United States Patent Application Publication US 2018/0305689 A1 - sequence listing, part 158

SEQ ID NO: 2281099 - RNA, 19 nt, Artificial Sequence
  Description of Artificial Sequence: Synthetic oligonucleotide
  Antisense strand to SEQ ID NO: 2281098
aucacuagagacuacaggu

SEQ ID NO: 2281100 - RNA, 19 nt, Artificial Sequence
  Description of Artificial Sequence: Synthetic oligonucleotide
  Sense strand starting at position 181 of SEQ ID NO: 1884646
uagugauugggagguagaa

SEQ ID NO: 2281101 - RNA, 19 nt, Artificial Sequence
  Description of Artificial Sequence: Synthetic oligonucleotide
  Antisense strand to SEQ ID NO: 2281100
uucuaccucccaaucacua

SEQ ID NO: 2281102 - RNA, 19 nt, Artificial Sequence
  Description of Artificial Sequence: Synthetic oligonucleotide
  Sense strand starting at position 232 of SEQ ID NO: 1884646
gugaucaccugucaauuuc

SEQ ID NO: 2281103 - RNA, 19 nt, Artificial Sequence
  Description of Artificial Sequence: Synthetic oligonucleotide
  Antisense strand to SEQ ID NO: 2281102
gaaauugacaggugaucac

SEQ ID NO: 2281104 - RNA, 19 nt, Artificial Sequence
  Description of Artificial Sequence: Synthetic oligonucleotide
  Sense strand starting at position 242 of SEQ ID NO: 1884646
gucaauuucucagucccuu

SEQ ID NO: 2281105 - RNA, 19 nt, Artificial Sequence
  Description of Artificial Sequence: Synthetic oligonucleotide
  Antisense strand to SEQ ID NO: 2281104
aagggacugagaaauugac

SEQ ID NO: 2281106 - RNA, 19 nt, Artificial Sequence
  Description of Artificial Sequence: Synthetic oligonucleotide
  Sense strand starting at position 448 of SEQ ID NO: 1884646
cagagaucucacugguucu

SEQ ID NO: 2281107 - RNA, 19 nt, Artificial Sequence
  Description of Artificial Sequence: Synthetic oligonucleotide
  Antisense strand to SEQ ID NO: 2281106
agaaccagugagaucucug

SEQ ID NO: 2281108 - RNA, 19 nt, Artificial Sequence
  Description of Artificial Sequence: Synthetic oligonucleotide
  Sense strand starting at position 459 of SEQ ID NO: 1884646
cugguucuaucucugacaa

SEQ ID NO: 2281109 - RNA, 19 nt, Artificial Sequence
  Description of Artificial Sequence: Synthetic oligonucleotide
  Antisense strand to SEQ ID NO: 2281108
uugucagagauagaaccag

SEQ ID NO: 2281110 - RNA, 19 nt, Artificial Sequence
  Description of Artificial Sequence: Synthetic oligonucleotide
  Sense strand starting at position 460 of SEQ ID NO: 1884646
ugguucuaucucugacaac

SEQ ID NO: 2281111 - RNA, 19 nt, Artificial Sequence
  Description of Artificial Sequence: Synthetic oligonucleotide
  Antisense strand to SEQ ID NO: 2281110
guugucagagauagaacca

SEQ ID NO: 2281112 - RNA, 19 nt, Artificial Sequence
  Description of Artificial Sequence: Synthetic oligonucleotide
  Sense strand starting at position 490 of SEQ ID NO: 1884646
cuccuauuccugugauguc

SEQ ID NO: 2281113 - RNA, 19 nt, Artificial Sequence
  Description of Artificial Sequence: Synthetic oligonucleotide
  Antisense strand to SEQ ID NO: 2281112
gacaucacaggaauaggag

SEQ ID NO: 2281114 - RNA, 19 nt, Artificial Sequence
  Description of Artificial Sequence: Synthetic oligonucleotide
  Sense strand starting at position 499 of SEQ ID NO: 1884646
cugugaugucuuugcccau

SEQ ID NO: 2281115 - RNA, 19 nt, Artificial Sequence
  Description of Artificial Sequence: Synthetic oligonucleotide
  Antisense strand to SEQ ID NO: 2281114
augggcaaagacaucacag

SEQ ID NO: 2281116 - RNA, 19 nt, Artificial Sequence
  Description of Artificial Sequence: Synthetic oligonucleotide
  Sense strand starting at position 500 of SEQ ID NO: 1884646
ugugaugucuuugcccaua

SEQ ID NO: 2281117 - RNA, 19 nt, Artificial Sequence
  Description of Artificial Sequence: Synthetic oligonucleotide
  Antisense strand to SEQ ID NO: 2281116
uaugggcaaagacaucaca

SEQ ID NO: 2281118 - RNA, 19 nt, Artificial Sequence
  Description of Artificial Sequence: Synthetic oligonucleotide
  Sense strand starting at position 502 of SEQ ID NO: 1884646
ugaugucuuugcccauaug

SEQ ID NO: 2281119 - RNA, 19 nt, Artificial Sequence
  Description of Artificial Sequence: Synthetic oligonucleotide
  Antisense strand to SEQ ID NO: 2281118
cauaugggcaaagacauca

SEQ ID NO: 2281120 - RNA, 19 nt, Artificial Sequence
  Description of Artificial Sequence: Synthetic oligonucleotide
  Sense strand starting at position 522 of SEQ ID NO: 1884646
uggcaugugcaagaucaca

SEQ ID NO: 2281121 - RNA, 19 nt, Artificial Sequence
  Description of Artificial Sequence: Synthetic oligonucleotide
  Antisense strand to SEQ ID NO: 2281120
ugugaucuugcacaugcca

SEQ ID NO: 2281122 - RNA, 19 nt, Artificial Sequence
  Description of Artificial Sequence: Synthetic oligonucleotide
  Sense strand starting at position 699 of SEQ ID NO: 1884646
gccuauuagauagguaaag

SEQ ID NO: 2281123 - RNA, 19 nt, Artificial Sequence
  Description of Artificial Sequence: Synthetic oligonucleotide
  Antisense strand to SEQ ID NO: 2281122
cuuuaccuaucuaauaggc

SEQ ID NO: 2281124 - RNA, 19 nt, Artificial Sequence
  Description of Artificial Sequence: Synthetic oligonucleotide
  Sense strand starting at position 877 of SEQ ID NO: 1884646
ugcaaugacuagucuucuu

SEQ ID NO: 2281125 - RNA, 19 nt, Artificial Sequence
  Description of Artificial Sequence: Synthetic oligonucleotide
  Antisense strand to SEQ ID NO: 2281124
aagaagacuagucauugca

SEQ ID NO: 2281126 - RNA, 19 nt, Artificial Sequence
  Description of Artificial Sequence: Synthetic oligonucleotide
  Sense strand starting at position 999 of SEQ ID NO: 1884646
ugaauaaaugcaugaauuc

SEQ ID NO: 2281127 - RNA, 19 nt, Artificial Sequence
  Description of Artificial Sequence: Synthetic oligonucleotide
  Antisense strand to SEQ ID NO: 2281126
gaauucaugcauuuauuca

SEQ ID NO: 2281128 - RNA, 19 nt, Artificial Sequence
  Description of Artificial Sequence: Synthetic oligonucleotide
  Sense strand starting at position 1011 of SEQ ID NO: 1884646
ugaauuccggcauacaauc

SEQ ID NO: 2281129 - RNA, 19 nt, Artificial Sequence
  Description of Artificial Sequence: Synthetic oligonucleotide
  Antisense strand to SEQ ID NO: 2281128
gauuguaugccggaauuca

SEQ ID NO: 2281130 - RNA, 19 nt, Artificial Sequence
  Description of Artificial Sequence: Synthetic oligonucleotide
  Sense strand starting at position 1069 of SEQ ID NO: 1884646
cuuuacugagcaugcauua

SEQ ID NO: 2281131 - RNA, 19 nt, Artificial Sequence
  Description of Artificial Sequence: Synthetic oligonucleotide
  Antisense strand to SEQ ID NO: 2281130
uaaugcaugcucaguaaag

SEQ ID NO: 2281132 - RNA, 19 nt, Artificial Sequence
  Description of Artificial Sequence: Synthetic oligonucleotide
  Sense strand starting at position 1088 of SEQ ID NO: 1884646
gauacaaagucuuagaaug

SEQ ID NO: 2281133 - RNA, 19 nt, Artificial Sequence
  Description of Artificial Sequence: Synthetic oligonucleotide
  Antisense strand to SEQ ID NO: 2281132
cauucuaagacuuuguauc

SEQ ID NO: 2281134 - RNA, 19 nt, Artificial Sequence
  Description of Artificial Sequence: Synthetic oligonucleotide
  Sense strand starting at position 1090 of SEQ ID NO: 1884646
uacaaagucuuagaaugga

SEQ ID NO: 2281135 - RNA, 19 nt, Artificial Sequence
  Description of Artificial Sequence: Synthetic oligonucleotide
  Antisense strand to SEQ ID NO: 2281134
uccauucuaagacuuugua

SEQ ID NO: 2281136 - RNA, 19 nt, Artificial Sequence
  Description of Artificial Sequence: Synthetic oligonucleotide
  Sense strand starting at position 1217 of SEQ ID NO: 1884646
aguccucucccacaguaga

SEQ ID NO: 2281137 - RNA, 19 nt, Artificial Sequence
  Description of Artificial Sequence: Synthetic oligonucleotide
  Antisense strand to SEQ ID NO: 2281136
ucuacugugggagaggacu

SEQ ID NO: 2281138 - RNA, 19 nt, Artificial Sequence
  Description of Artificial Sequence: Synthetic oligonucleotide
  Sense strand starting at position 2056 of SEQ ID NO: 1884646
gaggcugacccggaaguuu

SEQ ID NO: 2281139 - RNA, 19 nt, Artificial Sequence
  Description of Artificial Sequence: Synthetic oligonucleotide
  Antisense strand to SEQ ID NO: 2281138
aaacuuccgggucagccuc

SEQ ID NO: 2281140 - RNA, 19 nt, Artificial Sequence
  Description of Artificial Sequence: Synthetic oligonucleotide
  Sense strand starting at position 2089 of SEQ ID NO: 1884646
ccacgaaagaguuguagug

SEQ ID NO: 2281141 - RNA, 19 nt, Artificial Sequence
  Description of Artificial Sequence: Synthetic oligonucleotide
  Antisense strand to SEQ ID NO: 2281140
cacuacaacucuuucgugg

SEQ ID NO: 2281142 - RNA, 19 nt, Artificial Sequence
  Description of Artificial Sequence: Synthetic oligonucleotide
  Sense strand starting at position 2095 of SEQ ID NO: 1884646
aagaguuguagugagugaa

SEQ ID NO: 2281143 - RNA, 19 nt, Artificial Sequence
  Description of Artificial Sequence: Synthetic oligonucleotide
  Antisense strand to SEQ ID NO: 2281142
uucacucacuacaacucuu

SEQ ID NO: 2281144 - RNA, 19 nt, Artificial Sequence
  Description of Artificial Sequence: Synthetic oligonucleotide
  Sense strand starting at position 2163 of SEQ ID NO: 1884646
ccaucuugccucgguagga

SEQ ID NO: 2281145 - RNA, 19 nt, Artificial Sequence
  Description of Artificial Sequence: Synthetic oligonucleotide
  Antisense strand to SEQ ID NO: 2281144
uccuaccgaggcaagaugg

SEQ ID NO: 2281146 - RNA, 19 nt, Artificial Sequence
  Description of Artificial Sequence: Synthetic oligonucleotide
  Sense strand starting at position 2282 of SEQ ID NO: 1884646
ggccgaauuggcgggagaa

SEQ ID NO: 2281147 - RNA, 19 nt, Artificial Sequence
  Description of Artificial Sequence: Synthetic oligonucleotide
  Antisense strand to SEQ ID NO: 2281146
uucucccgccaauucggcc

SEQ ID NO: 2281148 - RNA, 19 nt, Artificial Sequence
  Description of Artificial Sequence: Synthetic oligonucleotide
  Sense strand starting at position 2283 of SEQ ID NO: 1884646
gccgaauuggcgggagaau

SEQ ID NO: 2281149 - RNA, 19 nt, Artificial Sequence
  Description of Artificial Sequence: Synthetic oligonucleotide
  Antisense strand to SEQ ID NO: 2281148
auucucccgccaauucggc

SEQ ID NO: 2281150 - RNA, 19 nt, Artificial Sequence
  Description of Artificial Sequence: Synthetic oligonucleotide
  Sense strand starting at position 2284 of SEQ ID NO: 1884646
ccgaauuggcgggagaaua

SEQ ID NO: 2281151 - RNA, 19 nt, Artificial Sequence
  Description of Artificial Sequence: Synthetic oligonucleotide
  Antisense strand to SEQ ID NO: 2281150
uauucucccgccaauucgg

SEQ ID NO: 2281152 - RNA, 19 nt, Artificial Sequence
  Description of Artificial Sequence: Synthetic oligonucleotide
  Sense strand starting at position 2295 of SEQ ID NO: 1884646
ggagaauagguuugguggu

SEQ ID NO: 2281153 - RNA, 19 nt, Artificial Sequence
  Description of Artificial Sequence: Synthetic oligonucleotide
  Antisense strand to SEQ ID NO: 2281152
accaccaaaccuauucucc

SEQ ID NO: 2281154 - RNA, 19 nt, Artificial Sequence
  Description of Artificial Sequence: Synthetic oligonucleotide
  Sense strand starting at position 2301 of SEQ ID NO: 1884646
uagguuuggugguccgaga

SEQ ID NO: 2281155 - RNA, 19 nt, Artificial Sequence
  Description of Artificial Sequence: Synthetic oligonucleotide
  Antisense strand to SEQ ID NO: 2281154
ucucggaccaccaaaccua

SEQ ID NO: 2281156 - RNA, 19 nt, Artificial Sequence
  Description of Artificial Sequence: Synthetic oligonucleotide
  Sense strand starting at position 2365 of SEQ ID NO: 1884646
ggcguugggauuuguugau

SEQ ID NO: 2281157 - RNA, 19 nt, Artificial Sequence
  Description of Artificial Sequence: Synthetic oligonucleotide
  Antisense strand to SEQ ID NO: 2281156
aucaacaaaucccaacgcc

SEQ ID NO: 2281158 - RNA, 19 nt, Artificial Sequence
  Description of Artificial Sequence: Synthetic oligonucleotide
  Sense strand starting at position 2472 of SEQ ID NO: 1884646
gcggcuugagcucccgaaa

SEQ ID NO: 2281159 - RNA, 19 nt, Artificial Sequence
  Description of Artificial Sequence: Synthetic oligonucleotide
  Antisense strand to SEQ ID NO: 2281158
uuucgggagcucaagccgc

SEQ ID NO: 2281160 - RNA, 19 nt, Artificial Sequence
  Description of Artificial Sequence: Synthetic oligonucleotide
  Sense strand starting at position 2528 of SEQ ID NO: 1884646
ccacauuccgcgucuuacu

SEQ ID NO: 2281161 - RNA, 19 nt, Artificial Sequence
  Description of Artificial Sequence: Synthetic oligonucleotide
  Antisense strand to SEQ ID NO: 2281160
aguaagacgcggaaugugg

SEQ ID NO: 2281162 - RNA, 19 nt, Artificial Sequence
  Description of Artificial Sequence: Synthetic oligonucleotide
  Sense strand starting at position 2915 of SEQ ID NO: 1884646
cggagaauauuguaaauac

SEQ ID NO: 2281163 - RNA, 19 nt, Artificial Sequence
  Description of Artificial Sequence: Synthetic oligonucleotide
  Antisense strand to SEQ ID NO: 2281162
guauuuacaauauucuccg

SEQ ID NO: 2281164 - RNA, 19 nt, Artificial Sequence
  Description of Artificial Sequence: Synthetic oligonucleotide
  Sense strand starting at position 2956 of SEQ ID NO: 1884646
gacuacuggcauuaugauu

SEQ ID NO: 2281165 - RNA, 19 nt, Artificial Sequence
  Description of Artificial Sequence: Synthetic oligonucleotide
  Antisense strand to SEQ ID NO: 2281164
aaucauaaugccaguaguc

SEQ ID NO: 2281166 - RNA, 19 nt, Artificial Sequence
  Description of Artificial Sequence: Synthetic oligonucleotide
  Sense strand starting at position 3068 of SEQ ID NO: 1884646
agaagcaacuauuaugaau

SEQ ID NO: 2281167 - RNA, 19 nt, Artificial Sequence
  Description of Artificial Sequence: Synthetic oligonucleotide
  Antisense strand to SEQ ID NO: 2281166
auucauaauaguugcuucu

SEQ ID NO: 2281168 - RNA, 19 nt, Artificial Sequence
  Description of Artificial Sequence: Synthetic oligonucleotide
  Sense strand starting at position 3086 of SEQ ID NO: 1884646
uuagaauuagcuuguguuc

SEQ ID NO: 2281169 - RNA, 19 nt, Artificial Sequence
  Description of Artificial Sequence: Synthetic oligonucleotide
  Antisense strand to SEQ ID NO: 2281168
gaacacaagcuaauucuaa

SEQ ID NO: 2281170 - RNA, 19 nt, Artificial Sequence
  Description of Artificial Sequence: Synthetic oligonucleotide
  Sense strand starting at position 3127 of SEQ ID NO: 1884646
auauguagccaugacuaua

SEQ ID NO: 2281171 - RNA, 19 nt, Artificial Sequence
  Description of Artificial Sequence: Synthetic oligonucleotide
  Antisense strand to SEQ ID NO: 2281170
uauagucauggcuacauau

SEQ ID NO: 2281172 - RNA, 19 nt, Artificial Sequence
  Description of Artificial Sequence: Synthetic oligonucleotide
  Sense strand starting at position 3519 of SEQ ID NO: 1884646
cgugauaacugcucacugu

SEQ ID NO: 2281173 - RNA, 19 nt, Artificial Sequence
  Description of Artificial Sequence: Synthetic oligonucleotide
  Antisense strand to SEQ ID NO: 2281172
acagugagcaguuaucacg

SEQ ID NO: 2281174 - RNA, 19 nt, Artificial Sequence
  Description of Artificial Sequence: Synthetic oligonucleotide
  Sense strand starting at position 3522 of SEQ ID NO: 1884646
gauaacugcucacuguagu

SEQ ID NO: 2281175 - RNA, 19 nt, Artificial Sequence
  Description of Artificial Sequence: Synthetic oligonucleotide
  Antisense strand to SEQ ID NO: 2281174
acuacagugagcaguuauc

SEQ ID NO: 2281176 - RNA, 19 nt, Artificial Sequence
  Description of Artificial Sequence: Synthetic oligonucleotide
  Sense strand starting at position 89 of SEQ ID NO: 1884647
uguaauauguguucuggac

SEQ ID NO: 2281177 - RNA, 19 nt, Artificial Sequence
  Description of Artificial Sequence: Synthetic oligonucleotide
  Antisense strand to SEQ ID NO: 2281176
guccagaacacauauuaca

SEQ ID NO: 2281178 - RNA, 19 nt, Artificial Sequence
  Description of Artificial Sequence: Synthetic oligonucleotide
  Sense strand starting at position 93 of SEQ ID NO: 1884647
auauguguucuggacuguu

SEQ ID NO: 2281179 - RNA, 19 nt, Artificial Sequence
  Description of Artificial Sequence: Synthetic oligonucleotide
  Antisense strand to SEQ ID NO: 2281178
aacaguccagaacacauau

SEQ ID NO: 2281180 - RNA, 19 nt, Artificial Sequence
  Description of Artificial Sequence: Synthetic oligonucleotide
  Sense strand starting at position 190 of SEQ ID NO: 1884647
ggcuucguucuggaauaua

SEQ ID NO: 2281181 - RNA, 19 nt, Artificial Sequence
  Description of Artificial Sequence: Synthetic oligonucleotide
  Antisense strand to SEQ ID NO: 2281180
uauauuccagaacgaagcc

SEQ ID NO: 2281182 - RNA, 19 nt, Artificial Sequence
  Description of Artificial Sequence: Synthetic oligonucleotide
  Sense strand starting at position 193 of SEQ ID NO: 1884647
uucguucuggaauauaagu

SEQ ID NO: 2281183 - RNA, 19 nt, Artificial Sequence
  Description of Artificial Sequence: Synthetic oligonucleotide
  Antisense strand to SEQ ID NO: 2281182
acuuauauuccagaacgaa

SEQ ID NO: 2281184 - RNA, 19 nt, Artificial Sequence
  Description of Artificial Sequence: Synthetic oligonucleotide
  Sense strand starting at position 751 of SEQ ID NO: 1884647
ugugcuaugcuacaugaga

SEQ ID NO: 2281185 - RNA, 19 nt, Artificial Sequence
  Description of Artificial Sequence: Synthetic oligonucleotide
  Antisense strand to SEQ ID NO: 2281184
ucucauguagcauagcaca

SEQ ID NO: 2281186 - RNA, 19 nt, Artificial Sequence
  Description of Artificial Sequence: Synthetic oligonucleotide
  Sense strand starting at position 774 of SEQ ID NO: 1884647
cagagaaagucaucgcuca

SEQ ID NO: 2281187 - RNA, 19 nt, Artificial Sequence
  Description of Artificial Sequence: Synthetic oligonucleotide
  Antisense strand to SEQ ID NO: 2281186
ugagcgaugacuuucucug

SEQ ID NO: 2281188 - RNA, 19 nt, Artificial Sequence
  Description of Artificial Sequence: Synthetic oligonucleotide
  Sense strand starting at position 779 of SEQ ID NO: 1884647
aaagucaucgcucaguaga

SEQ ID NO: 2281189 - RNA, 19 nt, Artificial Sequence
  Description of Artificial Sequence: Synthetic oligonucleotide
  Antisense strand to SEQ ID NO: 2281188
ucuacugagcgaugacuuu

SEQ ID NO: 2281190 - RNA, 19 nt, Artificial Sequence
  Description of Artificial Sequence: Synthetic oligonucleotide
  Sense strand starting at position 782 of SEQ ID NO: 1884647
gucaucgcucaguagaaau

SEQ ID NO: 2281191 - RNA, 19 nt, Artificial Sequence
  Description of Artificial Sequence: Synthetic oligonucleotide
  Antisense strand to SEQ ID NO: 2281190
auuucuacugagcgaugac

SEQ ID NO: 2281192 - RNA, 19 nt, Artificial Sequence
  Description of Artificial Sequence: Synthetic oligonucleotide
  Sense strand starting at position 804 of SEQ ID NO: 1884647
guaauagcgcaugcguaaa

SEQ ID NO: 2281193 - RNA, 19 nt, Artificial Sequence
  Description of Artificial Sequence: Synthetic oligonucleotide
  Antisense strand to SEQ ID NO: 2281192
uuuacgcaugcgcuauuac

SEQ ID NO: 2281194 - RNA, 19 nt, Artificial Sequence
  Description of Artificial Sequence: Synthetic oligonucleotide
  Sense strand starting at position 828 of SEQ ID NO: 1884647
gagggaagucgcuacuuua

SEQ ID NO: 2281195 - RNA, 19 nt, Artificial Sequence
  Description of Artificial Sequence: Synthetic oligonucleotide
  Antisense strand to SEQ ID NO: 2281194
uaaaguagcgacuucccuc

SEQ ID NO: 2281196 - RNA, 19 nt, Artificial Sequence
  Description of Artificial Sequence: Synthetic oligonucleotide
  Sense strand starting at position 836 of SEQ ID NO: 1884647
ucgcuacuuuaccuagaga

SEQ ID NO: 2281197 - RNA, 19 nt, Artificial Sequence
  Description of Artificial Sequence: Synthetic oligonucleotide
  Antisense strand to SEQ ID NO: 2281196
ucucuagguaaaguagcga

SEQ ID NO: 2281198 - RNA, 19 nt, Artificial Sequence
  Description of Artificial Sequence: Synthetic oligonucleotide
  Sense strand starting at position 847 of SEQ ID NO: 1884647
ccuagagauuaacacagaa

SEQ ID NO: 2281199 - RNA, 19 nt, Artificial Sequence
  Description of Artificial Sequence: Synthetic oligonucleotide
  Antisense strand to SEQ ID NO: 2281198
uucuguguuaaucucuagg

SEQ ID NO: 2281200 - RNA, 19 nt, Artificial Sequence
  Description of Artificial Sequence: Synthetic oligonucleotide
  Sense strand starting at position 898 of SEQ ID NO: 1884647
uuuaucuaacgcgaagauu

SEQ ID NO: 2281201 - RNA, 19 nt, Artificial Sequence
  Description of Artificial Sequence: Synthetic oligonucleotide
  Antisense strand to SEQ ID NO: 2281200
aaucuucgcguuagauaaa

SEQ ID NO: 2281202 - RNA, 19 nt, Artificial Sequence
  Description of Artificial Sequence: Synthetic oligonucleotide
  Sense strand starting at position 1030 of SEQ ID NO: 1884647
guuagucaggcuggaauua

SEQ ID NO: 2281203 - RNA, 19 nt, Artificial Sequence
  Description of Artificial Sequence: Synthetic oligonucleotide
  Antisense strand to SEQ ID NO: 2281202
uaauuccagccugacuaac

SEQ ID NO: 2281204 - RNA, 19 nt, Artificial Sequence
  Description of Artificial Sequence: Synthetic oligonucleotide
  Sense strand starting at position 1108 of SEQ ID NO: 1884647
gcgaccuagguuuaacaca

SEQ ID NO: 2281205 - RNA, 19 nt, Artificial Sequence
  Description of Artificial Sequence: Synthetic oligonucleotide
  Antisense strand to SEQ ID NO: 2281204
uguguuaaaccuaggucgc

SEQ ID NO: 2281206 - RNA, 19 nt, Artificial Sequence
  Description of Artificial Sequence: Synthetic oligonucleotide
  Sense strand starting at position 1635 of SEQ ID NO: 1884647
gaggcugaaguaugaagau

SEQ ID NO: 2281207 - RNA, 19 nt, Artificial Sequence
  Description of Artificial Sequence: Synthetic oligonucleotide
  Antisense strand to SEQ ID NO: 2281206
aucuucauacuucagccuc

SEQ ID NO: 2281208 - RNA, 19 nt, Artificial Sequence
  Description of Artificial Sequence: Synthetic oligonucleotide
  Sense strand starting at position 1642 of SEQ ID NO: 1884647
aaguaugaagauugcugaa

SEQ ID NO: 2281209 - RNA, 19 nt, Artificial Sequence
  Description of Artificial Sequence: Synthetic oligonucleotide
  Antisense strand to SEQ ID NO: 2281208
uucagcaaucuucauacuu

SEQ ID NO: 2281210 - RNA, 19 nt, Artificial Sequence
  Description of Artificial Sequence: Synthetic oligonucleotide
  Sense strand starting at position 1644 of SEQ ID NO: 1884647
guaugaagauugcugaaga

SEQ ID NO: 2281211 - RNA, 19 nt, Artificial Sequence
  Description of Artificial Sequence: Synthetic oligonucleotide
  Antisense strand to SEQ ID NO: 2281210
ucuucagcaaucuucauac

SEQ ID NO: 2281212 - RNA, 19 nt, Artificial Sequence
  Description of Artificial Sequence: Synthetic oligonucleotide
  Sense strand starting at position 1806 of SEQ ID NO: 1884647
acccuaacugaucgaaauc

SEQ ID NO: 2281213 - RNA, 19 nt, Artificial Sequence
  Description of Artificial Sequence: Synthetic oligonucleotide
  Antisense strand to SEQ ID NO: 2281212
gauuucgaucaguuagggu

SEQ ID NO: 2281214 - RNA, 19 nt, Artificial Sequence
  Description of Artificial Sequence: Synthetic oligonucleotide
  Sense strand starting at position 2104 of SEQ ID NO: 1884647
gguaacuauccaggcacua

SEQ ID NO: 2281215 - RNA, 19 nt, Artificial Sequence
  Description of Artificial Sequence: Synthetic oligonucleotide
  Antisense strand to SEQ ID NO: 2281214
uagugccuggauaguuacc

SEQ ID NO: 2281216 - RNA, 19 nt, Artificial Sequence
  Description of Artificial Sequence: Synthetic oligonucleotide
  Sense strand starting at position 2528 of SEQ ID NO: 1884647
uccaguuccugacuuaaug

SEQ ID NO: 2281217 - RNA, 19 nt, Artificial Sequence
  Description of Artificial Sequence: Synthetic oligonucleotide
  Antisense strand to SEQ ID NO: 2281216
cauuaagucaggaacugga

SEQ ID NO: 2281218 - RNA, 19 nt, Artificial Sequence
  Description of Artificial Sequence: Synthetic oligonucleotide
  Sense strand starting at position 2815 of SEQ ID NO: 1884647
ccacgcacucuuuagaguu

SEQ ID NO: 2281219 - RNA, 19 nt, Artificial Sequence
  Description of Artificial Sequence: Synthetic oligonucleotide
  Antisense strand to SEQ ID NO: 2281218
aacucuaaagagugcgugg

SEQ ID NO: 2281220 - RNA, 19 nt, Artificial Sequence
  Description of Artificial Sequence: Synthetic oligonucleotide
  Sense strand starting at position 2952 of SEQ ID NO: 1884647
ggaggagaguguagguaaa

SEQ ID NO: 2281221 - RNA, 19 nt, Artificial Sequence
  Description of Artificial Sequence: Synthetic oligonucleotide
  Antisense strand to SEQ ID NO: 2281220
uuuaccuacacucuccucc

SEQ ID NO: 2281222 - RNA, 19 nt, Artificial Sequence
  Description of Artificial Sequence: Synthetic oligonucleotide
  Sense strand starting at position 3006 of SEQ ID NO: 1884647
gcaagcucgccagaaugaa

SEQ ID NO: 2281223 - RNA, 19 nt, Artificial Sequence
  Description of Artificial Sequence: Synthetic oligonucleotide
  Antisense strand to SEQ ID NO: 2281222
uucauucuggcgagcuugc

SEQ ID NO: 2281224 - RNA, 19 nt, Artificial Sequence
  Description of Artificial Sequence: Synthetic oligonucleotide
  Sense strand starting at position 3062 of SEQ ID NO: 1884647
aggucuugcuuucuuggaa

SEQ ID NO: 2281225 - RNA, 19 nt, Artificial Sequence
  Description of Artificial Sequence: Synthetic oligonucleotide
  Antisense strand to SEQ ID NO: 2281224
uuccaagaaagcaagaccu

SEQ ID NO: 2281226 - RNA, 19 nt, Artificial Sequence
  Description of Artificial Sequence: Synthetic oligonucleotide
  Sense strand starting at position 3119 of SEQ ID NO: 1884647
cccuuaaccuggguuggaa

SEQ ID NO: 2281227 - RNA, 19 nt, Artificial Sequence
  Description of Artificial Sequence: Synthetic oligonucleotide
  Antisense strand to SEQ ID NO: 2281226
uuccaacccagguuaaggg

SEQ ID NO: 2281228 - RNA, 19 nt, Artificial Sequence
  Description of Artificial Sequence: Synthetic oligonucleotide
  Sense strand starting at position 3122 of SEQ ID NO: 1884647
uuaaccuggguuggaaaua

SEQ ID NO: 2281229 - RNA, 19 nt, Artificial Sequence
  Description of Artificial Sequence: Synthetic oligonucleotide
  Antisense strand to SEQ ID NO: 2281228
uauuuccaacccagguuaa

SEQ ID NO: 2281230 - RNA, 19 nt, Artificial Sequence
  Description of Artificial Sequence: Synthetic oligonucleotide
  Sense strand starting at position 3163 of SEQ ID NO: 1884647
gcgucuugcauggcugaga

SEQ ID NO: 2281231 - RNA, 19 nt, Artificial Sequence
  Description of Artificial Sequence: Synthetic oligonucleotide
  Antisense strand to SEQ ID NO: 2281230
ucucagccaugcaagacgc

SEQ ID NO: 2281232 - RNA, 19 nt, Artificial Sequence
  Description of Artificial Sequence: Synthetic oligonucleotide
  Sense strand starting at position 3238 of SEQ ID NO: 1884647
agcuucugauaaucuauga

SEQ ID NO: 2281233 - RNA, 19 nt, Artificial Sequence
  Description of Artificial Sequence: Synthetic oligonucleotide
  Antisense strand to SEQ ID NO: 2281232
ucauagauuaucagaagcu

SEQ ID NO: 2281234 - RNA, 19 nt, Artificial Sequence
  Description of Artificial Sequence: Synthetic oligonucleotide
  Sense strand starting at position 3332 of SEQ ID NO: 1884647
gugccacaucaagagagua

SEQ ID NO: 2281235 - RNA, 19 nt, Artificial Sequence
  Description of Artificial Sequence: Synthetic oligonucleotide
  Antisense strand to SEQ ID NO: 2281234
uacucucuugauguggcac

SEQ ID NO: 2281236 - RNA, 19 nt, Artificial Sequence
  Description of Artificial Sequence: Synthetic oligonucleotide
  Sense strand starting at position 3334 of SEQ ID NO: 1884647
gccacaucaagagaguagu

SEQ ID NO: 2281237 - RNA, 19 nt, Artificial Sequence
  Description of Artificial Sequence: Synthetic oligonucleotide
  Antisense strand to SEQ ID NO: 2281236
acuacucucuugauguggc

SEQ ID NO: 2281238 - RNA, 19 nt, Artificial Sequence
  Description of Artificial Sequence: Synthetic oligonucleotide
  Sense strand starting at position 3698 of SEQ ID NO: 1884647
agagauggucagugagaac

SEQ ID NO: 2281239 - RNA, 19 nt, Artificial Sequence
  Description of Artificial Sequence: Synthetic oligonucleotide
  Antisense strand to SEQ ID NO: 2281238
guucucacugaccaucucu

SEQ ID NO: 2281240 - RNA, 19 nt, Artificial Sequence
  Description of Artificial Sequence: Synthetic oligonucleotide
  Sense strand starting at position 3712 of SEQ ID NO: 1884647
agaaccucugaauguguua

SEQ ID NO: 2281241 - RNA, 19 nt, Artificial Sequence
  Description of Artificial Sequence: Synthetic oligonucleotide
  Antisense strand to SEQ ID NO: 2281240
uaacacauucagagguucu

SEQ ID NO: 2281242 - RNA, 19 nt, Artificial Sequence
  Description of Artificial Sequence: Synthetic oligonucleotide
  Sense strand starting at position 3787 of SEQ ID NO: 1884647
cgagauuuauccuggauuu

SEQ ID NO: 2281243 - RNA, 19 nt, Artificial Sequence
  Description of Artificial Sequence: Synthetic oligonucleotide
  Antisense strand to SEQ ID NO: 2281242
aaauccaggauaaaucucg

SEQ ID NO: 2281244 - RNA, 19 nt, Artificial Sequence
  Description of Artificial Sequence: Synthetic oligonucleotide
  Sense strand starting at position 3811 of SEQ ID NO: 1884647
guggguucagaguaaucac

SEQ ID NO: 2281245 - RNA, 19 nt, Artificial Sequence
  Description of Artificial Sequence: Synthetic oligonucleotide
  Antisense strand to SEQ ID NO: 2281244
gugauuacucugaacccac

SEQ ID NO: 2281246 - RNA, 19 nt, Artificial Sequence
  Description of Artificial Sequence: Synthetic oligonucleotide
  Sense strand starting at position 3861 of SEQ ID NO: 1884647
gagagucugagugaugcaa

SEQ ID NO: 2281247 - RNA, 19 nt, Artificial Sequence
  Description of Artificial Sequence: Synthetic oligonucleotide
  Antisense strand to SEQ ID NO: 2281246
uugcaucacucagacucuc

SEQ ID NO: 2281248 - RNA, 19 nt, Artificial Sequence
  Description of Artificial Sequence: Synthetic oligonucleotide
  Sense strand starting at position 3870 of SEQ ID NO: 1884647
agugaugcaaccugaggaa

SEQ ID NO: 2281249 - RNA, 19 nt, Artificial Sequence
  Description of Artificial Sequence: Synthetic oligonucleotide
  Antisense strand to SEQ ID NO: 2281248
uuccucagguugcaucacu

SEQ ID NO: 2281250 - RNA, 19 nt, Artificial Sequence
  Description of Artificial Sequence: Synthetic oligonucleotide
  Sense strand starting at position 3905 of SEQ ID NO: 1884647
gcuugcucugcagauggaa

SEQ ID NO: 2281251 - RNA, 19 nt, Artificial Sequence
  Description of Artificial Sequence: Synthetic oligonucleotide
  Antisense strand to SEQ ID NO: 2281250
uuccaucugcagagcaagc

SEQ ID NO: 2281252 - RNA, 19 nt, Artificial Sequence
  Description of Artificial Sequence: Synthetic oligonucleotide
  Sense strand starting at position 3920 of SEQ ID NO: 1884647
ggaagagagucaucagcca

SEQ ID NO: 2281253 - RNA, 19 nt, Artificial Sequence
  Description of Artificial Sequence: Synthetic oligonucleotide
  Antisense strand to SEQ ID NO: 2281252
uggcugaugacucucuucc

SEQ ID NO: 2281254 - RNA, 19 nt, Artificial Sequence
  Description of Artificial Sequence: Synthetic oligonucleotide
  Sense strand starting at position 3927 of SEQ ID NO: 1884647
agucaucagccagggaguu

SEQ ID NO: 2281255 - RNA, 19 nt, Artificial Sequence
  Description of Artificial Sequence: Synthetic oligonucleotide
  Antisense strand to SEQ ID NO: 2281254
aacucccuggcugaugacu

SEQ ID NO: 2281256 - RNA, 19 nt, Artificial Sequence
  Description of Artificial Sequence: Synthetic oligonucleotide
  Sense strand starting at position 56 of SEQ ID NO: 1884648
uugagaugaucacuugguu

SEQ ID NO: 2281257 - RNA, 19 nt, Artificial Sequence
  Description of Artificial Sequence: Synthetic oligonucleotide
  Antisense strand to SEQ ID NO: 2281256
aaccaagugaucaucucaa

SEQ ID NO: 2281258 - RNA, 19 nt, Artificial Sequence
  Description of Artificial Sequence: Synthetic oligonucleotide
  Sense strand starting at position 155 of SEQ ID NO: 1884648
cuacuugauggugguuaau

SEQ ID NO: 2281259 - RNA, 19 nt, Artificial Sequence
  Description of Artificial Sequence: Synthetic oligonucleotide
  Antisense strand to SEQ ID NO: 2281258
auuaaccaccaucaaguag

SEQ ID NO: 2281260 - RNA, 19 nt, Artificial Sequence
  Description of Artificial Sequence: Synthetic oligonucleotide
  Sense strand starting at position 157 of SEQ ID NO: 1884648
acuugauggugguuaauua

SEQ ID NO: 2281261 - RNA, 19 nt, Artificial Sequence
  Description of Artificial Sequence: Synthetic oligonucleotide
  Antisense strand to SEQ ID NO: 2281260
uaauuaaccaccaucaagu

SEQ ID NO: 2281262 - RNA, 19 nt, Artificial Sequence
  Description of Artificial Sequence: Synthetic oligonucleotide
  Sense strand starting at position 158 of SEQ ID NO: 1884648
cuugauggugguuaauuaa

SEQ ID NO: 2281263 - RNA, 19 nt, Artificial Sequence
  Description of Artificial Sequence: Synthetic oligonucleotide
  Antisense strand to SEQ ID NO: 2281262
uuaauuaaccaccaucaag

SEQ ID NO: 2281264 - RNA, 19 nt, Artificial Sequence
  Description of Artificial Sequence: Synthetic oligonucleotide
  Sense strand starting at position 161 of SEQ ID NO: 1884648
gauggugguuaauuaacau

SEQ ID NO: 2281265 - RNA, 19 nt, Artificial Sequence
  Description of Artificial Sequence: Synthetic oligonucleotide
  Antisense strand to SEQ ID NO: 2281264
auguuaauuaaccaccauc

SEQ ID NO: 2281266 - RNA, 19 nt, Artificial Sequence
  Description of Artificial Sequence: Synthetic oligonucleotide
  Sense strand starting at position 337 of SEQ ID NO: 1884648
guaccuucuccuuguauuu

SEQ ID NO: 2281267 - RNA, 19 nt, Artificial Sequence
  Description of Artificial Sequence: Synthetic oligonucleotide
  Antisense strand to SEQ ID NO: 2281266
aaauacaaggagaagguac

SEQ ID NO: 2281268 - RNA, 19 nt, Artificial Sequence
  Description of Artificial Sequence: Synthetic oligonucleotide
  Sense strand starting at position 580 of SEQ ID NO: 1884648
guuugugugcacagugaug

SEQ ID NO: 2281269 - RNA, 19 nt, Artificial Sequence
  Description of Artificial Sequence: Synthetic oligonucleotide
  Antisense strand to SEQ ID NO: 2281268
caucacugugcacacaaac

SEQ ID NO: 2281270 - RNA, 19 nt, Artificial Sequence
  Description of Artificial Sequence: Synthetic oligonucleotide
  Sense strand starting at position 600 of SEQ ID NO: 1884648
ugacaauagucucugagga

SEQ ID NO: 2281271 - RNA, 19 nt, Artificial Sequence
  Description of Artificial Sequence: Synthetic oligonucleotide
  Antisense strand to SEQ ID NO: 2281270
uccucagagacuauuguca

SEQ ID NO: 2281272 - RNA, 19 nt, Artificial Sequence
  Description of Artificial Sequence: Synthetic oligonucleotide
  Sense strand starting at position 601 of SEQ ID NO: 1884648
gacaauagucucugaggau

SEQ ID NO: 2281273 - RNA, 19 nt, Artificial Sequence
  Description of Artificial Sequence: Synthetic oligonucleotide
  Antisense strand to SEQ ID NO: 2281272
auccucagagacuauuguc

SEQ ID NO: 2281274 - RNA, 19 nt, Artificial Sequence
  Description of Artificial Sequence: Synthetic oligonucleotide
  Sense strand starting at position 715 of SEQ ID NO: 1884648
gcagccuaucaauauuguu

SEQ ID NO: 2281275 - RNA, 19 nt, Artificial Sequence
  Description of Artificial Sequence: Synthetic oligonucleotide
  Antisense strand to SEQ ID NO: 2281274
aacaauauugauaggcugc

SEQ ID NO: 2281276 - RNA, 19 nt, Artificial Sequence
  Description of Artificial Sequence: Synthetic oligonucleotide
  Sense strand starting at position 904 of SEQ ID NO: 1884648
gguuguuaauuugagauga

SEQ ID NO: 2281277 - RNA, 19 nt, Artificial Sequence
  Description of Artificial Sequence: Synthetic oligonucleotide
  Antisense strand to SEQ ID NO: 2281276
ucaucucaaauuaacaacc

SEQ ID NO: 2281278 - RNA, 19 nt, Artificial Sequence
  Description of Artificial Sequence: Synthetic oligonucleotide
  Sense strand starting at position 2146 of SEQ ID NO: 1884648
ggguguguuggguaugaug

SEQ ID NO: 2281279 - RNA, 19 nt, Artificial Sequence
  Description of Artificial Sequence: Synthetic oligonucleotide
  Antisense strand to SEQ ID NO: 2281278
caucauacccaacacaccc

SEQ ID NO: 2281280 - RNA, 19 nt, Artificial Sequence
  Description of Artificial Sequence: Synthetic oligonucleotide
  Sense strand starting at position 2186 of SEQ ID NO: 1884648
ggacuugcuuuauuccuga

SEQ ID NO: 2281281 - RNA, 19 nt, Artificial Sequence
  Description of Artificial Sequence: Synthetic oligonucleotide
  Antisense strand to SEQ ID NO: 2281280
ucaggaauaaagcaagucc

SEQ ID NO: 2281282 - RNA, 19 nt, Artificial Sequence
  Description of Artificial Sequence: Synthetic oligonucleotide
  Sense strand starting at position 2272 of SEQ ID NO: 1884648
auggauuguucuguagaug

SEQ ID NO: 2281283 - RNA, 19 nt, Artificial Sequence
  Description of Artificial Sequence: Synthetic oligonucleotide
  Antisense strand to SEQ ID NO: 2281282
caucuacagaacaauccau

SEQ ID NO: 2281284 - RNA, 19 nt, Artificial Sequence
  Description of Artificial Sequence: Synthetic oligonucleotide
  Sense strand starting at position 2281 of SEQ ID NO: 1884648
ucuguagauguguaauuag

SEQ ID NO: 2281285 - RNA, 19 nt, Artificial Sequence
  Description of Artificial Sequence: Synthetic oligonucleotide
  Antisense strand to SEQ ID NO: 2281284
cuaauuacacaucuacaga

SEQ ID NO: 2281286 - RNA, 19 nt, Artificial Sequence
  Description of Artificial Sequence: Synthetic oligonucleotide
  Sense strand starting at position 2299 of SEQ ID NO: 1884648
gcuccaauuggucaagucu

SEQ ID NO: 2281287 - RNA, 19 nt, Artificial Sequence
  Description of Artificial Sequence: Synthetic oligonucleotide
  Antisense strand to SEQ ID NO: 2281286
agacuugaccaauuggagc

SEQ ID NO: 2281288 - RNA, 19 nt, Artificial Sequence
  Description of Artificial Sequence: Synthetic oligonucleotide
  Sense strand starting at position 2315 of SEQ ID NO: 1884648
ucuugaguuuaaguccaga

SEQ ID NO: 2281289 - RNA, 19 nt, Artificial Sequence
  Description of Artificial Sequence: Synthetic oligonucleotide
  Antisense strand to SEQ ID NO: 2281288
ucuggacuuaaacucaaga

SEQ ID NO: 2281290 - RNA, 19 nt, Artificial Sequence
  Description of Artificial Sequence: Synthetic oligonucleotide
  Sense strand starting at position 2357 of SEQ ID NO: 1884648
ugaugauacgucugacauu

SEQ ID NO: 2281291 - RNA, 19 nt, Artificial Sequence
  Description of Artificial Sequence: Synthetic oligonucleotide
  Antisense strand to SEQ ID NO: 2281290
aaugucagacguaucauca

SEQ ID NO: 2281292 - RNA, 19 nt, Artificial Sequence
  Description of Artificial Sequence: Synthetic oligonucleotide
  Sense strand starting at position 2666 of SEQ ID NO: 1884648
uuacuugugagauaggucu

SEQ ID NO: 2281293 - RNA, 19 nt, Artificial Sequence
  Description of Artificial Sequence: Synthetic oligonucleotide
  Antisense strand to SEQ ID NO: 2281292
agaccuaucucacaaguaa

SEQ ID NO: 2281294 - RNA, 19 nt, Artificial Sequence
  Description of Artificial Sequence: Synthetic oligonucleotide
  Sense strand starting at position 2955 of SEQ ID NO: 1884648
uuauuauagaauuguggga

SEQ ID NO: 2281295 - RNA, 19 nt, Artificial Sequence
  Description of Artificial Sequence: Synthetic oligonucleotide
  Antisense strand to SEQ ID NO: 2281294
ucccacaauucuauaauaa

SEQ ID NO: 2281296 - RNA, 19 nt, Artificial Sequence
  Description of Artificial Sequence: Synthetic oligonucleotide
  Sense strand starting at position 2983 of SEQ ID NO: 1884648
gggagcagaguuugaaaca

SEQ ID NO: 2281297 - RNA, 19 nt, Artificial Sequence
  Description of Artificial Sequence: Synthetic oligonucleotide
  Antisense strand to SEQ ID NO: 2281296
uguuucaaacucugcuccc

SEQ ID NO: 2281298 - RNA, 19 nt, Artificial Sequence
  Description of Artificial Sequence: Synthetic oligonucleotide
  Sense strand starting at position 3042 of SEQ ID NO: 1884648
uuaacaugcuaaguaaaga

SEQ ID NO: 2281299 - RNA, 19 nt, Artificial Sequence
  Description of Artificial Sequence: Synthetic oligonucleotide
  Antisense strand to SEQ ID NO: 2281298
ucuuuacuuagcauguuaa

SEQ ID NO: 2281300 - RNA, 19 nt, Artificial Sequence
  Description of Artificial Sequence: Synthetic oligonucleotide
  Sense strand starting at position 3124 of SEQ ID NO: 1884648
gugcuuuaccuugacccua

SEQ ID NO: 2281301 - RNA, 19 nt, Artificial Sequence
  Description of Artificial Sequence: Synthetic oligonucleotide
  Antisense strand to SEQ ID NO: 2281300
uagggucaagguaaagcac

SEQ ID NO: 2281302 - RNA, 19 nt, Artificial Sequence
  Description of Artificial Sequence: Synthetic oligonucleotide
  Sense strand starting at position 3264 of SEQ ID NO: 1884648
uauggagaucuauguuuga

SEQ ID NO: 2281303 - RNA, 19 nt, Artificial Sequence
  Description of Artificial Sequence: Synthetic oligonucleotide
  Antisense strand to SEQ ID NO: 2281302
ucaaacauagaucuccaua

SEQ ID NO: 2281304 - RNA, 19 nt, Artificial Sequence
  Description of Artificial Sequence: Synthetic oligonucleotide
  Sense strand starting at position 3267 of SEQ ID NO: 1884648
ggagaucuauguuugaauc

SEQ ID NO: 2281305 - RNA, 19 nt, Artificial Sequence
  Description of Artificial Sequence: Synthetic oligonucleotide
  Antisense strand to SEQ ID NO: 2281304
gauucaaacauagaucucc

SEQ ID NO: 2281306 - RNA, 19 nt, Artificial Sequence
  Description of Artificial Sequence: Synthetic oligonucleotide
  Sense strand starting at position 3378 of SEQ ID NO: 1884648
uuacaaggauaauaugaga

SEQ ID NO: 2281307 - RNA, 19 nt, Artificial Sequence
  Description of Artificial Sequence: Synthetic oligonucleotide
  Antisense strand to SEQ ID NO: 2281306
ucucauauuauccuuguaa

SEQ ID NO: 2281308 - RNA, 19 nt, Artificial Sequence
  Description of Artificial Sequence: Synthetic oligonucleotide
  Sense strand starting at position 3440 of SEQ ID NO: 1884648
ggcacaagaugcuuccuaa

SEQ ID NO: 2281309 - RNA, 19 nt, Artificial Sequence
  Description of Artificial Sequence: Synthetic oligonucleotide
  Antisense strand to SEQ ID NO: 2281308
uuaggaagcaucuugugcc

SEQ ID NO: 2281310 - RNA, 19 nt, Artificial Sequence
  Description of Artificial Sequence: Synthetic oligonucleotide
  Sense strand starting at position 3443 of SEQ ID NO: 1884648
acaagaugcuuccuaagua

SEQ ID NO: 2281311 - RNA, 19 nt, Artificial Sequence
  Description of Artificial Sequence: Synthetic oligonucleotide
  Antisense strand to SEQ ID NO: 2281310
uacuuaggaagcaucuugu

SEQ ID NO: 2281312 - RNA, 19 nt, Artificial Sequence
  Description of Artificial Sequence: Synthetic oligonucleotide
  Sense strand starting at position 3447 of SEQ ID NO: 1884648
gaugcuuccuaaguaguaa

SEQ ID NO: 2281313 - RNA, 19 nt, Artificial Sequence
  Description of Artificial Sequence: Synthetic oligonucleotide
  Antisense strand to SEQ ID NO: 2281312
uuacuacuuaggaagcauc

SEQ ID NO: 2281314 - RNA, 19 nt, Artificial Sequence
  Description of Artificial Sequence: Synthetic oligonucleotide
  Sense strand starting at position 3581 of SEQ ID NO: 1884648
ggcagucacuauuuagcuu

SEQ ID NO: 2281315 - RNA, 19 nt, Artificial Sequence
  Description of Artificial Sequence: Synthetic oligonucleotide
  Antisense strand to SEQ ID NO: 2281314
aagcuaaauagugacugcc

SEQ ID NO: 2281316 - RNA, 19 nt, Artificial Sequence
  Description of Artificial Sequence: Synthetic oligonucleotide
  Sense strand starting at position 3612 of SEQ ID NO: 1884648
uugauuuaugccuggucca

SEQ ID NO: 2281317 - RNA, 19 nt, Artificial Sequence
  Description of Artificial Sequence: Synthetic oligonucleotide
  Antisense strand to SEQ ID NO: 2281316
uggaccaggcauaaaucaa

SEQ ID NO: 2281318 - RNA, 19 nt, Artificial Sequence
  Description of Artificial Sequence: Synthetic oligonucleotide
  Sense strand starting at position 3613 of SEQ ID NO: 1884648
ugauuuaugccugguccac

SEQ ID NO: 2281319 - RNA, 19 nt, Artificial Sequence
  Description of Artificial Sequence: Synthetic oligonucleotide
  Antisense strand to SEQ ID NO: 2281318
guggaccaggcauaaauca

SEQ ID NO: 2281320 - RNA, 19 nt, Artificial Sequence
  Description of Artificial Sequence: Synthetic oligonucleotide
  Sense strand starting at position 3617 of SEQ ID NO: 1884648
uuaugccugguccacaaua

SEQ ID NO: 2281321 - RNA, 19 nt, Artificial Sequence
  Description of Artificial Sequence: Synthetic oligonucleotide
  Antisense strand to SEQ ID NO: 2281320
uauuguggaccaggcauaa

SEQ ID NO: 2281322 - RNA, 19 nt, Artificial Sequence
  Description of Artificial Sequence: Synthetic oligonucleotide
  Sense strand starting at position 3619 of SEQ ID NO: 1884648
augccugguccacaauaga

SEQ ID NO: 2281323 - RNA, 19 nt, Artificial Sequence
  Description of Artificial Sequence: Synthetic oligonucleotide
  Antisense strand to SEQ ID NO: 2281322
ucuauuguggaccaggcau

SEQ ID NO: 2281324 - RNA, 19 nt, Artificial Sequence
  Description of Artificial Sequence: Synthetic oligonucleotide
  Sense strand starting at position 3682 of SEQ ID NO: 1884648
auuaaaucacaguguguag

SEQ ID NO: 2281325 - RNA, 19 nt, Artificial Sequence
  Description of Artificial Sequence: Synthetic oligonucleotide
  Antisense strand to SEQ ID NO: 2281324
cuacacacugugauuuaau

SEQ ID NO: 2281326 - RNA, 19 nt, Artificial Sequence
  Description of Artificial Sequence: Synthetic oligonucleotide
  Sense strand starting at position 3736 of SEQ ID NO: 1884648
ggacaauauugacaauuug

SEQ ID NO: 2281327 - RNA, 19 nt, Artificial Sequence
  Description of Artificial Sequence: Synthetic oligonucleotide
  Antisense strand to SEQ ID NO: 2281326
caaauugucaauauugucc

SEQ ID NO: 2281328 - RNA, 19 nt, Artificial Sequence
  Description of Artificial Sequence: Synthetic oligonucleotide
  Sense strand starting at position 3793 of SEQ ID NO: 1884648
cugauaugugccuaagcac

SEQ ID NO: 2281329 - RNA, 19 nt, Artificial Sequence
  Description of Artificial Sequence: Synthetic oligonucleotide
  Antisense strand to SEQ ID NO: 2281328
gugcuuaggcacauaucag

SEQ ID NO: 2281330 - RNA, 19 nt, Artificial Sequence
  Description of Artificial Sequence: Synthetic oligonucleotide
  Sense strand starting at position 3800 of SEQ ID NO: 1884648
gugccuaagcacuacaaga

SEQ ID NO: 2281331 - RNA, 19 nt, Artificial Sequence
  Description of Artificial Sequence: Synthetic oligonucleotide
  Antisense strand to SEQ ID NO: 2281330
ucuuguagugcuuaggcac

SEQ ID NO: 2281332 - RNA, 19 nt, Artificial Sequence
  Description of Artificial Sequence: Synthetic oligonucleotide
  Sense strand starting at position 3802 of SEQ ID NO: 1884648
gccuaagcacuacaagaua

SEQ ID NO: 2281333 - RNA, 19 nt, Artificial Sequence
  Description of Artificial Sequence: Synthetic oligonucleotide
  Antisense strand to SEQ ID NO: 2281332
uaucuuguagugcuuaggc

SEQ ID NO: 2281334 - RNA, 19 nt, Artificial Sequence
  Description of Artificial Sequence: Synthetic oligonucleotide
  Sense strand starting at position 3935 of SEQ ID NO: 1884648
uuguaaugucaugacuagu

SEQ ID NO: 2281335 - RNA, 19 nt, Artificial Sequence
  Description of Artificial Sequence: Synthetic oligonucleotide
  Antisense strand to SEQ ID NO: 2281334
acuagucaugacauuacaa

SEQ ID NO: 2281336 - RNA, 19 nt, Artificial Sequence
  Description of Artificial Sequence: Synthetic oligonucleotide
  Sense strand starting at position 462 of SEQ ID NO: 1884649
uagccucuacuguguguua

SEQ ID NO: 2281337 - RNA, 19 nt, Artificial Sequence
  Description of Artificial Sequence: Synthetic oligonucleotide
  Antisense strand to SEQ ID NO: 2281336
uaacacacaguagaggcua

SEQ ID NO: 2281338 - RNA, 19 nt, Artificial Sequence
  Description of Artificial Sequence: Synthetic oligonucleotide
  Sense strand starting at position 474 of SEQ ID NO: 1884649
uguguuaggaacuauugua

SEQ ID NO: 2281339 - RNA, 19 nt, Artificial Sequence
  Description of Artificial Sequence: Synthetic oligonucleotide
  Antisense strand to SEQ ID NO: 2281338
uacaauaguuccuaacaca

SEQ ID NO: 2281340 - RNA, 19 nt, Artificial Sequence
  Description of Artificial Sequence: Synthetic oligonucleotide
  Sense strand starting at position 512 of SEQ ID NO: 1884649
uggauagaguuucuuguca

SEQ ID NO: 2281341 - RNA, 19 nt, Artificial Sequence
  Description of Artificial Sequence: Synthetic oligonucleotide
  Antisense strand to SEQ ID NO: 2281340
ugacaagaaacucuaucca

SEQ ID NO: 2281342 - RNA, 19 nt, Artificial Sequence
  Description of Artificial Sequence: Synthetic oligonucleotide
  Sense strand starting at position 570 of SEQ ID NO: 1884649
ggcacuuaauuagaaacua

SEQ ID NO: 2281343 - RNA, 19 nt, Artificial Sequence
  Description of Artificial Sequence: Synthetic oligonucleotide
  Antisense strand to SEQ ID NO: 2281342
uaguuucuaauuaagugcc

SEQ ID NO: 2281344 - RNA, 19 nt, Artificial Sequence
  Description of Artificial Sequence: Synthetic oligonucleotide
  Sense strand starting at position 582 of SEQ ID NO: 1884649
gaaacuauuguguaagugu

SEQ ID NO: 2281345 - RNA, 19 nt, Artificial Sequence
  Description of Artificial Sequence: Synthetic oligonucleotide
  Antisense strand to SEQ ID NO: 2281344
acacuuacacaauaguuuc

SEQ ID NO: 2281346 - RNA, 19 nt, Artificial Sequence
  Description of Artificial Sequence: Synthetic oligonucleotide
  Sense strand starting at position 618 of SEQ ID NO: 1884649
caugaugugcuaggaagau

SEQ ID NO: 2281347 - RNA, 19 nt, Artificial Sequence
  Description of Artificial Sequence: Synthetic oligonucleotide
  Antisense strand to SEQ ID NO: 2281346
aucuuccuagcacaucaug

SEQ ID NO: 2281348 - RNA, 19 nt, Artificial Sequence
  Description of Artificial Sequence: Synthetic oligonucleotide
  Sense strand starting at position 729 of SEQ ID NO: 1884649
cauggugggucuccaucaa

SEQ ID NO: 2281349 - RNA, 19 nt, Artificial Sequence
  Description of Artificial Sequence: Synthetic oligonucleotide
  Antisense strand to SEQ ID NO: 2281348
uugauggagacccaccaug

SEQ ID NO: 2281350 - RNA, 19 nt, Artificial Sequence
  Description of Artificial Sequence: Synthetic oligonucleotide
  Sense strand starting at position 733 of SEQ ID NO: 1884649
gugggucuccaucaagacu

SEQ ID NO: 2281351 - RNA, 19 nt, Artificial Sequence
  Description of Artificial Sequence: Synthetic oligonucleotide
  Antisense strand to SEQ ID NO: 2281350
agucuugauggagacccac

SEQ ID NO: 2281352 - RNA, 19 nt, Artificial Sequence
  Description of Artificial Sequence: Synthetic oligonucleotide
  Sense strand starting at position 799 of SEQ ID NO: 1884649
accagacacucagaauguu

SEQ ID NO: 2281353 - RNA, 19 nt, Artificial Sequence
  Description of Artificial Sequence: Synthetic oligonucleotide
  Antisense strand to SEQ ID NO: 2281352
aacauucugagugucuggu

SEQ ID NO: 2281354 - RNA, 19 nt, Artificial Sequence
  Description of Artificial Sequence: Synthetic oligonucleotide
  Sense strand starting at position 802 of SEQ ID NO: 1884649
agacacucagaauguuuau

SEQ ID NO: 2281355 - RNA, 19 nt, Artificial Sequence
  Description of Artificial Sequence: Synthetic oligonucleotide
  Antisense strand to SEQ ID NO: 2281354
auaaacauucugagugucu

SEQ ID NO: 2281356 - RNA, 19 nt, Artificial Sequence
  Description of Artificial Sequence: Synthetic oligonucleotide
  Sense strand starting at position 808 of SEQ ID NO: 1884649
ucagaauguuuauaaacug

SEQ ID NO: 2281357 - RNA, 19 nt, Artificial Sequence
  Description of Artificial Sequence: Synthetic oligonucleotide
  Antisense strand to SEQ ID NO: 2281356
caguuuauaaacauucuga

SEQ ID NO: 2281358 - RNA, 19 nt, Artificial Sequence
  Description of Artificial Sequence: Synthetic oligonucleotide
  Sense strand starting at position 840 of SEQ ID NO: 1884649
aguauugaacuagguagaa

SEQ ID NO: 2281359 - RNA, 19 nt, Artificial Sequence
  Description of Artificial Sequence: Synthetic oligonucleotide
  Antisense strand to SEQ ID NO: 2281358
uucuaccuaguucaauacu

SEQ ID NO: 2281360 - RNA, 19 nt, Artificial Sequence
  Description of Artificial Sequence: Synthetic oligonucleotide
  Sense strand starting at position 1292 of SEQ ID NO: 1884649
ugaagagucaggugacuug

SEQ ID NO: 2281361 - RNA, 19 nt, Artificial Sequence
  Description of Artificial Sequence: Synthetic oligonucleotide
  Antisense strand to SEQ ID NO: 2281360
caagucaccugacucuuca

SEQ ID NO: 2281362 - RNA, 19 nt, Artificial Sequence
  Description of Artificial Sequence: Synthetic oligonucleotide
  Sense strand starting at position 1334 of SEQ ID NO: 1884649
cugccuugccaggauuaca

SEQ ID NO: 2281363 - RNA, 19 nt, Artificial Sequence
  Description of Artificial Sequence: Synthetic oligonucleotide
  Antisense strand to SEQ ID NO: 2281362
uguaauccuggcaaggcag

SEQ ID NO: 2281364 - RNA, 19 nt, Artificial Sequence
  Description of Artificial Sequence: Synthetic oligonucleotide
  Sense strand starting at position 1443 of SEQ ID NO: 1884649
ugagguuaauaacaucaaa

SEQ ID NO: 2281365 - RNA, 19 nt, Artificial Sequence
  Description of Artificial Sequence: Synthetic oligonucleotide
  Antisense strand to SEQ ID NO: 2281364
uuugauguuauuaaccuca

SEQ ID NO: 2281366 - RNA, 19 nt, Artificial Sequence
  Description of Artificial Sequence: Synthetic oligonucleotide
  Sense strand starting at position 1505 of SEQ ID NO: 1884649
acaggagcuuuggaagaga

SEQ ID NO: 2281367 - RNA, 19 nt, Artificial Sequence
  Description of Artificial Sequence: Synthetic oligonucleotide
  Antisense strand to SEQ ID NO: 2281366
ucucuuccaaagcuccugu

SEQ ID NO: 2281368 - RNA, 19 nt, Artificial Sequence
  Description of Artificial Sequence: Synthetic oligonucleotide
  Sense strand starting at position 1613 of SEQ ID NO: 1884649
gggagcugugucugagcuu

SEQ ID NO: 2281369 - RNA, 19 nt, Artificial Sequence
  Description of Artificial Sequence: Synthetic oligonucleotide
  Antisense strand to SEQ ID NO: 2281368
aagcucagacacagcuccc

SEQ ID NO: 2281370 - RNA, 19 nt, Artificial Sequence
  Description of Artificial Sequence: Synthetic oligonucleotide
  Sense strand starting at position 1626 of SEQ ID NO: 1884649
gagcuuccucuggagggau

SEQ ID NO: 2281371 - RNA, 19 nt, Artificial Sequence
  Description of Artificial Sequence: Synthetic oligonucleotide
  Antisense strand to SEQ ID NO: 2281370
aucccuccagaggaagcuc

SEQ ID NO: 2281372 - RNA, 19 nt, Artificial Sequence
  Description of Artificial Sequence: Synthetic oligonucleotide
  Sense strand starting at position 1789 of SEQ ID NO: 1884649
augucagaaggccaguauu

SEQ ID NO: 2281373 - RNA, 19 nt, Artificial Sequence
  Description of Artificial Sequence: Synthetic oligonucleotide
  Antisense strand to SEQ ID NO: 2281372
aauacuggccuucugacau

SEQ ID NO: 2281374 - RNA, 19 nt, Artificial Sequence
  Description of Artificial Sequence: Synthetic oligonucleotide
  Sense strand starting at position 1825 of SEQ ID NO: 1884649
ggcagaauccauuaccuuu

SEQ ID NO: 2281375 - RNA, 19 nt, Artificial Sequence
  Description of Artificial Sequence: Synthetic oligonucleotide
  Antisense strand to SEQ ID NO: 2281374
aaagguaauggauucugcc

SEQ ID NO: 2281376 - RNA, 19 nt, Artificial Sequence
  Description of Artificial Sequence: Synthetic oligonucleotide
  Sense strand starting at position 1864 of SEQ ID NO: 1884649
ccacuuguaucucuugguu

SEQ ID NO: 2281377 - RNA, 19 nt, Artificial Sequence
  Description of Artificial Sequence: Synthetic oligonucleotide
  Antisense strand to SEQ ID NO: 2281376
aaccaagagauacaagugg

SEQ ID NO: 2281378 - RNA, 19 nt, Artificial Sequence
  Description of Artificial Sequence: Synthetic oligonucleotide
  Sense strand starting at position 2353 of SEQ ID NO: 1884649
ugcacugagcccuagcaaa

SEQ ID NO: 2281379 - RNA, 19 nt, Artificial Sequence
  Description of Artificial Sequence: Synthetic oligonucleotide
  Antisense strand to SEQ ID NO: 2281378
uuugcuagggcucagugca

SEQ ID NO: 2281380 - RNA, 19 nt, Artificial Sequence
  Description of Artificial Sequence: Synthetic oligonucleotide
  Sense strand starting at position 2499 of SEQ ID NO: 1884649
cuugucuggcacugggaaa

SEQ ID NO: 2281381 - RNA, 19 nt, Artificial Sequence
  Description of Artificial Sequence: Synthetic oligonucleotide
  Antisense strand to SEQ ID NO: 2281380
uuucccagugccagacaag

SEQ ID NO: 2281382 - RNA, 19 nt, Artificial Sequence
  Description of Artificial Sequence: Synthetic oligonucleotide
  Sense strand starting at position 2590 of SEQ ID NO: 1884649
agguucuuuggcuggacua

SEQ ID NO: 2281383 - RNA, 19 nt, Artificial Sequence
  Description of Artificial Sequence: Synthetic oligonucleotide
  Antisense strand to SEQ ID NO: 2281382
uaguccagccaaagaaccu

SEQ ID NO: 2281384 - RNA, 19 nt, Artificial Sequence
  Description of Artificial Sequence: Synthetic oligonucleotide
  Sense strand starting at position 2591 of SEQ ID NO: 1884649
gguucuuuggcuggacuau

SEQ ID NO: 2281385 - RNA, 19 nt, Artificial Sequence
  Description of Artificial Sequence: Synthetic oligonucleotide
  Antisense strand to SEQ ID NO: 2281384
auaguccagccaaagaacc

SEQ ID NO: 2281386 - RNA, 19 nt, Artificial Sequence
  Description of Artificial Sequence: Synthetic oligonucleotide
  Sense strand starting at position 2662 of SEQ ID NO: 1884649
gcauacuaugaugguuaau

SEQ ID NO: 2281387 - RNA, 19 nt, Artificial Sequence
  Description of Artificial Sequence: Synthetic oligonucleotide
  Antisense strand to SEQ ID NO: 2281386
auuaaccaucauaguaugc

SEQ ID NO: 2281388 - RNA, 19 nt, Artificial Sequence
  Description of Artificial Sequence: Synthetic oligonucleotide
  Sense strand starting at position 2767 of SEQ ID NO: 1884649
uugagucugggcugggaaa

SEQ ID NO: 2281389 - RNA, 19 nt, Artificial Sequence
  Description of Artificial Sequence: Synthetic oligonucleotide
  Antisense strand to SEQ ID NO: 2281388
uuucccagcccagacucaa

SEQ ID NO: 2281390 - RNA, 19 nt, Artificial Sequence
  Description of Artificial Sequence: Synthetic oligonucleotide
  Sense strand starting at position 3228 of SEQ ID NO: 1884649
ggaggauguguauggugaa

SEQ ID NO: 2281391 - RNA, 19 nt, Artificial Sequence
  Description of Artificial Sequence: Synthetic oligonucleotide
  Antisense strand to SEQ ID NO: 2281390
uucaccauacacauccucc

SEQ ID NO: 2281392 - RNA, 19 nt, Artificial Sequence
  Description of Artificial Sequence: Synthetic oligonucleotide
  Sense strand starting at position 3254 of SEQ ID NO: 1884649
cgucuuguuacacagauga

SEQ ID NO: 2281393 - RNA, 19 nt, Artificial Sequence
  Description of Artificial Sequence: Synthetic oligonucleotide
  Antisense strand to SEQ ID NO: 2281392
ucaucuguguaacaagacg

SEQ ID NO: 2281394 - RNA, 19 nt, Artificial Sequence
  Description of Artificial Sequence: Synthetic oligonucleotide
  Sense strand starting at position 3267 of SEQ ID NO: 1884649
agaugaagucuccggugau

SEQ ID NO: 2281395 - RNA, 19 nt, Artificial Sequence
  Description of Artificial Sequence: Synthetic oligonucleotide
  Antisense strand to SEQ ID NO: 2281394
aucaccggagacuucaucu

SEQ ID NO: 2281396 - RNA, 19 nt, Artificial Sequence
  Description of Artificial Sequence: Synthetic oligonucleotide
  Sense strand starting at position 3270 of SEQ ID NO: 1884649
ugaagucuccggugaucaa

SEQ ID NO: 2281397 - RNA, 19 nt, Artificial Sequence
  Description of Artificial Sequence: Synthetic oligonucleotide
  Antisense strand to SEQ ID NO: 2281396
uugaucaccggagacuuca

SEQ ID NO: 2281398 - RNA, 19 nt, Artificial Sequence
  Description of Artificial Sequence: Synthetic oligonucleotide
  Sense strand starting at position 3271 of SEQ ID NO: 1884649
gaagucuccggugaucaaa

SEQ ID NO: 2281399 - RNA, 19 nt, Artificial Sequence
  Description of Artificial Sequence: Synthetic oligonucleotide
  Antisense strand to SEQ ID NO: 2281398
uuugaucaccggagacuuc

SEQ ID NO: 2281400 - RNA, 19 nt, Artificial Sequence
  Description of Artificial Sequence: Synthetic oligonucleotide
  Sense strand starting at position 3274 of SEQ ID NO: 1884649
gucuccggugaucaaaguu

SEQ ID NO: 2281401 - RNA, 19 nt, Artificial Sequence
  Description of Artificial Sequence: Synthetic oligonucleotide
  Antisense strand to SEQ ID NO: 2281400
aacuuugaucaccggagac

SEQ ID NO: 2281402 - RNA, 19 nt, Artificial Sequence
  Description of Artificial Sequence: Synthetic oligonucleotide
  Sense strand starting at position 3607 of SEQ ID NO: 1884649
gcagcccucuuccugauau

SEQ ID NO: 2281403 - RNA, 19 nt, Artificial Sequence
  Description of Artificial Sequence: Synthetic oligonucleotide
  Antisense strand to SEQ ID NO: 2281402
auaucaggaagagggcugc

SEQ ID NO: 2281404 - RNA, 19 nt, Artificial Sequence
  Description of Artificial Sequence: Synthetic oligonucleotide
  Sense strand starting at position 3635 of SEQ ID NO: 1884649
uuaccaauguaagcguaau

SEQ ID NO: 2281405 - RNA, 19 nt, Artificial Sequence
  Description of Artificial Sequence: Synthetic oligonucleotide
  Antisense strand to SEQ ID NO: 2281404
auuacgcuuacauugguaa

SEQ ID NO: 2281406 - RNA, 19 nt, Artificial Sequence
  Description of Artificial Sequence: Synthetic oligonucleotide
  Sense strand starting at position 3754 of SEQ ID NO: 1884649
ugauuauaaccugggagca

SEQ ID NO: 2281407 - RNA, 19 nt, Artificial Sequence
  Description of Artificial Sequence: Synthetic oligonucleotide
  Antisense strand to SEQ ID NO: 2281406
ugcucccagguuauaauca

SEQ ID NO: 2281408 - RNA, 19 nt, Artificial Sequence
  Description of Artificial Sequence: Synthetic oligonucleotide
  Sense strand starting at position 3755 of SEQ ID NO: 1884649
gauuauaaccugggagcau

SEQ ID NO: 2281409 - RNA, 19 nt, Artificial Sequence
  Description of Artificial Sequence: Synthetic oligonucleotide
  Antisense strand to SEQ ID NO: 2281408
augcucccagguuauaauc

SEQ ID NO: 2281410 - RNA, 19 nt, Artificial Sequence
  Description of Artificial Sequence: Synthetic oligonucleotide
  Sense strand starting at position 3756 of SEQ ID NO: 1884649
auuauaaccugggagcaua

SEQ ID NO: 2281411 - RNA, 19 nt, Artificial Sequence
  Description of Artificial Sequence: Synthetic oligonucleotide
  Antisense strand to SEQ ID NO: 2281410
uaugcucccagguuauaau

SEQ ID NO: 2281412 - RNA, 19 nt, Artificial Sequence
  Description of Artificial Sequence: Synthetic oligonucleotide
  Sense strand starting at position 3774 of SEQ ID NO: 1884649
agaauccaguuauccugaa

SEQ ID NO: 2281413 - RNA, 19 nt, Artificial Sequence
  Description of Artificial Sequence: Synthetic oligonucleotide
  Antisense strand to SEQ ID NO: 2281412
uucaggauaacuggauucu

SEQ ID NO: 2281414 - RNA, 19 nt, Artificial Sequence
  Description of Artificial Sequence: Synthetic oligonucleotide
  Sense strand starting at position 3804 of SEQ ID NO: 1884649
guuagcagcaguuguaacu

SEQ ID NO: 2281415 - RNA, 19 nt, Artificial Sequence
  Description of Artificial Sequence: Synthetic oligonucleotide
  Antisense strand to SEQ ID NO: 2281414
aguuacaacugcugcuaac

SEQ ID NO: 2281416 - RNA, 19 nt, Artificial Sequence
  Description of Artificial Sequence: Synthetic oligonucleotide
  Sense strand starting at position 44 of SEQ ID NO: 1884650
gaagaagacucugagcauc

SEQ ID NO: 2281417 - RNA, 19 nt, Artificial Sequence
  Description of Artificial Sequence: Synthetic oligonucleotide
  Antisense strand to SEQ ID NO: 2281416
gaugcucagagucuucuuc

SEQ ID NO: 2281418 - RNA, 19 nt, Artificial Sequence
  Description of Artificial Sequence: Synthetic oligonucleotide
  Sense strand starting at position 52 of SEQ ID NO: 1884650
cucugagcauccgaugaga

SEQ ID NO: 2281419 - RNA, 19 nt, Artificial Sequence
  Description of Artificial Sequence: Synthetic oligonucleotide
  Antisense strand to SEQ ID NO: 2281418
ucucaucggaugcucagag

SEQ ID NO: 2281420 - RNA, 19 nt, Artificial Sequence
  Description of Artificial Sequence: Synthetic oligonucleotide
  Sense strand starting at position 84 of SEQ ID NO: 1884650
ugacacucugguugccaua

SEQ ID NO: 2281421 - RNA, 19 nt, Artificial Sequence
  Description of Artificial Sequence: Synthetic oligonucleotide
  Antisense strand to SEQ ID NO: 2281420
uauggcaaccagaguguca

SEQ ID NO: 2281422 - RNA, 19 nt, Artificial Sequence
  Description of Artificial Sequence: Synthetic oligonucleotide
  Sense strand starting at position 86 of SEQ ID NO: 1884650
acacucugguugccauauu

SEQ ID NO: 2281423 - RNA, 19 nt, Artificial Sequence
  Description of Artificial Sequence: Synthetic oligonucleotide
  Antisense strand to SEQ ID NO: 2281422
aauauggcaaccagagugu

SEQ ID NO: 2281424 - RNA, 19 nt, Artificial Sequence
  Description of Artificial Sequence: Synthetic oligonucleotide
  Sense strand starting at position 97 of SEQ ID NO: 1884650
gccauauugugacccugaa

SEQ ID NO: 2281425 - RNA, 19 nt, Artificial Sequence
  Description of Artificial Sequence: Synthetic oligonucleotide
  Antisense strand to SEQ ID NO: 2281424
uucagggucacaauauggc

SEQ ID NO: 2281426 - RNA, 19 nt, Artificial Sequence
  Description of Artificial Sequence: Synthetic oligonucleotide
  Sense strand starting at position 163 of SEQ ID NO: 1884650
gauaauaacuggguggagu

SEQ ID NO: 2281427 - RNA, 19 nt, Artificial Sequence
  Description of Artificial Sequence: Synthetic oligonucleotide
  Antisense strand to SEQ ID NO: 2281426
acuccacccaguuauuauc

SEQ ID NO: 2281428 - RNA, 19 nt, Artificial Sequence
  Description of Artificial Sequence: Synthetic oligonucleotide
  Sense strand starting at position 164 of SEQ ID NO: 1884650
auaauaacuggguggaguu

SEQ ID NO: 2281429 - RNA, 19 nt, Artificial Sequence
  Description of Artificial Sequence: Synthetic oligonucleotide
  Antisense strand to SEQ ID NO: 2281428
aacuccacccaguuauuau

SEQ ID NO: 2281430 - RNA, 19 nt, Artificial Sequence
  Description of Artificial Sequence: Synthetic oligonucleotide
  Sense strand starting at position 165 of SEQ ID NO: 1884650
uaauaacuggguggaguuu

SEQ ID NO: 2281431 - RNA, 19 nt, Artificial Sequence
  Description of Artificial Sequence: Synthetic oligonucleotide
  Antisense strand to SEQ ID NO: 2281430
aaacuccacccaguuauua

SEQ ID NO: 2281432 - RNA, 19 nt, Artificial Sequence
  Description of Artificial Sequence: Synthetic oligonucleotide
  Sense strand starting at position 662 of SEQ ID NO: 1884650
ccaggaaagugacagaauu

SEQ ID NO: 2281433 - RNA, 19 nt, Artificial Sequence
  Description of Artificial Sequence: Synthetic oligonucleotide
  Antisense strand to SEQ ID NO: 2281432
aauucugucacuuuccugg

SEQ ID NO: 2281434 - RNA, 19 nt, Artificial Sequence
  Description of Artificial Sequence: Synthetic oligonucleotide
  Sense strand starting at position 672 of SEQ ID NO: 1884650
gacagaauuuagcaaaguc

SEQ ID NO: 2281435 - RNA, 19 nt, Artificial Sequence
  Description of Artificial Sequence: Synthetic oligonucleotide
  Antisense strand to SEQ ID NO: 2281434
gacuuugcuaaauucuguc

SEQ ID NO: 2281436 - RNA, 19 nt, Artificial Sequence
  Description of Artificial Sequence: Synthetic oligonucleotide
  Sense strand starting at position 1433 of SEQ ID NO: 1884650
gguauaucucccgauguuc

SEQ ID NO: 2281437 - RNA, 19 nt, Artificial Sequence
  Description of Artificial Sequence: Synthetic oligonucleotide
  Antisense strand to SEQ ID NO: 2281436
gaacaucgggagauauacc

SEQ ID NO: 2281438 - RNA, 19 nt, Artificial Sequence
  Description of Artificial Sequence: Synthetic oligonucleotide
  Sense strand starting at position 2698 of SEQ ID NO: 1884650
aucugcuuuguccaaugaa

SEQ ID NO: 2281439 - RNA, 19 nt, Artificial Sequence
  Description of Artificial Sequence: Synthetic oligonucleotide
  Antisense strand to SEQ ID NO: 2281438
uucauuggacaaagcagau

SEQ ID NO: 2281440 - RNA, 19 nt, Artificial Sequence
  Description of Artificial Sequence: Synthetic oligonucleotide
  Sense strand starting at position 2701 of SEQ ID NO: 1884650
ugcuuuguccaaugaacca

SEQ ID NO: 2281441 - RNA, 19 nt, Artificial Sequence
  Description of Artificial Sequence: Synthetic oligonucleotide
  Antisense strand to SEQ ID NO: 2281440
ugguucauuggacaaagca

SEQ ID NO: 2281442 - RNA, 19 nt, Artificial Sequence
  Description of Artificial Sequence: Synthetic oligonucleotide
  Sense strand starting at position 3617 of SEQ ID NO: 1884650
gcucaaagugccuauccau

SEQ ID NO: 2281443 - RNA, 19 nt, Artificial Sequence
  Description of Artificial Sequence: Synthetic oligonucleotide
  Antisense strand to SEQ ID NO: 2281442
auggauaggcacuuugagc

SEQ ID NO: 2281444 - RNA, 19 nt, Artificial Sequence
  Description of Artificial Sequence: Synthetic oligonucleotide
  Sense strand starting at position 3922 of SEQ ID NO: 1884650
ggugacaguacauaucagu

SEQ ID NO: 2281445 - RNA, 19 nt, Artificial Sequence
  Description of Artificial Sequence: Synthetic oligonucleotide
  Antisense strand to SEQ ID NO: 2281444
acugauauguacugucacc

SEQ ID NO: 2281446 - RNA, 19 nt, Artificial Sequence
  Description of Artificial Sequence: Synthetic oligonucleotide
  Sense strand starting at position 3928 of SEQ ID NO: 1884650
aguacauaucaguaagucu

SEQ ID NO: 2281447 - RNA, 19 nt, Artificial Sequence
  Description of Artificial Sequence: Synthetic oligonucleotide
  Antisense strand to SEQ ID NO: 2281446
agacuuacugauauguacu

SEQ ID NO: 2281448 - RNA, 19 nt, Artificial Sequence
  Description of Artificial Sequence: Synthetic oligonucleotide
  Sense strand starting at position 697 of SEQ ID NO: 1884651
cccaguuugugggucagua

SEQ ID NO: 2281449 - RNA, 19 nt, Artificial Sequence
  Description of Artificial Sequence: Synthetic oligonucleotide
  Antisense strand to SEQ ID NO: 2281448
uacugacccacaaacuggg

SEQ ID NO: 2281450 - RNA, 19 nt, Artificial Sequence
  Description of Artificial Sequence: Synthetic oligonucleotide
  Sense strand starting at position 699 of SEQ ID NO: 1884651
caguuugugggucaguaaa

SEQ ID NO: 2281451 - RNA, 19 nt, Artificial Sequence
  Description of Artificial Sequence: Synthetic oligonucleotide
  Antisense strand to SEQ ID NO: 2281450
uuuacugacccacaaacug

SEQ ID NO: 2281452 - RNA, 19 nt, Artificial Sequence
  Description of Artificial Sequence: Synthetic oligonucleotide
  Sense strand starting at position 724 of SEQ ID NO: 1884651
uagaguugauaggaauaga

SEQ ID NO: 2281453 - RNA, 19 nt, Artificial Sequence
  Description of Artificial Sequence: Synthetic oligonucleotide
  Antisense strand to SEQ ID NO: 2281452
ucuauuccuaucaacucua

SEQ ID NO: 2281454 - RNA, 19 nt, Artificial Sequence
  Description of Artificial Sequence: Synthetic oligonucleotide
  Sense strand starting at position 1117 of SEQ ID NO: 1884651
ugggaauuauacuguaaca

SEQ ID NO: 2281455 - RNA, 19 nt, Artificial Sequence
  Description of Artificial Sequence: Synthetic oligonucleotide
  Antisense strand to SEQ ID NO: 2281454
uguuacaguauaauuccca

SEQ ID NO: 2281456 - RNA, 19 nt, Artificial Sequence
  Description of Artificial Sequence: Synthetic oligonucleotide
  Sense strand starting at position 1152 of SEQ ID NO: 1884651
uuucucccaugcgaaauuu

SEQ ID NO: 2281457 - RNA, 19 nt, Artificial Sequence
  Description of Artificial Sequence: Synthetic oligonucleotide
  Antisense strand to SEQ ID NO: 2281456
aaauuucgcaugggagaaa

SEQ ID NO: 2281458 - RNA, 19 nt, Artificial Sequence
  Description of Artificial Sequence: Synthetic oligonucleotide
  Sense strand starting at position 1407 of SEQ ID NO: 1884651
acuggacucaguugagaug

SEQ ID NO: 2281459 - RNA, 19 nt, Artificial Sequence
  Description of Artificial Sequence: Synthetic oligonucleotide
  Antisense strand to SEQ ID NO: 2281458
caucucaacugaguccagu

SEQ ID NO: 2281460 - RNA, 19 nt, Artificial Sequence
  Description of Artificial Sequence: Synthetic oligonucleotide
  Sense strand starting at position 1549 of SEQ ID NO: 1884651
ggugcuguggcuuaacauu

SEQ ID NO: 2281461 - RNA, 19 nt, Artificial Sequence
  Description of Artificial Sequence: Synthetic oligonucleotide
  Antisense strand to SEQ ID NO: 2281460
aauguuaagccacagcacc

SEQ ID NO: 2281462 - RNA, 19 nt, Artificial Sequence
  Description of Artificial Sequence: Synthetic oligonucleotide
  Sense strand starting at position 1586 of SEQ ID NO: 1884651
gugugucuucugucuucuu

SEQ ID NO: 2281463 - RNA, 19 nt, Artificial Sequence
  Description of Artificial Sequence: Synthetic oligonucleotide
  Antisense strand to SEQ ID NO: 2281462
aagaagacagaagacacac

SEQ ID NO: 2281464 - RNA, 19 nt, Artificial Sequence
  Description of Artificial Sequence: Synthetic oligonucleotide
  Sense strand starting at position 1607 of SEQ ID NO: 1884651
uggagacucaguggucaga

SEQ ID NO: 2281465 - RNA, 19 nt, Artificial Sequence
  Description of Artificial Sequence: Synthetic oligonucleotide
  Antisense strand to SEQ ID NO: 2281464
ucugaccacugagucucca

SEQ ID NO: 2281466 - RNA, 19 nt, Artificial Sequence
  Description of Artificial Sequence: Synthetic oligonucleotide
  Sense strand starting at position 1624 of SEQ ID NO: 1884651
gaggaaacuugaugaugca

SEQ ID NO: 2281467 - RNA, 19 nt, Artificial Sequence
  Description of Artificial Sequence: Synthetic oligonucleotide
  Antisense strand to SEQ ID NO: 2281466
ugcaucaucaaguuuccuc

SEQ ID NO: 2281468 - RNA, 19 nt, Artificial Sequence
  Description of Artificial Sequence: Synthetic oligonucleotide
  Sense strand starting at position 1637 of SEQ ID NO: 1884651
gaugcauaguggucaagcu

SEQ ID NO: 2281469 - RNA, 19 nt, Artificial Sequence
  Description of Artificial Sequence: Synthetic oligonucleotide
  Antisense strand to SEQ ID NO: 2281468
agcuugaccacuaugcauc

SEQ ID NO: 2281470 - RNA, 19 nt, Artificial Sequence
  Description of Artificial Sequence: Synthetic oligonucleotide
  Sense strand starting at position 1668 of SEQ ID NO: 1884651
gggugcucuuaagauauuu

SEQ ID NO: 2281471 - RNA, 19 nt, Artificial Sequence
  Description of Artificial Sequence: Synthetic oligonucleotide
  Antisense strand to SEQ ID NO: 2281470
aaauaucuuaagagcaccc

SEQ ID NO: 2281472 - RNA, 19 nt, Artificial Sequence
  Description of Artificial Sequence: Synthetic oligonucleotide
  Sense strand starting at position 1727 of SEQ ID NO: 1884651
gcuagugauacgcggaucu

SEQ ID NO: 2281473 - RNA, 19 nt, Artificial Sequence
  Description of Artificial Sequence: Synthetic oligonucleotide
  Antisense strand to SEQ ID NO: 2281472
agauccgcguaucacuagc

SEQ ID NO: 2281474 - RNA, 19 nt, Artificial Sequence
  Description of Artificial Sequence: Synthetic oligonucleotide
  Sense strand starting at position 1729 of SEQ ID NO: 1884651
uagugauacgcggaucuuc

SEQ ID NO: 2281475 - RNA, 19 nt, Artificial Sequence
  Description of Artificial Sequence: Synthetic oligonucleotide
  Antisense strand to SEQ ID NO: 2281474
gaagauccgcguaucacua

SEQ ID NO: 2281476 - RNA, 19 nt, Artificial Sequence
  Description of Artificial Sequence: Synthetic oligonucleotide
  Sense strand starting at position 1825 of SEQ ID NO: 1884651
ggagcuuccuucuuagcuu

SEQ ID NO: 2281477 - RNA, 19 nt, Artificial Sequence
  Description of Artificial Sequence: Synthetic oligonucleotide
  Antisense strand to SEQ ID NO: 2281476
aagcuaagaaggaagcucc

SEQ ID NO: 2281478 - RNA, 19 nt, Artificial Sequence
  Description of Artificial Sequence: Synthetic oligonucleotide
  Sense strand starting at position 2001 of SEQ ID NO: 1884651
ggccaauaauuagaaauau

SEQ ID NO: 2281479 - RNA, 19 nt, Artificial Sequence
  Description of Artificial Sequence: Synthetic oligonucleotide
  Antisense strand to SEQ ID NO: 2281478
auauuucuaauuauuggcc

SEQ ID NO: 2281480 - RNA, 19 nt, Artificial Sequence
  Description of Artificial Sequence: Synthetic oligonucleotide
  Sense strand starting at position 2321 of SEQ ID NO: 1884651
cggcccaaauuagaaauau

SEQ ID NO: 2281481 - RNA, 19 nt, Artificial Sequence
  Description of Artificial Sequence: Synthetic oligonucleotide
  Antisense strand to SEQ ID NO: 2281480
auauuucuaauuugggccg

SEQ ID NO: 2281482 - RNA, 19 nt, Artificial Sequence
  Description of Artificial Sequence: Synthetic oligonucleotide
  Sense strand starting at position 2345 of SEQ ID NO: 1884651
aucagauauuuccaugguu

SEQ ID NO: 2281483 - RNA, 19 nt, Artificial Sequence
  Description of Artificial Sequence: Synthetic oligonucleotide
  Antisense strand to SEQ ID NO: 2281482
aaccauggaaauaucugau

SEQ ID NO: 2281484 - RNA, 19 nt, Artificial Sequence
  Description of Artificial Sequence: Synthetic oligonucleotide
  Sense strand starting at position 2353 of SEQ ID NO: 1884651
uuuccaugguuauagauau

SEQ ID NO: 2281485 - RNA, 19 nt, Artificial Sequence
  Description of Artificial Sequence: Synthetic oligonucleotide
  Antisense strand to SEQ ID NO: 2281484
auaucuauaaccauggaaa

SEQ ID NO: 2281486 - RNA, 19 nt, Artificial Sequence
  Description of Artificial Sequence: Synthetic oligonucleotide
  Sense strand starting at position 2395 of SEQ ID NO: 1884651
agaaacaguugucauaacu

SEQ ID NO: 2281487 - RNA, 19 nt, Artificial Sequence
  Description of Artificial Sequence: Synthetic oligonucleotide
  Antisense strand to SEQ ID NO: 2281486
aguuaugacaacuguuucu

SEQ ID NO: 2281488 - RNA, 19 nt, Artificial Sequence
  Description of Artificial Sequence: Synthetic oligonucleotide
  Sense strand starting at position 2439 of SEQ ID NO: 1884651
uucuaagugauuggaauag

SEQ ID NO: 2281489 - RNA, 19 nt, Artificial Sequence
  Description of Artificial Sequence: Synthetic oligonucleotide
  Antisense strand to SEQ ID NO: 2281488
cuauuccaaucacuuagaa

SEQ ID NO: 2281490 - RNA, 19 nt, Artificial Sequence
  Description of Artificial Sequence: Synthetic oligonucleotide
  Sense strand starting at position 2443 of SEQ ID NO: 1884651
aagugauuggaauagcuuu

SEQ ID NO: 2281491 - RNA, 19 nt, Artificial Sequence
  Description of Artificial Sequence: Synthetic oligonucleotide
  Antisense strand to SEQ ID NO: 2281490
aaagcuauuccaaucacuu

SEQ ID NO: 2281492 - RNA, 19 nt, Artificial Sequence
  Description of Artificial Sequence: Synthetic oligonucleotide
  Sense strand starting at position 2450 of SEQ ID NO: 1884651
uggaauagcuuuccuuuaa

SEQ ID NO: 2281493 - RNA, 19 nt, Artificial Sequence
  Description of Artificial Sequence: Synthetic oligonucleotide
  Antisense strand to SEQ ID NO: 2281492
uuaaaggaaagcuauucca

SEQ ID NO: 2281494 - RNA, 19 nt, Artificial Sequence
  Description of Artificial Sequence: Synthetic oligonucleotide
  Sense strand starting at position 2451 of SEQ ID NO: 1884651
ggaauagcuuuccuuuaau

SEQ ID NO: 2281495 - RNA, 19 nt, Artificial Sequence
  Description of Artificial Sequence: Synthetic oligonucleotide
  Antisense strand to SEQ ID NO: 2281494
auuaaaggaaagcuauucc

SEQ ID NO: 2281496 - RNA, 19 nt, Artificial Sequence
  Description of Artificial Sequence: Synthetic oligonucleotide
  Sense strand starting at position 2501 of SEQ ID NO: 1884651
gaucacgcucuaugauguu

SEQ ID NO: 2281497 - RNA, 19 nt, Artificial Sequence
  Description of Artificial Sequence: Synthetic oligonucleotide
  Antisense strand to SEQ ID NO: 2281496
aacaucauagagcgugauc

SEQ ID NO: 2281498 - RNA, 19 nt, Artificial Sequence
  Description of Artificial Sequence: Synthetic oligonucleotide
  Sense strand starting at position 2507 of SEQ ID NO: 1884651
gcucuaugauguuucgauu

SEQ ID NO: 2281499 - RNA, 19 nt, Artificial Sequence
  Description of Artificial Sequence: Synthetic oligonucleotide
  Antisense strand to SEQ ID NO: 2281498
aaucgaaacaucauagagc

SEQ ID NO: 2281500 - RNA, 19 nt, Artificial Sequence
  Description of Artificial Sequence: Synthetic oligonucleotide
  Sense strand starting at position 2528 of SEQ ID NO: 1884651
acucaaaggcaucaugagu

SEQ ID NO: 2281501 - RNA, 19 nt, Artificial Sequence
  Description of Artificial Sequence: Synthetic oligonucleotide
  Antisense strand to SEQ ID NO: 2281500
acucaugaugccuuugagu

SEQ ID NO: 2281502 - RNA, 19 nt, Artificial Sequence
  Description of Artificial Sequence: Synthetic oligonucleotide
  Sense strand starting at position 2539 of SEQ ID NO: 1884651
ucaugaguacucugcucau

SEQ ID NO: 2281503 - RNA, 19 nt, Artificial Sequence
  Description of Artificial Sequence: Synthetic oligonucleotide
  Antisense strand to SEQ ID NO: 2281502
augagcagaguacucauga

SEQ ID NO: 2281504 - RNA, 19 nt, Artificial Sequence
  Description of Artificial Sequence: Synthetic oligonucleotide
  Sense strand starting at position 2542 of SEQ ID NO: 1884651
ugaguacucugcucauucu

SEQ ID NO: 2281505 - RNA, 19 nt, Artificial Sequence
  Description of Artificial Sequence: Synthetic oligonucleotide
  Antisense strand to SEQ ID NO: 2281504
agaaugagcagaguacuca

SEQ ID NO: 2281506 - RNA, 19 nt, Artificial Sequence
  Description of Artificial Sequence: Synthetic oligonucleotide
  Sense strand starting at position 2982 of SEQ ID NO: 1884651
ucuggauuagcugggcaua

SEQ ID NO: 2281507 - RNA, 19 nt, Artificial Sequence
  Description of Artificial Sequence: Synthetic oligonucleotide
  Antisense strand to SEQ ID NO: 2281506
uaugcccagcuaauccaga

SEQ ID NO: 2281508 - RNA, 19 nt, Artificial Sequence
  Description of Artificial Sequence: Synthetic oligonucleotide
  Sense strand starting at position 2983 of SEQ ID NO: 1884651
cuggauuagcugggcauau

SEQ ID NO: 2281509 - RNA, 19 nt, Artificial Sequence
  Description of Artificial Sequence: Synthetic oligonucleotide
  Antisense strand to SEQ ID NO: 2281508
auaugcccagcuaauccag

SEQ ID NO: 2281510 - RNA, 19 nt, Artificial Sequence
  Description of Artificial Sequence: Synthetic oligonucleotide
  Sense strand starting at position 2984 of SEQ ID NO: 1884651
uggauuagcugggcauaua

SEQ ID NO: 2281511 - RNA, 19 nt, Artificial Sequence
  Description of Artificial Sequence: Synthetic oligonucleotide
  Antisense strand to SEQ ID NO: 2281510
uauaugcccagcuaaucca

SEQ ID NO: 2281512 - RNA, 19 nt, Artificial Sequence
  Description of Artificial Sequence: Synthetic oligonucleotide
  Sense strand starting at position 3035 of SEQ ID NO: 1884651
cuacuuacucuggaggcua

SEQ ID NO: 2281513 - RNA, 19 nt, Artificial Sequence
  Description of Artificial Sequence: Synthetic oligonucleotide
  Antisense strand to SEQ ID NO: 2281512
uagccuccagaguaaguag

SEQ ID NO: 2281514 - RNA, 19 nt, Artificial Sequence
  Description of Artificial Sequence: Synthetic oligonucleotide
  Sense strand starting at position 3117 of SEQ ID NO: 1884651
cugugaucccaccacuaca

SEQ ID NO: 2281515 - RNA, 19 nt, Artificial Sequence
  Description of Artificial Sequence: Synthetic oligonucleotide
  Antisense strand to SEQ ID NO: 2281514
uguaguggugggaucacag

SEQ ID NO: 2281516 - RNA, 19 nt, Artificial Sequence
  Description of Artificial Sequence: Synthetic oligonucleotide
  Sense strand starting at position 3154 of SEQ ID NO: 1884651
gcaagaaugucucuuuaaa

SEQ ID NO: 2281517 - RNA, 19 nt, Artificial Sequence
  Description of Artificial Sequence: Synthetic oligonucleotide
  Antisense strand to SEQ ID NO: 2281516
uuuaaagagacauucuugc

SEQ ID NO: 2281518 - RNA, 19 nt, Artificial Sequence
  Description of Artificial Sequence: Synthetic oligonucleotide
  Sense strand starting at position 3331 of SEQ ID NO: 1884651
gugacauuugccuguagug

SEQ ID NO: 2281519 - RNA, 19 nt, Artificial Sequence
  Description of Artificial Sequence: Synthetic oligonucleotide
  Antisense strand to SEQ ID NO: 2281518
cacuacaggcaaaugucac

SEQ ID NO: 2281520 - RNA, 19 nt, Artificial Sequence
  Description of Artificial Sequence: Synthetic oligonucleotide
  Sense strand starting at position 3333 of SEQ ID NO: 1884651
gacauuugccuguagugcu

SEQ ID NO: 2281521 - RNA, 19 nt, Artificial Sequence
  Description of Artificial Sequence: Synthetic oligonucleotide
  Antisense strand to SEQ ID NO: 2281520
agcacuacaggcaaauguc

SEQ ID NO: 2281522 - RNA, 19 nt, Artificial Sequence
  Description of Artificial Sequence: Synthetic oligonucleotide
  Sense strand starting at position 3376 of SEQ ID NO: 1884651
aggauugcuuaagcucaca

SEQ ID NO: 2281523 - RNA, 19 nt, Artificial Sequence
  Description of Artificial Sequence: Synthetic oligonucleotide
  Antisense strand to SEQ ID NO: 2281522
ugugagcuuaagcaauccu

SEQ ID NO: 2281524 - RNA, 19 nt, Artificial Sequence
  Description of Artificial Sequence: Synthetic oligonucleotide
  Sense strand starting at position 3403 of SEQ ID NO: 1884651
gcaggagugagcugugauc

SEQ ID NO: 2281525 - RNA, 19 nt, Artificial Sequence
  Description of Artificial Sequence: Synthetic oligonucleotide
  Antisense strand to SEQ ID NO: 2281524
gaucacagcucacuccugc

SEQ ID NO: 2281526 - RNA, 19 nt, Artificial Sequence
  Description of Artificial Sequence: Synthetic oligonucleotide
  Sense strand starting at position 3531 of SEQ ID NO: 1884651
cacggaggagucugcuaaa

SEQ ID NO: 2281527 - RNA, 19 nt, Artificial Sequence
  Description of Artificial Sequence: Synthetic oligonucleotide
  Antisense strand to SEQ ID NO: 2281526
uuuagcagacuccuccgug

SEQ ID NO: 2281528 - RNA, 19 nt, Artificial Sequence
  Description of Artificial Sequence: Synthetic oligonucleotide
  Sense strand starting at position 165 of SEQ ID NO: 1884652
uccaucaacugauggauau

SEQ ID NO: 2281529 - RNA, 19 nt, Artificial Sequence
  Description of Artificial Sequence: Synthetic oligonucleotide
  Antisense strand to SEQ ID NO: 2281528
auauccaucaguugaugga

SEQ ID NO: 2281530 - RNA, 19 nt, Artificial Sequence
  Description of Artificial Sequence: Synthetic oligonucleotide
  Sense strand starting at position 193 of SEQ ID NO: 1884652
gugcaauauuacuuggcaa

SEQ ID NO: 2281531 - RNA, 19 nt, Artificial Sequence
  Description of Artificial Sequence: Synthetic oligonucleotide
  Antisense strand to SEQ ID NO: 2281530
uugccaaguaauauugcac

SEQ ID NO: 2281532 - RNA, 19 nt, Artificial Sequence
  Description of Artificial Sequence: Synthetic oligonucleotide
  Sense strand starting at position 195 of SEQ ID NO: 1884652
gcaauauuacuuggcaaua

SEQ ID NO: 2281533 - RNA, 19 nt, Artificial Sequence
  Description of Artificial Sequence: Synthetic oligonucleotide
  Antisense strand to SEQ ID NO: 2281532
uauugccaaguaauauugc

SEQ ID NO: 2281534 - RNA, 19 nt, Artificial Sequence
  Description of Artificial Sequence: Synthetic oligonucleotide
  Sense strand starting at position 436 of SEQ ID NO: 1884652
uguaaauguucugaaauag

SEQ ID NO: 2281535 - RNA, 19 nt, Artificial Sequence
  Description of Artificial Sequence: Synthetic oligonucleotide
  Antisense strand to SEQ ID NO: 2281534
cuauuucagaacauuuaca

SEQ ID NO: 2281536 - RNA, 19 nt, Artificial Sequence
  Description of Artificial Sequence: Synthetic oligonucleotide
  Sense strand starting at position 447 of SEQ ID NO: 1884652
ugaaauagauacuagugau

SEQ ID NO: 2281537 - RNA, 19 nt, Artificial Sequence
  Description of Artificial Sequence: Synthetic oligonucleotide
  Antisense strand to SEQ ID NO: 2281536
aucacuaguaucuauuuca

SEQ ID NO: 2281538 - RNA, 19 nt, Artificial Sequence
  Description of Artificial Sequence: Synthetic oligonucleotide
  Sense strand starting at position 450 of SEQ ID NO: 1884652
aauagauacuagugaugaa

SEQ ID NO: 2281539 - RNA, 19 nt, Artificial Sequence
  Description of Artificial Sequence: Synthetic oligonucleotide
  Antisense strand to SEQ ID NO: 2281538
uucaucacuaguaucuauu

SEQ ID NO: 2281540 - RNA, 19 nt, Artificial Sequence
  Description of Artificial Sequence: Synthetic oligonucleotide
  Sense strand starting at position 457 of SEQ ID NO: 1884652
acuagugaugaaugcauga

SEQ ID NO: 2281541 - RNA, 19 nt, Artificial Sequence
  Description of Artificial Sequence: Synthetic oligonucleotide
  Antisense strand to SEQ ID NO: 2281540
ucaugcauucaucacuagu

SEQ ID NO: 2281542 - RNA, 19 nt, Artificial Sequence
  Description of Artificial Sequence: Synthetic oligonucleotide
  Sense strand starting at position 467 of SEQ ID NO: 1884652
aaugcaugacuuugugaau

SEQ ID NO: 2281543 - RNA, 19 nt, Artificial Sequence
  Description of Artificial Sequence: Synthetic oligonucleotide
  Antisense strand to SEQ ID NO: 2281542
auucacaaagucaugcauu

SEQ ID NO: 2281544 - RNA, 19 nt, Artificial Sequence
  Description of Artificial Sequence: Synthetic oligonucleotide
  Sense strand starting at position 468 of SEQ ID NO: 1884652
augcaugacuuugugaaua

SEQ ID NO: 2281545 - RNA, 19 nt, Artificial Sequence
  Description of Artificial Sequence: Synthetic oligonucleotide
  Antisense strand to SEQ ID NO: 2281544
uauucacaaagucaugcau

SEQ ID NO: 2281546 - RNA, 19 nt, Artificial Sequence
  Description of Artificial Sequence: Synthetic oligonucleotide
  Sense strand starting at position 473 of SEQ ID NO: 1884652
ugacuuugugaauauguua

SEQ ID NO: 2281547 - RNA, 19 nt, Artificial Sequence
  Description of Artificial Sequence: Synthetic oligonucleotide
  Antisense strand to SEQ ID NO: 2281546
uaacauauucacaaaguca

SEQ ID NO: 2281548 - RNA, 19 nt, Artificial Sequence
  Description of Artificial Sequence: Synthetic oligonucleotide
  Sense strand starting at position 813 of SEQ ID NO: 1884652
gccggcuguguuuagacaa

SEQ ID NO: 2281549 - RNA, 19 nt, Artificial Sequence
  Description of Artificial Sequence: Synthetic oligonucleotide
  Antisense strand to SEQ ID NO: 2281548
uugucuaaacacagccggc

SEQ ID NO: 2281550 - RNA, 19 nt, Artificial Sequence
  Description of Artificial Sequence: Synthetic oligonucleotide
  Sense strand starting at position 1088 of SEQ ID NO: 1884652
uuauaaugaguguaacugu

SEQ ID NO: 2281551 - RNA, 19 nt, Artificial Sequence
  Description of Artificial Sequence: Synthetic oligonucleotide
  Antisense strand to SEQ ID NO: 2281550
acaguuacacucauuauaa

SEQ ID NO: 2281552 - RNA, 19 nt, Artificial Sequence
  Description of Artificial Sequence: Synthetic oligonucleotide
  Sense strand starting at position 2001 of SEQ ID NO: 1884652
gagcaagugaaauggguuu

SEQ ID NO: 2281553 - RNA, 19 nt, Artificial Sequence
  Description of Artificial Sequence: Synthetic oligonucleotide
  Antisense strand to SEQ ID NO: 2281552
aaacccauuucacuugcuc

SEQ ID NO: 2281554 - RNA, 19 nt, Artificial Sequence
  Description of Artificial Sequence: Synthetic oligonucleotide
  Sense strand starting at position 2053 of SEQ ID NO: 1884652
acucauuaccacgagagca

SEQ ID NO: 2281555 - RNA, 19 nt, Artificial Sequence
  Description of Artificial Sequence: Synthetic oligonucleotide
  Antisense strand to SEQ ID NO: 2281554
ugcucucgugguaaugagu

SEQ ID NO: 2281556 - RNA, 19 nt, Artificial Sequence
  Description of Artificial Sequence: Synthetic oligonucleotide
  Sense strand starting at position 2214 of SEQ ID NO: 1884652
uguaaauaaucaguaucac

SEQ ID NO: 2281557 - RNA, 19 nt, Artificial Sequence
  Description of Artificial Sequence: Synthetic oligonucleotide
  Antisense strand to SEQ ID NO: 2281556
gugauacugauuauuuaca

SEQ ID NO: 2281558 - RNA, 19 nt, Artificial Sequence
  Description of Artificial Sequence: Synthetic oligonucleotide
  Sense strand starting at position 2314 of SEQ ID NO: 1884652
cugcuauaggcgucauugu

SEQ ID NO: 2281559 - RNA, 19 nt, Artificial Sequence
  Description of Artificial Sequence: Synthetic oligonucleotide
  Antisense strand to SEQ ID NO: 2281558
acaaugacgccuauagcag

SEQ ID NO: 2281560 - RNA, 19 nt, Artificial Sequence
  Description of Artificial Sequence: Synthetic oligonucleotide
  Sense strand starting at position 2324 of SEQ ID NO: 1884652
cgucauuguggauauugca

SEQ ID NO: 2281561 - RNA, 19 nt, Artificial Sequence
  Description of Artificial Sequence: Synthetic oligonucleotide
  Antisense strand to SEQ ID NO: 2281560
ugcaauauccacaaugacg

SEQ ID NO: 2281562 - RNA, 19 nt, Artificial Sequence
  Description of Artificial Sequence: Synthetic oligonucleotide
  Sense strand starting at position 2332 of SEQ ID NO: 1884652
uggauauugcauuaaucca

SEQ ID NO: 2281563 - RNA, 19 nt, Artificial Sequence
  Description of Artificial Sequence: Synthetic oligonucleotide
  Antisense strand to SEQ ID NO: 2281562
uggauuaaugcaauaucca

SEQ ID NO: 2281564 - RNA, 19 nt, Artificial Sequence
  Description of Artificial Sequence: Synthetic oligonucleotide
  Sense strand starting at position 2422 of SEQ ID NO: 1884652
aaggcuucgguuugcaaua

SEQ ID NO: 2281565 - RNA, 19 nt, Artificial Sequence
  Description of Artificial Sequence: Synthetic oligonucleotide
  Antisense strand to SEQ ID NO: 2281564
uauugcaaaccgaagccuu

SEQ ID NO: 2281566 - RNA, 19 nt, Artificial Sequence
  Description of Artificial Sequence: Synthetic oligonucleotide
  Sense strand starting at position 2423 of SEQ ID NO: 1884652
aggcuucgguuugcaauaa

SEQ ID NO: 2281567 - RNA, 19 nt, Artificial Sequence
  Description of Artificial Sequence: Synthetic oligonucleotide
  Antisense strand to SEQ ID NO: 2281566
uuauugcaaaccgaagccu

SEQ ID NO: 2281568 - RNA, 19 nt, Artificial Sequence
  Description of Artificial Sequence: Synthetic oligonucleotide
  Sense strand starting at position 2427 of SEQ ID NO: 1884652
uucgguuugcaauaaucua

SEQ ID NO: 2281569 - RNA, 19 nt, Artificial Sequence
  Description of Artificial Sequence: Synthetic oligonucleotide
  Antisense strand to SEQ ID NO: 2281568
uagauuauugcaaaccgaa

SEQ ID NO: 2281570 - RNA, 19 nt, Artificial Sequence
  Description of Artificial Sequence: Synthetic oligonucleotide
  Sense strand starting at position 2450 of SEQ ID NO: 1884652
auucgugcucucugagagu

SEQ ID NO: 2281571 - RNA, 19 nt, Artificial Sequence
  Description of Artificial Sequence: Synthetic oligonucleotide
  Antisense strand to SEQ ID NO: 2281570
acucucagagagcacgaau

SEQ ID NO: 2281572 - RNA, 19 nt, Artificial Sequence
  Description of Artificial Sequence: Synthetic oligonucleotide
  Sense strand starting at position 2545 of SEQ ID NO: 1884652
agcagaaucugucucucag

SEQ ID NO: 2281573 - RNA, 19 nt, Artificial Sequence
  Description of Artificial Sequence: Synthetic oligonucleotide
  Antisense strand to SEQ ID NO: 2281572
cugagagacagauucugcu

SEQ ID NO: 2281574 - RNA, 19 nt, Artificial Sequence
  Description of Artificial Sequence: Synthetic oligonucleotide
  Sense strand starting at position 2816 of SEQ ID NO: 1884652
gaugaaugcucaugagaau

SEQ ID NO: 2281575 - RNA, 19 nt, Artificial Sequence
  Description of Artificial Sequence: Synthetic oligonucleotide
  Antisense strand to SEQ ID NO: 2281574
auucucaugagcauucauc

SEQ ID NO: 2281576 - RNA, 19 nt, Artificial Sequence
  Description of Artificial Sequence: Synthetic oligonucleotide
  Sense strand starting at position 2825 of SEQ ID NO: 1884652
ucaugagaauugccucuuu

SEQ ID NO: 2281577 - RNA, 19 nt, Artificial Sequence
  Description of Artificial Sequence: Synthetic oligonucleotide
  Antisense strand to SEQ ID NO: 2281576
aaagaggcaauucucauga

SEQ ID NO: 2281578 - RNA, 19 nt, Artificial Sequence
  Description of Artificial Sequence: Synthetic oligonucleotide
  Sense strand starting at position 2990 of SEQ ID NO: 1884652
agcugacgggcagauuaua

SEQ ID NO: 2281579 - RNA, 19 nt, Artificial Sequence
  Description of Artificial Sequence: Synthetic oligonucleotide
  Antisense strand to SEQ ID NO: 2281578
uauaaucugcccgucagcu

SEQ ID NO: 2281580 - RNA, 19 nt, Artificial Sequence
  Description of Artificial Sequence: Synthetic oligonucleotide
  Sense strand starting at position 3277 of SEQ ID NO: 1884652
uuaggaggccuggguuaaa

SEQ ID NO: 2281581 - RNA, 19 nt, Artificial Sequence
  Description of Artificial Sequence: Synthetic oligonucleotide
  Antisense strand to SEQ ID NO: 2281580
uuuaacccaggccuccuaa

SEQ ID NO: 2281582 - RNA, 19 nt, Artificial Sequence
  Description of Artificial Sequence: Synthetic oligonucleotide
  Sense strand starting at position 3347 of SEQ ID NO: 1884652
auacucuggugcccugaua

SEQ ID NO: 2281583 - RNA, 19 nt, Artificial Sequence
  Description of Artificial Sequence: Synthetic oligonucleotide
  Antisense strand to SEQ ID NO: 2281582
uaucagggcaccagaguau

SEQ ID NO: 2281584 - RNA, 19 nt, Artificial Sequence
  Description of Artificial Sequence: Synthetic oligonucleotide
  Sense strand starting at position 3405 of SEQ ID NO: 1884652
cccuccauuguguaacagu

SEQ ID NO: 2281585 - RNA, 19 nt, Artificial Sequence
  Description of Artificial Sequence: Synthetic oligonucleotide
  Antisense strand to SEQ ID NO: 2281584
acuguuacacaauggaggg

SEQ ID NO: 2281586 - RNA, 19 nt, Artificial Sequence
  Description of Artificial Sequence: Synthetic oligonucleotide
  Sense strand starting at position 3467 of SEQ ID NO: 1884652
ccugcuugcugaccagauu

SEQ ID NO: 2281587 - RNA, 19 nt, Artificial Sequence
  Description of Artificial Sequence: Synthetic oligonucleotide
  Antisense strand to SEQ ID NO: 2281586
aaucuggucagcaagcagg

SEQ ID NO: 2281588 - RNA, 19 nt, Artificial Sequence
  Description of Artificial Sequence: Synthetic oligonucleotide
  Sense strand starting at position 3639 of SEQ ID NO: 1884652
caggaaucugaacgugaaa

SEQ ID NO: 2281589 - RNA, 19 nt, Artificial Sequence
  Description of Artificial Sequence: Synthetic oligonucleotide
  Antisense strand to SEQ ID NO: 2281588
uuucacguucagauuccug

SEQ ID NO: 2281590 - RNA, 19 nt, Artificial Sequence
  Description of Artificial Sequence: Synthetic oligonucleotide
  Sense strand starting at position 3641 of SEQ ID NO: 1884652
ggaaucugaacgugaaauc

SEQ ID NO: 2281591 - RNA, 19 nt, Artificial Sequence
  Description of Artificial Sequence: Synthetic oligonucleotide
  Antisense strand to SEQ ID NO: 2281590
gauuucacguucagauucc

SEQ ID NO: 2281592 - RNA, 19 nt, Artificial Sequence
  Description of Artificial Sequence: Synthetic oligonucleotide
  Sense strand starting at position 3650 of SEQ ID NO: 1884652
acgugaaaucuggagguac

SEQ ID NO: 2281593 - RNA, 19 nt, Artificial Sequence
  Description of Artificial Sequence: Synthetic oligonucleotide
  Antisense strand to SEQ ID NO: 2281592
guaccuccagauuucacgu

SEQ ID NO: 2281594 - RNA, 19 nt, Artificial Sequence
  Description of Artificial Sequence: Synthetic oligonucleotide
  Sense strand starting at position 3682 of SEQ ID NO: 1884652
gcaccauacgguugaaagu

SEQ ID NO: 2281595 - RNA, 19 nt, Artificial Sequence
  Description of Artificial Sequence: Synthetic oligonucleotide
  Antisense strand to SEQ ID NO: 2281594
acuuucaaccguauggugc

SEQ ID NO: 2281596 - RNA, 19 nt, Artificial Sequence
  Description of Artificial Sequence: Synthetic oligonucleotide
  Sense strand starting at position 3769 of SEQ ID NO: 1884652
ccuccagaguccuuguaau

SEQ ID NO: 2281597 - RNA, 19 nt, Artificial Sequence
  Description of Artificial Sequence: Synthetic oligonucleotide
  Antisense strand to SEQ ID NO: 2281596
auuacaaggacucuggagg

SEQ ID NO: 2281598 - RNA, 19 nt, Artificial Sequence
  Description of Artificial Sequence: Synthetic oligonucleotide
  Sense strand starting at position 3777 of SEQ ID NO: 1884652
guccuuguaaugugagaag

SEQ ID NO: 2281599 - RNA, 19 nt, Artificial Sequence
  Description of Artificial Sequence: Synthetic oligonucleotide
  Antisense strand to SEQ ID NO: 2281598
cuucucacauuacaaggac

SEQ ID NO: 2281600 - RNA, 19 nt, Artificial Sequence
  Description of Artificial Sequence: Synthetic oligonucleotide
  Sense strand starting at position 3780 of SEQ ID NO: 1884652
cuuguaaugugagaagaga

SEQ ID NO: 2281601 - RNA, 19 nt, Artificial Sequence
  Description of Artificial Sequence: Synthetic oligonucleotide
  Antisense strand to SEQ ID NO: 2281600
ucucuucucacauuacaag

SEQ ID NO: 2281602 - RNA, 19 nt, Artificial Sequence
  Description of Artificial Sequence: Synthetic oligonucleotide
  Sense strand starting at position 3794 of SEQ ID NO: 1884652
agagaaagcccugaagugu

SEQ ID NO: 2281603 - RNA, 19 nt, Artificial Sequence
  Description of Artificial Sequence: Synthetic oligonucleotide
  Antisense strand to SEQ ID NO: 2281602
acacuucagggcuuucucu

SEQ ID NO: 2281604 - RNA, 19 nt, Artificial Sequence
  Description of Artificial Sequence: Synthetic oligonucleotide
  Sense strand starting at position 3802 of SEQ ID NO: 1884652
cccugaaguguuuaagcca

SEQ ID NO: 2281605 - RNA, 19 nt, Artificial Sequence
  Description of Artificial Sequence: Synthetic oligonucleotide
  Antisense strand to SEQ ID NO: 2281604
uggcuuaaacacuucaggg

SEQ ID NO: 2281606 - RNA, 19 nt, Artificial Sequence
  Description of Artificial Sequence: Synthetic oligonucleotide
  Sense strand starting at position 3838 of SEQ ID NO: 1884652
uugucuugggaccaaaugu

SEQ ID NO: 2281607 - RNA, 19 nt, Artificial Sequence
  Description of Artificial Sequence: Synthetic oligonucleotide
  Antisense strand to SEQ ID NO: 2281606
acauuuggucccaagacaa

SEQ ID NO: 2281608 - RNA, 19 nt, Artificial Sequence
  Description of Artificial Sequence: Synthetic oligonucleotide
  Sense strand starting at position 125 of SEQ ID NO: 1884653
ucaaguugcuaaguuauaa

SEQ ID NO: 2281609 - RNA, 19 nt, Artificial Sequence
  Description of Artificial Sequence: Synthetic oligonucleotide
  Antisense strand to SEQ ID NO: 2281608
uuauaacuuagcaacuuga

SEQ ID NO: 2281610 - RNA, 19 nt, Artificial Sequence
  Description of Artificial Sequence: Synthetic oligonucleotide
  Sense strand starting at position 198 of SEQ ID NO: 1884653
gcuggugguuuaaaggaga

SEQ ID NO: 2281611 - RNA, 19 nt, Artificial Sequence
  Description of Artificial Sequence: Synthetic oligonucleotide
  Antisense strand to SEQ ID NO: 2281610
ucuccuuuaaaccaccagc

SEQ ID NO: 2281612 - RNA, 19 nt, Artificial Sequence
  Description of Artificial Sequence: Synthetic oligonucleotide
  Sense strand starting at position 213 of SEQ ID NO: 1884653
gagacaggguucuaaauuu

SEQ ID NO: 2281613 - RNA, 19 nt, Artificial Sequence
  Description of Artificial Sequence: Synthetic oligonucleotide
  Antisense strand to SEQ ID NO: 2281612
aaauuuagaacccugucuc

SEQ ID NO: 2281614 - RNA, 19 nt, Artificial Sequence
  Description of Artificial Sequence: Synthetic oligonucleotide
  Sense strand starting at position 327 of SEQ ID NO: 1884653
agcucucagacaggugaaa

SEQ ID NO: 2281615 - RNA, 19 nt, Artificial Sequence
  Description of Artificial Sequence: Synthetic oligonucleotide
  Antisense strand to SEQ ID NO: 2281614
uuucaccugucugagagcu

SEQ ID NO: 2281616 - RNA, 19 nt, Artificial Sequence
  Description of Artificial Sequence: Synthetic oligonucleotide
  Sense strand starting at position 365 of SEQ ID NO: 1884653
cguagagaauaauacauuu

SEQ ID NO: 2281617 - RNA, 19 nt, Artificial Sequence
  Description of Artificial Sequence: Synthetic oligonucleotide
  Antisense strand to SEQ ID NO: 2281616
aaauguauuauucucuacg

SEQ ID NO: 2281618 - RNA, 19 nt, Artificial Sequence
  Description of Artificial Sequence: Synthetic oligonucleotide
  Sense strand starting at position 380 of SEQ ID NO: 1884653
auuuaagguuaagaucaga

SEQ ID NO: 2281619 - RNA, 19 nt, Artificial Sequence
  Description of Artificial Sequence: Synthetic oligonucleotide
  Antisense strand to SEQ ID NO: 2281618
ucugaucuuaaccuuaaau

SEQ ID NO: 2281620 - RNA, 19 nt, Artificial Sequence
  Description of Artificial Sequence: Synthetic oligonucleotide
  Sense strand starting at position 385 of SEQ ID NO: 1884653
agguuaagaucagaaauuu

SEQ ID NO: 2281621 - RNA, 19 nt, Artificial Sequence
  Description of Artificial Sequence: Synthetic oligonucleotide
  Antisense strand to SEQ ID NO: 2281620
aaauuucugaucuuaaccu

SEQ ID NO: 2281622 - RNA, 19 nt, Artificial Sequence
  Description of Artificial Sequence: Synthetic oligonucleotide
  Sense strand starting at position 560 of SEQ ID NO: 1884653
agacuccguuccuuugaga

SEQ ID NO: 2281623 - RNA, 19 nt, Artificial Sequence
  Description of Artificial Sequence: Synthetic oligonucleotide
  Antisense strand to SEQ ID NO: 2281622
ucucaaaggaacggagucu

SEQ ID NO: 2281624 - RNA, 19 nt, Artificial Sequence
  Description of Artificial Sequence: Synthetic oligonucleotide
  Sense strand starting at position 822 of SEQ ID NO: 1884653
uuuguuauacuucgaucaa

SEQ ID NO: 2281625 - RNA, 19 nt, Artificial Sequence
  Description of Artificial Sequence: Synthetic oligonucleotide
  Antisense strand to SEQ ID NO: 2281624
uugaucgaaguauaacaaa

SEQ ID NO: 2281626 - RNA, 19 nt, Artificial Sequence
  Description of Artificial Sequence: Synthetic oligonucleotide
  Sense strand starting at position 826 of SEQ ID NO: 1884653
uuauacuucgaucaauagu

SEQ ID NO: 2281627 - RNA, 19 nt, Artificial Sequence
  Description of Artificial Sequence: Synthetic oligonucleotide
  Antisense strand to SEQ ID NO: 2281626
acuauugaucgaaguauaa

SEQ ID NO: 2281628 - RNA, 19 nt, Artificial Sequence
  Description of Artificial Sequence: Synthetic oligonucleotide
  Sense strand starting at position 837 of SEQ ID NO: 1884653
ucaauaguagcccacagaa

SEQ ID NO: 2281629 - RNA, 19 nt, Artificial Sequence
  Description of Artificial Sequence: Synthetic oligonucleotide
  Antisense strand to SEQ ID NO: 2281628
uucugugggcuacuauuga

SEQ ID NO: 2281630 - RNA, 19 nt, Artificial Sequence
  Description of Artificial Sequence: Synthetic oligonucleotide
  Sense strand starting at position 870 of SEQ ID NO: 1884653
acauguugauagcuuagca

SEQ ID NO: 2281631 - RNA, 19 nt, Artificial Sequence
  Description of Artificial Sequence: Synthetic oligonucleotide
  Antisense strand to SEQ ID NO: 2281630
ugcuaagcuaucaacaugu

SEQ ID NO: 2281632 - RNA, 19 nt, Artificial Sequence
  Description of Artificial Sequence: Synthetic oligonucleotide
  Sense strand starting at position 880 of SEQ ID NO: 1884653
agcuuagcaugacucuauu

SEQ ID NO: 2281633 - RNA, 19 nt, Artificial Sequence
  Description of Artificial Sequence: Synthetic oligonucleotide
  Antisense strand to SEQ ID NO: 2281632
aauagagucaugcuaagcu

SEQ ID NO: 2281634 - RNA, 19 nt, Artificial Sequence
  Description of Artificial Sequence: Synthetic oligonucleotide
  Sense strand starting at position 1198 of SEQ ID NO: 1884653
ucaugaaugcuugauuaug

SEQ ID NO: 2281635 - RNA, 19 nt, Artificial Sequence
  Description of Artificial Sequence: Synthetic oligonucleotide
  Antisense strand to SEQ ID NO: 2281634
cauaaucaagcauucauga

SEQ ID NO: 2281636 - RNA, 19 nt, Artificial Sequence
  Description of Artificial Sequence: Synthetic oligonucleotide
  Sense strand starting at position 1204 of SEQ ID NO: 1884653
augcuugauuaugucaaca

SEQ ID NO: 2281637 - RNA, 19 nt, Artificial Sequence
  Description of Artificial Sequence: Synthetic oligonucleotide
  Antisense strand to SEQ ID NO: 2281636
uguugacauaaucaagcau

SEQ ID NO: 2281638 - RNA, 19 nt, Artificial Sequence
  Description of Artificial Sequence: Synthetic oligonucleotide
  Sense strand starting at position 1209 of SEQ ID NO: 1884653
ugauuaugucaacaccugu

SEQ ID NO: 2281639 - RNA, 19 nt, Artificial Sequence
  Description of Artificial Sequence: Synthetic oligonucleotide
  Antisense strand to SEQ ID NO: 2281638
acagguguugacauaauca

SEQ ID NO: 2281640 - RNA, 19 nt, Artificial Sequence
  Description of Artificial Sequence: Synthetic oligonucleotide
  Sense strand starting at position 1216 of SEQ ID NO: 1884653
gucaacaccugucugcaaa

SEQ ID NO: 2281641 - RNA, 19 nt, Artificial Sequence
  Description of Artificial Sequence: Synthetic oligonucleotide
  Antisense strand to SEQ ID NO: 2281640
uuugcagacagguguugac

SEQ ID NO: 2281642 - RNA, 19 nt, Artificial Sequence
  Description of Artificial Sequence: Synthetic oligonucleotide
  Sense strand starting at position 1563 of SEQ ID NO: 1884653
ucaguagucgaggguaauu

SEQ ID NO: 2281643 - RNA, 19 nt, Artificial Sequence
  Description of Artificial Sequence: Synthetic oligonucleotide
  Antisense strand to SEQ ID NO: 2281642
aauuacccucgacuacuga

SEQ ID NO: 2281644 - RNA, 19 nt, Artificial Sequence
  Description of Artificial Sequence: Synthetic oligonucleotide
  Sense strand starting at position 1572 of SEQ ID NO: 1884653
gaggguaauucguccuccu

SEQ ID NO: 2281645 - RNA, 19 nt, Artificial Sequence
  Description of Artificial Sequence: Synthetic oligonucleotide
  Antisense strand to SEQ ID NO: 2281644
aggaggacgaauuacccuc

SEQ ID NO: 2281646 - RNA, 19 nt, Artificial Sequence
  Description of Artificial Sequence: Synthetic oligonucleotide
  Sense strand starting at position 2210 of SEQ ID NO: 1884653
ggagcugcgggauaguauu

SEQ ID NO: 2281647 - RNA, 19 nt, Artificial Sequence
  Description of Artificial Sequence: Synthetic oligonucleotide
  Antisense strand to SEQ ID NO: 2281646
aauacuaucccgcagcucc

SEQ ID NO: 2281648 - RNA, 19 nt, Artificial Sequence
  Description of Artificial Sequence: Synthetic oligonucleotide
  Sense strand starting at position 2284 of SEQ ID NO: 1884653
guagaaaugucuuugggcu

SEQ ID NO: 2281649 - RNA, 19 nt, Artificial Sequence
  Description of Artificial Sequence: Synthetic oligonucleotide
  Antisense strand to SEQ ID NO: 2281648
agcccaaagacauuucuac

SEQ ID NO: 2281650 - RNA, 19 nt, Artificial Sequence
  Description of Artificial Sequence: Synthetic oligonucleotide
  Sense strand starting at position 2285 of SEQ ID NO: 1884653
uagaaaugucuuugggcuu

SEQ ID NO: 2281651 - RNA, 19 nt, Artificial Sequence
  Description of Artificial Sequence: Synthetic oligonucleotide
  Antisense strand to SEQ ID NO: 2281650
aagcccaaagacauuucua

SEQ ID NO: 2281652 - RNA, 19 nt, Artificial Sequence
  Description of Artificial Sequence: Synthetic oligonucleotide
  Sense strand starting at position 2296 of SEQ ID NO: 1884653
uugggcuuccauuauggaa

SEQ ID NO: 2281653 - RNA, 19 nt, Artificial Sequence
  Description of Artificial Sequence: Synthetic oligonucleotide
  Antisense strand to SEQ ID NO: 2281652
uuccauaauggaagcccaa

SEQ ID NO: 2281654 - RNA, 19 nt, Artificial Sequence
  Description of Artificial Sequence: Synthetic oligonucleotide
  Sense strand starting at position 2452 of SEQ ID NO: 1884653
guaauaucuccucaccgag

SEQ ID NO: 2281655 - RNA, 19 nt, Artificial Sequence
  Description of Artificial Sequence: Synthetic oligonucleotide
  Antisense strand to SEQ ID NO: 2281654
cucggugaggagauauuac

SEQ ID NO: 2281656 - RNA, 19 nt, Artificial Sequence
  Description of Artificial Sequence: Synthetic oligonucleotide
  Sense strand starting at position 2502 of SEQ ID NO: 1884653
gguggagaaagaugcuaua

SEQ ID NO: 2281657 - RNA, 19 nt, Artificial Sequence
  Description of Artificial Sequence: Synthetic oligonucleotide
  Antisense strand to SEQ ID NO: 2281656
uauagcaucuuucuccacc

SEQ ID NO: 2281658 - RNA, 19 nt, Artificial Sequence
  Description of Artificial Sequence: Synthetic oligonucleotide
  Sense strand starting at position 2644 of SEQ ID NO: 1884653
cuccgaauagacugucaga

SEQ ID NO: 2281659 - RNA, 19 nt, Artificial Sequence
  Description of Artificial Sequence: Synthetic oligonucleotide
  Antisense strand to SEQ ID NO: 2281658
ucugacagucuauucggag

SEQ ID NO: 2281660 - RNA, 19 nt, Artificial Sequence
  Description of Artificial Sequence: Synthetic oligonucleotide
  Sense strand starting at position 2657 of SEQ ID NO: 1884653
gucagauagagacgacaua

SEQ ID NO: 2281661 - RNA, 19 nt, Artificial Sequence
  Description of Artificial Sequence: Synthetic oligonucleotide
  Antisense strand to SEQ ID NO: 2281660
uaugucgucucuaucugac

SEQ ID NO: 2281662 - RNA, 19 nt, Artificial Sequence
  Description of Artificial Sequence: Synthetic oligonucleotide
  Sense strand starting at position 2730 of SEQ ID NO: 1884653
aaauguuggcugugauuau

SEQ ID NO: 2281663 - RNA, 19 nt, Artificial Sequence
  Description of Artificial Sequence: Synthetic oligonucleotide
  Antisense strand to SEQ ID NO: 2281662
auaaucacagccaacauuu

SEQ ID NO: 2281664 - RNA, 19 nt, Artificial Sequence
  Description of Artificial Sequence: Synthetic oligonucleotide
  Sense strand starting at position 3104 of SEQ ID NO: 1884653
uggaaaggugcauagucuu

SEQ ID NO: 2281665 - RNA, 19 nt, Artificial Sequence
  Description of Artificial Sequence: Synthetic oligonucleotide
  Antisense strand to SEQ ID NO: 2281664
aagacuaugcaccuuucca

SEQ ID NO: 2281666 - RNA, 19 nt, Artificial Sequence
  Description of Artificial Sequence: Synthetic oligonucleotide
  Sense strand starting at position 3112 of SEQ ID NO: 1884653
ugcauagucuuuguuaaag

SEQ ID NO: 2281667 - RNA, 19 nt, Artificial Sequence
  Description of Artificial Sequence: Synthetic oligonucleotide
  Antisense strand to SEQ ID NO: 2281666
cuuuaacaaagacuaugca

SEQ ID NO: 2281668 - RNA, 19 nt, Artificial Sequence
  Description of Artificial Sequence: Synthetic oligonucleotide
  Sense strand starting at position 3405 of SEQ ID NO: 1884653
agagcaaaucuccgucaaa

SEQ ID NO: 2281669 - RNA, 19 nt, Artificial Sequence
  Description of Artificial Sequence: Synthetic oligonucleotide
  Antisense strand to SEQ ID NO: 2281668
uuugacggagauuugcucu

SEQ ID NO: 2281670 - RNA, 19 nt, Artificial Sequence
  Description of Artificial Sequence: Synthetic oligonucleotide
  Sense strand starting at position 3406 of SEQ ID NO: 1884653
gagcaaaucuccgucaaau

SEQ ID NO: 2281671 - RNA, 19 nt, Artificial Sequence
  Description of Artificial Sequence: Synthetic oligonucleotide
  Antisense strand to SEQ ID NO: 2281670
auuugacggagauuugcuc

SEQ ID NO: 2281672 - RNA, 19 nt, Artificial Sequence
  Description of Artificial Sequence: Synthetic oligonucleotide
  Sense strand starting at position 3408 of SEQ ID NO: 1884653
gcaaaucuccgucaaauaa

SEQ ID NO: 2281673 - RNA, 19 nt, Artificial Sequence
  Description of Artificial Sequence: Synthetic oligonucleotide
  Antisense strand to SEQ ID NO: 2281672
uuauuugacggagauuugc

SEQ ID NO: 2281674 - RNA, 19 nt, Artificial Sequence
  Description of Artificial Sequence: Synthetic oligonucleotide
  Sense strand starting at position 3600 of SEQ ID NO: 1884653
cgaucugaccaguggaaau

SEQ ID NO: 2281675 - RNA, 19 nt, Artificial Sequence
  Description of Artificial Sequence: Synthetic oligonucleotide
  Antisense strand to SEQ ID NO: 2281674
auuuccacuggucagaucg

SEQ ID NO: 2281676 - RNA, 19 nt, Artificial Sequence
  Description of Artificial Sequence: Synthetic oligonucleotide
  Sense strand starting at position 3623 of SEQ ID NO: 1884653
uagaacaagcuguguacua

SEQ ID NO: 2281677 - RNA, 19 nt, Artificial Sequence
  Description of Artificial Sequence: Synthetic oligonucleotide
  Antisense strand to SEQ ID NO: 2281676
uaguacacagcuuguucua

SEQ ID NO: 2281678 - RNA, 19 nt, Artificial Sequence
  Description of Artificial Sequence: Synthetic oligonucleotide
  Sense strand starting at position 3625 of SEQ ID NO: 1884653
gaacaagcuguguacuaca

SEQ ID NO: 2281679 - RNA, 19 nt, Artificial Sequence
  Description of Artificial Sequence: Synthetic oligonucleotide
  Antisense strand to SEQ ID NO: 2281678
uguaguacacagcuuguuc

SEQ ID NO: 2281680 - RNA, 19 nt, Artificial Sequence
  Description of Artificial Sequence: Synthetic oligonucleotide
  Sense strand starting at position 3801 of SEQ ID NO: 1884653
agcaaacugucucuuggau

SEQ ID NO: 2281681 - RNA, 19 nt, Artificial Sequence
  Description of Artificial Sequence: Synthetic oligonucleotide
  Antisense strand to SEQ ID NO: 2281680
auccaagagacaguuugcu

SEQ ID NO: 2281682 - RNA, 19 nt, Artificial Sequence
  Description of Artificial Sequence: Synthetic oligonucleotide
  Sense strand starting at position 3807 of SEQ ID NO: 1884653
cugucucuuggauggcaaa

SEQ ID NO: 2281683 - RNA, 19 nt, Artificial Sequence
  Description of Artificial Sequence: Synthetic oligonucleotide
  Antisense strand to SEQ ID NO: 2281682
uuugccauccaagagacag

SEQ ID NO: 2281684 - RNA, 19 nt, Artificial Sequence
  Description of Artificial Sequence: Synthetic oligonucleotide
  Sense strand starting at position 3870 of SEQ ID NO: 1884653
uucugauacgugcauaugu

SEQ ID NO: 2281685 - RNA, 19 nt, Artificial Sequence
  Description of Artificial Sequence: Synthetic oligonucleotide
  Antisense strand to SEQ ID NO: 2281684
acauaugcacguaucagaa

SEQ ID NO: 2281686 - RNA, 19 nt, Artificial Sequence
  Description of Artificial Sequence: Synthetic oligonucleotide
  Sense strand starting at position 3872 of SEQ ID NO: 1884653
cugauacgugcauauguuu

SEQ ID NO: 2281687 - RNA, 19 nt, Artificial Sequence
  Description of Artificial Sequence: Synthetic oligonucleotide
  Antisense strand to SEQ ID NO: 2281686
aaacauaugcacguaucag

SEQ ID NO: 2281688 - RNA, 19 nt, Artificial Sequence
  Description of Artificial Sequence: Synthetic oligonucleotide
  Sense strand starting at position 137 of SEQ ID NO: 1884654
uugagaguuuaugacauuu

SEQ ID NO: 2281689 - RNA, 19 nt, Artificial Sequence
  Description of Artificial Sequence: Synthetic oligonucleotide
  Antisense strand to SEQ ID NO: 2281688
aaaugucauaaacucucaa

SEQ ID NO: 2281690 - RNA, 19 nt, Artificial Sequence
  Description of Artificial Sequence: Synthetic oligonucleotide
  Sense strand starting at position 173 of SEQ ID NO: 1884654
cugaguuacugacuuaaau

SEQ ID NO: 2281691 - RNA, 19 nt, Artificial Sequence
  Description of Artificial Sequence: Synthetic oligonucleotide
  Antisense strand to SEQ ID NO: 2281690
auuuaagucaguaacucag

SEQ ID NO: 2281692 - RNA, 19 nt, Artificial Sequence
  Description of Artificial Sequence: Synthetic oligonucleotide
  Sense strand starting at position 382 of SEQ ID NO: 1884654
aggguauggacccgggaau

SEQ ID NO: 2281693 - RNA, 19 nt, Artificial Sequence
  Description of Artificial Sequence: Synthetic oligonucleotide
  Antisense strand to SEQ ID NO: 2281692
auucccggguccauacccu

SEQ ID NO: 2281694 - RNA, 19 nt, Artificial Sequence
  Description of Artificial Sequence: Synthetic oligonucleotide
  Sense strand starting at position 494 of SEQ ID NO: 1884654
gaaagauauuuguaguuga

SEQ ID NO: 2281695 - RNA, 19 nt, Artificial Sequence
  Description of Artificial Sequence: Synthetic oligonucleotide
  Antisense strand to SEQ ID NO: 2281694
ucaacuacaaauaucuuuc

SEQ ID NO: 2281696 - RNA, 19 nt, Artificial Sequence
  Description of Artificial Sequence: Synthetic oligonucleotide
  Sense strand starting at position 498 of SEQ ID NO: 1884654
gauauuuguaguugagugu

SEQ ID NO: 2281697 - RNA, 19 nt, Artificial Sequence
  Description of Artificial Sequence: Synthetic oligonucleotide
  Antisense strand to SEQ ID NO: 2281696
acacucaacuacaaauauc

SEQ ID NO: 2281698 - RNA, 19 nt, Artificial Sequence
  Description of Artificial Sequence: Synthetic oligonucleotide
  Sense strand starting at position 970 of SEQ ID NO: 1884654
ggguauauuucucuugcua

SEQ ID NO: 2281699 - RNA, 19 nt, Artificial Sequence
  Description of Artificial Sequence: Synthetic oligonucleotide
  Antisense strand to SEQ ID NO: 2281698
uagcaagagaaauauaccc

SEQ ID NO: 2281700 - RNA, 19 nt, Artificial Sequence
  Description of Artificial Sequence: Synthetic oligonucleotide
  Sense strand starting at position 992 of SEQ ID NO: 1884654
guuuccuggccauauauaa

SEQ ID NO: 2281701 - RNA, 19 nt, Artificial Sequence
  Description of Artificial Sequence: Synthetic oligonucleotide
  Antisense strand to SEQ ID NO: 2281700
uuauauauggccaggaaac

SEQ ID NO: 2281702 - RNA, 19 nt, Artificial Sequence
  Description of Artificial Sequence: Synthetic oligonucleotide
  Sense strand starting at position 1055 of SEQ ID NO: 1884654
ugggauaaguggagcuaga

SEQ ID NO: 2281703 - RNA, 19 nt, Artificial Sequence
  Description of Artificial Sequence: Synthetic oligonucleotide
  Antisense strand to SEQ ID NO: 2281702
ucuagcuccacuuauccca

SEQ ID NO: 2281704 - RNA, 19 nt, Artificial Sequence
  Description of Artificial Sequence: Synthetic oligonucleotide
  Sense strand starting at position 1103 of SEQ ID NO: 1884654
ugccauuucuuagauaaag

SEQ ID NO: 2281705 - RNA, 19 nt, Artificial Sequence
  Description of Artificial Sequence: Synthetic oligonucleotide
  Antisense strand to SEQ ID NO: 2281704
cuuuaucuaagaaauggca

SEQ ID NO: 2281706 - RNA, 19 nt, Artificial Sequence
  Description of Artificial Sequence: Synthetic oligonucleotide
  Sense strand starting at position 1166 of SEQ ID NO: 1884654
agcagaguaccuugauuaa

SEQ ID NO: 2281707 - RNA, 19 nt, Artificial Sequence
  Description of Artificial Sequence: Synthetic oligonucleotide
  Antisense strand to SEQ ID NO: 2281706
uuaaucaagguacucugcu

SEQ ID NO: 2281708 - RNA, 19 nt, Artificial Sequence
  Description of Artificial Sequence: Synthetic oligonucleotide
  Sense strand starting at position 1202 of SEQ ID NO: 1884654
caagacugccuggguuaau

SEQ ID NO: 2281709 - RNA, 19 nt, Artificial Sequence
  Description of Artificial Sequence: Synthetic oligonucleotide
  Antisense strand to SEQ ID NO: 2281708
auuaacccaggcagucuug

SEQ ID NO: 2281710 - RNA, 19 nt, Artificial Sequence
  Description of Artificial Sequence: Synthetic oligonucleotide
  Sense strand starting at position 1232 of SEQ ID NO: 1884654
uuggaacuucuuuacguau

SEQ ID NO: 2281711 - RNA, 19 nt, Artificial Sequence
  Description of Artificial Sequence: Synthetic oligonucleotide
  Antisense strand to SEQ ID NO: 2281710
auacguaaagaaguuccaa

SEQ ID NO: 2281712 - RNA, 19 nt, Artificial Sequence
  Description of Artificial Sequence: Synthetic oligonucleotide
  Sense strand starting at position 1309 of SEQ ID NO: 1884654
guguguuagcuucucuguu

SEQ ID NO: 2281713 - RNA, 19 nt, Artificial Sequence
  Description of Artificial Sequence: Synthetic oligonucleotide
  Antisense strand to SEQ ID NO: 2281712
aacagagaagcuaacacac

SEQ ID NO: 2281714 - RNA, 19 nt, Artificial Sequence
  Description of Artificial Sequence: Synthetic oligonucleotide
  Sense strand starting at position 1569 of SEQ ID NO: 1884654
accgguauuaugggaacau

SEQ ID NO: 2281715 - RNA, 19 nt, Artificial Sequence
  Description of Artificial Sequence: Synthetic oligonucleotide
  Antisense strand to SEQ ID NO: 2281714
auguucccauaauaccggu

SEQ ID NO: 2281716 - RNA, 19 nt, Artificial Sequence
  Description of Artificial Sequence: Synthetic oligonucleotide
  Sense strand starting at position 1658 of SEQ ID NO: 1884654
gcuggaggauccucauaga

SEQ ID NO: 2281717 - RNA, 19 nt, Artificial Sequence
  Description of Artificial Sequence: Synthetic oligonucleotide
  Antisense strand to SEQ ID NO: 2281716
ucuaugaggauccuccagc

SEQ ID NO: 2281718 - RNA, 19 nt, Artificial Sequence
  Description of Artificial Sequence: Synthetic oligonucleotide
  Sense strand starting at position 1669 of SEQ ID NO: 1884654
cucauagaagagugucaaa

SEQ ID NO: 2281719 - RNA, 19 nt, Artificial Sequence
  Description of Artificial Sequence: Synthetic oligonucleotide
  Antisense strand to SEQ ID NO: 2281718
uuugacacucuucuaugag

SEQ ID NO: 2281720 - RNA, 19 nt, Artificial Sequence
  Description of Artificial Sequence: Synthetic oligonucleotide
  Sense strand starting at position 1681 of SEQ ID NO: 1884654
ugucaaagcuguccagaaa

SEQ ID NO: 2281721 - RNA, 19 nt, Artificial Sequence
  Description of Artificial Sequence: Synthetic oligonucleotide
  Antisense strand to SEQ ID NO: 2281720
uuucuggacagcuuugaca

SEQ ID NO: 2281722 - RNA, 19 nt, Artificial Sequence
  Description of Artificial Sequence: Synthetic oligonucleotide
  Sense strand starting at position 1864 of SEQ ID NO: 1884654
ugccuugaggaauguuaac

SEQ ID NO: 2281723 - RNA, 19 nt, Artificial Sequence
  Description of Artificial Sequence: Synthetic oligonucleotide
  Antisense strand to SEQ ID NO: 2281722
guuaacauuccucaaggca

SEQ ID NO: 2281724 - RNA, 19 nt, Artificial Sequence
  Description of Artificial Sequence: Synthetic oligonucleotide
  Sense strand starting at position 1870 of SEQ ID NO: 1884654
gaggaauguuaaccauccu

SEQ ID NO: 2281725 - RNA, 19 nt, Artificial Sequence
  Description of Artificial Sequence: Synthetic oligonucleotide
  Antisense strand to SEQ ID NO: 2281724
aggaugguuaacauuccuc

SEQ ID NO: 2281726 - RNA, 19 nt, Artificial Sequence
  Description of Artificial Sequence: Synthetic oligonucleotide
  Sense strand starting at position 2095 of SEQ ID NO: 1884654
gguguauguguauagauaa

SEQ ID NO: 2281727 - RNA, 19 nt, Artificial Sequence
  Description of Artificial Sequence: Synthetic oligonucleotide
  Antisense strand to SEQ ID NO: 2281726
uuaucuauacacauacacc

SEQ ID NO: 2281728 - RNA, 19 nt, Artificial Sequence
  Description of Artificial Sequence: Synthetic oligonucleotide
  Sense strand starting at position 2188 of SEQ ID NO: 1884654
agcagugacccaggauaaa

SEQ ID NO: 2281729 - RNA, 19 nt, Artificial Sequence
  Description of Artificial Sequence: Synthetic oligonucleotide
  Antisense strand to SEQ ID NO: 2281728
uuuauccugggucacugcu

SEQ ID NO: 2281730 - RNA, 19 nt, Artificial Sequence
  Description of Artificial Sequence: Synthetic oligonucleotide
  Sense strand starting at position 2221 of SEQ ID NO: 1884654
gucacaccauguuugagaa

SEQ ID NO: 2281731 - RNA, 19 nt, Artificial Sequence
  Description of Artificial Sequence: Synthetic oligonucleotide
  Antisense strand to SEQ ID NO: 2281730
uucucaaacauggugugac

SEQ ID NO: 2281732 - RNA, 19 nt, Artificial Sequence
  Description of Artificial Sequence: Synthetic oligonucleotide
  Sense strand starting at position 2222 of SEQ ID NO: 1884654
ucacaccauguuugagaau

SEQ ID NO: 2281733 - RNA, 19 nt, Artificial Sequence
  Description of Artificial Sequence: Synthetic oligonucleotide
  Antisense strand to SEQ ID NO: 2281732
auucucaaacaugguguga

SEQ ID NO: 2281734 - RNA, 19 nt, Artificial Sequence
  Description of Artificial Sequence: Synthetic oligonucleotide
  Sense strand starting at position 2590 of SEQ ID NO: 1884654
gcaugugauguccagaccu

SEQ ID NO: 2281735 - RNA, 19 nt, Artificial Sequence
  Description of Artificial Sequence: Synthetic oligonucleotide
  Antisense strand to SEQ ID NO: 2281734
aggucuggacaucacaugc

SEQ ID NO: 2281736 - RNA, 19 nt, Artificial Sequence
  Description of Artificial Sequence: Synthetic oligonucleotide
  Sense strand starting at position 2631 of SEQ ID NO: 1884654
gcagaaauugagggccaau

SEQ ID NO: 2281737 - RNA, 19 nt, Artificial Sequence
  Description of Artificial Sequence: Synthetic oligonucleotide
  Antisense strand to SEQ ID NO: 2281736
auuggcccucaauuucugc

SEQ ID NO: 2281738 - RNA, 19 nt, Artificial Sequence
  Description of Artificial Sequence: Synthetic oligonucleotide
  Sense strand starting at position 2739 of SEQ ID NO: 1884654
uuugauagaaguugauaug

SEQ ID NO: 2281739 - RNA, 19 nt, Artificial Sequence
  Description of Artificial Sequence: Synthetic oligonucleotide
  Antisense strand to SEQ ID NO: 2281738
cauaucaacuucuaucaaa

SEQ ID NO: 2281740 - RNA, 19 nt, Artificial Sequence
  Description of Artificial Sequence: Synthetic oligonucleotide
  Sense strand starting at position 2843 of SEQ ID NO: 1884654
caggaaggcuguuucucau

SEQ ID NO: 2281741 - RNA, 19 nt, Artificial Sequence
  Description of Artificial Sequence: Synthetic oligonucleotide
  Antisense strand to SEQ ID NO: 2281740
augagaaacagccuuccug

SEQ ID NO: 2281742 - RNA, 19 nt, Artificial Sequence
  Description of Artificial Sequence: Synthetic oligonucleotide
  Sense strand starting at position 2846 of SEQ ID NO: 1884654
gaaggcuguuucucaugaa

SEQ ID NO: 2281743 - RNA, 19 nt, Artificial Sequence
  Description of Artificial Sequence: Synthetic oligonucleotide
  Antisense strand to SEQ ID NO: 2281742
uucaugagaaacagccuuc

SEQ ID NO: 2281744 - RNA, 19 nt, Artificial Sequence
  Description of Artificial Sequence: Synthetic oligonucleotide
  Sense strand starting at position 2850 of SEQ ID NO: 1884654
gcuguuucucaugaaaggu

SEQ ID NO: 2281745 - RNA, 19 nt, Artificial Sequence
  Description of Artificial Sequence: Synthetic oligonucleotide
  Antisense strand to SEQ ID NO: 2281744
accuuucaugagaaacagc

SEQ ID NO: 2281746 - RNA, 19 nt, Artificial Sequence
  Description of Artificial Sequence: Synthetic oligonucleotide
  Sense strand starting at position 2886 of SEQ ID NO: 1884654
gguacugucgucgugauag

SEQ ID NO: 2281747 - RNA, 19 nt, Artificial Sequence
  Description of Artificial Sequence: Synthetic oligonucleotide
  Antisense strand to SEQ ID NO: 2281746
cuaucacgacgacaguacc

SEQ ID NO: 2281748 - RNA, 19 nt, Artificial Sequence
  Description of Artificial Sequence: Synthetic oligonucleotide
  Sense strand starting at position 3008 of SEQ ID NO: 1884654
cugccuuugccauauugaa

SEQ ID NO: 2281749 - RNA, 19 nt, Artificial Sequence
  Description of Artificial Sequence: Synthetic oligonucleotide
  Antisense strand to SEQ ID NO: 2281748
uucaauauggcaaaggcag

SEQ ID NO: 2281750 - RNA, 19 nt, Artificial Sequence
  Description of Artificial Sequence: Synthetic oligonucleotide
  Sense strand starting at position 3201 of SEQ ID NO: 1884654
cuggcucaugcuuauaaua

SEQ ID NO: 2281751 - RNA, 19 nt, Artificial Sequence
  Description of Artificial Sequence: Synthetic oligonucleotide
  Antisense strand to SEQ ID NO: 2281750
uauuauaagcaugagccag

SEQ ID NO: 2281752 - RNA, 19 nt, Artificial Sequence
  Description of Artificial Sequence: Synthetic oligonucleotide
  Sense strand starting at position 3423 of SEQ ID NO: 1884654
uauggugagccauaaucac

SEQ ID NO: 2281753 - RNA, 19 nt, Artificial Sequence
  Description of Artificial Sequence: Synthetic oligonucleotide
  Antisense strand to SEQ ID NO: 2281752
gugauuauggcucaccaua

SEQ ID NO: 2281754 - RNA, 19 nt, Artificial Sequence
  Description of Artificial Sequence: Synthetic oligonucleotide
  Sense strand starting at position 3498 of SEQ ID NO: 1884654
caagaaagcgaguaugauu

SEQ ID NO: 2281755 - RNA, 19 nt, Artificial Sequence
  Description of Artificial Sequence: Synthetic oligonucleotide
  Antisense strand to SEQ ID NO: 2281754
aaucauacucgcuuucuug

SEQ ID NO: 2281756 - RNA, 19 nt, Artificial Sequence
  Description of Artificial Sequence: Synthetic oligonucleotide
  Sense strand starting at position 3507 of SEQ ID NO: 1884654
gaguaugauuucuagauac

SEQ ID NO: 2281757 - RNA, 19 nt, Artificial Sequence
  Description of Artificial Sequence: Synthetic oligonucleotide
  Antisense strand to SEQ ID NO: 2281756
guaucuagaaaucauacuc

SEQ ID NO: 2281758 - RNA, 19 nt, Artificial Sequence
  Description of Artificial Sequence: Synthetic oligonucleotide
  Sense strand starting at position 3772 of SEQ ID NO: 1884654
gcugguuugcaugagauca

SEQ ID NO: 2281759 - RNA, 19 nt, Artificial Sequence
  Description of Artificial Sequence: Synthetic oligonucleotide
  Antisense strand to SEQ ID NO: 2281758
ugaucucaugcaaaccagc

SEQ ID NO: 2281760 - RNA, 19 nt, Artificial Sequence
  Description of Artificial Sequence: Synthetic oligonucleotide
  Sense strand starting at position 3834 of SEQ ID NO: 1884654
cuacaauggccuggauuga

SEQ ID NO: 2281761 - RNA, 19 nt, Artificial Sequence
  Description of Artificial Sequence: Synthetic oligonucleotide
  Antisense strand to SEQ ID NO: 2281760
ucaauccaggccauuguag

SEQ ID NO: 2281762 - RNA, 19 nt, Artificial Sequence
  Description of Artificial Sequence: Synthetic oligonucleotide
  Sense strand starting at position 3868 of SEQ ID NO: 1884654
guagcacuacucugauaac

SEQ ID NO: 2281763 - RNA, 19 nt, Artificial Sequence
  Description of Artificial Sequence: Synthetic oligonucleotide
  Antisense strand to SEQ ID NO: 2281762
guuaucagaguagugcuac

SEQ ID NO: 2281764 - RNA, 19 nt, Artificial Sequence
  Description of Artificial Sequence: Synthetic oligonucleotide
  Sense strand starting at position 3877 of SEQ ID NO: 1884654
cucugauaaccuuguguga

SEQ ID NO: 2281765 - RNA, 19 nt, Artificial Sequence
  Description of Artificial Sequence: Synthetic oligonucleotide
  Antisense strand to SEQ ID NO: 2281764
ucacacaagguuaucagag

SEQ ID NO: 2281766 - RNA, 19 nt, Artificial Sequence
  Description of Artificial Sequence: Synthetic oligonucleotide
  Sense strand starting at position 3899 of SEQ ID NO: 1884654
ggcugauugagaggcccaa

SEQ ID NO: 2281767 - RNA, 19 nt, Artificial Sequence
  Description of Artificial Sequence: Synthetic oligonucleotide
  Antisense strand to SEQ ID NO: 2281766
uugggccucucaaucagcc

SEQ ID NO: 2281768 - RNA, 19 nt, Artificial Sequence
  Description of Artificial Sequence: Synthetic oligonucleotide
  Sense strand starting at position 22 of SEQ ID NO: 1884655
gaggauauauuuggagcaa

SEQ ID NO: 2281769 - RNA, 19 nt, Artificial Sequence
  Description of Artificial Sequence: Synthetic oligonucleotide
  Antisense strand to SEQ ID NO: 2281768
uugcuccaaauauauccuc

SEQ ID NO: 2281770 - RNA, 19 nt, Artificial Sequence
  Description of Artificial Sequence: Synthetic oligonucleotide
  Sense strand starting at position 23 of SEQ ID NO: 1884655
aggauauauuuggagcaag

SEQ ID NO: 2281771 - RNA, 19 nt, Artificial Sequence
  Description of Artificial Sequence: Synthetic oligonucleotide
  Antisense strand to SEQ ID NO: 2281770
cuugcuccaaauauauccu

SEQ ID NO: 2281772 - RNA, 19 nt, Artificial Sequence
  Description of Artificial Sequence: Synthetic oligonucleotide
  Sense strand starting at position 191 of SEQ ID NO: 1884655
uauugaucugcugguauga

SEQ ID NO: 2281773 - RNA, 19 nt, Artificial Sequence
  Description of Artificial Sequence: Synthetic oligonucleotide
  Antisense strand to SEQ ID NO: 2281772
ucauaccagcagaucaaua

SEQ ID NO: 2281774 - RNA, 19 nt, Artificial Sequence
  Description of Artificial Sequence: Synthetic oligonucleotide
  Sense strand starting at position 235 of SEQ ID NO: 1884655
gugggcacauaucuguaua

SEQ ID NO: 2281775 - RNA, 19 nt, Artificial Sequence
  Description of Artificial Sequence: Synthetic oligonucleotide
  Antisense strand to SEQ ID NO: 2281774
uauacagauaugugcccac

SEQ ID NO: 2281776 - RNA, 19 nt, Artificial Sequence
  Description of Artificial Sequence: Synthetic oligonucleotide
  Sense strand starting at position 238 of SEQ ID NO: 1884655
ggcacauaucuguauaugu

SEQ ID NO: 2281777 - RNA, 19 nt, Artificial Sequence
  Description of Artificial Sequence: Synthetic oligonucleotide
  Antisense strand to SEQ ID NO: 2281776
acauauacagauaugugcc

SEQ ID NO: 2281778 - RNA, 19 nt, Artificial Sequence
  Description of Artificial Sequence: Synthetic oligonucleotide
  Sense strand starting at position 265 of SEQ ID NO: 1884655
ggguaucucuaagcaagga

SEQ ID NO: 2281779 - RNA, 19 nt, Artificial Sequence
  Description of Artificial Sequence: Synthetic oligonucleotide
  Antisense strand to SEQ ID NO: 2281778
uccuugcuuagagauaccc

SEQ ID NO: 2281780 - RNA, 19 nt, Artificial Sequence
  Description of Artificial Sequence: Synthetic oligonucleotide
  Sense strand starting at position 266 of SEQ ID NO: 1884655
gguaucucuaagcaaggau

SEQ ID NO: 2281781 - RNA, 19 nt, Artificial Sequence
  Description of Artificial Sequence: Synthetic oligonucleotide
  Antisense strand to SEQ ID NO: 2281780
auccuugcuuagagauacc

SEQ ID NO: 2281782 - RNA, 19 nt, Artificial Sequence
  Description of Artificial Sequence: Synthetic oligonucleotide
  Sense strand starting at position 401 of SEQ ID NO: 1884655
ugaggagguagcuaugacu

SEQ ID NO: 2281783 - RNA, 19 nt, Artificial Sequence
  Description of Artificial Sequence: Synthetic oligonucleotide
  Antisense strand to SEQ ID NO: 2281782
agucauagcuaccuccuca

SEQ ID NO: 2281784 - RNA, 19 nt, Artificial Sequence
  Description of Artificial Sequence: Synthetic oligonucleotide
  Sense strand starting at position 439 of SEQ ID NO: 1884655
uggguaucuguguggauau

SEQ ID NO: 2281785 - RNA, 19 nt, Artificial Sequence
  Description of Artificial Sequence: Synthetic oligonucleotide
  Antisense strand to SEQ ID NO: 2281784
auauccacacagauaccca

SEQ ID NO: 2281786 - RNA, 19 nt, Artificial Sequence
  Description of Artificial Sequence: Synthetic oligonucleotide
  Sense strand starting at position 441 of SEQ ID NO: 1884655
gguaucuguguggauaugu

SEQ ID NO: 2281787 - RNA, 19 nt, Artificial Sequence
  Description of Artificial Sequence: Synthetic oligonucleotide
  Antisense strand to SEQ ID NO: 2281786
acauauccacacagauacc

SEQ ID NO: 2281788 - RNA, 19 nt, Artificial Sequence
  Description of Artificial Sequence: Synthetic oligonucleotide
  Sense strand starting at position 606 of SEQ ID NO: 1884655
gggcguaaauauucuauca

SEQ ID NO: 2281789 - RNA, 19 nt, Artificial Sequence
  Description of Artificial Sequence: Synthetic oligonucleotide
  Antisense strand to SEQ ID NO: 2281788
ugauagaauauuuacgccc

SEQ ID NO: 2281790 - RNA, 19 nt, Artificial Sequence
  Description of Artificial Sequence: Synthetic oligonucleotide
  Sense strand starting at position 623 of SEQ ID NO: 1884655
cagagugugcauggaauaa

SEQ ID NO: 2281791 - RNA, 19 nt, Artificial Sequence
  Description of Artificial Sequence: Synthetic oligonucleotide
  Antisense strand to SEQ ID NO: 2281790
uuauuccaugcacacucug

SEQ ID NO: 2281792 - RNA, 19 nt, Artificial Sequence
  Description of Artificial Sequence: Synthetic oligonucleotide
  Sense strand starting at position 667 of SEQ ID NO: 1884655
gcaggagagacucaguagu

SEQ ID NO: 2281793 - RNA, 19 nt, Artificial Sequence
  Description of Artificial Sequence: Synthetic oligonucleotide
  Antisense strand to SEQ ID NO: 2281792
acuacugagucucuccugc

SEQ ID NO: 2281794 - RNA, 19 nt, Artificial Sequence
  Description of Artificial Sequence: Synthetic oligonucleotide
  Sense strand starting at position 669 of SEQ ID NO: 1884655
aggagagacucaguagucu

SEQ ID NO: 2281795 - RNA, 19 nt, Artificial Sequence
  Description of Artificial Sequence: Synthetic oligonucleotide
  Antisense strand to SEQ ID NO: 2281794
agacuacugagucucuccu

SEQ ID NO: 2281796 - RNA, 19 nt, Artificial Sequence
  Description of Artificial Sequence: Synthetic oligonucleotide
  Sense strand starting at position 948 of SEQ ID NO: 1884655
ccgcgucuuccuccaacau

SEQ ID NO: 2281797 - RNA, 19 nt, Artificial Sequence
  Description of Artificial Sequence: Synthetic oligonucleotide
  Antisense strand to SEQ ID NO: 2281796
auguuggaggaagacgcgg

SEQ ID NO: 2281798 - RNA, 19 nt, Artificial Sequence
  Description of Artificial Sequence: Synthetic oligonucleotide
  Sense strand starting at position 1227 of SEQ ID NO: 1884655
ucuugagccuuaucgggaa

SEQ ID NO: 2281799 - RNA, 19 nt, Artificial Sequence
  Description of Artificial Sequence: Synthetic oligonucleotide
  Antisense strand to SEQ ID NO: 2281798
uucccgauaaggcucaaga

SEQ ID NO: 2281800 - RNA, 19 nt, Artificial Sequence
  Description of Artificial Sequence: Synthetic oligonucleotide
  Sense strand starting at position 2228 of SEQ ID NO: 1884655
cucgaaagcguaugcauuu

SEQ ID NO: 2281801 - RNA, 19 nt, Artificial Sequence
  Description of Artificial Sequence: Synthetic oligonucleotide
  Antisense strand to SEQ ID NO: 2281800
aaaugcauacgcuuucgag

SEQ ID NO: 2281802 - RNA, 19 nt, Artificial Sequence
  Description of Artificial Sequence: Synthetic oligonucleotide
  Sense strand starting at position 2385 of SEQ ID NO: 1884655
aaggcugugcacugaaauc

SEQ ID NO: 2281803 - RNA, 19 nt, Artificial Sequence
  Description of Artificial Sequence: Synthetic oligonucleotide
  Antisense strand to SEQ ID NO: 2281802
gauuucagugcacagccuu

SEQ ID NO: 2281804 - RNA, 19 nt, Artificial Sequence
  Description of Artificial Sequence: Synthetic oligonucleotide
  Sense strand starting at position 2464 of SEQ ID NO: 1884655
ugagauuauggcgaagcau

SEQ ID NO: 2281805 - RNA, 19 nt, Artificial Sequence
  Description of Artificial Sequence: Synthetic oligonucleotide
  Antisense strand to SEQ ID NO: 2281804
augcuucgccauaaucuca

SEQ ID NO: 2281806 - RNA, 19 nt, Artificial Sequence
  Description of Artificial Sequence: Synthetic oligonucleotide
  Sense strand starting at position 2517 of SEQ ID NO: 1884655
uuccacauuggguauguau

SEQ ID NO: 2281807 - RNA, 19 nt, Artificial Sequence
  Description of Artificial Sequence: Synthetic oligonucleotide
  Antisense strand to SEQ ID NO: 2281806
auacauacccaauguggaa

SEQ ID NO: 2281808 - RNA, 19 nt, Artificial Sequence
  Description of Artificial Sequence: Synthetic oligonucleotide
  Sense strand starting at position 2525 of SEQ ID NO: 1884655
uggguauguauuggugaua

SEQ ID NO: 2281809 - RNA, 19 nt, Artificial Sequence
  Description of Artificial Sequence: Synthetic oligonucleotide
  Antisense strand to SEQ ID NO: 2281808
uaucaccaauacauaccca

SEQ ID NO: 2281810 - RNA, 19 nt, Artificial Sequence
  Description of Artificial Sequence: Synthetic oligonucleotide
  Sense strand starting at position 2526 of SEQ ID NO: 1884655
ggguauguauuggugauaa

SEQ ID NO: 2281811 - RNA, 19 nt, Artificial Sequence
  Description of Artificial Sequence: Synthetic oligonucleotide
  Antisense strand to SEQ ID NO: 2281810
uuaucaccaauacauaccc

SEQ ID NO: 2281812 - RNA, 19 nt, Artificial Sequence
  Description of Artificial Sequence: Synthetic oligonucleotide
  Sense strand starting at position 2528 of SEQ ID NO: 1884655
guauguauuggugauaagg

SEQ ID NO: 2281813 - RNA, 19 nt, Artificial Sequence
  Description of Artificial Sequence: Synthetic oligonucleotide
  Antisense strand to SEQ ID NO: 2281812
ccuuaucaccaauacauac

SEQ ID NO: 2281814 - RNA, 19 nt, Artificial Sequence
  Description of Artificial Sequence: Synthetic oligonucleotide
  Sense strand starting at position 2609 of SEQ ID NO: 1884655
gacgaauuggccuaucaag

SEQ ID NO: 2281815 - RNA, 19 nt, Artificial Sequence
  Description of Artificial Sequence: Synthetic oligonucleotide
  Antisense strand to SEQ ID NO: 2281814
cuugauaggccaauucguc

SEQ ID NO: 2281816 - RNA, 19 nt, Artificial Sequence
  Description of Artificial Sequence: Synthetic oligonucleotide
  Sense strand starting at position 2634 of SEQ ID NO: 1884655
uccggaaguuaacuuucua

SEQ ID NO: 2281817 - RNA, 19 nt, Artificial Sequence
  Description of Artificial Sequence: Synthetic oligonucleotide
  Antisense strand to SEQ ID NO: 2281816
uagaaaguuaacuuccgga

SEQ ID NO: 2281818 - RNA, 19 nt, Artificial Sequence
  Description of Artificial Sequence: Synthetic oligonucleotide
  Sense strand starting at position 2747 of SEQ ID NO: 1884655
ucacaugugcugggauuaa

SEQ ID NO: 2281819 - RNA, 19 nt, Artificial Sequence
  Description of Artificial Sequence: Synthetic oligonucleotide
  Antisense strand to SEQ ID NO: 2281818
uuaaucccagcacauguga

SEQ ID NO: 2281820 - RNA, 19 nt, Artificial Sequence
  Description of Artificial Sequence: Synthetic oligonucleotide
  Sense strand starting at position 2758 of SEQ ID NO: 1884655
gggauuaacuuccuuuaag

SEQ ID NO: 2281821 - RNA, 19 nt, Artificial Sequence
  Description of Artificial Sequence: Synthetic oligonucleotide
  Antisense strand to SEQ ID NO: 2281820
cuuaaaggaaguuaauccc

SEQ ID NO: 2281822 - RNA, 19 nt, Artificial Sequence
  Description of Artificial Sequence: Synthetic oligonucleotide
  Sense strand starting at position 2852 of SEQ ID NO: 1884655
aguagagguggucagucau

SEQ ID NO: 2281823 - RNA, 19 nt, Artificial Sequence
  Description of Artificial Sequence: Synthetic oligonucleotide
  Antisense strand to SEQ ID NO: 2281822
augacugaccaccucuacu

SEQ ID NO: 2281824 - RNA, 19 nt, Artificial Sequence
  Description of Artificial Sequence: Synthetic oligonucleotide
  Sense strand starting at position 2879 of SEQ ID NO: 1884655
gguucaagcgcugauugga

SEQ ID NO: 2281825 - RNA, 19 nt, Artificial Sequence
  Description of Artificial Sequence: Synthetic oligonucleotide
  Antisense strand to SEQ ID NO: 2281824
uccaaucagcgcuugaacc

SEQ ID NO: 2281826 - RNA, 19 nt, Artificial Sequence
  Description of Artificial Sequence: Synthetic oligonucleotide
  Sense strand starting at position 2966 of SEQ ID NO: 1884655
gucagcauuuacuaagaac

SEQ ID NO: 2281827 - RNA, 19 nt, Artificial Sequence
  Description of Artificial Sequence: Synthetic oligonucleotide
  Antisense strand to SEQ ID NO: 2281826
guucuuaguaaaugcugac

SEQ ID NO: 2281828 - RNA, 19 nt, Artificial Sequence
  Description of Artificial Sequence: Synthetic oligonucleotide
  Sense strand starting at position 3038 of SEQ ID NO: 1884655
ggaguucugggcugacuuu

SEQ ID NO: 2281829 - RNA, 19 nt, Artificial Sequence
  Description of Artificial Sequence: Synthetic oligonucleotide
  Antisense strand to SEQ ID NO: 2281828
aaagucagcccagaacucc

SEQ ID NO: 2281830 - RNA, 19 nt, Artificial Sequence
  Description of Artificial Sequence: Synthetic oligonucleotide
  Sense strand starting at position 3058 of SEQ ID NO: 1884655
gggaaaguucaucagcggu

SEQ ID NO: 2281831 - RNA, 19 nt, Artificial Sequence
  Description of Artificial Sequence: Synthetic oligonucleotide
  Antisense strand to SEQ ID NO: 2281830
accgcugaugaacuuuccc

SEQ ID NO: 2281832 - RNA, 19 nt, Artificial Sequence
  Description of Artificial Sequence: Synthetic oligonucleotide
  Sense strand starting at position 3093 of SEQ ID NO: 1884655
ggcagaucagcaggaacau

SEQ ID NO: 2281833 - RNA, 19 nt, Artificial Sequence
  Description of Artificial Sequence: Synthetic oligonucleotide
  Antisense strand to SEQ ID NO: 2281832
auguuccugcugaucugcc

SEQ ID NO: 2281834 - RNA, 19 nt, Artificial Sequence
  Description of Artificial Sequence: Synthetic oligonucleotide
  Sense strand starting at position 3094 of SEQ ID NO: 1884655
gcagaucagcaggaacauu

SEQ ID NO: 2281835 - RNA, 19 nt, Artificial Sequence
  Description of Artificial Sequence: Synthetic oligonucleotide
  Antisense strand to SEQ ID NO: 2281834
aauguuccugcugaucugc

SEQ ID NO: 2281836 - RNA, 19 nt, Artificial Sequence
  Description of Artificial Sequence: Synthetic oligonucleotide
  Sense strand starting at position 3435 of SEQ ID NO: 1884655
uacagacuugccuguggaa

SEQ ID NO: 2281837 - RNA, 19 nt, Artificial Sequence
  Description of Artificial Sequence: Synthetic oligonucleotide
  Antisense strand to SEQ ID NO: 2281836
uuccacaggcaagucugua

SEQ ID NO: 2281838 - RNA, 19 nt, Artificial Sequence
  Description of Artificial Sequence: Synthetic oligonucleotide
  Sense strand starting at position 3437 of SEQ ID NO: 1884655
cagacuugccuguggaaau

SEQ ID NO: 2281839 - RNA, 19 nt, Artificial Sequence
  Description of Artificial Sequence: Synthetic oligonucleotide
  Antisense strand to SEQ ID NO: 2281838
auuuccacaggcaagucug

SEQ ID NO: 2281840 - RNA, 19 nt, Artificial Sequence
  Description of Artificial Sequence: Synthetic oligonucleotide
  Sense strand starting at position 3525 of SEQ ID NO: 1884655
ccugccagaucuucucaga

SEQ ID NO: 2281841 - RNA, 19 nt, Artificial Sequence
  Description of Artificial Sequence: Synthetic oligonucleotide
  Antisense strand to SEQ ID NO: 2281840
ucugagaagaucuggcagg

SEQ ID NO: 2281842 - RNA, 19 nt, Artificial Sequence
  Description of Artificial Sequence: Synthetic oligonucleotide
  Sense strand starting at position 3609 of SEQ ID NO: 1884655
ccacgugacuuucuaaaga

SEQ ID NO: 2281843 - RNA, 19 nt, Artificial Sequence
  Description of Artificial Sequence: Synthetic oligonucleotide
  Antisense strand to SEQ ID NO: 2281842
ucuuuagaaagucacgugg

SEQ ID NO: 2281844 - RNA, 19 nt, Artificial Sequence
  Description of Artificial Sequence: Synthetic oligonucleotide
  Sense strand starting at position 3677 of SEQ ID NO: 1884655
acacaucaccuguacagua

SEQ ID NO: 2281845 - RNA, 19 nt, Artificial Sequence
  Description of Artificial Sequence: Synthetic oligonucleotide
  Antisense strand to SEQ ID NO: 2281844
uacuguacaggugaugugu

SEQ ID NO: 2281846 - RNA, 19 nt, Artificial Sequence
  Description of Artificial Sequence: Synthetic oligonucleotide
  Sense strand starting at position 3745 of SEQ ID NO: 1884655
aggccuguuugacucugaa

SEQ ID NO: 2281847 - RNA, 19 nt, Artificial Sequence
  Description of Artificial Sequence: Synthetic oligonucleotide
  Antisense strand to SEQ ID NO: 2281846
uucagagucaaacaggccu

SEQ ID NO: 2281848 - RNA, 19 nt, Artificial Sequence
  Description of Artificial Sequence: Synthetic oligonucleotide
  Sense strand starting at position 32 of SEQ ID NO: 1884656
gugccucagugagucuaau

SEQ ID NO: 2281849 - RNA, 19 nt, Artificial Sequence
  Description of Artificial Sequence: Synthetic oligonucleotide
  Antisense strand to SEQ ID NO: 2281848
auuagacucacugaggcac

SEQ ID NO: 2281850 - RNA, 19 nt, Artificial Sequence
  Description of Artificial Sequence: Synthetic oligonucleotide
  Sense strand starting at position 38 of SEQ ID NO: 1884656
cagugagucuaauugguuc

SEQ ID NO: 2281851 - RNA, 19 nt, Artificial Sequence
  Description of Artificial Sequence: Synthetic oligonucleotide
  Antisense strand to SEQ ID NO: 2281850
gaaccaauuagacucacug

SEQ ID NO: 2281852 - RNA, 19 nt, Artificial Sequence
  Description of Artificial Sequence: Synthetic oligonucleotide
  Sense strand starting at position 40 of SEQ ID NO: 1884656
gugagucuaauugguucca

SEQ ID NO: 2281853 - RNA, 19 nt, Artificial Sequence
  Description of Artificial Sequence: Synthetic oligonucleotide
  Antisense strand to SEQ ID NO: 2281852
uggaaccaauuagacucac

SEQ ID NO: 2281854 - RNA, 19 nt, Artificial Sequence
  Description of Artificial Sequence: Synthetic oligonucleotide
  Sense strand starting at position 42 of SEQ ID NO: 1884656
gagucuaauugguuccaga

SEQ ID NO: 2281855 - RNA, 19 nt, Artificial Sequence
  Description of Artificial Sequence: Synthetic oligonucleotide
  Antisense strand to SEQ ID NO: 2281854
ucuggaaccaauuagacuc

SEQ ID NO: 2281856 - RNA, 19 nt, Artificial Sequence
  Description of Artificial Sequence: Synthetic oligonucleotide
  Sense strand starting at position 83 of SEQ ID NO: 1884656
ucaauauauucugugguaa

SEQ ID NO: 2281857 - RNA, 19 nt, Artificial Sequence
  Description of Artificial Sequence: Synthetic oligonucleotide
  Antisense strand to SEQ ID NO: 2281856
uuaccacagaauauauuga

SEQ ID NO: 2281858 - RNA, 19 nt, Artificial Sequence
  Description of Artificial Sequence: Synthetic oligonucleotide
  Sense strand starting at position 105 of SEQ ID NO: 1884656
gguguuguagcaggccaua

SEQ ID NO: 2281859 - RNA, 19 nt, Artificial Sequence
  Description of Artificial Sequence: Synthetic oligonucleotide
  Antisense strand to SEQ ID NO: 2281858
uauggccugcuacaacacc

SEQ ID NO: 2281860 - RNA, 19 nt, Artificial Sequence
  Description of Artificial Sequence: Synthetic oligonucleotide
  Sense strand starting at position 753 of SEQ ID NO: 1884656
uguaauugacagcgacacu

SEQ ID NO: 2281861 - RNA, 19 nt, Artificial Sequence
  Description of Artificial Sequence: Synthetic oligonucleotide
  Antisense strand to SEQ ID NO: 2281860
agugucgcugucaauuaca

SEQ ID NO: 2281862 - RNA, 19 nt, Artificial Sequence
  Description of Artificial Sequence: Synthetic oligonucleotide
  Sense strand starting at position 754 of SEQ ID NO: 1884656
guaauugacagcgacacua

SEQ ID NO: 2281863 - RNA, 19 nt, Artificial Sequence
  Description of Artificial Sequence: Synthetic oligonucleotide
  Antisense strand to SEQ ID NO: 2281862
uagugucgcugucaauuac

SEQ ID NO: 2281864 - RNA, 19 nt, Artificial Sequence
  Description of Artificial Sequence: Synthetic oligonucleotide
  Sense strand starting at position 812 of SEQ ID NO: 1884656
cuggguacuuccuuacaga

SEQ ID NO: 2281865 - RNA, 19 nt, Artificial Sequence
  Description of Artificial Sequence: Synthetic oligonucleotide
  Antisense strand to SEQ ID NO: 2281864
ucuguaaggaaguacccag

SEQ ID NO: 2281866 - RNA, 19 nt, Artificial Sequence
  Description of Artificial Sequence: Synthetic oligonucleotide
  Sense strand starting at position 813 of SEQ ID NO: 1884656
uggguacuuccuuacagac

SEQ ID NO: 2281867 - RNA, 19 nt, Artificial Sequence
  Description of Artificial Sequence: Synthetic oligonucleotide
  Antisense strand to SEQ ID NO: 2281866
gucuguaaggaaguaccca

SEQ ID NO: 2281868 - RNA, 19 nt, Artificial Sequence
  Description of Artificial Sequence: Synthetic oligonucleotide
  Sense strand starting at position 815 of SEQ ID NO: 1884656
gguacuuccuuacagacau

SEQ ID NO: 2281869 - RNA, 19 nt, Artificial Sequence
  Description of Artificial Sequence: Synthetic oligonucleotide
  Antisense strand to SEQ ID NO: 2281868
augucuguaaggaaguacc

SEQ ID NO: 2281870 - RNA, 19 nt, Artificial Sequence
  Description of Artificial Sequence: Synthetic oligonucleotide
  Sense strand starting at position 839 of SEQ ID NO: 1884656
aguggagaagcaugguaau

SEQ ID NO: 2281871 - RNA, 19 nt, Artificial Sequence
  Description of Artificial Sequence: Synthetic oligonucleotide
  Antisense strand to SEQ ID NO: 2281870
auuaccaugcuucuccacu

SEQ ID NO: 2281872 - RNA, 19 nt, Artificial Sequence
  Description of Artificial Sequence: Synthetic oligonucleotide
  Sense strand starting at position 842 of SEQ ID NO: 1884656
ggagaagcaugguaauaca

SEQ ID NO: 2281873 - RNA, 19 nt, Artificial Sequence
  Description of Artificial Sequence: Synthetic oligonucleotide
  Antisense strand to SEQ ID NO: 2281872
uguauuaccaugcuucucc

SEQ ID NO: 2281874 - RNA, 19 nt, Artificial Sequence
  Description of Artificial Sequence: Synthetic oligonucleotide
  Sense strand starting at position 845 of SEQ ID NO: 1884656
gaagcaugguaauacauau

SEQ ID NO: 2281875 - RNA, 19 nt, Artificial Sequence
  Description of Artificial Sequence: Synthetic oligonucleotide
  Antisense strand to SEQ ID NO: 2281874
auauguauuaccaugcuuc

SEQ ID NO: 2281876 - RNA, 19 nt, Artificial Sequence
  Description of Artificial Sequence: Synthetic oligonucleotide
  Sense strand starting at position 858 of SEQ ID NO: 1884656
acauauuguuaagagauca

SEQ ID NO: 2281877 - RNA, 19 nt, Artificial Sequence
  Description of Artificial Sequence: Synthetic oligonucleotide
  Antisense strand to SEQ ID NO: 2281876
ugaucucuuaacaauaugu

SEQ ID NO: 2281878 - RNA, 19 nt, Artificial Sequence
  Description of Artificial Sequence: Synthetic oligonucleotide
  Sense strand starting at position 887 of SEQ ID NO: 1884656
gaaauuugcucggauaggu

SEQ ID NO: 2281879 - RNA, 19 nt, Artificial Sequence
  Description of Artificial Sequence: Synthetic oligonucleotide
  Antisense strand to SEQ ID NO: 2281878
accuauccgagcaaauuuc

SEQ ID NO: 2281880 - RNA, 19 nt, Artificial Sequence
  Description of Artificial Sequence: Synthetic oligonucleotide
  Sense strand starting at position 896 of SEQ ID NO: 1884656
ucggauagguuuccacuga

SEQ ID NO: 2281881 - RNA, 19 nt, Artificial Sequence
  Description of Artificial Sequence: Synthetic oligonucleotide
  Antisense strand to SEQ ID NO: 2281880
ucaguggaaaccuauccga

SEQ ID NO: 2281882 - RNA, 19 nt, Artificial Sequence
  Description of Artificial Sequence: Synthetic oligonucleotide
  Sense strand starting at position 976 of SEQ ID NO: 1884656
uguuacuuccaguaauauu

SEQ ID NO: 2281883 - RNA, 19 nt, Artificial Sequence
  Description of Artificial Sequence: Synthetic oligonucleotide
  Antisense strand to SEQ ID NO: 2281882
aauauuacuggaaguaaca

SEQ ID NO: 2281884 - RNA, 19 nt, Artificial Sequence
  Description of Artificial Sequence: Synthetic oligonucleotide
  Sense strand starting at position 1097 of SEQ ID NO: 1884656
gugauuguggcucauugca

SEQ ID NO: 2281885 - RNA, 19 nt, Artificial Sequence
  Description of Artificial Sequence: Synthetic oligonucleotide
  Antisense strand to SEQ ID NO: 2281884
ugcaaugagccacaaucac

SEQ ID NO: 2281886 - RNA, 19 nt, Artificial Sequence
  Description of Artificial Sequence: Synthetic oligonucleotide
  Sense strand starting at position 1325 of SEQ ID NO: 1884656
ggccauacuuuacuuguga

SEQ ID NO: 2281887 - RNA, 19 nt, Artificial Sequence
  Description of Artificial Sequence: Synthetic oligonucleotide
  Antisense strand to SEQ ID NO: 2281886
ucacaaguaaaguauggcc

SEQ ID NO: 2281888 - RNA, 19 nt, Artificial Sequence
  Description of Artificial Sequence: Synthetic oligonucleotide
  Sense strand starting at position 1332 of SEQ ID NO: 1884656
cuuuacuugugagauuuag

SEQ ID NO: 2281889 - RNA, 19 nt, Artificial Sequence
  Description of Artificial Sequence: Synthetic oligonucleotide
  Antisense strand to SEQ ID NO: 2281888
cuaaaucucacaaguaaag

SEQ ID NO: 2281890 - RNA, 19 nt, Artificial Sequence
  Description of Artificial Sequence: Synthetic oligonucleotide
  Sense strand starting at position 1456 of SEQ ID NO: 1884656
ccuuauuaccuggaucugu

SEQ ID NO: 2281891 - RNA, 19 nt, Artificial Sequence
  Description of Artificial Sequence: Synthetic oligonucleotide
  Antisense strand to SEQ ID NO: 2281890
acagauccagguaauaagg

SEQ ID NO: 2281892 - RNA, 19 nt, Artificial Sequence
  Description of Artificial Sequence: Synthetic oligonucleotide
  Sense strand starting at position 1575 of SEQ ID NO: 1884656
ggaauaucauaccacaaug

SEQ ID NO: 2281893 - RNA, 19 nt, Artificial Sequence
  Description of Artificial Sequence: Synthetic oligonucleotide
  Antisense strand to SEQ ID NO: 2281892
cauugugguaugauauucc

SEQ ID NO: 2281894 - RNA, 19 nt, Artificial Sequence
  Description of Artificial Sequence: Synthetic oligonucleotide
  Sense strand starting at position 1993 of SEQ ID NO: 1884656
cucagaaagcacugacuuu

SEQ ID NO: 2281895 - RNA, 19 nt, Artificial Sequence
  Description of Artificial Sequence: Synthetic oligonucleotide
  Antisense strand to SEQ ID NO: 2281894
aaagucagugcuuucugag

SEQ ID NO: 2281896 - RNA, 19 nt, Artificial Sequence
  Description of Artificial Sequence: Synthetic oligonucleotide
  Sense strand starting at position 2079 of SEQ ID NO: 1884656
agugaacauuaagacauua

SEQ ID NO: 2281897 - RNA, 19 nt, Artificial Sequence
  Description of Artificial Sequence: Synthetic oligonucleotide
  Antisense strand to SEQ ID NO: 2281896
uaaugucuuaauguucacu

SEQ ID NO: 2281898 - RNA, 19 nt, Artificial Sequence
  Description of Artificial Sequence: Synthetic oligonucleotide
  Sense strand starting at position 2239 of SEQ ID NO: 1884656
aaauauaguugggauaaga

SEQ ID NO: 2281899 - RNA, 19 nt, Artificial Sequence
  Description of Artificial Sequence: Synthetic oligonucleotide
  Antisense strand to SEQ ID NO: 2281898
ucuuaucccaacuauauuu

SEQ ID NO: 2281900 - RNA, 19 nt, Artificial Sequence
  Description of Artificial Sequence: Synthetic oligonucleotide
  Sense strand starting at position 2330 of SEQ ID NO: 1884656
aaaguugucuugucuuaga

SEQ ID NO: 2281901 - RNA, 19 nt, Artificial Sequence
  Description of Artificial Sequence: Synthetic oligonucleotide
  Antisense strand to SEQ ID NO: 2281900
ucuaagacaagacaacuuu

SEQ ID NO: 2281902 - RNA, 19 nt, Artificial Sequence
  Description of Artificial Sequence: Synthetic oligonucleotide
  Sense strand starting at position 2489 of SEQ ID NO: 1884656
gaaccagugugaugagaaa

SEQ ID NO: 2281903 - RNA, 19 nt, Artificial Sequence
  Description of Artificial Sequence: Synthetic oligonucleotide
  Antisense strand to SEQ ID NO: 2281902
uuucucaucacacugguuc

SEQ ID NO: 2281904 - RNA, 19 nt, Artificial Sequence
  Description of Artificial Sequence: Synthetic oligonucleotide
  Sense strand starting at position 2555 of SEQ ID NO: 1884656
aacacagugugguccuaaa

SEQ ID NO: 2281905 - RNA, 19 nt, Artificial Sequence
  Description of Artificial Sequence: Synthetic oligonucleotide
  Antisense strand to SEQ ID NO: 2281904
uuuaggaccacacuguguu

SEQ ID NO: 2281906 - RNA, 19 nt, Artificial Sequence
  Description of Artificial Sequence: Synthetic oligonucleotide
  Sense strand starting at position 2564 of SEQ ID NO: 1884656
ugguccuaaagaugcgaaa

SEQ ID NO: 2281907 - RNA, 19 nt, Artificial Sequence
  Description of Artificial Sequence: Synthetic oligonucleotide
  Antisense strand to SEQ ID NO: 2281906
uuucgcaucuuuaggacca

SEQ ID NO: 2281908 - RNA, 19 nt, Artificial Sequence
  Description of Artificial Sequence: Synthetic oligonucleotide
  Sense strand starting at position 2841 of SEQ ID NO: 1884656
guuguaaugaaccgagaau

SEQ ID NO: 2281909 - RNA, 19 nt, Artificial Sequence
  Description of Artificial Sequence: Synthetic oligonucleotide
  Antisense strand to SEQ ID NO: 2281908
auucucgguucauuacaac

SEQ ID NO: 2281910 - RNA, 19 nt, Artificial Sequence
  Description of Artificial Sequence: Synthetic oligonucleotide
  Sense strand starting at position 2919 of SEQ ID NO: 1884656
aaauguaaccagugguugu

SEQ ID NO: 2281911 - RNA, 19 nt, Artificial Sequence
  Description of Artificial Sequence: Synthetic oligonucleotide
  Antisense strand to SEQ ID NO: 2281910
acaaccacugguuacauuu

SEQ ID NO: 2281912 - RNA, 19 nt, Artificial Sequence
  Description of Artificial Sequence: Synthetic oligonucleotide
  Sense strand starting at position 2923 of SEQ ID NO: 1884656
guaaccagugguuguuuau

SEQ ID NO: 2281913 - RNA, 19 nt, Artificial Sequence
  Description of Artificial Sequence: Synthetic oligonucleotide
  Antisense strand to SEQ ID NO: 2281912
auaaacaaccacugguuac

SEQ ID NO: 2281914 - RNA, 19 nt, Artificial Sequence
  Description of Artificial Sequence: Synthetic oligonucleotide
  Sense strand starting at position 2926 of SEQ ID NO: 1884656
accagugguuguuuauuaa

SEQ ID NO: 2281915 - RNA, 19 nt, Artificial Sequence
  Description of Artificial Sequence: Synthetic oligonucleotide
  Antisense strand to SEQ ID NO: 2281914
uuaauaaacaaccacuggu

SEQ ID NO: 2281916 - RNA, 19 nt, Artificial Sequence
  Description of Artificial Sequence: Synthetic oligonucleotide
  Sense strand starting at position 3361 of SEQ ID NO: 1884656
aacugcuagccugaaguga

SEQ ID NO: 2281917 - RNA, 19 nt, Artificial Sequence
  Description of Artificial Sequence: Synthetic oligonucleotide
  Antisense strand to SEQ ID NO: 2281916
ucacuucaggcuagcaguu

SEQ ID NO: 2281918 - RNA, 19 nt, Artificial Sequence
  Description of Artificial Sequence: Synthetic oligonucleotide
  Sense strand starting at position 3539 of SEQ ID NO: 1884656
auuauacuuugugucucau

SEQ ID NO: 2281919 - RNA, 19 nt, Artificial Sequence
  Description of Artificial Sequence: Synthetic oligonucleotide
  Antisense strand to SEQ ID NO: 2281918
augagacacaaaguauaau

SEQ ID NO: 2281920 - RNA, 19 nt, Artificial Sequence
  Description of Artificial Sequence: Synthetic oligonucleotide
  Sense strand starting at position 3608 of SEQ ID NO: 1884656
aacugacacuugugagaaa

SEQ ID NO: 2281921 - RNA, 19 nt, Artificial Sequence
  Description of Artificial Sequence: Synthetic oligonucleotide
  Antisense strand to SEQ ID NO: 2281920
uuucucacaagugucaguu

SEQ ID NO: 2281922 - RNA, 19 nt, Artificial Sequence
  Description of Artificial Sequence: Synthetic oligonucleotide
  Sense strand starting at position 3611 of SEQ ID NO: 1884656
ugacacuugugagaaagcu

SEQ ID NO: 2281923 - RNA, 19 nt, Artificial Sequence
  Description of Artificial Sequence: Synthetic oligonucleotide
  Antisense strand to SEQ ID NO: 2281922
agcuuucucacaaguguca

SEQ ID NO: 2281924 - RNA, 19 nt, Artificial Sequence
  Description of Artificial Sequence: Synthetic oligonucleotide
  Sense strand starting at position 3643 of SEQ ID NO: 1884656
uguagucuauggcucugaa

SEQ ID NO: 2281925 - RNA, 19 nt, Artificial Sequence
  Description of Artificial Sequence: Synthetic oligonucleotide
  Antisense strand to SEQ ID NO: 2281924
uucagagccauagacuaca

SEQ ID NO: 2281926 - RNA, 19 nt, Artificial Sequence
  Description of Artificial Sequence: Synthetic oligonucleotide
  Sense strand starting at position 3723 of SEQ ID NO: 1884656
auuagaagguaugcacauu

SEQ ID NO: 2281927 - RNA, 19 nt, Artificial Sequence
  Description of Artificial Sequence: Synthetic oligonucleotide
  Antisense strand to SEQ ID NO: 2281926
aaugugcauaccuucuaau

SEQ ID NO: 2281928 - RNA, 19 nt, Artificial Sequence
  Description of Artificial Sequence: Synthetic oligonucleotide
  Sense strand starting at position 16 of SEQ ID NO: 1884657
uggaauacccaaugguauu

SEQ ID NO: 2281929 - RNA, 19 nt, Artificial Sequence
  Description of Artificial Sequence: Synthetic oligonucleotide
  Antisense strand to SEQ ID NO: 2281928
aauaccauuggguauucca

SEQ ID NO: 2281930 - RNA, 19 nt, Artificial Sequence
  Description of Artificial Sequence: Synthetic oligonucleotide
  Sense strand starting at position 355 of SEQ ID NO: 1884657
acugcauacgucuaucaac

SEQ ID NO: 2281931 - RNA, 19 nt, Artificial Sequence
  Description of Artificial Sequence: Synthetic oligonucleotide
  Antisense strand to SEQ ID NO: 2281930
guugauagacguaugcagu

SEQ ID NO: 2281932 - RNA, 19 nt, Artificial Sequence
  Description of Artificial Sequence: Synthetic oligonucleotide
  Sense strand starting at position 394 of SEQ ID NO: 1884657
cguggugcuggagauuauu

SEQ ID NO: 2281933 - RNA, 19 nt, Artificial Sequence
  Description of Artificial Sequence: Synthetic oligonucleotide
  Antisense strand to SEQ ID NO: 2281932
aauaaucuccagcaccacg

SEQ ID NO: 2281934 - RNA, 19 nt, Artificial Sequence
  Description of Artificial Sequence: Synthetic oligonucleotide
  Sense strand starting at position 400 of SEQ ID NO: 1884657
gcuggagauuauucuccuu

SEQ ID NO: 2281935 - RNA, 19 nt, Artificial Sequence
  Description of Artificial Sequence: Synthetic oligonucleotide
  Antisense strand to SEQ ID NO: 2281934
aaggagaauaaucuccagc

SEQ ID NO: 2281936 - RNA, 19 nt, Artificial Sequence
  Description of Artificial Sequence: Synthetic oligonucleotide
  Sense strand starting at position 427 of SEQ ID NO: 1884657
ucacauggcagguguauuu

SEQ ID NO: 2281937 - RNA, 19 nt, Artificial Sequence
  Description of Artificial Sequence: Synthetic oligonucleotide
  Antisense strand to SEQ ID NO: 2281936
aaauacaccugccauguga

SEQ ID NO: 2281938 - RNA, 19 nt, Artificial Sequence
  Description of Artificial Sequence: Synthetic oligonucleotide
  Sense strand starting at position 469 of SEQ ID NO: 1884657
cccucagcacaauggaaau

SEQ ID NO: 2281939 - RNA, 19 nt, Artificial Sequence
  Description of Artificial Sequence: Synthetic oligonucleotide
  Antisense strand to SEQ ID NO: 2281938
auuuccauugugcugaggg

SEQ ID NO: 2281940 - RNA, 19 nt, Artificial Sequence
  Description of Artificial Sequence: Synthetic oligonucleotide
  Sense strand starting at position 475 of SEQ ID NO: 1884657
gcacaauggaaauguuguu

SEQ ID NO: 2281941 - RNA, 19 nt, Artificial Sequence
  Description of Artificial Sequence: Synthetic oligonucleotide
  Antisense strand to SEQ ID NO: 2281940
aacaacauuuccauugugc

SEQ ID NO: 2281942 - RNA, 19 nt, Artificial Sequence
  Description of Artificial Sequence: Synthetic oligonucleotide
  Sense strand starting at position 493 of SEQ ID NO: 1884657
ucaucuucuccuuaguaga

SEQ ID NO: 2281943 - RNA, 19 nt, Artificial Sequence
  Description of Artificial Sequence: Synthetic oligonucleotide
  Antisense strand to SEQ ID NO: 2281942
ucuacuaaggagaagauga

SEQ ID NO: 2281944 - RNA, 19 nt, Artificial Sequence
  Description of Artificial Sequence: Synthetic oligonucleotide
  Sense strand starting at position 516 of SEQ ID NO: 1884657
accagagugaugcggucau

SEQ ID NO: 2281945 - RNA, 19 nt, Artificial Sequence
  Description of Artificial Sequence: Synthetic oligonucleotide
  Antisense strand to SEQ ID NO: 2281944
augaccgcaucacucuggu

SEQ ID NO: 2281946 - RNA, 19 nt, Artificial Sequence
  Description of Artificial Sequence: Synthetic oligonucleotide
  Sense strand starting at position 519 of SEQ ID NO: 1884657
agagugaugcggucaucgu

SEQ ID NO: 2281947 - RNA, 19 nt, Artificial Sequence
  Description of Artificial Sequence: Synthetic oligonucleotide
  Antisense strand to SEQ ID NO: 2281946
acgaugaccgcaucacucu

SEQ ID NO: 2281948 - RNA, 19 nt, Artificial Sequence
  Description of Artificial Sequence: Synthetic oligonucleotide
  Sense strand starting at position 526 of SEQ ID NO: 1884657
ugcggucaucgucuuucaa

SEQ ID NO: 2281949 - RNA, 19 nt, Artificial Sequence
  Description of Artificial Sequence: Synthetic oligonucleotide
  Antisense strand to SEQ ID NO: 2281948
uugaaagacgaugaccgca

SEQ ID NO: 2281950 - RNA, 19 nt, Artificial Sequence
  Description of Artificial Sequence: Synthetic oligonucleotide
  Sense strand starting at position 527 of SEQ ID NO: 1884657
gcggucaucgucuuucaac

SEQ ID NO: 2281951 - RNA, 19 nt, Artificial Sequence
  Description of Artificial Sequence: Synthetic oligonucleotide
  Antisense strand to SEQ ID NO: 2281950
guugaaagacgaugaccgc

SEQ ID NO: 2281952 - RNA, 19 nt, Artificial Sequence
  Description of Artificial Sequence: Synthetic oligonucleotide
  Sense strand starting at position 529 of SEQ ID NO: 1884657
ggucaucgucuuucaacgu

SEQ ID NO: 2281953 - RNA, 19 nt, Artificial Sequence
  Description of Artificial Sequence: Synthetic oligonucleotide
  Antisense strand to SEQ ID NO: 2281952
acguugaaagacgaugacc

SEQ ID NO: 2281954 - RNA, 19 nt, Artificial Sequence
  Description of Artificial Sequence: Synthetic oligonucleotide
  Sense strand starting at position 555 of SEQ ID NO: 1884657
gggucagacuucucauucu

SEQ ID NO: 2281955 - RNA, 19 nt, Artificial Sequence
  Description of Artificial Sequence: Synthetic oligonucleotide
  Antisense strand to SEQ ID NO: 2281954
agaaugagaagucugaccc

SEQ ID NO: 2281956 - RNA, 19 nt, Artificial Sequence
  Description of Artificial Sequence: Synthetic oligonucleotide
  Sense strand starting at position 616 of SEQ ID NO: 1884657
ugagaaaguagccgagaaa

SEQ ID NO: 2281957 - RNA, 19 nt, Artificial Sequence
  Description of Artificial Sequence: Synthetic oligonucleotide
  Antisense strand to SEQ ID NO: 2281956
uuucucggcuacuuucuca

SEQ ID NO: 2281958 - RNA, 19 nt, Artificial Sequence
  Description of Artificial Sequence: Synthetic oligonucleotide
  Sense strand starting at position 769 of SEQ ID NO: 1884657
cugccugucuaaccugaau

SEQ ID NO: 2281959 - RNA, 19 nt, Artificial Sequence
  Description of Artificial Sequence: Synthetic oligonucleotide
  Antisense strand to SEQ ID NO: 2281958
auucagguuagacaggcag

SEQ ID NO: 2281960 - RNA, 19 nt, Artificial Sequence
  Description of Artificial Sequence: Synthetic oligonucleotide
  Sense strand starting at position 819 of SEQ ID NO: 1884657
uuauuaaggucucccugga

SEQ ID NO: 2281961 - RNA, 19 nt, Artificial Sequence
  Description of Artificial Sequence: Synthetic oligonucleotide
  Antisense strand to SEQ ID NO: 2281960
uccagggagaccuuaauaa

SEQ ID NO: 2281962 - RNA, 19 nt, Artificial Sequence
  Description of Artificial Sequence: Synthetic oligonucleotide
  Sense strand starting at position 978 of SEQ ID NO: 1884657
cugucaagaccuggaucaa

SEQ ID NO: 2281963 - RNA, 19 nt, Artificial Sequence
  Description of Artificial Sequence: Synthetic oligonucleotide
  Antisense strand to SEQ ID NO: 2281962
uugauccaggucuugacag

SEQ ID NO: 2281964 - RNA, 19 nt, Artificial Sequence
  Description of Artificial Sequence: Synthetic oligonucleotide
  Sense strand starting at position 990 of SEQ ID NO: 1884657
ggaucaaucccacagcucu

SEQ ID NO: 2281965 - RNA, 19 nt, Artificial Sequence
  Description of Artificial Sequence: Synthetic oligonucleotide
  Antisense strand to SEQ ID NO: 2281964
agagcugugggauugaucc

SEQ ID NO: 2281966 - RNA, 19 nt, Artificial Sequence
  Description of Artificial Sequence: Synthetic oligonucleotide
  Sense strand starting at position 1104 of SEQ ID NO: 1884657
auuguagagugaguacaau

SEQ ID NO: 2281967 - RNA, 19 nt, Artificial Sequence
  Description of Artificial Sequence: Synthetic oligonucleotide
  Antisense strand to SEQ ID NO: 2281966
auuguacucacucuacaau

SEQ ID NO: 2281968 - RNA, 19 nt, Artificial Sequence
  Description of Artificial Sequence: Synthetic oligonucleotide
  Sense strand starting at position 1446 of SEQ ID NO: 1884657
aaagaauacugggagaaag

SEQ ID NO: 2281969 - RNA, 19 nt, Artificial Sequence
  Description of Artificial Sequence: Synthetic oligonucleotide
  Antisense strand to SEQ ID NO: 2281968
cuuucucccaguauucuuu

SEQ ID NO: 2281970 - RNA, 19 nt, Artificial Sequence
  Description of Artificial Sequence: Synthetic oligonucleotide
  Sense strand starting at position 1750 of SEQ ID NO: 1884657
caggaagaggccuguguaa

SEQ ID NO: 2281971 - RNA, 19 nt, Artificial Sequence
  Description of Artificial Sequence: Synthetic oligonucleotide
  Antisense strand to SEQ ID NO: 2281970
uuacacaggccucuuccug

SEQ ID NO: 2281972 - RNA, 19 nt, Artificial Sequence
  Description of Artificial Sequence: Synthetic oligonucleotide
  Sense strand starting at position 2535 of SEQ ID NO: 1884657
ugggaaagucaguggcaga

SEQ ID NO: 2281973 - RNA, 19 nt, Artificial Sequence
  Description of Artificial Sequence: Synthetic oligonucleotide
  Antisense strand to SEQ ID NO: 2281972
ucugccacugacuuuccca

SEQ ID NO: 2281974 - RNA, 19 nt, Artificial Sequence
  Description of Artificial Sequence: Synthetic oligonucleotide
  Sense strand starting at position 2536 of SEQ ID NO: 1884657
gggaaagucaguggcagaa

SEQ ID NO: 2281975 - RNA, 19 nt, Artificial Sequence
  Description of Artificial Sequence: Synthetic oligonucleotide
  Antisense strand to SEQ ID NO: 2281974
uucugccacugacuuuccc

SEQ ID NO: 2281976 - RNA, 19 nt, Artificial Sequence
  Description of Artificial Sequence: Synthetic oligonucleotide
  Sense strand starting at position 3000 of SEQ ID NO: 1884657
cccucuguugucuaacuua

SEQ ID NO: 2281977 - RNA, 19 nt, Artificial Sequence
  Description of Artificial Sequence: Synthetic oligonucleotide
  Antisense strand to SEQ ID NO: 2281976
uaaguuagacaacagaggg

SEQ ID NO: 2281978 - RNA, 19 nt, Artificial Sequence
  Description of Artificial Sequence: Synthetic oligonucleotide
  Sense strand starting at position 3003 of SEQ ID NO: 1884657
ucuguugucuaacuuaauu

SEQ ID NO: 2281979 - RNA, 19 nt, Artificial Sequence
  Description of Artificial Sequence: Synthetic oligonucleotide
  Antisense strand to SEQ ID NO: 2281978
aauuaaguuagacaacaga

SEQ ID NO: 2281980 - RNA, 19 nt, Artificial Sequence
  Description of Artificial Sequence: Synthetic oligonucleotide
  Sense strand starting at position 3239 of SEQ ID NO: 1884657
ggccauugucgcuaacaau

SEQ ID NO: 2281981 - RNA, 19 nt, Artificial Sequence
  Description of Artificial Sequence: Synthetic oligonucleotide
  Antisense strand to SEQ ID NO: 2281980
auuguuagcgacaauggcc

SEQ ID NO: 2281982 - RNA, 19 nt, Artificial Sequence
  Description of Artificial Sequence: Synthetic oligonucleotide
  Sense strand starting at position 3256 of SEQ ID NO: 1884657
auaguacuagcugauauua

SEQ ID NO: 2281983 - RNA, 19 nt, Artificial Sequence
  Description of Artificial Sequence: Synthetic oligonucleotide
  Antisense strand to SEQ ID NO: 2281982
uaauaucagcuaguacuau

SEQ ID NO: 2281984 - RNA, 19 nt, Artificial Sequence
  Description of Artificial Sequence: Synthetic oligonucleotide
  Sense strand starting at position 3264 of SEQ ID NO: 1884657
agcugauauuaacugagca

SEQ ID NO: 2281985 - RNA, 19 nt, Artificial Sequence
  Description of Artificial Sequence: Synthetic oligonucleotide
  Antisense strand to SEQ ID NO: 2281984
ugcucaguuaauaucagcu

SEQ ID NO: 2281986 - RNA, 19 nt, Artificial Sequence
  Description of Artificial Sequence: Synthetic oligonucleotide
  Sense strand starting at position 3334 of SEQ ID NO: 1884657
guacuauuauagguccaca

SEQ ID NO: 2281987 - RNA, 19 nt, Artificial Sequence
  Description of Artificial Sequence: Synthetic oligonucleotide
  Antisense strand to SEQ ID NO: 2281986
uguggaccuauaauaguac

SEQ ID NO: 2281988 - RNA, 19 nt, Artificial Sequence
  Description of Artificial Sequence: Synthetic oligonucleotide
  Sense strand starting at position 3337 of SEQ ID NO: 1884657
cuauuauagguccacauug

SEQ ID NO: 2281989 - RNA, 19 nt, Artificial Sequence
  Description of Artificial Sequence: Synthetic oligonucleotide
  Antisense strand to SEQ ID NO: 2281988
caauguggaccuauaauag

SEQ ID NO: 2281990 - RNA, 19 nt, Artificial Sequence
  Description of Artificial Sequence: Synthetic oligonucleotide
  Sense strand starting at position 3339 of SEQ ID NO: 1884657
auuauagguccacauugua

SEQ ID NO: 2281991 - RNA, 19 nt, Artificial Sequence
  Description of Artificial Sequence: Synthetic oligonucleotide
  Antisense strand to SEQ ID NO: 2281990
uacaauguggaccuauaau

SEQ ID NO: 2281992 - RNA, 19 nt, Artificial Sequence
  Description of Artificial Sequence: Synthetic oligonucleotide
  Sense strand starting at position 3348 of SEQ ID NO: 1884657
ccacauuguaggugagaca

SEQ ID NO: 2281993 - RNA, 19 nt, Artificial Sequence
  Description of Artificial Sequence: Synthetic oligonucleotide
  Antisense strand to SEQ ID NO: 2281992
ugucucaccuacaaugugg

SEQ ID NO: 2281994 - RNA, 19 nt, Artificial Sequence
  Description of Artificial Sequence: Synthetic oligonucleotide
  Sense strand starting at position 3426 of SEQ ID NO: 1884657
ccaauuagugcugggaagu

SEQ ID NO: 2281995 - RNA, 19 nt, Artificial Sequence
  Description of Artificial Sequence: Synthetic oligonucleotide
  Antisense strand to SEQ ID NO: 2281994
acuucccagcacuaauugg

SEQ ID NO: 2281996 - RNA, 19 nt, Artificial Sequence
  Description of Artificial Sequence: Synthetic oligonucleotide
  Sense strand starting at position 3427 of SEQ ID NO: 1884657
caauuagugcugggaaguu

SEQ ID NO: 2281997 - RNA, 19 nt, Artificial Sequence
  Description of Artificial Sequence: Synthetic oligonucleotide
  Antisense strand to SEQ ID NO: 2281996
aacuucccagcacuaauug

SEQ ID NO: 2281998 - RNA, 19 nt, Artificial Sequence
  Description of Artificial Sequence: Synthetic oligonucleotide
  Sense strand starting at position 3501 of SEQ ID NO: 1884657
uuguucuagagccaugguu

SEQ ID NO: 2281999 - RNA, 19 nt, Artificial Sequence
  Description of Artificial Sequence: Synthetic oligonucleotide
  Antisense strand to SEQ ID NO: 2281998
aaccauggcucuagaacaa

SEQ ID NO: 2282000 - RNA, 19 nt, Artificial Sequence
  Description of Artificial Sequence: Synthetic oligonucleotide
  Sense strand starting at position 3628 of SEQ ID NO: 1884657
ucgagaaaguucccaggga

SEQ ID NO: 2282001 - RNA, 19 nt, Artificial Sequence
  Description of Artificial Sequence: Synthetic oligonucleotide
  Antisense strand to SEQ ID NO: 2282000
ucccugggaacuuucucga

SEQ ID NO: 2282002 - RNA, 19 nt, Artificial Sequence
  Description of Artificial Sequence: Synthetic oligonucleotide
  Sense strand starting at position 3684 of SEQ ID NO: 1884657
gcgagaggauuugugcaua

SEQ ID NO: 2282003 - RNA, 19 nt, Artificial Sequence
  Description of Artificial Sequence: Synthetic oligonucleotide
  Antisense strand to SEQ ID NO: 2282002
uaugcacaaauccucucgc

SEQ ID NO: 2282004 - RNA, 19 nt, Artificial Sequence
  Description of Artificial Sequence: Synthetic oligonucleotide
  Sense strand starting at position 3716 of SEQ ID NO: 1884657
uuauuagaaugcucaaagg

SEQ ID NO: 2282005 - RNA, 19 nt, Artificial Sequence
  Description of Artificial Sequence: Synthetic oligonucleotide
  Antisense strand to SEQ ID NO: 2282004
ccuuugagcauucuaauaa

SEQ ID NO: 2282006 - RNA, 19 nt, Artificial Sequence
  Description of Artificial Sequence: Synthetic oligonucleotide
  Sense strand starting at position 3802 of SEQ ID NO: 1884657
cagaguaaauggugaauuu

SEQ ID NO: 2282007 - RNA, 19 nt, Artificial Sequence
  Description of Artificial Sequence: Synthetic oligonucleotide
  Antisense strand to SEQ ID NO: 2282006
aaauucaccauuuacucug

SEQ ID NO: 2282008 - RNA, 19 nt, Artificial Sequence
  Description of Artificial Sequence: Synthetic oligonucleotide
  Sense strand starting at position 62 of SEQ ID NO: 1884658
aggauauaacucugaguac

SEQ ID NO: 2282009 - RNA, 19 nt, Artificial Sequence
  Description of Artificial Sequence: Synthetic oligonucleotide
  Antisense strand to SEQ ID NO: 2282008
guacucagaguuauauccu

SEQ ID NO: 2282010 - RNA, 19 nt, Artificial Sequence
  Description of Artificial Sequence: Synthetic oligonucleotide
  Sense strand starting at position 110 of SEQ ID NO: 1884658
gagagaagcuaucucuguu

SEQ ID NO: 2282011 - RNA, 19 nt, Artificial Sequence
  Description of Artificial Sequence: Synthetic oligonucleotide
  Antisense strand to SEQ ID NO: 2282010
aacagagauagcuucucuc

SEQ ID NO: 2282012 - RNA, 19 nt, Artificial Sequence
  Description of Artificial Sequence: Synthetic oligonucleotide
  Sense strand starting at position 650 of SEQ ID NO: 1884658
gcuagaaggucuucuauga

SEQ ID NO: 2282013 - RNA, 19 nt, Artificial Sequence
  Description of Artificial Sequence: Synthetic oligonucleotide
  Antisense strand to SEQ ID NO: 2282012
ucauagaagaccuucuagc

SEQ ID NO: 2282014 - RNA, 19 nt, Artificial Sequence
  Description of Artificial Sequence: Synthetic oligonucleotide
  Sense strand starting at position 654 of SEQ ID NO: 1884658
gaaggucuucuaugauuau

SEQ ID NO: 2282015 - RNA, 19 nt, Artificial Sequence
  Description of Artificial Sequence: Synthetic oligonucleotide
  Antisense strand to SEQ ID NO: 2282014
auaaucauagaagaccuuc

SEQ ID NO: 2282016 - RNA, 19 nt, Artificial Sequence
  Description of Artificial Sequence: Synthetic oligonucleotide
  Sense strand starting at position 657 of SEQ ID NO: 1884658
ggucuucuaugauuauaaa

SEQ ID NO: 2282017 - RNA, 19 nt, Artificial Sequence
  Description of Artificial Sequence: Synthetic oligonucleotide
  Antisense strand to SEQ ID NO: 2282016
uuuauaaucauagaagacc

SEQ ID NO: 2282018 - RNA, 19 nt, Artificial Sequence
  Description of Artificial Sequence: Synthetic oligonucleotide
  Sense strand starting at position 705 of SEQ ID NO: 1884658
ugcccaaagguguaaacua

SEQ ID NO: 2282019 - RNA, 19 nt, Artificial Sequence
  Description of Artificial Sequence: Synthetic oligonucleotide
  Antisense strand to SEQ ID NO: 2282018
uaguuuacaccuuugggca

SEQ ID NO: 2282020 - RNA, 19 nt, Artificial Sequence
  Description of Artificial Sequence: Synthetic oligonucleotide
  Sense strand starting at position 978 of SEQ ID NO: 1884658
gagucauuaggaugaucau

SEQ ID NO: 2282021 - RNA, 19 nt, Artificial Sequence
  Description of Artificial Sequence: Synthetic oligonucleotide
  Antisense strand to SEQ ID NO: 2282020
augaucauccuaaugacuc

SEQ ID NO: 2282022 - RNA, 19 nt, Artificial Sequence
  Description of Artificial Sequence: Synthetic oligonucleotide
  Sense strand starting at position 1135 of SEQ ID NO: 1884658
cagggaacaucugcauguu

SEQ ID NO: 2282023 - RNA, 19 nt, Artificial Sequence
  Description of Artificial Sequence: Synthetic oligonucleotide
  Antisense strand to SEQ ID NO: 2282022
aacaugcagauguucccug

SEQ ID NO: 2282024 - RNA, 19 nt, Artificial Sequence
  Description of Artificial Sequence: Synthetic oligonucleotide
  Sense strand starting at position 1192 of SEQ ID NO: 1884658
cuaacucaguaaucuggaa

SEQ ID NO: 2282025 - RNA, 19 nt, Artificial Sequence
  Description of Artificial Sequence: Synthetic oligonucleotide
  Antisense strand to SEQ ID NO: 2282024
uuccagauuacugaguuag

SEQ ID NO: 2282026 - RNA, 19 nt, Artificial Sequence
  Description of Artificial Sequence: Synthetic oligonucleotide
  Sense strand starting at position 1264 of SEQ ID NO: 1884658
cuuuaacaguucuugagac

SEQ ID NO: 2282027 - RNA, 19 nt, Artificial Sequence
  Description of Artificial Sequence: Synthetic oligonucleotide
  Antisense strand to SEQ ID NO: 2282026
gucucaagaacuguuaaag

SEQ ID NO: 2282028 - RNA, 19 nt, Artificial Sequence
  Description of Artificial Sequence: Synthetic oligonucleotide
  Sense strand starting at position 1407 of SEQ ID NO: 1884658
guauccuagcauuacuaca

SEQ ID NO: 2282029 - RNA, 19 nt, Artificial Sequence
  Description of Artificial Sequence: Synthetic oligonucleotide
  Antisense strand to SEQ ID NO: 2282028
uguaguaaugcuaggauac

SEQ ID NO: 2282030 - RNA, 19 nt, Artificial Sequence
  Description of Artificial Sequence: Synthetic oligonucleotide
  Sense strand starting at position 1598 of SEQ ID NO: 1884658
acagaacugcuauguggau

SEQ ID NO: 2282031 - RNA, 19 nt, Artificial Sequence
  Description of Artificial Sequence: Synthetic oligonucleotide
  Antisense strand to SEQ ID NO: 2282030
auccacauagcaguucugu

SEQ ID NO: 2282032 - RNA, 19 nt, Artificial Sequence
  Description of Artificial Sequence: Synthetic oligonucleotide
  Sense strand starting at position 1599 of SEQ ID NO: 1884658
cagaacugcuauguggauu

SEQ ID NO: 2282033 - RNA, 19 nt, Artificial Sequence
  Description of Artificial Sequence: Synthetic oligonucleotide
  Antisense strand to SEQ ID NO: 2282032
aauccacauagcaguucug

SEQ ID NO: 2282034 - RNA, 19 nt, Artificial Sequence
  Description of Artificial Sequence: Synthetic oligonucleotide
  Sense strand starting at position 1600 of SEQ ID NO: 1884658
agaacugcuauguggauua

SEQ ID NO: 2282035 - RNA, 19 nt, Artificial Sequence
  Description of Artificial Sequence: Synthetic oligonucleotide
  Antisense strand to SEQ ID NO: 2282034
uaauccacauagcaguucu

SEQ ID NO: 2282036 - RNA, 19 nt, Artificial Sequence
  Description of Artificial Sequence: Synthetic oligonucleotide
  Sense strand starting at position 1613 of SEQ ID NO: 1884658
ggauuagccucaucaggac

SEQ ID NO: 2282037 - RNA, 19 nt, Artificial Sequence
  Description of Artificial Sequence: Synthetic oligonucleotide
  Antisense strand to SEQ ID NO: 2282036
guccugaugaggcuaaucc

SEQ ID NO: 2282038 - RNA, 19 nt, Artificial Sequence
  Description of Artificial Sequence: Synthetic oligonucleotide
  Sense strand starting at position 1694 of SEQ ID NO: 1884658
gaaauauaccuucggguaa

SEQ ID NO: 2282039 - RNA, 19 nt, Artificial Sequence
  Description of Artificial Sequence: Synthetic oligonucleotide
  Antisense strand to SEQ ID NO: 2282038
uuacccgaagguauauuuc

SEQ ID NO: 2282040 - RNA, 19 nt, Artificial Sequence
  Description of Artificial Sequence: Synthetic oligonucleotide
  Sense strand starting at position 1698 of SEQ ID NO: 1884658
uauaccuucggguaaacau

SEQ ID NO: 2282041 - RNA, 19 nt, Artificial Sequence
  Description of Artificial Sequence: Synthetic oligonucleotide
  Antisense strand to SEQ ID NO: 2282040
auguuuacccgaagguaua

SEQ ID NO: 2282042 - RNA, 19 nt, Artificial Sequence
  Description of Artificial Sequence: Synthetic oligonucleotide
  Sense strand starting at position 1736 of SEQ ID NO: 1884658
uggucauugcugugauuuc

SEQ ID NO: 2282043 - RNA, 19 nt, Artificial Sequence
  Description of Artificial Sequence: Synthetic oligonucleotide
  Antisense strand to SEQ ID NO: 2282042
gaaaucacagcaaugacca

SEQ ID NO: 2282044 - RNA, 19 nt, Artificial Sequence
  Description of Artificial Sequence: Synthetic oligonucleotide
  Sense strand starting at position 2004 of SEQ ID NO: 1884658
agaggaaaugcugggugaa

SEQ ID NO: 2282045 - RNA, 19 nt, Artificial Sequence
  Description of Artificial Sequence: Synthetic oligonucleotide
  Antisense strand to SEQ ID NO: 2282044
uucacccagcauuuccucu

SEQ ID NO: 2282046 - RNA, 19 nt, Artificial Sequence
  Description of Artificial Sequence: Synthetic oligonucleotide
  Sense strand starting at position 2005 of SEQ ID NO: 1884658
gaggaaaugcugggugaac

SEQ ID NO: 2282047 - RNA, 19 nt, Artificial Sequence
  Description of Artificial Sequence: Synthetic oligonucleotide
  Antisense strand to SEQ ID NO: 2282046
guucacccagcauuuccuc

SEQ ID NO: 2282048 - RNA, 19 nt, Artificial Sequence
  Description of Artificial Sequence: Synthetic oligonucleotide
  Sense strand starting at position 2357 of SEQ ID NO: 1884658
ucaggugccagguauauaa

SEQ ID NO: 2282049 - RNA, 19 nt, Artificial Sequence
  Description of Artificial Sequence: Synthetic oligonucleotide
  Antisense strand to SEQ ID NO: 2282048
uuauauaccuggcaccuga

SEQ ID NO: 2282050 - RNA, 19 nt, Artificial Sequence
  Description of Artificial Sequence: Synthetic oligonucleotide
  Sense strand starting at position 2410 of SEQ ID NO: 1884658
ggaagauuugggcgacgca

SEQ ID NO: 2282051 - RNA, 19 nt, Artificial Sequence
  Description of Artificial Sequence: Synthetic oligonucleotide
  Antisense strand to SEQ ID NO: 2282050
ugcgucgcccaaaucuucc

SEQ ID NO: 2282052 - RNA, 19 nt, Artificial Sequence
  Description of Artificial Sequence: Synthetic oligonucleotide
  Sense strand starting at position 2472 of SEQ ID NO: 1884658
auucgaaagaucuggguuc

SEQ ID NO: 2282053 - RNA, 19 nt, Artificial Sequence
  Description of Artificial Sequence: Synthetic oligonucleotide
  Antisense strand to SEQ ID NO: 2282052
gaacccagaucuuucgaau

SEQ ID NO: 2282054 - RNA, 19 nt, Artificial Sequence
  Description of Artificial Sequence: Synthetic oligonucleotide
  Sense strand starting at position 2591 of SEQ ID NO: 1884658
ugaggaucauaugcgacaa

SEQ ID NO: 2282055 - RNA, 19 nt, Artificial Sequence
  Description of Artificial Sequence: Synthetic oligonucleotide
  Antisense strand to SEQ ID NO: 2282054
uugucgcauaugauccuca

SEQ ID NO: 2282056 - RNA, 19 nt, Artificial Sequence
  Description of Artificial Sequence: Synthetic oligonucleotide
  Sense strand starting at position 2595 of SEQ ID NO: 1884658
gaucauaugcgacaaugua

SEQ ID NO: 2282057 - RNA, 19 nt, Artificial Sequence
  Description of Artificial Sequence: Synthetic oligonucleotide
  Antisense strand to SEQ ID NO: 2282056
uacauugucgcauaugauc

SEQ ID NO: 2282058 - RNA, 19 nt, Artificial Sequence
  Description of Artificial Sequence: Synthetic oligonucleotide
  Sense strand starting at position 2629 of SEQ ID NO: 1884658
aacauuaucggaggaaggu

SEQ ID NO: 2282059 - RNA, 19 nt, Artificial Sequence
  Description of Artificial Sequence: Synthetic oligonucleotide
  Antisense strand to SEQ ID NO: 2282058
accuuccuccgauaauguu

SEQ ID NO: 2282060 - RNA, 19 nt, Artificial Sequence
  Description of Artificial Sequence: Synthetic oligonucleotide
  Sense strand starting at position 2642 of SEQ ID NO: 1884658
gaagguggacucugaagua

SEQ ID NO: 2282061 - RNA, 19 nt, Artificial Sequence
  Description of Artificial Sequence: Synthetic oligonucleotide
  Antisense strand to SEQ ID NO: 2282060
uacuucagaguccaccuuc

SEQ ID NO: 2282062 - RNA, 19 nt, Artificial Sequence
  Description of Artificial Sequence: Synthetic oligonucleotide
  Sense strand starting at position 2667 of SEQ ID NO: 1884658
guagacuauggauguagaa

SEQ ID NO: 2282063 - RNA, 19 nt, Artificial Sequence
  Description of Artificial Sequence: Synthetic oligonucleotide
  Antisense strand to SEQ ID NO: 2282062
uucuacauccauagucuac

SEQ ID NO: 2282064 - RNA, 19 nt, Artificial Sequence
  Description of Artificial Sequence: Synthetic oligonucleotide
  Sense strand starting at position 2739 of SEQ ID NO: 1884658
gcuacaugaccuuggacua

SEQ ID NO: 2282065 - RNA, 19 nt, Artificial Sequence
  Description of Artificial Sequence: Synthetic oligonucleotide
  Antisense strand to SEQ ID NO: 2282064
uaguccaaggucauguagc

SEQ ID NO: 2282066 - RNA, 19 nt, Artificial Sequence
  Description of Artificial Sequence: Synthetic oligonucleotide
  Sense strand starting at position 2782 of SEQ ID NO: 1884658
ggugaugacagcuauccuu

SEQ ID NO: 2282067 - RNA, 19 nt, Artificial Sequence
  Description of Artificial Sequence: Synthetic oligonucleotide
  Antisense strand to SEQ ID NO: 2282066
aaggauagcugucaucacc

SEQ ID NO: 2282068 - RNA, 19 nt, Artificial Sequence
  Description of Artificial Sequence: Synthetic oligonucleotide
  Sense strand starting at position 2788 of SEQ ID NO: 1884658
gacagcuauccuugaggac

SEQ ID NO: 2282069 - RNA, 19 nt, Artificial Sequence
  Description of Artificial Sequence: Synthetic oligonucleotide
  Antisense strand to SEQ ID NO: 2282068
guccucaaggauagcuguc

SEQ ID NO: 2282070 - RNA, 19 nt, Artificial Sequence
  Description of Artificial Sequence: Synthetic oligonucleotide
  Sense strand starting at position 2926 of SEQ ID NO: 1884658
agaaaucuuugggcccuga

SEQ ID NO: 2282071 - RNA, 19 nt, Artificial Sequence
  Description of Artificial Sequence: Synthetic oligonucleotide
  Antisense strand to SEQ ID NO: 2282070
ucagggcccaaagauuucu

SEQ ID NO: 2282072 - RNA, 19 nt, Artificial Sequence
  Description of Artificial Sequence: Synthetic oligonucleotide
  Sense strand starting at position 2963 of SEQ ID NO: 1884658
acauaauuucugugccugu

SEQ ID NO: 2282073 - RNA, 19 nt, Artificial Sequence
  Description of Artificial Sequence: Synthetic oligonucleotide
  Antisense strand to SEQ ID NO: 2282072
acaggcacagaaauuaugu

SEQ ID NO: 2282074 - RNA, 19 nt, Artificial Sequence
  Description of Artificial Sequence: Synthetic oligonucleotide
  Sense strand starting at position 3030 of SEQ ID NO: 1884658
gaagaauuaccuugucuag

SEQ ID NO: 2282075 - RNA, 19 nt, Artificial Sequence
  Description of Artificial Sequence: Synthetic oligonucleotide
  Antisense strand to SEQ ID NO: 2282074
cuagacaagguaauucuuc

SEQ ID NO: 2282076 - RNA, 19 nt, Artificial Sequence
  Description of Artificial Sequence: Synthetic oligonucleotide
  Sense strand starting at position 3071 of SEQ ID NO: 1884658
agugcaauaguuugggaaa

SEQ ID NO: 2282077 - RNA, 19 nt, Artificial Sequence
  Description of Artificial Sequence: Synthetic oligonucleotide
  Antisense strand to SEQ ID NO: 2282076
uuucccaaacuauugcacu

SEQ ID NO: 2282078 - RNA, 19 nt, Artificial Sequence
  Description of Artificial Sequence: Synthetic oligonucleotide
  Sense strand starting at position 3195 of SEQ ID NO: 1884658
ggaucaauauuggugacua

SEQ ID NO: 2282079 - RNA, 19 nt, Artificial Sequence
  Description of Artificial Sequence: Synthetic oligonucleotide
  Antisense strand to SEQ ID NO: 2282078
uagucaccaauauugaucc

SEQ ID NO: 2282080 - RNA, 19 nt, Artificial Sequence
  Description of Artificial Sequence: Synthetic oligonucleotide
  Sense strand starting at position 3245 of SEQ ID NO: 1884658
gugacuccgugguugauuu

SEQ ID NO: 2282081 - RNA, 19 nt, Artificial Sequence
  Description of Artificial Sequence: Synthetic oligonucleotide
  Antisense strand to SEQ ID NO: 2282080
aaaucaaccacggagucac

SEQ ID NO: 2282082 - RNA, 19 nt, Artificial Sequence
  Description of Artificial Sequence: Synthetic oligonucleotide
  Sense strand starting at position 3246 of SEQ ID NO: 1884658
ugacuccgugguugauuua

SEQ ID NO: 2282083 - RNA, 19 nt, Artificial Sequence
  Description of Artificial Sequence: Synthetic oligonucleotide
  Antisense strand to SEQ ID NO: 2282082
uaaaucaaccacggaguca

SEQ ID NO: 2282084 - RNA, 19 nt, Artificial Sequence
  Description of Artificial Sequence: Synthetic oligonucleotide
  Sense strand starting at position 3376 of SEQ ID NO: 1884658
uggaguuauguugggauaa

SEQ ID NO: 2282085 - RNA, 19 nt, Artificial Sequence
  Description of Artificial Sequence: Synthetic oligonucleotide
  Antisense strand to SEQ ID NO: 2282084
uuaucccaacauaacucca

SEQ ID NO: 2282086 - RNA, 19 nt, Artificial Sequence
  Description of Artificial Sequence: Synthetic oligonucleotide
  Sense strand starting at position 3387 of SEQ ID NO: 1884658
ugggauaaauguguggaga

SEQ ID NO: 2282087 - RNA, 19 nt, Artificial Sequence
  Description of Artificial Sequence: Synthetic oligonucleotide
  Antisense strand to SEQ ID NO: 2282086
ucuccacacauuuauccca

SEQ ID NO: 2282088 - RNA, 19 nt, Artificial Sequence
  Description of Artificial Sequence: Synthetic oligonucleotide
  Sense strand starting at position 2283 of SEQ ID NO: 1884659
ugcagugaucuaggauuga

SEQ ID NO: 2282089 - RNA, 19 nt, Artificial Sequence
  Description of Artificial Sequence: Synthetic oligonucleotide
  Antisense strand to SEQ ID NO: 2282088
ucaauccuagaucacugca

SEQ ID NO: 2282090 - RNA, 19 nt, Artificial Sequence
  Description of Artificial Sequence: Synthetic oligonucleotide
  Sense strand starting at position 2287 of SEQ ID NO: 1884659
gugaucuaggauugagcca

SEQ ID NO: 2282091 - RNA, 19 nt, Artificial Sequence
  Description of Artificial Sequence: Synthetic oligonucleotide
  Antisense strand to SEQ ID NO: 2282090
uggcucaauccuagaucac

SEQ ID NO: 2282092 - RNA, 19 nt, Artificial Sequence
  Description of Artificial Sequence: Synthetic oligonucleotide
  Sense strand starting at position 2418 of SEQ ID NO: 1884659
ucuuuaaccuuguaugguu

SEQ ID NO: 2282093 - RNA, 19 nt, Artificial Sequence
  Description of Artificial Sequence: Synthetic oligonucleotide
  Antisense strand to SEQ ID NO: 2282092
aaccauacaagguuaaaga

SEQ ID NO: 2282094 - RNA, 19 nt, Artificial Sequence
  Description of Artificial Sequence: Synthetic oligonucleotide
  Sense strand starting at position 2598 of SEQ ID NO: 1884659
ggcucaaagugacugugau

SEQ ID NO: 2282095 - RNA, 19 nt, Artificial Sequence
  Description of Artificial Sequence: Synthetic oligonucleotide
  Antisense strand to SEQ ID NO: 2282094
aucacagucacuuugagcc

SEQ ID NO: 2282096 - RNA, 19 nt, Artificial Sequence
  Description of Artificial Sequence: Synthetic oligonucleotide
  Sense strand starting at position 2599 of SEQ ID NO: 1884659
gcucaaagugacugugaug

SEQ ID NO: 2282097 - RNA, 19 nt, Artificial Sequence
  Description of Artificial Sequence: Synthetic oligonucleotide
  Antisense strand to SEQ ID NO: 2282096
caucacagucacuuugagc

SEQ ID NO: 2282098 - RNA, 19 nt, Artificial Sequence
  Description of Artificial Sequence: Synthetic oligonucleotide
  Sense strand starting at position 2602 of SEQ ID NO: 1884659
caaagugacugugaugguu

SEQ ID NO: 2282099 - RNA, 19 nt, Artificial Sequence
  Description of Artificial Sequence: Synthetic oligonucleotide
  Antisense strand to SEQ ID NO: 2282098
aaccaucacagucacuuug

SEQ ID NO: 2282100 - RNA, 19 nt, Artificial Sequence
  Description of Artificial Sequence: Synthetic oligonucleotide
  Sense strand starting at position 2604 of SEQ ID NO: 1884659
aagugacugugaugguuaa

SEQ ID NO: 2282101 - RNA, 19 nt, Artificial Sequence
  Description of Artificial Sequence: Synthetic oligonucleotide
  Antisense strand to SEQ ID NO: 2282100
uuaaccaucacagucacuu

SEQ ID NO: 2282102 - RNA, 19 nt, Artificial Sequence
  Description of Artificial Sequence: Synthetic oligonucleotide
  Sense strand starting at position 2810 of SEQ ID NO: 1884659
gagagacuugucuagccuc

SEQ ID NO: 2282103 - RNA, 19 nt, Artificial Sequence
  Description of Artificial Sequence: Synthetic oligonucleotide
  Antisense strand to SEQ ID NO: 2282102
gaggcuagacaagucucuc

SEQ ID NO: 2282104 - RNA, 19 nt, Artificial Sequence
  Description of Artificial Sequence: Synthetic oligonucleotide
  Sense strand starting at position 2954 of SEQ ID NO: 1884659
ucuugugauuguguaauua

SEQ ID NO: 2282105 - RNA, 19 nt, Artificial Sequence
  Description of Artificial Sequence: Synthetic oligonucleotide
  Antisense strand to SEQ ID NO: 2282104
uaauuacacaaucacaaga

SEQ ID NO: 2282106 - RNA, 19 nt, Artificial Sequence
  Description of Artificial Sequence: Synthetic oligonucleotide
  Sense strand starting at position 3181 of SEQ ID NO: 1884659
gucacucauuuaugaggaa

SEQ ID NO: 2282107 - RNA, 19 nt, Artificial Sequence
  Description of Artificial Sequence: Synthetic oligonucleotide
  Antisense strand to SEQ ID NO: 2282106
uuccucauaaaugagugac

SEQ ID NO: 2282108 - RNA, 19 nt, Artificial Sequence
  Description of Artificial Sequence: Synthetic oligonucleotide
  Sense strand starting at position 3182 of SEQ ID NO: 1884659
ucacucauuuaugaggaaa

SEQ ID NO: 2282109 - RNA, 19 nt, Artificial Sequence
  Description of Artificial Sequence: Synthetic oligonucleotide
  Antisense strand to SEQ ID NO: 2282108
uuuccucauaaaugaguga

SEQ ID NO: 2282110 - RNA, 19 nt, Artificial Sequence
  Description of Artificial Sequence: Synthetic oligonucleotide
  Sense strand starting at position 3184 of SEQ ID NO: 1884659
acucauuuaugaggaaaug

SEQ ID NO: 2282111 - RNA, 19 nt, Artificial Sequence
  Description of Artificial Sequence: Synthetic oligonucleotide
  Antisense strand to SEQ ID NO: 2282110
cauuuccucauaaaugagu

SEQ ID NO: 2282112 - RNA, 19 nt, Artificial Sequence
  Description of Artificial Sequence: Synthetic oligonucleotide
  Sense strand starting at position 3196 of SEQ ID NO: 1884659
ggaaaugucugccaaauac

SEQ ID NO: 2282113 - RNA, 19 nt, Artificial Sequence
  Description of Artificial Sequence: Synthetic oligonucleotide
  Antisense strand to SEQ ID NO: 2282112
guauuuggcagacauuucc

SEQ ID NO: 2282114 - RNA, 19 nt, Artificial Sequence
  Description of Artificial Sequence: Synthetic oligonucleotide
  Sense strand starting at position 3234 of SEQ ID NO: 1884659
gucggucugcccguuguau

SEQ ID NO: 2282115 - RNA, 19 nt, Artificial Sequence
  Description of Artificial Sequence: Synthetic oligonucleotide
  Antisense strand to SEQ ID NO: 2282114
auacaacgggcagaccgac

SEQ ID NO: 2282116 - RNA, 19 nt, Artificial Sequence
  Description of Artificial Sequence: Synthetic oligonucleotide
  Sense strand starting at position 3235 of SEQ ID NO: 1884659
ucggucugcccguuguauu

SEQ ID NO: 2282117 - RNA, 19 nt, Artificial Sequence
  Description of Artificial Sequence: Synthetic oligonucleotide
  Antisense strand to SEQ ID NO: 2282116
aauacaacgggcagaccga

SEQ ID NO: 2282118 - RNA, 19 nt, Artificial Sequence
  Description of Artificial Sequence: Synthetic oligonucleotide
  Sense strand starting at position 3236 of SEQ ID NO: 1884659
cggucugcccguuguauuu

SEQ ID NO: 2282119 - RNA, 19 nt, Artificial Sequence
  Description of Artificial Sequence: Synthetic oligonucleotide
  Antisense strand to SEQ ID NO: 2282118
aaauacaacgggcagaccg

SEQ ID NO: 2282120 - RNA, 19 nt, Artificial Sequence
  Description of Artificial Sequence: Synthetic oligonucleotide
  Sense strand starting at position 3316 of SEQ ID NO: 1884659
uuaguuuguagcuggagua

SEQ ID NO: 2282121 - RNA, 19 nt, Artificial Sequence
  Description of Artificial Sequence: Synthetic oligonucleotide
  Antisense strand to SEQ ID NO: 2282120
uacuccagcuacaaacuaa

SEQ ID NO: 2282122 - RNA, 19 nt, Artificial Sequence
  Description of Artificial Sequence: Synthetic oligonucleotide
  Sense strand starting at position 3326 of SEQ ID NO: 1884659
gcuggaguacuuuagguac

SEQ ID NO: 2282123 - RNA, 19 nt, Artificial Sequence
  Description of Artificial Sequence: Synthetic oligonucleotide
  Antisense strand to SEQ ID NO: 2282122
guaccuaaaguacuccagc

SEQ ID NO: 2282124 - RNA, 19 nt, Artificial Sequence
  Description of Artificial Sequence: Synthetic oligonucleotide
  Sense strand starting at position 3329 of SEQ ID NO: 1884659
ggaguacuuuagguacacu

SEQ ID NO: 2282125 - RNA, 19 nt, Artificial Sequence
  Description of Artificial Sequence: Synthetic oligonucleotide
  Antisense strand to SEQ ID NO: 2282124
aguguaccuaaaguacucc

SEQ ID NO: 2282126 - RNA, 19 nt, Artificial Sequence
  Description of Artificial Sequence: Synthetic oligonucleotide
  Sense strand starting at position 3359 of SEQ ID NO: 1884659
uaagaagacuauugggaag

SEQ ID NO: 2282127 - RNA, 19 nt, Artificial Sequence
  Description of Artificial Sequence: Synthetic oligonucleotide
  Antisense strand to SEQ ID NO: 2282126
cuucccaauagucuucuua

SEQ ID NO: 2282128 - RNA, 19 nt, Artificial Sequence
  Description of Artificial Sequence: Synthetic oligonucleotide
  Sense strand starting at position 3474 of SEQ ID NO: 1884659
acuggaagcgcaugaugau

SEQ ID NO: 2282129 - RNA, 19 nt, Artificial Sequence
  Description of Artificial Sequence: Synthetic oligonucleotide
  Antisense strand to SEQ ID NO: 2282128
aucaucaugcgcuuccagu

SEQ ID NO: 2282130 - RNA, 19 nt, Artificial Sequence
  Description of Artificial Sequence: Synthetic oligonucleotide
  Sense strand starting at position 3512 of SEQ ID NO: 1884659
agcagaguuuggugacaau

SEQ ID NO: 2282131 - RNA, 19 nt, Artificial Sequence
  Description of Artificial Sequence: Synthetic oligonucleotide
  Antisense strand to SEQ ID NO: 2282130
auugucaccaaacucugcu

SEQ ID NO: 2282132 - RNA, 19 nt, Artificial Sequence
  Description of Artificial Sequence: Synthetic oligonucleotide
  Sense strand starting at position 3521 of SEQ ID NO: 1884659
uggugacaauggcuugauu

SEQ ID NO: 2282133 - RNA, 19 nt, Artificial Sequence
  Description of Artificial Sequence: Synthetic oligonucleotide
  Antisense strand to SEQ ID NO: 2282132
aaucaagccauugucacca

SEQ ID NO: 2282134 - RNA, 19 nt, Artificial Sequence
  Description of Artificial Sequence: Synthetic oligonucleotide
  Sense strand starting at position 3705 of SEQ ID NO: 1884659
acuguuacuuuagggaacu

SEQ ID NO: 2282135 - RNA, 19 nt, Artificial Sequence
  Description of Artificial Sequence: Synthetic oligonucleotide
  Antisense strand to SEQ ID NO: 2282134
aguucccuaaaguaacagu

SEQ ID NO: 2282136 - RNA, 19 nt, Artificial Sequence
  Description of Artificial Sequence: Synthetic oligonucleotide
  Sense strand starting at position 3715 of SEQ ID NO: 1884659
uagggaacuccuugaaugu

SEQ ID NO: 2282137 - RNA, 19 nt, Artificial Sequence
  Description of Artificial Sequence: Synthetic oligonucleotide
  Antisense strand to SEQ ID NO: 2282136
acauucaaggaguucccua

SEQ ID NO: 2282138 - RNA, 19 nt, Artificial Sequence
  Description of Artificial Sequence: Synthetic oligonucleotide
  Sense strand starting at position 3726 of SEQ ID NO: 1884659
uugaaugucuauugcauua

SEQ ID NO: 2282139 - RNA, 19 nt, Artificial Sequence
  Description of Artificial Sequence: Synthetic oligonucleotide
  Antisense strand to SEQ ID NO: 2282138
uaaugcaauagacauucaa

SEQ ID NO: 2282140 - RNA, 19 nt, Artificial Sequence
  Description of Artificial Sequence: Synthetic oligonucleotide
  Sense strand starting at position 3728 of SEQ ID NO: 1884659
gaaugucuauugcauuagu

SEQ ID NO: 2282141 - RNA, 19 nt, Artificial Sequence
  Description of Artificial Sequence: Synthetic oligonucleotide
  Antisense strand to SEQ ID NO: 2282140
acuaaugcaauagacauuc

SEQ ID NO: 2282142 - RNA, 19 nt, Artificial Sequence
  Description of Artificial Sequence: Synthetic oligonucleotide
  Sense strand starting at position 3783 of SEQ ID NO: 1884659
uggguaauuuaccaacaaa

SEQ ID NO: 2282143 - RNA, 19 nt, Artificial Sequence
  Description of Artificial Sequence: Synthetic oligonucleotide
  Antisense strand to SEQ ID NO: 2282142
uuuguugguaaauuaccca

SEQ ID NO: 2282144 - RNA, 19 nt, Artificial Sequence
  Description of Artificial Sequence: Synthetic oligonucleotide
  Sense strand starting at position 800 of SEQ ID NO: 1884660
cgggcuccuccagauggaa

SEQ ID NO: 2282145 - RNA, 19 nt, Artificial Sequence
  Description of Artificial Sequence: Synthetic oligonucleotide
  Antisense strand to SEQ ID NO: 2282144
uuccaucuggaggagcccg

SEQ ID NO: 2282146 - RNA, 19 nt, Artificial Sequence
  Description of Artificial Sequence: Synthetic oligonucleotide
  Sense strand starting at position 1479 of SEQ ID NO: 1884660
cuaagauguugggcucaga

SEQ ID NO: 2282147 - RNA, 19 nt, Artificial Sequence
  Description of Artificial Sequence: Synthetic oligonucleotide
  Antisense strand to SEQ ID NO: 2282146
ucugagcccaacaucuuag

SEQ ID NO: 2282148 - RNA, 19 nt, Artificial Sequence
  Description of Artificial Sequence: Synthetic oligonucleotide
  Sense strand starting at position 1569 of SEQ ID NO: 1884660
gaaauaugcugacuuaggu

SEQ ID NO: 2282149 - RNA, 19 nt, Artificial Sequence
  Description of Artificial Sequence: Synthetic oligonucleotide
  Antisense strand to SEQ ID NO: 2282148
accuaagucagcauauuuc

SEQ ID NO: 2282150 - RNA, 19 nt, Artificial Sequence
  Description of Artificial Sequence: Synthetic oligonucleotide
  Sense strand starting at position 1625 of SEQ ID NO: 1884660
ugagauaacugacugugau

SEQ ID NO: 2282151 - RNA, 19 nt, Artificial Sequence
  Description of Artificial Sequence: Synthetic oligonucleotide
  Antisense strand to SEQ ID NO: 2282150
aucacagucaguuaucuca

SEQ ID NO: 2282152 - RNA, 19 nt, Artificial Sequence
  Description of Artificial Sequence: Synthetic oligonucleotide
  Sense strand starting at position 1656 of SEQ ID NO: 1884660
gcuauaagagccuauaaga

SEQ ID NO: 2282153 - RNA, 19 nt, Artificial Sequence
  Description of Artificial Sequence: Synthetic oligonucleotide
  Antisense strand to SEQ ID NO: 2282152
ucuuauaggcucuuauagc

SEQ ID NO: 2282154 - RNA, 19 nt, Artificial Sequence
  Description of Artificial Sequence: Synthetic oligonucleotide
  Sense strand starting at position 1803 of SEQ ID NO: 1884660
gcaagugucucuguauuuc

SEQ ID NO: 2282155 - RNA, 19 nt, Artificial Sequence
  Description of Artificial Sequence: Synthetic oligonucleotide
  Antisense strand to SEQ ID NO: 2282154
gaaauacagagacacuugc

SEQ ID NO: 2282156 - RNA, 19 nt, Artificial Sequence
  Description of Artificial Sequence: Synthetic oligonucleotide
  Sense strand starting at position 1812 of SEQ ID NO: 1884660
ucuguauuucuggguuuag

SEQ ID NO: 2282157 - RNA, 19 nt, Artificial Sequence
  Description of Artificial Sequence: Synthetic oligonucleotide
  Antisense strand to SEQ ID NO: 2282156
cuaaacccagaaauacaga

SEQ ID NO: 2282158 - RNA, 19 nt, Artificial Sequence
  Description of Artificial Sequence: Synthetic oligonucleotide
  Sense strand starting at position 1813 of SEQ ID NO: 1884660
cuguauuucuggguuuagu

SEQ ID NO: 2282159 - RNA, 19 nt, Artificial Sequence
  Description of Artificial Sequence: Synthetic oligonucleotide
  Antisense strand to SEQ ID NO: 2282158
acuaaacccagaaauacag

SEQ ID NO: 2282160 - RNA, 19 nt, Artificial Sequence
  Description of Artificial Sequence: Synthetic oligonucleotide
  Sense strand starting at position 1896 of SEQ ID NO: 1884660
ggccucuucugauccagaa

SEQ ID NO: 2282161 - RNA, 19 nt, Artificial Sequence
  Description of Artificial Sequence: Synthetic oligonucleotide
  Antisense strand to SEQ ID NO: 2282160
uucuggaucagaagaggcc

SEQ ID NO: 2282162 - RNA, 19 nt, Artificial Sequence
  Description of Artificial Sequence: Synthetic oligonucleotide
  Sense strand starting at position 2046 of SEQ ID NO: 1884660
gugcuaaccucuuuagaua

SEQ ID NO: 2282163 - RNA, 19 nt, Artificial Sequence
  Description of Artificial Sequence: Synthetic oligonucleotide
  Antisense strand to SEQ ID NO: 2282162
uaucuaaagagguuagcac

SEQ ID NO: 2282164 - RNA, 19 nt, Artificial Sequence
  Description of Artificial Sequence: Synthetic oligonucleotide
  Sense strand starting at position 2267 of SEQ ID NO: 1884660
ccaagcauucugcaagauu

SEQ ID NO: 2282165 - RNA, 19 nt, Artificial Sequence
  Description of Artificial Sequence: Synthetic oligonucleotide
  Antisense strand to SEQ ID NO: 2282164
aaucuugcagaaugcuugg

SEQ ID NO: 2282166 - RNA, 19 nt, Artificial Sequence
  Description of Artificial Sequence: Synthetic oligonucleotide
  Sense strand starting at position 2270 of SEQ ID NO: 1884660
agcauucugcaagauugag

SEQ ID NO: 2282167 - RNA, 19 nt, Artificial Sequence
  Description of Artificial Sequence: Synthetic oligonucleotide
  Antisense strand to SEQ ID NO: 2282166
cucaaucuugcagaaugcu

SEQ ID NO: 2282168 - RNA, 19 nt, Artificial Sequence
  Description of Artificial Sequence: Synthetic oligonucleotide
  Sense strand starting at position 2276 of SEQ ID NO: 1884660
cugcaagauugagccuuua

SEQ ID NO: 2282169 - RNA, 19 nt, Artificial Sequence
  Description of Artificial Sequence: Synthetic oligonucleotide
  Antisense strand to SEQ ID NO: 2282168
uaaaggcucaaucuugcag

SEQ ID NO: 2282170 - RNA, 19 nt, Artificial Sequence
  Description of Artificial Sequence: Synthetic oligonucleotide
  Sense strand starting at position 2394 of SEQ ID NO: 1884660
caaauacugugcuuggaga

SEQ ID NO: 2282171 - RNA, 19 nt, Artificial Sequence
  Description of Artificial Sequence: Synthetic oligonucleotide
  Antisense strand to SEQ ID NO: 2282170
ucuccaagcacaguauuug

SEQ ID NO: 2282172 - RNA, 19 nt, Artificial Sequence
  Description of Artificial Sequence: Synthetic oligonucleotide
  Sense strand starting at position 2427 of SEQ ID NO: 1884660
gagagaggccagcauucuu

SEQ ID NO: 2282173 - RNA, 19 nt, Artificial Sequence
  Description of Artificial Sequence: Synthetic oligonucleotide
  Antisense strand to SEQ ID NO: 2282172
aagaaugcuggccucucuc

SEQ ID NO: 2282174 - RNA, 19 nt, Artificial Sequence
  Description of Artificial Sequence: Synthetic oligonucleotide
  Sense strand starting at position 2445 of SEQ ID NO: 1884660
ucugcucucuuggugagaa

SEQ ID NO: 2282175 - RNA, 19 nt, Artificial Sequence
  Description of Artificial Sequence: Synthetic oligonucleotide
  Antisense strand to SEQ ID NO: 2282174
uucucaccaagagagcaga

SEQ ID NO: 2282176 - RNA, 19 nt, Artificial Sequence
  Description of Artificial Sequence: Synthetic oligonucleotide
  Sense strand starting at position 2447 of SEQ ID NO: 1884660
ugcucucuuggugagaaug

SEQ ID NO: 2282177 - RNA, 19 nt, Artificial Sequence
  Description of Artificial Sequence: Synthetic oligonucleotide
  Antisense strand to SEQ ID NO: 2282176
cauucucaccaagagagca

SEQ ID NO: 2282178 - RNA, 19 nt, Artificial Sequence
  Description of Artificial Sequence: Synthetic oligonucleotide
  Sense strand starting at position 2457 of SEQ ID NO: 1884660
gugagaaugaaccguccau

SEQ ID NO: 2282179 - RNA, 19 nt, Artificial Sequence
  Description of Artificial Sequence: Synthetic oligonucleotide
  Antisense strand to SEQ ID NO: 2282178
auggacgguucauucucac

SEQ ID NO: 2282180 - RNA, 19 nt, Artificial Sequence
  Description of Artificial Sequence: Synthetic oligonucleotide
  Sense strand starting at position 2473 of SEQ ID NO: 1884660
cauuaagccuguuugagau

SEQ ID NO: 2282181 - RNA, 19 nt, Artificial Sequence
  Description of Artificial Sequence: Synthetic oligonucleotide
  Antisense strand to SEQ ID NO: 2282180
aucucaaacaggcuuaaug

SEQ ID NO: 2282182 - RNA, 19 nt, Artificial Sequence
  Description of Artificial Sequence: Synthetic oligonucleotide
  Sense strand starting at position 2523 of SEQ ID NO: 1884660
cuagguuaccucuacagua

SEQ ID NO: 2282183 - RNA, 19 nt, Artificial Sequence
  Description of Artificial Sequence: Synthetic oligonucleotide
  Antisense strand to SEQ ID NO: 2282182
uacuguagagguaaccuag

SEQ ID NO: 2282184 - RNA, 19 nt, Artificial Sequence
  Description of Artificial Sequence: Synthetic oligonucleotide
  Sense strand starting at position 2525 of SEQ ID NO: 1884660
agguuaccucuacaguagu

SEQ ID NO: 2282185 - RNA, 19 nt, Artificial Sequence
  Description of Artificial Sequence: Synthetic oligonucleotide
  Antisense strand to SEQ ID NO: 2282184
acuacuguagagguaaccu

SEQ ID NO: 2282186 - RNA, 19 nt, Artificial Sequence
  Description of Artificial Sequence: Synthetic oligonucleotide
  Sense strand starting at position 2538 of SEQ ID NO: 1884660
aguaguaucuaaccaaucu

SEQ ID NO: 2282187 - RNA, 19 nt, Artificial Sequence
  Description of Artificial Sequence: Synthetic oligonucleotide
  Antisense strand to SEQ ID NO: 2282186
agauugguuagauacuacu

SEQ ID NO: 2282188 - RNA, 19 nt, Artificial Sequence
  Description of Artificial Sequence: Synthetic oligonucleotide
  Sense strand starting at position 2576 of SEQ ID NO: 1884660
cucauauguguuuacaaga

SEQ ID NO: 2282189 - RNA, 19 nt, Artificial Sequence
  Description of Artificial Sequence: Synthetic oligonucleotide
  Antisense strand to SEQ ID NO: 2282188
ucuuguaaacacauaugag

SEQ ID NO: 2282190 - RNA, 19 nt, Artificial Sequence
  Description of Artificial Sequence: Synthetic oligonucleotide
  Sense strand starting at position 2581 of SEQ ID NO: 1884660
auguguuuacaagaacacu

SEQ ID NO: 2282191 - RNA, 19 nt, Artificial Sequence
  Description of Artificial Sequence: Synthetic oligonucleotide
  Antisense strand to SEQ ID NO: 2282190
aguguucuuguaaacacau

SEQ ID NO: 2282192 - RNA, 19 nt, Artificial Sequence
  Description of Artificial Sequence: Synthetic oligonucleotide
  Sense strand starting at position 2720 of SEQ ID NO: 1884660
ucagguuugagugauucua

SEQ ID NO: 2282193 - RNA, 19 nt, Artificial Sequence
  Description of Artificial Sequence: Synthetic oligonucleotide
  Antisense strand to SEQ ID NO: 2282192
uagaaucacucaaaccuga

SEQ ID NO: 2282194 - RNA, 19 nt, Artificial Sequence
  Description of Artificial Sequence: Synthetic oligonucleotide
  Sense strand starting at position 2730 of SEQ ID NO: 1884660
gugauucuaggaugugauu

SEQ ID NO: 2282195 - RNA, 19 nt, Artificial Sequence
  Description of Artificial Sequence: Synthetic oligonucleotide
  Antisense strand to SEQ ID NO: 2282194
aaucacauccuagaaucac

SEQ ID NO: 2282196 - RNA, 19 nt, Artificial Sequence
  Description of Artificial Sequence: Synthetic oligonucleotide
  Sense strand starting at position 2895 of SEQ ID NO: 1884660
ugcacaacucuaugugauu

SEQ ID NO: 2282197 - RNA, 19 nt, Artificial Sequence
  Description of Artificial Sequence: Synthetic oligonucleotide
  Antisense strand to SEQ ID NO: 2282196
aaucacauagaguugugca

SEQ ID NO: 2282198 - RNA, 19 nt, Artificial Sequence
  Description of Artificial Sequence: Synthetic oligonucleotide
  Sense strand starting at position 2896 of SEQ ID NO: 1884660
gcacaacucuaugugauua

SEQ ID NO: 2282199 - RNA, 19 nt, Artificial Sequence
  Description of Artificial Sequence: Synthetic oligonucleotide
  Antisense strand to SEQ ID NO: 2282198
uaaucacauagaguugugc

SEQ ID NO: 2282200 - RNA, 19 nt, Artificial Sequence
  Description of Artificial Sequence: Synthetic oligonucleotide
  Sense strand starting at position 3002 of SEQ ID NO: 1884660
gaccgucacauugggagaa

SEQ ID NO: 2282201 - RNA, 19 nt, Artificial Sequence
  Description of Artificial Sequence: Synthetic oligonucleotide
  Antisense strand to SEQ ID NO: 2282200
uucucccaaugugacgguc

SEQ ID NO: 2282202 - RNA, 19 nt, Artificial Sequence
  Description of Artificial Sequence: Synthetic oligonucleotide
  Sense strand starting at position 3021 of SEQ ID NO: 1884660
gcaauauuugcuggagcca

SEQ ID NO: 2282203 - RNA, 19 nt, Artificial Sequence
  Description of Artificial Sequence: Synthetic oligonucleotide
  Antisense strand to SEQ ID NO: 2282202
uggcuccagcaaauauugc

SEQ ID NO: 2282204 - RNA, 19 nt, Artificial Sequence
  Description of Artificial Sequence: Synthetic oligonucleotide
  Sense strand starting at position 3063 of SEQ ID NO: 1884660
guuaacuugcaguauuaaa

SEQ ID NO: 2282205 - RNA, 19 nt, Artificial Sequence
  Description of Artificial Sequence: Synthetic oligonucleotide
  Antisense strand to SEQ ID NO: 2282204
uuuaauacugcaaguuaac

SEQ ID NO: 2282206 - RNA, 19 nt, Artificial Sequence
  Description of Artificial Sequence: Synthetic oligonucleotide
  Sense strand starting at position 3113 of SEQ ID NO: 1884660
cugauauuaucaguguuaa

SEQ ID NO: 2282207 - RNA, 19 nt, Artificial Sequence
  Description of Artificial Sequence: Synthetic oligonucleotide
  Antisense strand to SEQ ID NO: 2282206
uuaacacugauaauaucag

SEQ ID NO: 2282208 - RNA, 19 nt, Artificial Sequence
  Description of Artificial Sequence: Synthetic oligonucleotide
  Sense strand starting at position 3374 of SEQ ID NO: 1884660
aguagcugugugccuuaua

SEQ ID NO: 2282209 - RNA, 19 nt, Artificial Sequence
  Description of Artificial Sequence: Synthetic oligonucleotide
  Antisense strand to SEQ ID NO: 2282208
uauaaggcacacagcuacu

SEQ ID NO: 2282210 - RNA, 19 nt, Artificial Sequence
  Description of Artificial Sequence: Synthetic oligonucleotide
  Sense strand starting at position 3860 of SEQ ID NO: 1884660
agaacaaucucaguugagu

SEQ ID NO: 2282211 - RNA, 19 nt, Artificial Sequence
  Description of Artificial Sequence: Synthetic oligonucleotide
  Antisense strand to SEQ ID NO: 2282210
acucaacugagauuguucu

SEQ ID NO: 2282212 - RNA, 19 nt, Artificial Sequence
  Description of Artificial Sequence: Synthetic oligonucleotide
  Sense strand starting at position 3866 of SEQ ID NO: 1884660
aucucaguugaguggugau

SEQ ID NO: 2282213 - RNA, 19 nt, Artificial Sequence
  Description of Artificial Sequence: Synthetic oligonucleotide
  Antisense strand to SEQ ID NO: 2282212
aucaccacucaacugagau

SEQ ID NO: 2282214 - RNA, 19 nt, Artificial Sequence
  Description of Artificial Sequence: Synthetic oligonucleotide
  Sense strand starting at position 3879 of SEQ ID NO: 1884660
ggugauauaucuucugaag

SEQ ID NO: 2282215 - RNA, 19 nt, Artificial Sequence
  Description of Artificial Sequence: Synthetic oligonucleotide
  Antisense strand to SEQ ID NO: 2282214
cuucagaagauauaucacc

SEQ ID NO: 2282216 - RNA, 19 nt, Artificial Sequence
  Description of Artificial Sequence: Synthetic oligonucleotide
  Sense strand starting at position 3896 of SEQ ID NO: 1884660
agaacaauaacgcagguua

SEQ ID NO: 2282217 - RNA, 19 nt, Artificial Sequence
  Description of Artificial Sequence: Synthetic oligonucleotide
  Antisense strand to SEQ ID NO: 2282216
uaaccugcguuauuguucu

SEQ ID NO: 2282218 - RNA, 19 nt, Artificial Sequence
  Description of Artificial Sequence: Synthetic oligonucleotide
  Sense strand starting at position 3924 of SEQ ID NO: 1884660
aaguaaugacgcuauauag

SEQ ID NO: 2282219 - RNA, 19 nt, Artificial Sequence
  Description of Artificial Sequence: Synthetic oligonucleotide
  Antisense strand to SEQ ID NO: 2282218
cuauauagcgucauuacuu

SEQ ID NO: 2282220 - RNA, 19 nt, Artificial Sequence
  Description of Artificial Sequence: Synthetic oligonucleotide
  Sense strand starting at position 3952 of SEQ ID NO: 1884660
ugaggagaagcgugucuaa

SEQ ID NO: 2282221 - RNA, 19 nt, Artificial Sequence
  Description of Artificial Sequence: Synthetic oligonucleotide
  Antisense strand to SEQ ID NO: 2282220
uuagacacgcuucuccuca

SEQ ID NO: 2282222 - RNA, 19 nt, Artificial Sequence
  Description of Artificial Sequence: Synthetic oligonucleotide
  Sense strand starting at position 3955 of SEQ ID NO: 1884660
ggagaagcgugucuaacaa

SEQ ID NO: 2282223 - RNA, 19 nt, Artificial Sequence
  Description of Artificial Sequence: Synthetic oligonucleotide
  Antisense strand to SEQ ID NO: 2282222
uuguuagacacgcuucucc

SEQ ID NO: 2282224 - RNA, 19 nt, Artificial Sequence
  Description of Artificial Sequence: Synthetic oligonucleotide
  Sense strand starting at position 79 of SEQ ID NO: 1884661
uuuaguaccuuacuguauu

SEQ ID NO: 2282225 - RNA, 19 nt, Artificial Sequence
  Description of Artificial Sequence: Synthetic oligonucleotide
  Antisense strand to SEQ ID NO: 2282224
aauacaguaagguacuaaa

SEQ ID NO: 2282226 - RNA, 19 nt, Artificial Sequence
  Description of Artificial Sequence: Synthetic oligonucleotide
  Sense strand starting at position 87 of SEQ ID NO: 1884661
cuuacuguauuuggaaaga

SEQ ID NO: 2282227 - RNA, 19 nt, Artificial Sequence
  Description of Artificial Sequence: Synthetic oligonucleotide
  Antisense strand to SEQ ID NO: 2282226
ucuuuccaaauacaguaag

SEQ ID NO: 2282228 - RNA, 19 nt, Artificial Sequence
  Description of Artificial Sequence: Synthetic oligonucleotide
  Sense strand starting at position 589 of SEQ ID NO: 1884661
ccagucuccugccuggaaa

SEQ ID NO: 2282229 - RNA, 19 nt, Artificial Sequence
  Description of Artificial Sequence: Synthetic oligonucleotide
  Antisense strand to SEQ ID NO: 2282228
uuuccaggcaggagacugg

SEQ ID NO: 2282230 - RNA, 19 nt, Artificial Sequence
  Description of Artificial Sequence: Synthetic oligonucleotide
  Sense strand starting at position 751 of SEQ ID NO: 1884661
ccuuguacugaucauuacu

SEQ ID NO: 2282231 - RNA, 19 nt, Artificial Sequence
  Description of Artificial Sequence: Synthetic oligonucleotide
  Antisense strand to SEQ ID NO: 2282230
aguaaugaucaguacaagg

SEQ ID NO: 2282232 - RNA, 19 nt, Artificial Sequence
  Description of Artificial Sequence: Synthetic oligonucleotide
  Sense strand starting at position 805 of SEQ ID NO: 1884661
agcaauacagguuauaauu

SEQ ID NO: 2282233 - RNA, 19 nt, Artificial Sequence
  Description of Artificial Sequence: Synthetic oligonucleotide
  Antisense strand to SEQ ID NO: 2282232
aauuauaaccuguauugcu

SEQ ID NO: 2282234 - RNA, 19 nt, Artificial Sequence
  Description of Artificial Sequence: Synthetic oligonucleotide
  Sense strand starting at position 929 of SEQ ID NO: 1884661
ucauucgucaacgaguauu

SEQ ID NO: 2282235 - RNA, 19 nt, Artificial Sequence
  Description of Artificial Sequence: Synthetic oligonucleotide
  Antisense strand to SEQ ID NO: 2282234
aauacucguugacgaauga

SEQ ID NO: 2282236 - RNA, 19 nt, Artificial Sequence
  Description of Artificial Sequence: Synthetic oligonucleotide
  Sense strand starting at position 1036 of SEQ ID NO: 1884661
gccagagagacugacguua

SEQ ID NO: 2282237 - RNA, 19 nt, Artificial Sequence
  Description of Artificial Sequence: Synthetic oligonucleotide
  Antisense strand to SEQ ID NO: 2282236
uaacgucagucucucuggc

SEQ ID NO: 2282238 - RNA, 19 nt, Artificial Sequence
  Description of Artificial Sequence: Synthetic oligonucleotide
  Sense strand starting at position 1084 of SEQ ID NO: 1884661
ugauacgugcuaugaagaa

SEQ ID NO: 2282239 - RNA, 19 nt, Artificial Sequence
  Description of Artificial Sequence: Synthetic oligonucleotide
  Antisense strand to SEQ ID NO: 2282238
uucuucauagcacguauca

SEQ ID NO: 2282240 - RNA, 19 nt, Artificial Sequence
  Description of Artificial Sequence: Synthetic oligonucleotide
  Sense strand starting at position 1276 of SEQ ID NO: 1884661
agcagagugucagcaaaua

SEQ ID NO: 2282241 - RNA, 19 nt, Artificial Sequence
  Description of Artificial Sequence: Synthetic oligonucleotide
  Antisense strand to SEQ ID NO: 2282240
uauuugcugacacucugcu

SEQ ID NO: 2282242 - RNA, 19 nt, Artificial Sequence
  Description of Artificial Sequence: Synthetic oligonucleotide
  Sense strand starting at position 2287 of SEQ ID NO: 1884661
cagcgauggcaucaccauu

SEQ ID NO: 2282243 - RNA, 19 nt, Artificial Sequence
  Description of Artificial Sequence: Synthetic oligonucleotide
  Antisense strand to SEQ ID NO: 2282242
aauggugaugccaucgcug

SEQ ID NO: 2282244 - RNA, 19 nt, Artificial Sequence
  Description of Artificial Sequence: Synthetic oligonucleotide
  Sense strand starting at position 2384 of SEQ ID NO: 1884661
uuuggugugcguucgcaaa

SEQ ID NO: 2282245 - RNA, 19 nt, Artificial Sequence
  Description of Artificial Sequence: Synthetic oligonucleotide
  Antisense strand to SEQ ID NO: 2282244
uuugcgaacgcacaccaaa

SEQ ID NO: 2282246 - RNA, 19 nt, Artificial Sequence
  Description of Artificial Sequence: Synthetic oligonucleotide
  Sense strand starting at position 2585 of SEQ ID NO: 1884661
acuggauaaucgucaccca

SEQ ID NO: 2282247 - RNA, 19 nt, Artificial Sequence
  Description of Artificial Sequence: Synthetic oligonucleotide
  Antisense strand to SEQ ID NO: 2282246
ugggugacgauuauccagu

SEQ ID NO: 2282248 - RNA, 19 nt, Artificial Sequence
  Description of Artificial Sequence: Synthetic oligonucleotide
  Sense strand starting at position 2586 of SEQ ID NO: 1884661
cuggauaaucgucacccaa

SEQ ID NO: 2282249 - RNA, 19 nt, Artificial Sequence
  Description of Artificial Sequence: Synthetic oligonucleotide
  Antisense strand to SEQ ID NO: 2282248
uugggugacgauuauccag

SEQ ID NO: 2282250 - RNA, 19 nt, Artificial Sequence
  Description of Artificial Sequence: Synthetic oligonucleotide
  Sense strand starting at position 2826 of SEQ ID NO: 1884661
ugggaagugucuccaauga

SEQ ID NO: 2282251 - RNA, 19 nt, Artificial Sequence
  Description of Artificial Sequence: Synthetic oligonucleotide
  Antisense strand to SEQ ID NO: 2282250
ucauuggagacacuuccca

SEQ ID NO: 2282252 - RNA, 19 nt, Artificial Sequence
  Description of Artificial Sequence: Synthetic oligonucleotide
  Sense strand starting at position 2944 of SEQ ID NO: 1884661
accuguggcaucuggagaa

SEQ ID NO: 2282253 - RNA, 19 nt, Artificial Sequence
  Description of Artificial Sequence: Synthetic oligonucleotide
  Antisense strand to SEQ ID NO: 2282252
uucuccagaugccacaggu

SEQ ID NO: 2282254 - RNA, 19 nt, Artificial Sequence
  Description of Artificial Sequence: Synthetic oligonucleotide
  Sense strand starting at position 2957 of SEQ ID NO: 1884661
ggagaacgucgaugaccau

SEQ ID NO: 2282255 - RNA, 19 nt, Artificial Sequence
  Description of Artificial Sequence: Synthetic oligonucleotide
  Antisense strand to SEQ ID NO: 2282254
auggucaucgacguucucc

SEQ ID NO: 2282256 - RNA, 19 nt, Artificial Sequence
  Description of Artificial Sequence: Synthetic oligonucleotide
  Sense strand starting at position 2958 of SEQ ID NO: 1884661
gagaacgucgaugaccaua

SEQ ID NO: 2282257 - RNA, 19 nt, Artificial Sequence
  Description of Artificial Sequence: Synthetic oligonucleotide
  Antisense strand to SEQ ID NO: 2282256
uauggucaucgacguucuc

SEQ ID NO: 2282258 - RNA, 19 nt, Artificial Sequence
  Description of Artificial Sequence: Synthetic oligonucleotide
  Sense strand starting at position 3020 of SEQ ID NO: 1884661
ucucuagggaucugaaugu

SEQ ID NO: 2282259 - RNA, 19 nt, Artificial Sequence
  Description of Artificial Sequence: Synthetic oligonucleotide
  Antisense strand to SEQ ID NO: 2282258
acauucagaucccuagaga

SEQ ID NO: 2282260 - RNA, 19 nt, Artificial Sequence
  Description of Artificial Sequence: Synthetic oligonucleotide
  Sense strand starting at position 3042 of SEQ ID NO: 1884661
ggagcuauaccaugcuuac

SEQ ID NO: 2282261 - RNA, 19 nt, Artificial Sequence
  Description of Artificial Sequence: Synthetic oligonucleotide
  Antisense strand to SEQ ID NO: 2282260
guaagcaugguauagcucc

SEQ ID NO: 2282262 - RNA, 19 nt, Artificial Sequence
  Description of Artificial Sequence: Synthetic oligonucleotide
  Sense strand starting at position 3045 of SEQ ID NO: 1884661
gcuauaccaugcuuacuga

SEQ ID NO: 2282263 - RNA, 19 nt, Artificial Sequence
  Description of Artificial Sequence: Synthetic oligonucleotide
  Antisense strand to SEQ ID NO: 2282262
ucaguaagcaugguauagc

SEQ ID NO: 2282264 - RNA, 19 nt, Artificial Sequence
  Description of Artificial Sequence: Synthetic oligonucleotide
  Sense strand starting at position 3053 of SEQ ID NO: 1884661
augcuuacugacugucuua

SEQ ID NO: 2282265 - RNA, 19 nt, Artificial Sequence
  Description of Artificial Sequence: Synthetic oligonucleotide
  Antisense strand to SEQ ID NO: 2282264
uaagacagucaguaagcau

SEQ ID NO: 2282266 - RNA, 19 nt, Artificial Sequence
  Description of Artificial Sequence: Synthetic oligonucleotide
  Sense strand starting at position 3056 of SEQ ID NO: 1884661
cuuacugacugucuuauga

SEQ ID NO: 2282267 - RNA, 19 nt, Artificial Sequence
  Description of Artificial Sequence: Synthetic oligonucleotide
  Antisense strand to SEQ ID NO: 2282266
ucauaagacagucaguaag

SEQ ID NO: 2282268 - RNA, 19 nt, Artificial Sequence
  Description of Artificial Sequence: Synthetic oligonucleotide
  Sense strand starting at position 3107 of SEQ ID NO: 1884661
gcauguguaacaggaugua

SEQ ID NO: 2282269 - RNA, 19 nt, Artificial Sequence
  Description of Artificial Sequence: Synthetic oligonucleotide
  Antisense strand to SEQ ID NO: 2282268
uacauccuguuacacaugc

SEQ ID NO: 2282270 - RNA, 19 nt, Artificial Sequence
  Description of Artificial Sequence: Synthetic oligonucleotide
  Sense strand starting at position 3234 of SEQ ID NO: 1884661
ucuagaaaccaguguauga

SEQ ID NO: 2282271 - RNA, 19 nt, Artificial Sequence
  Description of Artificial Sequence: Synthetic oligonucleotide
  Antisense strand to SEQ ID NO: 2282270
ucauacacugguuucuaga

SEQ ID NO: 2282272 - RNA, 19 nt, Artificial Sequence
  Description of Artificial Sequence: Synthetic oligonucleotide
  Sense strand starting at position 3238 of SEQ ID NO: 1884661
gaaaccaguguaugacuuu

SEQ ID NO: 2282273 - RNA, 19 nt, Artificial Sequence
  Description of Artificial Sequence: Synthetic oligonucleotide
  Antisense strand to SEQ ID NO: 2282272
aaagucauacacugguuuc

SEQ ID NO: 2282274 - RNA, 19 nt, Artificial Sequence
  Description of Artificial Sequence: Synthetic oligonucleotide
  Sense strand starting at position 3297 of SEQ ID NO: 1884661
uaggauauguggccacaau

SEQ ID NO: 2282275 - RNA, 19 nt, Artificial Sequence
  Description of Artificial Sequence: Synthetic oligonucleotide
  Antisense strand to SEQ ID NO: 2282274
auuguggccacauauccua

SEQ ID NO: 2282276 - RNA, 19 nt, Artificial Sequence
  Description of Artificial Sequence: Synthetic oligonucleotide
  Sense strand starting at position 3298 of SEQ ID NO: 1884661
aggauauguggccacaauu

SEQ ID NO: 2282277 - RNA, 19 nt, Artificial Sequence
  Description of Artificial Sequence: Synthetic oligonucleotide
  Antisense strand to SEQ ID NO: 2282276
aauuguggccacauauccu

SEQ ID NO: 2282278 - RNA, 19 nt, Artificial Sequence
  Description of Artificial Sequence: Synthetic oligonucleotide
  Sense strand starting at position 3389 of SEQ ID NO: 1884661
ugguaugcaucccucuaga

SEQ ID NO: 2282279 - RNA, 19 nt, Artificial Sequence
  Description of Artificial Sequence: Synthetic oligonucleotide
  Antisense strand to SEQ ID NO: 2282278
ucuagagggaugcauacca

SEQ ID NO: 2282280 - RNA, 19 nt, Artificial Sequence
  Description of Artificial Sequence: Synthetic oligonucleotide
  Sense strand starting at position 3453 of SEQ ID NO: 1884661
aagggcuuguggcuggaua

SEQ ID NO: 2282281 - RNA, 19 nt, Artificial Sequence
  Description of Artificial Sequence: Synthetic oligonucleotide
  Antisense strand to SEQ ID NO: 2282280
uauccagccacaagcccuu

SEQ ID NO: 2282282 - RNA, 19 nt, Artificial Sequence
  Description of Artificial Sequence: Synthetic oligonucleotide
  Sense strand starting at position 3454 of SEQ ID NO: 1884661
agggcuuguggcuggauau

SEQ ID NO: 2282283 - RNA, 19 nt, Artificial Sequence
  Description of Artificial Sequence: Synthetic oligonucleotide
  Antisense strand to SEQ ID NO: 2282282
auauccagccacaagcccu

SEQ ID NO: 2282284 - RNA, 19 nt, Artificial Sequence
  Description of Artificial Sequence: Synthetic oligonucleotide
  Sense strand starting at position 3465 of SEQ ID NO: 1884661
cuggauaucugcucuaaua

SEQ ID NO: 2282285 - RNA, 19 nt, Artificial Sequence
  Description of Artificial Sequence: Synthetic oligonucleotide
  Antisense strand to SEQ ID NO: 2282284
uauuagagcagauauccag

SEQ ID NO: 2282286 - RNA, 19 nt, Artificial Sequence
  Description of Artificial Sequence: Synthetic oligonucleotide
  Sense strand starting at position 3467 of SEQ ID NO: 1884661
ggauaucugcucuaauagc

SEQ ID NO: 2282287 - RNA, 19 nt, Artificial Sequence
  Description of Artificial Sequence: Synthetic oligonucleotide
  Antisense strand to SEQ ID NO: 2282286
gcuauuagagcagauaucc

SEQ ID NO: 2282288 - RNA, 19 nt, Artificial Sequence
  Description of Artificial Sequence: Synthetic oligonucleotide
  Sense strand starting at position 3475 of SEQ ID NO: 1884661
gcucuaauagcugagcaaa

SEQ ID NO: 2282289 - RNA, 19 nt, Artificial Sequence
  Description of Artificial Sequence: Synthetic oligonucleotide
  Antisense strand to SEQ ID NO: 2282288
uuugcucagcuauuagagc

SEQ ID NO: 2282290 - RNA, 19 nt, Artificial Sequence
  Description of Artificial Sequence: Synthetic oligonucleotide
  Sense strand starting at position 3477 of SEQ ID NO: 1884661
ucuaauagcugagcaaaga

SEQ ID NO: 2282291 - RNA, 19 nt, Artificial Sequence
  Description of Artificial Sequence: Synthetic oligonucleotide
  Antisense strand to SEQ ID NO: 2282290
ucuuugcucagcuauuaga

SEQ ID NO: 2282292 - RNA, 19 nt, Artificial Sequence
  Description of Artificial Sequence: Synthetic oligonucleotide
  Sense strand starting at position 3551 of SEQ ID NO: 1884661
guccauuucccaugugagu

SEQ ID NO: 2282293 - RNA, 19 nt, Artificial Sequence
  Description of Artificial Sequence: Synthetic oligonucleotide
  Antisense strand to SEQ ID NO: 2282292
acucacaugggaaauggac

SEQ ID NO: 2282294 - RNA, 19 nt, Artificial Sequence
  Description of Artificial Sequence: Synthetic oligonucleotide
  Sense strand starting at position 3603 of SEQ ID NO: 1884661
ggucuuagaccuuguccaa

SEQ ID NO: 2282295 - RNA, 19 nt, Artificial Sequence
  Description of Artificial Sequence: Synthetic oligonucleotide
  Antisense strand to SEQ ID NO: 2282294
uuggacaaggucuaagacc

SEQ ID NO: 2282296 - RNA, 19 nt, Artificial Sequence
  Description of Artificial Sequence: Synthetic oligonucleotide
  Sense strand starting at position 3656 of SEQ ID NO: 1884661
gacagucgaucacuagauu

SEQ ID NO: 2282297 - RNA, 19 nt, Artificial Sequence
  Description of Artificial Sequence: Synthetic oligonucleotide
  Antisense strand to SEQ ID NO: 2282296
aaucuagugaucgacuguc

SEQ ID NO: 2282298 - RNA, 19 nt, Artificial Sequence
  Description of Artificial Sequence: Synthetic oligonucleotide
  Sense strand starting at position 3914 of SEQ ID NO: 1884661
ccaggcauccacugaguaa

SEQ ID NO: 2282299 - RNA, 19 nt, Artificial Sequence
  Description of Artificial Sequence: Synthetic oligonucleotide
  Antisense strand to SEQ ID NO: 2282298
uuacucaguggaugccugg

SEQ ID NO: 2282300 - RNA, 19 nt, Artificial Sequence
  Description of Artificial Sequence: Synthetic oligonucleotide
  Sense strand starting at position 3917 of SEQ ID NO: 1884661
ggcauccacugaguaacaa

SEQ ID NO: 2282301 - RNA, 19 nt, Artificial Sequence
  Description of Artificial Sequence: Synthetic oligonucleotide
  Antisense strand to SEQ ID NO: 2282300
uuguuacucaguggaugcc

SEQ ID NO: 2282302 - RNA, 19 nt, Artificial Sequence
  Description of Artificial Sequence: Synthetic oligonucleotide
  Sense strand starting at position 3976 of SEQ ID NO: 1884661
cucaguucuggaggaggaa

SEQ ID NO: 2282303 - RNA, 19 nt, Artificial Sequence
  Description of Artificial Sequence: Synthetic oligonucleotide
  Antisense strand to SEQ ID NO: 2282302
uuccuccuccagaacugag

SEQ ID NO: 2282304 - RNA, 19 nt, Artificial Sequence
  Description of Artificial Sequence: Synthetic oligonucleotide
  Sense strand starting at position 36 of SEQ ID NO: 1884662
auauauaaacgugguaauc

SEQ ID NO: 2282305 - RNA, 19 nt, Artificial Sequence
  Description of Artificial Sequence: Synthetic oligonucleotide
  Antisense strand to SEQ ID NO: 2282304
gauuaccacguuuauauau

SEQ ID NO: 2282306 - RNA, 19 nt, Artificial Sequence
  Description of Artificial Sequence: Synthetic oligonucleotide
  Sense strand starting at position 66 of SEQ ID NO: 1884662
ggcugcagagaguguuaga

SEQ ID NO: 2282307 - RNA, 19 nt, Artificial Sequence
  Description of Artificial Sequence: Synthetic oligonucleotide
  Antisense strand to SEQ ID NO: 2282306
ucuaacacucucugcagcc

SEQ ID NO: 2282308 - RNA, 19 nt, Artificial Sequence
  Description of Artificial Sequence: Synthetic oligonucleotide
  Sense strand starting at position 71 of SEQ ID NO: 1884662
cagagaguguuagauagau

SEQ ID NO: 2282309 - RNA, 19 nt, Artificial Sequence
  Description of Artificial Sequence: Synthetic oligonucleotide
  Antisense strand to SEQ ID NO: 2282308
aucuaucuaacacucucug

SEQ ID NO: 2282310 - RNA, 19 nt, Artificial Sequence
  Description of Artificial Sequence: Synthetic oligonucleotide
  Sense strand starting at position 98 of SEQ ID NO: 1884662
aaccaugagugcucugaaa

SEQ ID NO: 2282311 - RNA, 19 nt, Artificial Sequence
  Description of Artificial Sequence: Synthetic oligonucleotide
  Antisense strand to SEQ ID NO: 2282310
uuucagagcacucaugguu

SEQ ID NO: 2282312 - RNA, 19 nt, Artificial Sequence
  Description of Artificial Sequence: Synthetic oligonucleotide
  Sense strand starting at position 100 of SEQ ID NO: 1884662
ccaugagugcucugaaauc

SEQ ID NO: 2282313 - RNA, 19 nt, Artificial Sequence
  Description of Artificial Sequence: Synthetic oligonucleotide
  Antisense strand to SEQ ID NO: 2282312
gauuucagagcacucaugg

SEQ ID NO: 2282314 - RNA, 19 nt, Artificial Sequence
  Description of Artificial Sequence: Synthetic oligonucleotide
  Sense strand starting at position 139 of SEQ ID NO: 1884662
acugaagaaucauagauuu

SEQ ID NO: 2282315 - RNA, 19 nt, Artificial Sequence
  Description of Artificial Sequence: Synthetic oligonucleotide
  Antisense strand to SEQ ID NO: 2282314
aaaucuaugauucuucagu

SEQ ID NO: 2282316 - RNA, 19 nt, Artificial Sequence
  Description of Artificial Sequence: Synthetic oligonucleotide
  Sense strand starting at position 147 of SEQ ID NO: 1884662
aucauagauuuguaaagca

SEQ ID NO: 2282317 - RNA, 19 nt, Artificial Sequence
  Description of Artificial Sequence: Synthetic oligonucleotide
  Antisense strand to SEQ ID NO: 2282316
ugcuuuacaaaucuaugau

SEQ ID NO: 2282318 - RNA, 19 nt, Artificial Sequence
  Description of Artificial Sequence: Synthetic oligonucleotide
  Sense strand starting at position 306 of SEQ ID NO: 1884662
ucauaaguuuagccaagau

SEQ ID NO: 2282319 - RNA, 19 nt, Artificial Sequence
  Description of Artificial Sequence: Synthetic oligonucleotide
  Antisense strand to SEQ ID NO: 2282318
aucuuggcuaaacuuauga

SEQ ID NO: 2282320 - RNA, 19 nt, Artificial Sequence
  Description of Artificial Sequence: Synthetic oligonucleotide
  Sense strand starting at position 439 of SEQ ID NO: 1884662
ggcagaaacucccuacauu

SEQ ID NO: 2282321 - RNA, 19 nt, Artificial Sequence
  Description of Artificial Sequence: Synthetic oligonucleotide
  Antisense strand to SEQ ID NO: 2282320
aauguagggaguuucugcc

SEQ ID NO: 2282322 - RNA, 19 nt, Artificial Sequence
  Description of Artificial Sequence: Synthetic oligonucleotide
  Sense strand starting at position 535 of SEQ ID NO: 1884662
agccgaucagacugagauc

SEQ ID NO: 2282323 - RNA, 19 nt, Artificial Sequence
  Description of Artificial Sequence: Synthetic oligonucleotide
  Antisense strand to SEQ ID NO: 2282322
gaucucagucugaucggcu

SEQ ID NO: 2282324 - RNA, 19 nt, Artificial Sequence
  Description of Artificial Sequence: Synthetic oligonucleotide
  Sense strand starting at position 538 of SEQ ID NO: 1884662
cgaucagacugagaucuaa

SEQ ID NO: 2282325 - RNA, 19 nt, Artificial Sequence
  Description of Artificial Sequence: Synthetic oligonucleotide
  Antisense strand to SEQ ID NO: 2282324
uuagaucucagucugaucg

SEQ ID NO: 2282326 - RNA, 19 nt, Artificial Sequence
  Description of Artificial Sequence: Synthetic oligonucleotide
  Sense strand starting at position 695 of SEQ ID NO: 1884662
gagcuauccuugguacggu

SEQ ID NO: 2282327 - RNA, 19 nt, Artificial Sequence
  Description of Artificial Sequence: Synthetic oligonucleotide
  Antisense strand to SEQ ID NO: 2282326
accguaccaaggauagcuc

SEQ ID NO: 2282328 - RNA, 19 nt, Artificial Sequence
  Description of Artificial Sequence: Synthetic oligonucleotide
  Sense strand starting at position 716 of SEQ ID NO: 1884662
ccauucugguuccucaaga

SEQ ID NO: 2282329 - RNA, 19 nt, Artificial Sequence
  Description of Artificial Sequence: Synthetic oligonucleotide
  Antisense strand to SEQ ID NO: 2282328
ucuugaggaaccagaaugg

SEQ ID NO: 2282330 - RNA, 19 nt, Artificial Sequence
  Description of Artificial Sequence: Synthetic oligonucleotide
  Sense strand starting at position 1809 of SEQ ID NO: 1884662
gagccucaguccuucuuga

SEQ ID NO: 2282331 - RNA, 19 nt, Artificial Sequence
  Description of Artificial Sequence: Synthetic oligonucleotide
  Antisense strand to SEQ ID NO: 2282330
ucaagaaggacugaggcuc

SEQ ID NO: 2282332 - RNA, 19 nt, Artificial Sequence
  Description of Artificial Sequence: Synthetic oligonucleotide
  Sense strand starting at position 1905 of SEQ ID NO: 1884662
gcgcgcacuucauuuguua

SEQ ID NO: 2282333 - RNA, 19 nt, Artificial Sequence
  Description of Artificial Sequence: Synthetic oligonucleotide
  Antisense strand to SEQ ID NO: 2282332
uaacaaaugaagugcgcgc

SEQ ID NO: 2282334 - RNA, 19 nt, Artificial Sequence
  Description of Artificial Sequence: Synthetic oligonucleotide
  Sense strand starting at position 1916 of SEQ ID NO: 1884662
auuuguuacugcgugaacu

SEQ ID NO: 2282335 - RNA, 19 nt, Artificial Sequence
  Description of Artificial Sequence: Synthetic oligonucleotide
  Antisense strand to SEQ ID NO: 2282334
aguucacgcaguaacaaau

SEQ ID NO: 2282336 - RNA, 19 nt, Artificial Sequence
  Description of Artificial Sequence: Synthetic oligonucleotide
  Sense strand starting at position 1917 of SEQ ID NO: 1884662
uuuguuacugcgugaacug

SEQ ID NO: 2282337 - RNA, 19 nt, Artificial Sequence
  Description of Artificial Sequence: Synthetic oligonucleotide
  Antisense strand to SEQ ID NO: 2282336
caguucacgcaguaacaaa

SEQ ID NO: 2282338 - RNA, 19 nt, Artificial Sequence
  Description of Artificial Sequence: Synthetic oligonucleotide
  Sense strand starting at position 1918 of SEQ ID NO: 1884662
uuguuacugcgugaacuga

SEQ ID NO: 2282339 - RNA, 19 nt, Artificial Sequence
  Description of Artificial Sequence: Synthetic oligonucleotide
  Antisense strand to SEQ ID NO: 2282338
ucaguucacgcaguaacaa

SEQ ID NO: 2282340 - RNA, 19 nt, Artificial Sequence
  Description of Artificial Sequence: Synthetic oligonucleotide
  Sense strand starting at position 1968 of SEQ ID NO: 1884662
gggcgaacucuaugacgga

SEQ ID NO: 2282341 - RNA, 19 nt, Artificial Sequence
  Description of Artificial Sequence: Synthetic oligonucleotide
  Antisense strand to SEQ ID NO: 2282340
uccgucauagaguucgccc

SEQ ID NO: 2282342 - RNA, 19 nt, Artificial Sequence
  Description of Artificial Sequence: Synthetic oligonucleotide
  Sense strand starting at position 2106 of SEQ ID NO: 1884662
gcaguuucuccgggauuaa

SEQ ID NO: 2282343 - RNA, 19 nt, Artificial Sequence
  Description of Artificial Sequence: Synthetic oligonucleotide
  Antisense strand to SEQ ID NO: 2282342
uuaaucccggagaaacugc

SEQ ID NO: 2282344 - RNA, 19 nt, Artificial Sequence
  Description of Artificial Sequence: Synthetic oligonucleotide
  Sense strand starting at position 2107 of SEQ ID NO: 1884662
caguuucuccgggauuaag

SEQ ID NO: 2282345 - RNA, 19 nt, Artificial Sequence
  Description of Artificial Sequence: Synthetic oligonucleotide
  Antisense strand to SEQ ID NO: 2282344
cuuaaucccggagaaacug

SEQ ID NO: 2282346 - RNA, 19 nt, Artificial Sequence
  Description of Artificial Sequence: Synthetic oligonucleotide
  Sense strand starting at position 2485 of SEQ ID NO: 1884662
gcaacaacauauuagauga

SEQ ID NO: 2282347 - RNA, 19 nt, Artificial Sequence
  Description of Artificial Sequence: Synthetic oligonucleotide
  Antisense strand to SEQ ID NO: 2282346
ucaucuaauauguuguugc

SEQ ID NO: 2282348 - RNA, 19 nt, Artificial Sequence
  Description of Artificial Sequence: Synthetic oligonucleotide
  Sense strand starting at position 2507 of SEQ ID NO: 1884662
guaacagaagguugucagu

SEQ ID NO: 2282349 - RNA, 19 nt, Artificial Sequence
  Description of Artificial Sequence: Synthetic oligonucleotide
  Antisense strand to SEQ ID NO: 2282348
acugacaaccuucuguuac

SEQ ID NO: 2282350 - RNA, 19 nt, Artificial Sequence
  Description of Artificial Sequence: Synthetic oligonucleotide
  Sense strand starting at position 2552 of SEQ ID NO: 1884662
uuggaaucuccacggaguu

SEQ ID NO: 2282351 - RNA, 19 nt, Artificial Sequence
  Description of Artificial Sequence: Synthetic oligonucleotide
  Antisense strand to SEQ ID NO: 2282350
aacuccguggagauuccaa

SEQ ID NO: 2282352 - RNA, 19 nt, Artificial Sequence
  Description of Artificial Sequence: Synthetic oligonucleotide
  Sense strand starting at position 2956 of SEQ ID NO: 1884662
cuugccuuuccagaugaca

SEQ ID NO: 2282353 - RNA, 19 nt, Artificial Sequence
  Description of Artificial Sequence: Synthetic oligonucleotide
  Antisense strand to SEQ ID NO: 2282352
ugucaucuggaaaggcaag

SEQ ID NO: 2282354 - RNA, 19 nt, Artificial Sequence
  Description of Artificial Sequence: Synthetic oligonucleotide
  Sense strand starting at position 3287 of SEQ ID NO: 1884662
uaugauauuguugguagga

SEQ ID NO: 2282355 - RNA, 19 nt, Artificial Sequence
  Description of Artificial Sequence: Synthetic oligonucleotide
  Antisense strand to SEQ ID NO: 2282354
uccuaccaacaauaucaua

SEQ ID NO: 2282356 - RNA, 19 nt, Artificial Sequence
  Description of Artificial Sequence: Synthetic oligonucleotide
  Sense strand starting at position 3288 of SEQ ID NO: 1884662
augauauuguugguaggaa

SEQ ID NO: 2282357 - RNA, 19 nt, Artificial Sequence
  Description of Artificial Sequence: Synthetic oligonucleotide
  Antisense strand to SEQ ID NO: 2282356
uuccuaccaacaauaucau

SEQ ID NO: 2282358 - RNA, 19 nt, Artificial Sequence
  Description of Artificial Sequence: Synthetic oligonucleotide
  Sense strand starting at position 3289 of SEQ ID NO: 1884662
ugauauuguugguaggaaa

SEQ ID NO: 2282359 - RNA, 19 nt, Artificial Sequence
  Description of Artificial Sequence: Synthetic oligonucleotide
  Antisense strand to SEQ ID NO: 2282358
uuuccuaccaacaauauca

SEQ ID NO: 2282360 - RNA, 19 nt, Artificial Sequence
  Description of Artificial Sequence: Synthetic oligonucleotide
  Sense strand starting at position 3311 of SEQ ID NO: 1884662
acauuagugcaacagaauc

SEQ ID NO: 2282361 - RNA, 19 nt, Artificial Sequence
  Description of Artificial Sequence: Synthetic oligonucleotide
  Antisense strand to SEQ ID NO: 2282360
gauucuguugcacuaaugu

SEQ ID NO: 2282362 - RNA, 19 nt, Artificial Sequence
  Description of Artificial Sequence: Synthetic oligonucleotide
  Sense strand starting at position 3383 of SEQ ID NO: 1884662
ugauaaauggcguagaauc

SEQ ID NO: 2282363 - RNA, 19 nt, Artificial Sequence
  Description of Artificial Sequence: Synthetic oligonucleotide
  Antisense strand to SEQ ID NO: 2282362
gauucuacgccauuuauca

SEQ ID NO: 2282364 - RNA, 19 nt, Artificial Sequence
  Description of Artificial Sequence: Synthetic oligonucleotide
  Sense strand starting at position 3391 of SEQ ID NO: 1884662
ggcguagaaucuuaaauuu

SEQ ID NO: 2282365 - RNA, 19 nt, Artificial Sequence
  Description of Artificial Sequence: Synthetic oligonucleotide
  Antisense strand to SEQ ID NO: 2282364
aaauuuaagauucuacgcc

SEQ ID NO: 2282366 - RNA, 19 nt, Artificial Sequence
  Description of Artificial Sequence: Synthetic oligonucleotide
  Sense strand starting at position 3438 of SEQ ID NO: 1884662
aggagacuauaaggguauu

SEQ ID NO: 2282367 - RNA, 19 nt, Artificial Sequence
  Description of Artificial Sequence: Synthetic oligonucleotide
  Antisense strand to SEQ ID NO: 2282366
aauacccuuauagucuccu

SEQ ID NO: 2282368 - RNA, 19 nt, Artificial Sequence
  Description of Artificial Sequence: Synthetic oligonucleotide
  Sense strand starting at position 3676 of SEQ ID NO: 1884662
auggacaugucucagaaga

SEQ ID NO: 2282369 - RNA, 19 nt, Artificial Sequence
  Description of Artificial Sequence: Synthetic oligonucleotide
  Antisense strand to SEQ ID NO: 2282368
ucuucugagacauguccau

SEQ ID NO: 2282370 - RNA, 19 nt, Artificial Sequence
  Description of Artificial Sequence: Synthetic oligonucleotide
  Sense strand starting at position 3678 of SEQ ID NO: 1884662
ggacaugucucagaagaac

SEQ ID NO: 2282371 - RNA, 19 nt, Artificial Sequence
  Description of Artificial Sequence: Synthetic oligonucleotide
  Antisense strand to SEQ ID NO: 2282370
guucuucugagacaugucc

SEQ ID NO: 2282372 - RNA, 19 nt, Artificial Sequence
  Description of Artificial Sequence: Synthetic oligonucleotide
  Sense strand starting at position 3803 of SEQ ID NO: 1884662
gagagaggugacugugauc

SEQ ID NO: 2282373 - RNA, 19 nt, Artificial Sequence
  Description of Artificial Sequence: Synthetic oligonucleotide
  Antisense strand to SEQ ID NO: 2282372
gaucacagucaccucucuc

SEQ ID NO: 2282374 - RNA, 19 nt, Artificial Sequence
  Description of Artificial Sequence: Synthetic oligonucleotide
  Sense strand starting at position 3806 of SEQ ID NO: 1884662
agaggugacugugaucuca

SEQ ID NO: 2282375 - RNA, 19 nt, Artificial Sequence
  Description of Artificial Sequence: Synthetic oligonucleotide
  Antisense strand to SEQ ID NO: 2282374
ugagaucacagucaccucu

SEQ ID NO: 2282376 - RNA, 19 nt, Artificial Sequence
  Description of Artificial Sequence: Synthetic oligonucleotide
  Sense strand starting at position 3876 of SEQ ID NO: 1884662
uuucuuguucuguacaauu

SEQ ID NO: 2282377 - RNA, 19 nt, Artificial Sequence
  Description of Artificial Sequence: Synthetic oligonucleotide
  Antisense strand to SEQ ID NO: 2282376
aauuguacagaacaagaaa

SEQ ID NO: 2282378 - RNA, 19 nt, Artificial Sequence
  Description of Artificial Sequence: Synthetic oligonucleotide
  Sense strand starting at position 3878 of SEQ ID NO: 1884662
ucuuguucuguacaauuau

SEQ ID NO: 2282379 - RNA, 19 nt, Artificial Sequence
  Description of Artificial Sequence: Synthetic oligonucleotide
  Antisense strand to SEQ ID NO: 2282378
auaauuguacagaacaaga

SEQ ID NO: 2282380 - RNA, 19 nt, Artificial Sequence
  Description of Artificial Sequence: Synthetic oligonucleotide
  Sense strand starting at position 3887 of SEQ ID NO: 1884662
guacaauuauuggagagaa

SEQ ID NO: 2282381 - RNA, 19 nt, Artificial Sequence
  Description of Artificial Sequence: Synthetic oligonucleotide
  Antisense strand to SEQ ID NO: 2282380
uucucuccaauaauuguac

SEQ ID NO: 2282382 - RNA, 19 nt, Artificial Sequence
  Description of Artificial Sequence: Synthetic oligonucleotide
  Sense strand starting at position 3924 of SEQ ID NO: 1884662
ccugcugccuucuuaauga

SEQ ID NO: 2282383 - RNA, 19 nt, Artificial Sequence
  Description of Artificial Sequence: Synthetic oligonucleotide
  Antisense strand to SEQ ID NO: 2282382
ucauuaagaaggcagcagg

SEQ ID NO: 2282384 - RNA, 19 nt, Artificial Sequence
  Description of Artificial Sequence: Synthetic oligonucleotide
  Sense strand starting at position 75 of SEQ ID NO: 1884663
agccgguguuggugugaau

SEQ ID NO: 2282385 - RNA, 19 nt, Artificial Sequence
  Description of Artificial Sequence: Synthetic oligonucleotide
  Antisense strand to SEQ ID NO: 2282384
auucacaccaacaccggcu

SEQ ID NO: 2282386 - RNA, 19 nt, Artificial Sequence
  Description of Artificial Sequence: Synthetic oligonucleotide
  Sense strand starting at position 76 of SEQ ID NO: 1884663
gccgguguuggugugaauu

SEQ ID NO: 2282387 - RNA, 19 nt, Artificial Sequence
  Description of Artificial Sequence: Synthetic oligonucleotide
  Antisense strand to SEQ ID NO: 2282386
aauucacaccaacaccggc

SEQ ID NO: 2282388 - RNA, 19 nt, Artificial Sequence
  Description of Artificial Sequence: Synthetic oligonucleotide
  Sense strand starting at position 78 of SEQ ID NO: 1884663
cgguguuggugugaauucu

SEQ ID NO: 2282389 - RNA, 19 nt, Artificial Sequence
  Description of Artificial Sequence: Synthetic oligonucleotide
  Antisense strand to SEQ ID NO: 2282388
agaauucacaccaacaccg

SEQ ID NO: 2282390 - RNA, 19 nt, Artificial Sequence
  Description of Artificial Sequence: Synthetic oligonucleotide
  Sense strand starting at position 134 of SEQ ID NO: 1884663
gguuacaagccugggagau

SEQ ID NO: 2282391 - RNA, 19 nt, Artificial Sequence
  Description of Artificial Sequence: Synthetic oligonucleotide
  Antisense strand to SEQ ID NO: 2282390
aucucccaggcuuguaacc

SEQ ID NO: 2282392 - RNA, 19 nt, Artificial Sequence
  Description of Artificial Sequence: Synthetic oligonucleotide
  Sense strand starting at position 147 of SEQ ID NO: 1884663
ggagaugucuuccaaguuc

SEQ ID NO: 2282393 - RNA, 19 nt, Artificial Sequence
  Description of Artificial Sequence: Synthetic oligonucleotide
  Antisense strand to SEQ ID NO: 2282392
gaacuuggaagacaucucc

SEQ ID NO: 2282394 - RNA, 19 nt, Artificial Sequence
  Description of Artificial Sequence: Synthetic oligonucleotide
  Sense strand starting at position 338 of SEQ ID NO: 1884663
cuuggccucucugcugaaa

SEQ ID NO: 2282395 - RNA, 19 nt, Artificial Sequence
  Description of Artificial Sequence: Synthetic oligonucleotide
  Antisense strand to SEQ ID NO: 2282394
uuucagcagagaggccaag

SEQ ID NO: 2282396 - RNA, 19 nt, Artificial Sequence
  Description of Artificial Sequence: Synthetic oligonucleotide
  Sense strand starting at position 363 of SEQ ID NO: 1884663
gauaaugugcucuguggua

SEQ ID NO: 2282397 - RNA, 19 nt, Artificial Sequence
  Description of Artificial Sequence: Synthetic oligonucleotide
  Antisense strand to SEQ ID NO: 2282396
uaccacagagcacauuauc

SEQ ID NO: 2282398 - RNA, 19 nt, Artificial Sequence
  Description of Artificial Sequence: Synthetic oligonucleotide
  Sense strand starting at position 365 of SEQ ID NO: 1884663
uaaugugcucugugguaca

SEQ ID NO: 2282399 - RNA, 19 nt, Artificial Sequence
  Description of Artificial Sequence: Synthetic oligonucleotide
  Antisense strand to SEQ ID NO: 2282398
uguaccacagagcacauua

SEQ ID NO: 2282400 - RNA, 19 nt, Artificial Sequence
  Description of Artificial Sequence: Synthetic oligonucleotide
  Sense strand starting at position 384 of SEQ ID NO: 1884663
ugucuacacgccugucauu

SEQ ID NO: 2282401 - RNA, 19 nt, Artificial Sequence
  Description of Artificial Sequence: Synthetic oligonucleotide
  Antisense strand to SEQ ID NO: 2282400
aaugacaggcguguagaca

SEQ ID NO: 2282402 - RNA, 19 nt, Artificial Sequence
  Description of Artificial Sequence: Synthetic oligonucleotide
  Sense strand starting at position 412 of SEQ ID NO: 1884663
agcaucagugacuaaacau

SEQ ID NO: 2282403 - RNA, 19 nt, Artificial Sequence
  Description of Artificial Sequence: Synthetic oligonucleotide
  Antisense strand to SEQ ID NO: 2282402
auguuuagucacugaugcu

SEQ ID NO: 2282404 - RNA, 19 nt, Artificial Sequence
  Description of Artificial Sequence: Synthetic oligonucleotide
  Sense strand starting at position 594 of SEQ ID NO: 1884663
uuggaaugugcucaugagu

SEQ ID NO: 2282405 - RNA, 19 nt, Artificial Sequence
  Description of Artificial Sequence: Synthetic oligonucleotide
  Antisense strand to SEQ ID NO: 2282404
acucaugagcacauuccaa

SEQ ID NO: 2282406 - RNA, 19 nt, Artificial Sequence
  Description of Artificial Sequence: Synthetic oligonucleotide
  Sense strand starting at position 603 of SEQ ID NO: 1884663
gcucaugaguccucucuac

SEQ ID NO: 2282407 - RNA, 19 nt, Artificial Sequence
  Description of Artificial Sequence: Synthetic oligonucleotide
  Antisense strand to SEQ ID NO: 2282406
guagagaggacucaugagc

SEQ ID NO: 2282408 - RNA, 19 nt, Artificial Sequence
  Description of Artificial Sequence: Synthetic oligonucleotide
  Sense strand starting at position 1014 of SEQ ID NO: 1884663
gcgcguaagcuccaagaug

SEQ ID NO: 2282409 - RNA, 19 nt, Artificial Sequence
  Description of Artificial Sequence: Synthetic oligonucleotide
  Antisense strand to SEQ ID NO: 2282408
caucuuggagcuuacgcgc

SEQ ID NO: 2282410 - RNA, 19 nt, Artificial Sequence
  Description of Artificial Sequence: Synthetic oligonucleotide
  Sense strand starting at position 1230 of SEQ ID NO: 1884663
gggaccaucuugucacauu

SEQ ID NO: 2282411 - RNA, 19 nt, Artificial Sequence
  Description of Artificial Sequence: Synthetic oligonucleotide
  Antisense strand to SEQ ID NO: 2282410
aaugugacaagaugguccc

SEQ ID NO: 2282412 - RNA, 19 nt, Artificial Sequence
  Description of Artificial Sequence: Synthetic oligonucleotide
  Sense strand starting at position 1231 of SEQ ID NO: 1884663
ggaccaucuugucacauuu

SEQ ID NO: 2282413 - RNA, 19 nt, Artificial Sequence
  Description of Artificial Sequence: Synthetic oligonucleotide
  Antisense strand to SEQ ID NO: 2282412
aaaugugacaagauggucc

SEQ ID NO: 2282414 - RNA, 19 nt, Artificial Sequence
  Description of Artificial Sequence: Synthetic oligonucleotide
  Sense strand starting at position 1252 of SEQ ID NO: 1884663
uuugcaaagucaccuuaga

SEQ ID NO: 2282415 - RNA, 19 nt, Artificial Sequence
  Description of Artificial Sequence: Synthetic oligonucleotide
  Antisense strand to SEQ ID NO: 2282414
ucuaaggugacuuugcaaa

SEQ ID NO: 2282416 - RNA, 19 nt, Artificial Sequence
  Description of Artificial Sequence: Synthetic oligonucleotide
  Sense strand starting at position 1326 of SEQ ID NO: 1884663
gcaguuucuaggugccuga

SEQ ID NO: 2282417 - RNA, 19 nt, Artificial Sequence
  Description of Artificial Sequence: Synthetic oligonucleotide
  Antisense strand to SEQ ID NO: 2282416
ucaggcaccuagaaacugc

SEQ ID NO: 2282418 - RNA, 19 nt, Artificial Sequence
  Description of Artificial Sequence: Synthetic oligonucleotide
  Sense strand starting at position 1330 of SEQ ID NO: 1884663
uuucuaggugccugaaacu

SEQ ID NO: 2282419 - RNA, 19 nt, Artificial Sequence
  Description of Artificial Sequence: Synthetic oligonucleotide
  Antisense strand to SEQ ID NO: 2282418
aguuucaggcaccuagaaa

SEQ ID NO: 2282420 - RNA, 19 nt, Artificial Sequence
  Description of Artificial Sequence: Synthetic oligonucleotide
  Sense strand starting at position 1556 of SEQ ID NO: 1884663
gcacaaugugaaggaacau

SEQ ID NO: 2282421 - RNA, 19 nt, Artificial Sequence
  Description of Artificial Sequence: Synthetic oligonucleotide
  Antisense strand to SEQ ID NO: 2282420
auguuccuucacauugugc

SEQ ID NO: 2282422 - RNA, 19 nt, Artificial Sequence
  Description of Artificial Sequence: Synthetic oligonucleotide
  Sense strand starting at position 1565 of SEQ ID NO: 1884663
gaaggaacaugguugucua

SEQ ID NO: 2282423 - RNA, 19 nt, Artificial Sequence
  Description of Artificial Sequence: Synthetic oligonucleotide
  Antisense strand to SEQ ID NO: 2282422
uagacaaccauguuccuuc

SEQ ID NO: 2282424 - RNA, 19 nt, Artificial Sequence
  Description of Artificial Sequence: Synthetic oligonucleotide
  Sense strand starting at position 1568 of SEQ ID NO: 1884663
ggaacaugguugucuagca

SEQ ID NO: 2282425 - RNA, 19 nt, Artificial Sequence
  Description of Artificial Sequence: Synthetic oligonucleotide
  Antisense strand to SEQ ID NO: 2282424
ugcuagacaaccauguucc

SEQ ID NO: 2282426 - RNA, 19 nt, Artificial Sequence
  Description of Artificial Sequence: Synthetic oligonucleotide
  Sense strand starting at position 1569 of SEQ ID NO: 1884663
gaacaugguugucuagcaa

SEQ ID NO: 2282427 - RNA, 19 nt, Artificial Sequence
  Description of Artificial Sequence: Synthetic oligonucleotide
  Antisense strand to SEQ ID NO: 2282426
uugcuagacaaccauguuc

SEQ ID NO: 2282428 - RNA, 19 nt, Artificial Sequence
  Description of Artificial Sequence: Synthetic oligonucleotide
  Sense strand starting at position 1573 of SEQ ID NO: 1884663
augguugucuagcaacuga

SEQ ID NO: 2282429 - RNA, 19 nt, Artificial Sequence
  Description of Artificial Sequence: Synthetic oligonucleotide
  Antisense strand to SEQ ID NO: 2282428
ucaguugcuagacaaccau

SEQ ID NO: 2282430 - RNA, 19 nt, Artificial Sequence
  Description of Artificial Sequence: Synthetic oligonucleotide
  Sense strand starting at position 1858 of SEQ ID NO: 1884663
gacagcgaccauuauugua

SEQ ID NO: 2282431 - RNA, 19 nt, Artificial Sequence
  Description of Artificial Sequence: Synthetic oligonucleotide
  Antisense strand to SEQ ID NO: 2282430
uacaauaauggucgcuguc

SEQ ID NO: 2282432 - RNA, 19 nt, Artificial Sequence
  Description of Artificial Sequence: Synthetic oligonucleotide
  Sense strand starting at position 2269 of SEQ ID NO: 1884663
acacgcaucuuccagggaa

SEQ ID NO: 2282433 - RNA, 19 nt, Artificial Sequence
  Description of Artificial Sequence: Synthetic oligonucleotide
  Antisense strand to SEQ ID NO: 2282432
uucccuggaagaugcgugu

SEQ ID NO: 2282434 - RNA, 19 nt, Artificial Sequence
  Description of Artificial Sequence: Synthetic oligonucleotide
  Sense strand starting at position 2308 of SEQ ID NO: 1884663
ggagaaaugaggcagcagu

SEQ ID NO: 2282435 - RNA, 19 nt, Artificial Sequence
  Description of Artificial Sequence: Synthetic oligonucleotide
  Antisense strand to SEQ ID NO: 2282434
acugcugccucauuucucc

SEQ ID NO: 2282436 - RNA, 19 nt, Artificial Sequence
  Description of Artificial Sequence: Synthetic oligonucleotide
  Sense strand starting at position 2703 of SEQ ID NO: 1884663
ucaggacauuucgguguua

SEQ ID NO: 2282437 - RNA, 19 nt, Artificial Sequence
  Description of Artificial Sequence: Synthetic oligonucleotide
  Antisense strand to SEQ ID NO: 2282436
uaacaccgaaauguccuga

SEQ ID NO: 2282438 - RNA, 19 nt, Artificial Sequence
  Description of Artificial Sequence: Synthetic oligonucleotide
  Sense strand starting at position 3106 of SEQ ID NO: 1884663
ugcugcugcccggaaguua

SEQ ID NO: 2282439 - RNA, 19 nt, Artificial Sequence
  Description of Artificial Sequence: Synthetic oligonucleotide
  Antisense strand to SEQ ID NO: 2282438
uaacuuccgggcagcagca

SEQ ID NO: 2282440 - RNA, 19 nt, Artificial Sequence
  Description of Artificial Sequence: Synthetic oligonucleotide
  Sense strand starting at position 3275 of SEQ ID NO: 1884663
gcagaugggucaugaggaa

SEQ ID NO: 2282441 - RNA, 19 nt, Artificial Sequence
  Description of Artificial Sequence: Synthetic oligonucleotide
  Antisense strand to SEQ ID NO: 2282440
uuccucaugacccaucugc

SEQ ID NO: 2282442 - RNA, 19 nt, Artificial Sequence
  Description of Artificial Sequence: Synthetic oligonucleotide
  Sense strand starting at position 3363 of SEQ ID NO: 1884663
gacucuuggucccagagga

SEQ ID NO: 2282443 - RNA, 19 nt, Artificial Sequence
  Description of Artificial Sequence: Synthetic oligonucleotide
  Antisense strand to SEQ ID NO: 2282442
uccucugggaccaagaguc

SEQ ID NO: 2282444 - RNA, 19 nt, Artificial Sequence
  Description of Artificial Sequence: Synthetic oligonucleotide
  Sense strand starting at position 3530 of SEQ ID NO: 1884663
ggcucaguauccuggacaa

SEQ ID NO: 2282445 - RNA, 19 nt, Artificial Sequence
  Description of Artificial Sequence: Synthetic oligonucleotide
  Antisense strand to SEQ ID NO: 2282444
uuguccaggauacugagcc

SEQ ID NO: 2282446 - RNA, 19 nt, Artificial Sequence
  Description of Artificial Sequence: Synthetic oligonucleotide
  Sense strand starting at position 3708 of SEQ ID NO: 1884663
gacccugucuuccaggaau

SEQ ID NO: 2282447 - RNA, 19 nt, Artificial Sequence
  Description of Artificial Sequence: Synthetic oligonucleotide
  Antisense strand to SEQ ID NO: 2282446
auuccuggaagacaggguc

SEQ ID NO: 2282448 - RNA, 19 nt, Artificial Sequence
  Description of Artificial Sequence: Synthetic oligonucleotide
  Sense strand starting at position 3710 of SEQ ID NO: 1884663
cccugucuuccaggaauag

SEQ ID NO: 2282449 - RNA, 19 nt, Artificial Sequence
  Description of Artificial Sequence: Synthetic oligonucleotide
  Antisense strand to SEQ ID NO: 2282448
cuauuccuggaagacaggg

SEQ ID NO: 2282450 - RNA, 19 nt, Artificial Sequence
  Description of Artificial Sequence: Synthetic oligonucleotide
  Sense strand starting at position 3722 of SEQ ID NO: 1884663
ggaauagcccagcaugaau

SEQ ID NO: 2282451 - RNA, 19 nt, Artificial Sequence
  Description of Artificial Sequence: Synthetic oligonucleotide
  Antisense strand to SEQ ID NO: 2282450
auucaugcugggcuauucc

SEQ ID NO: 2282452 - RNA, 19 nt, Artificial Sequence
  Description of Artificial Sequence: Synthetic oligonucleotide
  Sense strand starting at position 80 of SEQ ID NO: 1884664
ggaccucucuccucaauga

SEQ ID NO: 2282453 - RNA, 19 nt, Artificial Sequence
  Description of Artificial Sequence: Synthetic oligonucleotide
  Antisense strand to SEQ ID NO: 2282452
ucauugaggagagaggucc

SEQ ID NO: 2282454 - RNA, 19 nt, Artificial Sequence
  Description of Artificial Sequence: Synthetic oligonucleotide
  Sense strand starting at position 208 of SEQ ID NO: 1884664
ccucaucuugcugaaugau

SEQ ID NO: 2282455 - RNA, 19 nt, Artificial Sequence
  Description of Artificial Sequence: Synthetic oligonucleotide
  Antisense strand to SEQ ID NO: 2282454
aucauucagcaagaugagg

SEQ ID NO: 2282456 - RNA, 19 nt, Artificial Sequence
  Description of Artificial Sequence: Synthetic oligonucleotide
  Sense strand starting at position 220 of SEQ ID NO: 1884664
gaaugauguccuuguccuc

SEQ ID NO: 2282457 - RNA, 19 nt, Artificial Sequence
  Description of Artificial Sequence: Synthetic oligonucleotide
  Antisense strand to SEQ ID NO: 2282456
gaggacaaggacaucauuc

SEQ ID NO: 2282458 - RNA, 19 nt, Artificial Sequence
  Description of Artificial Sequence: Synthetic oligonucleotide
  Sense strand starting at position 318 of SEQ ID NO: 1884664
auuaguauguucuucugca

SEQ ID NO: 2282459 - RNA, 19 nt, Artificial Sequence
  Description of Artificial Sequence: Synthetic oligonucleotide
  Antisense strand to SEQ ID NO: 2282458
ugcagaagaacauacuaau

SEQ ID NO: 2282460 - RNA, 19 nt, Artificial Sequence
  Description of Artificial Sequence: Synthetic oligonucleotide
  Sense strand starting at position 445 of SEQ ID NO: 1884664
cccacaucccugggagaca

SEQ ID NO: 2282461 - RNA, 19 nt, Artificial Sequence
  Description of Artificial Sequence: Synthetic oligonucleotide
  Antisense strand to SEQ ID NO: 2282460
ugucucccagggauguggg

SEQ ID NO: 2282462 - RNA, 19 nt, Artificial Sequence
  Description of Artificial Sequence: Synthetic oligonucleotide
  Sense strand starting at position 446 of SEQ ID NO: 1884664
ccacaucccugggagacaa

SEQ ID NO: 2282463 - RNA, 19 nt, Artificial Sequence
  Description of Artificial Sequence: Synthetic oligonucleotide
  Antisense strand to SEQ ID NO: 2282462
uugucucccagggaugugg

SEQ ID NO: 2282464 - RNA, 19 nt, Artificial Sequence
  Description of Artificial Sequence: Synthetic oligonucleotide
  Sense strand starting at position 501 of SEQ ID NO: 1884664
ggagaugauucuguuguaa

SEQ ID NO: 2282465 - RNA, 19 nt, Artificial Sequence
  Description of Artificial Sequence: Synthetic oligonucleotide
  Antisense strand to SEQ ID NO: 2282464
uuacaacagaaucaucucc

SEQ ID NO: 2282466 - RNA, 19 nt, Artificial Sequence
  Description of Artificial Sequence: Synthetic oligonucleotide
  Sense strand starting at position 546 of SEQ ID NO: 1884664
uuuggauuguuaucaagga

SEQ ID NO: 2282467 - RNA, 19 nt, Artificial Sequence
  Description of Artificial Sequence: Synthetic oligonucleotide
  Antisense strand to SEQ ID NO: 2282466
uccuugauaacaauccaaa

SEQ ID NO: 2282468 - RNA, 19 nt, Artificial Sequence
  Description of Artificial Sequence: Synthetic oligonucleotide
  Sense strand starting at position 595 of SEQ ID NO: 1884664
gugggucugacucagaagu

SEQ ID NO: 2282469 - RNA, 19 nt, Artificial Sequence
  Description of Artificial Sequence: Synthetic oligonucleotide
  Antisense strand to SEQ ID NO: 2282468
acuucugagucagacccac

SEQ ID NO: 2282470 - RNA, 19 nt, Artificial Sequence
  Description of Artificial Sequence: Synthetic oligonucleotide
  Sense strand starting at position 606 of SEQ ID NO: 1884664
ucagaaguguuucccagac

SEQ ID NO: 2282471 - RNA, 19 nt, Artificial Sequence
  Description of Artificial Sequence: Synthetic oligonucleotide
  Antisense strand to SEQ ID NO: 2282470
gucugggaaacacuucuga

SEQ ID NO: 2282472 - RNA, 19 nt, Artificial Sequence
  Description of Artificial Sequence: Synthetic oligonucleotide
  Sense strand starting at position 980 of SEQ ID NO: 1884664
aguccacucuucccugauu

SEQ ID NO: 2282473 - RNA, 19 nt, Artificial Sequence
  Description of Artificial Sequence: Synthetic oligonucleotide
  Antisense strand to SEQ ID NO: 2282472
aaucagggaagaguggacu

SEQ ID NO: 2282474 - RNA, 19 nt, Artificial Sequence
  Description of Artificial Sequence: Synthetic oligonucleotide
  Sense strand starting at position 1019 of SEQ ID NO: 1884664
auguuuagcgucuaaauga

SEQ ID NO: 2282475 - RNA, 19 nt, Artificial Sequence
  Description of Artificial Sequence: Synthetic oligonucleotide
  Antisense strand to SEQ ID NO: 2282474
ucauuuagacgcuaaacau

SEQ ID NO: 2282476 - RNA, 19 nt, Artificial Sequence
  Description of Artificial Sequence: Synthetic oligonucleotide
  Sense strand starting at position 1033 of SEQ ID NO: 1884664
aaugaagcguuucccagaa

SEQ ID NO: 2282477 - RNA, 19 nt, Artificial Sequence
  Description of Artificial Sequence: Synthetic oligonucleotide
  Antisense strand to SEQ ID NO: 2282476
uucugggaaacgcuucauu

SEQ ID NO: 2282478 - RNA, 19 nt, Artificial Sequence
  Description of Artificial Sequence: Synthetic oligonucleotide
  Sense strand starting at position 1037 of SEQ ID NO: 1884664
aagcguuucccagaacaga

SEQ ID NO: 2282479 - RNA, 19 nt, Artificial Sequence
  Description of Artificial Sequence: Synthetic oligonucleotide
  Antisense strand to SEQ ID NO: 2282478
ucuguucugggaaacgcuu

SEQ ID NO: 2282480 - RNA, 19 nt, Artificial Sequence
  Description of Artificial Sequence: Synthetic oligonucleotide
  Sense strand starting at position 1054 of SEQ ID NO: 1884664
gagugaaccuuuccauugu

SEQ ID NO: 2282481 - RNA, 19 nt, Artificial Sequence
  Description of Artificial Sequence: Synthetic oligonucleotide
  Antisense strand to SEQ ID NO: 2282480
acaauggaaagguucacuc

SEQ ID NO: 2282482 - RNA, 19 nt, Artificial Sequence
  Description of Artificial Sequence: Synthetic oligonucleotide
  Sense strand starting at position 1065 of SEQ ID NO: 1884664
uccauuguccucugaaagc

SEQ ID NO: 2282483 - RNA, 19 nt, Artificial Sequence
  Description of Artificial Sequence: Synthetic oligonucleotide
  Antisense strand to SEQ ID NO: 2282482
gcuuucagaggacaaugga

SEQ ID NO: 2282484 - RNA, 19 nt, Artificial Sequence
  Description of Artificial Sequence: Synthetic oligonucleotide
  Sense strand starting at position 1111 of SEQ ID NO: 1884664
aguuaauuucugcguguga

SEQ ID NO: 2282485 - RNA, 19 nt, Artificial Sequence
  Description of Artificial Sequence: Synthetic oligonucleotide
  Antisense strand to SEQ ID NO: 2282484
ucacacgcagaaauuaacu

SEQ ID NO: 2282486 - RNA, 19 nt, Artificial Sequence
  Description of Artificial Sequence: Synthetic oligonucleotide
  Sense strand starting at position 1112 of SEQ ID NO: 1884664
guuaauuucugcgugugau

SEQ ID NO: 2282487 - RNA, 19 nt, Artificial Sequence
  Description of Artificial Sequence: Synthetic oligonucleotide
  Antisense strand to SEQ ID NO: 2282486
aucacacgcagaaauuaac

SEQ ID NO: 2282488 - RNA, 19 nt, Artificial Sequence
  Description of Artificial Sequence: Synthetic oligonucleotide
  Sense strand starting at position 1113 of SEQ ID NO: 1884664
uuaauuucugcgugugauu

SEQ ID NO: 2282489 - RNA, 19 nt, Artificial Sequence
  Description of Artificial Sequence: Synthetic oligonucleotide
  Antisense strand to SEQ ID NO: 2282488
aaucacacgcagaaauuaa

SEQ ID NO: 2282490 - RNA, 19 nt, Artificial Sequence
  Description of Artificial Sequence: Synthetic oligonucleotide
  Sense strand starting at position 1124 of SEQ ID NO: 1884664
gugugauuccaagaaaugu

SEQ ID NO: 2282491 - RNA, 19 nt, Artificial Sequence
  Description of Artificial Sequence: Synthetic oligonucleotide
  Antisense strand to SEQ ID NO: 2282490
acauuucuuggaaucacac

SEQ ID NO: 2282492 - RNA, 19 nt, Artificial Sequence
  Description of Artificial Sequence: Synthetic oligonucleotide
  Sense strand starting at position 1460 of SEQ ID NO: 1884664
gcaccuacgcuguccuauu

SEQ ID NO: 2282493 - RNA, 19 nt, Artificial Sequence
  Description of Artificial Sequence: Synthetic oligonucleotide
  Antisense strand to SEQ ID NO: 2282492
aauaggacagcguaggugc

SEQ ID NO: 2282494 - RNA, 19 nt, Artificial Sequence
  Description of Artificial Sequence: Synthetic oligonucleotide
  Sense strand starting at position 1565 of SEQ ID NO: 1884664
gacuuugccgaguggauua

SEQ ID NO: 2282495 - RNA, 19 nt, Artificial Sequence
  Description of Artificial Sequence: Synthetic oligonucleotide
  Antisense strand to SEQ ID NO: 2282494
uaauccacucggcaaaguc

SEQ ID NO: 2282496 - RNA, 19 nt, Artificial Sequence
  Description of Artificial Sequence: Synthetic oligonucleotide
  Sense strand starting at position 1764 of SEQ ID NO: 1884664
cccagauucuagcuaaaug

SEQ ID NO: 2282497 - RNA, 19 nt, Artificial Sequence
  Description of Artificial Sequence: Synthetic oligonucleotide
  Antisense strand to SEQ ID NO: 2282496
cauuuagcuagaaucuggg

SEQ ID NO: 2282498 - RNA, 19 nt, Artificial Sequence
  Description of Artificial Sequence: Synthetic oligonucleotide
  Sense strand starting at position 1791 of SEQ ID NO: 1884664
guacaauucuaaguuguca

SEQ ID NO: 2282499 - RNA, 19 nt, Artificial Sequence
  Description of Artificial Sequence: Synthetic oligonucleotide
  Antisense strand to SEQ ID NO: 2282498
ugacaacuuagaauuguac

SEQ ID NO: 2282500 - RNA, 19 nt, Artificial Sequence
  Description of Artificial Sequence: Synthetic oligonucleotide
  Sense strand starting at position 1804 of SEQ ID NO: 1884664
uugucaugagucugggaga

SEQ ID NO: 2282501 - RNA, 19 nt, Artificial Sequence
  Description of Artificial Sequence: Synthetic oligonucleotide
  Antisense strand to SEQ ID NO: 2282500
ucucccagacucaugacaa

SEQ ID NO: 2282502 - RNA, 19 nt, Artificial Sequence
  Description of Artificial Sequence: Synthetic oligonucleotide
  Sense strand starting at position 1815 of SEQ ID NO: 1884664
cugggagagccuuaggcua

SEQ ID NO: 2282503 - RNA, 19 nt, Artificial Sequence
  Description of Artificial Sequence: Synthetic oligonucleotide
  Antisense strand to SEQ ID NO: 2282502
uagccuaaggcucucccag

SEQ ID NO: 2282504 - RNA, 19 nt, Artificial Sequence
  Description of Artificial Sequence: Synthetic oligonucleotide
  Sense strand starting at position 2039 of SEQ ID NO: 1884664
agcccuuugugggucagau

SEQ ID NO: 2282505 - RNA, 19 nt, Artificial Sequence
  Description of Artificial Sequence: Synthetic oligonucleotide
  Antisense strand to SEQ ID NO: 2282504
aucugacccacaaagggcu

SEQ ID NO: 2282506 - RNA, 19 nt, Artificial Sequence
  Description of Artificial Sequence: Synthetic oligonucleotide
  Sense strand starting at position 2301 of SEQ ID NO: 1884664
ggcagagaccaaugucaag

SEQ ID NO: 2282507 - RNA, 19 nt, Artificial Sequence
  Description of Artificial Sequence: Synthetic oligonucleotide
  Antisense strand to SEQ ID NO: 2282506
cuugacauuggucucugcc

SEQ ID NO: 2282508 - RNA, 19 nt, Artificial Sequence
  Description of Artificial Sequence: Synthetic oligonucleotide
  Sense strand starting at position 2502 of SEQ ID NO: 1884664
ggacuuagggcccacuuau

SEQ ID NO: 2282509 - RNA, 19 nt, Artificial Sequence
  Description of Artificial Sequence: Synthetic oligonucleotide
  Antisense strand to SEQ ID NO: 2282508
auaagugggcccuaagucc

SEQ ID NO: 2282510 - RNA, 19 nt, Artificial Sequence
  Description of Artificial Sequence: Synthetic oligonucleotide
  Sense strand starting at position 2513 of SEQ ID NO: 1884664
ccacuuauuccaggaugac

SEQ ID NO: 2282511 - RNA, 19 nt, Artificial Sequence
  Description of Artificial Sequence: Synthetic oligonucleotide
  Antisense strand to SEQ ID NO: 2282510
gucauccuggaauaagugg

SEQ ID NO: 2282512 - RNA, 19 nt, Artificial Sequence
  Description of Artificial Sequence: Synthetic oligonucleotide
  Sense strand starting at position 2542 of SEQ ID NO: 1884664
gugauugcaucuccagcaa

SEQ ID NO: 2282513 - RNA, 19 nt, Artificial Sequence
  Description of Artificial Sequence: Synthetic oligonucleotide
  Antisense strand to SEQ ID NO: 2282512
uugcuggagaugcaaucac

SEQ ID NO: 2282514 - RNA, 19 nt, Artificial Sequence
  Description of Artificial Sequence: Synthetic oligonucleotide
  Sense strand starting at position 2587 of SEQ ID NO: 1884664
ugagguucuacauagacgu

SEQ ID NO: 2282515 - RNA, 19 nt, Artificial Sequence
  Description of Artificial Sequence: Synthetic oligonucleotide
  Antisense strand to SEQ ID NO: 2282514
acgucuauguagaaccuca

SEQ ID NO: 2282516 - RNA, 19 nt, Artificial Sequence
  Description of Artificial Sequence: Synthetic oligonucleotide
  Sense strand starting at position 2635 of SEQ ID NO: 1884664
accgucucuuugcuugaaa

SEQ ID NO: 2282517 - RNA, 19 nt, Artificial Sequence
  Description of Artificial Sequence: Synthetic oligonucleotide
  Antisense strand to SEQ ID NO: 2282516
uuucaagcaaagagacggu

SEQ ID NO: 2282518 - RNA, 19 nt, Artificial Sequence
  Description of Artificial Sequence: Synthetic oligonucleotide
  Sense strand starting at position 2638 of SEQ ID NO: 1884664
gucucuuugcuugaaauca

SEQ ID NO: 2282519 - RNA, 19 nt, Artificial Sequence
  Description of Artificial Sequence: Synthetic oligonucleotide
  Antisense strand to SEQ ID NO: 2282518
ugauuucaagcaaagagac

SEQ ID NO: 2282520 - RNA, 19 nt, Artificial Sequence
  Description of Artificial Sequence: Synthetic oligonucleotide
  Sense strand starting at position 2684 of SEQ ID NO: 1884664
ccacuuuguccgcagaucu

SEQ ID NO: 2282521 - RNA, 19 nt, Artificial Sequence
  Description of Artificial Sequence: Synthetic oligonucleotide
  Antisense strand to SEQ ID NO: 2282520
agaucugcggacaaagugg

SEQ ID NO: 2282522 - RNA, 19 nt, Artificial Sequence
  Description of Artificial Sequence: Synthetic oligonucleotide
  Sense strand starting at position 3195 of SEQ ID NO: 1884664
auauuaggguccucauagu

SEQ ID NO: 2282523 - RNA, 19 nt, Artificial Sequence
  Description of Artificial Sequence: Synthetic oligonucleotide
  Antisense strand to SEQ ID NO: 2282522
acuaugaggacccuaauau

SEQ ID NO: 2282524 - RNA, 19 nt, Artificial Sequence
  Description of Artificial Sequence: Synthetic oligonucleotide
  Sense strand starting at position 3303 of SEQ ID NO: 1884664
ggcccagagauaggcuuau

SEQ ID NO: 2282525 - RNA, 19 nt, Artificial Sequence
  Description of Artificial Sequence: Synthetic oligonucleotide
  Antisense strand to SEQ ID NO: 2282524
auaagccuaucucugggcc

SEQ ID NO: 2282526 - RNA, 19 nt, Artificial Sequence
  Description of Artificial Sequence: Synthetic oligonucleotide
  Sense strand starting at position 3309 of SEQ ID NO: 1884664
gagauaggcuuauuggagu

SEQ ID NO: 2282527 - RNA, 19 nt, Artificial Sequence
  Description of Artificial Sequence: Synthetic oligonucleotide
  Antisense strand to SEQ ID NO: 2282526
acuccaauaagccuaucuc

SEQ ID NO: 2282528 - RNA, 19 nt, Artificial Sequence
  Description of Artificial Sequence: Synthetic oligonucleotide
  Sense strand starting at position 3518 of SEQ ID NO: 1884664
caguguuugccagcucauc

SEQ ID NO: 2282529 - RNA, 19 nt, Artificial Sequence
  Description of Artificial Sequence: Synthetic oligonucleotide
  Antisense strand to SEQ ID NO: 2282528
gaugagcuggcaaacacug

SEQ ID NO: 2282530 - RNA, 19 nt, Artificial Sequence
  Description of Artificial Sequence: Synthetic oligonucleotide
  Sense strand starting at position 3721 of SEQ ID NO: 1884664
uagguuaaaugacagagaa

SEQ ID NO: 2282531 - RNA, 19 nt, Artificial Sequence
  Description of Artificial Sequence: Synthetic oligonucleotide
  Antisense strand to SEQ ID NO: 2282530
uucucugucauuuaaccua

SEQ ID NO: 2282532 - RNA, 19 nt, Artificial Sequence
  Description of Artificial Sequence: Synthetic oligonucleotide
  Sense strand starting at position 996 of SEQ ID NO: 1884665
caccucuccuguuggauga

SEQ ID NO: 2282533 - RNA, 19 nt, Artificial Sequence
  Description of Artificial Sequence: Synthetic oligonucleotide
  Antisense strand to SEQ ID NO: 2282532
ucauccaacaggagaggug

SEQ ID NO: 2282534 - RNA, 19 nt, Artificial Sequence
  Description of Artificial Sequence: Synthetic oligonucleotide
  Sense strand starting at position 1043 of SEQ ID NO: 1884665
gacucucuguagcuguaaa

SEQ ID NO: 2282535 - RNA, 19 nt, Artificial Sequence
  Description of Artificial Sequence: Synthetic oligonucleotide
  Antisense strand to SEQ ID NO: 2282534
uuuacagcuacagagaguc

SEQ ID NO: 2282536 - RNA, 19 nt, Artificial Sequence
  Description of Artificial Sequence: Synthetic oligonucleotide
  Sense strand starting at position 1194 of SEQ ID NO: 1884665
gcaccagccugaguuauuu

SEQ ID NO: 2282537 - RNA, 19 nt, Artificial Sequence
  Description of Artificial Sequence: Synthetic oligonucleotide
  Antisense strand to SEQ ID NO: 2282536
aaauaacucaggcuggugc

SEQ ID NO: 2282538 - RNA, 19 nt, Artificial Sequence
  Description of Artificial Sequence: Synthetic oligonucleotide
  Sense strand starting at position 1494 of SEQ ID NO: 1884665
gugcuuagaucagcugaaa

SEQ ID NO: 2282539 - RNA, 19 nt, Artificial Sequence
  Description of Artificial Sequence: Synthetic oligonucleotide
  Antisense strand to SEQ ID NO: 2282538
uuucagcugaucuaagcac

SEQ ID NO: 2282540 - RNA, 19 nt, Artificial Sequence
  Description of Artificial Sequence: Synthetic oligonucleotide
  Sense strand starting at position 1513 of SEQ ID NO: 1884665
cagagacagccaugucaug

SEQ ID NO: 2282541 - RNA, 19 nt, Artificial Sequence
  Description of Artificial Sequence: Synthetic oligonucleotide
  Antisense strand to SEQ ID NO: 2282540
caugacauggcugucucug

SEQ ID NO: 2282542 - RNA, 19 nt, Artificial Sequence
  Description of Artificial Sequence: Synthetic oligonucleotide
  Sense strand starting at position 1615 of SEQ ID NO: 1884665
ugcugucuggccuacaaau

SEQ ID NO: 2282543 - RNA, 19 nt, Artificial Sequence
  Description of Artificial Sequence: Synthetic oligonucleotide
  Antisense strand to SEQ ID NO: 2282542
auuuguaggccagacagca

SEQ ID NO: 2282544 - RNA, 19 nt, Artificial Sequence
  Description of Artificial Sequence: Synthetic oligonucleotide
  Sense strand starting at position 1617 of SEQ ID NO: 1884665
cugucuggccuacaaauua

SEQ ID NO: 2282545 - RNA, 19 nt, Artificial Sequence
  Description of Artificial Sequence: Synthetic oligonucleotide
  Antisense strand to SEQ ID NO: 2282544
uaauuuguaggccagacag

SEQ ID NO: 2282546 - RNA, 19 nt, Artificial Sequence
  Description of Artificial Sequence: Synthetic oligonucleotide
  Sense strand starting at position 1651 of SEQ ID NO: 1884665
ccuggaaugugacaguguu

SEQ ID NO: 2282547 - RNA, 19 nt, Artificial Sequence
  Description of Artificial Sequence: Synthetic oligonucleotide
  Antisense strand to SEQ ID NO: 2282546
aacacugucacauuccagg

SEQ ID NO: 2282548 - RNA, 19 nt, Artificial Sequence
  Description of Artificial Sequence: Synthetic oligonucleotide
  Sense strand starting at position 1713 of SEQ ID NO: 1884665
ccugccaucuaagauggau

SEQ ID NO: 2282549 - RNA, 19 nt, Artificial Sequence
  Description of Artificial Sequence: Synthetic oligonucleotide
  Antisense strand to SEQ ID NO: 2282548
auccaucuuagauggcagg

SEQ ID NO: 2282550 - RNA, 19 nt, Artificial Sequence
  Description of Artificial Sequence: Synthetic oligonucleotide
  Sense strand starting at position 2082 of SEQ ID NO: 1884665
ccggaagccugaguaucau

SEQ ID NO: 2282551 - RNA, 19 nt, Artificial Sequence
  Description of Artificial Sequence: Synthetic oligonucleotide
  Antisense strand to SEQ ID NO: 2282550
augauacucaggcuuccgg

SEQ ID NO: 2282552 - RNA, 19 nt, Artificial Sequence
  Description of Artificial Sequence: Synthetic oligonucleotide
  Sense strand starting at position 2088 of SEQ ID NO: 1884665
gccugaguaucauccacag

SEQ ID NO: 2282553 - RNA, 19 nt, Artificial Sequence
  Description of Artificial Sequence: Synthetic oligonucleotide
  Antisense strand to SEQ ID NO: 2282552
cuguggaugauacucaggc

SEQ ID NO: 2282554 - RNA, 19 nt, Artificial Sequence
  Description of Artificial Sequence: Synthetic oligonucleotide
  Sense strand starting at position 2390 of SEQ ID NO: 1884665
uacacagaccaguguagua

SEQ ID NO: 2282555 - RNA, 19 nt, Artificial Sequence
  Description of Artificial Sequence: Synthetic oligonucleotide
  Antisense strand to SEQ ID NO: 2282554
uacuacacuggucugugua

SEQ ID NO: 2282556 - RNA, 19 nt, Artificial Sequence
  Description of Artificial Sequence: Synthetic oligonucleotide
  Sense strand starting at position 2547 of SEQ ID NO: 1884665
gcagguuugcagcaggaau

SEQ ID NO: 2282557 - RNA, 19 nt, Artificial Sequence
  Description of Artificial Sequence: Synthetic oligonucleotide
  Antisense strand to SEQ ID NO: 2282556
auuccugcugcaaaccugc

SEQ ID NO: 2282558 - RNA, 19 nt, Artificial Sequence
  Description of Artificial Sequence: Synthetic oligonucleotide
  Sense strand starting at position 2623 of SEQ ID NO: 1884665
gcaggugugccaucaguuc

SEQ ID NO: 2282559 - RNA, 19 nt, Artificial Sequence
  Description of Artificial Sequence: Synthetic oligonucleotide
  Antisense strand to SEQ ID NO: 2282558
gaacugauggcacaccugc

SEQ ID NO: 2282560 - RNA, 19 nt, Artificial Sequence
  Description of Artificial Sequence: Synthetic oligonucleotide
  Sense strand starting at position 2643 of SEQ ID NO: 1884665
gugucuggugcuuagauca

SEQ ID NO: 2282561 - RNA, 19 nt, Artificial Sequence
  Description of Artificial Sequence: Synthetic oligonucleotide
  Antisense strand to SEQ ID NO: 2282560
ugaucuaagcaccagacac

SEQ ID NO: 2282562 - RNA, 19 nt, Artificial Sequence
  Description of Artificial Sequence: Synthetic oligonucleotide
  Sense strand starting at position 2833 of SEQ ID NO: 1884665
gcaccugugucccacuauu

SEQ ID NO: 2282563 - RNA, 19 nt, Artificial Sequence
  Description of Artificial Sequence: Synthetic oligonucleotide
  Antisense strand to SEQ ID NO: 2282562
aauagugggacacaggugc

SEQ ID NO: 2282564 - RNA, 19 nt, Artificial Sequence
  Description of Artificial Sequence: Synthetic oligonucleotide
  Sense strand starting at position 2943 of SEQ ID NO: 1884665
cucauuuauuccugugcuu

SEQ ID NO: 2282565 - RNA, 19 nt, Artificial Sequence
  Description of Artificial Sequence: Synthetic oligonucleotide
  Antisense strand to SEQ ID NO: 2282564
aagcacaggaauaaaugag

SEQ ID NO: 2282566 - RNA, 19 nt, Artificial Sequence
  Description of Artificial Sequence: Synthetic oligonucleotide
  Sense strand starting at position 2946 of SEQ ID NO: 1884665
auuuauuccugugcuuauu

SEQ ID NO: 2282567 - RNA, 19 nt, Artificial Sequence
  Description of Artificial Sequence: Synthetic oligonucleotide
  Antisense strand to SEQ ID NO: 2282566
aauaagcacaggaauaaau

SEQ ID NO: 2282568 - RNA, 19 nt, Artificial Sequence
  Description of Artificial Sequence: Synthetic oligonucleotide
  Sense strand starting at position 2955 of SEQ ID NO: 1884665
ugugcuuauuuauugucua

SEQ ID NO: 2282569 - RNA, 19 nt, Artificial Sequence
  Description of Artificial Sequence: Synthetic oligonucleotide
  Antisense strand to SEQ ID NO: 2282568
uagacaauaaauaagcaca

SEQ ID NO: 2282570 - RNA, 19 nt, Artificial Sequence
  Description of Artificial Sequence: Synthetic oligonucleotide
  Sense strand starting at position 2958 of SEQ ID NO: 1884665
gcuuauuuauugucuagcu

SEQ ID NO: 2282571 - RNA, 19 nt, Artificial Sequence
  Description of Artificial Sequence: Synthetic oligonucleotide
  Antisense strand to SEQ ID NO: 2282570
agcuagacaauaaauaagc

SEQ ID NO: 2282572 - RNA, 19 nt, Artificial Sequence
  Description of Artificial Sequence: Synthetic oligonucleotide
  Sense strand starting at position 2982 of SEQ ID NO: 1884665
cucccugaggucuggcuua

SEQ ID NO: 2282573 - RNA, 19 nt, Artificial Sequence
  Description of Artificial Sequence: Synthetic oligonucleotide
  Antisense strand to SEQ ID NO: 2282572
uaagccagaccucagggag

SEQ ID NO: 2282574 - RNA, 19 nt, Artificial Sequence
  Description of Artificial Sequence: Synthetic oligonucleotide
  Sense strand starting at position 2994 of SEQ ID NO: 1884665
uggcuuauucccugccuuu

SEQ ID NO: 2282575 - RNA, 19 nt, Artificial Sequence
  Description of Artificial Sequence: Synthetic oligonucleotide
  Antisense strand to SEQ ID NO: 2282574
aaaggcagggaauaagcca

SEQ ID NO: 2282576 - RNA, 19 nt, Artificial Sequence
  Description of Artificial Sequence: Synthetic oligonucleotide
  Sense strand starting at position 3028 of SEQ ID NO: 1884665
gucagcaucugcugggauu

SEQ ID NO: 2282577 - RNA, 19 nt, Artificial Sequence
  Description of Artificial Sequence: Synthetic oligonucleotide
  Antisense strand to SEQ ID NO: 2282576
aaucccagcagaugcugac

SEQ ID NO: 2282578 - RNA, 19 nt, Artificial Sequence
  Description of Artificial Sequence: Synthetic oligonucleotide
  Sense strand starting at position 3039 of SEQ ID NO: 1884665
cugggauugucucaaggca

SEQ ID NO: 2282579 - RNA, 19 nt, Artificial Sequence
  Description of Artificial Sequence: Synthetic oligonucleotide
  Antisense strand to SEQ ID NO: 2282578
ugccuugagacaaucccag

SEQ ID NO: 2282580 - RNA, 19 nt, Artificial Sequence
  Description of Artificial Sequence: Synthetic oligonucleotide
  Sense strand starting at position 3079 of SEQ ID NO: 1884665
gcaacuguagguugcuaua

SEQ ID NO: 2282581 - RNA, 19 nt, Artificial Sequence
  Description of Artificial Sequence: Synthetic oligonucleotide
  Antisense strand to SEQ ID NO: 2282580
uauagcaaccuacaguugc

SEQ ID NO: 2282582 - RNA, 19 nt, Artificial Sequence
  Description of Artificial Sequence: Synthetic oligonucleotide
  Sense strand starting at position 3081 of SEQ ID NO: 1884665
aacuguagguugcuauauu

SEQ ID NO: 2282583 - RNA, 19 nt, Artificial Sequence
  Description of Artificial Sequence: Synthetic oligonucleotide
  Antisense strand to SEQ ID NO: 2282582
aauauagcaaccuacaguu

SEQ ID NO: 2282584 - RNA, 19 nt, Artificial Sequence
  Description of Artificial Sequence: Synthetic oligonucleotide
  Sense strand starting at position 3082 of SEQ ID NO: 1884665
acuguagguugcuauauuu

SEQ ID NO: 2282585 - RNA, 19 nt, Artificial Sequence
  Description of Artificial Sequence: Synthetic oligonucleotide
  Antisense strand to SEQ ID NO: 2282584
aaauauagcaaccuacagu

SEQ ID NO: 2282586 - RNA, 19 nt, Artificial Sequence
  Description of Artificial Sequence: Synthetic oligonucleotide
  Sense strand starting at position 3171 of SEQ ID NO: 1884665
aggccaacucagugcaauu

SEQ ID NO: 2282587 - RNA, 19 nt, Artificial Sequence
  Description of Artificial Sequence: Synthetic oligonucleotide
  Antisense strand to SEQ ID NO: 2282586
aauugcacugaguuggccu

SEQ ID NO: 2282588 - RNA, 19 nt, Artificial Sequence
  Description of Artificial Sequence: Synthetic oligonucleotide
  Sense strand starting at position 3173 of SEQ ID NO: 1884665
gccaacucagugcaauuaa

SEQ ID NO: 2282589 - RNA, 19 nt, Artificial Sequence
  Description of Artificial Sequence: Synthetic oligonucleotide
  Antisense strand to SEQ ID NO: 2282588
uuaauugcacugaguuggc

SEQ ID NO: 2282590 - RNA, 19 nt, Artificial Sequence
  Description of Artificial Sequence: Synthetic oligonucleotide
  Sense strand starting at position 3183 of SEQ ID NO: 1884665
ugcaauuaacucugacaug

SEQ ID NO: 2282591 - RNA, 19 nt, Artificial Sequence
  Description of Artificial Sequence: Synthetic oligonucleotide
  Antisense strand to SEQ ID NO: 2282590
caugucagaguuaauugca

SEQ ID NO: 2282592 - RNA, 19 nt, Artificial Sequence
  Description of Artificial Sequence: Synthetic oligonucleotide
  Sense strand starting at position 3201 of SEQ ID NO: 1884665
ggauguuugcaugguuuaa

SEQ ID NO: 2282593 - RNA, 19 nt, Artificial Sequence
  Description of Artificial Sequence: Synthetic oligonucleotide
  Antisense strand to SEQ ID NO: 2282592
uuaaaccaugcaaacaucc

SEQ ID NO: 2282594 - RNA, 19 nt, Artificial Sequence
  Description of Artificial Sequence: Synthetic oligonucleotide
  Sense strand starting at position 3383 of SEQ ID NO: 1884665
ugccaugugguguaggaaa

SEQ ID NO: 2282595 - RNA, 19 nt, Artificial Sequence
  Description of Artificial Sequence: Synthetic oligonucleotide
  Antisense strand to SEQ ID NO: 2282594
uuuccuacaccacauggca

SEQ ID NO: 2282596 - RNA, 19 nt, Artificial Sequence
  Description of Artificial Sequence: Synthetic oligonucleotide
  Sense strand starting at position 3525 of SEQ ID NO: 1884665
accauuacuagguguggga

SEQ ID NO: 2282597 - RNA, 19 nt, Artificial Sequence
  Description of Artificial Sequence: Synthetic oligonucleotide
  Antisense strand to SEQ ID NO: 2282596
ucccacaccuaguaauggu

SEQ ID NO: 2282598 - RNA, 19 nt, Artificial Sequence
  Description of Artificial Sequence: Synthetic oligonucleotide
  Sense strand starting at position 3581 of SEQ ID NO: 1884665
aggucuugcuguuaaacau

SEQ ID NO: 2282599 - RNA, 19 nt, Artificial Sequence
  Description of Artificial Sequence: Synthetic oligonucleotide
  Antisense strand to SEQ ID NO: 2282598
auguuuaacagcaagaccu

SEQ ID NO: 2282600 - RNA, 19 nt, Artificial Sequence
  Description of Artificial Sequence: Synthetic oligonucleotide
  Sense strand starting at position 3648 of SEQ ID NO: 1884665
cuaaccugggccugauuaa

SEQ ID NO: 2282601 - RNA, 19 nt, Artificial Sequence
  Description of Artificial Sequence: Synthetic oligonucleotide
  Antisense strand to SEQ ID NO: 2282600
uuaaucaggcccagguuag

SEQ ID NO: 2282602 - RNA, 19 nt, Artificial Sequence
  Description of Artificial Sequence: Synthetic oligonucleotide
  Sense strand starting at position 3851 of SEQ ID NO: 1884665
cagaaagaauuuggaauga

SEQ ID NO: 2282603 - RNA, 19 nt, Artificial Sequence
  Description of Artificial Sequence: Synthetic oligonucleotide
  Antisense strand to SEQ ID NO: 2282602
ucauuccaaauucuuucug

SEQ ID NO: 2282604 - RNA, 19 nt, Artificial Sequence
  Description of Artificial Sequence: Synthetic oligonucleotide
  Sense strand starting at position 3873 of SEQ ID NO: 1884665
ggcuuugugguaugauuca

SEQ ID NO: 2282605 - RNA, 19 nt, Artificial Sequence
  Description of Artificial Sequence: Synthetic oligonucleotide
  Antisense strand to SEQ ID NO: 2282604
ugaaucauaccacaaagcc

SEQ ID NO: 2282606 - RNA, 19 nt, Artificial Sequence
  Description of Artificial Sequence: Synthetic oligonucleotide
  Sense strand starting at position 18 of SEQ ID NO: 1884666
ugaucauaccacugugaca

SEQ ID NO: 2282607 - RNA, 19 nt, Artificial Sequence
  Description of Artificial Sequence: Synthetic oligonucleotide
  Antisense strand to SEQ ID NO: 2282606
ugucacagugguaugauca

SEQ ID NO: 2282608 - RNA, 19 nt, Artificial Sequence
  Description of Artificial Sequence: Synthetic oligonucleotide
  Sense strand starting at position 46 of SEQ ID NO: 1884666
caguuuccuuucguugaca

SEQ ID NO: 2282609 - RNA, 19 nt, Artificial Sequence
  Description of Artificial Sequence: Synthetic oligonucleotide
  Antisense strand to SEQ ID NO: 2282608
ugucaacgaaaggaaacug

SEQ ID NO: 2282610 - RNA, 19 nt, Artificial Sequence
  Description of Artificial Sequence: Synthetic oligonucleotide
  Sense strand starting at position 82 of SEQ ID NO: 1884666
gcugcaguccuaucuguau

SEQ ID NO: 2282611 - RNA, 19 nt, Artificial Sequence
  Description of Artificial Sequence: Synthetic oligonucleotide
  Antisense strand to SEQ ID NO: 2282610
auacagauaggacugcagc

SEQ ID NO: 2282612 - RNA, 19 nt, Artificial Sequence
  Description of Artificial Sequence: Synthetic oligonucleotide
  Sense strand starting at position 181 of SEQ ID NO: 1884666
cuaauaucccacugggaac

SEQ ID NO: 2282613 - RNA, 19 nt, Artificial Sequence
  Description of Artificial Sequence: Synthetic oligonucleotide
  Antisense strand to SEQ ID NO: 2282612
guucccagugggauauuag

SEQ ID NO: 2282614 - RNA, 19 nt, Artificial Sequence
  Description of Artificial Sequence: Synthetic oligonucleotide
  Sense strand starting at position 216 of SEQ ID NO: 1884666
ccguguuguugggcauuua

SEQ ID NO: 2282615 - RNA, 19 nt, Artificial Sequence
  Description of Artificial Sequence: Synthetic oligonucleotide
  Antisense strand to SEQ ID NO: 2282614
uaaaugcccaacaacacgg

SEQ ID NO: 2282616 - RNA, 19 nt, Artificial Sequence
  Description of Artificial Sequence: Synthetic oligonucleotide
  Sense strand starting at position 354 of SEQ ID NO: 1884666
auaaaugaguucuugccca

SEQ ID NO: 2282617 - RNA, 19 nt, Artificial Sequence
  Description of Artificial Sequence: Synthetic oligonucleotide
  Antisense strand to SEQ ID NO: 2282616
ugggcaagaacucauuuau

SEQ ID NO: 2282618 - RNA, 19 nt, Artificial Sequence
  Description of Artificial Sequence: Synthetic oligonucleotide
  Sense strand starting at position 573 of SEQ ID NO: 1884666
guugauuaaugccaugaaa

SEQ ID NO: 2282619 - RNA, 19 nt, Artificial Sequence
  Description of Artificial Sequence: Synthetic oligonucleotide
  Antisense strand to SEQ ID NO: 2282618
uuucauggcauuaaucaac

SEQ ID NO: 2282620 - RNA, 19 nt, Artificial Sequence
  Description of Artificial Sequence: Synthetic oligonucleotide
  Sense strand starting at position 575 of SEQ ID NO: 1884666
ugauuaaugccaugaaacc

SEQ ID NO: 2282621 - RNA, 19 nt, Artificial Sequence
  Description of Artificial Sequence: Synthetic oligonucleotide
  Antisense strand to SEQ ID NO: 2282620
gguuucauggcauuaauca

SEQ ID NO: 2282622 - RNA, 19 nt, Artificial Sequence
  Description of Artificial Sequence: Synthetic oligonucleotide
  Sense strand starting at position 595 of SEQ ID NO: 1884666
cucagugucuuucucugua

SEQ ID NO: 2282623 - RNA, 19 nt, Artificial Sequence
  Description of Artificial Sequence: Synthetic oligonucleotide
  Antisense strand to SEQ ID NO: 2282622
uacagagaaagacacugag

SEQ ID NO: 2282624 - RNA, 19 nt, Artificial Sequence
  Description of Artificial Sequence: Synthetic oligonucleotide
  Sense strand starting at position 632 of SEQ ID NO: 1884666
cuacuuccuggguggugaa

SEQ ID NO: 2282625 - RNA, 19 nt, Artificial Sequence
  Description of Artificial Sequence: Synthetic oligonucleotide
  Antisense strand to SEQ ID NO: 2282624
uucaccacccaggaaguag

SEQ ID NO: 2282626 - RNA, 19 nt, Artificial Sequence
  Description of Artificial Sequence: Synthetic oligonucleotide
  Sense strand starting at position 639 of SEQ ID NO: 1884666
cuggguggugaagaguauu

SEQ ID NO: 2282627 - RNA, 19 nt, Artificial Sequence
  Description of Artificial Sequence: Synthetic oligonucleotide
  Antisense strand to SEQ ID NO: 2282626
aauacucuucaccacccag

SEQ ID NO: 2282628 - RNA, 19 nt, Artificial Sequence
  Description of Artificial Sequence: Synthetic oligonucleotide
  Sense strand starting at position 645 of SEQ ID NO: 1884666
ggugaagaguauuaaauca

SEQ ID NO: 2282629 - RNA, 19 nt, Artificial Sequence
  Description of Artificial Sequence: Synthetic oligonucleotide
  Antisense strand to SEQ ID NO: 2282628
ugauuuaauacucuucacc

SEQ ID NO: 2282630 - RNA, 19 nt, Artificial Sequence
  Description of Artificial Sequence: Synthetic oligonucleotide
  Sense strand starting at position 661 of SEQ ID NO: 1884666
ucaguuaaacagugaaagu

SEQ ID NO: 2282631 - RNA, 19 nt, Artificial Sequence
  Description of Artificial Sequence: Synthetic oligonucleotide
  Antisense strand to SEQ ID NO: 2282630
acuuucacuguuuaacuga

SEQ ID NO: 2282632 - RNA, 19 nt, Artificial Sequence
  Description of Artificial Sequence: Synthetic oligonucleotide
  Sense strand starting at position 670 of SEQ ID NO: 1884666
cagugaaagugcuuagcau

SEQ ID NO: 2282633 - RNA, 19 nt, Artificial Sequence
  Description of Artificial Sequence: Synthetic oligonucleotide
  Antisense strand to SEQ ID NO: 2282632
augcuaagcacuuucacug

SEQ ID NO: 2282634 - RNA, 19 nt, Artificial Sequence
  Description of Artificial Sequence: Synthetic oligonucleotide
  Sense strand starting at position 671 of SEQ ID NO: 1884666
agugaaagugcuuagcaua

SEQ ID NO: 2282635 - RNA, 19 nt, Artificial Sequence
  Description of Artificial Sequence: Synthetic oligonucleotide
  Antisense strand to SEQ ID NO: 2282634
uaugcuaagcacuuucacu

SEQ ID NO: 2282636 - RNA, 19 nt, Artificial Sequence
  Description of Artificial Sequence: Synthetic oligonucleotide
  Sense strand starting at position 1121 of SEQ ID NO: 1884666
ccugguuugucccagguca

SEQ ID NO: 2282637 - RNA, 19 nt, Artificial Sequence
  Description of Artificial Sequence: Synthetic oligonucleotide
  Antisense strand to SEQ ID NO: 2282636
ugaccugggacaaaccagg

SEQ ID NO: 2282638 - RNA, 19 nt, Artificial Sequence
  Description of Artificial Sequence: Synthetic oligonucleotide
  Sense strand starting at position 1362 of SEQ ID NO: 1884666
gggcaucucuccgcagaag

SEQ ID NO: 2282639 - RNA, 19 nt, Artificial Sequence
  Description of Artificial Sequence: Synthetic oligonucleotide
  Antisense strand to SEQ ID NO: 2282638
cuucugcggagagaugccc

SEQ ID NO: 2282640 - RNA, 19 nt, Artificial Sequence
  Description of Artificial Sequence: Synthetic oligonucleotide
  Sense strand starting at position 2368 of SEQ ID NO: 1884666
ucucucggcuucuugagaa

SEQ ID NO: 2282641 - RNA, 19 nt, Artificial Sequence
  Description of Artificial Sequence: Synthetic oligonucleotide
  Antisense strand to SEQ ID NO: 2282640
uucucaagaagccgagaga

SEQ ID NO: 2282642 - RNA, 19 nt, Artificial Sequence
  Description of Artificial Sequence: Synthetic oligonucleotide
  Sense strand starting at position 2458 of SEQ ID NO: 1884666
cuggguguuuaggagaagu

SEQ ID NO: 2282643 - RNA, 19 nt, Artificial Sequence
  Description of Artificial Sequence: Synthetic oligonucleotide
  Antisense strand to SEQ ID NO: 2282642
acuucuccuaaacacccag

SEQ ID NO: 2282644 - RNA, 19 nt, Artificial Sequence
  Description of Artificial Sequence: Synthetic oligonucleotide
  Sense strand starting at position 2460 of SEQ ID NO: 1884666
ggguguuuaggagaaguga

SEQ ID NO: 2282645 - RNA, 19 nt, Artificial Sequence
  Description of Artificial Sequence: Synthetic oligonucleotide
  Antisense strand to SEQ ID NO: 2282644
ucacuucuccuaaacaccc

SEQ ID NO: 2282646 - RNA, 19 nt, Artificial Sequence
  Description of Artificial Sequence: Synthetic oligonucleotide
  Sense strand starting at position 2474 of SEQ ID NO: 1884666
agugaaagccugggucaca

SEQ ID NO: 2282647 - RNA, 19 nt, Artificial Sequence
  Description of Artificial Sequence: Synthetic oligonucleotide
  Antisense strand to SEQ ID NO: 2282646
ugugacccaggcuuucacu

SEQ ID NO: 2282648 - RNA, 19 nt, Artificial Sequence
  Description of Artificial Sequence: Synthetic oligonucleotide
  Sense strand starting at position 2715 of SEQ ID NO: 1884666
ccugcaucauuuggucaca

SEQ ID NO: 2282649 - RNA, 19 nt, Artificial Sequence
  Description of Artificial Sequence: Synthetic oligonucleotide
  Antisense strand to SEQ ID NO: 2282648
ugugaccaaaugaugcagg

SEQ ID NO: 2282650 - RNA, 19 nt, Artificial Sequence
  Description of Artificial Sequence: Synthetic oligonucleotide
  Sense strand starting at position 2717 of SEQ ID NO: 1884666
ugcaucauuuggucacacu

SEQ ID NO: 2282651 - RNA, 19 nt, Artificial Sequence
  Description of Artificial Sequence: Synthetic oligonucleotide
  Antisense strand to SEQ ID NO: 2282650
agugugaccaaaugaugca

SEQ ID NO: 2282652 - RNA, 19 nt, Artificial Sequence
  Description of Artificial Sequence: Synthetic oligonucleotide
  Sense strand starting at position 2792 of SEQ ID NO: 1884666
aaagauugguuccugguaa

SEQ ID NO: 2282653 - RNA, 19 nt, Artificial Sequence
  Description of Artificial Sequence: Synthetic oligonucleotide
  Antisense strand to SEQ ID NO: 2282652
uuaccaggaaccaaucuuu

SEQ ID NO: 2282654 - RNA, 19 nt, Artificial Sequence
  Description of Artificial Sequence: Synthetic oligonucleotide
  Sense strand starting at position 2793 of SEQ ID NO: 1884666
aagauugguuccugguaac

SEQ ID NO: 2282655 - RNA, 19 nt, Artificial Sequence
  Description of Artificial Sequence: Synthetic oligonucleotide
  Antisense strand to SEQ ID NO: 2282654
guuaccaggaaccaaucuu

SEQ ID NO: 2282656 - RNA, 19 nt, Artificial Sequence
  Description of Artificial Sequence: Synthetic oligonucleotide
  Sense strand starting at position 2841 of SEQ ID NO: 1884666
uccugaguggcagggaaau

SEQ ID NO: 2282657 - RNA, 19 nt, Artificial Sequence
  Description of Artificial Sequence: Synthetic oligonucleotide
  Antisense strand to SEQ ID NO: 2282656
auuucccugccacucagga

SEQ ID NO: 2282658 - RNA, 19 nt, Artificial Sequence
  Description of Artificial Sequence: Synthetic oligonucleotide
  Sense strand starting at position 2865 of SEQ ID NO: 1884666
gcgcaauucggauugcaca

SEQ ID NO: 2282659 - RNA, 19 nt, Artificial Sequence
  Description of Artificial Sequence: Synthetic oligonucleotide
  Antisense strand to SEQ ID NO: 2282658
ugugcaauccgaauugcgc

SEQ ID NO: 2282660 - RNA, 19 nt, Artificial Sequence
  Description of Artificial Sequence: Synthetic oligonucleotide
  Sense strand starting at position 2942 of SEQ ID NO: 1884666
ccacaagugagucgggauu

SEQ ID NO: 2282661 - RNA, 19 nt, Artificial Sequence
  Description of Artificial Sequence: Synthetic oligonucleotide
  Antisense strand to SEQ ID NO: 2282660
aaucccgacucacuugugg

SEQ ID NO: 2282662 - RNA, 19 nt, Artificial Sequence
  Description of Artificial Sequence: Synthetic oligonucleotide
  Sense strand starting at position 2944 of SEQ ID NO: 1884666
acaagugagucgggauuga

SEQ ID NO: 2282663 - RNA, 19 nt, Artificial Sequence
  Description of Artificial Sequence: Synthetic oligonucleotide
  Antisense strand to SEQ ID NO: 2282662
ucaaucccgacucacuugu

SEQ ID NO: 2282664 - RNA, 19 nt, Artificial Sequence
  Description of Artificial Sequence: Synthetic oligonucleotide
  Sense strand starting at position 2988 of SEQ ID NO: 1884666
cagagucagccucagaacu

SEQ ID NO: 2282665 - RNA, 19 nt, Artificial Sequence
  Description of Artificial Sequence: Synthetic oligonucleotide
  Antisense strand to SEQ ID NO: 2282664
aguucugaggcugacucug

SEQ ID NO: 2282666 - RNA, 19 nt, Artificial Sequence
  Description of Artificial Sequence: Synthetic oligonucleotide
  Sense strand starting at position 3214 of SEQ ID NO: 1884666
ggcugcuucucuuuauuga

SEQ ID NO: 2282667 - RNA, 19 nt, Artificial Sequence
  Description of Artificial Sequence: Synthetic oligonucleotide
  Antisense strand to SEQ ID NO: 2282666
ucaauaaagagaagcagcc

SEQ ID NO: 2282668 - RNA, 19 nt, Artificial Sequence
  Description of Artificial Sequence: Synthetic oligonucleotide
  Sense strand starting at position 3240 of SEQ ID NO: 1884666
gcauauaugucuccuuugu

SEQ ID NO: 2282669 - RNA, 19 nt, Artificial Sequence
  Description of Artificial Sequence: Synthetic oligonucleotide
  Antisense strand to SEQ ID NO: 2282668
acaaaggagacauauaugc

SEQ ID NO: 2282670 - RNA, 19 nt, Artificial Sequence
  Description of Artificial Sequence: Synthetic oligonucleotide
  Sense strand starting at position 3242 of SEQ ID NO: 1884666
auauaugucuccuuuguag

SEQ ID NO: 2282671 - RNA, 19 nt, Artificial Sequence
  Description of Artificial Sequence: Synthetic oligonucleotide
  Antisense strand to SEQ ID NO: 2282670
cuacaaaggagacauauau

SEQ ID NO: 2282672 - RNA, 19 nt, Artificial Sequence
  Description of Artificial Sequence: Synthetic oligonucleotide
  Sense strand starting at position 3279 of SEQ ID NO: 1884666
ccaucuaaguaguuuccua

SEQ ID NO: 2282673 - RNA, 19 nt, Artificial Sequence
  Description of Artificial Sequence: Synthetic oligonucleotide
  Antisense strand to SEQ ID NO: 2282672
uaggaaacuacuuagaugg

SEQ ID NO: 2282674 - RNA, 19 nt, Artificial Sequence
  Description of Artificial Sequence: Synthetic oligonucleotide
  Sense strand starting at position 3440 of SEQ ID NO: 1884666
cuucccagugcuuggcaaa

SEQ ID NO: 2282675 - RNA, 19 nt, Artificial Sequence
  Description of Artificial Sequence: Synthetic oligonucleotide
  Antisense strand to SEQ ID NO: 2282674
uuugccaagcacugggaag

SEQ ID NO: 2282676 - RNA, 19 nt, Artificial Sequence
  Description of Artificial Sequence: Synthetic oligonucleotide
  Sense strand starting at position 3441 of SEQ ID NO: 1884666
uucccagugcuuggcaaau

SEQ ID NO: 2282677 - RNA, 19 nt, Artificial Sequence
  Description of Artificial Sequence: Synthetic oligonucleotide
  Antisense strand to SEQ ID NO: 2282676
auuugccaagcacugggaa

SEQ ID NO: 2282678 - RNA, 19 nt, Artificial Sequence
  Description of Artificial Sequence: Synthetic oligonucleotide
  Sense strand starting at position 3468 of SEQ ID NO: 1884666
cucaauaaguauugccuga

SEQ ID NO: 2282679 - RNA, 19 nt, Artificial Sequence
  Description of Artificial Sequence: Synthetic oligonucleotide
  Antisense strand to SEQ ID NO: 2282678
ucaggcaauacuuauugag

SEQ ID NO: 2282680 - RNA, 19 nt, Artificial Sequence
  Description of Artificial Sequence: Synthetic oligonucleotide
  Sense strand starting at position 3472 of SEQ ID NO: 1884666
auaaguauugccugaauca

SEQ ID NO: 2282681 - RNA, 19 nt, Artificial Sequence
  Description of Artificial Sequence: Synthetic oligonucleotide
  Antisense strand to SEQ ID NO: 2282680
ugauucaggcaauacuuau

SEQ ID NO: 2282682 - RNA, 19 nt, Artificial Sequence
  Description of Artificial Sequence: Synthetic oligonucleotide
  Sense strand starting at position 3498 of SEQ ID NO: 1884666
gaaagagugucccaaggca

SEQ ID NO: 2282683 - RNA, 19 nt, Artificial Sequence
  Description of Artificial Sequence: Synthetic oligonucleotide
  Antisense strand to SEQ ID NO: 2282682
ugccuugggacacucuuuc

SEQ ID NO: 2282684 - RNA, 19 nt, Artificial Sequence
  Description of Artificial Sequence: Synthetic oligonucleotide
  Sense strand starting at position 3576 of SEQ ID NO: 1884666
agcuauagauaccagcaaa

SEQ ID NO: 2282685 - RNA, 19 nt, Artificial Sequence
  Description of Artificial Sequence: Synthetic oligonucleotide
  Antisense strand to SEQ ID NO: 2282684
uuugcugguaucuauagcu

SEQ ID NO: 2282686 - RNA, 19 nt, Artificial Sequence
  Description of Artificial Sequence: Synthetic oligonucleotide
  Sense strand starting at position 169 of SEQ ID NO: 1884667
gaggguuggugacaaacaa

SEQ ID NO: 2282687 - RNA, 19 nt, Artificial Sequence
  Description of Artificial Sequence: Synthetic oligonucleotide
  Antisense strand to SEQ ID NO: 2282686
uuguuugucaccaacccuc

SEQ ID NO: 2282688 - RNA, 19 nt, Artificial Sequence
  Description of Artificial Sequence: Synthetic oligonucleotide
  Sense strand starting at position 184 of SEQ ID NO: 1884667
acaagacauucuggauaag

SEQ ID NO: 2282689 - RNA, 19 nt, Artificial Sequence
  Description of Artificial Sequence: Synthetic oligonucleotide
  Antisense strand to SEQ ID NO: 2282688
cuuauccagaaugucuugu

SEQ ID NO: 2282690 - RNA, 19 nt, Artificial Sequence
  Description of Artificial Sequence: Synthetic oligonucleotide
  Sense strand starting at position 218 of SEQ ID NO: 1884667
uagaaagaccaggguguau

SEQ ID NO: 2282691 - RNA, 19 nt, Artificial Sequence
  Description of Artificial Sequence: Synthetic oligonucleotide
  Antisense strand to SEQ ID NO: 2282690
auacacccuggucuuucua

SEQ ID NO: 2282692 - RNA, 19 nt, Artificial Sequence
  Description of Artificial Sequence: Synthetic oligonucleotide
  Sense strand starting at position 233 of SEQ ID NO: 1884667
guaucaugacacgguguga

SEQ ID NO: 2282693 - RNA, 19 nt, Artificial Sequence
  Description of Artificial Sequence: Synthetic oligonucleotide
  Antisense strand to SEQ ID NO: 2282692
ucacaccgugucaugauac

SEQ ID NO: 2282694 - RNA, 19 nt, Artificial Sequence
  Description of Artificial Sequence: Synthetic oligonucleotide
  Sense strand starting at position 447 of SEQ ID NO: 1884667
cugcacaucgucugucaau

SEQ ID NO: 2282695 - RNA, 19 nt, Artificial Sequence
  Description of Artificial Sequence: Synthetic oligonucleotide
  Antisense strand to SEQ ID NO: 2282694
auugacagacgaugugcag

SEQ ID NO: 2282696 - RNA, 19 nt, Artificial Sequence
  Description of Artificial Sequence: Synthetic oligonucleotide
  Sense strand starting at position 448 of SEQ ID NO: 1884667
ugcacaucgucugucaaua

SEQ ID NO: 2282697 - RNA, 19 nt, Artificial Sequence
  Description of Artificial Sequence: Synthetic oligonucleotide
  Antisense strand to SEQ ID NO: 2282696
uauugacagacgaugugca

SEQ ID NO: 2282698 - RNA, 19 nt, Artificial Sequence
  Description of Artificial Sequence: Synthetic oligonucleotide
  Sense strand starting at position 717 of SEQ ID NO: 1884667
gcugcagagagcuauguuu

SEQ ID NO: 2282699 - RNA, 19 nt, Artificial Sequence
  Description of Artificial Sequence: Synthetic oligonucleotide
  Antisense strand to SEQ ID NO: 2282698
aaacauagcucucugcagc

SEQ ID NO: 2282700 - RNA, 19 nt, Artificial Sequence
  Description of Artificial Sequence: Synthetic oligonucleotide
  Sense strand starting at position 719 of SEQ ID NO: 1884667
ugcagagagcuauguuugu

SEQ ID NO: 2282701 - RNA, 19 nt, Artificial Sequence
  Description of Artificial Sequence: Synthetic oligonucleotide
  Antisense strand to SEQ ID NO: 2282700
acaaacauagcucucugca

SEQ ID NO: 2282702 - RNA, 19 nt, Artificial Sequence
  Description of Artificial Sequence: Synthetic oligonucleotide
  Sense strand starting at position 723 of SEQ ID NO: 1884667
gagagcuauguuuguacca

SEQ ID NO: 2282703 - RNA, 19 nt, Artificial Sequence
  Description of Artificial Sequence: Synthetic oligonucleotide
  Antisense strand to SEQ ID NO: 2282702
ugguacaaacauagcucuc

SEQ ID NO: 2282704 - RNA, 19 nt, Artificial Sequence
  Description of Artificial Sequence: Synthetic oligonucleotide
  Sense strand starting at position 831 of SEQ ID NO: 1884667
uguaaagacuaggaggaau

SEQ ID NO: 2282705 - RNA, 19 nt, Artificial Sequence
  Description of Artificial Sequence: Synthetic oligonucleotide
  Antisense strand to SEQ ID NO: 2282704
auuccuccuagucuuuaca

SEQ ID NO: 2282706 - RNA, 19 nt, Artificial Sequence
  Description of Artificial Sequence: Synthetic oligonucleotide
  Sense strand starting at position 849 of SEQ ID NO: 1884667
ugggacagcucuuucugaa

SEQ ID NO: 2282707 - RNA, 19 nt, Artificial Sequence
  Description of Artificial Sequence: Synthetic oligonucleotide
  Antisense strand to SEQ ID NO: 2282706
uucagaaagagcuguccca

SEQ ID NO: 2282708 - RNA, 19 nt, Artificial Sequence
  Description of Artificial Sequence: Synthetic oligonucleotide
  Sense strand starting at position 852 of SEQ ID NO: 1884667
gacagcucuuucugaagga

SEQ ID NO: 2282709 - RNA, 19 nt, Artificial Sequence
  Description of Artificial Sequence: Synthetic oligonucleotide
  Antisense strand to SEQ ID NO: 2282708
uccuucagaaagagcuguc

SEQ ID NO: 2282710 - RNA, 19 nt, Artificial Sequence
  Description of Artificial Sequence: Synthetic oligonucleotide
  Sense strand starting at position 856 of SEQ ID NO: 1884667
gcucuuucugaaggaauag

SEQ ID NO: 2282711 - RNA, 19 nt, Artificial Sequence
  Description of Artificial Sequence: Synthetic oligonucleotide
  Antisense strand to SEQ ID NO: 2282710
cuauuccuucagaaagagc

SEQ ID NO: 2282712 - RNA, 19 nt, Artificial Sequence
  Description of Artificial Sequence: Synthetic oligonucleotide
  Sense strand starting at position 993 of SEQ ID NO: 1884667
ggagaacugcuugaccgua

SEQ ID NO: 2282713 - RNA, 19 nt, Artificial Sequence
  Description of Artificial Sequence: Synthetic oligonucleotide
  Antisense strand to SEQ ID NO: 2282712
uacggucaagcaguucucc

SEQ ID NO: 2282714 - RNA, 19 nt, Artificial Sequence
  Description of Artificial Sequence: Synthetic oligonucleotide
  Sense strand starting at position 998 of SEQ ID NO: 1884667
acugcuugaccguagaagu

SEQ ID NO: 2282715 - RNA, 19 nt, Artificial Sequence
  Description of Artificial Sequence: Synthetic oligonucleotide
  Antisense strand to SEQ ID NO: 2282714
acuucuacggucaagcagu

SEQ ID NO: 2282716 - RNA, 19 nt, Artificial Sequence
  Description of Artificial Sequence: Synthetic oligonucleotide
  Sense strand starting at position 1138 of SEQ ID NO: 1884667
cuugcuugacugcauagaa

SEQ ID NO: 2282717 - RNA, 19 nt, Artificial Sequence
  Description of Artificial Sequence: Synthetic oligonucleotide
  Antisense strand to SEQ ID NO: 2282716
uucuaugcagucaagcaag

SEQ ID NO: 2282718 - RNA, 19 nt, Artificial Sequence
  Description of Artificial Sequence: Synthetic oligonucleotide
  Sense strand starting at position 1257 of SEQ ID NO: 1884667
uucugugccuuucgggauu

SEQ ID NO: 2282719 - RNA, 19 nt, Artificial Sequence
  Description of Artificial Sequence: Synthetic oligonucleotide
  Antisense strand to SEQ ID NO: 2282718
aaucccgaaaggcacagaa

SEQ ID NO: 2282720 - RNA, 19 nt, Artificial Sequence
  Description of Artificial Sequence: Synthetic oligonucleotide
  Sense strand starting at position 1283 of SEQ ID NO: 1884667
augugaauguacuauaugu

SEQ ID NO: 2282721 - RNA, 19 nt, Artificial Sequence
  Description of Artificial Sequence: Synthetic oligonucleotide
  Antisense strand to SEQ ID NO: 2282720
acauauaguacauucacau

SEQ ID NO: 2282722 - RNA, 19 nt, Artificial Sequence
  Description of Artificial Sequence: Synthetic oligonucleotide
  Sense strand starting at position 1285 of SEQ ID NO: 1884667
gugaauguacuauauguau

SEQ ID NO: 2282723 - RNA, 19 nt, Artificial Sequence
  Description of Artificial Sequence: Synthetic oligonucleotide
  Antisense strand to SEQ ID NO: 2282722
auacauauaguacauucac

SEQ ID NO: 2282724 - RNA, 19 nt, Artificial Sequence
  Description of Artificial Sequence: Synthetic oligonucleotide
  Sense strand starting at position 2363 of SEQ ID NO: 1884667
gucucuaggcuccaaauca

SEQ ID NO: 2282725 - RNA, 19 nt, Artificial Sequence
  Description of Artificial Sequence: Synthetic oligonucleotide
  Antisense strand to SEQ ID NO: 2282724
ugauuuggagccuagagac

SEQ ID NO: 2282726 - RNA, 19 nt, Artificial Sequence
  Description of Artificial Sequence: Synthetic oligonucleotide
  Sense strand starting at position 2389 of SEQ ID NO: 1884667
agccuuaagugcugagagu

SEQ ID NO: 2282727 - RNA, 19 nt, Artificial Sequence
  Description of Artificial Sequence: Synthetic oligonucleotide
  Antisense strand to SEQ ID NO: 2282726
acucucagcacuuaaggcu

SEQ ID NO: 2282728 - RNA, 19 nt, Artificial Sequence
  Description of Artificial Sequence: Synthetic oligonucleotide
  Sense strand starting at position 2390 of SEQ ID NO: 1884667
gccuuaagugcugagaguu

SEQ ID NO: 2282729 - RNA, 19 nt, Artificial Sequence
  Description of Artificial Sequence: Synthetic oligonucleotide
  Antisense strand to SEQ ID NO: 2282728
aacucucagcacuuaaggc

SEQ ID NO: 2282730 - RNA, 19 nt, Artificial Sequence
  Description of Artificial Sequence: Synthetic oligonucleotide
  Sense strand starting at position 2450 of SEQ ID NO: 1884667
cccacuucccgagaaagca

SEQ ID NO: 2282731 - RNA, 19 nt, Artificial Sequence
  Description of Artificial Sequence: Synthetic oligonucleotide
  Antisense strand to SEQ ID NO: 2282730
ugcuuucucgggaaguggg

SEQ ID NO: 2282732 - RNA, 19 nt, Artificial Sequence
  Description of Artificial Sequence: Synthetic oligonucleotide
  Sense strand starting at position 2482 of SEQ ID NO: 1884667
acaggugacacgugggaaa

SEQ ID NO: 2282733 - RNA, 19 nt, Artificial Sequence
  Description of Artificial Sequence: Synthetic oligonucleotide
  Antisense strand to SEQ ID NO: 2282732
uuucccacgugucaccugu

SEQ ID NO: 2282734 - RNA, 19 nt, Artificial Sequence
  Description of Artificial Sequence: Synthetic oligonucleotide
  Sense strand starting at position 2891 of SEQ ID NO: 1884667
cucagugacucagaguuua

SEQ ID NO: 2282735 - RNA, 19 nt, Artificial Sequence
  Description of Artificial Sequence: Synthetic oligonucleotide
  Antisense strand to SEQ ID NO: 2282734
uaaacucugagucacugag

SEQ ID NO: 2282736 - RNA, 19 nt, Artificial Sequence
  Description of Artificial Sequence: Synthetic oligonucleotide
  Sense strand starting at position 2899 of SEQ ID NO: 1884667
cucagaguuuaugagaggu

SEQ ID NO: 2282737 - RNA, 19 nt, Artificial Sequence
  Description of Artificial Sequence: Synthetic oligonucleotide
  Antisense strand to SEQ ID NO: 2282736
accucucauaaacucugag

SEQ ID NO: 2282738 - RNA, 19 nt, Artificial Sequence
  Description of Artificial Sequence: Synthetic oligonucleotide
  Sense strand starting at position 2901 of SEQ ID NO: 1884667
cagaguuuaugagagguua

SEQ ID NO: 2282739 - RNA, 19 nt, Artificial Sequence
  Description of Artificial Sequence: Synthetic oligonucleotide
  Antisense strand to SEQ ID NO: 2282738
uaaccucucauaaacucug

SEQ ID NO: 2282740 - RNA, 19 nt, Artificial Sequence
  Description of Artificial Sequence: Synthetic oligonucleotide
  Sense strand starting at position 2984 of SEQ ID NO: 1884667
caaguaaggguuugagcaa

SEQ ID NO: 2282741 - RNA, 19 nt, Artificial Sequence
  Description of Artificial Sequence: Synthetic oligonucleotide
  Antisense strand to SEQ ID NO: 2282740
uugcucaaacccuuacuug

SEQ ID NO: 2282742 - RNA, 19 nt, Artificial Sequence
  Description of Artificial Sequence: Synthetic oligonucleotide
  Sense strand starting at position 3335 of SEQ ID NO: 1884667
acucuuaucucugguaaga

SEQ ID NO: 2282743 - RNA, 19 nt, Artificial Sequence
  Description of Artificial Sequence: Synthetic oligonucleotide
  Antisense strand to SEQ ID NO: 2282742
ucuuaccagagauaagagu

SEQ ID NO: 2282744 - RNA, 19 nt, Artificial Sequence
  Description of Artificial Sequence: Synthetic oligonucleotide
  Sense strand starting at position 3337 of SEQ ID NO: 1884667
ucuuaucucugguaagaaa

SEQ ID NO: 2282745 - RNA, 19 nt, Artificial Sequence
  Description of Artificial Sequence: Synthetic oligonucleotide
  Antisense strand to SEQ ID NO: 2282744
uuucuuaccagagauaaga

SEQ ID NO: 2282746 - RNA, 19 nt, Artificial Sequence
  Description of Artificial Sequence: Synthetic oligonucleotide
  Sense strand starting at position 3375 of SEQ ID NO: 1884667
ccuggagcggcuuauguaa

SEQ ID NO: 2282747 - RNA, 19 nt, Artificial Sequence
  Description of Artificial Sequence: Synthetic oligonucleotide
  Antisense strand to SEQ ID NO: 2282746
uuacauaagccgcuccagg

SEQ ID NO: 2282748 - RNA, 19 nt, Artificial Sequence
  Description of Artificial Sequence: Synthetic oligonucleotide
  Sense strand starting at position 3472 of SEQ ID NO: 1884667
gccgggugugugcuaagua

SEQ ID NO: 2282749 - RNA, 19 nt, Artificial Sequence
  Description of Artificial Sequence: Synthetic oligonucleotide
  Antisense strand to SEQ ID NO: 2282748
uacuuagcacacacccggc

SEQ ID NO: 2282750 - RNA, 19 nt, Artificial Sequence
  Description of Artificial Sequence: Synthetic oligonucleotide
  Sense strand starting at position 3475 of SEQ ID NO: 1884667
gggugugugcuaaguagag

SEQ ID NO: 2282751 - RNA, 19 nt, Artificial Sequence
  Description of Artificial Sequence: Synthetic oligonucleotide
  Antisense strand to SEQ ID NO: 2282750
cucuacuuagcacacaccc

SEQ ID NO: 2282752 - RNA, 19 nt, Artificial Sequence
  Description of Artificial Sequence: Synthetic oligonucleotide
  Sense strand starting at position 3481 of SEQ ID NO: 1884667
gugcuaaguagagguuuga

SEQ ID NO: 2282753 - RNA, 19 nt, Artificial Sequence
  Description of Artificial Sequence: Synthetic oligonucleotide
  Antisense strand to SEQ ID NO: 2282752
ucaaaccucuacuuagcac

SEQ ID NO: 2282754 - RNA, 19 nt, Artificial Sequence
  Description of Artificial Sequence: Synthetic oligonucleotide
  Sense strand starting at position 3526 of SEQ ID NO: 1884667
ggccgaagugugcaagaaa

SEQ ID NO: 2282755 - RNA, 19 nt, Artificial Sequence
  Description of Artificial Sequence: Synthetic oligonucleotide
  Antisense strand to SEQ ID NO: 2282754
uuucuugcacacuucggcc

SEQ ID NO: 2282756 - RNA, 19 nt, Artificial Sequence
  Description of Artificial Sequence: Synthetic oligonucleotide
  Sense strand starting at position 3527 of SEQ ID NO: 1884667
gccgaagugugcaagaaag

SEQ ID NO: 2282757 - RNA, 19 nt, Artificial Sequence
  Description of Artificial Sequence: Synthetic oligonucleotide
  Antisense strand to SEQ ID NO: 2282756
cuuucuugcacacuucggc

SEQ ID NO: 2282758 - RNA, 19 nt, Artificial Sequence
  Description of Artificial Sequence: Synthetic oligonucleotide
  Sense strand starting at position 3529 of SEQ ID NO: 1884667
cgaagugugcaagaaaggu

SEQ ID NO: 2282759 - RNA, 19 nt, Artificial Sequence
  Description of Artificial Sequence: Synthetic oligonucleotide
  Antisense strand to SEQ ID NO: 2282758
accuuucuugcacacuucg

SEQ ID NO: 2282760 - RNA, 19 nt, Artificial Sequence
  Description of Artificial Sequence: Synthetic oligonucleotide
  Sense strand starting at position 3670 of SEQ ID NO: 1884667
gguggucuugcccagauac

SEQ ID NO: 2282761 - RNA, 19 nt, Artificial Sequence
  Description of Artificial Sequence: Synthetic oligonucleotide
  Antisense strand to SEQ ID NO: 2282760
guaucugggcaagaccacc

SEQ ID NO: 2282762 - RNA, 19 nt, Artificial Sequence
  Description of Artificial Sequence: Synthetic oligonucleotide
  Sense strand starting at position 82 of SEQ ID NO: 1884668
cugcauucucucuagagca

SEQ ID NO: 2282763 - RNA, 19 nt, Artificial Sequence
  Description of Artificial Sequence: Synthetic oligonucleotide
  Antisense strand to SEQ ID NO: 2282762
ugcucuagagagaaugcag

SEQ ID NO: 2282764 - RNA, 19 nt, Artificial Sequence
  Description of Artificial Sequence: Synthetic oligonucleotide
  Sense strand starting at position 84 of SEQ ID NO: 1884668
gcauucucucuagagcaca

SEQ ID NO: 2282765 - RNA, 19 nt, Artificial Sequence
  Description of Artificial Sequence: Synthetic oligonucleotide
  Antisense strand to SEQ ID NO: 2282764
ugugcucuagagagaaugc

SEQ ID NO: 2282766 - RNA, 19 nt, Artificial Sequence
  Description of Artificial Sequence: Synthetic oligonucleotide
  Sense strand starting at position 476 of SEQ ID NO: 1884668
uggaaugucacgcaucaug

SEQ ID NO: 2282767 - RNA, 19 nt, Artificial Sequence
  Description of Artificial Sequence: Synthetic oligonucleotide
  Antisense strand to SEQ ID NO: 2282766
caugaugcgugacauucca

SEQ ID NO: 2282768 - RNA, 19 nt, Artificial Sequence
  Description of Artificial Sequence: Synthetic oligonucleotide
  Sense strand starting at position 479 of SEQ ID NO: 1884668
aaugucacgcaucauguua

SEQ ID NO: 2282769 - RNA, 19 nt, Artificial Sequence
  Description of Artificial Sequence: Synthetic oligonucleotide
  Antisense strand to SEQ ID NO: 2282768
uaacaugaugcgugacauu

SEQ ID NO: 2282770 - RNA, 19 nt, Artificial Sequence
  Description of Artificial Sequence: Synthetic oligonucleotide
  Sense strand starting at position 580 of SEQ ID NO: 1884668
gccaguacccaagaagcau

SEQ ID NO: 2282771 - RNA, 19 nt, Artificial Sequence
  Description of Artificial Sequence: Synthetic oligonucleotide
  Antisense strand to SEQ ID NO: 2282770
augcuucuuggguacuggc

SEQ ID NO: 2282772 - RNA, 19 nt, Artificial Sequence
  Description of Artificial Sequence: Synthetic oligonucleotide
  Sense strand starting at position 605 of SEQ ID NO: 1884668
aguuguugcagugaauaca

SEQ ID NO: 2282773 - RNA, 19 nt, Artificial Sequence
  Description of Artificial Sequence: Synthetic oligonucleotide
  Antisense strand to SEQ ID NO: 2282772
uguauucacugcaacaacu

SEQ ID NO: 2282774 - RNA, 19 nt, Artificial Sequence
  Description of Artificial Sequence: Synthetic oligonucleotide
  Sense strand starting at position 608 of SEQ ID NO: 1884668
uguugcagugaauacagau

SEQ ID NO: 2282775 - RNA, 19 nt, Artificial Sequence
  Description of Artificial Sequence: Synthetic oligonucleotide
  Antisense strand to SEQ ID NO: 2282774
aucuguauucacugcaaca

SEQ ID NO: 2282776 - RNA, 19 nt, Artificial Sequence
  Description of Artificial Sequence: Synthetic oligonucleotide
  Sense strand starting at position 712 of SEQ ID NO: 1884668
gugccugcuccacaguaga

SEQ ID NO: 2282777 - RNA, 19 nt, Artificial Sequence
  Description of Artificial Sequence: Synthetic oligonucleotide
  Antisense strand to SEQ ID NO: 2282776
ucuacuguggagcaggcac

SEQ ID NO: 2282778 - RNA, 19 nt, Artificial Sequence
  Description of Artificial Sequence: Synthetic oligonucleotide
  Sense strand starting at position 1112 of SEQ ID NO: 1884668
ucaaacguucgauaaccga

SEQ ID NO: 2282779 - RNA, 19 nt, Artificial Sequence
  Description of Artificial Sequence: Synthetic oligonucleotide
  Antisense strand to SEQ ID NO: 2282778
ucgguuaucgaacguuuga

SEQ ID NO: 2282780 - RNA, 19 nt, Artificial Sequence
  Description of Artificial Sequence: Synthetic oligonucleotide
  Sense strand starting at position 1181 of SEQ ID NO: 1884668
cgccuuugcucauuccaga

SEQ ID NO: 2282781 - RNA, 19 nt, Artificial Sequence
  Description of Artificial Sequence: Synthetic oligonucleotide
  Antisense strand to SEQ ID NO: 2282780
ucuggaaugagcaaaggcg

SEQ ID NO: 2282782 - RNA, 19 nt, Artificial Sequence
  Description of Artificial Sequence: Synthetic oligonucleotide
  Sense strand starting at position 1229 of SEQ ID NO: 1884668
agaugugggcauugcugaa

SEQ ID NO: 2282783 - RNA, 19 nt, Artificial Sequence
  Description of Artificial Sequence: Synthetic oligonucleotide
  Antisense strand to SEQ ID NO: 2282782
uucagcaaugcccacaucu

SEQ ID NO: 2282784 - RNA, 19 nt, Artificial Sequence
  Description of Artificial Sequence: Synthetic oligonucleotide
  Sense strand starting at position 1411 of SEQ ID NO: 1884668
ccaggagucucaccgggau

SEQ ID NO: 2282785 - RNA, 19 nt, Artificial Sequence
  Description of Artificial Sequence: Synthetic oligonucleotide
  Antisense strand to SEQ ID NO: 2282784
aucccggugagacuccugg

SEQ ID NO: 2282786 - RNA, 19 nt, Artificial Sequence
  Description of Artificial Sequence: Synthetic oligonucleotide
  Sense strand starting at position 1423 of SEQ ID NO: 1884668
ccgggauggcggugaugaa

SEQ ID NO: 2282787 - RNA, 19 nt, Artificial Sequence
  Description of Artificial Sequence: Synthetic oligonucleotide
  Antisense strand to SEQ ID NO: 2282786
uucaucaccgccaucccgg

SEQ ID NO: 2282788 - RNA, 19 nt, Artificial Sequence
  Description of Artificial Sequence: Synthetic oligonucleotide
  Sense strand starting at position 1640 of SEQ ID NO: 1884668
ugggaauuguaguucgauc

SEQ ID NO: 2282789 - RNA, 19 nt, Artificial Sequence
  Description of Artificial Sequence: Synthetic oligonucleotide
  Antisense strand to SEQ ID NO: 2282788
gaucgaacuacaauuccca

SEQ ID NO: 2282790 - RNA, 19 nt, Artificial Sequence
  Description of Artificial Sequence: Synthetic oligonucleotide
  Sense strand starting at position 1921 of SEQ ID NO: 1884668
ggcggauuucggcgugucu

SEQ ID NO: 2282791 - RNA, 19 nt, Artificial Sequence
  Description of Artificial Sequence: Synthetic oligonucleotide
  Antisense strand to SEQ ID NO: 2282790
agacacgccgaaauccgcc

SEQ ID NO: 2282792 - RNA, 19 nt, Artificial Sequence
  Description of Artificial Sequence: Synthetic oligonucleotide
  Sense strand starting at position 2247 of SEQ ID NO: 1884668
ucgucagcuccgaggugau

SEQ ID NO: 2282793 - RNA, 19 nt, Artificial Sequence
  Description of Artificial Sequence: Synthetic oligonucleotide
  Antisense strand to SEQ ID NO: 2282792
aucaccucggagcugacga

SEQ ID NO: 2282794 - RNA, 19 nt, Artificial Sequence
  Description of Artificial Sequence: Synthetic oligonucleotide
  Sense strand starting at position 2538 of SEQ ID NO: 1884668
ucucauaaucuacgaauag

SEQ ID NO: 2282795 - RNA, 19 nt, Artificial Sequence
  Description of Artificial Sequence: Synthetic oligonucleotide
  Antisense strand to SEQ ID NO: 2282794
cuauucguagauuaugaga

SEQ ID NO: 2282796 - RNA, 19 nt, Artificial Sequence
  Description of Artificial Sequence: Synthetic oligonucleotide
  Sense strand starting at position 2555 of SEQ ID NO: 1884668
agguguggguucucugcaa

SEQ ID NO: 2282797 - RNA, 19 nt, Artificial Sequence
  Description of Artificial Sequence: Synthetic oligonucleotide
  Antisense strand to SEQ ID NO: 2282796
uugcagagaacccacaccu

SEQ ID NO: 2282798 - RNA, 19 nt, Artificial Sequence
  Description of Artificial Sequence: Synthetic oligonucleotide
  Sense strand starting at position 3093 of SEQ ID NO: 1884668
agcgccguugagugauaaa

SEQ ID NO: 2282799 - RNA, 19 nt, Artificial Sequence
  Description of Artificial Sequence: Synthetic oligonucleotide
  Antisense strand to SEQ ID NO: 2282798
uuuaucacucaacggcgcu

SEQ ID NO: 2282800 - RNA, 19 nt, Artificial Sequence
  Description of Artificial Sequence: Synthetic oligonucleotide
  Sense strand starting at position 3102 of SEQ ID NO: 1884668
gagugauaaaugggugguu

SEQ ID NO: 2282801 - RNA, 19 nt, Artificial Sequence
  Description of Artificial Sequence: Synthetic oligonucleotide
  Antisense strand to SEQ ID NO: 2282800
aaccacccauuuaucacuc

SEQ ID NO: 2282802 - RNA, 19 nt, Artificial Sequence
  Description of Artificial Sequence: Synthetic oligonucleotide
  Sense strand starting at position 3105 of SEQ ID NO: 1884668
ugauaaaugggugguugca

SEQ ID NO: 2282803 - RNA, 19 nt, Artificial Sequence
  Description of Artificial Sequence: Synthetic oligonucleotide
  Antisense strand to SEQ ID NO: 2282802
ugcaaccacccauuuauca

SEQ ID NO: 2282804 - RNA, 19 nt, Artificial Sequence
  Description of Artificial Sequence: Synthetic oligonucleotide
  Sense strand starting at position 3210 of SEQ ID NO: 1884668
cucugaauaugucaagggu

SEQ ID NO: 2282805 - RNA, 19 nt, Artificial Sequence
  Description of Artificial Sequence: Synthetic oligonucleotide
  Antisense strand to SEQ ID NO: 2282804
acccuugacauauucagag

SEQ ID NO: 2282806 - RNA, 19 nt, Artificial Sequence
  Description of Artificial Sequence: Synthetic oligonucleotide
  Sense strand starting at position 3213 of SEQ ID NO: 1884668
ugaauaugucaaggguguu

SEQ ID NO: 2282807 - RNA, 19 nt, Artificial Sequence
  Description of Artificial Sequence: Synthetic oligonucleotide
  Antisense strand to SEQ ID NO: 2282806
aacacccuugacauauuca

SEQ ID NO: 2282808 - RNA, 19 nt, Artificial Sequence
  Description of Artificial Sequence: Synthetic oligonucleotide
  Sense strand starting at position 3214 of SEQ ID NO: 1884668
gaauaugucaaggguguua

SEQ ID NO: 2282809 - RNA, 19 nt, Artificial Sequence
  Description of Artificial Sequence: Synthetic oligonucleotide
  Antisense strand to SEQ ID NO: 2282808
uaacacccuugacauauuc

SEQ ID NO: 2282810 - RNA, 19 nt, Artificial Sequence
  Description of Artificial Sequence: Synthetic oligonucleotide
  Sense strand starting at position 3227 of SEQ ID NO: 1884668
guguuaacagguugcuaac

SEQ ID NO: 2282811 - RNA, 19 nt, Artificial Sequence
  Description of Artificial Sequence: Synthetic oligonucleotide
  Antisense strand to SEQ ID NO: 2282810
guuagcaaccuguuaacac

SEQ ID NO: 2282812 - RNA, 19 nt, Artificial Sequence
  Description of Artificial Sequence: Synthetic oligonucleotide
  Sense strand starting at position 3534 of SEQ ID NO: 1884668
cacugaauuuguugagaca

SEQ ID NO: 2282813 - RNA, 19 nt, Artificial Sequence
  Description of Artificial Sequence: Synthetic oligonucleotide
  Antisense strand to SEQ ID NO: 2282812
ugucucaacaaauucagug

SEQ ID NO: 2282814 - RNA, 19 nt, Artificial Sequence
  Description of Artificial Sequence: Synthetic oligonucleotide
  Sense strand starting at position 3610 of SEQ ID NO: 1884668
acaagagagugcugacaca

SEQ ID NO: 2282815 - RNA, 19 nt, Artificial Sequence
  Description of Artificial Sequence: Synthetic oligonucleotide
  Antisense strand to SEQ ID NO: 2282814
ugugucagcacucucuugu

SEQ ID NO: 2282816 - RNA, 19 nt, Artificial Sequence
  Description of Artificial Sequence: Synthetic oligonucleotide
  Sense strand starting at position 3621 of SEQ ID NO: 1884668
cugacacauucugggacau

SEQ ID NO: 2282817 - RNA, 19 nt, Artificial Sequence
  Description of Artificial Sequence: Synthetic oligonucleotide
  Antisense strand to SEQ ID NO: 2282816
augucccagaaugugucag

SEQ ID NO: 2282818 - RNA, 19 nt, Artificial Sequence
  Description of Artificial Sequence: Synthetic oligonucleotide
  Sense strand starting at position 3623 of SEQ ID NO: 1884668
gacacauucugggacauac

SEQ ID NO: 2282819 - RNA, 19 nt, Artificial Sequence
  Description of Artificial Sequence: Synthetic oligonucleotide
  Antisense strand to SEQ ID NO: 2282818
guaugucccagaauguguc

SEQ ID NO: 2282820 - RNA, 19 nt, Artificial Sequence
  Description of Artificial Sequence: Synthetic oligonucleotide
  Sense strand starting at position 3714 of SEQ ID NO: 1884668
aagucugagggcugauuaa

SEQ ID NO: 2282821 - RNA, 19 nt, Artificial Sequence
  Description of Artificial Sequence: Synthetic oligonucleotide
  Antisense strand to SEQ ID NO: 2282820
uuaaucagcccucagacuu

SEQ ID NO: 2282822 - RNA, 19 nt, Artificial Sequence
  Description of Artificial Sequence: Synthetic oligonucleotide
  Sense strand starting at position 3778 of SEQ ID NO: 1884668
auuccaucguccuuguaau

SEQ ID NO: 2282823 - RNA, 19 nt, Artificial Sequence
  Description of Artificial Sequence: Synthetic oligonucleotide
  Antisense strand to SEQ ID NO: 2282822
auuacaaggacgauggaau

SEQ ID NO: 2282824 - RNA, 19 nt, Artificial Sequence
  Description of Artificial Sequence: Synthetic oligonucleotide
  Sense strand starting at position 3779 of SEQ ID NO: 1884668
uuccaucguccuuguaaua

SEQ ID NO: 2282825 - RNA, 19 nt, Artificial Sequence
  Description of Artificial Sequence: Synthetic oligonucleotide
  Antisense strand to SEQ ID NO: 2282824
uauuacaaggacgauggaa

SEQ ID NO: 2282826 - RNA, 19 nt, Artificial Sequence
  Description of Artificial Sequence: Synthetic oligonucleotide
  Sense strand starting at position 3784 of SEQ ID NO: 1884668
ucguccuuguaauaaauau

SEQ ID NO: 2282827 - RNA, 19 nt, Artificial Sequence
  Description of Artificial Sequence: Synthetic oligonucleotide
  Antisense strand to SEQ ID NO: 2282826
auauuuauuacaaggacga

SEQ ID NO: 2282828 - RNA, 19 nt, Artificial Sequence
  Description of Artificial Sequence: Synthetic oligonucleotide
  Sense strand starting at position 3806 of SEQ ID NO: 1884668
guuacuauccugcaaugaa

SEQ ID NO: 2282829 - RNA, 19 nt, Artificial Sequence
  Description of Artificial Sequence: Synthetic oligonucleotide
  Antisense strand to SEQ ID NO: 2282828
uucauugcaggauaguaac

SEQ ID NO: 2282830 - RNA, 19 nt, Artificial Sequence
  Description of Artificial Sequence: Synthetic oligonucleotide
  Sense strand starting at position 3869 of SEQ ID NO: 1884668
ucgagauaauauccugauu

SEQ ID NO: 2282831 - RNA, 19 nt, Artificial Sequence
  Description of Artificial Sequence: Synthetic oligonucleotide
  Antisense strand to SEQ ID NO: 2282830
aaucaggauauuaucucga

SEQ ID NO: 2282832 - RNA, 19 nt, Artificial Sequence
  Description of Artificial Sequence: Synthetic oligonucleotide
  Sense strand starting at position 3893 of SEQ ID NO: 1884668
gcagaugaaucauaaggga

SEQ ID NO: 2282833 - RNA, 19 nt, Artificial Sequence
  Description of Artificial Sequence: Synthetic oligonucleotide
  Antisense strand to SEQ ID NO: 2282832
ucccuuaugauucaucugc

SEQ ID NO: 2282834 - RNA, 19 nt, Artificial Sequence
  Description of Artificial Sequence: Synthetic oligonucleotide
  Sense strand starting at position 3896 of SEQ ID NO: 1884668
gaugaaucauaagggaaau

SEQ ID NO: 2282835 - RNA, 19 nt, Artificial Sequence
  Description of Artificial Sequence: Synthetic oligonucleotide
  Antisense strand to SEQ ID NO: 2282834
auuucccuuaugauucauc

SEQ ID NO: 2282836 - RNA, 19 nt, Artificial Sequence
  Description of Artificial Sequence: Synthetic oligonucleotide
  Sense strand starting at position 3919 of SEQ ID NO: 1884668
uaguaauaacauggugugu

SEQ ID NO: 2282837 - RNA, 19 nt, Artificial Sequence
  Description of Artificial Sequence: Synthetic oligonucleotide
  Antisense strand to SEQ ID NO: 2282836
acacaccauguuauuacua

SEQ ID NO: 2282838 - RNA, 19 nt, Artificial Sequence
  Description of Artificial Sequence: Synthetic oligonucleotide
  Sense strand starting at position 3934 of SEQ ID NO: 1884668
gugugugaauguguuaaua

SEQ ID NO: 2282839 - RNA, 19 nt, Artificial Sequence
  Description of Artificial Sequence: Synthetic oligonucleotide
  Antisense strand to SEQ ID NO: 2282838
uauuaacacauucacacac

SEQ ID NO: 2282840 - RNA, 19 nt, Artificial Sequence
  Description of Artificial Sequence: Synthetic oligonucleotide
  Sense strand starting at position 3958 of SEQ ID NO: 1884668
gguacaugaagcugucaaa

SEQ ID NO: 2282841 - RNA, 19 nt, Artificial Sequence
  Description of Artificial Sequence: Synthetic oligonucleotide
  Antisense strand to SEQ ID NO: 2282840
uuugacagcuucauguacc

SEQ ID NO: 2282842 - RNA, 19 nt, Artificial Sequence
  Description of Artificial Sequence: Synthetic oligonucleotide
  Sense strand starting at position 128 of SEQ ID NO: 1884669
ugaacaggucaguguccua

SEQ ID NO: 2282843 - RNA, 19 nt, Artificial Sequence
  Description of Artificial Sequence: Synthetic oligonucleotide
  Antisense strand to SEQ ID NO: 2282842
uaggacacugaccuguuca

SEQ ID NO: 2282844 - RNA, 19 nt, Artificial Sequence
  Description of Artificial Sequence: Synthetic oligonucleotide
  Sense strand starting at position 158 of SEQ ID NO: 1884669
ucaggagcuaggugacauu

SEQ ID NO: 2282845 - RNA, 19 nt, Artificial Sequence
  Description of Artificial Sequence: Synthetic oligonucleotide
  Antisense strand to SEQ ID NO: 2282844
aaugucaccuagcuccuga

SEQ ID NO: 2282846 - RNA, 19 nt, Artificial Sequence
  Description of Artificial Sequence: Synthetic oligonucleotide
  Sense strand starting at position 161 of SEQ ID NO: 1884669
ggagcuaggugacauucaa

SEQ ID NO: 2282847 - RNA, 19 nt, Artificial Sequence
  Description of Artificial Sequence: Synthetic oligonucleotide
  Antisense strand to SEQ ID NO: 2282846
uugaaugucaccuagcucc

SEQ ID NO: 2282848 - RNA, 19 nt, Artificial Sequence
  Description of Artificial Sequence: Synthetic oligonucleotide
  Sense strand starting at position 208 of SEQ ID NO: 1884669
auuugaaccuauggcaaau

SEQ ID NO: 2282849 - RNA, 19 nt, Artificial Sequence
  Description of Artificial Sequence: Synthetic oligonucleotide
  Antisense strand to SEQ ID NO: 2282848
auuugccauagguucaaau

SEQ ID NO: 2282850 - RNA, 19 nt, Artificial Sequence
  Description of Artificial Sequence: Synthetic oligonucleotide
  Sense strand starting at position 234 of SEQ ID NO: 1884669
cuuguaugguuauacagag

SEQ ID NO: 2282851 - RNA, 19 nt, Artificial Sequence
  Description of Artificial Sequence: Synthetic oligonucleotide
  Antisense strand to SEQ ID NO: 2282850
cucuguauaaccauacaag

SEQ ID NO: 2282852 - RNA, 19 nt, Artificial Sequence
  Description of Artificial Sequence: Synthetic oligonucleotide
  Sense strand starting at position 378 of SEQ ID NO: 1884669
acaggauucucacagagaa

SEQ ID NO: 2282853 - RNA, 19 nt, Artificial Sequence
  Description of Artificial Sequence: Synthetic oligonucleotide
  Antisense strand to SEQ ID NO: 2282852
uucucugugagaauccugu

SEQ ID NO: 2282854 - RNA, 19 nt, Artificial Sequence
  Description of Artificial Sequence: Synthetic oligonucleotide
  Sense strand starting at position 467 of SEQ ID NO: 1884669
acugucucauccucagagu

SEQ ID NO: 2282855 - RNA, 19 nt, Artificial Sequence
  Description of Artificial Sequence: Synthetic oligonucleotide
  Antisense strand to SEQ ID NO: 2282854
acucugaggaugagacagu

SEQ ID NO: 2282856 - RNA, 19 nt, Artificial Sequence
  Description of Artificial Sequence: Synthetic oligonucleotide
  Sense strand starting at position 470 of SEQ ID NO: 1884669
gucucauccucagagucaa

SEQ ID NO: 2282857 - RNA, 19 nt, Artificial Sequence
  Description of Artificial Sequence: Synthetic oligonucleotide
  Antisense strand to SEQ ID NO: 2282856
uugacucugaggaugagac

SEQ ID NO: 2282858 - RNA, 19 nt, Artificial Sequence
  Description of Artificial Sequence: Synthetic oligonucleotide
  Sense strand starting at position 536 of SEQ ID NO: 1884669
gugcuauuggccuauccuu

SEQ ID NO: 2282859 - RNA, 19 nt, Artificial Sequence
  Description of Artificial Sequence: Synthetic oligonucleotide
  Antisense strand to SEQ ID NO: 2282858
aaggauaggccaauagcac

SEQ ID NO: 2282860 - RNA, 19 nt, Artificial Sequence
  Description of Artificial Sequence: Synthetic oligonucleotide
  Sense strand starting at position 543 of SEQ ID NO: 1884669
uggccuauccuuuggcuau

SEQ ID NO: 2282861 - RNA, 19 nt, Artificial Sequence
  Description of Artificial Sequence: Synthetic oligonucleotide
  Antisense strand to SEQ ID NO: 2282860
auagccaaaggauaggcca

SEQ ID NO: 2282862 - RNA, 19 nt, Artificial Sequence
  Description of Artificial Sequence: Synthetic oligonucleotide
  Sense strand starting at position 547 of SEQ ID NO: 1884669
cuauccuuuggcuauagga

SEQ ID NO: 2282863 - RNA, 19 nt, Artificial Sequence
  Description of Artificial Sequence: Synthetic oligonucleotide
  Antisense strand to SEQ ID NO: 2282862
uccuauagccaaaggauag

SEQ ID NO: 2282864 - RNA, 19 nt, Artificial Sequence
  Description of Artificial Sequence: Synthetic oligonucleotide
  Sense strand starting at position 630 of SEQ ID NO: 1884669
agggcuugcugugaaagga

SEQ ID NO: 2282865 - RNA, 19 nt, Artificial Sequence
  Description of Artificial Sequence: Synthetic oligonucleotide
  Antisense strand to SEQ ID NO: 2282864
uccuuucacagcaagcccu

SEQ ID NO: 2282866 - RNA, 19 nt, Artificial Sequence
  Description of Artificial Sequence: Synthetic oligonucleotide
  Sense strand starting at position 820 of SEQ ID NO: 1884669
ugagacagucuaugaguua

SEQ ID NO: 2282867 - RNA, 19 nt, Artificial Sequence
  Description of Artificial Sequence: Synthetic oligonucleotide
  Antisense strand to SEQ ID NO: 2282866
uaacucauagacugucuca

SEQ ID NO: 2282868 - RNA, 19 nt, Artificial Sequence
  Description of Artificial Sequence: Synthetic oligonucleotide
  Sense strand starting at position 821 of SEQ ID NO: 1884669
gagacagucuaugaguuaa

SEQ ID NO: 2282869 - RNA, 19 nt, Artificial Sequence
  Description of Artificial Sequence: Synthetic oligonucleotide
  Antisense strand to SEQ ID NO: 2282868
uuaacucauagacugucuc

SEQ ID NO: 2282870 - RNA, 19 nt, Artificial Sequence
  Description of Artificial Sequence: Synthetic oligonucleotide
  Sense strand starting at position 861 of SEQ ID NO: 1884669
augcaagucacugaguguu

SEQ ID NO: 2282871 - RNA, 19 nt, Artificial Sequence
  Description of Artificial Sequence: Synthetic oligonucleotide
  Antisense strand to SEQ ID NO: 2282870
aacacucagugacuugcau

SEQ ID NO: 2282872 - RNA, 19 nt, Artificial Sequence
  Description of Artificial Sequence: Synthetic oligonucleotide
  Sense strand starting at position 867 of SEQ ID NO: 1884669
gucacugaguguuuccuau

SEQ ID NO: 2282873 - RNA, 19 nt, Artificial Sequence
  Description of Artificial Sequence: Synthetic oligonucleotide
  Antisense strand to SEQ ID NO: 2282872
auaggaaacacucagugac

SEQ ID NO: 2282874 - RNA, 19 nt, Artificial Sequence
  Description of Artificial Sequence: Synthetic oligonucleotide
  Sense strand starting at position 873 of SEQ ID NO: 1884669
gaguguuuccuauguauua

SEQ ID NO: 2282875 - RNA, 19 nt, Artificial Sequence
  Description of Artificial Sequence: Synthetic oligonucleotide
  Antisense strand to SEQ ID NO: 2282874
uaauacauaggaaacacuc

SEQ ID NO: 2282876 - RNA, 19 nt, Artificial Sequence
  Description of Artificial Sequence: Synthetic oligonucleotide
  Sense strand starting at position 874 of SEQ ID NO: 1884669
aguguuuccuauguauuac

SEQ ID NO: 2282877 - RNA, 19 nt, Artificial Sequence
  Description of Artificial Sequence: Synthetic oligonucleotide
  Antisense strand to SEQ ID NO: 2282876
guaauacauaggaaacacu

SEQ ID NO: 2282878 - RNA, 19 nt, Artificial Sequence
  Description of Artificial Sequence: Synthetic oligonucleotide
  Sense strand starting at position 880 of SEQ ID NO: 1884669
uccuauguauuacuuggua

SEQ ID NO: 2282879 - RNA, 19 nt, Artificial Sequence
  Description of Artificial Sequence: Synthetic oligonucleotide
  Antisense strand to SEQ ID NO: 2282878
uaccaaguaauacauagga

SEQ ID NO: 2282880 - RNA, 19 nt, Artificial Sequence
  Description of Artificial Sequence: Synthetic oligonucleotide
  Sense strand starting at position 884 of SEQ ID NO: 1884669
auguauuacuugguacaaa

SEQ ID NO: 2282881 - RNA, 19 nt, Artificial Sequence
  Description of Artificial Sequence: Synthetic oligonucleotide
  Antisense strand to SEQ ID NO: 2282880
uuuguaccaaguaauacau

SEQ ID NO: 2282882 - RNA, 19 nt, Artificial Sequence
  Description of Artificial Sequence: Synthetic oligonucleotide
  Sense strand starting at position 961 of SEQ ID NO: 1884669
ggccuuaagauaugggaag

SEQ ID NO: 2282883 - RNA, 19 nt, Artificial Sequence
  Description of Artificial Sequence: Synthetic oligonucleotide
  Antisense strand to SEQ ID NO: 2282882
cuucccauaucuuaaggcc

SEQ ID NO: 2282884 - RNA, 19 nt, Artificial Sequence
  Description of Artificial Sequence: Synthetic oligonucleotide
  Sense strand starting at position 1228 of SEQ ID NO: 1884669
aaguuuauagugcagagaa

SEQ ID NO: 2282885 - RNA, 19 nt, Artificial Sequence
  Description of Artificial Sequence: Synthetic oligonucleotide
  Antisense strand to SEQ ID NO: 2282884
uucucugcacuauaaacuu

SEQ ID NO: 2282886 - RNA, 19 nt, Artificial Sequence
  Description of Artificial Sequence: Synthetic oligonucleotide
  Sense strand starting at position 1230 of SEQ ID NO: 1884669
guuuauagugcagagaagu

SEQ ID NO: 2282887 - RNA, 19 nt, Artificial Sequence
  Description of Artificial Sequence: Synthetic oligonucleotide
  Antisense strand to SEQ ID NO: 2282886
acuucucugcacuauaaac

SEQ ID NO: 2282888 - RNA, 19 nt, Artificial Sequence
  Description of Artificial Sequence: Synthetic oligonucleotide
  Sense strand starting at position 1367 of SEQ ID NO: 1884669
accacugguuuaguaaaua

SEQ ID NO: 2282889 - RNA, 19 nt, Artificial Sequence
  Description of Artificial Sequence: Synthetic oligonucleotide
  Antisense strand to SEQ ID NO: 2282888
uauuuacuaaaccaguggu

SEQ ID NO: 2282890 - RNA, 19 nt, Artificial Sequence
  Description of Artificial Sequence: Synthetic oligonucleotide
  Sense strand starting at position 1492 of SEQ ID NO: 1884669
gcugaagacuaacaaaucu

SEQ ID NO: 2282891 - RNA, 19 nt, Artificial Sequence
  Description of Artificial Sequence: Synthetic oligonucleotide
  Antisense strand to SEQ ID NO: 2282890
agauuuguuagucuucagc

SEQ ID NO: 2282892 - RNA, 19 nt, Artificial Sequence
  Description of Artificial Sequence: Synthetic oligonucleotide
  Sense strand starting at position 1600 of SEQ ID NO: 1884669
cuagcuguuuccuugggaa

SEQ ID NO: 2282893 - RNA, 19 nt, Artificial Sequence
  Description of Artificial Sequence: Synthetic oligonucleotide
  Antisense strand to SEQ ID NO: 2282892
uucccaaggaaacagcuag

SEQ ID NO: 2282894 - RNA, 19 nt, Artificial Sequence
  Description of Artificial Sequence: Synthetic oligonucleotide
  Sense strand starting at position 2063 of SEQ ID NO: 1884669
gcgggucggcuuucuucaa

SEQ ID NO: 2282895 - RNA, 19 nt, Artificial Sequence
  Description of Artificial Sequence: Synthetic oligonucleotide
  Antisense strand to SEQ ID NO: 2282894
uugaagaaagccgacccgc

SEQ ID NO: 2282896 - RNA, 19 nt, Artificial Sequence
  Description of Artificial Sequence: Synthetic oligonucleotide
  Sense strand starting at position 2064 of SEQ ID NO: 1884669
cgggucggcuuucuucaaa

SEQ ID NO: 2282897 - RNA, 19 nt, Artificial Sequence
  Description of Artificial Sequence: Synthetic oligonucleotide
  Antisense strand to SEQ ID NO: 2282896
uuugaagaaagccgacccg

SEQ ID NO: 2282898 - RNA, 19 nt, Artificial Sequence
  Description of Artificial Sequence: Synthetic oligonucleotide
  Sense strand starting at position 2972 of SEQ ID NO: 1884669
ccugucuaacccuaaaguu

SEQ ID NO: 2282899 - RNA, 19 nt, Artificial Sequence
  Description of Artificial Sequence: Synthetic oligonucleotide
  Antisense strand to SEQ ID NO: 2282898
aacuuuaggguuagacagg

SEQ ID NO: 2282900 - RNA, 19 nt, Artificial Sequence
  Description of Artificial Sequence: Synthetic oligonucleotide
  Sense strand starting at position 3039 of SEQ ID NO: 1884669
ggacuaggccugugauccu

SEQ ID NO: 2282901 - RNA, 19 nt, Artificial Sequence
  Description of Artificial Sequence: Synthetic oligonucleotide
  Antisense strand to SEQ ID NO: 2282900
aggaucacaggccuagucc

SEQ ID NO: 2282902 - RNA, 19 nt, Artificial Sequence
  Description of Artificial Sequence: Synthetic oligonucleotide
  Sense strand starting at position 3301 of SEQ ID NO: 1884669
gcgcuagaccucugcuaga

SEQ ID NO: 2282903 - RNA, 19 nt, Artificial Sequence
  Description of Artificial Sequence: Synthetic oligonucleotide
  Antisense strand to SEQ ID NO: 2282902
ucuagcagaggucuagcgc

SEQ ID NO: 2282904 - RNA, 19 nt, Artificial Sequence
  Description of Artificial Sequence: Synthetic oligonucleotide
  Sense strand starting at position 3399 of SEQ ID NO: 1884669
gcaacuauuuauuguguac

SEQ ID NO: 2282905 - RNA, 19 nt, Artificial Sequence
  Description of Artificial Sequence: Synthetic oligonucleotide
  Antisense strand to SEQ ID NO: 2282904
guacacaauaaauaguugc

SEQ ID NO: 2282906 - RNA, 19 nt, Artificial Sequence
  Description of Artificial Sequence: Synthetic oligonucleotide
  Sense strand starting at position 3410 of SEQ ID NO: 1884669
uuguguacucacuacaaua

SEQ ID NO: 2282907 - RNA, 19 nt, Artificial Sequence
  Description of Artificial Sequence: Synthetic oligonucleotide
  Antisense strand to SEQ ID NO: 2282906
uauuguagugaguacacaa

SEQ ID NO: 2282908 - RNA, 19 nt, Artificial Sequence
  Description of Artificial Sequence: Synthetic oligonucleotide
  Sense strand starting at position 3412 of SEQ ID NO: 1884669
guguacucacuacaauacu

SEQ ID NO: 2282909 - RNA, 19 nt, Artificial Sequence
  Description of Artificial Sequence: Synthetic oligonucleotide
  Antisense strand to SEQ ID NO: 2282908
aguauuguagugaguacac

SEQ ID NO: 2282910 - RNA, 19 nt, Artificial Sequence
  Description of Artificial Sequence: Synthetic oligonucleotide
  Sense strand starting at position 3567 of SEQ ID NO: 1884669
auguuuggcagcuaggaau

SEQ ID NO: 2282911 - RNA, 19 nt, Artificial Sequence
  Description of Artificial Sequence: Synthetic oligonucleotide
  Antisense strand to SEQ ID NO: 2282910
auuccuagcugccaaacau

SEQ ID NO: 2282912 - RNA, 19 nt, Artificial Sequence
  Description of Artificial Sequence: Synthetic oligonucleotide
  Sense strand starting at position 3574 of SEQ ID NO: 1884669
gcagcuaggaaucagacau

SEQ ID NO: 2282913 - RNA, 19 nt, Artificial Sequence
  Description of Artificial Sequence: Synthetic oligonucleotide
  Antisense strand to SEQ ID NO: 2282912
augucugauuccuagcugc

SEQ ID NO: 2282914 - RNA, 19 nt, Artificial Sequence
  Description of Artificial Sequence: Synthetic oligonucleotide
  Sense strand starting at position 3601 of SEQ ID NO: 1884669
gacugauagggcuguaaug

SEQ ID NO: 2282915 - RNA, 19 nt, Artificial Sequence
  Description of Artificial Sequence: Synthetic oligonucleotide
  Antisense strand to SEQ ID NO: 2282914
cauuacagcccuaucaguc

SEQ ID NO: 2282916 - RNA, 19 nt, Artificial Sequence
  Description of Artificial Sequence: Synthetic oligonucleotide
  Sense strand starting at position 3914 of SEQ ID NO: 1884669
aggaacuccuuguuccuaa

SEQ ID NO: 2282917 - RNA, 19 nt, Artificial Sequence
  Description of Artificial Sequence: Synthetic oligonucleotide
  Antisense strand to SEQ ID NO: 2282916
uuaggaacaaggaguuccu

SEQ ID NO: 2282918 - RNA, 19 nt, Artificial Sequence
  Description of Artificial Sequence: Synthetic oligonucleotide
  Sense strand starting at position 3915 of SEQ ID NO: 1884669
ggaacuccuuguuccuaaa

SEQ ID NO: 2282919 - RNA, 19 nt, Artificial Sequence
  Description of Artificial Sequence: Synthetic oligonucleotide
  Antisense strand to SEQ ID NO: 2282918
uuuaggaacaaggaguucc

SEQ ID NO: 2282920 - RNA, 19 nt, Artificial Sequence
  Description of Artificial Sequence: Synthetic oligonucleotide
  Sense strand starting at position 3945 of SEQ ID NO: 1884669
gggcuacuuucagagagga

SEQ ID NO: 2282921 - RNA, 19 nt, Artificial Sequence
  Description of Artificial Sequence: Synthetic oligonucleotide
  Antisense strand to SEQ ID NO: 2282920
uccucucugaaaguagccc

SEQ ID NO: 2282922 - RNA, 19 nt, Artificial Sequence
  Description of Artificial Sequence: Synthetic oligonucleotide
  Sense strand starting at position 5 of SEQ ID NO: 1884670
ugcguucuccaguuucuca

SEQ ID NO: 2282923 - RNA, 19 nt, Artificial Sequence
  Description of Artificial Sequence: Synthetic oligonucleotide
  Antisense strand to SEQ ID NO: 2282922
ugagaaacuggagaacgca

SEQ ID NO: 2282924 - RNA, 19 nt, Artificial Sequence
  Description of Artificial Sequence: Synthetic oligonucleotide
  Sense strand starting at position 93 of SEQ ID NO: 1884670
uggcauaagcuguaaggaa

SEQ ID NO: 2282925 - RNA, 19 nt, Artificial Sequence
  Description of Artificial Sequence: Synthetic oligonucleotide
  Antisense strand to SEQ ID NO: 2282924
uuccuuacagcuuaugcca

SEQ ID NO: 2282926 - RNA, 19 nt, Artificial Sequence
  Description of Artificial Sequence: Synthetic oligonucleotide
  Sense strand starting at position 236 of SEQ ID NO: 1884670
acgguugcuaauggacaaa

SEQ ID NO: 2282927 - RNA, 19 nt, Artificial Sequence
  Description of Artificial Sequence: Synthetic oligonucleotide
  Antisense strand to SEQ ID NO: 2282926
uuuguccauuagcaaccgu

SEQ ID NO: 2282928 - RNA, 19 nt, Artificial Sequence
  Description of Artificial Sequence: Synthetic oligonucleotide
  Sense strand starting at position 378 of SEQ ID NO: 1884670
auguuuccuccucauugga

SEQ ID NO: 2282929 - RNA, 19 nt, Artificial Sequence
  Description of Artificial Sequence: Synthetic oligonucleotide
  Antisense strand to SEQ ID NO: 2282928
uccaaugaggaggaaacau

SEQ ID NO: 2282930 - RNA, 19 nt, Artificial Sequence
  Description of Artificial Sequence: Synthetic oligonucleotide
  Sense strand starting at position 396 of SEQ ID NO: 1884670
agcagaauccuggaaagcu

SEQ ID NO: 2282931 - RNA, 19 nt, Artificial Sequence
  Description of Artificial Sequence: Synthetic oligonucleotide
  Antisense strand to SEQ ID NO: 2282930
agcuuuccaggauucugcu

SEQ ID NO: 2282932 - RNA, 19 nt, Artificial Sequence
  Description of Artificial Sequence: Synthetic oligonucleotide
  Sense strand starting at position 452 of SEQ ID NO: 1884670
gugggcaucuaucugagaa

SEQ ID NO: 2282933 - RNA, 19 nt, Artificial Sequence
  Description of Artificial Sequence: Synthetic oligonucleotide
  Antisense strand to SEQ ID NO: 2282932
uucucagauagaugcccac

SEQ ID NO: 2282934 - RNA, 19 nt, Artificial Sequence
  Description of Artificial Sequence: Synthetic oligonucleotide
  Sense strand starting at position 453 of SEQ ID NO: 1884670
ugggcaucuaucugagaaa

SEQ ID NO: 2282935 - RNA, 19 nt, Artificial Sequence
  Description of Artificial Sequence: Synthetic oligonucleotide
  Antisense strand to SEQ ID NO: 2282934
uuucucagauagaugccca

SEQ ID NO: 2282936 - RNA, 19 nt, Artificial Sequence
  Description of Artificial Sequence: Synthetic oligonucleotide
  Sense strand starting at position 480 of SEQ ID NO: 1884670
auauaucagugggcaucua

SEQ ID NO: 2282937 - RNA, 19 nt, Artificial Sequence
  Description of Artificial Sequence: Synthetic oligonucleotide
  Antisense strand to SEQ ID NO: 2282936
uagaugcccacugauauau

SEQ ID NO: 2282938 - RNA, 19 nt, Artificial Sequence
  Description of Artificial Sequence: Synthetic oligonucleotide
  Sense strand starting at position 488 of SEQ ID NO: 1884670
gugggcaucuaucuagaaa

SEQ ID NO: 2282939 - RNA, 19 nt, Artificial Sequence
  Description of Artificial Sequence: Synthetic oligonucleotide
  Antisense strand to SEQ ID NO: 2282938
uuucuagauagaugcccac

SEQ ID NO: 2282940 - RNA, 19 nt, Artificial Sequence
  Description of Artificial Sequence: Synthetic oligonucleotide
  Sense strand starting at position 577 of SEQ ID NO: 1884670
auggcuaaguuaucuauua

SEQ ID NO: 2282941 - RNA, 19 nt, Artificial Sequence
  Description of Artificial Sequence: Synthetic oligonucleotide
  Antisense strand to SEQ ID NO: 2282940
uaauagauaacuuagccau

SEQ ID NO: 2282942 - RNA, 19 nt, Artificial Sequence
  Description of Artificial Sequence: Synthetic oligonucleotide
  Sense strand starting at position 578 of SEQ ID NO: 1884670
uggcuaaguuaucuauuag

SEQ ID NO: 2282943 - RNA, 19 nt, Artificial Sequence
  Description of Artificial Sequence: Synthetic oligonucleotide
  Antisense strand to SEQ ID NO: 2282942
cuaauagauaacuuagcca

SEQ ID NO: 2282944 - RNA, 19 nt, Artificial Sequence
  Description of Artificial Sequence: Synthetic oligonucleotide
  Sense strand starting at position 592 of SEQ ID NO: 1884670
auuagauaauaggcccaua

SEQ ID NO: 2282945 - RNA, 19 nt, Artificial Sequence
  Description of Artificial Sequence: Synthetic oligonucleotide
  Antisense strand to SEQ ID NO: 2282944
uaugggccuauuaucuaau

SEQ ID NO: 2282946 - RNA, 19 nt, Artificial Sequence
  Description of Artificial Sequence: Synthetic oligonucleotide
  Sense strand starting at position 642 of SEQ ID NO: 1884670
ggcagacugucaucaggaa

SEQ ID NO: 2282947 - RNA, 19 nt, Artificial Sequence
  Description of Artificial Sequence: Synthetic oligonucleotide
  Antisense strand to SEQ ID NO: 2282946
uuccugaugacagucugcc

SEQ ID NO: 2282948 - RNA, 19 nt, Artificial Sequence
  Description of Artificial Sequence: Synthetic oligonucleotide
  Sense strand starting at position 643 of SEQ ID NO: 1884670
gcagacugucaucaggaau

SEQ ID NO: 2282949 - RNA, 19 nt, Artificial Sequence
  Description of Artificial Sequence: Synthetic oligonucleotide
  Antisense strand to SEQ ID NO: 2282948
auuccugaugacagucugc

SEQ ID NO: 2282950 - RNA, 19 nt, Artificial Sequence
  Description of Artificial Sequence: Synthetic oligonucleotide
  Sense strand starting at position 808 of SEQ ID NO: 1884670
aguaacgugaucgauauau

SEQ ID NO: 2282951 - RNA, 19 nt, Artificial Sequence
  Description of Artificial Sequence: Synthetic oligonucleotide
  Antisense strand to SEQ ID NO: 2282950
auauaucgaucacguuacu

SEQ ID NO: 2282952 - RNA, 19 nt, Artificial Sequence
  Description of Artificial Sequence: Synthetic oligonucleotide
  Sense strand starting at position 810 of SEQ ID NO: 1884670
uaacgugaucgauauaugg

SEQ ID NO: 2282953 - RNA, 19 nt, Artificial Sequence
  Description of Artificial Sequence: Synthetic oligonucleotide
  Antisense strand to SEQ ID NO: 2282952
ccauauaucgaucacguua

SEQ ID NO: 2282954 - RNA, 19 nt, Artificial Sequence
  Description of Artificial Sequence: Synthetic oligonucleotide
  Sense strand starting at position 812 of SEQ ID NO: 1884670
acgugaucgauauauggau

SEQ ID NO: 2282955 - RNA, 19 nt, Artificial Sequence
  Description of Artificial Sequence: Synthetic oligonucleotide
  Antisense strand to SEQ ID NO: 2282954
auccauauaucgaucacgu

SEQ ID NO: 2282956 - RNA, 19 nt, Artificial Sequence
  Description of Artificial Sequence: Synthetic oligonucleotide
  Sense strand starting at position 814 of SEQ ID NO: 1884670
gugaucgauauauggauga

SEQ ID NO: 2282957 - RNA, 19 nt, Artificial Sequence
  Description of Artificial Sequence: Synthetic oligonucleotide
  Antisense strand to SEQ ID NO: 2282956
ucauccauauaucgaucac

SEQ ID NO: 2282958 - RNA, 19 nt, Artificial Sequence
  Description of Artificial Sequence: Synthetic oligonucleotide
  Sense strand starting at position 818 of SEQ ID NO: 1884670
ucgauauauggaugagggu

SEQ ID NO: 2282959 - RNA, 19 nt, Artificial Sequence
  Description of Artificial Sequence: Synthetic oligonucleotide
  Antisense strand to SEQ ID NO: 2282958
acccucauccauauaucga

SEQ ID NO: 2282960 - RNA, 19 nt, Artificial Sequence
  Description of Artificial Sequence: Synthetic oligonucleotide
  Sense strand starting at position 987 of SEQ ID NO: 1884670
uuuggauaauuaccuguau

SEQ ID NO: 2282961 - RNA, 19 nt, Artificial Sequence
  Description of Artificial Sequence: Synthetic oligonucleotide
  Antisense strand to SEQ ID NO: 2282960
auacagguaauuauccaaa

SEQ ID NO: 2282962 - RNA, 19 nt, Artificial Sequence
  Description of Artificial Sequence: Synthetic oligonucleotide
  Sense strand starting at position 988 of SEQ ID NO: 1884670
uuggauaauuaccuguauu

SEQ ID NO: 2282963 - RNA, 19 nt, Artificial Sequence
  Description of Artificial Sequence: Synthetic oligonucleotide
  Antisense strand to SEQ ID NO: 2282962
aauacagguaauuauccaa

SEQ ID NO: 2282964 - RNA, 19 nt, Artificial Sequence
  Description of Artificial Sequence: Synthetic oligonucleotide
  Sense strand starting at position 1120 of SEQ ID NO: 1884670
ucucacuucucaguaguaa

SEQ ID NO: 2282965 - RNA, 19 nt, Artificial Sequence
  Description of Artificial Sequence: Synthetic oligonucleotide
  Antisense strand to SEQ ID NO: 2282964
uuacuacugagaagugaga

SEQ ID NO: 2282966 - RNA, 19 nt, Artificial Sequence
  Description of Artificial Sequence: Synthetic oligonucleotide
  Sense strand starting at position 1121 of SEQ ID NO: 1884670
cucacuucucaguaguaag

SEQ ID NO: 2282967 - RNA, 19 nt, Artificial Sequence
  Description of Artificial Sequence: Synthetic oligonucleotide
  Antisense strand to SEQ ID NO: 2282966
cuuacuacugagaagugag

SEQ ID NO: 2282968 - RNA, 19 nt, Artificial Sequence
  Description of Artificial Sequence: Synthetic oligonucleotide
  Sense strand starting at position 1184 of SEQ ID NO: 1884670
ucaucauggagugguuauc

SEQ ID NO: 2282969 - RNA, 19 nt, Artificial Sequence
  Description of Artificial Sequence: Synthetic oligonucleotide
  Antisense strand to SEQ ID NO: 2282968
gauaaccacuccaugauga

SEQ ID NO: 2282970 - RNA, 19 nt, Artificial Sequence
  Description of Artificial Sequence: Synthetic oligonucleotide
  Sense strand starting at position 1190 of SEQ ID NO: 1884670
uggagugguuaucuacaag

SEQ ID NO: 2282971 - RNA, 19 nt, Artificial Sequence
  Description of Artificial Sequence: Synthetic oligonucleotide
  Antisense strand to SEQ ID NO: 2282970
cuuguagauaaccacucca

SEQ ID NO: 2282972 - RNA, 19 nt, Artificial Sequence
  Description of Artificial Sequence: Synthetic oligonucleotide
  Sense strand starting at position 1205 of SEQ ID NO: 1884670
caaggucuccucuguaaga

SEQ ID NO: 2282973 - RNA, 19 nt, Artificial Sequence
  Description of Artificial Sequence: Synthetic oligonucleotide
  Antisense strand to SEQ ID NO: 2282972
ucuuacagaggagaccuug

SEQ ID NO: 2282974 - RNA, 19 nt, Artificial Sequence
  Description of Artificial Sequence: Synthetic oligonucleotide
  Sense strand starting at position 1247 of SEQ ID NO: 1884670
ggaacauuacuguaacgcu

SEQ ID NO: 2282975 - RNA, 19 nt, Artificial Sequence
  Description of Artificial Sequence: Synthetic oligonucleotide
  Antisense strand to SEQ ID NO: 2282974
agcguuacaguaauguucc

SEQ ID NO: 2282976 - RNA, 19 nt, Artificial Sequence
  Description of Artificial Sequence: Synthetic oligonucleotide
  Sense strand starting at position 1263 of SEQ ID NO: 1884670
gcuggcuuugcauaaagau

SEQ ID NO: 2282977 - RNA, 19 nt, Artificial Sequence
  Description of Artificial Sequence: Synthetic oligonucleotide
  Antisense strand to SEQ ID NO: 2282976
aucuuuaugcaaagccagc

SEQ ID NO: 2282978 - RNA, 19 nt, Artificial Sequence
  Description of Artificial Sequence: Synthetic oligonucleotide
  Sense strand starting at position 1367 of SEQ ID NO: 1884670
ucaauagggcccugacauu

SEQ ID NO: 2282979 - RNA, 19 nt, Artificial Sequence
  Description of Artificial Sequence: Synthetic oligonucleotide
  Antisense strand to SEQ ID NO: 2282978
aaugucagggcccuauuga

SEQ ID NO: 2282980 - RNA, 19 nt, Artificial Sequence
  Description of Artificial Sequence: Synthetic oligonucleotide
  Sense strand starting at position 1376 of SEQ ID NO: 1884670
cccugacauuuguugcgua

SEQ ID NO: 2282981 - RNA, 19 nt, Artificial Sequence
  Description of Artificial Sequence: Synthetic oligonucleotide
  Antisense strand to SEQ ID NO: 2282980
uacgcaacaaaugucaggg

SEQ ID NO: 2282982 - RNA, 19 nt, Artificial Sequence
  Description of Artificial Sequence: Synthetic oligonucleotide
  Sense strand starting at position 1380 of SEQ ID NO: 1884670
gacauuuguugcguacagu

SEQ ID NO: 2282983 - RNA, 19 nt, Artificial Sequence
  Description of Artificial Sequence: Synthetic oligonucleotide
  Antisense strand to SEQ ID NO: 2282982
acuguacgcaacaaauguc

SEQ ID NO: 2282984 - RNA, 19 nt, Artificial Sequence
  Description of Artificial Sequence: Synthetic oligonucleotide
  Sense strand starting at position 1381 of SEQ ID NO: 1884670
acauuuguugcguacagua

SEQ ID NO: 2282985 - RNA, 19 nt, Artificial Sequence
  Description of Artificial Sequence: Synthetic oligonucleotide
  Antisense strand to SEQ ID NO: 2282984
uacuguacgcaacaaaugu

SEQ ID NO: 2282986 - RNA, 19 nt, Artificial Sequence
  Description of Artificial Sequence: Synthetic oligonucleotide
  Sense strand starting at position 1511 of SEQ ID NO: 1884670
uuaagaaauggccguaaga

SEQ ID NO: 2282987 - RNA, 19 nt, Artificial Sequence
  Description of Artificial Sequence: Synthetic oligonucleotide
  Antisense strand to SEQ ID NO: 2282986
ucuuacggccauuucuuaa

SEQ ID NO: 2282988 - RNA, 19 nt, Artificial Sequence
  Description of Artificial Sequence: Synthetic oligonucleotide
  Sense strand starting at position 1570 of SEQ ID NO: 1884670
gcguaaauccugcagacag

SEQ ID NO: 2282989 - RNA, 19 nt, Artificial Sequence
  Description of Artificial Sequence: Synthetic oligonucleotide
  Antisense strand to SEQ ID NO: 2282988
cugucugcaggauuuacgc

SEQ ID NO: 2282990 - RNA, 19 nt, Artificial Sequence
  Description of Artificial Sequence: Synthetic oligonucleotide
  Sense strand starting at position 1671 of SEQ ID NO: 1884670
ggcccaucuccucagaguu

SEQ ID NO: 2282991 - RNA, 19 nt, Artificial Sequence
  Description of Artificial Sequence: Synthetic oligonucleotide
  Antisense strand to SEQ ID NO: 2282990
aacucugaggagaugggcc

SEQ ID NO: 2282992 - RNA, 19 nt, Artificial Sequence
  Description of Artificial Sequence: Synthetic oligonucleotide
  Sense strand starting at position 1707 of SEQ ID NO: 1884670
ucaguacaggucugugaaa

SEQ ID NO: 2282993 - RNA, 19 nt, Artificial Sequence
  Description of Artificial Sequence: Synthetic oligonucleotide
  Antisense strand to SEQ ID NO: 2282992
uuucacagaccuguacuga

SEQ ID NO: 2282994 - RNA, 19 nt, Artificial Sequence
  Description of Artificial Sequence: Synthetic oligonucleotide
  Sense strand starting at position 2551 of SEQ ID NO: 1884670
aaaguaugucaggacguaa

SEQ ID NO: 2282995 - RNA, 19 nt, Artificial Sequence
  Description of Artificial Sequence: Synthetic oligonucleotide
  Antisense strand to SEQ ID NO: 2282994
uuacguccugacauacuuu

SEQ ID NO: 2282996 - RNA, 19 nt, Artificial Sequence
  Description of Artificial Sequence: Synthetic oligonucleotide
  Sense strand starting at position 2639 of SEQ ID NO: 1884670
ucuuuagaucuuggacuac

SEQ ID NO: 2282997 - RNA, 19 nt, Artificial Sequence
  Description of Artificial Sequence: Synthetic oligonucleotide
  Antisense strand to SEQ ID NO: 2282996
guaguccaagaucuaaaga

SEQ ID NO: 2282998 - RNA, 19 nt, Artificial Sequence
  Description of Artificial Sequence: Synthetic oligonucleotide
  Sense strand starting at position 2816 of SEQ ID NO: 1884670
cugccugaucaauaugguu

SEQ ID NO: 2282999 - RNA, 19 nt, Artificial Sequence
  Description of Artificial Sequence: Synthetic oligonucleotide
  Antisense strand to SEQ ID NO: 2282998
aaccauauugaucaggcag

SEQ ID NO: 2283000 - RNA, 19 nt, Artificial Sequence
  Description of Artificial Sequence: Synthetic oligonucleotide
  Sense strand starting at position 3790 of SEQ ID NO: 1884670
ugagauugacccugucuca

SEQ ID NO: 2283001 - RNA, 19 nt, Artificial Sequence
  Description of Artificial Sequence: Synthetic oligonucleotide
  Antisense strand to SEQ ID NO: 2283000
ugagacagggucaaucuca

SEQ ID NO: 2283002 - RNA, 19 nt, Artificial Sequence
  Description of Artificial Sequence: Synthetic oligonucleotide
  Sense strand starting at position 206 of SEQ ID NO: 1884671
auaaauuguuauucgagga

SEQ ID NO: 2283003 - RNA, 19 nt, Artificial Sequence
  Description of Artificial Sequence: Synthetic oligonucleotide
  Antisense strand to SEQ ID NO: 2283002
uccucgaauaacaauuuau

SEQ ID NO: 2283004 - RNA, 19 nt, Artificial Sequence
  Description of Artificial Sequence: Synthetic oligonucleotide
  Sense strand starting at position 211 of SEQ ID NO: 1884671
uuguuauucgaggaauucc

SEQ ID NO: 2283005 - RNA, 19 nt, Artificial Sequence
  Description of Artificial Sequence: Synthetic oligonucleotide
  Antisense strand to SEQ ID NO: 2283004
ggaauuccucgaauaacaa

SEQ ID NO: 2283006 - RNA, 19 nt, Artificial Sequence
  Description of Artificial Sequence: Synthetic oligonucleotide
  Sense strand starting at position 305 of SEQ ID NO: 1884671
caaguuugcccugaagaag

SEQ ID NO: 2283007 - RNA, 19 nt, Artificial Sequence
  Description of Artificial Sequence: Synthetic oligonucleotide
  Antisense strand to SEQ ID NO: 2283006
cuucuucagggcaaacuug

SEQ ID NO: 2283008 - RNA, 19 nt, Artificial Sequence
  Description of Artificial Sequence: Synthetic oligonucleotide
  Sense strand starting at position 357 of SEQ ID NO: 1884671
ggcaacaauccuggauuau

SEQ ID NO: 2283009 - RNA, 19 nt, Artificial Sequence
  Description of Artificial Sequence: Synthetic oligonucleotide
  Antisense strand to SEQ ID NO: 2283008
auaauccaggauuguugcc

SEQ ID NO: 2283010 - RNA, 19 nt, Artificial Sequence
  Description of Artificial Sequence: Synthetic oligonucleotide
  Sense strand starting at position 358 of SEQ ID NO: 1884671
gcaacaauccuggauuauu

SEQ ID NO: 2283011 - RNA, 19 nt, Artificial Sequence
  Description of Artificial Sequence: Synthetic oligonucleotide
  Antisense strand to SEQ ID NO: 2283010
aauaauccaggauuguugc

SEQ ID NO: 2283012 - RNA, 19 nt, Artificial Sequence
  Description of Artificial Sequence: Synthetic oligonucleotide
  Sense strand starting at position 410 of SEQ ID NO: 1884671
aaacauuaggagugcuaug

SEQ ID NO: 2283013 - RNA, 19 nt, Artificial Sequence
  Description of Artificial Sequence: Synthetic oligonucleotide
  Antisense strand to SEQ ID NO: 2283012
cauagcacuccuaauguuu

SEQ ID NO: 2283014 - RNA, 19 nt, Artificial Sequence
  Description of Artificial Sequence: Synthetic oligonucleotide
  Sense strand starting at position 491 of SEQ ID NO: 1884671
auaagcccucuuugaaaug

SEQ ID NO: 2283015 - RNA, 19 nt, Artificial Sequence
  Description of Artificial Sequence: Synthetic oligonucleotide
  Antisense strand to SEQ ID NO: 2283014
cauuucaaagagggcuuau

SEQ ID NO: 2283016 - RNA, 19 nt, Artificial Sequence
  Description of Artificial Sequence: Synthetic oligonucleotide
  Sense strand starting at position 643 of SEQ ID NO: 1884671
augaaugagucccuagaac

SEQ ID NO: 2283017 - RNA, 19 nt, Artificial Sequence
  Description of Artificial Sequence: Synthetic oligonucleotide
  Antisense strand to SEQ ID NO: 2283016
guucuagggacucauucau

SEQ ID NO: 2283018 - RNA, 19 nt, Artificial Sequence
  Description of Artificial Sequence: Synthetic oligonucleotide
  Sense strand starting at position 656 of SEQ ID NO: 1884671
uagaacgagccugaguuaa

SEQ ID NO: 2283019 - RNA, 19 nt, Artificial Sequence
  Description of Artificial Sequence: Synthetic oligonucleotide
  Antisense strand to SEQ ID NO: 2283018
uuaacucaggcucguucua

SEQ ID NO: 2283020 - RNA, 19 nt, Artificial Sequence
  Description of Artificial Sequence: Synthetic oligonucleotide
  Sense strand starting at position 912 of SEQ ID NO: 1884671
uggucauguccacagcaaa

SEQ ID NO: 2283021 - RNA, 19 nt, Artificial Sequence
  Description of Artificial Sequence: Synthetic oligonucleotide
  Antisense strand to SEQ ID NO: 2283020
uuugcuguggacaugacca

SEQ ID NO: 2283022 - RNA, 19 nt, Artificial Sequence
  Description of Artificial Sequence: Synthetic oligonucleotide
  Sense strand starting at position 1029 of SEQ ID NO: 1884671
ggcuucugucaucucguuu

SEQ ID NO: 2283023 - RNA, 19 nt, Artificial Sequence
  Description of Artificial Sequence: Synthetic oligonucleotide
  Antisense strand to SEQ ID NO: 2283022
aaacgagaugacagaagcc

SEQ ID NO: 2283024 - RNA, 19 nt, Artificial Sequence
  Description of Artificial Sequence: Synthetic oligonucleotide
  Sense strand starting at position 1162 of SEQ ID NO: 1884671
guuccaaaguauccugaaa

SEQ ID NO: 2283025 - RNA, 19 nt, Artificial Sequence
  Description of Artificial Sequence: Synthetic oligonucleotide
  Antisense strand to SEQ ID NO: 2283024
uuucaggauacuuuggaac

SEQ ID NO: 2283026 - RNA, 19 nt, Artificial Sequence
  Description of Artificial Sequence: Synthetic oligonucleotide
  Sense strand starting at position 1493 of SEQ ID NO: 1884671
cuccuaaguggugauagau

SEQ ID NO: 2283027 - RNA, 19 nt, Artificial Sequence
  Description of Artificial Sequence: Synthetic oligonucleotide
  Antisense strand to SEQ ID NO: 2283026
aucuaucaccacuuaggag

SEQ ID NO: 2283028 - RNA, 19 nt, Artificial Sequence
  Description of Artificial Sequence: Synthetic oligonucleotide
  Sense strand starting at position 1518 of SEQ ID NO: 1884671
auagcauugcuagauaaau

SEQ ID NO: 2283029 - RNA, 19 nt, Artificial Sequence
  Description of Artificial Sequence: Synthetic oligonucleotide
  Antisense strand to SEQ ID NO: 2283028
auuuaucuagcaaugcuau

SEQ ID NO: 2283030 - RNA, 19 nt, Artificial Sequence
  Description of Artificial Sequence: Synthetic oligonucleotide
  Sense strand starting at position 1977 of SEQ ID NO: 1884671
gugcccauucucuagaaug

SEQ ID NO: 2283031 - RNA, 19 nt, Artificial Sequence
  Description of Artificial Sequence: Synthetic oligonucleotide
  Antisense strand to SEQ ID NO: 2283030
cauucuagagaaugggcac

SEQ ID NO: 2283032 - RNA, 19 nt, Artificial Sequence
  Description of Artificial Sequence: Synthetic oligonucleotide
  Sense strand starting at position 1979 of SEQ ID NO: 1884671
gcccauucucuagaaugag

SEQ ID NO: 2283033 - RNA, 19 nt, Artificial Sequence
  Description of Artificial Sequence: Synthetic oligonucleotide
  Antisense strand to SEQ ID NO: 2283032
cucauucuagagaaugggc

SEQ ID NO: 2283034 - RNA, 19 nt, Artificial Sequence
  Description of Artificial Sequence: Synthetic oligonucleotide
  Sense strand starting at position 1987 of SEQ ID NO: 1884671
ucuagaaugaggcauugua

SEQ ID NO: 2283035 - RNA, 19 nt, Artificial Sequence
  Description of Artificial Sequence: Synthetic oligonucleotide
  Antisense strand to SEQ ID NO: 2283034
uacaaugccucauucuaga

SEQ ID NO: 2283036 - RNA, 19 nt, Artificial Sequence
  Description of Artificial Sequence: Synthetic oligonucleotide
  Sense strand starting at position 2022 of SEQ ID NO: 1884671
aguaguguauuuguacgaa

SEQ ID NO: 2283037 - RNA, 19 nt, Artificial Sequence
  Description of Artificial Sequence: Synthetic oligonucleotide
  Antisense strand to SEQ ID NO: 2283036
uucguacaaauacacuacu

SEQ ID NO: 2283038 - RNA, 19 nt, Artificial Sequence
  Description of Artificial Sequence: Synthetic oligonucleotide
  Sense strand starting at position 2025 of SEQ ID NO: 1884671
aguguauuuguacgaaguu

SEQ ID NO: 2283039 - RNA, 19 nt, Artificial Sequence
  Description of Artificial Sequence: Synthetic oligonucleotide
  Antisense strand to SEQ ID NO: 2283038
aacuucguacaaauacacu

SEQ ID NO: 2283040 - RNA, 19 nt, Artificial Sequence
  Description of Artificial Sequence: Synthetic oligonucleotide
  Sense strand starting at position 2131 of SEQ ID NO: 1884671
ggaucuaccugguucucaa

SEQ ID NO: 2283041 - RNA, 19 nt, Artificial Sequence
  Description of Artificial Sequence: Synthetic oligonucleotide
  Antisense strand to SEQ ID NO: 2283040
uugagaaccagguagaucc

SEQ ID NO: 2283042 - RNA, 19 nt, Artificial Sequence
  Description of Artificial Sequence: Synthetic oligonucleotide
  Sense strand starting at position 2238 of SEQ ID NO: 1884671
guagaaauaccagguuuaa

SEQ ID NO: 2283043 - RNA, 19 nt, Artificial Sequence
  Description of Artificial Sequence: Synthetic oligonucleotide
  Antisense strand to SEQ ID NO: 2283042
uuaaaccugguauuucuac

SEQ ID NO: 2283044 - RNA, 19 nt, Artificial Sequence
  Description of Artificial Sequence: Synthetic oligonucleotide
  Sense strand starting at position 2362 of SEQ ID NO: 1884671
gugcaauuaugacugaacu

SEQ ID NO: 2283045 - RNA, 19 nt, Artificial Sequence
  Description of Artificial Sequence: Synthetic oligonucleotide
  Antisense strand to SEQ ID NO: 2283044
aguucagucauaauugcac

SEQ ID NO: 2283046 - RNA, 19 nt, Artificial Sequence
  Description of Artificial Sequence: Synthetic oligonucleotide
  Sense strand starting at position 2363 of SEQ ID NO: 1884671
ugcaauuaugacugaacug

SEQ ID NO: 2283047 - RNA, 19 nt, Artificial Sequence
  Description of Artificial Sequence: Synthetic oligonucleotide
  Antisense strand to SEQ ID NO: 2283046
caguucagucauaauugca

SEQ ID NO: 2283048 - RNA, 19 nt, Artificial Sequence
  Description of Artificial Sequence: Synthetic oligonucleotide
  Sense strand starting at position 2403 of SEQ ID NO: 1884671
ugcaauauugcugagaaau

SEQ ID NO: 2283049 - RNA, 19 nt, Artificial Sequence
  Description of Artificial Sequence: Synthetic oligonucleotide
  Antisense strand to SEQ ID NO: 2283048
auuucucagcaauauugca

SEQ ID NO: 2283050 - RNA, 19 nt, Artificial Sequence
  Description of Artificial Sequence: Synthetic oligonucleotide
  Sense strand starting at position 2700 of SEQ ID NO: 1884671
acagguuuacgugacuuua

SEQ ID NO: 2283051 - RNA, 19 nt, Artificial Sequence
  Description of Artificial Sequence: Synthetic oligonucleotide
  Antisense strand to SEQ ID NO: 2283050
uaaagucacguaaaccugu

SEQ ID NO: 2283052 - RNA, 19 nt, Artificial Sequence
  Description of Artificial Sequence: Synthetic oligonucleotide
  Sense strand starting at position 2719 of SEQ ID NO: 1884671
ggaugaaauauguguaacu

SEQ ID NO: 2283053 - RNA, 19 nt, Artificial Sequence
  Description of Artificial Sequence: Synthetic oligonucleotide
  Antisense strand to SEQ ID NO: 2283052
aguuacacauauuucaucc

SEQ ID NO: 2283054 - RNA, 19 nt, Artificial Sequence
  Description of Artificial Sequence: Synthetic oligonucleotide
  Sense strand starting at position 2720 of SEQ ID NO: 1884671
gaugaaauauguguaacug

SEQ ID NO: 2283055 - RNA, 19 nt, Artificial Sequence
  Description of Artificial Sequence: Synthetic oligonucleotide
  Antisense strand to SEQ ID NO: 2283054
caguuacacauauuucauc

SEQ ID NO: 2283056 - RNA, 19 nt, Artificial Sequence
  Description of Artificial Sequence: Synthetic oligonucleotide
  Sense strand starting at position 2736 of SEQ ID NO: 1884671
cugccaguugaauaaugau

SEQ ID NO: 2283057 - RNA, 19 nt, Artificial Sequence
  Description of Artificial Sequence: Synthetic oligonucleotide
  Antisense strand to SEQ ID NO: 2283056
aucauuauucaacuggcag

SEQ ID NO: 2283058 - RNA, 19 nt, Artificial Sequence
  Description of Artificial Sequence: Synthetic oligonucleotide
  Sense strand starting at position 2866 of SEQ ID NO: 1884671
uguguuauaccugaaauac

SEQ ID NO: 2283059 - RNA, 19 nt, Artificial Sequence
  Description of Artificial Sequence: Synthetic oligonucleotide
  Antisense strand to SEQ ID NO: 2283058
guauuucagguauaacaca

SEQ ID NO: 2283060 - RNA, 19 nt, Artificial Sequence
  Description of Artificial Sequence: Synthetic oligonucleotide
  Sense strand starting at position 2875 of SEQ ID NO: 1884671
ccugaaauacugggauggu

SEQ ID NO: 2283061 - RNA, 19 nt, Artificial Sequence
  Description of Artificial Sequence: Synthetic oligonucleotide
  Antisense strand to SEQ ID NO: 2283060
accaucccaguauuucagg

SEQ ID NO: 2283062 - RNA, 19 nt, Artificial Sequence
  Description of Artificial Sequence: Synthetic oligonucleotide
  Sense strand starting at position 2878 of SEQ ID NO: 1884671
gaaauacugggauggugua

SEQ ID NO: 2283063 - RNA, 19 nt, Artificial Sequence
  Description of Artificial Sequence: Synthetic oligonucleotide
  Antisense strand to SEQ ID NO: 2283062
uacaccaucccaguauuuc

SEQ ID NO: 2283064 - RNA, 19 nt, Artificial Sequence
  Description of Artificial Sequence: Synthetic oligonucleotide
  Sense strand starting at position 2915 of SEQ ID NO: 1884671
uugaguccuugauuauuau

SEQ ID NO: 2283065 - RNA, 19 nt, Artificial Sequence
  Description of Artificial Sequence: Synthetic oligonucleotide
  Antisense strand to SEQ ID NO: 2283064
auaauaaucaaggacucaa

SEQ ID NO: 2283066 - RNA, 19 nt, Artificial Sequence
  Description of Artificial Sequence: Synthetic oligonucleotide
  Sense strand starting at position 2916 of SEQ ID NO: 1884671
ugaguccuugauuauuaua

SEQ ID NO: 2283067 - RNA, 19 nt, Artificial Sequence
  Description of Artificial Sequence: Synthetic oligonucleotide
  Antisense strand to SEQ ID NO: 2283066
uauaauaaucaaggacuca

SEQ ID NO: 2283068 - RNA, 19 nt, Artificial Sequence
  Description of Artificial Sequence: Synthetic oligonucleotide
  Sense strand starting at position 2918 of SEQ ID NO: 1884671
aguccuugauuauuauaag

SEQ ID NO: 2283069 - RNA, 19 nt, Artificial Sequence
  Description of Artificial Sequence: Synthetic oligonucleotide
  Antisense strand to SEQ ID NO: 2283068
cuuauaauaaucaaggacu

SEQ ID NO: 2283070 - RNA, 19 nt, Artificial Sequence
  Description of Artificial Sequence: Synthetic oligonucleotide
  Sense strand starting at position 3065 of SEQ ID NO: 1884671
agauccaguuuauuauaca

SEQ ID NO: 2283071 - RNA, 19 nt, Artificial Sequence
  Description of Artificial Sequence: Synthetic oligonucleotide
  Antisense strand to SEQ ID NO: 2283070
uguauaauaaacuggaucu

SEQ ID NO: 2283072 - RNA, 19 nt, Artificial Sequence
  Description of Artificial Sequence: Synthetic oligonucleotide
  Sense strand starting at position 3221 of SEQ ID NO: 1884671
gcgaucacucaagaauggu

SEQ ID NO: 2283073 - RNA, 19 nt, Artificial Sequence
  Description of Artificial Sequence: Synthetic oligonucleotide
  Antisense strand to SEQ ID NO: 2283072
accauucuugagugaucgc

SEQ ID NO: 2283074 - RNA, 19 nt, Artificial Sequence
  Description of Artificial Sequence: Synthetic oligonucleotide
  Sense strand starting at position 3250 of SEQ ID NO: 1884671
ggaguaugccaauaccuaa

SEQ ID NO: 2283075 - RNA, 19 nt, Artificial Sequence
  Description of Artificial Sequence: Synthetic oligonucleotide
  Antisense strand to SEQ ID NO: 2283074
uuagguauuggcauacucc

SEQ ID NO: 2283076 - RNA, 19 nt, Artificial Sequence
  Description of Artificial Sequence: Synthetic oligonucleotide
  Sense strand starting at position 3275 of SEQ ID NO: 1884671
aaaguagauuaucugguuu

SEQ ID NO: 2283077 - RNA, 19 nt, Artificial Sequence
  Description of Artificial Sequence: Synthetic oligonucleotide
  Antisense strand to SEQ ID NO: 2283076
aaaccagauaaucuacuuu

SEQ ID NO: 2283078 - RNA, 19 nt, Artificial Sequence
  Description of Artificial Sequence: Synthetic oligonucleotide
  Sense strand starting at position 3368 of SEQ ID NO: 1884671
uaguccugugaguaaagua

SEQ ID NO: 2283079 - RNA, 19 nt, Artificial Sequence
  Description of Artificial Sequence: Synthetic oligonucleotide
  Antisense strand to SEQ ID NO: 2283078
uacuuuacucacaggacua

SEQ ID NO: 2283080 - RNA, 19 nt, Artificial Sequence
  Description of Artificial Sequence: Synthetic oligonucleotide
  Sense strand starting at position 3530 of SEQ ID NO: 1884671
gugauucuugcugaaucac

SEQ ID NO: 2283081 - RNA, 19 nt, Artificial Sequence
  Description of Artificial Sequence: Synthetic oligonucleotide
  Antisense strand to SEQ ID NO: 2283080
gugauucagcaagaaucac

SEQ ID NO: 2283082 - RNA, 19 nt, Artificial Sequence
  Description of Artificial Sequence: Synthetic oligonucleotide
  Sense strand starting at position 29 of SEQ ID NO: 1884672
cuccuaaguggugauagau

SEQ ID NO: 2283083 - RNA, 19 nt, Artificial Sequence
  Description of Artificial Sequence: Synthetic oligonucleotide
  Antisense strand to SEQ ID NO: 2283082
aucuaucaccacuuaggag

SEQ ID NO: 2283084 - RNA, 19 nt, Artificial Sequence
  Description of Artificial Sequence: Synthetic oligonucleotide
  Sense strand starting at position 54 of SEQ ID NO: 1884672
auagcauugcuagauaaau

SEQ ID NO: 2283085 - RNA, 19 nt, Artificial Sequence
  Description of Artificial Sequence: Synthetic oligonucleotide
  Antisense strand to SEQ ID NO: 2283084
auuuaucuagcaaugcuau

SEQ ID NO: 2283086 - RNA, 19 nt, Artificial Sequence
  Description of Artificial Sequence: Synthetic oligonucleotide
  Sense strand starting at position 513 of SEQ ID NO: 1884672
gugcccauucucuagaaug

SEQ ID NO: 2283087 - RNA, 19 nt, Artificial Sequence
  Description of Artificial Sequence: Synthetic oligonucleotide
  Antisense strand to SEQ ID NO: 2283086
cauucuagagaaugggcac

SEQ ID NO: 2283088 - RNA, 19 nt, Artificial Sequence
  Description of Artificial Sequence: Synthetic oligonucleotide
  Sense strand starting at position 515 of SEQ ID NO: 1884672
gcccauucucuagaaugag

SEQ ID NO: 2283089 - RNA, 19 nt, Artificial Sequence
  Description of Artificial Sequence: Synthetic oligonucleotide
  Antisense strand to SEQ ID NO: 2283088
cucauucuagagaaugggc

SEQ ID NO: 2283090 - RNA, 19 nt, Artificial Sequence
  Description of Artificial Sequence: Synthetic oligonucleotide
  Sense strand starting at position 523 of SEQ ID NO: 1884672
ucuagaaugaggcauugua

SEQ ID NO: 2283091 - RNA, 19 nt, Artificial Sequence
  Description of Artificial Sequence: Synthetic oligonucleotide
  Antisense strand to SEQ ID NO: 2283090
uacaaugccucauucuaga

SEQ ID NO: 2283092 - RNA, 19 nt, Artificial Sequence
  Description of Artificial Sequence: Synthetic oligonucleotide
  Sense strand starting at position 558 of SEQ ID NO: 1884672
aguaguguauuuguacgaa

SEQ ID NO: 2283093 - RNA, 19 nt, Artificial Sequence
  Description of Artificial Sequence: Synthetic oligonucleotide
  Antisense strand to SEQ ID NO: 2283092
uucguacaaauacacuacu

SEQ ID NO: 2283094 - RNA, 19 nt, Artificial Sequence
  Description of Artificial Sequence: Synthetic oligonucleotide
  Sense strand starting at position 561 of SEQ ID NO: 1884672
aguguauuuguacgaaguu

SEQ ID NO: 2283095 - RNA, 19 nt, Artificial Sequence
  Description of Artificial Sequence: Synthetic oligonucleotide
  Antisense strand to SEQ ID NO: 2283094
aacuucguacaaauacacu

SEQ ID NO: 2283096 - RNA, 19 nt, Artificial Sequence
  Description of Artificial Sequence: Synthetic oligonucleotide
  Sense strand starting at position 667 of SEQ ID NO: 1884672
ggaucuaccugguucucaa

SEQ ID NO: 2283097 - RNA, 19 nt, Artificial Sequence
  Description of Artificial Sequence: Synthetic oligonucleotide
  Antisense strand to SEQ ID NO: 2283096
uugagaaccagguagaucc

SEQ ID NO: 2283098 - RNA, 19 nt, Artificial Sequence
  Description of Artificial Sequence: Synthetic oligonucleotide
  Sense strand starting at position 774 of SEQ ID NO: 1884672
guagaaauaccagguuuaa

SEQ ID NO: 2283099 - RNA, 19 nt, Artificial Sequence
  Description of Artificial Sequence: Synthetic oligonucleotide
  Antisense strand to SEQ ID NO: 2283098
uuaaaccugguauuucuac

SEQ ID NO: 2283100 - RNA, 19 nt, Artificial Sequence
  Description of Artificial Sequence: Synthetic oligonucleotide
  Sense strand starting at position 898 of SEQ ID NO: 1884672
gugcaauuaugacugaacu

SEQ ID NO: 2283101 - RNA, 19 nt, Artificial Sequence
  Description of Artificial Sequence: Synthetic oligonucleotide
  Antisense strand to SEQ ID NO: 2283100
aguucagucauaauugcac

SEQ ID NO: 2283102 - RNA, 19 nt, Artificial Sequence
  Description of Artificial Sequence: Synthetic oligonucleotide
  Sense strand starting at position 899 of SEQ ID NO: 1884672
ugcaauuaugacugaacug

SEQ ID NO: 2283103 - RNA, 19 nt, Artificial Sequence
  Description of Artificial Sequence: Synthetic oligonucleotide
  Antisense strand to SEQ ID NO: 2283102
caguucagucauaauugca

SEQ ID NO: 2283104 - RNA, 19 nt, Artificial Sequence
  Description of Artificial Sequence: Synthetic oligonucleotide
  Sense strand starting at position 939 of SEQ ID NO: 1884672
ugcaauauugcugagaaau

SEQ ID NO: 2283105 - RNA, 19 nt, Artificial Sequence
  Description of Artificial Sequence: Synthetic oligonucleotide
  Antisense strand to SEQ ID NO: 2283104
auuucucagcaauauugca

SEQ ID NO: 2283106 - RNA, 19 nt, Artificial Sequence
  Description of Artificial Sequence: Synthetic oligonucleotide
  Sense strand starting at position 1236 of SEQ ID NO: 1884672
acagguuuacgugacuuua

SEQ ID NO: 2283107 - RNA, 19 nt, Artificial Sequence
  Description of Artificial Sequence: Synthetic oligonucleotide
  Antisense strand to SEQ ID NO: 2283106
uaaagucacguaaaccugu

SEQ ID NO: 2283108 - RNA, 19 nt, Artificial Sequence
  Description of Artificial Sequence: Synthetic oligonucleotide
  Sense strand starting at position 1255 of SEQ ID NO: 1884672
ggaugaaauauguguaacu

SEQ ID NO: 2283109 - RNA, 19 nt, Artificial Sequence
  Description of Artificial Sequence: Synthetic oligonucleotide
  Antisense strand to SEQ ID NO: 2283108
aguuacacauauuucaucc

SEQ ID NO: 2283110 - RNA, 19 nt, Artificial Sequence
  Description of Artificial Sequence: Synthetic oligonucleotide
  Sense strand starting at position 1256 of SEQ ID NO: 1884672
gaugaaauauguguaacug

SEQ ID NO: 2283111 - RNA, 19 nt, Artificial Sequence
  Description of Artificial Sequence: Synthetic oligonucleotide
  Antisense strand to SEQ ID NO: 2283110
caguuacacauauuucauc

SEQ ID NO: 2283112 - RNA, 19 nt, Artificial Sequence
  Description of Artificial Sequence: Synthetic oligonucleotide
  Sense strand starting at position 1272 of SEQ ID NO: 1884672
cugccaguugaauaaugau

SEQ ID NO: 2283113 - RNA, 19 nt, Artificial Sequence
  Description of Artificial Sequence: Synthetic oligonucleotide
  Antisense strand to SEQ ID NO: 2283112
aucauuauucaacuggcag

SEQ ID NO: 2283114 - RNA, 19 nt, Artificial Sequence
  Description of Artificial Sequence: Synthetic oligonucleotide
  Sense strand starting at position 1402 of SEQ ID NO: 1884672
uguguuauaccugaaauac

SEQ ID NO: 2283115 - RNA, 19 nt, Artificial Sequence
  Description of Artificial Sequence: Synthetic oligonucleotide
  Antisense strand to SEQ ID NO: 2283114
guauuucagguauaacaca

SEQ ID NO: 2283116 - RNA, 19 nt, Artificial Sequence
  Description of Artificial Sequence: Synthetic oligonucleotide
  Sense strand starting at position 1411 of SEQ ID NO: 1884672
ccugaaauacugggauggu

SEQ ID NO: 2283117 - RNA, 19 nt, Artificial Sequence
  Description of Artificial Sequence: Synthetic oligonucleotide
  Antisense strand to SEQ ID NO: 2283116
accaucccaguauuucagg

SEQ ID NO: 2283118 - RNA, 19 nt, Artificial Sequence
  Description of Artificial Sequence: Synthetic oligonucleotide
  Sense strand starting at position 1414 of SEQ ID NO: 1884672
gaaauacugggauggugua

SEQ ID NO: 2283119 - RNA, 19 nt, Artificial Sequence
  Description of Artificial Sequence: Synthetic oligonucleotide
  Antisense strand to SEQ ID NO: 2283118
uacaccaucccaguauuuc

SEQ ID NO: 2283120 - RNA, 19 nt, Artificial Sequence
  Description of Artificial Sequence: Synthetic oligonucleotide
  Sense strand starting at position 1451 of SEQ ID NO: 1884672
uugaguccuugauuauuau

SEQ ID NO: 2283121 - RNA, 19 nt, Artificial Sequence
  Description of Artificial Sequence: Synthetic oligonucleotide
  Antisense strand to SEQ ID NO: 2283120
auaauaaucaaggacucaa

SEQ ID NO: 2283122 - RNA, 19 nt, Artificial Sequence
  Description of Artificial Sequence: Synthetic oligonucleotide
  Sense strand starting at position 1452 of SEQ ID NO: 1884672
ugaguccuugauuauuaua

SEQ ID NO: 2283123 - RNA, 19 nt, Artificial Sequence
  Description of Artificial Sequence: Synthetic oligonucleotide
  Antisense strand to SEQ ID NO: 2283122
uauaauaaucaaggacuca

SEQ ID NO: 2283124 - RNA, 19 nt, Artificial Sequence
  Description of Artificial Sequence: Synthetic oligonucleotide
  Sense strand starting at position 1454 of SEQ ID NO: 1884672
aguccuugauuauuauaag

SEQ ID NO: 2283125 - RNA, 19 nt, Artificial Sequence
  Description of Artificial Sequence: Synthetic oligonucleotide
  Antisense strand to SEQ ID NO: 2283124
cuuauaauaaucaaggacu

SEQ ID NO: 2283126 - RNA, 19 nt, Artificial Sequence
  Description of Artificial Sequence: Synthetic oligonucleotide
  Sense strand starting at position 1555 of SEQ ID NO: 1884672
aggauacauuuccaguuau

SEQ ID NO: 2283127 - RNA, 19 nt, Artificial Sequence
  Description of Artificial Sequence: Synthetic oligonucleotide
  Antisense strand to SEQ ID NO: 2283126
auaacuggaaauguauccu

SEQ ID NO: 2283128 - RNA, 19 nt, Artificial Sequence
  Description of Artificial Sequence: Synthetic oligonucleotide
  Sense strand starting at position 1601 of SEQ ID NO: 1884672
agauccaguuuauuauaca

SEQ ID NO: 2283129 - RNA, 19 nt, Artificial Sequence
  Description of Artificial Sequence: Synthetic oligonucleotide
  Antisense strand to SEQ ID NO: 2283128
uguauaauaaacuggaucu

SEQ ID NO: 2283130 - RNA, 19 nt, Artificial Sequence
  Description of Artificial Sequence: Synthetic oligonucleotide
  Sense strand starting at position 1623 of SEQ ID NO: 1884672
auauccagcucugucagaa

SEQ ID NO: 2283131 - RNA, 19 nt, Artificial Sequence
  Description of Artificial Sequence: Synthetic oligonucleotide
  Antisense strand to SEQ ID NO: 2283130
uucugacagagcuggauau

SEQ ID NO: 2283132 - RNA, 19 nt, Artificial Sequence
  Description of Artificial Sequence: Synthetic oligonucleotide
  Sense strand starting at position 1757 of SEQ ID NO: 1884672
gcgaucacucaagaauggu

SEQ ID NO: 2283133 - RNA, 19 nt, Artificial Sequence
  Description of Artificial Sequence: Synthetic oligonucleotide
  Antisense strand to SEQ ID NO: 2283132
accauucuugagugaucgc

SEQ ID NO: 2283134 - RNA, 19 nt, Artificial Sequence
  Description of Artificial Sequence: Synthetic oligonucleotide
  Sense strand starting at position 1786 of SEQ ID NO: 1884672
ggaguaugccaauaccuaa

SEQ ID NO: 2283135 - RNA, 19 nt, Artificial Sequence
  Description of Artificial Sequence: Synthetic oligonucleotide
  Antisense strand to SEQ ID NO: 2283134
uuagguauuggcauacucc

SEQ ID NO: 2283136 - RNA, 19 nt, Artificial Sequence
  Description of Artificial Sequence: Synthetic oligonucleotide
  Sense strand starting at position 1811 of SEQ ID NO: 1884672
aaaguagauuaucugguuu

SEQ ID NO: 2283137 - RNA, 19 nt, Artificial Sequence
  Description of Artificial Sequence: Synthetic oligonucleotide
  Antisense strand to SEQ ID NO: 2283136
aaaccagauaaucuacuuu

SEQ ID NO: 2283138 - RNA, 19 nt, Artificial Sequence
  Description of Artificial Sequence: Synthetic oligonucleotide
  Sense strand starting at position 1900 of SEQ ID NO: 1884672
acaauaguccugugaguaa

SEQ ID NO: 2283139 - RNA, 19 nt, Artificial Sequence
  Description of Artificial Sequence: Synthetic oligonucleotide
  Antisense strand to SEQ ID NO: 2283138
uuacucacaggacuauugu

SEQ ID NO: 2283140 - RNA, 19 nt, Artificial Sequence
  Description of Artificial Sequence: Synthetic oligonucleotide
  Sense strand starting at position 1904 of SEQ ID NO: 1884672
uaguccugugaguaaagua

SEQ ID NO: 2283141 - RNA, 19 nt, Artificial Sequence
  Description of Artificial Sequence: Synthetic oligonucleotide
  Antisense strand to SEQ ID NO: 2283140
uacuuuacucacaggacua

SEQ ID NO: 2283142 - RNA, 19 nt, Artificial Sequence
  Description of Artificial Sequence: Synthetic oligonucleotide
  Sense strand starting at position 2066 of SEQ ID NO: 1884672
gugauucuugcugaaucac

SEQ ID NO: 2283143 - RNA, 19 nt, Artificial Sequence
  Description of Artificial Sequence: Synthetic oligonucleotide
  Antisense strand to SEQ ID NO: 2283142
gugauucagcaagaaucac

SEQ ID NO: 2283144 - RNA, 19 nt, Artificial Sequence
  Description of Artificial Sequence: Synthetic oligonucleotide
  Sense strand starting at position 2610 of SEQ ID NO: 1884672
cgacuuuggcauuauauaa

SEQ ID NO: 2283145 - RNA, 19 nt, Artificial Sequence
  Description of Artificial Sequence: Synthetic oligonucleotide
  Antisense strand to SEQ ID NO: 2283144
uuauauaaugccaaagucg

SEQ ID NO: 2283146 - RNA, 19 nt, Artificial Sequence
  Description of Artificial Sequence: Synthetic oligonucleotide
  Sense strand starting at position 2668 of SEQ ID NO: 1884672
uuaugaccuguguaaucau

SEQ ID NO: 2283147 - RNA, 19 nt, Artificial Sequence
  Description of Artificial Sequence: Synthetic oligonucleotide
  Antisense strand to SEQ ID NO: 2283146
augauuacacaggucauaa

SEQ ID NO: 2283148 - RNA, 19 nt, Artificial Sequence
  Description of Artificial Sequence: Synthetic oligonucleotide
  Sense strand starting at position 2932 of SEQ ID NO: 1884672
guagaaaugucccugaaua

SEQ ID NO: 2283149 - RNA, 19 nt, Artificial Sequence
  Description of Artificial Sequence: Synthetic oligonucleotide
  Antisense strand to SEQ ID NO: 2283148
uauucagggacauuucuac

SEQ ID NO: 2283150 - RNA, 19 nt, Artificial Sequence
  Description of Artificial Sequence: Synthetic oligonucleotide
  Sense strand starting at position 2954 of SEQ ID NO: 1884672
ugaaacuugcucugacaac

SEQ ID NO: 2283151 - RNA, 19 nt, Artificial Sequence
  Description of Artificial Sequence: Synthetic oligonucleotide
  Antisense strand to SEQ ID NO: 2283150
guugucagagcaaguuuca

SEQ ID NO: 2283152 - RNA, 19 nt, Artificial Sequence
  Description of Artificial Sequence: Synthetic oligonucleotide
  Sense strand starting at position 3082 of SEQ ID NO: 1884672
uuguguauaucaucaacau

SEQ ID NO: 2283153 - RNA, 19 nt, Artificial Sequence
  Description of Artificial Sequence: Synthetic oligonucleotide
  Antisense strand to SEQ ID NO: 2283152
auguugaugauauacacaa

SEQ ID NO: 2283154 - RNA, 19 nt, Artificial Sequence
  Description of Artificial Sequence: Synthetic oligonucleotide
  Sense strand starting at position 3083 of SEQ ID NO: 1884672
uguguauaucaucaacaug

SEQ ID NO: 2283155 - RNA, 19 nt, Artificial Sequence
  Description of Artificial Sequence: Synthetic oligonucleotide
  Antisense strand to SEQ ID NO: 2283154
cauguugaugauauacaca

SEQ ID NO: 2283156 - RNA, 19 nt, Artificial Sequence
  Description of Artificial Sequence: Synthetic oligonucleotide
  Sense strand starting at position 3152 of SEQ ID NO: 1884672
cuguuuaucuauucuacag

SEQ ID NO: 2283157 - RNA, 19 nt, Artificial Sequence
  Description of Artificial Sequence: Synthetic oligonucleotide
  Antisense strand to SEQ ID NO: 2283156
cuguagaauagauaaacag

SEQ ID NO: 2283158 - RNA, 19 nt, Artificial Sequence
  Description of Artificial Sequence: Synthetic oligonucleotide
  Sense strand starting at position 3604 of SEQ ID NO: 1884672
cuuuguccacguuaaacaa

SEQ ID NO: 2283159 - RNA, 19 nt, Artificial Sequence
  Description of Artificial Sequence: Synthetic oligonucleotide
  Antisense strand to SEQ ID NO: 2283158
uuguuuaacguggacaaag

SEQ ID NO: 2283160 - RNA, 19 nt, Artificial Sequence
  Description of Artificial Sequence: Synthetic oligonucleotide
  Sense strand starting at position 3673 of SEQ ID NO: 1884672
cucuaucguggugaucaaa

SEQ ID NO: 2283161 - RNA, 19 nt, Artificial Sequence
  Description of Artificial Sequence: Synthetic oligonucleotide
  Antisense strand to SEQ ID NO: 2283160
uuugaucaccacgauagag

SEQ ID NO: 2283162 - RNA, 19 nt, Artificial Sequence
  Description of Artificial Sequence: Synthetic oligonucleotide
  Sense strand starting at position 59 of SEQ ID NO: 1884673
ugcucauugggugaccuua

SEQ ID NO: 2283163 - RNA, 19 nt, Artificial Sequence
  Description of Artificial Sequence: Synthetic oligonucleotide
  Antisense strand to SEQ ID NO: 2283162
uaaggucacccaaugagca

SEQ ID NO: 2283164 - RNA, 19 nt, Artificial Sequence
  Description of Artificial Sequence: Synthetic oligonucleotide
  Sense strand starting at position 61 of SEQ ID NO: 1884673
cucauugggugaccuuaaa

SEQ ID NO: 2283165 - RNA, 19 nt, Artificial Sequence
  Description of Artificial Sequence: Synthetic oligonucleotide
  Antisense strand to SEQ ID NO: 2283164
uuuaaggucacccaaugag

SEQ ID NO: 2283166 - RNA, 19 nt, Artificial Sequence
  Description of Artificial Sequence: Synthetic oligonucleotide
  Sense strand starting at position 298 of SEQ ID NO: 1884673
ugagcauuccagggcacua

SEQ ID NO: 2283167 - RNA, 19 nt, Artificial Sequence
  Description of Artificial Sequence: Synthetic oligonucleotide
  Antisense strand to SEQ ID NO: 2283166
uagugcccuggaaugcuca

SEQ ID NO: 2283168 - RNA, 19 nt, Artificial Sequence
  Description of Artificial Sequence: Synthetic oligonucleotide
  Sense strand starting at position 339 of SEQ ID NO: 1884673
cgagguaguaguuaagaac

SEQ ID NO: 2283169 - RNA, 19 nt, Artificial Sequence
  Description of Artificial Sequence: Synthetic oligonucleotide
  Antisense strand to SEQ ID NO: 2283168
guucuuaacuacuaccucg

SEQ ID NO: 2283170 - RNA, 19 nt, Artificial Sequence
  Description of Artificial Sequence: Synthetic oligonucleotide
  Sense strand starting at position 460 of SEQ ID NO: 1884673
cugacacaugauuguguua

SEQ ID NO: 2283171 - RNA, 19 nt, Artificial Sequence
  Description of Artificial Sequence: Synthetic oligonucleotide
  Antisense strand to SEQ ID NO: 2283170
uaacacaaucaugugucag

SEQ ID NO: 2283172 - RNA, 19 nt, Artificial Sequence
  Description of Artificial Sequence: Synthetic oligonucleotide
  Sense strand starting at position 463 of SEQ ID NO: 1884673
acacaugauuguguuagaa

SEQ ID NO: 2283173 - RNA, 19 nt, Artificial Sequence
  Description of Artificial Sequence: Synthetic oligonucleotide
  Antisense strand to SEQ ID NO: 2283172
uucuaacacaaucaugugu

SEQ ID NO: 2283174 - RNA, 19 nt, Artificial Sequence
  Description of Artificial Sequence: Synthetic oligonucleotide
  Sense strand starting at position 521 of SEQ ID NO: 1884673
cacaguaaugucugugaaa

SEQ ID NO: 2283175 - RNA, 19 nt, Artificial Sequence
  Description of Artificial Sequence: Synthetic oligonucleotide
  Antisense strand to SEQ ID NO: 2283174
uuucacagacauuacugug

SEQ ID NO: 2283176 - RNA, 19 nt, Artificial Sequence
  Description of Artificial Sequence: Synthetic oligonucleotide
  Sense strand starting at position 522 of SEQ ID NO: 1884673
acaguaaugucugugaaau

SEQ ID NO: 2283177 - RNA, 19 nt, Artificial Sequence
  Description of Artificial Sequence: Synthetic oligonucleotide
  Antisense strand to SEQ ID NO: 2283176
auuucacagacauuacugu

SEQ ID NO: 2283178 - RNA, 19 nt, Artificial Sequence
  Description of Artificial Sequence: Synthetic oligonucleotide
  Sense strand starting at position 598 of SEQ ID NO: 1884673
gccuguuaggagcaguaga

SEQ ID NO: 2283179 - RNA, 19 nt, Artificial Sequence
  Description of Artificial Sequence: Synthetic oligonucleotide
  Antisense strand to SEQ ID NO: 2283178
ucuacugcuccuaacaggc

SEQ ID NO: 2283180 - RNA, 19 nt, Artificial Sequence
  Description of Artificial Sequence: Synthetic oligonucleotide
  Sense strand starting at position 614 of SEQ ID NO: 1884673
agauaagugguaggugagu

SEQ ID NO: 2283181 - RNA, 19 nt, Artificial Sequence
  Description of Artificial Sequence: Synthetic oligonucleotide
  Antisense strand to SEQ ID NO: 2283180
acucaccuaccacuuaucu

SEQ ID NO: 2283182 - RNA, 19 nt, Artificial Sequence
  Description of Artificial Sequence: Synthetic oligonucleotide
  Sense strand starting at position 635 of SEQ ID NO: 1884673
gcauuacugccggaaauuc

SEQ ID NO: 2283183 - RNA, 19 nt, Artificial Sequence
  Description of Artificial Sequence: Synthetic oligonucleotide
  Antisense strand to SEQ ID NO: 2283182
gaauuuccggcaguaaugc

SEQ ID NO: 2283184 - RNA, 19 nt, Artificial Sequence
  Description of Artificial Sequence: Synthetic oligonucleotide
  Sense strand starting at position 715 of SEQ ID NO: 1884673
augagaaaccauugccugu

SEQ ID NO: 2283185 - RNA, 19 nt, Artificial Sequence
  Description of Artificial Sequence: Synthetic oligonucleotide
  Antisense strand to SEQ ID NO: 2283184
acaggcaaugguuucucau

SEQ ID NO: 2283186 - RNA, 19 nt, Artificial Sequence
  Description of Artificial Sequence: Synthetic oligonucleotide
  Sense strand starting at position 719 of SEQ ID NO: 1884673
gaaaccauugccugucuga

SEQ ID NO: 2283187 - RNA, 19 nt, Artificial Sequence
  Description of Artificial Sequence: Synthetic oligonucleotide
  Antisense strand to SEQ ID NO: 2283186
ucagacaggcaaugguuuc

SEQ ID NO: 2283188 - RNA, 19 nt, Artificial Sequence
  Description of Artificial Sequence: Synthetic oligonucleotide
  Sense strand starting at position 722 of SEQ ID NO: 1884673
accauugccugucugauaa

SEQ ID NO: 2283189 - RNA, 19 nt, Artificial Sequence
  Description of Artificial Sequence: Synthetic oligonucleotide
  Antisense strand to SEQ ID NO: 2283188
uuaucagacaggcaauggu

SEQ ID NO: 2283190 - RNA, 19 nt, Artificial Sequence
  Description of Artificial Sequence: Synthetic oligonucleotide
  Sense strand starting at position 774 of SEQ ID NO: 1884673
cccggaccaucuguggaaa

SEQ ID NO: 2283191 - RNA, 19 nt, Artificial Sequence
  Description of Artificial Sequence: Synthetic oligonucleotide
  Antisense strand to SEQ ID NO: 2283190
uuuccacagaugguccggg

SEQ ID NO: 2283192 - RNA, 19 nt, Artificial Sequence
  Description of Artificial Sequence: Synthetic oligonucleotide
  Sense strand starting at position 830 of SEQ ID NO: 1884673
gguugacugcuauaaggua

SEQ ID NO: 2283193 - RNA, 19 nt, Artificial Sequence
  Description of Artificial Sequence: Synthetic oligonucleotide
  Antisense strand to SEQ ID NO: 2283192
uaccuuauagcagucaacc

SEQ ID NO: 2283194 - RNA, 19 nt, Artificial Sequence
  Description of Artificial Sequence: Synthetic oligonucleotide
  Sense strand starting at position 1085 of SEQ ID NO: 1884673
auucuuuagcuguaagaga

SEQ ID NO: 2283195 - RNA, 19 nt, Artificial Sequence
  Description of Artificial Sequence: Synthetic oligonucleotide
  Antisense strand to SEQ ID NO: 2283194
ucucuuacagcuaaagaau

SEQ ID NO: 2283196 - RNA, 19 nt, Artificial Sequence
  Description of Artificial Sequence: Synthetic oligonucleotide
  Sense strand starting at position 1154 of SEQ ID NO: 1884673
aacaaauaucgaugaguuu

SEQ ID NO: 2283197 - RNA, 19 nt, Artificial Sequence
  Description of Artificial Sequence: Synthetic oligonucleotide
  Antisense strand to SEQ ID NO: 2283196
aaacucaucgauauuuguu

SEQ ID NO: 2283198 - RNA, 19 nt, Artificial Sequence
  Description of Artificial Sequence: Synthetic oligonucleotide
  Sense strand starting at position 1749 of SEQ ID NO: 1884673
cacagugaguuacuguaga

SEQ ID NO: 2283199 - RNA, 19 nt, Artificial Sequence
  Description of Artificial Sequence: Synthetic oligonucleotide
  Antisense strand to SEQ ID NO: 2283198
ucuacaguaacucacugug

SEQ ID NO: 2283200 - RNA, 19 nt, Artificial Sequence
  Description of Artificial Sequence: Synthetic oligonucleotide
  Sense strand starting at position 1795 of SEQ ID NO: 1884673
aucucuauucccugaguuc

SEQ ID NO: 2283201 - RNA, 19 nt, Artificial Sequence
  Description of Artificial Sequence: Synthetic oligonucleotide
  Antisense strand to SEQ ID NO: 2283200
gaacucagggaauagagau

SEQ ID NO: 2283202 - RNA, 19 nt, Artificial Sequence
  Description of Artificial Sequence: Synthetic oligonucleotide
  Sense strand starting at position 1796 of SEQ ID NO: 1884673
ucucuauucccugaguucu

SEQ ID NO: 2283203 - RNA, 19 nt, Artificial Sequence
  Description of Artificial Sequence: Synthetic oligonucleotide
  Antisense strand to SEQ ID NO: 2283202
agaacucagggaauagaga

SEQ ID NO: 2283204 - RNA, 19 nt, Artificial Sequence
  Description of Artificial Sequence: Synthetic oligonucleotide
  Sense strand starting at position 2371 of SEQ ID NO: 1884673
uuucguauuccagaacuuc

SEQ ID NO: 2283205 - RNA, 19 nt, Artificial Sequence
  Description of Artificial Sequence: Synthetic oligonucleotide
  Antisense strand to SEQ ID NO: 2283204
gaaguucuggaauacgaaa

SEQ ID NO: 2283206 - RNA, 19 nt, Artificial Sequence
  Description of Artificial Sequence: Synthetic oligonucleotide
  Sense strand starting at position 2437 of SEQ ID NO: 1884673
uuagaaagccauuaugcca

SEQ ID NO: 2283207 - RNA, 19 nt, Artificial Sequence
  Description of Artificial Sequence: Synthetic oligonucleotide
  Antisense strand to SEQ ID NO: 2283206
uggcauaauggcuuucuaa

SEQ ID NO: 2283208 - RNA, 19 nt, Artificial Sequence
  Description of Artificial Sequence: Synthetic oligonucleotide
  Sense strand starting at position 2470 of SEQ ID NO: 1884673
uaguguucgaaugauguaa

SEQ ID NO: 2283209 - RNA, 19 nt, Artificial Sequence
  Description of Artificial Sequence: Synthetic oligonucleotide
  Antisense strand to SEQ ID NO: 2283208
uuacaucauucgaacacua

SEQ ID NO: 2283210 - RNA, 19 nt, Artificial Sequence
  Description of Artificial Sequence: Synthetic oligonucleotide
  Sense strand starting at position 2474 of SEQ ID NO: 1884673
guucgaaugauguaaguuu

SEQ ID NO: 2283211 - RNA, 19 nt, Artificial Sequence
  Description of Artificial Sequence: Synthetic oligonucleotide
  Antisense strand to SEQ ID NO: 2283210
aaacuuacaucauucgaac

SEQ ID NO: 2283212 - RNA, 19 nt, Artificial Sequence
  Description of Artificial Sequence: Synthetic oligonucleotide
  Sense strand starting at position 2482 of SEQ ID NO: 1884673
gauguaaguuugguuaauu

SEQ ID NO: 2283213 - RNA, 19 nt, Artificial Sequence
  Description of Artificial Sequence: Synthetic oligonucleotide
  Antisense strand to SEQ ID NO: 2283212
aauuaaccaaacuuacauc

SEQ ID NO: 2283214 - RNA, 19 nt, Artificial Sequence
  Description of Artificial Sequence: Synthetic oligonucleotide
  Sense strand starting at position 2596 of SEQ ID NO: 1884673
cgaauaaacuggcuaucua

SEQ ID NO: 2283215 - RNA, 19 nt, Artificial Sequence
  Description of Artificial Sequence: Synthetic oligonucleotide
  Antisense strand to SEQ ID NO: 2283214
uagauagccaguuuauucg

SEQ ID NO: 2283216 - RNA, 19 nt, Artificial Sequence
  Description of Artificial Sequence: Synthetic oligonucleotide
  Sense strand starting at position 2795 of SEQ ID NO: 1884673
uuagaagaguuccuuaaac

SEQ ID NO: 2283217 - RNA, 19 nt, Artificial Sequence
  Description of Artificial Sequence: Synthetic oligonucleotide
  Antisense strand to SEQ ID NO: 2283216
guuuaaggaacucuucuaa

SEQ ID NO: 2283218 - RNA, 19 nt, Artificial Sequence
  Description of Artificial Sequence: Synthetic oligonucleotide
  Sense strand starting at position 2964 of SEQ ID NO: 1884673
guccauggauuaguugaua

SEQ ID NO: 2283219 - RNA, 19 nt, Artificial Sequence
  Description of Artificial Sequence: Synthetic oligonucleotide
  Antisense strand to SEQ ID NO: 2283218
uaucaacuaauccauggac

SEQ ID NO: 2283220 - RNA, 19 nt, Artificial Sequence
  Description of Artificial Sequence: Synthetic oligonucleotide
  Sense strand starting at position 2977 of SEQ ID NO: 1884673
uugauaguagcauaccaaa

SEQ ID NO: 2283221 - RNA, 19 nt, Artificial Sequence
  Description of Artificial Sequence: Synthetic oligonucleotide
  Antisense strand to SEQ ID NO: 2283220
uuugguaugcuacuaucaa

SEQ ID NO: 2283222 - RNA, 19 nt, Artificial Sequence
  Description of Artificial Sequence: Synthetic oligonucleotide
  Sense strand starting at position 3054 of SEQ ID NO: 1884673
agcugagugaaagguaaga

SEQ ID NO: 2283223 - RNA, 19 nt, Artificial Sequence
  Description of Artificial Sequence: Synthetic oligonucleotide
  Antisense strand to SEQ ID NO: 2283222
ucuuaccuuucacucagcu

SEQ ID NO: 2283224 - RNA, 19 nt, Artificial Sequence
  Description of Artificial Sequence: Synthetic oligonucleotide
  Sense strand starting at position 3081 of SEQ ID NO: 1884673
acuugaauuugccaagaga

SEQ ID NO: 2283225 - RNA, 19 nt, Artificial Sequence
  Description of Artificial Sequence: Synthetic oligonucleotide
  Antisense strand to SEQ ID NO: 2283224
ucucuuggcaaauucaagu

SEQ ID NO: 2283226 - RNA, 19 nt, Artificial Sequence
  Description of Artificial Sequence: Synthetic oligonucleotide
  Sense strand starting at position 3123 of SEQ ID NO: 1884673
ugccacaaaugauuagaau

SEQ ID NO: 2283227 - RNA, 19 nt, Artificial Sequence
  Description of Artificial Sequence: Synthetic oligonucleotide
  Antisense strand to SEQ ID NO: 2283226
auucuaaucauuuguggca

SEQ ID NO: 2283228 - RNA, 19 nt, Artificial Sequence
  Description of Artificial Sequence: Synthetic oligonucleotide
  Sense strand starting at position 3515 of SEQ ID NO: 1884673
augacuaaauauucuguga

SEQ ID NO: 2283229 - RNA, 19 nt, Artificial Sequence
  Description of Artificial Sequence: Synthetic oligonucleotide
  Antisense strand to SEQ ID NO: 2283228
ucacagaauauuuagucau

SEQ ID NO: 2283230 - RNA, 19 nt, Artificial Sequence
  Description of Artificial Sequence: Synthetic oligonucleotide
  Sense strand starting at position 3518 of SEQ ID NO: 1884673
acuaaauauucugugagua

SEQ ID NO: 2283231 - RNA, 19 nt, Artificial Sequence
  Description of Artificial Sequence: Synthetic oligonucleotide
  Antisense strand to SEQ ID NO: 2283230
uacucacagaauauuuagu

SEQ ID NO: 2283232 - RNA, 19 nt, Artificial Sequence
  Description of Artificial Sequence: Synthetic oligonucleotide
  Sense strand starting at position 3519 of SEQ ID NO: 1884673
cuaaauauucugugaguac

SEQ ID NO: 2283233 - RNA, 19 nt, Artificial Sequence
  Description of Artificial Sequence: Synthetic oligonucleotide
  Antisense strand to SEQ ID NO: 2283232
guacucacagaauauuuag

SEQ ID NO: 2283234 - RNA, 19 nt, Artificial Sequence
  Description of Artificial Sequence: Synthetic oligonucleotide
  Sense strand starting at position 3545 of SEQ ID NO: 1884673
cuggcuuuagaauguaaag

SEQ ID NO: 2283235 - RNA, 19 nt, Artificial Sequence
  Description of Artificial Sequence: Synthetic oligonucleotide
  Antisense strand to SEQ ID NO: 2283234
cuuuacauucuaaagccag

SEQ ID NO: 2283236 - RNA, 19 nt, Artificial Sequence
  Description of Artificial Sequence: Synthetic oligonucleotide
  Sense strand starting at position 3766 of SEQ ID NO: 1884673
gcaccugaggcaugagaau

SEQ ID NO: 2283237 - RNA, 19 nt, Artificial Sequence
  Description of Artificial Sequence: Synthetic oligonucleotide
  Antisense strand to SEQ ID NO: 2283236
auucucaugccucaggugc

SEQ ID NO: 2283238 - RNA, 19 nt, Artificial Sequence
  Description of Artificial Sequence: Synthetic oligonucleotide
  Sense strand starting at position 3903 of SEQ ID NO: 1884673
aucacuuuaaugugggaga

SEQ ID NO: 2283239 - RNA, 19 nt, Artificial Sequence
  Description of Artificial Sequence: Synthetic oligonucleotide
  Antisense strand to SEQ ID NO: 2283238
ucucccacauuaaagugau

SEQ ID NO: 2283240 - RNA, 19 nt, Artificial Sequence
  Description of Artificial Sequence: Synthetic oligonucleotide
  Sense strand starting at position 3905 of SEQ ID NO: 1884673
cacuuuaaugugggagacu

SEQ ID NO: 2283241 - RNA, 19 nt, Artificial Sequence
  Description of Artificial Sequence: Synthetic oligonucleotide
  Antisense strand to SEQ ID NO: 2283240
agucucccacauuaaagug

SEQ ID NO: 2283242 - RNA, 19 nt, Artificial Sequence
  Description of Artificial Sequence: Synthetic oligonucleotide
  Sense strand starting at position 219 of SEQ ID NO: 1884674
ccaguugauuugucucuua

SEQ ID NO: 2283243 - RNA, 19 nt, Artificial Sequence
  Description of Artificial Sequence: Synthetic oligonucleotide
  Antisense strand to SEQ ID NO: 2283242
uaagagacaaaucaacugg

SEQ ID NO: 2283244 - RNA, 19 nt, Artificial Sequence
  Description of Artificial Sequence: Synthetic oligonucleotide
  Sense strand starting at position 252 of SEQ ID NO: 1884674
guacucauuggagggaauu

SEQ ID NO: 2283245 - RNA, 19 nt, Artificial Sequence
  Description of Artificial Sequence: Synthetic oligonucleotide
  Antisense strand to SEQ ID NO: 2283244
aauucccuccaaugaguac

SEQ ID NO: 2283246 - RNA, 19 nt, Artificial Sequence
  Description of Artificial Sequence: Synthetic oligonucleotide
  Sense strand starting at position 773 of SEQ ID NO: 1884674
cuuucuugccauuagguga

SEQ ID NO: 2283247 - RNA, 19 nt, Artificial Sequence
  Description of Artificial Sequence: Synthetic oligonucleotide
  Antisense strand to SEQ ID NO: 2283246
ucaccuaauggcaagaaag

SEQ ID NO: 2283248 - RNA, 19 nt, Artificial Sequence
  Description of Artificial Sequence: Synthetic oligonucleotide
  Sense strand starting at position 920 of SEQ ID NO: 1884674
aguagauacuuugccuauu

SEQ ID NO: 2283249 - RNA, 19 nt, Artificial Sequence
  Description of Artificial Sequence: Synthetic oligonucleotide
  Antisense strand to SEQ ID NO: 2283248
aauaggcaaaguaucuacu

SEQ ID NO: 2283250 - RNA, 19 nt, Artificial Sequence
  Description of Artificial Sequence: Synthetic oligonucleotide
  Sense strand starting at position 921 of SEQ ID NO: 1884674
guagauacuuugccuauuu

SEQ ID NO: 2283251 - RNA, 19 nt, Artificial Sequence
  Description of Artificial Sequence: Synthetic oligonucleotide
  Antisense strand to SEQ ID NO: 2283250
aaauaggcaaaguaucuac

SEQ ID NO: 2283252 - RNA, 19 nt, Artificial Sequence
  Description of Artificial Sequence: Synthetic oligonucleotide
  Sense strand starting at position 1315 of SEQ ID NO: 1884674
gggucuaagguaggguuaa

SEQ ID NO: 2283253 - RNA, 19 nt, Artificial Sequence
  Description of Artificial Sequence: Synthetic oligonucleotide
  Antisense strand to SEQ ID NO: 2283252
uuaacccuaccuuagaccc

SEQ ID NO: 2283254 - RNA, 19 nt, Artificial Sequence
  Description of Artificial Sequence: Synthetic oligonucleotide
  Sense strand starting at position 1693 of SEQ ID NO: 1884674
auaaauuguuauucgagga

SEQ ID NO: 2283255 - RNA, 19 nt, Artificial Sequence
  Description of Artificial Sequence: Synthetic oligonucleotide
  Antisense strand to SEQ ID NO: 2283254
uccucgaauaacaauuuau

SEQ ID NO: 2283256 - RNA, 19 nt, Artificial Sequence
  Description of Artificial Sequence: Synthetic oligonucleotide
  Sense strand starting at position 1697 of SEQ ID NO: 1884674
auuguuauucgaggaauuc

SEQ ID NO: 2283257 - RNA, 19 nt, Artificial Sequence
  Description of Artificial Sequence: Synthetic oligonucleotide
  Antisense strand to SEQ ID NO: 2283256
gaauuccucgaauaacaau

SEQ ID NO: 2283258 - RNA, 19 nt, Artificial Sequence
  Description of Artificial Sequence: Synthetic oligonucleotide
  Sense strand starting at position 1698 of SEQ ID NO: 1884674
uuguuauucgaggaauucc

SEQ ID NO: 2283259 - RNA, 19 nt, Artificial Sequence
  Description of Artificial Sequence: Synthetic oligonucleotide
  Antisense strand to SEQ ID NO: 2283258
ggaauuccucgaauaacaa

SEQ ID NO: 2283260 - RNA, 19 nt, Artificial Sequence
  Description of Artificial Sequence: Synthetic oligonucleotide
  Sense strand starting at position 1792 of SEQ ID NO: 1884674
caaguuugcccugaagaag

SEQ ID NO: 2283261 - RNA, 19 nt, Artificial Sequence
  Description of Artificial Sequence: Synthetic oligonucleotide
  Antisense strand to SEQ ID NO: 2283260
cuucuucagggcaaacuug

SEQ ID NO: 2283262 - RNA, 19 nt, Artificial Sequence
  Description of Artificial Sequence: Synthetic oligonucleotide
  Sense strand starting at position 1844 of SEQ ID NO: 1884674
ggcaacaauccuggauuau

SEQ ID NO: 2283263 - RNA, 19 nt, Artificial Sequence
  Description of Artificial Sequence: Synthetic oligonucleotide
  Antisense strand to SEQ ID NO: 2283262
auaauccaggauuguugcc

SEQ ID NO: 2283264 - RNA, 19 nt, Artificial Sequence
  Description of Artificial Sequence: Synthetic oligonucleotide
  Sense strand starting at position 1845 of SEQ ID NO: 1884674
gcaacaauccuggauuauu

SEQ ID NO: 2283265 - RNA, 19 nt, Artificial Sequence
  Description of Artificial Sequence: Synthetic oligonucleotide
  Antisense strand to SEQ ID NO: 2283264
aauaauccaggauuguugc

SEQ ID NO: 2283266 - RNA, 19 nt, Artificial Sequence
  Description of Artificial Sequence: Synthetic oligonucleotide
  Sense strand starting at position 1897 of SEQ ID NO: 1884674
aaacauuaggagugcuaug

SEQ ID NO: 2283267 - RNA, 19 nt, Artificial Sequence
  Description of Artificial Sequence: Synthetic oligonucleotide
  Antisense strand to SEQ ID NO: 2283266
cauagcacuccuaauguuu

SEQ ID NO: 2283268 - RNA, 19 nt, Artificial Sequence
  Description of Artificial Sequence: Synthetic oligonucleotide
  Sense strand starting at position 1978 of SEQ ID NO: 1884674
auaagcccucuuugaaaug

SEQ ID NO: 2283269 - RNA, 19 nt, Artificial Sequence
  Description of Artificial Sequence: Synthetic oligonucleotide
  Antisense strand to SEQ ID NO: 2283268
cauuucaaagagggcuuau

SEQ ID NO: 2283270 - RNA, 19 nt, Artificial Sequence
  Description of Artificial Sequence: Synthetic oligonucleotide
  Sense strand starting at position 2130 of SEQ ID NO: 1884674
augaaugagucccuagaac

SEQ ID NO: 2283271 - RNA, 19 nt, Artificial Sequence
  Description of Artificial Sequence: Synthetic oligonucleotide
  Antisense strand to SEQ ID NO: 2283270
guucuagggacucauucau

SEQ ID NO: 2283272 - RNA, 19 nt, Artificial Sequence
  Description of Artificial Sequence: Synthetic oligonucleotide
  Sense strand starting at position 2142 of SEQ ID NO: 1884674
cuagaacgagccugaguua

SEQ ID NO: 2283273 - RNA, 19 nt, Artificial Sequence
  Description of Artificial Sequence: Synthetic oligonucleotide
  Antisense strand to SEQ ID NO: 2283272
uaacucaggcucguucuag

SEQ ID NO: 2283274 - RNA, 19 nt, Artificial Sequence
  Description of Artificial Sequence: Synthetic oligonucleotide
  Sense strand starting at position 2143 of SEQ ID NO: 1884674
uagaacgagccugaguuaa

SEQ ID NO: 2283275 - RNA, 19 nt, Artificial Sequence
  Description of Artificial Sequence: Synthetic oligonucleotide
  Antisense strand to SEQ ID NO: 2283274
uuaacucaggcucguucua

SEQ ID NO: 2283276 - RNA, 19 nt, Artificial Sequence
  Description of Artificial Sequence: Synthetic oligonucleotide
  Sense strand starting at position 2145 of SEQ ID NO: 1884674
gaacgagccugaguuaacu

SEQ ID NO: 2283277 - RNA, 19 nt, Artificial Sequence
  Description of Artificial Sequence: Synthetic oligonucleotide
  Antisense strand to SEQ ID NO: 2283276
aguuaacucaggcucguuc

SEQ ID NO: 2283278 - RNA, 19 nt, Artificial Sequence
  Description of Artificial Sequence: Synthetic oligonucleotide
  Sense strand starting at position 2166 of SEQ ID NO: 1884674
acuacaaacugcuugguua

SEQ ID NO: 2283279 - RNA, 19 nt, Artificial Sequence
  Description of Artificial Sequence: Synthetic oligonucleotide
  Antisense strand to SEQ ID NO: 2283278
uaaccaagcaguuuguagu

SEQ ID NO: 2283280 - RNA, 19 nt, Artificial Sequence
  Description of Artificial Sequence: Synthetic oligonucleotide
  Sense strand starting at position 2169 of SEQ ID NO: 1884674
acaaacugcuugguuauua

SEQ ID NO: 2283281 - RNA, 19 nt, Artificial Sequence
  Description of Artificial Sequence: Synthetic oligonucleotide
  Antisense strand to SEQ ID NO: 2283280
uaauaaccaagcaguuugu

SEQ ID NO: 2283282 - RNA, 19 nt, Artificial Sequence
  Description of Artificial Sequence: Synthetic oligonucleotide
  Sense strand starting at position 2399 of SEQ ID NO: 1884674
uggucauguccacagcaaa

SEQ ID NO: 2283283 - RNA, 19 nt, Artificial Sequence
  Description of Artificial Sequence: Synthetic oligonucleotide
  Antisense strand to SEQ ID NO: 2283282
uuugcuguggacaugacca

SEQ ID NO: 2283284 - RNA, 19 nt, Artificial Sequence
  Description of Artificial Sequence: Synthetic oligonucleotide
  Sense strand starting at position 2516 of SEQ ID NO: 1884674
ggcuucugucaucucguuu

SEQ ID NO: 2283285 - RNA, 19 nt, Artificial Sequence
  Description of Artificial Sequence: Synthetic oligonucleotide
  Antisense strand to SEQ ID NO: 2283284
aaacgagaugacagaagcc

SEQ ID NO: 2283286 - RNA, 19 nt, Artificial Sequence
  Description of Artificial Sequence: Synthetic oligonucleotide
  Sense strand starting at position 2649 of SEQ ID NO: 1884674
guuccaaaguauccugaaa

SEQ ID NO: 2283287 - RNA, 19 nt, Artificial Sequence
  Description of Artificial Sequence: Synthetic oligonucleotide
  Antisense strand to SEQ ID NO: 2283286
uuucaggauacuuuggaac

SEQ ID NO: 2283288 - RNA, 19 nt, Artificial Sequence
  Description of Artificial Sequence: Synthetic oligonucleotide
  Sense strand starting at position 2780 of SEQ ID NO: 1884674
augaucauguuucugguaa

SEQ ID NO: 2283289 - RNA, 19 nt, Artificial Sequence
  Description of Artificial Sequence: Synthetic oligonucleotide
  Antisense strand to SEQ ID NO: 2283288
uuaccagaaacaugaucau

SEQ ID NO: 2283290 - RNA, 19 nt, Artificial Sequence
  Description of Artificial Sequence: Synthetic oligonucleotide
  Sense strand starting at position 2980 of SEQ ID NO: 1884674
cuccuaaguggugauagau

SEQ ID NO: 2283291 - RNA, 19 nt, Artificial Sequence
  Description of Artificial Sequence: Synthetic oligonucleotide
  Antisense strand to SEQ ID NO: 2283290
aucuaucaccacuuaggag

SEQ ID NO: 2283292 - RNA, 19 nt, Artificial Sequence
  Description of Artificial Sequence: Synthetic oligonucleotide
  Sense strand starting at position 3005 of SEQ ID NO: 1884674
auagcauugcuagauaaau

SEQ ID NO: 2283293 - RNA, 19 nt, Artificial Sequence
  Description of Artificial Sequence: Synthetic oligonucleotide
  Antisense strand to SEQ ID NO: 2283292
auuuaucuagcaaugcuau

SEQ ID NO: 2283294 - RNA, 19 nt, Artificial Sequence
  Description of Artificial Sequence: Synthetic oligonucleotide
  Sense strand starting at position 3463 of SEQ ID NO: 1884674
agugcccauucucuagaau

SEQ ID NO: 2283295 - RNA, 19 nt, Artificial Sequence
  Description of Artificial Sequence: Synthetic oligonucleotide
  Antisense strand to SEQ ID NO: 2283294
auucuagagaaugggcacu

SEQ ID NO: 2283296 - RNA, 19 nt, Artificial Sequence
  Description of Artificial Sequence: Synthetic oligonucleotide
  Sense strand starting at position 3464 of SEQ ID NO: 1884674
gugcccauucucuagaaug

SEQ ID NO: 2283297 - RNA, 19 nt, Artificial Sequence
  Description of Artificial Sequence: Synthetic oligonucleotide
  Antisense strand to SEQ ID NO: 2283296
cauucuagagaaugggcac

SEQ ID NO: 2283298 - RNA, 19 nt, Artificial Sequence
  Description of Artificial Sequence: Synthetic oligonucleotide
  Sense strand starting at position 3466 of SEQ ID NO: 1884674
gcccauucucuagaaugag

SEQ ID NO: 2283299 - RNA, 19 nt, Artificial Sequence
  Description of Artificial Sequence: Synthetic oligonucleotide
  Antisense strand to SEQ ID NO: 2283298
cucauucuagagaaugggc

SEQ ID NO: 2283300 - RNA, 19 nt, Artificial Sequence
  Description of Artificial Sequence: Synthetic oligonucleotide
  Sense strand starting at position 3474 of SEQ ID NO: 1884674
ucuagaaugaggcauugua

SEQ ID NO: 2283301 - RNA, 19 nt, Artificial Sequence
  Description of Artificial Sequence: Synthetic oligonucleotide
  Antisense strand to SEQ ID NO: 2283300
uacaaugccucauucuaga

SEQ ID NO: 2283302 - RNA, 19 nt, Artificial Sequence
  Description of Artificial Sequence: Synthetic oligonucleotide
  Sense strand starting at position 3509 of SEQ ID NO: 1884674
aguaguguauuuguacgaa

SEQ ID NO: 2283303 - RNA, 19 nt, Artificial Sequence
  Description of Artificial Sequence: Synthetic oligonucleotide
  Antisense strand to SEQ ID NO: 2283302
uucguacaaauacacuacu

SEQ ID NO: 2283304 - RNA, 19 nt, Artificial Sequence
  Description of Artificial Sequence: Synthetic oligonucleotide
  Sense strand starting at position 3512 of SEQ ID NO: 1884674
aguguauuuguacgaaguu

SEQ ID NO: 2283305 - RNA, 19 nt, Artificial Sequence
  Description of Artificial Sequence: Synthetic oligonucleotide
  Antisense strand to SEQ ID NO: 2283304
aacuucguacaaauacacu

SEQ ID NO: 2283306 - RNA, 19 nt, Artificial Sequence
  Description of Artificial Sequence: Synthetic oligonucleotide
  Sense strand starting at position 3618 of SEQ ID NO: 1884674
ggaucuaccugguucucaa

SEQ ID NO: 2283307 - RNA, 19 nt, Artificial Sequence
  Description of Artificial Sequence: Synthetic oligonucleotide
  Antisense strand to SEQ ID NO: 2283306
uugagaaccagguagaucc

SEQ ID NO: 2283308 - RNA, 19 nt, Artificial Sequence
  Description of Artificial Sequence: Synthetic oligonucleotide
  Sense strand starting at position 3725 of SEQ ID NO: 1884674
guagaaauaccagguuuaa

SEQ ID NO: 2283309 - RNA, 19 nt, Artificial Sequence
  Description of Artificial Sequence: Synthetic oligonucleotide
  Antisense strand to SEQ ID NO: 2283308
uuaaaccugguauuucuac

SEQ ID NO: 2283310 - RNA, 19 nt, Artificial Sequence
  Description of Artificial Sequence: Synthetic oligonucleotide
  Sense strand starting at position 3849 of SEQ ID NO: 1884674
gugcaauuaugacugaacu

SEQ ID NO: 2283311 - RNA, 19 nt, Artificial Sequence
  Description of Artificial Sequence: Synthetic oligonucleotide
  Antisense strand to SEQ ID NO: 2283310
aguucagucauaauugcac

SEQ ID NO: 2283312 - RNA, 19 nt, Artificial Sequence
  Description of Artificial Sequence: Synthetic oligonucleotide
  Sense strand starting at position 3850 of SEQ ID NO: 1884674
ugcaauuaugacugaacug

SEQ ID NO: 2283313 - RNA, 19 nt, Artificial Sequence
  Description of Artificial Sequence: Synthetic oligonucleotide
  Antisense strand to SEQ ID NO: 2283312
caguucagucauaauugca

SEQ ID NO: 2283314 - RNA, 19 nt, Artificial Sequence
  Description of Artificial Sequence: Synthetic oligonucleotide
  Sense strand starting at position 3888 of SEQ ID NO: 1884674
uuugcaauauugcugagaa

SEQ ID NO: 2283315 - RNA, 19 nt, Artificial Sequence
  Description of Artificial Sequence: Synthetic oligonucleotide
  Antisense strand to SEQ ID NO: 2283314
uucucagcaauauugcaaa

SEQ ID NO: 2283316 - RNA, 19 nt, Artificial Sequence
  Description of Artificial Sequence: Synthetic oligonucleotide
  Sense strand starting at position 3890 of SEQ ID NO: 1884674
ugcaauauugcugagaaau

SEQ ID NO: 2283317 - RNA, 19 nt, Artificial Sequence
  Description of Artificial Sequence: Synthetic oligonucleotide
  Antisense strand to SEQ ID NO: 2283316
auuucucagcaauauugca

SEQ ID NO: 2283318 - RNA, 19 nt, Artificial Sequence
  Description of Artificial Sequence: Synthetic oligonucleotide
  Sense strand starting at position 3962 of SEQ ID NO: 1884674
uccuaauugucacuguaau

SEQ ID NO: 2283319 - RNA, 19 nt, Artificial Sequence
  Description of Artificial Sequence: Synthetic oligonucleotide
  Antisense strand to SEQ ID NO: 2283318
auuacagugacaauuagga

SEQ ID NO: 2283320 - RNA, 19 nt, Artificial Sequence
  Description of Artificial Sequence: Synthetic oligonucleotide
  Sense strand starting at position 3963 of SEQ ID NO: 1884674
ccuaauugucacuguaaua

SEQ ID NO: 2283321 - RNA, 19 nt, Artificial Sequence
  Description of Artificial Sequence: Synthetic oligonucleotide
  Antisense strand to SEQ ID NO: 2283320
uauuacagugacaauuagg

SEQ ID NO: 2283322 - RNA, 19 nt, Artificial Sequence
  Description of Artificial Sequence: Synthetic oligonucleotide
  Sense strand starting at position 320 of SEQ ID NO: 1884675
cuuucuugccauuagguga

SEQ ID NO: 2283323 - RNA, 19 nt, Artificial Sequence
  Description of Artificial Sequence: Synthetic oligonucleotide
  Antisense strand to SEQ ID NO: 2283322
ucaccuaauggcaagaaag

SEQ ID NO: 2283324 - RNA, 19 nt, Artificial Sequence
  Description of Artificial Sequence: Synthetic oligonucleotide
  Sense strand starting at position 468 of SEQ ID NO: 1884675
guagauacuuugccuauuu

SEQ ID NO: 2283325 - RNA, 19 nt, Artificial Sequence
  Description of Artificial Sequence: Synthetic oligonucleotide
  Antisense strand to SEQ ID NO: 2283324
aaauaggcaaaguaucuac

SEQ ID NO: 2283326 - RNA, 19 nt, Artificial Sequence
  Description of Artificial Sequence: Synthetic oligonucleotide
  Sense strand starting at position 862 of SEQ ID NO: 1884675
gggucuaagguaggguuaa

SEQ ID NO: 2283327 - RNA, 19 nt, Artificial Sequence
  Description of Artificial Sequence: Synthetic oligonucleotide
  Antisense strand to SEQ ID NO: 2283326
uuaacccuaccuuagaccc

SEQ ID NO: 2283328 - RNA, 19 nt, Artificial Sequence
  Description of Artificial Sequence: Synthetic oligonucleotide
  Sense strand starting at position 1240 of SEQ ID NO: 1884675
auaaauuguuauucgagga

SEQ ID NO: 2283329 - RNA, 19 nt, Artificial Sequence
  Description of Artificial Sequence: Synthetic oligonucleotide
  Antisense strand to SEQ ID NO: 2283328
uccucgaauaacaauuuau

SEQ ID NO: 2283330 - RNA, 19 nt, Artificial Sequence
  Description of Artificial Sequence: Synthetic oligonucleotide
  Sense strand starting at position 1244 of SEQ ID NO: 1884675
auuguuauucgaggaauuc

SEQ ID NO: 2283331 - RNA, 19 nt, Artificial Sequence
  Description of Artificial Sequence: Synthetic oligonucleotide
  Antisense strand to SEQ ID NO: 2283330
gaauuccucgaauaacaau

SEQ ID NO: 2283332 - RNA, 19 nt, Artificial Sequence
  Description of Artificial Sequence: Synthetic oligonucleotide
  Sense strand starting at position 1245 of SEQ ID NO: 1884675
uuguuauucgaggaauucc

SEQ ID NO: 2283333 - RNA, 19 nt, Artificial Sequence
  Description of Artificial Sequence: Synthetic oligonucleotide
  Antisense strand to SEQ ID NO: 2283332
ggaauuccucgaauaacaa

SEQ ID NO: 2283334 - RNA, 19 nt, Artificial Sequence
  Description of Artificial Sequence: Synthetic oligonucleotide
  Sense strand starting at position 1339 of SEQ ID NO: 1884675
caaguuugcccugaagaag

SEQ ID NO: 2283335 - RNA, 19 nt, Artificial Sequence
  Description of Artificial Sequence: Synthetic oligonucleotide
  Antisense strand to SEQ ID NO: 2283334
cuucuucagggcaaacuug

SEQ ID NO: 2283336 - RNA, 19 nt, Artificial Sequence
  Description of Artificial Sequence: Synthetic oligonucleotide
  Sense strand starting at position 1391 of SEQ ID NO: 1884675
ggcaacaauccuggauuau

SEQ ID NO: 2283337 - RNA, 19 nt, Artificial Sequence
  Description of Artificial Sequence: Synthetic oligonucleotide
  Antisense strand to SEQ ID NO: 2283336
auaauccaggauuguugcc

SEQ ID NO: 2283338 - RNA, 19 nt, Artificial Sequence
  Description of Artificial Sequence: Synthetic oligonucleotide
  Sense strand starting at position 1392 of SEQ ID NO: 1884675
gcaacaauccuggauuauu

SEQ ID NO: 2283339 - RNA, 19 nt, Artificial Sequence
  Description of Artificial Sequence: Synthetic oligonucleotide
  Antisense strand to SEQ ID NO: 2283338
aauaauccaggauuguugc

SEQ ID NO: 2283340 - RNA, 19 nt, Artificial Sequence
  Description of Artificial Sequence: Synthetic oligonucleotide
  Sense strand starting at position 1444 of SEQ ID NO: 1884675
aaacauuaggagugcuaug

SEQ ID NO: 2283341 - RNA, 19 nt, Artificial Sequence
  Description of Artificial Sequence: Synthetic oligonucleotide
  Antisense strand to SEQ ID NO: 2283340
cauagcacuccuaauguuu

SEQ ID NO: 2283342 - RNA, 19 nt, Artificial Sequence
  Description of Artificial Sequence: Synthetic oligonucleotide
  Sense strand starting at position 1525 of SEQ ID NO: 1884675
auaagcccucuuugaaaug

SEQ ID NO: 2283343 - RNA, 19 nt, Artificial Sequence
  Description of Artificial Sequence: Synthetic oligonucleotide
  Antisense strand to SEQ ID NO: 2283342
cauuucaaagagggcuuau

SEQ ID NO: 2283344 - RNA, 19 nt, Artificial Sequence
  Description of Artificial Sequence: Synthetic oligonucleotide
  Sense strand starting at position 1677 of SEQ ID NO: 1884675
augaaugagucccuagaac

SEQ ID NO: 2283345 - RNA, 19 nt, Artificial Sequence
  Description of Artificial Sequence: Synthetic oligonucleotide
  Antisense strand to SEQ ID NO: 2283344
guucuagggacucauucau

SEQ ID NO: 2283346 - RNA, 19 nt, Artificial Sequence
  Description of Artificial Sequence: Synthetic oligonucleotide
  Sense strand starting at position 1690 of SEQ ID NO: 1884675
uagaacgagccugaguuaa

SEQ ID NO: 2283347 - RNA, 19 nt, Artificial Sequence
  Description of Artificial Sequence: Synthetic oligonucleotide
  Antisense strand to SEQ ID NO: 2283346
uuaacucaggcucguucua

SEQ ID NO: 2283348 - RNA, 19 nt, Artificial Sequence
  Description of Artificial Sequence: Synthetic oligonucleotide
  Sense strand starting at position 1716 of SEQ ID NO: 1884675
acaaacugcuugguuauua

SEQ ID NO: 2283349 - RNA, 19 nt, Artificial Sequence
  Description of Artificial Sequence: Synthetic oligonucleotide
  Antisense strand to SEQ ID NO: 2283348
uaauaaccaagcaguuugu

SEQ ID NO: 2283350 - RNA, 19 nt, Artificial Sequence
  Description of Artificial Sequence: Synthetic oligonucleotide
  Sense strand starting at position 1946 of SEQ ID NO: 1884675
uggucauguccacagcaaa

SEQ ID NO: 2283351 - RNA, 19 nt, Artificial Sequence
  Description of Artificial Sequence: Synthetic oligonucleotide
  Antisense strand to SEQ ID NO: 2283350
uuugcuguggacaugacca

SEQ ID NO: 2283352 - RNA, 19 nt, Artificial Sequence
  Description of Artificial Sequence: Synthetic oligonucleotide
  Sense strand starting at position 2063 of SEQ ID NO: 1884675
ggcuucugucaucucguuu

SEQ ID NO: 2283353 - RNA, 19 nt, Artificial Sequence
  Description of Artificial Sequence: Synthetic oligonucleotide
  Antisense strand to SEQ ID NO: 2283352
aaacgagaugacagaagcc

SEQ ID NO: 2283354 - RNA, 19 nt, Artificial Sequence
  Description of Artificial Sequence: Synthetic oligonucleotide
  Sense strand starting at position 2196 of SEQ ID NO: 1884675
guuccaaaguauccugaaa

SEQ ID NO: 2283355 - RNA, 19 nt, Artificial Sequence
  Description of Artificial Sequence: Synthetic oligonucleotide
  Antisense strand to SEQ ID NO: 2283354
uuucaggauacuuuggaac

SEQ ID NO: 2283356 - RNA, 19 nt, Artificial Sequence
  Description of Artificial Sequence: Synthetic oligonucleotide
  Sense strand starting at position 2327 of SEQ ID NO: 1884675
augaucauguuucugguaa

SEQ ID NO: 2283357 - RNA, 19 nt, Artificial Sequence
  Description of Artificial Sequence: Synthetic oligonucleotide
  Antisense strand to SEQ ID NO: 2283356
uuaccagaaacaugaucau

SEQ ID NO: 2283358 - RNA, 19 nt, Artificial Sequence
  Description of Artificial Sequence: Synthetic oligonucleotide
  Sense strand starting at position 2527 of SEQ ID NO: 1884675
cuccuaaguggugauagau

SEQ ID NO: 2283359 - RNA, 19 nt, Artificial Sequence
  Description of Artificial Sequence: Synthetic oligonucleotide
  Antisense strand to SEQ ID NO: 2283358
aucuaucaccacuuaggag

SEQ ID NO: 2283360 - RNA, 19 nt, Artificial Sequence
  Description of Artificial Sequence: Synthetic oligonucleotide
  Sense strand starting at position 2552 of SEQ ID NO: 1884675
auagcauugcuagauaaau

SEQ ID NO: 2283361 - RNA, 19 nt, Artificial Sequence
  Description of Artificial Sequence: Synthetic oligonucleotide
  Antisense strand to SEQ ID NO: 2283360
auuuaucuagcaaugcuau

SEQ ID NO: 2283362 - RNA, 19 nt, Artificial Sequence
  Description of Artificial Sequence: Synthetic oligonucleotide
  Sense strand starting at position 3011 of SEQ ID NO: 1884675
gugcccauucucuagaaug

SEQ ID NO: 2283363 - RNA, 19 nt, Artificial Sequence
  Description of Artificial Sequence: Synthetic oligonucleotide
  Antisense strand to SEQ ID NO: 2283362
cauucuagagaaugggcac

SEQ ID NO: 2283364 - RNA, 19 nt, Artificial Sequence
  Description of Artificial Sequence: Synthetic oligonucleotide
  Sense strand starting at position 3013 of SEQ ID NO: 1884675
gcccauucucuagaaugag

SEQ ID NO: 2283365 - RNA, 19 nt, Artificial Sequence
  Description of Artificial Sequence: Synthetic oligonucleotide
  Antisense strand to SEQ ID NO: 2283364
cucauucuagagaaugggc

SEQ ID NO: 2283366 - RNA, 19 nt, Artificial Sequence
  Description of Artificial Sequence: Synthetic oligonucleotide
  Sense strand starting at position 3021 of SEQ ID NO: 1884675
ucuagaaugaggcauugua

SEQ ID NO: 2283367 - RNA, 19 nt, Artificial Sequence
  Description of Artificial Sequence: Synthetic oligonucleotide
  Antisense strand to SEQ ID NO: 2283366
uacaaugccucauucuaga

SEQ ID NO: 2283368 - RNA, 19 nt, Artificial Sequence
  Description of Artificial Sequence: Synthetic oligonucleotide
  Sense strand starting at position 3056 of SEQ ID NO: 1884675
aguaguguauuuguacgaa

SEQ ID NO: 2283369 - RNA, 19 nt, Artificial Sequence
  Description of Artificial Sequence: Synthetic oligonucleotide
  Antisense strand to SEQ ID NO: 2283368
uucguacaaauacacuacu

SEQ ID NO: 2283370 - RNA, 19 nt, Artificial Sequence
  Description of Artificial Sequence: Synthetic oligonucleotide
  Sense strand starting at position 3059 of SEQ ID NO: 1884675
aguguauuuguacgaaguu

SEQ ID NO: 2283371 - RNA, 19 nt, Artificial Sequence
  Description of Artificial Sequence: Synthetic oligonucleotide
  Antisense strand to SEQ ID NO: 2283370
aacuucguacaaauacacu

SEQ ID NO: 2283372 - RNA, 19 nt, Artificial Sequence
  Description of Artificial Sequence: Synthetic oligonucleotide
  Sense strand starting at position 3165 of SEQ ID NO: 1884675
ggaucuaccugguucucaa

SEQ ID NO: 2283373 - RNA, 19 nt, Artificial Sequence
  Description of Artificial Sequence: Synthetic oligonucleotide
  Antisense strand to SEQ ID NO: 2283372
uugagaaccagguagaucc

SEQ ID NO: 2283374 - RNA, 19 nt, Artificial Sequence
  Description of Artificial Sequence: Synthetic oligonucleotide
  Sense strand starting at position 3272 of SEQ ID NO: 1884675
guagaaauaccagguuuaa

SEQ ID NO: 2283375 - RNA, 19 nt, Artificial Sequence
  Description of Artificial Sequence: Synthetic oligonucleotide
  Antisense strand to SEQ ID NO: 2283374
uuaaaccugguauuucuac

SEQ ID NO: 2283376 - RNA, 19 nt, Artificial Sequence
  Description of Artificial Sequence: Synthetic oligonucleotide
  Sense strand starting at position 3396 of SEQ ID NO: 1884675
gugcaauuaugacugaacu

SEQ ID NO: 2283377 - RNA, 19 nt, Artificial Sequence
  Description of Artificial Sequence: Synthetic oligonucleotide
  Antisense strand to SEQ ID NO: 2283376
aguucagucauaauugcac

SEQ ID NO: 2283378 - RNA, 19 nt, Artificial Sequence
  Description of Artificial Sequence: Synthetic oligonucleotide
  Sense strand starting at position 3397 of SEQ ID NO: 1884675
ugcaauuaugacugaacug

SEQ ID NO: 2283379 - RNA, 19 nt, Artificial Sequence
  Description of Artificial Sequence: Synthetic oligonucleotide
  Antisense strand to SEQ ID NO: 2283378
caguucagucauaauugca

SEQ ID NO: 2283380 - RNA, 19 nt, Artificial Sequence
  Description of Artificial Sequence: Synthetic oligonucleotide
  Sense strand starting at position 3437 of SEQ ID NO: 1884675
ugcaauauugcugagaaau

SEQ ID NO: 2283381 - RNA, 19 nt, Artificial Sequence
  Description of Artificial Sequence: Synthetic oligonucleotide
  Antisense strand to SEQ ID NO: 2283380
auuucucagcaauauugca

SEQ ID NO: 2283382 - RNA, 19 nt, Artificial Sequence
  Description of Artificial Sequence: Synthetic oligonucleotide
  Sense strand starting at position 3734 of SEQ ID NO: 1884675
acagguuuacgugacuuua

SEQ ID NO: 2283383 - RNA, 19 nt, Artificial Sequence
  Description of Artificial Sequence: Synthetic oligonucleotide
  Antisense strand to SEQ ID NO: 2283382
uaaagucacguaaaccugu

SEQ ID NO: 2283384 - RNA, 19 nt, Artificial Sequence
  Description of Artificial Sequence: Synthetic oligonucleotide
  Sense strand starting at position 3753 of SEQ ID NO: 1884675
ggaugaaauauguguaacu

SEQ ID NO: 2283385 - RNA, 19 nt, Artificial Sequence
  Description of Artificial Sequence: Synthetic oligonucleotide
  Antisense strand to SEQ ID NO: 2283384
aguuacacauauuucaucc

SEQ ID NO: 2283386 - RNA, 19 nt, Artificial Sequence
  Description of Artificial Sequence: Synthetic oligonucleotide
  Sense strand starting at position 3754 of SEQ ID NO: 1884675
gaugaaauauguguaacug

SEQ ID NO: 2283387 - RNA, 19 nt, Artificial Sequence
  Description of Artificial Sequence: Synthetic oligonucleotide
  Antisense strand to SEQ ID NO: 2283386
caguuacacauauuucauc

SEQ ID NO: 2283388 - RNA, 19 nt, Artificial Sequence
  Description of Artificial Sequence: Synthetic oligonucleotide
  Sense strand starting at position 3770 of SEQ ID NO: 1884675
cugccaguugaauaaugau

SEQ ID NO: 2283389 - RNA, 19 nt, Artificial Sequence
  Description of Artificial Sequence: Synthetic oligonucleotide
  Antisense strand to SEQ ID NO: 2283388
aucauuauucaacuggcag

SEQ ID NO: 2283390 - RNA, 19 nt, Artificial Sequence
  Description of Artificial Sequence: Synthetic oligonucleotide
  Sense strand starting at position 3900 of SEQ ID NO: 1884675
uguguuauaccugaaauac

SEQ ID NO: 2283391 - RNA, 19 nt, Artificial Sequence
  Description of Artificial Sequence: Synthetic oligonucleotide
  Antisense strand to SEQ ID NO: 2283390
guauuucagguauaacaca

SEQ ID NO: 2283392 - RNA, 19 nt, Artificial Sequence
  Description of Artificial Sequence: Synthetic oligonucleotide
  Sense strand starting at position 3909 of SEQ ID NO: 1884675
ccugaaauacugggauggu

SEQ ID NO: 2283393 - RNA, 19 nt, Artificial Sequence
  Description of Artificial Sequence: Synthetic oligonucleotide
  Antisense strand to SEQ ID NO: 2283392
accaucccaguauuucagg

SEQ ID NO: 2283394 - RNA, 19 nt, Artificial Sequence
  Description of Artificial Sequence: Synthetic oligonucleotide
  Sense strand starting at position 3912 of SEQ ID NO: 1884675
gaaauacugggauggugua

SEQ ID NO: 2283395 - RNA, 19 nt, Artificial Sequence
  Description of Artificial Sequence: Synthetic oligonucleotide
  Antisense strand to SEQ ID NO: 2283394
uacaccaucccaguauuuc

SEQ ID NO: 2283396 - RNA, 19 nt, Artificial Sequence
  Description of Artificial Sequence: Synthetic oligonucleotide
  Sense strand starting at position 3949 of SEQ ID NO: 1884675
uugaguccuugauuauuau

SEQ ID NO: 2283397 - RNA, 19 nt, Artificial Sequence
  Description of Artificial Sequence: Synthetic oligonucleotide
  Antisense strand to SEQ ID NO: 2283396
auaauaaucaaggacucaa

SEQ ID NO: 2283398 - RNA, 19 nt, Artificial Sequence
  Description of Artificial Sequence: Synthetic oligonucleotide
  Sense strand starting at position 3950 of SEQ ID NO: 1884675
ugaguccuugauuauuaua

SEQ ID NO: 2283399 - RNA, 19 nt, Artificial Sequence
  Description of Artificial Sequence: Synthetic oligonucleotide
  Antisense strand to SEQ ID NO: 2283398
uauaauaaucaaggacuca

SEQ ID NO: 2283400 - RNA, 19 nt, Artificial Sequence
  Description of Artificial Sequence: Synthetic oligonucleotide
  Sense strand starting at position 3952 of SEQ ID NO: 1884675
aguccuugauuauuauaag

SEQ ID NO: 2283401 - RNA, 19 nt, Artificial Sequence
  Description of Artificial Sequence: Synthetic oligonucleotide
  Antisense strand to SEQ ID NO: 2283400
cuuauaauaaucaaggacu

SEQ ID NO: 2283402 - RNA, 19 nt, Artificial Sequence
  Description of Artificial Sequence: Synthetic oligonucleotide
  Sense strand starting at position 118 of SEQ ID NO: 1884676
gcgaucacucaagaauggu

SEQ ID NO: 2283403 - RNA, 19 nt, Artificial Sequence
  Description of Artificial Sequence: Synthetic oligonucleotide
  Antisense strand to SEQ ID NO: 2283402
accauucuugagugaucgc

SEQ ID NO: 2283404 - RNA, 19 nt, Artificial Sequence
  Description of Artificial Sequence: Synthetic oligonucleotide
  Sense strand starting at position 134 of SEQ ID NO: 1884676
gguacagauguguggagua

SEQ ID NO: 2283405 - RNA, 19 nt, Artificial Sequence
  Description of Artificial Sequence: Synthetic oligonucleotide
  Antisense strand to SEQ ID NO: 2283404
uacuccacacaucuguacc

SEQ ID NO: 2283406 - RNA, 19 nt, Artificial Sequence
  Description of Artificial Sequence: Synthetic oligonucleotide
  Sense strand starting at position 147 of SEQ ID NO: 1884676
ggaguaugccaauaccuaa

SEQ ID NO: 2283407 - RNA, 19 nt, Artificial Sequence
  Description of Artificial Sequence: Synthetic oligonucleotide
  Antisense strand to SEQ ID NO: 2283406
uuagguauuggcauacucc

SEQ ID NO: 2283408 - RNA, 19 nt, Artificial Sequence
  Description of Artificial Sequence: Synthetic oligonucleotide
  Sense strand starting at position 172 of SEQ ID NO: 1884676
aaaguagauuaucugguuu

SEQ ID NO: 2283409 - RNA, 19 nt, Artificial Sequence
  Description of Artificial Sequence: Synthetic oligonucleotide
  Antisense strand to SEQ ID NO: 2283408
aaaccagauaaucuacuuu

SEQ ID NO: 2283410 - RNA, 19 nt, Artificial Sequence
  Description of Artificial Sequence: Synthetic oligonucleotide
  Sense strand starting at position 261 of SEQ ID NO: 1884676
acaauaguccugugaguaa

SEQ ID NO: 2283411 - RNA, 19 nt, Artificial Sequence
  Description of Artificial Sequence: Synthetic oligonucleotide
  Antisense strand to SEQ ID NO: 2283410
uuacucacaggacuauugu

SEQ ID NO: 2283412 - RNA, 19 nt, Artificial Sequence
  Description of Artificial Sequence: Synthetic oligonucleotide
  Sense strand starting at position 264 of SEQ ID NO: 1884676
auaguccugugaguaaagu

SEQ ID NO: 2283413 - RNA, 19 nt, Artificial Sequence
  Description of Artificial Sequence: Synthetic oligonucleotide
  Antisense strand to SEQ ID NO: 2283412
acuuuacucacaggacuau

SEQ ID NO: 2283414 - RNA, 19 nt, Artificial Sequence
  Description of Artificial Sequence: Synthetic oligonucleotide
  Sense strand starting at position 265 of SEQ ID NO: 1884676
uaguccugugaguaaagua

SEQ ID NO: 2283415 - RNA, 19 nt, Artificial Sequence
  Description of Artificial Sequence: Synthetic oligonucleotide
  Antisense strand to SEQ ID NO: 2283414
uacuuuacucacaggacua

SEQ ID NO: 2283416 - RNA, 19 nt, Artificial Sequence
  Description of Artificial Sequence: Synthetic oligonucleotide
  Sense strand starting at position 427 of SEQ ID NO: 1884676
gugauucuugcugaaucac

SEQ ID NO: 2283417 - RNA, 19 nt, Artificial Sequence
  Description of Artificial Sequence: Synthetic oligonucleotide
  Antisense strand to SEQ ID NO: 2283416
gugauucagcaagaaucac

SEQ ID NO: 2283418 - RNA, 19 nt, Artificial Sequence
  Description of Artificial Sequence: Synthetic oligonucleotide
  Sense strand starting at position 625 of SEQ ID NO: 1884676
gaaagaaauuaugagcaga

SEQ ID NO: 2283419 - RNA, 19 nt, Artificial Sequence
  Description of Artificial Sequence: Synthetic oligonucleotide
  Antisense strand to SEQ ID NO: 2283418
ucugcucauaauuucuuuc

SEQ ID NO: 2283420 - RNA, 19 nt, Artificial Sequence
  Description of Artificial Sequence: Synthetic oligonucleotide
  Sense strand starting at position 829 of SEQ ID NO: 1884676
gucuaacuguuguuaugaa

SEQ ID NO: 2283421 - RNA, 19 nt, Artificial Sequence
  Description of Artificial Sequence: Synthetic oligonucleotide
  Antisense strand to SEQ ID NO: 2283420
uucauaacaacaguuagac

SEQ ID NO: 2283422 - RNA, 19 nt, Artificial Sequence
  Description of Artificial Sequence: Synthetic oligonucleotide
  Sense strand starting at position 947 of SEQ ID NO: 1884676
ggaauauaaugugccugua

SEQ ID NO: 2283423 - RNA, 19 nt, Artificial Sequence
  Description of Artificial Sequence: Synthetic oligonucleotide
  Antisense strand to SEQ ID NO: 2283422
uacaggcacauuauauucc

SEQ ID NO: 2283424 - RNA, 19 nt, Artificial Sequence
  Description of Artificial Sequence: Synthetic oligonucleotide
  Sense strand starting at position 949 of SEQ ID NO: 1884676
aauauaaugugccuguaag

SEQ ID NO: 2283425 - RNA, 19 nt, Artificial Sequence
  Description of Artificial Sequence: Synthetic oligonucleotide
  Antisense strand to SEQ ID NO: 2283424
cuuacaggcacauuauauu

SEQ ID NO: 2283426 - RNA, 19 nt, Artificial Sequence
  Description of Artificial Sequence: Synthetic oligonucleotide
  Sense strand starting at position 971 of SEQ ID NO: 1884676
cgacuuuggcauuauauaa

SEQ ID NO: 2283427 - RNA, 19 nt, Artificial Sequence
  Description of Artificial Sequence: Synthetic oligonucleotide
  Antisense strand to SEQ ID NO: 2283426
uuauauaaugccaaagucg

SEQ ID NO: 2283428 - RNA, 19 nt, Artificial Sequence
  Description of Artificial Sequence: Synthetic oligonucleotide
  Sense strand starting at position 1027 of SEQ ID NO: 1884676
ucuuaugaccuguguaauc

SEQ ID NO: 2283429 - RNA, 19 nt, Artificial Sequence
  Description of Artificial Sequence: Synthetic oligonucleotide
  Antisense strand to SEQ ID NO: 2283428
gauuacacaggucauaaga

SEQ ID NO: 2283430 - RNA, 19 nt, Artificial Sequence
  Description of Artificial Sequence: Synthetic oligonucleotide
  Sense strand starting at position 1029 of SEQ ID NO: 1884676
uuaugaccuguguaaucau

SEQ ID NO: 2283431 - RNA, 19 nt, Artificial Sequence
  Description of Artificial Sequence: Synthetic oligonucleotide
  Antisense strand to SEQ ID NO: 2283430
augauuacacaggucauaa

SEQ ID NO: 2283432 - RNA, 19 nt, Artificial Sequence
  Description of Artificial Sequence: Synthetic oligonucleotide
  Sense strand starting at position 1293 of SEQ ID NO: 1884676
guagaaaugucccugaaua

SEQ ID NO: 2283433 - RNA, 19 nt, Artificial Sequence
  Description of Artificial Sequence: Synthetic oligonucleotide
  Antisense strand to SEQ ID NO: 2283432
uauucagggacauuucuac

SEQ ID NO: 2283434 - RNA, 19 nt, Artificial Sequence
  Description of Artificial Sequence: Synthetic oligonucleotide
  Sense strand starting at position 1315 of SEQ ID NO: 1884676
ugaaacuugcucugacaac

SEQ ID NO: 2283435 - RNA, 19 nt, Artificial Sequence
  Description of Artificial Sequence: Synthetic oligonucleotide
  Antisense strand to SEQ ID NO: 2283434
guugucagagcaaguuuca

SEQ ID NO: 2283436 - RNA, 19 nt, Artificial Sequence
  Description of Artificial Sequence: Synthetic oligonucleotide
  Sense strand starting at position 1443 of SEQ ID NO: 1884676
uuguguauaucaucaacau

SEQ ID NO: 2283437 - RNA, 19 nt, Artificial Sequence
  Description of Artificial Sequence: Synthetic oligonucleotide
  Antisense strand to SEQ ID NO: 2283436
auguugaugauauacacaa

SEQ ID NO: 2283438 - RNA, 19 nt, Artificial Sequence
  Description of Artificial Sequence: Synthetic oligonucleotide
  Sense strand starting at position 1444 of SEQ ID NO: 1884676
uguguauaucaucaacaug

SEQ ID NO: 2283439 - RNA, 19 nt, Artificial Sequence
  Description of Artificial Sequence: Synthetic oligonucleotide
  Antisense strand to SEQ ID NO: 2283438
cauguugaugauauacaca

SEQ ID NO: 2283440 - RNA, 19 nt, Artificial Sequence
  Description of Artificial Sequence: Synthetic oligonucleotide
  Sense strand starting at position 1506 of SEQ ID NO: 1884676
ucccaugcuguuuaucuau

SEQ ID NO: 2283441 - RNA, 19 nt, Artificial Sequence
  Description of Artificial Sequence: Synthetic oligonucleotide
  Antisense strand to SEQ ID NO: 2283440
auagauaaacagcauggga

SEQ ID NO: 2283442 - RNA, 19 nt, Artificial Sequence
  Description of Artificial Sequence: Synthetic oligonucleotide
  Sense strand starting at position 1513 of SEQ ID NO: 1884676
cuguuuaucuauucuacag

SEQ ID NO: 2283443 - RNA, 19 nt, Artificial Sequence
  Description of Artificial Sequence: Synthetic oligonucleotide
  Antisense strand to SEQ ID NO: 2283442
cuguagaauagauaaacag

SEQ ID NO: 2283444 - RNA, 19 nt, Artificial Sequence
  Description of Artificial Sequence: Synthetic oligonucleotide
  Sense strand starting at position 1710 of SEQ ID NO: 1884676
ggagauguguuucuuacuu

SEQ ID NO: 2283445 - RNA, 19 nt, Artificial Sequence
  Description of Artificial Sequence: Synthetic oligonucleotide
  Antisense strand to SEQ ID NO: 2283444
aaguaagaaacacaucucc

SEQ ID NO: 2283446 - RNA, 19 nt, Artificial Sequence
  Description of Artificial Sequence: Synthetic oligonucleotide
  Sense strand starting at position 1965 of SEQ ID NO: 1884676
cuuuguccacguuaaacaa

SEQ ID NO: 2283447 - RNA, 19 nt, Artificial Sequence
  Description of Artificial Sequence: Synthetic oligonucleotide
  Antisense strand to SEQ ID NO: 2283446
uuguuuaacguggacaaag

SEQ ID NO: 2283448 - RNA, 19 nt, Artificial Sequence
  Description of Artificial Sequence: Synthetic oligonucleotide
  Sense strand starting at position 2034 of SEQ ID NO: 1884676
cucuaucguggugaucaaa

SEQ ID NO: 2283449 - RNA, 19 nt, Artificial Sequence
  Description of Artificial Sequence: Synthetic oligonucleotide
  Antisense strand to SEQ ID NO: 2283448
uuugaucaccacgauagag

SEQ ID NO: 2283450 - RNA, 19 nt, Artificial Sequence
  Description of Artificial Sequence: Synthetic oligonucleotide
  Sense strand starting at position 2509 of SEQ ID NO: 1884676
acuugucauggcugaacaa

SEQ ID NO: 2283451 - RNA, 19 nt, Artificial Sequence
  Description of Artificial Sequence: Synthetic oligonucleotide
  Antisense strand to SEQ ID NO: 2283450
uuguucagccaugacaagu

SEQ ID NO: 2283452 - RNA, 19 nt, Artificial Sequence
  Description of Artificial Sequence: Synthetic oligonucleotide
  Sense strand starting at position 2519 of SEQ ID NO: 1884676
gcugaacaaagcugggaua

SEQ ID NO: 2283453 - RNA, 19 nt, Artificial Sequence
  Description of Artificial Sequence: Synthetic oligonucleotide
  Antisense strand to SEQ ID NO: 2283452
uaucccagcuuuguucagc

SEQ ID NO: 2283454 - RNA, 19 nt, Artificial Sequence
  Description of Artificial Sequence: Synthetic oligonucleotide
  Sense strand starting at position 2565 of SEQ ID NO: 1884676
caagaugguugggugucaa

SEQ ID NO: 2283455 - RNA, 19 nt, Artificial Sequence
  Description of Artificial Sequence: Synthetic oligonucleotide
  Antisense strand to SEQ ID NO: 2283454
uugacacccaaccaucuug

SEQ ID NO: 2283456 - RNA, 19 nt, Artificial Sequence
  Description of Artificial Sequence: Synthetic oligonucleotide
  Sense strand starting at position 2577 of SEQ ID NO: 1884676
gugucaaguuacuuuaaga

SEQ ID NO: 2283457 - RNA, 19 nt, Artificial Sequence
  Description of Artificial Sequence: Synthetic oligonucleotide
  Antisense strand to SEQ ID NO: 2283456
ucuuaaaguaacuugacac

SEQ ID NO: 2283458 - RNA, 19 nt, Artificial Sequence
  Description of Artificial Sequence: Synthetic oligonucleotide
  Sense strand starting at position 3133 of SEQ ID NO: 1884676
agcugaaugcccuggauua

SEQ ID NO: 2283459 - RNA, 19 nt, Artificial Sequence
  Description of Artificial Sequence: Synthetic oligonucleotide
  Antisense strand to SEQ ID NO: 2283458
uaauccagggcauucagcu

SEQ ID NO: 2283460 - RNA, 19 nt, Artificial Sequence
  Description of Artificial Sequence: Synthetic oligonucleotide
  Sense strand starting at position 3135 of SEQ ID NO: 1884676
cugaaugcccuggauuacu

SEQ ID NO: 2283461 - RNA, 19 nt, Artificial Sequence
  Description of Artificial Sequence: Synthetic oligonucleotide
  Antisense strand to SEQ ID NO: 2283460
aguaauccagggcauucag

SEQ ID NO: 2283462 - RNA, 19 nt, Artificial Sequence
  Description of Artificial Sequence: Synthetic oligonucleotide
  Sense strand starting at position 3359 of SEQ ID NO: 1884676
aguuaaaugaaguguaaga

SEQ ID NO: 2283463 - RNA, 19 nt, Artificial Sequence
  Description of Artificial Sequence: Synthetic oligonucleotide
  Antisense strand to SEQ ID NO: 2283462
ucuuacacuucauuuaacu

SEQ ID NO: 2283464 - RNA, 19 nt, Artificial Sequence
  Description of Artificial Sequence: Synthetic oligonucleotide
  Sense strand starting at position 3468 of SEQ ID NO: 1884676
auaucacauucguuaucuu

SEQ ID NO: 2283465 - RNA, 19 nt, Artificial Sequence
  Description of Artificial Sequence: Synthetic oligonucleotide
  Antisense strand to SEQ ID NO: 2283464
aagauaacgaaugugauau

SEQ ID NO: 2283466 - RNA, 19 nt, Artificial Sequence
  Description of Artificial Sequence: Synthetic oligonucleotide
  Sense strand starting at position 3531 of SEQ ID NO: 1884676
uuaucaucgagaugacaga

SEQ ID NO: 2283467 - RNA, 19 nt, Artificial Sequence
  Description of Artificial Sequence: Synthetic oligonucleotide
  Antisense strand to SEQ ID NO: 2283466
ucugucaucucgaugauaa

SEQ ID NO: 2283468 - RNA, 19 nt, Artificial Sequence
  Description of Artificial Sequence: Synthetic oligonucleotide
  Sense strand starting at position 3542 of SEQ ID NO: 1884676
augacagaaucuucgauga

SEQ ID NO: 2283469 - RNA, 19 nt, Artificial Sequence
  Description of Artificial Sequence: Synthetic oligonucleotide
  Antisense strand to SEQ ID NO: 2283468
ucaucgaagauucugucau

SEQ ID NO: 2283470 - RNA, 19 nt, Artificial Sequence
  Description of Artificial Sequence: Synthetic oligonucleotide
  Sense strand starting at position 3558 of SEQ ID NO: 1884676
ugaccuaauuaguuguaua

SEQ ID NO: 2283471 - RNA, 19 nt, Artificial Sequence
  Description of Artificial Sequence: Synthetic oligonucleotide
  Antisense strand to SEQ ID NO: 2283470
uauacaacuaauuagguca

SEQ ID NO: 2283472 - RNA, 19 nt, Artificial Sequence
  Description of Artificial Sequence: Synthetic oligonucleotide
  Sense strand starting at position 3640 of SEQ ID NO: 1884676
uuguguucuggagaauucu

SEQ ID NO: 2283473 - RNA, 19 nt, Artificial Sequence
  Description of Artificial Sequence: Synthetic oligonucleotide
  Antisense strand to SEQ ID NO: 2283472
agaauucuccagaacacaa

SEQ ID NO: 2283474 - RNA, 19 nt, Artificial Sequence
  Description of Artificial Sequence: Synthetic oligonucleotide
  Sense strand starting at position 3679 of SEQ ID NO: 1884676
uuggcucaacuguaauaau

SEQ ID NO: 2283475 - RNA, 19 nt, Artificial Sequence
  Description of Artificial Sequence: Synthetic oligonucleotide
  Antisense strand to SEQ ID NO: 2283474
auuauuacaguugagccaa

SEQ ID NO: 2283476 - RNA, 19 nt, Artificial Sequence
  Description of Artificial Sequence: Synthetic oligonucleotide
  Sense strand starting at position 3704 of SEQ ID NO: 1884676
ugucauacucuguaucuuu

SEQ ID NO: 2283477 - RNA, 19 nt, Artificial Sequence
  Description of Artificial Sequence: Synthetic oligonucleotide
  Antisense strand to SEQ ID NO: 2283476
aaagauacagaguaugaca

SEQ ID NO: 2283478 - RNA, 19 nt, Artificial Sequence
  Description of Artificial Sequence: Synthetic oligonucleotide
  Sense strand starting at position 3825 of SEQ ID NO: 1884676
uacguugacuccucaauag

SEQ ID NO: 2283479 - RNA, 19 nt, Artificial Sequence
  Description of Artificial Sequence: Synthetic oligonucleotide
  Antisense strand to SEQ ID NO: 2283478
cuauugaggagucaacgua

SEQ ID NO: 2283480 - RNA, 19 nt, Artificial Sequence
  Description of Artificial Sequence: Synthetic oligonucleotide
  Sense strand starting at position 3874 of SEQ ID NO: 1884676
uguaucuacgacugucaaa

SEQ ID NO: 2283481 - RNA, 19 nt, Artificial Sequence
  Description of Artificial Sequence: Synthetic oligonucleotide
  Antisense strand to SEQ ID NO: 2283480
uuugacagucguagauaca

SEQ ID NO: 2283482 - RNA, 19 nt, Artificial Sequence
  Description of Artificial Sequence: Synthetic oligonucleotide
  Sense strand starting at position 542 of SEQ ID NO: 1884677
guaguagcccuagaagaac

SEQ ID NO: 2283483 - RNA, 19 nt, Artificial Sequence
  Description of Artificial Sequence: Synthetic oligonucleotide
  Antisense strand to SEQ ID NO: 2283482
guucuucuagggcuacuac

SEQ ID NO: 2283484 - RNA, 19 nt, Artificial Sequence
  Description of Artificial Sequence: Synthetic oligonucleotide
  Sense strand starting at position 602 of SEQ ID NO: 1884677
cgugaugggcgugaggaaa

SEQ ID NO: 2283485 - RNA, 19 nt, Artificial Sequence
  Description of Artificial Sequence: Synthetic oligonucleotide
  Antisense strand to SEQ ID NO: 2283484
uuuccucacgcccaucacg

SEQ ID NO: 2283486 - RNA, 19 nt, Artificial Sequence
  Description of Artificial Sequence: Synthetic oligonucleotide
  Sense strand starting at position 653 of SEQ ID NO: 1884677
ggguauguauguuucugau

SEQ ID NO: 2283487 - RNA, 19 nt, Artificial Sequence
  Description of Artificial Sequence: Synthetic oligonucleotide
  Antisense strand to SEQ ID NO: 2283486
aucagaaacauacauaccc

SEQ ID NO: 2283488 - RNA, 19 nt, Artificial Sequence
  Description of Artificial Sequence: Synthetic oligonucleotide
  Sense strand starting at position 655 of SEQ ID NO: 1884677
guauguauguuucugaucu

SEQ ID NO: 2283489 - RNA, 19 nt, Artificial Sequence
  Description of Artificial Sequence: Synthetic oligonucleotide
  Antisense strand to SEQ ID NO: 2283488
agaucagaaacauacauac

SEQ ID NO: 2283490 - RNA, 19 nt, Artificial Sequence
  Description of Artificial Sequence: Synthetic oligonucleotide
  Sense strand starting at position 877 of SEQ ID NO: 1884677
auuaaauaggcugggaagu

SEQ ID NO: 2283491 - RNA, 19 nt, Artificial Sequence
  Description of Artificial Sequence: Synthetic oligonucleotide
  Antisense strand to SEQ ID NO: 2283490
acuucccagccuauuuaau

SEQ ID NO: 2283492 - RNA, 19 nt, Artificial Sequence
  Description of Artificial Sequence: Synthetic oligonucleotide
  Sense strand starting at position 1025 of SEQ ID NO: 1884677
ucagauaaugcauggcacu

SEQ ID NO: 2283493 - RNA, 19 nt, Artificial Sequence
  Description of Artificial Sequence: Synthetic oligonucleotide
  Antisense strand to SEQ ID NO: 2283492
agugccaugcauuaucuga

SEQ ID NO: 2283494 - RNA, 19 nt, Artificial Sequence
  Description of Artificial Sequence: Synthetic oligonucleotide
  Sense strand starting at position 1031 of SEQ ID NO: 1884677
aaugcauggcacugaguau

SEQ ID NO: 2283495 - RNA, 19 nt, Artificial Sequence
  Description of Artificial Sequence: Synthetic oligonucleotide
  Antisense strand to SEQ ID NO: 2283494
auacucagugccaugcauu

SEQ ID NO: 2283496 - RNA, 19 nt, Artificial Sequence
  Description of Artificial Sequence: Synthetic oligonucleotide
  Sense strand starting at position 1035 of SEQ ID NO: 1884677
cauggcacugaguaucaau

SEQ ID NO: 2283497 - RNA, 19 nt, Artificial Sequence
  Description of Artificial Sequence: Synthetic oligonucleotide
  Antisense strand to SEQ ID NO: 2283496
auugauacucagugccaug

SEQ ID NO: 2283498 - RNA, 19 nt, Artificial Sequence
  Description of Artificial Sequence: Synthetic oligonucleotide
  Sense strand starting at position 1054 of SEQ ID NO: 1884677
ggaacauauuaggauucua

SEQ ID NO: 2283499 - RNA, 19 nt, Artificial Sequence
  Description of Artificial Sequence: Synthetic oligonucleotide
  Antisense strand to SEQ ID NO: 2283498
uagaauccuaauauguucc

SEQ ID NO: 2283500 - RNA, 19 nt, Artificial Sequence
  Description of Artificial Sequence: Synthetic oligonucleotide
  Sense strand starting at position 1096 of SEQ ID NO: 1884677
aagagcugugcucagugaa

SEQ ID NO: 2283501 - RNA, 19 nt, Artificial Sequence
  Description of Artificial Sequence: Synthetic oligonucleotide
  Antisense strand to SEQ ID NO: 2283500
uucacugagcacagcucuu

SEQ ID NO: 2283502 - RNA, 19 nt, Artificial Sequence
  Description of Artificial Sequence: Synthetic oligonucleotide
  Sense strand starting at position 1190 of SEQ ID NO: 1884677
ggaacuaccuaugauaauu

SEQ ID NO: 2283503 - RNA, 19 nt, Artificial Sequence
  Description of Artificial Sequence: Synthetic oligonucleotide
  Antisense strand to SEQ ID NO: 2283502
aauuaucauagguaguucc

SEQ ID NO: 2283504 - RNA, 19 nt, Artificial Sequence
  Description of Artificial Sequence: Synthetic oligonucleotide
  Sense strand starting at position 1201 of SEQ ID NO: 1884677
ugauaauucuaccacagga

SEQ ID NO: 2283505 - RNA, 19 nt, Artificial Sequence
  Description of Artificial Sequence: Synthetic oligonucleotide
  Antisense strand to SEQ ID NO: 2283504
uccugugguagaauuauca

SEQ ID NO: 2283506 - RNA, 19 nt, Artificial Sequence
  Description of Artificial Sequence: Synthetic oligonucleotide
  Sense strand starting at position 1254 of SEQ ID NO: 1884677
cagauuauauaaguggauu

SEQ ID NO: 2283507 - RNA, 19 nt, Artificial Sequence
  Description of Artificial Sequence: Synthetic oligonucleotide
  Antisense strand to SEQ ID NO: 2283506
aauccacuuauauaaucug

SEQ ID NO: 2283508 - RNA, 19 nt, Artificial Sequence
  Description of Artificial Sequence: Synthetic oligonucleotide
  Sense strand starting at position 1549 of SEQ ID NO: 1884677
uuaagaugcuauguuuauc

SEQ ID NO: 2283509 - RNA, 19 nt, Artificial Sequence
  Description of Artificial Sequence: Synthetic oligonucleotide
  Antisense strand to SEQ ID NO: 2283508
gauaaacauagcaucuuaa

SEQ ID NO: 2283510 - RNA, 19 nt, Artificial Sequence
  Description of Artificial Sequence: Synthetic oligonucleotide
  Sense strand starting at position 1554 of SEQ ID NO: 1884677
augcuauguuuaucaucuu

SEQ ID NO: 2283511 - RNA, 19 nt, Artificial Sequence
  Description of Artificial Sequence: Synthetic oligonucleotide
  Antisense strand to SEQ ID NO: 2283510
aagaugauaaacauagcau

SEQ ID NO: 2283512 - RNA, 19 nt, Artificial Sequence
  Description of Artificial Sequence: Synthetic oligonucleotide
  Sense strand starting at position 1587 of SEQ ID NO: 1884677
ccuauuagaguguaaauua

SEQ ID NO: 2283513 - RNA, 19 nt, Artificial Sequence
  Description of Artificial Sequence: Synthetic oligonucleotide
  Antisense strand to SEQ ID NO: 2283512
uaauuuacacucuaauagg

SEQ ID NO: 2283514 - RNA, 19 nt, Artificial Sequence
  Description of Artificial Sequence: Synthetic oligonucleotide
  Sense strand starting at position 1619 of SEQ ID NO: 1884677
agcagugucaggcauauga

SEQ ID NO: 2283515 - RNA, 19 nt, Artificial Sequence
  Description of Artificial Sequence: Synthetic oligonucleotide
  Antisense strand to SEQ ID NO: 2283514
ucauaugccugacacugcu

SEQ ID NO: 2283516 - RNA, 19 nt, Artificial Sequence
  Description of Artificial Sequence: Synthetic oligonucleotide
  Sense strand starting at position 1621 of SEQ ID NO: 1884677
cagugucaggcauaugaua

SEQ ID NO: 2283517 - RNA, 19 nt, Artificial Sequence
  Description of Artificial Sequence: Synthetic oligonucleotide
  Antisense strand to SEQ ID NO: 2283516
uaucauaugccugacacug

SEQ ID NO: 2283518 - RNA, 19 nt, Artificial Sequence
  Description of Artificial Sequence: Synthetic oligonucleotide
  Sense strand starting at position 1814 of SEQ ID NO: 1884677
acgucuucugaauagccaa

SEQ ID NO: 2283519 - RNA, 19 nt, Artificial Sequence
  Description of Artificial Sequence: Synthetic oligonucleotide
  Antisense strand to SEQ ID NO: 2283518
uuggcuauucagaagacgu

SEQ ID NO: 2283520 - RNA, 19 nt, Artificial Sequence
  Description of Artificial Sequence: Synthetic oligonucleotide
  Sense strand starting at position 1863 of SEQ ID NO: 1884677
gaaugugaagcaugucucu

SEQ ID NO: 2283521 - RNA, 19 nt, Artificial Sequence
  Description of Artificial Sequence: Synthetic oligonucleotide
  Antisense strand to SEQ ID NO: 2283520
agagacaugcuucacauuc

SEQ ID NO: 2283522 - RNA, 19 nt, Artificial Sequence
  Description of Artificial Sequence: Synthetic oligonucleotide
  Sense strand starting at position 1987 of SEQ ID NO: 1884677
gacucuagccucgaugaca

SEQ ID NO: 2283523 - RNA, 19 nt, Artificial Sequence
  Description of Artificial Sequence: Synthetic oligonucleotide
  Antisense strand to SEQ ID NO: 2283522
ugucaucgaggcuagaguc

SEQ ID NO: 2283524 - RNA, 19 nt, Artificial Sequence
  Description of Artificial Sequence: Synthetic oligonucleotide
  Sense strand starting at position 2051 of SEQ ID NO: 1884677
aggcaaggcuugcuucuaa

SEQ ID NO: 2283525 - RNA, 19 nt, Artificial Sequence
  Description of Artificial Sequence: Synthetic oligonucleotide
  Antisense strand to SEQ ID NO: 2283524
uuagaagcaagccuugccu

SEQ ID NO: 2283526 - RNA, 19 nt, Artificial Sequence
  Description of Artificial Sequence: Synthetic oligonucleotide
  Sense strand starting at position 2105 of SEQ ID NO: 1884677
ccucccaagcugugucaau

SEQ ID NO: 2283527 - RNA, 19 nt, Artificial Sequence
  Description of Artificial Sequence: Synthetic oligonucleotide
  Antisense strand to SEQ ID NO: 2283526
auugacacagcuugggagg

SEQ ID NO: 2283528 - RNA, 19 nt, Artificial Sequence
  Description of Artificial Sequence: Synthetic oligonucleotide
  Sense strand starting at position 2106 of SEQ ID NO: 1884677
cucccaagcugugucaaua

SEQ ID NO: 2283529 - RNA, 19 nt, Artificial Sequence
  Description of Artificial Sequence: Synthetic oligonucleotide
  Antisense strand to SEQ ID NO: 2283528
uauugacacagcuugggag

SEQ ID NO: 2283530 - RNA, 19 nt, Artificial Sequence
  Description of Artificial Sequence: Synthetic oligonucleotide
  Sense strand starting at position 2141 of SEQ ID NO: 1884677
acuuacuauuugucgaagu

SEQ ID NO: 2283531 - RNA, 19 nt, Artificial Sequence
  Description of Artificial Sequence: Synthetic oligonucleotide
  Antisense strand to SEQ ID NO: 2283530
acuucgacaaauaguaagu

SEQ ID NO: 2283532 - RNA, 19 nt, Artificial Sequence
  Description of Artificial Sequence: Synthetic oligonucleotide
  Sense strand starting at position 2214 of SEQ ID NO: 1884677
ggugcuugccugcaggaau

SEQ ID NO: 2283533 - RNA, 19 nt, Artificial Sequence
  Description of Artificial Sequence: Synthetic oligonucleotide
  Antisense strand to SEQ ID NO: 2283532
auuccugcaggcaagcacc

SEQ ID NO: 2283534 - RNA, 19 nt, Artificial Sequence
  Description of Artificial Sequence: Synthetic oligonucleotide
  Sense strand starting at position 2399 of SEQ ID NO: 1884677
ggcgcacaccuguaauauc

SEQ ID NO: 2283535 - RNA, 19 nt, Artificial Sequence
  Description of Artificial Sequence: Synthetic oligonucleotide
  Antisense strand to SEQ ID NO: 2283534
gauauuacaggugugcgcc

SEQ ID NO: 2283536 - RNA, 19 nt, Artificial Sequence
  Description of Artificial Sequence: Synthetic oligonucleotide
  Sense strand starting at position 2508 of SEQ ID NO: 1884677
gggcgacagugaucagucu

SEQ ID NO: 2283537 - RNA, 19 nt, Artificial Sequence
  Description of Artificial Sequence: Synthetic oligonucleotide
  Antisense strand to SEQ ID NO: 2283536
agacugaucacugucgccc

SEQ ID NO: 2283538 - RNA, 19 nt, Artificial Sequence
  Description of Artificial Sequence: Synthetic oligonucleotide
  Sense strand starting at position 2600 of SEQ ID NO: 1884677
gaguguuucccagacuucu

SEQ ID NO: 2283539 - RNA, 19 nt, Artificial Sequence
  Description of Artificial Sequence: Synthetic oligonucleotide
  Antisense strand to SEQ ID NO: 2283538
agaagucugggaaacacuc

SEQ ID NO: 2283540 - RNA, 19 nt, Artificial Sequence
  Description of Artificial Sequence: Synthetic oligonucleotide
  Sense strand starting at position 2612 of SEQ ID NO: 1884677
gacuucugugucccgcuua

SEQ ID NO: 2283541 - RNA, 19 nt, Artificial Sequence
  Description of Artificial Sequence: Synthetic oligonucleotide
  Antisense strand to SEQ ID NO: 2283540
uaagcgggacacagaaguc

SEQ ID NO: 2283542 - RNA, 19 nt, Artificial Sequence
  Description of Artificial Sequence: Synthetic oligonucleotide
  Sense strand starting at position 2664 of SEQ ID NO: 1884677
caaugcgauuacuuuagga

SEQ ID NO: 2283543 - RNA, 19 nt, Artificial Sequence
  Description of Artificial Sequence: Synthetic oligonucleotide
  Antisense strand to SEQ ID NO: 2283542
uccuaaaguaaucgcauug

SEQ ID NO: 2283544 - RNA, 19 nt, Artificial Sequence
  Description of Artificial Sequence: Synthetic oligonucleotide
  Sense strand starting at position 2666 of SEQ ID NO: 1884677
augcgauuacuuuaggauu

SEQ ID NO: 2283545 - RNA, 19 nt, Artificial Sequence
  Description of Artificial Sequence: Synthetic oligonucleotide
  Antisense strand to SEQ ID NO: 2283544
aauccuaaaguaaucgcau

SEQ ID NO: 2283546 - RNA, 19 nt, Artificial Sequence
  Description of Artificial Sequence: Synthetic oligonucleotide
  Sense strand starting at position 2678 of SEQ ID NO: 1884677
uaggauuccgggugaaaca

SEQ ID NO: 2283547 - RNA, 19 nt, Artificial Sequence
  Description of Artificial Sequence: Synthetic oligonucleotide
  Antisense strand to SEQ ID NO: 2283546
uguuucacccggaauccua

SEQ ID NO: 2283548 - RNA, 19 nt, Artificial Sequence
  Description of Artificial Sequence: Synthetic oligonucleotide
  Sense strand starting at position 2716 of SEQ ID NO: 1884677
acagcauucccacaguacu

SEQ ID NO: 2283549 - RNA, 19 nt, Artificial Sequence
  Description of Artificial Sequence: Synthetic oligonucleotide
  Antisense strand to SEQ ID NO: 2283548
aguacugugggaaugcugu

SEQ ID NO: 2283550 - RNA, 19 nt, Artificial Sequence
  Description of Artificial Sequence: Synthetic oligonucleotide
  Sense strand starting at position 2814 of SEQ ID NO: 1884677
acuagaggaucgucagaaa

SEQ ID NO: 2283551 - RNA, 19 nt, Artificial Sequence
  Description of Artificial Sequence: Synthetic oligonucleotide
  Antisense strand to SEQ ID NO: 2283550
uuucugacgauccucuagu

SEQ ID NO: 2283552 - RNA, 19 nt, Artificial Sequence
  Description of Artificial Sequence: Synthetic oligonucleotide
  Sense strand starting at position 3044 of SEQ ID NO: 1884677
ggugguaaggccuaaggaa

SEQ ID NO: 2283553 - RNA, 19 nt, Artificial Sequence
  Description of Artificial Sequence: Synthetic oligonucleotide
  Antisense strand to SEQ ID NO: 2283552
uuccuuaggccuuaccacc

SEQ ID NO: 2283554 - RNA, 19 nt, Artificial Sequence
  Description of Artificial Sequence: Synthetic oligonucleotide
  Sense strand starting at position 3206 of SEQ ID NO: 1884677
gcguguccuagagauccga

SEQ ID NO: 2283555 - RNA, 19 nt, Artificial Sequence
  Description of Artificial Sequence: Synthetic oligonucleotide
  Antisense strand to SEQ ID NO: 2283554
ucggaucucuaggacacgc

SEQ ID NO: 2283556 - RNA, 19 nt, Artificial Sequence
  Description of Artificial Sequence: Synthetic oligonucleotide
  Sense strand starting at position 3781 of SEQ ID NO: 1884677
gucugagcuccucaccaaa

SEQ ID NO: 2283557 - RNA, 19 nt, Artificial Sequence
  Description of Artificial Sequence: Synthetic oligonucleotide
  Antisense strand to SEQ ID NO: 2283556
uuuggugaggagcucagac

SEQ ID NO: 2283558 - RNA, 19 nt, Artificial Sequence
  Description of Artificial Sequence: Synthetic oligonucleotide
  Sense strand starting at position 3902 of SEQ ID NO: 1884677
ccgcgaggcccucuuuaau

SEQ ID NO: 2283559 - RNA, 19 nt, Artificial Sequence
  Description of Artificial Sequence: Synthetic oligonucleotide
  Antisense strand to SEQ ID NO: 2283558
auuaaagagggccucgcgg

SEQ ID NO: 2283560 - RNA, 19 nt, Artificial Sequence
  Description of Artificial Sequence: Synthetic oligonucleotide
  Sense strand starting at position 3911 of SEQ ID NO: 1884677
ccucuuuaauccucagugu

SEQ ID NO: 2283561 - RNA, 19 nt, Artificial Sequence
  Description of Artificial Sequence: Synthetic oligonucleotide
  Antisense strand to SEQ ID NO: 2283560
acacugaggauuaaagagg

SEQ ID NO: 2283562 - RNA, 19 nt, Artificial Sequence
  Description of Artificial Sequence: Synthetic oligonucleotide
  Sense strand starting at position 1754 of SEQ ID NO: 1884678
guaguagcccuagaagaac

SEQ ID NO: 2283563 - RNA, 19 nt, Artificial Sequence
  Description of Artificial Sequence: Synthetic oligonucleotide
  Antisense strand to SEQ ID NO: 2283562
guucuucuagggcuacuac

SEQ ID NO: 2283564 - RNA, 19 nt, Artificial Sequence
  Description of Artificial Sequence: Synthetic oligonucleotide
  Sense strand starting at position 1813 of SEQ ID NO: 1884678
gcgugaugggcgugaggaa

SEQ ID NO: 2283565 - RNA, 19 nt, Artificial Sequence
  Description of Artificial Sequence: Synthetic oligonucleotide
  Antisense strand to SEQ ID NO: 2283564
uuccucacgcccaucacgc

SEQ ID NO: 2283566 - RNA, 19 nt, Artificial Sequence
  Description of Artificial Sequence: Synthetic oligonucleotide
  Sense strand starting at position 1814 of SEQ ID NO: 1884678
cgugaugggcgugaggaaa

SEQ ID NO: 2283567 - RNA, 19 nt, Artificial Sequence
  Description of Artificial Sequence: Synthetic oligonucleotide
  Antisense strand to SEQ ID NO: 2283566
uuuccucacgcccaucacg

SEQ ID NO: 2283568 - RNA, 19 nt, Artificial Sequence
  Description of Artificial Sequence: Synthetic oligonucleotide
  Sense strand starting at position 1865 of SEQ ID NO: 1884678
ggguauguauguuucugau

SEQ ID NO: 2283569 - RNA, 19 nt, Artificial Sequence
  Description of Artificial Sequence: Synthetic oligonucleotide
  Antisense strand to SEQ ID NO: 2283568
aucagaaacauacauaccc

SEQ ID NO: 2283570 - RNA, 19 nt, Artificial Sequence
  Description of Artificial Sequence: Synthetic oligonucleotide
  Sense strand starting at position 1867 of SEQ ID NO: 1884678
guauguauguuucugaucu

SEQ ID NO: 2283571 - RNA, 19 nt, Artificial Sequence
  Description of Artificial Sequence: Synthetic oligonucleotide
  Antisense strand to SEQ ID NO: 2283570
agaucagaaacauacauac

SEQ ID NO: 2283572 - RNA, 19 nt, Artificial Sequence
  Description of Artificial Sequence: Synthetic oligonucleotide
  Sense strand starting at position 2089 of SEQ ID NO: 1884678
auuaaauaggcugggaagu

SEQ ID NO: 2283573 - RNA, 19 nt, Artificial Sequence
  Description of Artificial Sequence: Synthetic oligonucleotide
  Antisense strand to SEQ ID NO: 2283572
acuucccagccuauuuaau

SEQ ID NO: 2283574 - RNA, 19 nt, Artificial Sequence
  Description of Artificial Sequence: Synthetic oligonucleotide
  Sense strand starting at position 2237 of SEQ ID NO: 1884678
ucagauaaugcauggcacu

SEQ ID NO: 2283575 - RNA, 19 nt, Artificial Sequence
  Description of Artificial Sequence: Synthetic oligonucleotide
  Antisense strand to SEQ ID NO: 2283574
agugccaugcauuaucuga

SEQ ID NO: 2283576 - RNA, 19 nt, Artificial Sequence
  Description of Artificial Sequence: Synthetic oligonucleotide
  Sense strand starting at position 2243 of SEQ ID NO: 1884678
aaugcauggcacugaguau

SEQ ID NO: 2283577 - RNA, 19 nt, Artificial Sequence
  Description of Artificial Sequence: Synthetic oligonucleotide
  Antisense strand to SEQ ID NO: 2283576
auacucagugccaugcauu

SEQ ID NO: 2283578 - RNA, 19 nt, Artificial Sequence
  Description of Artificial Sequence: Synthetic oligonucleotide
  Sense strand starting at position 2247 of SEQ ID NO: 1884678
cauggcacugaguaucaau

SEQ ID NO: 2283579 - RNA, 19 nt, Artificial Sequence
  Description of Artificial Sequence: Synthetic oligonucleotide
  Antisense strand to SEQ ID NO: 2283578
auugauacucagugccaug

SEQ ID NO: 2283580 - RNA, 19 nt, Artificial Sequence
  Description of Artificial Sequence: Synthetic oligonucleotide
  Sense strand starting at position 2266 of SEQ ID NO: 1884678
ggaacauauuaggauucua

SEQ ID NO: 2283581 - RNA, 19 nt, Artificial Sequence
  Description of Artificial Sequence: Synthetic oligonucleotide
  Antisense strand to SEQ ID NO: 2283580
uagaauccuaauauguucc

SEQ ID NO: 2283582 - RNA, 19 nt, Artificial Sequence
  Description of Artificial Sequence: Synthetic oligonucleotide
  Sense strand starting at position 2279 of SEQ ID NO: 1884678
auucuauuaucuggagaac

SEQ ID NO: 2283583 - RNA, 19 nt, Artificial Sequence
  Description of Artificial Sequence: Synthetic oligonucleotide
  Antisense strand to SEQ ID NO: 2283582
guucuccagauaauagaau

SEQ ID NO: 2283584 - RNA, 19 nt, Artificial Sequence
  Description of Artificial Sequence: Synthetic oligonucleotide
  Sense strand starting at position 2308 of SEQ ID NO: 1884678
aagagcugugcucagugaa

SEQ ID NO: 2283585 - RNA, 19 nt, Artificial Sequence
  Description of Artificial Sequence: Synthetic oligonucleotide
  Antisense strand to SEQ ID NO: 2283584
uucacugagcacagcucuu

SEQ ID NO: 2283586 - RNA, 19 nt, Artificial Sequence
  Description of Artificial Sequence: Synthetic oligonucleotide
  Sense strand starting at position 2402 of SEQ ID NO: 1884678
ggaacuaccuaugauaauu

SEQ ID NO: 2283587 - RNA, 19 nt, Artificial Sequence
  Description of Artificial Sequence: Synthetic oligonucleotide
  Antisense strand to SEQ ID NO: 2283586
aauuaucauagguaguucc

SEQ ID NO: 2283588 - RNA, 19 nt, Artificial Sequence
  Description of Artificial Sequence: Synthetic oligonucleotide
  Sense strand starting at position 2413 of SEQ ID NO: 1884678
ugauaauucuaccacagga

SEQ ID NO: 2283589 - RNA, 19 nt, Artificial Sequence
  Description of Artificial Sequence: Synthetic oligonucleotide
  Antisense strand to SEQ ID NO: 2283588
uccugugguagaauuauca

SEQ ID NO: 2283590 - RNA, 19 nt, Artificial Sequence
  Description of Artificial Sequence: Synthetic oligonucleotide
  Sense strand starting at position 2437 of SEQ ID NO: 1884678
aucaaugucugguagguaa

SEQ ID NO: 2283591 - RNA, 19 nt, Artificial Sequence
  Description of Artificial Sequence: Synthetic oligonucleotide
  Antisense strand to SEQ ID NO: 2283590
uuaccuaccagacauugau

SEQ ID NO: 2283592 - RNA, 19 nt, Artificial Sequence
  Description of Artificial Sequence: Synthetic oligonucleotide
  Sense strand starting at position 2466 of SEQ ID NO: 1884678
cagauuauauaaguggauu

SEQ ID NO: 2283593 - RNA, 19 nt, Artificial Sequence
  Description of Artificial Sequence: Synthetic oligonucleotide
  Antisense strand to SEQ ID NO: 2283592
aauccacuuauauaaucug

SEQ ID NO: 2283594 - RNA, 19 nt, Artificial Sequence
  Description of Artificial Sequence: Synthetic oligonucleotide
  Sense strand starting at position 2761 of SEQ ID NO: 1884678
uuaagaugcuauguuuauc

SEQ ID NO: 2283595 - RNA, 19 nt, Artificial Sequence
  Description of Artificial Sequence: Synthetic oligonucleotide
  Antisense strand to SEQ ID NO: 2283594
gauaaacauagcaucuuaa

SEQ ID NO: 2283596 - RNA, 19 nt, Artificial Sequence
  Description of Artificial Sequence: Synthetic oligonucleotide
  Sense strand starting at position 2766 of SEQ ID NO: 1884678
augcuauguuuaucaucuu

SEQ ID NO: 2283597 - RNA, 19 nt, Artificial Sequence
  Description of Artificial Sequence: Synthetic oligonucleotide
  Antisense strand to SEQ ID NO: 2283596
aagaugauaaacauagcau

SEQ ID NO: 2283598 - RNA, 19 nt, Artificial Sequence
  Description of Artificial Sequence: Synthetic oligonucleotide
  Sense strand starting at position 2799 of SEQ ID NO: 1884678
ccuauuagaguguaaauua

SEQ ID NO: 2283599 - RNA, 19 nt, Artificial Sequence
  Description of Artificial Sequence: Synthetic oligonucleotide
  Antisense strand to SEQ ID NO: 2283598
uaauuuacacucuaauagg

SEQ ID NO: 2283600 - RNA, 19 nt, Artificial Sequence
  Description of Artificial Sequence: Synthetic oligonucleotide
  Sense strand starting at position 2831 of SEQ ID NO: 1884678
agcagugucaggcauauga

SEQ ID NO: 2283601 - RNA, 19 nt, Artificial Sequence
  Description of Artificial Sequence: Synthetic oligonucleotide
  Antisense strand to SEQ ID NO: 2283600
ucauaugccugacacugcu

SEQ ID NO: 2283602 - RNA, 19 nt, Artificial Sequence
  Description of Artificial Sequence: Synthetic oligonucleotide
  Sense strand starting at position 2833 of SEQ ID NO: 1884678
cagugucaggcauaugaua

SEQ ID NO: 2283603 - RNA, 19 nt, Artificial Sequence
  Description of Artificial Sequence: Synthetic oligonucleotide
  Antisense strand to SEQ ID NO: 2283602
uaucauaugccugacacug

SEQ ID NO: 2283604 - RNA, 19 nt, Artificial Sequence
  Description of Artificial Sequence: Synthetic oligonucleotide
  Sense strand starting at position 3022 of SEQ ID NO: 1884678
auaaacgucuucugaauag

SEQ ID NO: 2283605 - RNA, 19 nt, Artificial Sequence
  Description of Artificial Sequence: Synthetic oligonucleotide
  Antisense strand to SEQ ID NO: 2283604
cuauucagaagacguuuau

SEQ ID NO: 2283606 - RNA, 19 nt, Artificial Sequence
  Description of Artificial Sequence: Synthetic oligonucleotide
  Sense strand starting at position 3026 of SEQ ID NO: 1884678
acgucuucugaauagccaa

SEQ ID NO: 2283607 - RNA, 19 nt, Artificial Sequence
  Description of Artificial Sequence: Synthetic oligonucleotide
  Antisense strand to SEQ ID NO: 2283606
uuggcuauucagaagacgu

SEQ ID NO: 2283608 - RNA, 19 nt, Artificial Sequence
  Description of Artificial Sequence: Synthetic oligonucleotide
  Sense strand starting at position 3075 of SEQ ID NO: 1884678
gaaugugaagcaugucucu

SEQ ID NO: 2283609 - RNA, 19 nt, Artificial Sequence
  Description of Artificial Sequence: Synthetic oligonucleotide
  Antisense strand to SEQ ID NO: 2283608
agagacaugcuucacauuc

SEQ ID NO: 2283610 - RNA, 19 nt, Artificial Sequence
  Description of Artificial Sequence: Synthetic oligonucleotide
  Sense strand starting at position 3199 of SEQ ID NO: 1884678
gacucuagccucgaugaca

SEQ ID NO: 2283611 - RNA, 19 nt, Artificial Sequence
  Description of Artificial Sequence: Synthetic oligonucleotide
  Antisense strand to SEQ ID NO: 2283610
ugucaucgaggcuagaguc

SEQ ID NO: 2283612 - RNA, 19 nt, Artificial Sequence
  Description of Artificial Sequence: Synthetic oligonucleotide
  Sense strand starting at position 3263 of SEQ ID NO: 1884678
aggcaaggcuugcuucuaa

SEQ ID NO: 2283613 - RNA, 19 nt, Artificial Sequence
  Description of Artificial Sequence: Synthetic oligonucleotide
  Antisense strand to SEQ ID NO: 2283612
uuagaagcaagccuugccu

SEQ ID NO: 2283614 - RNA, 19 nt, Artificial Sequence
  Description of Artificial Sequence: Synthetic oligonucleotide
  Sense strand starting at position 3317 of SEQ ID NO: 1884678
ccucccaagcugugucaau

SEQ ID NO: 2283615 - RNA, 19 nt, Artificial Sequence
  Description of Artificial Sequence: Synthetic oligonucleotide
  Antisense strand to SEQ ID NO: 2283614
auugacacagcuugggagg

SEQ ID NO: 2283616 - RNA, 19 nt, Artificial Sequence
  Description of Artificial Sequence: Synthetic oligonucleotide
  Sense strand starting at position 3318 of SEQ ID NO: 1884678
cucccaagcugugucaaua

SEQ ID NO: 2283617 - RNA, 19 nt, Artificial Sequence
  Description of Artificial Sequence: Synthetic oligonucleotide
  Antisense strand to SEQ ID NO: 2283616
uauugacacagcuugggag

SEQ ID NO: 2283618 - RNA, 19 nt, Artificial Sequence
  Description of Artificial Sequence: Synthetic oligonucleotide
  Sense strand starting at position 3353 of SEQ ID NO: 1884678
acuuacuauuugucgaagu

SEQ ID NO: 2283619 - RNA, 19 nt, Artificial Sequence
  Description of Artificial Sequence: Synthetic oligonucleotide
  Antisense strand to SEQ ID NO: 2283618
acuucgacaaauaguaagu

SEQ ID NO: 2283620 - RNA, 19 nt, Artificial Sequence
  Description of Artificial Sequence: Synthetic oligonucleotide
  Sense strand starting at position 3354 of SEQ ID NO: 1884678
cuuacuauuugucgaaguu

SEQ ID NO: 2283621 - RNA, 19 nt, Artificial Sequence
  Description of Artificial Sequence: Synthetic oligonucleotide
  Antisense strand to SEQ ID NO: 2283620
aacuucgacaaauaguaag

SEQ ID NO: 2283622 - RNA, 19 nt, Artificial Sequence
  Description of Artificial Sequence: Synthetic oligonucleotide
  Sense strand starting at position 3426 of SEQ ID NO: 1884678
ggugcuugccugcaggaau

SEQ ID NO: 2283623 - RNA, 19 nt, Artificial Sequence
  Description of Artificial Sequence: Synthetic oligonucleotide
  Antisense strand to SEQ ID NO: 2283622
auuccugcaggcaagcacc

SEQ ID NO: 2283624 - RNA, 19 nt, Artificial Sequence
  Description of Artificial Sequence: Synthetic oligonucleotide
  Sense strand starting at position 3611 of SEQ ID NO: 1884678
ggcgcacaccuguaauauc

SEQ ID NO: 2283625 - RNA, 19 nt, Artificial Sequence
  Description of Artificial Sequence: Synthetic oligonucleotide
  Antisense strand to SEQ ID NO: 2283624
gauauuacaggugugcgcc

SEQ ID NO: 2283626 - RNA, 19 nt, Artificial Sequence
  Description of Artificial Sequence: Synthetic oligonucleotide
  Sense strand starting at position 3720 of SEQ ID NO: 1884678
gggcgacagugaucagucu

SEQ ID NO: 2283627 - RNA, 19 nt, Artificial Sequence
  Description of Artificial Sequence: Synthetic oligonucleotide
  Antisense strand to SEQ ID NO: 2283626
agacugaucacugucgccc

SEQ ID NO: 2283628 - RNA, 19 nt, Artificial Sequence
  Description of Artificial Sequence: Synthetic oligonucleotide
  Sense strand starting at position 3810 of SEQ ID NO: 1884678
cagaguguuucccagacuu

SEQ ID NO: 2283629 - RNA, 19 nt, Artificial Sequence
  Description of Artificial Sequence: Synthetic oligonucleotide
  Antisense strand to SEQ ID NO: 2283628
aagucugggaaacacucug

SEQ ID NO: 2283630 - RNA, 19 nt, Artificial Sequence
  Description of Artificial Sequence: Synthetic oligonucleotide
  Sense strand starting at position 3812 of SEQ ID NO: 1884678
gaguguuucccagacuucu

SEQ ID NO: 2283631 - RNA, 19 nt, Artificial Sequence
  Description of Artificial Sequence: Synthetic oligonucleotide
  Antisense strand to SEQ ID NO: 2283630
agaagucugggaaacacuc

SEQ ID NO: 2283632 - RNA, 19 nt, Artificial Sequence
  Description of Artificial Sequence: Synthetic oligonucleotide
  Sense strand starting at position 3824 of SEQ ID NO: 1884678
gacuucugugucccgcuua

SEQ ID NO: 2283633 - RNA, 19 nt, Artificial Sequence
  Description of Artificial Sequence: Synthetic oligonucleotide
  Antisense strand to SEQ ID NO: 2283632
uaagcgggacacagaaguc

SEQ ID NO: 2283634 - RNA, 19 nt, Artificial Sequence
  Description of Artificial Sequence: Synthetic oligonucleotide
  Sense strand starting at position 3876 of SEQ ID NO: 1884678
caaugcgauuacuuuagga

SEQ ID NO: 2283635 - RNA, 19 nt, Artificial Sequence
  Description of Artificial Sequence: Synthetic oligonucleotide
  Antisense strand to SEQ ID NO: 2283634
uccuaaaguaaucgcauug

SEQ ID NO: 2283636 - RNA, 19 nt, Artificial Sequence
  Description of Artificial Sequence: Synthetic oligonucleotide
  Sense strand starting at position 3878 of SEQ ID NO: 1884678
augcgauuacuuuaggauu

SEQ ID NO: 2283637 - RNA, 19 nt, Artificial Sequence
  Description of Artificial Sequence: Synthetic oligonucleotide
  Antisense strand to SEQ ID NO: 2283636
aauccuaaaguaaucgcau

SEQ ID NO: 2283638 - RNA, 19 nt, Artificial Sequence
  Description of Artificial Sequence: Synthetic oligonucleotide
  Sense strand starting at position 3890 of SEQ ID NO: 1884678
uaggauuccgggugaaaca

SEQ ID NO: 2283639 - RNA, 19 nt, Artificial Sequence
  Description of Artificial Sequence: Synthetic oligonucleotide
  Antisense strand to SEQ ID NO: 2283638
uguuucacccggaauccua

SEQ ID NO: 2283640 - RNA, 19 nt, Artificial Sequence
  Description of Artificial Sequence: Synthetic oligonucleotide
  Sense strand starting at position 3928 of SEQ ID NO: 1884678
acagcauucccacaguacu

SEQ ID NO: 2283641 - RNA, 19 nt, Artificial Sequence
  Description of Artificial Sequence: Synthetic oligonucleotide
  Antisense strand to SEQ ID NO: 2283640
aguacugugggaaugcugu

SEQ ID NO: 2283642 - RNA, 19 nt, Artificial Sequence
  Description of Artificial Sequence: Synthetic oligonucleotide
  Sense strand starting at position 32 of SEQ ID NO: 1884679
gagcacaucugcccaguaa

SEQ ID NO: 2283643 - RNA, 19 nt, Artificial Sequence
  Description of Artificial Sequence: Synthetic oligonucleotide
  Antisense strand to SEQ ID NO: 2283642
uuacugggcagaugugcuc

SEQ ID NO: 2283644 - RNA, 19 nt, Artificial Sequence
  Description of Artificial Sequence: Synthetic oligonucleotide
  Sense strand starting at position 89 of SEQ ID NO: 1884679
aggagugauugcccaaguu

SEQ ID NO: 2283645 - RNA, 19 nt, Artificial Sequence
  Description of Artificial Sequence: Synthetic oligonucleotide
  Antisense strand to SEQ ID NO: 2283644
aacuugggcaaucacuccu

SEQ ID NO: 2283646 - RNA, 19 nt, Artificial Sequence
  Description of Artificial Sequence: Synthetic oligonucleotide
  Sense strand starting at position 102 of SEQ ID NO: 1884679
caaguugcucagggcauua

SEQ ID NO: 2283647 - RNA, 19 nt, Artificial Sequence
  Description of Artificial Sequence: Synthetic oligonucleotide
  Antisense strand to SEQ ID NO: 2283646
uaaugcccugagcaacuug

SEQ ID NO: 2283648 - RNA, 19 nt, Artificial Sequence
  Description of Artificial Sequence: Synthetic oligonucleotide
  Sense strand starting at position 114 of SEQ ID NO: 1884679
ggcauuauggcggagccau

SEQ ID NO: 2283649 - RNA, 19 nt, Artificial Sequence
  Description of Artificial Sequence: Synthetic oligonucleotide
  Antisense strand to SEQ ID NO: 2283648
auggcuccgccauaaugcc

SEQ ID NO: 2283650 - RNA, 19 nt, Artificial Sequence
  Description of Artificial Sequence: Synthetic oligonucleotide
  Sense strand starting at position 325 of SEQ ID NO: 1884679
gguuucugcugcucaggau

SEQ ID NO: 2283651 - RNA, 19 nt, Artificial Sequence
  Description of Artificial Sequence: Synthetic oligonucleotide
  Antisense strand to SEQ ID NO: 2283650
auccugagcagcagaaacc

SEQ ID NO: 2283652 - RNA, 19 nt, Artificial Sequence
  Description of Artificial Sequence: Synthetic oligonucleotide
  Sense strand starting at position 552 of SEQ ID NO: 1884679
ggauaaugggcacgagcua

SEQ ID NO: 2283653 - RNA, 19 nt, Artificial Sequence
  Description of Artificial Sequence: Synthetic oligonucleotide
  Antisense strand to SEQ ID NO: 2283652
uagcucgugcccauuaucc

SEQ ID NO: 2283654 - RNA, 19 nt, Artificial Sequence
  Description of Artificial Sequence: Synthetic oligonucleotide
  Sense strand starting at position 779 of SEQ ID NO: 1884679
uugacaaagugcucaugga

SEQ ID NO: 2283655 - RNA, 19 nt, Artificial Sequence
  Description of Artificial Sequence: Synthetic oligonucleotide
  Antisense strand to SEQ ID NO: 2283654
uccaugagcacuuugucaa

SEQ ID NO: 2283656 - RNA, 19 nt, Artificial Sequence
  Description of Artificial Sequence: Synthetic oligonucleotide
  Sense strand starting at position 783 of SEQ ID NO: 1884679
caaagugcucauggaauac

SEQ ID NO: 2283657 - RNA, 19 nt, Artificial Sequence
  Description of Artificial Sequence: Synthetic oligonucleotide
  Antisense strand to SEQ ID NO: 2283656
guauuccaugagcacuuug

SEQ ID NO: 2283658 - RNA, 19 nt, Artificial Sequence
  Description of Artificial Sequence: Synthetic oligonucleotide
  Sense strand starting at position 794 of SEQ ID NO: 1884679
uggaauacuugagagaugu

SEQ ID NO: 2283659 - RNA, 19 nt, Artificial Sequence
  Description of Artificial Sequence: Synthetic oligonucleotide
  Antisense strand to SEQ ID NO: 2283658
acaucucucaaguauucca

SEQ ID NO: 2283660 - RNA, 19 nt, Artificial Sequence
  Description of Artificial Sequence: Synthetic oligonucleotide
  Sense strand starting at position 798 of SEQ ID NO: 1884679
auacuugagagauguguaa

SEQ ID NO: 2283661 - RNA, 19 nt, Artificial Sequence
  Description of Artificial Sequence: Synthetic oligonucleotide
  Antisense strand to SEQ ID NO: 2283660
uuacacaucucucaaguau

SEQ ID NO: 2283662 - RNA, 19 nt, Artificial Sequence
  Description of Artificial Sequence: Synthetic oligonucleotide
  Sense strand starting at position 1193 of SEQ ID NO: 1884679
gaggcuguuccacagggaa

SEQ ID NO: 2283663 - RNA, 19 nt, Artificial Sequence
  Description of Artificial Sequence: Synthetic oligonucleotide
  Antisense strand to SEQ ID NO: 2283662
uucccuguggaacagccuc

SEQ ID NO: 2283664 - RNA, 19 nt, Artificial Sequence
  Description of Artificial Sequence: Synthetic oligonucleotide
  Sense strand starting at position 1195 of SEQ ID NO: 1884679
ggcuguuccacagggaagu

SEQ ID NO: 2283665 - RNA, 19 nt, Artificial Sequence
  Description of Artificial Sequence: Synthetic oligonucleotide
  Antisense strand to SEQ ID NO: 2283664
acuucccuguggaacagcc

SEQ ID NO: 2283666 - RNA, 19 nt, Artificial Sequence
  Description of Artificial Sequence: Synthetic oligonucleotide
  Sense strand starting at position 1196 of SEQ ID NO: 1884679
gcuguuccacagggaaguu

SEQ ID NO: 2283667 - RNA, 19 nt, Artificial Sequence
  Description of Artificial Sequence: Synthetic oligonucleotide
  Antisense strand to SEQ ID NO: 2283666
aacuucccuguggaacagc

SEQ ID NO: 2283668 - RNA, 19 nt, Artificial Sequence
  Description of Artificial Sequence: Synthetic oligonucleotide
  Sense strand starting at position 1277 of SEQ ID NO: 1884679
cccguucuuccugaacacu

SEQ ID NO: 2283669 - RNA, 19 nt, Artificial Sequence
  Description of Artificial Sequence: Synthetic oligonucleotide
  Antisense strand to SEQ ID NO: 2283668
aguguucaggaagaacggg

SEQ ID NO: 2283670 - RNA, 19 nt, Artificial Sequence
  Description of Artificial Sequence: Synthetic oligonucleotide
  Sense strand starting at position 1353 of SEQ ID NO: 1884679
acuugccuucuaggaauua

SEQ ID NO: 2283671 - RNA, 19 nt, Artificial Sequence
  Description of Artificial Sequence: Synthetic oligonucleotide
  Antisense strand to SEQ ID NO: 2283670
uaauuccuagaaggcaagu

SEQ ID NO: 2283672 - RNA, 19 nt, Artificial Sequence
  Description of Artificial Sequence: Synthetic oligonucleotide
  Sense strand starting at position 1436 of SEQ ID NO: 1884679
guucauaacuagguaggga

SEQ ID NO: 2283673 - RNA, 19 nt, Artificial Sequence
  Description of Artificial Sequence: Synthetic oligonucleotide
  Antisense strand to SEQ ID NO: 2283672
ucccuaccuaguuaugaac

SEQ ID NO: 2283674 - RNA, 19 nt, Artificial Sequence
  Description of Artificial Sequence: Synthetic oligonucleotide
  Sense strand starting at position 1528 of SEQ ID NO: 1884679
ggcccugucguggucacau

SEQ ID NO: 2283675 - RNA, 19 nt, Artificial Sequence
  Description of Artificial Sequence: Synthetic oligonucleotide
  Antisense strand to SEQ ID NO: 2283674
augugaccacgacagggcc

SEQ ID NO: 2283676 - RNA, 19 nt, Artificial Sequence
  Description of Artificial Sequence: Synthetic oligonucleotide
  Sense strand starting at position 1536 of SEQ ID NO: 1884679
cguggucacaugcauggaa

SEQ ID NO: 2283677 - RNA, 19 nt, Artificial Sequence
  Description of Artificial Sequence: Synthetic oligonucleotide
  Antisense strand to SEQ ID NO: 2283676
uuccaugcaugugaccacg

SEQ ID NO: 2283678 - RNA, 19 nt, Artificial Sequence
  Description of Artificial Sequence: Synthetic oligonucleotide
  Sense strand starting at position 1538 of SEQ ID NO: 1884679
uggucacaugcauggaaga

SEQ ID NO: 2283679 - RNA, 19 nt, Artificial Sequence
  Description of Artificial Sequence: Synthetic oligonucleotide
  Antisense strand to SEQ ID NO: 2283678
ucuuccaugcaugugacca

SEQ ID NO: 2283680 - RNA, 19 nt, Artificial Sequence
  Description of Artificial Sequence: Synthetic oligonucleotide
  Sense strand starting at position 1699 of SEQ ID NO: 1884679
acagaaagcaugugguaag

SEQ ID NO: 2283681 - RNA, 19 nt, Artificial Sequence
  Description of Artificial Sequence: Synthetic oligonucleotide
  Antisense strand to SEQ ID NO: 2283680
cuuaccacaugcuuucugu

SEQ ID NO: 2283682 - RNA, 19 nt, Artificial Sequence
  Description of Artificial Sequence: Synthetic oligonucleotide
  Sense strand starting at position 1733 of SEQ ID NO: 1884679
cucaguucuccagacacca

SEQ ID NO: 2283683 - RNA, 19 nt, Artificial Sequence
  Description of Artificial Sequence: Synthetic oligonucleotide
  Antisense strand to SEQ ID NO: 2283682
uggugucuggagaacugag

SEQ ID NO: 2283684 - RNA, 19 nt, Artificial Sequence
  Description of Artificial Sequence: Synthetic oligonucleotide
  Sense strand starting at position 1817 of SEQ ID NO: 1884679
accuaaacgucugcugaga

SEQ ID NO: 2283685 - RNA, 19 nt, Artificial Sequence
  Description of Artificial Sequence: Synthetic oligonucleotide
  Antisense strand to SEQ ID NO: 2283684
ucucagcagacguuuaggu

SEQ ID NO: 2283686 - RNA, 19 nt, Artificial Sequence
  Description of Artificial Sequence: Synthetic oligonucleotide
  Sense strand starting at position 1862 of SEQ ID NO: 1884679
uccugagagugucuagaag

SEQ ID NO: 2283687 - RNA, 19 nt, Artificial Sequence
  Description of Artificial Sequence: Synthetic oligonucleotide
  Antisense strand to SEQ ID NO: 2283686
cuucuagacacucucagga

SEQ ID NO: 2283688 - RNA, 19 nt, Artificial Sequence
  Description of Artificial Sequence: Synthetic oligonucleotide
  Sense strand starting at position 2105 of SEQ ID NO: 1884679
ggcuguuaccaggaaugua

SEQ ID NO: 2283689 - RNA, 19 nt, Artificial Sequence
  Description of Artificial Sequence: Synthetic oligonucleotide
  Antisense strand to SEQ ID NO: 2283688
uacauuccugguaacagcc

SEQ ID NO: 2283690 - RNA, 19 nt, Artificial Sequence
  Description of Artificial Sequence: Synthetic oligonucleotide
  Sense strand starting at position 2182 of SEQ ID NO: 1884679
gggaauaggcccugaaguu

SEQ ID NO: 2283691 - RNA, 19 nt, Artificial Sequence
  Description of Artificial Sequence: Synthetic oligonucleotide
  Antisense strand to SEQ ID NO: 2283690
aacuucagggccuauuccc

SEQ ID NO: 2283692 - RNA, 19 nt, Artificial Sequence
  Description of Artificial Sequence: Synthetic oligonucleotide
  Sense strand starting at position 2183 of SEQ ID NO: 1884679
ggaauaggcccugaaguuu

SEQ ID NO: 2283693 - RNA, 19 nt, Artificial Sequence
  Description of Artificial Sequence: Synthetic oligonucleotide
  Antisense strand to SEQ ID NO: 2283692
aaacuucagggccuauucc

SEQ ID NO: 2283694 - RNA, 19 nt, Artificial Sequence
  Description of Artificial Sequence: Synthetic oligonucleotide
  Sense strand starting at position 2236 of SEQ ID NO: 1884679
ucacuugggaagugauaua

SEQ ID NO: 2283695 - RNA, 19 nt, Artificial Sequence
  Description of Artificial Sequence: Synthetic oligonucleotide
  Antisense strand to SEQ ID NO: 2283694
uauaucacuucccaaguga

SEQ ID NO: 2283696 - RNA, 19 nt, Artificial Sequence
  Description of Artificial Sequence: Synthetic oligonucleotide
  Sense strand starting at position 2305 of SEQ ID NO: 1884679
agggcaucucacuacuuau

SEQ ID NO: 2283697 - RNA, 19 nt, Artificial Sequence
  Description of Artificial Sequence: Synthetic oligonucleotide
  Antisense strand to SEQ ID NO: 2283696
auaaguagugagaugcccu

SEQ ID NO: 2283698 - RNA, 19 nt, Artificial Sequence
  Description of Artificial Sequence: Synthetic oligonucleotide
  Sense strand starting at position 2308 of SEQ ID NO: 1884679
gcaucucacuacuuauguu

SEQ ID NO: 2283699 - RNA, 19 nt, Artificial Sequence
  Description of Artificial Sequence: Synthetic oligonucleotide
  Antisense strand to SEQ ID NO: 2283698
aacauaaguagugagaugc

SEQ ID NO: 2283700 - RNA, 19 nt, Artificial Sequence
  Description of Artificial Sequence: Synthetic oligonucleotide
  Sense strand starting at position 2318 of SEQ ID NO: 1884679
acuuauguugacuacucau

SEQ ID NO: 2283701 - RNA, 19 nt, Artificial Sequence
  Description of Artificial Sequence: Synthetic oligonucleotide
  Antisense strand to SEQ ID NO: 2283700
augaguagucaacauaagu

SEQ ID NO: 2283702 - RNA, 19 nt, Artificial Sequence
  Description of Artificial Sequence: Synthetic oligonucleotide
  Sense strand starting at position 2371 of SEQ ID NO: 1884679
ugaaauugacuuugacuuc

SEQ ID NO: 2283703 - RNA, 19 nt, Artificial Sequence
  Description of Artificial Sequence: Synthetic oligonucleotide
  Antisense strand to SEQ ID NO: 2283702
gaagucaaagucaauuuca

SEQ ID NO: 2283704 - RNA, 19 nt, Artificial Sequence
  Description of Artificial Sequence: Synthetic oligonucleotide
  Sense strand starting at position 2598 of SEQ ID NO: 1884679
ccgcaucagccucaugagu

SEQ ID NO: 2283705 - RNA, 19 nt, Artificial Sequence
  Description of Artificial Sequence: Synthetic oligonucleotide
  Antisense strand to SEQ ID NO: 2283704
acucaugaggcugaugcgg

SEQ ID NO: 2283706 - RNA, 19 nt, Artificial Sequence
  Description of Artificial Sequence: Synthetic oligonucleotide
  Sense strand starting at position 2835 of SEQ ID NO: 1884679
aaagcuuguuaaucacgau

SEQ ID NO: 2283707 - RNA, 19 nt, Artificial Sequence
  Description of Artificial Sequence: Synthetic oligonucleotide
  Antisense strand to SEQ ID NO: 2283706
aucgugauuaacaagcuuu

SEQ ID NO: 2283708 - RNA, 19 nt, Artificial Sequence
  Description of Artificial Sequence: Synthetic oligonucleotide
  Sense strand starting at position 3177 of SEQ ID NO: 1884679
cggcuuacuucucuaucca

SEQ ID NO: 2283709 - RNA, 19 nt, Artificial Sequence
  Description of Artificial Sequence: Synthetic oligonucleotide
  Antisense strand to SEQ ID NO: 2283708
uggauagagaaguaagccg

SEQ ID NO: 2283710 - RNA, 19 nt, Artificial Sequence
  Description of Artificial Sequence: Synthetic oligonucleotide
  Sense strand starting at position 3193 of SEQ ID NO: 1884679
ccaagaaaucgccaacuag

SEQ ID NO: 2283711 - RNA, 19 nt, Artificial Sequence
  Description of Artificial Sequence: Synthetic oligonucleotide
  Antisense strand to SEQ ID NO: 2283710
cuaguuggcgauuucuugg

SEQ ID NO: 2283712 - RNA, 19 nt, Artificial Sequence
  Description of Artificial Sequence: Synthetic oligonucleotide
  Sense strand starting at position 3259 of SEQ ID NO: 1884679
gcagaagaaucgccuguau

SEQ ID NO: 2283713 - RNA, 19 nt, Artificial Sequence
  Description of Artificial Sequence: Synthetic oligonucleotide
  Antisense strand to SEQ ID NO: 2283712
auacaggcgauucuucugc

SEQ ID NO: 2283714 - RNA, 19 nt, Artificial Sequence
  Description of Artificial Sequence: Synthetic oligonucleotide
  Sense strand starting at position 3261 of SEQ ID NO: 1884679
agaagaaucgccuguaugg

SEQ ID NO: 2283715 - RNA, 19 nt, Artificial Sequence
  Description of Artificial Sequence: Synthetic oligonucleotide
  Antisense strand to SEQ ID NO: 2283714
ccauacaggcgauucuucu

SEQ ID NO: 2283716 - RNA, 19 nt, Artificial Sequence
  Description of Artificial Sequence: Synthetic oligonucleotide
  Sense strand starting at position 3263 of SEQ ID NO: 1884679
aagaaucgccuguauggga

SEQ ID NO: 2283717 - RNA, 19 nt, Artificial Sequence
  Description of Artificial Sequence: Synthetic oligonucleotide
  Antisense strand to SEQ ID NO: 2283716
ucccauacaggcgauucuu

SEQ ID NO: 2283718 - RNA, 19 nt, Artificial Sequence
  Description of Artificial Sequence: Synthetic oligonucleotide
  Sense strand starting at position 3908 of SEQ ID NO: 1884679
gcagcaguuccggaaguga

SEQ ID NO: 2283719 - RNA, 19 nt, Artificial Sequence
  Description of Artificial Sequence: Synthetic oligonucleotide
  Antisense strand to SEQ ID NO: 2283718
ucacuuccggaacugcugc

SEQ ID NO: 2283720 - RNA, 19 nt, Artificial Sequence
  Description of Artificial Sequence: Synthetic oligonucleotide
  Sense strand starting at position 3919 of SEQ ID NO: 1884679
ggaagugacugcucuuaua

SEQ ID NO: 2283721 - RNA, 19 nt, Artificial Sequence
  Description of Artificial Sequence: Synthetic oligonucleotide
  Antisense strand to SEQ ID NO: 2283720
uauaagagcagucacuucc

SEQ ID NO: 2283722 - RNA, 19 nt, Artificial Sequence
  Description of Artificial Sequence: Synthetic oligonucleotide
  Sense strand starting at position 40 of SEQ ID NO: 1884680
ucaagaaacuguuuagcug

SEQ ID NO: 2283723 - RNA, 19 nt, Artificial Sequence
  Description of Artificial Sequence: Synthetic oligonucleotide
  Antisense strand to SEQ ID NO: 2283722
cagcuaaacaguuucuuga

SEQ ID NO: 2283724 - RNA, 19 nt, Artificial Sequence
  Description of Artificial Sequence: Synthetic oligonucleotide
  Sense strand starting at position 49 of SEQ ID NO: 1884680
uguuuagcugcccaaauga

SEQ ID NO: 2283725 - RNA, 19 nt, Artificial Sequence
  Description of Artificial Sequence: Synthetic oligonucleotide
  Antisense strand to SEQ ID NO: 2283724
ucauuugggcagcuaaaca

SEQ ID NO: 2283726 - RNA, 19 nt, Artificial Sequence
  Description of Artificial Sequence: Synthetic oligonucleotide
  Sense strand starting at position 114 of SEQ ID NO: 1884680
ccagguaagccauaaauau

SEQ ID NO: 2283727 - RNA, 19 nt, Artificial Sequence
  Description of Artificial Sequence: Synthetic oligonucleotide
  Antisense strand to SEQ ID NO: 2283726
auauuuauggcuuaccugg

SEQ ID NO: 2283728 - RNA, 19 nt, Artificial Sequence
  Description of Artificial Sequence: Synthetic oligonucleotide
  Sense strand starting at position 517 of SEQ ID NO: 1884680
uguguauccagguaggcaa

SEQ ID NO: 2283729 - RNA, 19 nt, Artificial Sequence
  Description of Artificial Sequence: Synthetic oligonucleotide
  Antisense strand to SEQ ID NO: 2283728
uugccuaccuggauacaca

SEQ ID NO: 2283730 - RNA, 19 nt, Artificial Sequence
  Description of Artificial Sequence: Synthetic oligonucleotide
  Sense strand starting at position 701 of SEQ ID NO: 1884680
aagacagauuuguauagug

SEQ ID NO: 2283731 - RNA, 19 nt, Artificial Sequence
  Description of Artificial Sequence: Synthetic oligonucleotide
  Antisense strand to SEQ ID NO: 2283730
cacuauacaaaucugucuu

SEQ ID NO: 2283732 - RNA, 19 nt, Artificial Sequence
  Description of Artificial Sequence: Synthetic oligonucleotide
  Sense strand starting at position 711 of SEQ ID NO: 1884680
uguauaguguucuuuacac

SEQ ID NO: 2283733 - RNA, 19 nt, Artificial Sequence
  Description of Artificial Sequence: Synthetic oligonucleotide
  Antisense strand to SEQ ID NO: 2283732
guguaaagaacacuauaca

SEQ ID NO: 2283734 - RNA, 19 nt, Artificial Sequence
  Description of Artificial Sequence: Synthetic oligonucleotide
  Sense strand starting at position 723 of SEQ ID NO: 1884680
uuuacacuugccuguauuu

SEQ ID NO: 2283735 - RNA, 19 nt, Artificial Sequence
  Description of Artificial Sequence: Synthetic oligonucleotide
  Antisense strand to SEQ ID NO: 2283734
aaauacaggcaaguguaaa

SEQ ID NO: 2283736 - RNA, 19 nt, Artificial Sequence
  Description of Artificial Sequence: Synthetic oligonucleotide
  Sense strand starting at position 814 of SEQ ID NO: 1884680
agagcucuagucuaugagu

SEQ ID NO: 2283737 - RNA, 19 nt, Artificial Sequence
  Description of Artificial Sequence: Synthetic oligonucleotide
  Antisense strand to SEQ ID NO: 2283736
acucauagacuagagcucu

SEQ ID NO: 2283738 - RNA, 19 nt, Artificial Sequence
  Description of Artificial Sequence: Synthetic oligonucleotide
  Sense strand starting at position 816 of SEQ ID NO: 1884680
agcucuagucuaugaguca

SEQ ID NO: 2283739 - RNA, 19 nt, Artificial Sequence
  Description of Artificial Sequence: Synthetic oligonucleotide
  Antisense strand to SEQ ID NO: 2283738
ugacucauagacuagagcu

SEQ ID NO: 2283740 - RNA, 19 nt, Artificial Sequence
  Description of Artificial Sequence: Synthetic oligonucleotide
  Sense strand starting at position 819 of SEQ ID NO: 1884680
ucuagucuaugagucacaa

SEQ ID NO: 2283741 - RNA, 19 nt, Artificial Sequence
  Description of Artificial Sequence: Synthetic oligonucleotide
  Antisense strand to SEQ ID NO: 2283740
uugugacucauagacuaga

SEQ ID NO: 2283742 - RNA, 19 nt, Artificial Sequence
  Description of Artificial Sequence: Synthetic oligonucleotide
  Sense strand starting at position 898 of SEQ ID NO: 1884680
ucaaacagguguccaauaa

SEQ ID NO: 2283743 - RNA, 19 nt, Artificial Sequence
  Description of Artificial Sequence: Synthetic oligonucleotide
  Antisense strand to SEQ ID NO: 2283742
uuauuggacaccuguuuga

SEQ ID NO: 2283744 - RNA, 19 nt, Artificial Sequence
  Description of Artificial Sequence: Synthetic oligonucleotide
  Sense strand starting at position 1300 of SEQ ID NO: 1884680
aaaguuaauugcgucugga

SEQ ID NO: 2283745 - RNA, 19 nt, Artificial Sequence
  Description of Artificial Sequence: Synthetic oligonucleotide
  Antisense strand to SEQ ID NO: 2283744
uccagacgcaauuaacuuu

SEQ ID NO: 2283746 - RNA, 19 nt, Artificial Sequence
  Description of Artificial Sequence: Synthetic oligonucleotide
  Sense strand starting at position 1303 of SEQ ID NO: 1884680
guuaauugcgucuggauga

SEQ ID NO: 2283747 - RNA, 19 nt, Artificial Sequence
  Description of Artificial Sequence: Synthetic oligonucleotide
  Antisense strand to SEQ ID NO: 2283746
ucauccagacgcaauuaac

SEQ ID NO: 2283748 - RNA, 19 nt, Artificial Sequence
  Description of Artificial Sequence: Synthetic oligonucleotide
  Sense strand starting at position 1314 of SEQ ID NO: 1884680
cuggaugaaucacagguaa

SEQ ID NO: 2283749 - RNA, 19 nt, Artificial Sequence
  Description of Artificial Sequence: Synthetic oligonucleotide
  Antisense strand to SEQ ID NO: 2283748
uuaccugugauucauccag

SEQ ID NO: 2283750 - RNA, 19 nt, Artificial Sequence
  Description of Artificial Sequence: Synthetic oligonucleotide
  Sense strand starting at position 1718 of SEQ ID NO: 1884680
cagcacuugcagugaagaa

SEQ ID NO: 2283751 - RNA, 19 nt, Artificial Sequence
  Description of Artificial Sequence: Synthetic oligonucleotide
  Antisense strand to SEQ ID NO: 2283750
uucuucacugcaagugcug

SEQ ID NO: 2283752 - RNA, 19 nt, Artificial Sequence
  Description of Artificial Sequence: Synthetic oligonucleotide
  Sense strand starting at position 1719 of SEQ ID NO: 1884680
agcacuugcagugaagaaa

SEQ ID NO: 2283753 - RNA, 19 nt, Artificial Sequence
  Description of Artificial Sequence: Synthetic oligonucleotide
  Antisense strand to SEQ ID NO: 2283752
uuucuucacugcaagugcu

SEQ ID NO: 2283754 - RNA, 19 nt, Artificial Sequence
  Description of Artificial Sequence: Synthetic oligonucleotide
  Sense strand starting at position 1991 of SEQ ID NO: 1884680
aacagugcucccugggaga

SEQ ID NO: 2283755 - RNA, 19 nt, Artificial Sequence
  Description of Artificial Sequence: Synthetic oligonucleotide
  Antisense strand to SEQ ID NO: 2283754
ucucccagggagcacuguu

SEQ ID NO: 2283756 - RNA, 19 nt, Artificial Sequence
  Description of Artificial Sequence: Synthetic oligonucleotide
  Sense strand starting at position 2053 of SEQ ID NO: 1884680
agcauaugguuccucagau

SEQ ID NO: 2283757 - RNA, 19 nt, Artificial Sequence
  Description of Artificial Sequence: Synthetic oligonucleotide
  Antisense strand to SEQ ID NO: 2283756
aucugaggaaccauaugcu

SEQ ID NO: 2283758 - RNA, 19 nt, Artificial Sequence
  Description of Artificial Sequence: Synthetic oligonucleotide
  Sense strand starting at position 2054 of SEQ ID NO: 1884680
gcauaugguuccucagaua

SEQ ID NO: 2283759 - RNA, 19 nt, Artificial Sequence
  Description of Artificial Sequence: Synthetic oligonucleotide
  Antisense strand to SEQ ID NO: 2283758
uaucugaggaaccauaugc

SEQ ID NO: 2283760 - RNA, 19 nt, Artificial Sequence
  Description of Artificial Sequence: Synthetic oligonucleotide
  Sense strand starting at position 2081 of SEQ ID NO: 1884680
ggcugaccuagucaagcuu

SEQ ID NO: 2283761 - RNA, 19 nt, Artificial Sequence
  Description of Artificial Sequence: Synthetic oligonucleotide
  Antisense strand to SEQ ID NO: 2283760
aagcuugacuaggucagcc

SEQ ID NO: 2283762 - RNA, 19 nt, Artificial Sequence
  Description of Artificial Sequence: Synthetic oligonucleotide
  Sense strand starting at position 2137 of SEQ ID NO: 1884680
uuacuaaugcaaugauaug

SEQ ID NO: 2283763 - RNA, 19 nt, Artificial Sequence
  Description of Artificial Sequence: Synthetic oligonucleotide
  Antisense strand to SEQ ID NO: 2283762
cauaucauugcauuaguaa

SEQ ID NO: 2283764 - RNA, 19 nt, Artificial Sequence
  Description of Artificial Sequence: Synthetic oligonucleotide
  Sense strand starting at position 2147 of SEQ ID NO: 1884680
aaugauaugccauggcaag

SEQ ID NO: 2283765 - RNA, 19 nt, Artificial Sequence
  Description of Artificial Sequence: Synthetic oligonucleotide
  Antisense strand to SEQ ID NO: 2283764
cuugccauggcauaucauu

SEQ ID NO: 2283766 - RNA, 19 nt, Artificial Sequence
  Description of Artificial Sequence: Synthetic oligonucleotide
  Sense strand starting at position 2271 of SEQ ID NO: 1884680
ugaauaagugcugaucauu

SEQ ID NO: 2283767 - RNA, 19 nt, Artificial Sequence
  Description of Artificial Sequence: Synthetic oligonucleotide
  Antisense strand to SEQ ID NO: 2283766
aaugaucagcacuuauuca

SEQ ID NO: 2283768 - RNA, 19 nt, Artificial Sequence
  Description of Artificial Sequence: Synthetic oligonucleotide
  Sense strand starting at position 2280 of SEQ ID NO: 1884680
gcugaucauuauguguaca

SEQ ID NO: 2283769 - RNA, 19 nt, Artificial Sequence
  Description of Artificial Sequence: Synthetic oligonucleotide
  Antisense strand to SEQ ID NO: 2283768
uguacacauaaugaucagc

SEQ ID NO: 2283770 - RNA, 19 nt, Artificial Sequence
  Description of Artificial Sequence: Synthetic oligonucleotide
  Sense strand starting at position 2283 of SEQ ID NO: 1884680
gaucauuauguguacauag

SEQ ID NO: 2283771 - RNA, 19 nt, Artificial Sequence
  Description of Artificial Sequence: Synthetic oligonucleotide
  Antisense strand to SEQ ID NO: 2283770
cuauguacacauaaugauc

SEQ ID NO: 2283772 - RNA, 19 nt, Artificial Sequence
  Description of Artificial Sequence: Synthetic oligonucleotide
  Sense strand starting at position 2330 of SEQ ID NO: 1884680
acauuagaugcaugcaaac

SEQ ID NO: 2283773 - RNA, 19 nt, Artificial Sequence
  Description of Artificial Sequence: Synthetic oligonucleotide
  Antisense strand to SEQ ID NO: 2283772
guuugcaugcaucuaaugu

SEQ ID NO: 2283774 - RNA, 19 nt, Artificial Sequence
  Description of Artificial Sequence: Synthetic oligonucleotide
  Sense strand starting at position 2817 of SEQ ID NO: 1884680
uuuaauauccugcaggugu

SEQ ID NO: 2283775 - RNA, 19 nt, Artificial Sequence
  Description of Artificial Sequence: Synthetic oligonucleotide
  Antisense strand to SEQ ID NO: 2283774
acaccugcaggauauuaaa

SEQ ID NO: 2283776 - RNA, 19 nt, Artificial Sequence
  Description of Artificial Sequence: Synthetic oligonucleotide
  Sense strand starting at position 2906 of SEQ ID NO: 1884680
cacaucucucccgaagagu

SEQ ID NO: 2283777 - RNA, 19 nt, Artificial Sequence
  Description of Artificial Sequence: Synthetic oligonucleotide
  Antisense strand to SEQ ID NO: 2283776
acucuucgggagagaugug

SEQ ID NO: 2283778 - RNA, 19 nt, Artificial Sequence
  Description of Artificial Sequence: Synthetic oligonucleotide
  Sense strand starting at position 2942 of SEQ ID NO: 1884680
ccagauguugcauaacuag

SEQ ID NO: 2283779 - RNA, 19 nt, Artificial Sequence
  Description of Artificial Sequence: Synthetic oligonucleotide
  Antisense strand to SEQ ID NO: 2283778
cuaguuaugcaacaucugg

SEQ ID NO: 2283780 - RNA, 19 nt, Artificial Sequence
  Description of Artificial Sequence: Synthetic oligonucleotide
  Sense strand starting at position 2968 of SEQ ID NO: 1884680
ggaauucuguccuugucaa

SEQ ID NO: 2283781 - RNA, 19 nt, Artificial Sequence
  Description of Artificial Sequence: Synthetic oligonucleotide
  Antisense strand to SEQ ID NO: 2283780
uugacaaggacagaauucc

SEQ ID NO: 2283782 - RNA, 19 nt, Artificial Sequence
  Description of Artificial Sequence: Synthetic oligonucleotide
  Sense strand starting at position 3316 of SEQ ID NO: 1884680
uggcaauaaaguugugcau

SEQ ID NO: 2283783 - RNA, 19 nt, Artificial Sequence
  Description of Artificial Sequence: Synthetic oligonucleotide
  Antisense strand to SEQ ID NO: 2283782
augcacaacuuuauugcca

SEQ ID NO: 2283784 - RNA, 19 nt, Artificial Sequence
  Description of Artificial Sequence: Synthetic oligonucleotide
  Sense strand starting at position 3323 of SEQ ID NO: 1884680
aaaguugugcauggcuuaa

SEQ ID NO: 2283785 - RNA, 19 nt, Artificial Sequence
  Description of Artificial Sequence: Synthetic oligonucleotide
  Antisense strand to SEQ ID NO: 2283784
uuaagccaugcacaacuuu

SEQ ID NO: 2283786 - RNA, 19 nt, Artificial Sequence
  Description of Artificial Sequence: Synthetic oligonucleotide
  Sense strand starting at position 3327 of SEQ ID NO: 1884680
uugugcauggcuuaacaau

SEQ ID NO: 2283787 - RNA, 19 nt, Artificial Sequence
  Description of Artificial Sequence: Synthetic oligonucleotide
  Antisense strand to SEQ ID NO: 2283786
auuguuaagccaugcacaa

SEQ ID NO: 2283788 - RNA, 19 nt, Artificial Sequence
  Description of Artificial Sequence: Synthetic oligonucleotide
  Sense strand starting at position 3374 of SEQ ID NO: 1884680
aggcaauucggcguguguu

SEQ ID NO: 2283789 - RNA, 19 nt, Artificial Sequence
  Description of Artificial Sequence: Synthetic oligonucleotide
  Antisense strand to SEQ ID NO: 2283788
aacacacgccgaauugccu

SEQ ID NO: 2283790 - RNA, 19 nt, Artificial Sequence
  Description of Artificial Sequence: Synthetic oligonucleotide
  Sense strand starting at position 3376 of SEQ ID NO: 1884680
gcaauucggcguguguuca

SEQ ID NO: 2283791 - RNA, 19 nt, Artificial Sequence
  Description of Artificial Sequence: Synthetic oligonucleotide
  Antisense strand to SEQ ID NO: 2283790
ugaacacacgccgaauugc

SEQ ID NO: 2283792 - RNA, 19 nt, Artificial Sequence
  Description of Artificial Sequence: Synthetic oligonucleotide
  Sense strand starting at position 3618 of SEQ ID NO: 1884680
ggcucaugacuguauccaa

SEQ ID NO: 2283793 - RNA, 19 nt, Artificial Sequence
  Description of Artificial Sequence: Synthetic oligonucleotide
  Antisense strand to SEQ ID NO: 2283792
uuggauacagucaugagcc

SEQ ID NO: 2283794 - RNA, 19 nt, Artificial Sequence
  Description of Artificial Sequence: Synthetic oligonucleotide
  Sense strand starting at position 3940 of SEQ ID NO: 1884680
cacgguuacuucuuuaaga

SEQ ID NO: 2283795 - RNA, 19 nt, Artificial Sequence
  Description of Artificial Sequence: Synthetic oligonucleotide
  Antisense strand to SEQ ID NO: 2283794
ucuuaaagaaguaaccgug

SEQ ID NO: 2283796 - RNA, 19 nt, Artificial Sequence
  Description of Artificial Sequence: Synthetic oligonucleotide
  Sense strand starting at position 3941 of SEQ ID NO: 1884680
acgguuacuucuuuaagaa

SEQ ID NO: 2283797 - RNA, 19 nt, Artificial Sequence
  Description of Artificial Sequence: Synthetic oligonucleotide
  Antisense strand to SEQ ID NO: 2283796
uucuuaaagaaguaaccgu

SEQ ID NO: 2283798 - RNA, 19 nt, Artificial Sequence
  Description of Artificial Sequence: Synthetic oligonucleotide
  Sense strand starting at position 3942 of SEQ ID NO: 1884680
cgguuacuucuuuaagaac

SEQ ID NO: 2283799 - RNA, 19 nt, Artificial Sequence
  Description of Artificial Sequence: Synthetic oligonucleotide
  Antisense strand to SEQ ID NO: 2283798
guucuuaaagaaguaaccg

SEQ ID NO: 2283800 - RNA, 19 nt, Artificial Sequence
  Description of Artificial Sequence: Synthetic oligonucleotide
  Sense strand starting at position 3966 of SEQ ID NO: 1884680
cacagagcgugucugagau

SEQ ID NO: 2283801 - RNA, 19 nt, Artificial Sequence
  Description of Artificial Sequence: Synthetic oligonucleotide
  Antisense strand to SEQ ID NO: 2283800
aucucagacacgcucugug

SEQ ID NO: 2283802 - RNA, 19 nt, Artificial Sequence
  Description of Artificial Sequence: Synthetic oligonucleotide
  Sense strand starting at position 1043 of SEQ ID NO: 1884681
gagggugucacuuggucua

SEQ ID NO: 2283803 - RNA, 19 nt, Artificial Sequence
  Description of Artificial Sequence: Synthetic oligonucleotide
  Antisense strand to SEQ ID NO: 2283802
uagaccaagugacacccuc

SEQ ID NO: 2283804 - RNA, 19 nt, Artificial Sequence
  Description of Artificial Sequence: Synthetic oligonucleotide
  Sense strand starting at position 1045 of SEQ ID NO: 1884681
gggugucacuuggucuaug

SEQ ID NO: 2283805 - RNA, 19 nt, Artificial Sequence
  Description of Artificial Sequence: Synthetic oligonucleotide
  Antisense strand to SEQ ID NO: 2283804
cauagaccaagugacaccc

SEQ ID NO: 2283806 - RNA, 19 nt, Artificial Sequence
  Description of Artificial Sequence: Synthetic oligonucleotide
  Sense strand starting at position 1046 of SEQ ID NO: 1884681
ggugucacuuggucuaugu

SEQ ID NO: 2283807 - RNA, 19 nt, Artificial Sequence
  Description of Artificial Sequence: Synthetic oligonucleotide
  Antisense strand to SEQ ID NO: 2283806
acauagaccaagugacacc

SEQ ID NO: 2283808 - RNA, 19 nt, Artificial Sequence
  Description of Artificial Sequence: Synthetic oligonucleotide
  Sense strand starting at position 1215 of SEQ ID NO: 1884681
gccaucgugcccgguuaau

SEQ ID NO: 2283809 - RNA, 19 nt, Artificial Sequence
  Description of Artificial Sequence: Synthetic oligonucleotide
  Antisense strand to SEQ ID NO: 2283808
auuaaccgggcacgauggc

SEQ ID NO: 2283810 - RNA, 19 nt, Artificial Sequence
  Description of Artificial Sequence: Synthetic oligonucleotide
  Sense strand starting at position 1313 of SEQ ID NO: 1884681
cuggcaaaguguuagcauu

SEQ ID NO: 2283811 - RNA, 19 nt, Artificial Sequence
  Description of Artificial Sequence: Synthetic oligonucleotide
  Antisense strand to SEQ ID NO: 2283810
aaugcuaacacuuugccag

SEQ ID NO: 2283812 - RNA, 19 nt, Artificial Sequence
  Description of Artificial Sequence: Synthetic oligonucleotide
  Sense strand starting at position 1315 of SEQ ID NO: 1884681
ggcaaaguguuagcauuac

SEQ ID NO: 2283813 - RNA, 19 nt, Artificial Sequence
  Description of Artificial Sequence: Synthetic oligonucleotide
  Antisense strand to SEQ ID NO: 2283812
guaaugcuaacacuuugcc

SEQ ID NO: 2283814 - RNA, 19 nt, Artificial Sequence
  Description of Artificial Sequence: Synthetic oligonucleotide
  Sense strand starting at position 1358 of SEQ ID NO: 1884681
caccguaggguuugagaau

SEQ ID NO: 2283815 - RNA, 19 nt, Artificial Sequence
  Description of Artificial Sequence: Synthetic oligonucleotide
  Antisense strand to SEQ ID NO: 2283814
auucucaaacccuacggug

SEQ ID NO: 2283816 - RNA, 19 nt, Artificial Sequence
  Description of Artificial Sequence: Synthetic oligonucleotide
  Sense strand starting at position 1367 of SEQ ID NO: 1884681
guuugagaaucacaauuuc

SEQ ID NO: 2283817 - RNA, 19 nt, Artificial Sequence
  Description of Artificial Sequence: Synthetic oligonucleotide
  Antisense strand to SEQ ID NO: 2283816
gaaauugugauucucaaac

SEQ ID NO: 2283818 - RNA, 19 nt, Artificial Sequence
  Description of Artificial Sequence: Synthetic oligonucleotide
  Sense strand starting at position 1395 of SEQ ID NO: 1884681
acuccugacucacgaggaa

SEQ ID NO: 2283819 - RNA, 19 nt, Artificial Sequence
  Description of Artificial Sequence: Synthetic oligonucleotide
  Antisense strand to SEQ ID NO: 2283818
uuccucgugagucaggagu

SEQ ID NO: 2283820 - RNA, 19 nt, Artificial Sequence
  Description of Artificial Sequence: Synthetic oligonucleotide
  Sense strand starting at position 1831 of SEQ ID NO: 1884681
gguuguccuucuccgagau

SEQ ID NO: 2283821 - RNA, 19 nt, Artificial Sequence
  Description of Artificial Sequence: Synthetic oligonucleotide
  Antisense strand to SEQ ID NO: 2283820
aucucggagaaggacaacc

SEQ ID NO: 2283822 - RNA, 19 nt, Artificial Sequence
  Description of Artificial Sequence: Synthetic oligonucleotide
  Sense strand starting at position 1832 of SEQ ID NO: 1884681
guuguccuucuccgagauu

SEQ ID NO: 2283823 - RNA, 19 nt, Artificial Sequence
  Description of Artificial Sequence: Synthetic oligonucleotide
  Antisense strand to SEQ ID NO: 2283822
aaucucggagaaggacaac

SEQ ID NO: 2283824 - RNA, 19 nt, Artificial Sequence
  Description of Artificial Sequence: Synthetic oligonucleotide
  Sense strand starting at position 2055 of SEQ ID NO: 1884681
gcccaaucuggcuacuaca

SEQ ID NO: 2283825 - RNA, 19 nt, Artificial Sequence
  Description of Artificial Sequence: Synthetic oligonucleotide
  Antisense strand to SEQ ID NO: 2283824
uguaguagccagauugggc

SEQ ID NO: 2283826 - RNA, 19 nt, Artificial Sequence
  Description of Artificial Sequence: Synthetic oligonucleotide
  Sense strand starting at position 2310 of SEQ ID NO: 1884681
gcgacuuuguuuccucaag

SEQ ID NO: 2283827 - RNA, 19 nt, Artificial Sequence
  Description of Artificial Sequence: Synthetic oligonucleotide
  Antisense strand to SEQ ID NO: 2283826
cuugaggaaacaaagucgc

SEQ ID NO: 2283828 - RNA, 19 nt, Artificial Sequence
  Description of Artificial Sequence: Synthetic oligonucleotide
  Sense strand starting at position 2420 of SEQ ID NO: 1884681
ccaucugauucgcaucuuu

SEQ ID NO: 2283829 - RNA, 19 nt, Artificial Sequence
  Description of Artificial Sequence: Synthetic oligonucleotide
  Antisense strand to SEQ ID NO: 2283828
aaagaugcgaaucagaugg

SEQ ID NO: 2283830 - RNA, 19 nt, Artificial Sequence
  Description of Artificial Sequence: Synthetic oligonucleotide
  Sense strand starting at position 2690 of SEQ ID NO: 1884681
gaaugucugucggcuguua

SEQ ID NO: 2283831 - RNA, 19 nt, Artificial Sequence
  Description of Artificial Sequence: Synthetic oligonucleotide
  Antisense strand to SEQ ID NO: 2283830
uaacagccgacagacauuc

SEQ ID NO: 2283832 - RNA, 19 nt, Artificial Sequence
  Description of Artificial Sequence: Synthetic oligonucleotide
  Sense strand starting at position 2698 of SEQ ID NO: 1884681
gucggcuguuaguuccuaa

SEQ ID NO: 2283833 - RNA, 19 nt, Artificial Sequence
  Description of Artificial Sequence: Synthetic oligonucleotide
  Antisense strand to SEQ ID NO: 2283832
uuaggaacuaacagccgac

SEQ ID NO: 2283834 - RNA, 19 nt, Artificial Sequence
  Description of Artificial Sequence: Synthetic oligonucleotide
  Sense strand starting at position 2701 of SEQ ID NO: 1884681
ggcuguuaguuccuaagcu

SEQ ID NO: 2283835 - RNA, 19 nt, Artificial Sequence
  Description of Artificial Sequence: Synthetic oligonucleotide
  Antisense strand to SEQ ID NO: 2283834
agcuuaggaacuaacagcc

SEQ ID NO: 2283836 - RNA, 19 nt, Artificial Sequence
  Description of Artificial Sequence: Synthetic oligonucleotide
  Sense strand starting at position 2705 of SEQ ID NO: 1884681
guuaguuccuaagcucuga

SEQ ID NO: 2283837 - RNA, 19 nt, Artificial Sequence
  Description of Artificial Sequence: Synthetic oligonucleotide
  Antisense strand to SEQ ID NO: 2283836
ucagagcuuaggaacuaac

SEQ ID NO: 2283838 - RNA, 19 nt, Artificial Sequence
  Description of Artificial Sequence: Synthetic oligonucleotide
  Sense strand starting at position 2731 of SEQ ID NO: 1884681
ucacaauaccuguagcaga

SEQ ID NO: 2283839 - RNA, 19 nt, Artificial Sequence
  Description of Artificial Sequence: Synthetic oligonucleotide
  Antisense strand to SEQ ID NO: 2283838
ucugcuacagguauuguga

SEQ ID NO: 2283840 - RNA, 19 nt, Artificial Sequence
  Description of Artificial Sequence: Synthetic oligonucleotide
  Sense strand starting at position 2766 of SEQ ID NO: 1884681
uuuggauucuguuaagaau

SEQ ID NO: 2283841 - RNA, 19 nt, Artificial Sequence
  Description of Artificial Sequence: Synthetic oligonucleotide
  Antisense strand to SEQ ID NO: 2283840
auucuuaacagaauccaaa

SEQ ID NO: 2283842 - RNA, 19 nt, Artificial Sequence
  Description of Artificial Sequence: Synthetic oligonucleotide
  Sense strand starting at position 2775 of SEQ ID NO: 1884681
uguuaagaaucucaggaaa

SEQ ID NO: 2283843 - RNA, 19 nt, Artificial Sequence
  Description of Artificial Sequence: Synthetic oligonucleotide
  Antisense strand to SEQ ID NO: 2283842
uuuccugagauucuuaaca

SEQ ID NO: 2283844 - RNA, 19 nt, Artificial Sequence
  Description of Artificial Sequence: Synthetic oligonucleotide
  Sense strand starting at position 2777 of SEQ ID NO: 1884681
uuaagaaucucaggaaagc

SEQ ID NO: 2283845 - RNA, 19 nt, Artificial Sequence
  Description of Artificial Sequence: Synthetic oligonucleotide
  Antisense strand to SEQ ID NO: 2283844
gcuuuccugagauucuuaa

SEQ ID NO: 2283846 - RNA, 19 nt, Artificial Sequence
  Description of Artificial Sequence: Synthetic oligonucleotide
  Sense strand starting at position 3125 of SEQ ID NO: 1884681
uucuccaaguaauguuaua

SEQ ID NO: 2283847 - RNA, 19 nt, Artificial Sequence
  Description of Artificial Sequence: Synthetic oligonucleotide
  Antisense strand to SEQ ID NO: 2283846
uauaacauuacuuggagaa

SEQ ID NO: 2283848 - RNA, 19 nt, Artificial Sequence
  Description of Artificial Sequence: Synthetic oligonucleotide
  Sense strand starting at position 3266 of SEQ ID NO: 1884681
ccuccugugucuugaggaa

SEQ ID NO: 2283849 - RNA, 19 nt, Artificial Sequence
  Description of Artificial Sequence: Synthetic oligonucleotide
  Antisense strand to SEQ ID NO: 2283848
uuccucaagacacaggagg

SEQ ID NO: 2283850 - RNA, 19 nt, Artificial Sequence
  Description of Artificial Sequence: Synthetic oligonucleotide
  Sense strand starting at position 3270 of SEQ ID NO: 1884681
cugugucuugaggaagagu

SEQ ID NO: 2283851 - RNA, 19 nt, Artificial Sequence
  Description of Artificial Sequence: Synthetic oligonucleotide
  Antisense strand to SEQ ID NO: 2283850
acucuuccucaagacacag

SEQ ID NO: 2283852 - RNA, 19 nt, Artificial Sequence
  Description of Artificial Sequence: Synthetic oligonucleotide
  Sense strand starting at position 3659 of SEQ ID NO: 1884681
guaaauauuuaggguuucu

SEQ ID NO: 2283853 - RNA, 19 nt, Artificial Sequence
  Description of Artificial Sequence: Synthetic oligonucleotide
  Antisense strand to SEQ ID NO: 2283852
agaaacccuaaauauuuac

SEQ ID NO: 2283854 - RNA, 19 nt, Artificial Sequence
  Description of Artificial Sequence: Synthetic oligonucleotide
  Sense strand starting at position 232 of SEQ ID NO: 1884682
cgacuuaauaaguaggagu

SEQ ID NO: 2283855 - RNA, 19 nt, Artificial Sequence
  Description of Artificial Sequence: Synthetic oligonucleotide
  Antisense strand to SEQ ID NO: 2283854
acuccuacuuauuaagucg

SEQ ID NO: 2283856 - RNA, 19 nt, Artificial Sequence
  Description of Artificial Sequence: Synthetic oligonucleotide
  Sense strand starting at position 234 of SEQ ID NO: 1884682
acuuaauaaguaggaguuu

SEQ ID NO: 2283857 - RNA, 19 nt, Artificial Sequence
  Description of Artificial Sequence: Synthetic oligonucleotide
  Antisense strand to SEQ ID NO: 2283856
aaacuccuacuuauuaagu

SEQ ID NO: 2283858 - RNA, 19 nt, Artificial Sequence
  Description of Artificial Sequence: Synthetic oligonucleotide
  Sense strand starting at position 240 of SEQ ID NO: 1884682
uaaguaggaguuugucaau

SEQ ID NO: 2283859 - RNA, 19 nt, Artificial Sequence
  Description of Artificial Sequence: Synthetic oligonucleotide
  Antisense strand to SEQ ID NO: 2283858
auugacaaacuccuacuua

SEQ ID NO: 2283860 - RNA, 19 nt, Artificial Sequence
  Description of Artificial Sequence: Synthetic oligonucleotide
  Sense strand starting at position 246 of SEQ ID NO: 1884682
ggaguuugucaauggacuu

SEQ ID NO: 2283861 - RNA, 19 nt, Artificial Sequence
  Description of Artificial Sequence: Synthetic oligonucleotide
  Antisense strand to SEQ ID NO: 2283860
aaguccauugacaaacucc

SEQ ID NO: 2283862 - RNA, 19 nt, Artificial Sequence
  Description of Artificial Sequence: Synthetic oligonucleotide
  Sense strand starting at position 258 of SEQ ID NO: 1884682
uggacuucucuggaacugu

SEQ ID NO: 2283863 - RNA, 19 nt, Artificial Sequence
  Description of Artificial Sequence: Synthetic oligonucleotide
  Antisense strand to SEQ ID NO: 2283862
acaguuccagagaagucca

SEQ ID NO: 2283864 - RNA, 19 nt, Artificial Sequence
  Description of Artificial Sequence: Synthetic oligonucleotide
  Sense strand starting at position 383 of SEQ ID NO: 1884682
aaguaaguagucugaugag

SEQ ID NO: 2283865 - RNA, 19 nt, Artificial Sequence
  Description of Artificial Sequence: Synthetic oligonucleotide
  Antisense strand to SEQ ID NO: 2283864
cucaucagacuacuuacuu

SEQ ID NO: 2283866 - RNA, 19 nt, Artificial Sequence
  Description of Artificial Sequence: Synthetic oligonucleotide
  Sense strand starting at position 561 of SEQ ID NO: 1884682
aaaggcuacccuugggaaa

SEQ ID NO: 2283867 - RNA, 19 nt, Artificial Sequence
  Description of Artificial Sequence: Synthetic oligonucleotide
  Antisense strand to SEQ ID NO: 2283866
uuucccaaggguagccuuu

SEQ ID NO: 2283868 - RNA, 19 nt, Artificial Sequence
  Description of Artificial Sequence: Synthetic oligonucleotide
  Sense strand starting at position 562 of SEQ ID NO: 1884682
aaggcuacccuugggaaau

SEQ ID NO: 2283869 - RNA, 19 nt, Artificial Sequence
  Description of Artificial Sequence: Synthetic oligonucleotide
  Antisense strand to SEQ ID NO: 2283868
auuucccaaggguagccuu

SEQ ID NO: 2283870 - RNA, 19 nt, Artificial Sequence
  Description of Artificial Sequence: Synthetic oligonucleotide
  Sense strand starting at position 583 of SEQ ID NO: 1884682
gucaccuucugcucuaaga

SEQ ID NO: 2283871 - RNA, 19 nt, Artificial Sequence
  Description of Artificial Sequence: Synthetic oligonucleotide
  Antisense strand to SEQ ID NO: 2283870
ucuuagagcagaaggugac

SEQ ID NO: 2283872 - RNA, 19 nt, Artificial Sequence
  Description of Artificial Sequence: Synthetic oligonucleotide
  Sense strand starting at position 674 of SEQ ID NO: 1884682
uacagagagugaucacauu

SEQ ID NO: 2283873 - RNA, 19 nt, Artificial Sequence
  Description of Artificial Sequence: Synthetic oligonucleotide
  Antisense strand to SEQ ID NO: 2283872
aaugugaucacucucugua

SEQ ID NO: 2283874 - RNA, 19 nt, Artificial Sequence
  Description of Artificial Sequence: Synthetic oligonucleotide
  Sense strand starting at position 1100 of SEQ ID NO: 1884682
auguaaguucuauacaguu

SEQ ID NO: 2283875 - RNA, 19 nt, Artificial Sequence
  Description of Artificial Sequence: Synthetic oligonucleotide
  Antisense strand to SEQ ID NO: 2283874
aacuguauagaacuuacau

SEQ ID NO: 2283876 - RNA, 19 nt, Artificial Sequence
  Description of Artificial Sequence: Synthetic oligonucleotide
  Sense strand starting at position 1188 of SEQ ID NO: 1884682
aguggaagccuucgugaau

SEQ ID NO: 2283877 - RNA, 19 nt, Artificial Sequence
  Description of Artificial Sequence: Synthetic oligonucleotide
  Antisense strand to SEQ ID NO: 2283876
auucacgaaggcuuccacu

SEQ ID NO: 2283878 - RNA, 19 nt, Artificial Sequence
  Description of Artificial Sequence: Synthetic oligonucleotide
  Sense strand starting at position 1191 of SEQ ID NO: 1884682
ggaagccuucgugaaugca

SEQ ID NO: 2283879 - RNA, 19 nt, Artificial Sequence
  Description of Artificial Sequence: Synthetic oligonucleotide
  Antisense strand to SEQ ID NO: 2283878
ugcauucacgaaggcuucc

SEQ ID NO: 2283880 - RNA, 19 nt, Artificial Sequence
  Description of Artificial Sequence: Synthetic oligonucleotide
  Sense strand starting at position 1707 of SEQ ID NO: 1884682
acaugcuccugguucuaua

SEQ ID NO: 2283881 - RNA, 19 nt, Artificial Sequence
  Description of Artificial Sequence: Synthetic oligonucleotide
  Antisense strand to SEQ ID NO: 2283880
uauagaaccaggagcaugu

SEQ ID NO: 2283882 - RNA, 19 nt, Artificial Sequence
  Description of Artificial Sequence: Synthetic oligonucleotide
  Sense strand starting at position 1747 of SEQ ID NO: 1884682
caacuuggccaguaugaac

SEQ ID NO: 2283883 - RNA, 19 nt, Artificial Sequence
  Description of Artificial Sequence: Synthetic oligonucleotide
  Antisense strand to SEQ ID NO: 2283882
guucauacuggccaaguug

SEQ ID NO: 2283884 - RNA, 19 nt, Artificial Sequence
  Description of Artificial Sequence: Synthetic oligonucleotide
  Sense strand starting at position 1932 of SEQ ID NO: 1884682
ugcuguuugcagcuauuga

SEQ ID NO: 2283885 - RNA, 19 nt, Artificial Sequence
  Description of Artificial Sequence: Synthetic oligonucleotide
  Antisense strand to SEQ ID NO: 2283884
ucaauagcugcaaacagca

SEQ ID NO: 2283886 - RNA, 19 nt, Artificial Sequence
  Description of Artificial Sequence: Synthetic oligonucleotide
  Sense strand starting at position 1973 of SEQ ID NO: 1884682
ggaacuaggucggcuuaau

SEQ ID NO: 2283887 - RNA, 19 nt, Artificial Sequence
  Description of Artificial Sequence: Synthetic oligonucleotide
  Antisense strand to SEQ ID NO: 2283886
auuaagccgaccuaguucc

SEQ ID NO: 2283888 - RNA, 19 nt, Artificial Sequence
  Description of Artificial Sequence: Synthetic oligonucleotide
  Sense strand starting at position 1984 of SEQ ID NO: 1884682
ggcuuaauugguugcagaa

SEQ ID NO: 2283889 - RNA, 19 nt, Artificial Sequence
  Description of Artificial Sequence: Synthetic oligonucleotide
  Antisense strand to SEQ ID NO: 2283888
uucugcaaccaauuaagcc

SEQ ID NO: 2283890 - RNA, 19 nt, Artificial Sequence
  Description of Artificial Sequence: Synthetic oligonucleotide
  Sense strand starting at position 2009 of SEQ ID NO: 1884682
gucuuacugagauguuggu

SEQ ID NO: 2283891 - RNA, 19 nt, Artificial Sequence
  Description of Artificial Sequence: Synthetic oligonucleotide
  Antisense strand to SEQ ID NO: 2283890
accaacaucucaguaagac

SEQ ID NO: 2283892 - RNA, 19 nt, Artificial Sequence
  Description of Artificial Sequence: Synthetic oligonucleotide
  Sense strand starting at position 2074 of SEQ ID NO: 1884682
guuugugaacuuuauuaag

SEQ ID NO: 2283893 - RNA, 19 nt, Artificial Sequence
  Description of Artificial Sequence: Synthetic oligonucleotide
  Antisense strand to SEQ ID NO: 2283892
cuuaauaaaguucacaaac

SEQ ID NO: 2283894 - RNA, 19 nt, Artificial Sequence
  Description of Artificial Sequence: Synthetic oligonucleotide
  Sense strand starting at position 2076 of SEQ ID NO: 1884682
uugugaacuuuauuaagcu

SEQ ID NO: 2283895 - RNA, 19 nt, Artificial Sequence
  Description of Artificial Sequence: Synthetic oligonucleotide
  Antisense strand to SEQ ID NO: 2283894
agcuuaauaaaguucacaa

SEQ ID NO: 2283896 - RNA, 19 nt, Artificial Sequence
  Description of Artificial Sequence: Synthetic oligonucleotide
  Sense strand starting at position 2227 of SEQ ID NO: 1884682
ugaggcuagaagugugaga

SEQ ID NO: 2283897 - RNA, 19 nt, Artificial Sequence
  Description of Artificial Sequence: Synthetic oligonucleotide
  Antisense strand to SEQ ID NO: 2283896
ucucacacuucuagccuca

SEQ ID NO: 2283898 - RNA, 19 nt, Artificial Sequence
  Description of Artificial Sequence: Synthetic oligonucleotide
  Sense strand starting at position 2538 of SEQ ID NO: 1884682
gggaacacgccuuaccauu

SEQ ID NO: 2283899 - RNA, 19 nt, Artificial Sequence
  Description of Artificial Sequence: Synthetic oligonucleotide
  Antisense strand to SEQ ID NO: 2283898
aaugguaaggcguguuccc

SEQ ID NO: 2283900 - RNA, 19 nt, Artificial Sequence
  Description of Artificial Sequence: Synthetic oligonucleotide
  Sense strand starting at position 2618 of SEQ ID NO: 1884682
guugaugugauuggaagga

SEQ ID NO: 2283901 - RNA, 19 nt, Artificial Sequence
  Description of Artificial Sequence: Synthetic oligonucleotide
  Antisense strand to SEQ ID NO: 2283900
uccuuccaaucacaucaac

SEQ ID NO: 2283902 - RNA, 19 nt, Artificial Sequence
  Description of Artificial Sequence: Synthetic oligonucleotide
  Sense strand starting at position 2623 of SEQ ID NO: 1884682
ugugauuggaaggaugcua

SEQ ID NO: 2283903 - RNA, 19 nt, Artificial Sequence
  Description of Artificial Sequence: Synthetic oligonucleotide
  Antisense strand to SEQ ID NO: 2283902
uagcauccuuccaaucaca

SEQ ID NO: 2283904 - RNA, 19 nt, Artificial Sequence
  Description of Artificial Sequence: Synthetic oligonucleotide
  Sense strand starting at position 2642 of SEQ ID NO: 1884682
acaccaaaugucgagacuu

SEQ ID NO: 2283905 - RNA, 19 nt, Artificial Sequence
  Description of Artificial Sequence: Synthetic oligonucleotide
  Antisense strand to SEQ ID NO: 2283904
aagucucgacauuuggugu

SEQ ID NO: 2283906 - RNA, 19 nt, Artificial Sequence
  Description of Artificial Sequence: Synthetic oligonucleotide
  Sense strand starting at position 3160 of SEQ ID NO: 1884682
accuguauauaaucaugua

SEQ ID NO: 2283907 - RNA, 19 nt, Artificial Sequence
  Description of Artificial Sequence: Synthetic oligonucleotide
  Antisense strand to SEQ ID NO: 2283906
uacaugauuauauacaggu

SEQ ID NO: 2283908 - RNA, 19 nt, Artificial Sequence
  Description of Artificial Sequence: Synthetic oligonucleotide
  Sense strand starting at position 3263 of SEQ ID NO: 1884682
cagggagacuccuauagau

SEQ ID NO: 2283909 - RNA, 19 nt, Artificial Sequence
  Description of Artificial Sequence: Synthetic oligonucleotide
  Antisense strand to SEQ ID NO: 2283908
aucuauaggagucucccug

SEQ ID NO: 2283910 - RNA, 19 nt, Artificial Sequence
  Description of Artificial Sequence: Synthetic oligonucleotide
  Sense strand starting at position 3273 of SEQ ID NO: 1884682
ccuauagauuuagagacua

SEQ ID NO: 2283911 - RNA, 19 nt, Artificial Sequence
  Description of Artificial Sequence: Synthetic oligonucleotide
  Antisense strand to SEQ ID NO: 2283910
uagucucuaaaucuauagg

SEQ ID NO: 2283912 - RNA, 19 nt, Artificial Sequence
  Description of Artificial Sequence: Synthetic oligonucleotide
  Sense strand starting at position 3316 of SEQ ID NO: 1884682
uguguaaucuuguuuggau

SEQ ID NO: 2283913 - RNA, 19 nt, Artificial Sequence
  Description of Artificial Sequence: Synthetic oligonucleotide
  Antisense strand to SEQ ID NO: 2283912
auccaaacaagauuacaca

SEQ ID NO: 2283914 - RNA, 19 nt, Artificial Sequence
  Description of Artificial Sequence: Synthetic oligonucleotide
  Sense strand starting at position 3317 of SEQ ID NO: 1884682
guguaaucuuguuuggauc

SEQ ID NO: 2283915 - RNA, 19 nt, Artificial Sequence
  Description of Artificial Sequence: Synthetic oligonucleotide
  Antisense strand to SEQ ID NO: 2283914
gauccaaacaagauuacac

SEQ ID NO: 2283916 - RNA, 19 nt, Artificial Sequence
  Description of Artificial Sequence: Synthetic oligonucleotide
  Sense strand starting at position 3461 of SEQ ID NO: 1884682
auccaugcccuugagcaau

SEQ ID NO: 2283917 - RNA, 19 nt, Artificial Sequence
  Description of Artificial Sequence: Synthetic oligonucleotide
  Antisense strand to SEQ ID NO: 2283916
auugcucaagggcauggau

SEQ ID NO: 2283918 - RNA, 19 nt, Artificial Sequence
  Description of Artificial Sequence: Synthetic oligonucleotide
  Sense strand starting at position 3467 of SEQ ID NO: 1884682
gcccuugagcaauaugacu

SEQ ID NO: 2283919 - RNA, 19 nt, Artificial Sequence
  Description of Artificial Sequence: Synthetic oligonucleotide
  Antisense strand to SEQ ID NO: 2283918
agucauauugcucaagggc

SEQ ID NO: 2283920 - RNA, 19 nt, Artificial Sequence
  Description of Artificial Sequence: Synthetic oligonucleotide
  Sense strand starting at position 3472 of SEQ ID NO: 1884682
ugagcaauaugacuuugca

SEQ ID NO: 2283921 - RNA, 19 nt, Artificial Sequence
  Description of Artificial Sequence: Synthetic oligonucleotide
  Antisense strand to SEQ ID NO: 2283920
ugcaaagucauauugcuca

SEQ ID NO: 2283922 - RNA, 19 nt, Artificial Sequence
  Description of Artificial Sequence: Synthetic oligonucleotide
  Sense strand starting at position 3612 of SEQ ID NO: 1884682
cccauaagccauggaaaca

SEQ ID NO: 2283923 - RNA, 19 nt, Artificial Sequence
  Description of Artificial Sequence: Synthetic oligonucleotide
  Antisense strand to SEQ ID NO: 2283922
uguuuccauggcuuauggg

SEQ ID NO: 2283924 - RNA, 19 nt, Artificial Sequence
  Description of Artificial Sequence: Synthetic oligonucleotide
  Sense strand starting at position 3623 of SEQ ID NO: 1884682
uggaaacaagccuguucua

SEQ ID NO: 2283925 - RNA, 19 nt, Artificial Sequence
  Description of Artificial Sequence: Synthetic oligonucleotide
  Antisense strand to SEQ ID NO: 2283924
uagaacaggcuuguuucca

SEQ ID NO: 2283926 - RNA, 19 nt, Artificial Sequence
  Description of Artificial Sequence: Synthetic oligonucleotide
  Sense strand starting at position 3726 of SEQ ID NO: 1884682
gcugacuccagagguauaa

SEQ ID NO: 2283927 - RNA, 19 nt, Artificial Sequence
  Description of Artificial Sequence: Synthetic oligonucleotide
  Antisense strand to SEQ ID NO: 2283926
uuauaccucuggagucagc

SEQ ID NO: 2283928 - RNA, 19 nt, Artificial Sequence
  Description of Artificial Sequence: Synthetic oligonucleotide
  Sense strand starting at position 3792 of SEQ ID NO: 1884682
ccaacuggcccguggaauu

SEQ ID NO: 2283929 - RNA, 19 nt, Artificial Sequence
  Description of Artificial Sequence: Synthetic oligonucleotide
  Antisense strand to SEQ ID NO: 2283928
aauuccacgggccaguugg

SEQ ID NO: 2283930 - RNA, 19 nt, Artificial Sequence
  Description of Artificial Sequence: Synthetic oligonucleotide
  Sense strand starting at position 3803 of SEQ ID NO: 1884682
guggaauuaugagcacuaa

SEQ ID NO: 2283931 - RNA, 19 nt, Artificial Sequence
  Description of Artificial Sequence: Synthetic oligonucleotide
  Antisense strand to SEQ ID NO: 2283930
uuagugcucauaauuccac

SEQ ID NO: 2283932 - RNA, 19 nt, Artificial Sequence
  Description of Artificial Sequence: Synthetic oligonucleotide
  Sense strand starting at position 3934 of SEQ ID NO: 1884682
uuaaauuucuaaggcauga

SEQ ID NO: 2283933 - RNA, 19 nt, Artificial Sequence
  Description of Artificial Sequence: Synthetic oligonucleotide
  Antisense strand to SEQ ID NO: 2283932
ucaugccuuagaaauuuaa

SEQ ID NO: 2283934 - RNA, 19 nt, Artificial Sequence
  Description of Artificial Sequence: Synthetic oligonucleotide
  Sense strand starting at position 44 of SEQ ID NO: 1884683
aaacauuaggagugcuaug

SEQ ID NO: 2283935 - RNA, 19 nt, Artificial Sequence
  Description of Artificial Sequence: Synthetic oligonucleotide
  Antisense strand to SEQ ID NO: 2283934
cauagcacuccuaauguuu

SEQ ID NO: 2283936 - RNA, 19 nt, Artificial Sequence
  Description of Artificial Sequence: Synthetic oligonucleotide
  Sense strand starting at position 125 of SEQ ID NO: 1884683
auaagcccucuuugaaaug

SEQ ID NO: 2283937 - RNA, 19 nt, Artificial Sequence
  Description of Artificial Sequence: Synthetic oligonucleotide
  Antisense strand to SEQ ID NO: 2283936
cauuucaaagagggcuuau

SEQ ID NO: 2283938 - RNA, 19 nt, Artificial Sequence
  Description of Artificial Sequence: Synthetic oligonucleotide
  Sense strand starting at position 277 of SEQ ID NO: 1884683
augaaugagucccuagaac

SEQ ID NO: 2283939 - RNA, 19 nt, Artificial Sequence
  Description of Artificial Sequence: Synthetic oligonucleotide
  Antisense strand to SEQ ID NO: 2283938
guucuagggacucauucau

SEQ ID NO: 2283940 - RNA, 19 nt, Artificial Sequence
  Description of Artificial Sequence: Synthetic oligonucleotide
  Sense strand starting at position 290 of SEQ ID NO: 1884683
uagaacgagccugaguuaa

SEQ ID NO: 2283941 - RNA, 19 nt, Artificial Sequence
  Description of Artificial Sequence: Synthetic oligonucleotide
  Antisense strand to SEQ ID NO: 2283940
uuaacucaggcucguucua

SEQ ID NO: 2283942 - RNA, 19 nt, Artificial Sequence
  Description of Artificial Sequence: Synthetic oligonucleotide
  Sense strand starting at position 546 of SEQ ID NO: 1884683
uggucauguccacagcaaa

SEQ ID NO: 2283943 - RNA, 19 nt, Artificial Sequence
  Description of Artificial Sequence: Synthetic oligonucleotide
  Antisense strand to SEQ ID NO: 2283942
uuugcuguggacaugacca

SEQ ID NO: 2283944 - RNA, 19 nt, Artificial Sequence
  Description of Artificial Sequence: Synthetic oligonucleotide
  Sense strand starting at position 663 of SEQ ID NO: 1884683
ggcuucugucaucucguuu

SEQ ID NO: 2283945 - RNA, 19 nt, Artificial Sequence
  Description of Artificial Sequence: Synthetic oligonucleotide
  Antisense strand to SEQ ID NO: 2283944
aaacgagaugacagaagcc

SEQ ID NO: 2283946 - RNA, 19 nt, Artificial Sequence
  Description of Artificial Sequence: Synthetic oligonucleotide
  Sense strand starting at position 796 of SEQ ID NO: 1884683
guuccaaaguauccugaaa

SEQ ID NO: 2283947 - RNA, 19 nt, Artificial Sequence
  Description of Artificial Sequence: Synthetic oligonucleotide
  Antisense strand to SEQ ID NO: 2283946
uuucaggauacuuuggaac

SEQ ID NO: 2283948 - RNA, 19 nt, Artificial Sequence
  Description of Artificial Sequence: Synthetic oligonucleotide
  Sense strand starting at position 927 of SEQ ID NO: 1884683
augaucauguuucugguaa

SEQ ID NO: 2283949 - RNA, 19 nt, Artificial Sequence
  Description of Artificial Sequence: Synthetic oligonucleotide
  Antisense strand to SEQ ID NO: 2283948
uuaccagaaacaugaucau

SEQ ID NO: 2283950 - RNA, 19 nt, Artificial Sequence
  Description of Artificial Sequence: Synthetic oligonucleotide
  Sense strand starting at position 1127 of SEQ ID NO: 1884683
cuccuaaguggugauagau

SEQ ID NO: 2283951 - RNA, 19 nt, Artificial Sequence
  Description of Artificial Sequence: Synthetic oligonucleotide
  Antisense strand to SEQ ID NO: 2283950
aucuaucaccacuuaggag

SEQ ID NO: 2283952 - RNA, 19 nt, Artificial Sequence
  Description of Artificial Sequence: Synthetic oligonucleotide
  Sense strand starting at position 1152 of SEQ ID NO: 1884683
auagcauugcuagauaaau

SEQ ID NO: 2283953 - RNA, 19 nt, Artificial Sequence
  Description of Artificial Sequence: Synthetic oligonucleotide
  Antisense strand to SEQ ID NO: 2283952
auuuaucuagcaaugcuau

SEQ ID NO: 2283954 - RNA, 19 nt, Artificial Sequence
  Description of Artificial Sequence: Synthetic oligonucleotide
  Sense strand starting at position 1611 of SEQ ID NO: 1884683
gugcccauucucuagaaug

SEQ ID NO: 2283955 - RNA, 19 nt, Artificial Sequence
  Description of Artificial Sequence: Synthetic oligonucleotide
  Antisense strand to SEQ ID NO: 2283954
cauucuagagaaugggcac

SEQ ID NO: 2283956 - RNA, 19 nt, Artificial Sequence
  Description of Artificial Sequence: Synthetic oligonucleotide
  Sense strand starting at position 1613 of SEQ ID NO: 1884683
gcccauucucuagaaugag

SEQ ID NO: 2283957 - RNA, 19 nt, Artificial Sequence
  Description of Artificial Sequence: Synthetic oligonucleotide
  Antisense strand to SEQ ID NO: 2283956
cucauucuagagaaugggc

SEQ ID NO: 2283958 - RNA, 19 nt, Artificial Sequence
  Description of Artificial Sequence: Synthetic oligonucleotide
  Sense strand starting at position 1621 of SEQ ID NO: 1884683
ucuagaaugaggcauugua

SEQ ID NO: 2283959 - RNA, 19 nt, Artificial Sequence
  Description of Artificial Sequence: Synthetic oligonucleotide
  Antisense strand to SEQ ID NO: 2283958
uacaaugccucauucuaga

SEQ ID NO: 2283960 - RNA, 19 nt, Artificial Sequence
  Description of Artificial Sequence: Synthetic oligonucleotide
  Sense strand starting at position 1656 of SEQ ID NO: 1884683
aguaguguauuuguacgaa

SEQ ID NO: 2283961 - RNA, 19 nt, Artificial Sequence
  Description of Artificial Sequence: Synthetic oligonucleotide
  Antisense strand to SEQ ID NO: 2283960
uucguacaaauacacuacu

SEQ ID NO: 2283962 - RNA, 19 nt, Artificial Sequence
  Description of Artificial Sequence: Synthetic oligonucleotide
  Sense strand starting at position 1659 of SEQ ID NO: 1884683
aguguauuuguacgaaguu

SEQ ID NO: 2283963 - RNA, 19 nt, Artificial Sequence
  Description of Artificial Sequence: Synthetic oligonucleotide
  Antisense strand to SEQ ID NO: 2283962
aacuucguacaaauacacu

SEQ ID NO: 2283964 - RNA, 19 nt, Artificial Sequence
  Description of Artificial Sequence: Synthetic oligonucleotide
  Sense strand starting at position 1765 of SEQ ID NO: 1884683
ggaucuaccugguucucaa

SEQ ID NO: 2283965 - RNA, 19 nt, Artificial Sequence
  Description of Artificial Sequence: Synthetic oligonucleotide
  Antisense strand to SEQ ID NO: 2283964
uugagaaccagguagaucc

SEQ ID NO: 2283966 - RNA, 19 nt, Artificial Sequence
  Description of Artificial Sequence: Synthetic oligonucleotide
  Sense strand starting at position 1872 of SEQ ID NO: 1884683
guagaaauaccagguuuaa

SEQ ID NO: 2283967 - RNA, 19 nt, Artificial Sequence
  Description of Artificial Sequence: Synthetic oligonucleotide
  Antisense strand to SEQ ID NO: 2283966
uuaaaccugguauuucuac

SEQ ID NO: 2283968 - RNA, 19 nt, Artificial Sequence
  Description of Artificial Sequence: Synthetic oligonucleotide
  Sense strand starting at position 1996 of SEQ ID NO: 1884683
gugcaauuaugacugaacu

SEQ ID NO: 2283969 - RNA, 19 nt, Artificial Sequence
  Description of Artificial Sequence: Synthetic oligonucleotide
  Antisense strand to SEQ ID NO: 2283968
aguucagucauaauugcac

SEQ ID NO: 2283970 - RNA, 19 nt, Artificial Sequence
  Description of Artificial Sequence: Synthetic oligonucleotide
  Sense strand starting at position 1997 of SEQ ID NO: 1884683
ugcaauuaugacugaacug

SEQ ID NO: 2283971 - RNA, 19 nt, Artificial Sequence
  Description of Artificial Sequence: Synthetic oligonucleotide
  Antisense strand to SEQ ID NO: 2283970
caguucagucauaauugca

SEQ ID NO: 2283972 - RNA, 19 nt, Artificial Sequence
  Description of Artificial Sequence: Synthetic oligonucleotide
  Sense strand starting at position 2037 of SEQ ID NO: 1884683
ugcaauauugcugagaaau

SEQ ID NO: 2283973 - RNA, 19 nt, Artificial Sequence
  Description of Artificial Sequence: Synthetic oligonucleotide
  Antisense strand to SEQ ID NO: 2283972
auuucucagcaauauugca

SEQ ID NO: 2283974 - RNA, 19 nt, Artificial Sequence
  Description of Artificial Sequence: Synthetic oligonucleotide
  Sense strand starting at position 2334 of SEQ ID NO: 1884683
acagguuuacgugacuuua

SEQ ID NO: 2283975 - RNA, 19 nt, Artificial Sequence
  Description of Artificial Sequence: Synthetic oligonucleotide
  Antisense strand to SEQ ID NO: 2283974
uaaagucacguaaaccugu

SEQ ID NO: 2283976 - RNA, 19 nt, Artificial Sequence
  Description of Artificial Sequence: Synthetic oligonucleotide
  Sense strand starting at position 2353 of SEQ ID NO: 1884683
ggaugaaauauguguaacu

SEQ ID NO: 2283977 - RNA, 19 nt, Artificial Sequence
  Description of Artificial Sequence: Synthetic oligonucleotide
  Antisense strand to SEQ ID NO: 2283976
aguuacacauauuucaucc

SEQ ID NO: 2283978 - RNA, 19 nt, Artificial Sequence
  Description of Artificial Sequence: Synthetic oligonucleotide
  Sense strand starting at position 2354 of SEQ ID NO: 1884683
gaugaaauauguguaacug

SEQ ID NO: 2283979 - RNA, 19 nt, Artificial Sequence
  Description of Artificial Sequence: Synthetic oligonucleotide
  Antisense strand to SEQ ID NO: 2283978
caguuacacauauuucauc

SEQ ID NO: 2283980 - RNA, 19 nt, Artificial Sequence
  Description of Artificial Sequence: Synthetic oligonucleotide
  Sense strand starting at position 2370 of SEQ ID NO: 1884683
cugccaguugaauaaugau

SEQ ID NO: 2283981 - RNA, 19 nt, Artificial Sequence
  Description of Artificial Sequence: Synthetic oligonucleotide
  Antisense strand to SEQ ID NO: 2283980
aucauuauucaacuggcag

SEQ ID NO: 2283982 - RNA, 19 nt, Artificial Sequence
  Description of Artificial Sequence: Synthetic oligonucleotide
  Sense strand starting at position 2500 of SEQ ID NO: 1884683
uguguuauaccugaaauac

SEQ ID NO: 2283983 - RNA, 19 nt, Artificial Sequence
  Description of Artificial Sequence: Synthetic oligonucleotide
  Antisense strand to SEQ ID NO: 2283982
guauuucagguauaacaca

SEQ ID NO: 2283984 - RNA, 19 nt, Artificial Sequence
  Description of Artificial Sequence: Synthetic oligonucleotide
  Sense strand starting at position 2509 of SEQ ID NO: 1884683
ccugaaauacugggauggu

SEQ ID NO: 2283985 - RNA, 19 nt, Artificial Sequence
  Description of Artificial Sequence: Synthetic oligonucleotide
  Antisense strand to SEQ ID NO: 2283984
accaucccaguauuucagg

SEQ ID NO: 2283986 - RNA, 19 nt, Artificial Sequence
  Description of Artificial Sequence: Synthetic oligonucleotide
  Sense strand starting at position 2512 of SEQ ID NO: 1884683
gaaauacugggauggugua

SEQ ID NO: 2283987 - RNA, 19 nt, Artificial Sequence
  Description of Artificial Sequence: Synthetic oligonucleotide
  Antisense strand to SEQ ID NO: 2283986
uacaccaucccaguauuuc

SEQ ID NO: 2283988 - RNA, 19 nt, Artificial Sequence
  Description of Artificial Sequence: Synthetic oligonucleotide
  Sense strand starting at position 2549 of SEQ ID NO: 1884683
uugaguccuugauuauuau

SEQ ID NO: 2283989 - RNA, 19 nt, Artificial Sequence
  Description of Artificial Sequence: Synthetic oligonucleotide
  Antisense strand to SEQ ID NO: 2283988
auaauaaucaaggacucaa

SEQ ID NO: 2283990 - RNA, 19 nt, Artificial Sequence
  Description of Artificial Sequence: Synthetic oligonucleotide
  Sense strand starting at position 2550 of SEQ ID NO: 1884683
ugaguccuugauuauuaua

SEQ ID NO: 2283991 - RNA, 19 nt, Artificial Sequence
  Description of Artificial Sequence: Synthetic oligonucleotide
  Antisense strand to SEQ ID NO: 2283990
uauaauaaucaaggacuca

SEQ ID NO: 2283992 - RNA, 19 nt, Artificial Sequence
  Description of Artificial Sequence: Synthetic oligonucleotide
  Sense strand starting at position 2552 of SEQ ID NO: 1884683
aguccuugauuauuauaag

SEQ ID NO: 2283993 - RNA, 19 nt, Artificial Sequence
  Description of Artificial Sequence: Synthetic oligonucleotide
  Antisense strand to SEQ ID NO: 2283992
cuuauaauaaucaaggacu

SEQ ID NO: 2283994 - RNA, 19 nt, Artificial Sequence
  Description of Artificial Sequence: Synthetic oligonucleotide
  Sense strand starting at position 2653 of SEQ ID NO: 1884683
aggauacauuuccaguuau

SEQ ID NO: 2283995 - RNA, 19 nt, Artificial Sequence
  Description of Artificial Sequence: Synthetic oligonucleotide
  Antisense strand to SEQ ID NO: 2283994
auaacuggaaauguauccu

SEQ ID NO: 2283996 - RNA, 19 nt, Artificial Sequence
  Description of Artificial Sequence: Synthetic oligonucleotide
  Sense strand starting at position 2699 of SEQ ID NO: 1884683
agauccaguuuauuauaca

SEQ ID NO: 2283997 - RNA, 19 nt, Artificial Sequence
  Description of Artificial Sequence: Synthetic oligonucleotide
  Antisense strand to SEQ ID NO: 2283996
uguauaauaaacuggaucu

SEQ ID NO: 2283998 - RNA, 19 nt, Artificial Sequence
  Description of Artificial Sequence: Synthetic oligonucleotide
  Sense strand starting at position 2855 of SEQ ID NO: 1884683
gcgaucacucaagaauggu

SEQ ID NO: 2283999 - RNA, 19 nt, Artificial Sequence
  Description of Artificial Sequence: Synthetic oligonucleotide
  Antisense strand to SEQ ID NO: 2283998
accauucuugagugaucgc

SEQ ID NO: 2284000 - RNA, 19 nt, Artificial Sequence
  Description of Artificial Sequence: Synthetic oligonucleotide
  Sense strand starting at position 2884 of SEQ ID NO: 1884683
ggaguaugccaauaccuaa

SEQ ID NO: 2284001 - RNA, 19 nt, Artificial Sequence
  Description of Artificial Sequence: Synthetic oligonucleotide
  Antisense strand to SEQ ID NO: 2284000
uuagguauuggcauacucc

SEQ ID NO: 2284002 - RNA, 19 nt, Artificial Sequence
  Description of Artificial Sequence: Synthetic oligonucleotide
  Sense strand starting at position 2909 of SEQ ID NO: 1884683
aaaguagauuaucugguuu

SEQ ID NO: 2284003 - RNA, 19 nt, Artificial Sequence
  Description of Artificial Sequence: Synthetic oligonucleotide
  Antisense strand to SEQ ID NO: 2284002
aaaccagauaaucuacuuu

SEQ ID NO: 2284004 - RNA, 19 nt, Artificial Sequence
  Description of Artificial Sequence: Synthetic oligonucleotide
  Sense strand starting at position 2998 of SEQ ID NO: 1884683
acaauaguccugugaguaa

SEQ ID NO: 2284005 - RNA, 19 nt, Artificial Sequence
  Description of Artificial Sequence: Synthetic oligonucleotide
  Antisense strand to SEQ ID NO: 2284004
uuacucacaggacuauugu

SEQ ID NO: 2284006 - RNA, 19 nt, Artificial Sequence
  Description of Artificial Sequence: Synthetic oligonucleotide
  Sense strand starting at position 3002 of SEQ ID NO: 1884683
uaguccugugaguaaagua

SEQ ID NO: 2284007 - RNA, 19 nt, Artificial Sequence
  Description of Artificial Sequence: Synthetic oligonucleotide
  Antisense strand to SEQ ID NO: 2284006
uacuuuacucacaggacua

SEQ ID NO: 2284008 - RNA, 19 nt, Artificial Sequence
  Description of Artificial Sequence: Synthetic oligonucleotide
  Sense strand starting at position 3164 of SEQ ID NO: 1884683
gugauucuugcugaaucac

SEQ ID NO: 2284009 - RNA, 19 nt, Artificial Sequence
  Description of Artificial Sequence: Synthetic oligonucleotide
  Antisense strand to SEQ ID NO: 2284008
gugauucagcaagaaucac

SEQ ID NO: 2284010 - RNA, 19 nt, Artificial Sequence
  Description of Artificial Sequence: Synthetic oligonucleotide
  Sense strand starting at position 3708 of SEQ ID NO: 1884683
cgacuuuggcauuauauaa

SEQ ID NO: 2284011 - RNA, 19 nt, Artificial Sequence
  Description of Artificial Sequence: Synthetic oligonucleotide
  Antisense strand to SEQ ID NO: 2284010
uuauauaaugccaaagucg

SEQ ID NO: 2284012 - RNA, 19 nt, Artificial Sequence
  Description of Artificial Sequence: Synthetic oligonucleotide
  Sense strand starting at position 3766 of SEQ ID NO: 1884683
uuaugaccuguguaaucau

SEQ ID NO: 2284013 - RNA, 19 nt, Artificial Sequence
  Description of Artificial Sequence: Synthetic oligonucleotide
  Antisense strand to SEQ ID NO: 2284012
augauuacacaggucauaa

SEQ ID NO: 2284014 - RNA, 19 nt, Artificial Sequence
  Description of Artificial Sequence: Synthetic oligonucleotide
  Sense strand starting at position 41 of SEQ ID NO: 1884684
aagagauugcgccauugga

SEQ ID NO: 2284015 - RNA, 19 nt, Artificial Sequence
  Description of Artificial Sequence: Synthetic oligonucleotide
  Antisense strand to SEQ ID NO: 2284014
uccaauggcgcaaucucuu

SEQ ID NO: 2284016 - RNA, 19 nt, Artificial Sequence
  Description of Artificial Sequence: Synthetic oligonucleotide
  Sense strand starting at position 380 of SEQ ID NO: 1884684
gcgacagagcgauacugua

SEQ ID NO: 2284017 - RNA, 19 nt, Artificial Sequence
  Description of Artificial Sequence: Synthetic oligonucleotide
  Antisense strand to SEQ ID NO: 2284016
uacaguaucgcucugucgc

SEQ ID NO: 2284018 - RNA, 19 nt, Artificial Sequence
  Description of Artificial Sequence: Synthetic oligonucleotide
  Sense strand starting at position 474 of SEQ ID NO: 1884684
ggugcucacacggauagau

SEQ ID NO: 2284019 - RNA, 19 nt, Artificial Sequence
  Description of Artificial Sequence: Synthetic oligonucleotide
  Antisense strand to SEQ ID NO: 2284018
aucuauccgugugagcacc

SEQ ID NO: 2284020 - RNA, 19 nt, Artificial Sequence
  Description of Artificial Sequence: Synthetic oligonucleotide
  Sense strand starting at position 476 of SEQ ID NO: 1884684
ugcucacacggauagauua

SEQ ID NO: 2284021 - RNA, 19 nt, Artificial Sequence
  Description of Artificial Sequence: Synthetic oligonucleotide
  Antisense strand to SEQ ID NO: 2284020
uaaucuauccgugugagca

SEQ ID NO: 2284022 - RNA, 19 nt, Artificial Sequence
  Description of Artificial Sequence: Synthetic oligonucleotide
  Sense strand starting at position 526 of SEQ ID NO: 1884684
ugggucaaaguagauguua

SEQ ID NO: 2284023 - RNA, 19 nt, Artificial Sequence
  Description of Artificial Sequence: Synthetic oligonucleotide
  Antisense strand to SEQ ID NO: 2284022
uaacaucuacuuugaccca

SEQ ID NO: 2284024 - RNA, 19 nt, Artificial Sequence
  Description of Artificial Sequence: Synthetic oligonucleotide
  Sense strand starting at position 531 of SEQ ID NO: 1884684
caaaguagauguuagggaa

SEQ ID NO: 2284025 - RNA, 19 nt, Artificial Sequence
  Description of Artificial Sequence: Synthetic oligonucleotide
  Antisense strand to SEQ ID NO: 2284024
uucccuaacaucuacuuug

SEQ ID NO: 2284026 - RNA, 19 nt, Artificial Sequence
  Description of Artificial Sequence: Synthetic oligonucleotide
  Sense strand starting at position 826 of SEQ ID NO: 1884684
auuucugaauucugaagga

SEQ ID NO: 2284027 - RNA, 19 nt, Artificial Sequence
  Description of Artificial Sequence: Synthetic oligonucleotide
  Antisense strand to SEQ ID NO: 2284026
uccuucagaauucagaaau

SEQ ID NO: 2284028 - RNA, 19 nt, Artificial Sequence
  Description of Artificial Sequence: Synthetic oligonucleotide
  Sense strand starting at position 842 of SEQ ID NO: 1884684
ggaucauggcucugucaac

SEQ ID NO: 2284029 - RNA, 19 nt, Artificial Sequence
  Description of Artificial Sequence: Synthetic oligonucleotide
  Antisense strand to SEQ ID NO: 2284028
guugacagagccaugaucc

SEQ ID NO: 2284030 - RNA, 19 nt, Artificial Sequence
  Description of Artificial Sequence: Synthetic oligonucleotide
  Sense strand starting at position 843 of SEQ ID NO: 1884684
gaucauggcucugucaaca

SEQ ID NO: 2284031 - RNA, 19 nt, Artificial Sequence
  Description of Artificial Sequence: Synthetic oligonucleotide
  Antisense strand to SEQ ID NO: 2284030
uguugacagagccaugauc

SEQ ID NO: 2284032 - RNA, 19 nt, Artificial Sequence
  Description of Artificial Sequence: Synthetic oligonucleotide
  Sense strand starting at position 917 of SEQ ID NO: 1884684
ucccuaggguugucugaga

SEQ ID NO: 2284033 - RNA, 19 nt, Artificial Sequence
  Description of Artificial Sequence: Synthetic oligonucleotide
  Antisense strand to SEQ ID NO: 2284032
ucucagacaacccuaggga

SEQ ID NO: 2284034 - RNA, 19 nt, Artificial Sequence
  Description of Artificial Sequence: Synthetic oligonucleotide
  Sense strand starting at position 969 of SEQ ID NO: 1884684
ccauuagguuaagaauuaa

SEQ ID NO: 2284035 - RNA, 19 nt, Artificial Sequence
  Description of Artificial Sequence: Synthetic oligonucleotide
  Antisense strand to SEQ ID NO: 2284034
uuaauucuuaaccuaaugg

SEQ ID NO: 2284036 - RNA, 19 nt, Artificial Sequence
  Description of Artificial Sequence: Synthetic oligonucleotide
  Sense strand starting at position 1302 of SEQ ID NO: 1884684
ugaugcuacaagugguuaa

SEQ ID NO: 2284037 - RNA, 19 nt, Artificial Sequence
  Description of Artificial Sequence: Synthetic oligonucleotide
  Antisense strand to SEQ ID NO: 2284036
uuaaccacuuguagcauca

SEQ ID NO: 2284038 - RNA, 19 nt, Artificial Sequence
  Description of Artificial Sequence: Synthetic oligonucleotide
  Sense strand starting at position 1305 of SEQ ID NO: 1884684
ugcuacaagugguuaacau

SEQ ID NO: 2284039 - RNA, 19 nt, Artificial Sequence
  Description of Artificial Sequence: Synthetic oligonucleotide
  Antisense strand to SEQ ID NO: 2284038
auguuaaccacuuguagca

SEQ ID NO: 2284040 - RNA, 19 nt, Artificial Sequence
  Description of Artificial Sequence: Synthetic oligonucleotide
  Sense strand starting at position 1306 of SEQ ID NO: 1884684
gcuacaagugguuaacauc

SEQ ID NO: 2284041 - RNA, 19 nt, Artificial Sequence
  Description of Artificial Sequence: Synthetic oligonucleotide
  Antisense strand to SEQ ID NO: 2284040
gauguuaaccacuuguagc

SEQ ID NO: 2284042 - RNA, 19 nt, Artificial Sequence
  Description of Artificial Sequence: Synthetic oligonucleotide
  Sense strand starting at position 1411 of SEQ ID NO: 1884684
aggcauuauuuccuagugu

SEQ ID NO: 2284043 - RNA, 19 nt, Artificial Sequence
  Description of Artificial Sequence: Synthetic oligonucleotide
  Antisense strand to SEQ ID NO: 2284042
acacuaggaaauaaugccu

SEQ ID NO: 2284044 - RNA, 19 nt, Artificial Sequence
  Description of Artificial Sequence: Synthetic oligonucleotide
  Sense strand starting at position 1430 of SEQ ID NO: 1884684
cuuccaguucuccauguuu

SEQ ID NO: 2284045 - RNA, 19 nt, Artificial Sequence
  Description of Artificial Sequence: Synthetic oligonucleotide
  Antisense strand to SEQ ID NO: 2284044
aaacauggagaacuggaag

SEQ ID NO: 2284046 - RNA, 19 nt, Artificial Sequence
  Description of Artificial Sequence: Synthetic oligonucleotide
  Sense strand starting at position 1432 of SEQ ID NO: 1884684
uccaguucuccauguuuaa

SEQ ID NO: 2284047 - RNA, 19 nt, Artificial Sequence
  Description of Artificial Sequence: Synthetic oligonucleotide
  Antisense strand to SEQ ID NO: 2284046
uuaaacauggagaacugga

SEQ ID NO: 2284048 - RNA, 19 nt, Artificial Sequence
  Description of Artificial Sequence: Synthetic oligonucleotide
  Sense strand starting at position 1467 of SEQ ID NO: 1884684
guuauaagcugcucaacug

SEQ ID NO: 2284049 - RNA, 19 nt, Artificial Sequence
  Description of Artificial Sequence: Synthetic oligonucleotide
  Antisense strand to SEQ ID NO: 2284048
caguugagcagcuuauaac

SEQ ID NO: 2284050 - RNA, 19 nt, Artificial Sequence
  Description of Artificial Sequence: Synthetic oligonucleotide
  Sense strand starting at position 1502 of SEQ ID NO: 1884684
aagggaugugauggacagu

SEQ ID NO: 2284051 - RNA, 19 nt, Artificial Sequence
  Description of Artificial Sequence: Synthetic oligonucleotide
  Antisense strand to SEQ ID NO: 2284050
acuguccaucacaucccuu

SEQ ID NO: 2284052 - RNA, 19 nt, Artificial Sequence
  Description of Artificial Sequence: Synthetic oligonucleotide
  Sense strand starting at position 1508 of SEQ ID NO: 1884684
ugugauggacaguaucuua

SEQ ID NO: 2284053 - RNA, 19 nt, Artificial Sequence
  Description of Artificial Sequence: Synthetic oligonucleotide
  Antisense strand to SEQ ID NO: 2284052
uaagauacuguccaucaca

SEQ ID NO: 2284054 - RNA, 19 nt, Artificial Sequence
  Description of Artificial Sequence: Synthetic oligonucleotide
  Sense strand starting at position 1522 of SEQ ID NO: 1884684
ucuuacugcucccuggaau

SEQ ID NO: 2284055 - RNA, 19 nt, Artificial Sequence
  Description of Artificial Sequence: Synthetic oligonucleotide
  Antisense strand to SEQ ID NO: 2284054
auuccagggagcaguaaga

SEQ ID NO: 2284056 - RNA, 19 nt, Artificial Sequence
  Description of Artificial Sequence: Synthetic oligonucleotide
  Sense strand starting at position 1869 of SEQ ID NO: 1884684
ugaaccaacucauuguguu

SEQ ID NO: 2284057 - RNA, 19 nt, Artificial Sequence
  Description of Artificial Sequence: Synthetic oligonucleotide
  Antisense strand to SEQ ID NO: 2284056
aacacaaugaguugguuca

SEQ ID NO: 2284058 - RNA, 19 nt, Artificial Sequence
  Description of Artificial Sequence: Synthetic oligonucleotide
  Sense strand starting at position 1950 of SEQ ID NO: 1884684
aaacauuucugguggaaac

SEQ ID NO: 2284059 - RNA, 19 nt, Artificial Sequence
  Description of Artificial Sequence: Synthetic oligonucleotide
  Antisense strand to SEQ ID NO: 2284058
guuuccaccagaaauguuu

SEQ ID NO: 2284060 - RNA, 19 nt, Artificial Sequence
  Description of Artificial Sequence: Synthetic oligonucleotide
  Sense strand starting at position 1989 of SEQ ID NO: 1884684
ucaucauagugagcaauuc

SEQ ID NO: 2284061 - RNA, 19 nt, Artificial Sequence
  Description of Artificial Sequence: Synthetic oligonucleotide
  Antisense strand to SEQ ID NO: 2284060
gaauugcucacuaugauga

SEQ ID NO: 2284062 - RNA, 19 nt, Artificial Sequence
  Description of Artificial Sequence: Synthetic oligonucleotide
  Sense strand starting at position 2307 of SEQ ID NO: 1884684
gcugacuccuauucuugau

SEQ ID NO: 2284063 - RNA, 19 nt, Artificial Sequence
  Description of Artificial Sequence: Synthetic oligonucleotide
  Antisense strand to SEQ ID NO: 2284062
aucaagaauaggagucagc

SEQ ID NO: 2284064 - RNA, 19 nt, Artificial Sequence
  Description of Artificial Sequence: Synthetic oligonucleotide
  Sense strand starting at position 2420 of SEQ ID NO: 1884684
cuauuagaaucagacggaa

SEQ ID NO: 2284065 - RNA, 19 nt, Artificial Sequence
  Description of Artificial Sequence: Synthetic oligonucleotide
  Antisense strand to SEQ ID NO: 2284064
uuccgucugauucuaauag

SEQ ID NO: 2284066 - RNA, 19 nt, Artificial Sequence
  Description of Artificial Sequence: Synthetic oligonucleotide
  Sense strand starting at position 2432 of SEQ ID NO: 1884684
gacggaauuuagcauccuu

SEQ ID NO: 2284067 - RNA, 19 nt, Artificial Sequence
  Description of Artificial Sequence: Synthetic oligonucleotide
  Antisense strand to SEQ ID NO: 2284066
aaggaugcuaaauuccguc

SEQ ID NO: 2284068 - RNA, 19 nt, Artificial Sequence
  Description of Artificial Sequence: Synthetic oligonucleotide
  Sense strand starting at position 2609 of SEQ ID NO: 1884684
guacuaagccuuggauaau

SEQ ID NO: 2284069 - RNA, 19 nt, Artificial Sequence
  Description of Artificial Sequence: Synthetic oligonucleotide
  Antisense strand to SEQ ID NO: 2284068
auuauccaaggcuuaguac

SEQ ID NO: 2284070 - RNA, 19 nt, Artificial Sequence
  Description of Artificial Sequence: Synthetic oligonucleotide
  Sense strand starting at position 2720 of SEQ ID NO: 1884684
cucucaagaugcuuucgaa

SEQ ID NO: 2284071 - RNA, 19 nt, Artificial Sequence
  Description of Artificial Sequence: Synthetic oligonucleotide
  Antisense strand to SEQ ID NO: 2284070
uucgaaagcaucuugagag

SEQ ID NO: 2284072 - RNA, 19 nt, Artificial Sequence
  Description of Artificial Sequence: Synthetic oligonucleotide
  Sense strand starting at position 2846 of SEQ ID NO: 1884684
ugugcaacaccaugugaau

SEQ ID NO: 2284073 - RNA, 19 nt, Artificial Sequence
  Description of Artificial Sequence: Synthetic oligonucleotide
  Antisense strand to SEQ ID NO: 2284072
auucacaugguguugcaca

SEQ ID NO: 2284074 - RNA, 19 nt, Artificial Sequence
  Description of Artificial Sequence: Synthetic oligonucleotide
  Sense strand starting at position 2855 of SEQ ID NO: 1884684
ccaugugaaucucucagga

SEQ ID NO: 2284075 - RNA, 19 nt, Artificial Sequence
  Description of Artificial Sequence: Synthetic oligonucleotide
  Antisense strand to SEQ ID NO: 2284074
uccugagagauucacaugg

SEQ ID NO: 2284076 - RNA, 19 nt, Artificial Sequence
  Description of Artificial Sequence: Synthetic oligonucleotide
  Sense strand starting at position 2962 of SEQ ID NO: 1884684
auaguuuccuaucuguaag

SEQ ID NO: 2284077 - RNA, 19 nt, Artificial Sequence
  Description of Artificial Sequence: Synthetic oligonucleotide
  Antisense strand to SEQ ID NO: 2284076
cuuacagauaggaaacuau

SEQ ID NO: 2284078 - RNA, 19 nt, Artificial Sequence
  Description of Artificial Sequence: Synthetic oligonucleotide
  Sense strand starting at position 3076 of SEQ ID NO: 1884684
aaccuuucugguggaaacu

SEQ ID NO: 2284079 - RNA, 19 nt, Artificial Sequence
  Description of Artificial Sequence: Synthetic oligonucleotide
  Antisense strand to SEQ ID NO: 2284078
aguuuccaccagaaagguu

SEQ ID NO: 2284080 - RNA, 19 nt, Artificial Sequence
  Description of Artificial Sequence: Synthetic oligonucleotide
  Sense strand starting at position 3110 of SEQ ID NO: 1884684
ccaucaucacagugagcuu

SEQ ID NO: 2284081 - RNA, 19 nt, Artificial Sequence
  Description of Artificial Sequence: Synthetic oligonucleotide
  Antisense strand to SEQ ID NO: 2284080
aagcucacugugaugaugg

SEQ ID NO: 2284082 - RNA, 19 nt, Artificial Sequence
  Description of Artificial Sequence: Synthetic oligonucleotide
  Sense strand starting at position 3149 of SEQ ID NO: 1884684
agggauuaaugagauucca

SEQ ID NO: 2284083 - RNA, 19 nt, Artificial Sequence
  Description of Artificial Sequence: Synthetic oligonucleotide
  Antisense strand to SEQ ID NO: 2284082
uggaaucucauuaaucccu

SEQ ID NO: 2284084 - RNA, 19 nt, Artificial Sequence
  Description of Artificial Sequence: Synthetic oligonucleotide
  Sense strand starting at position 3182 of SEQ ID NO: 1884684
ugagaacucuggucagaua

SEQ ID NO: 2284085 - RNA, 19 nt, Artificial Sequence
  Description of Artificial Sequence: Synthetic oligonucleotide
  Antisense strand to SEQ ID NO: 2284084
uaucugaccagaguucuca

SEQ ID NO: 2284086 - RNA, 19 nt, Artificial Sequence
  Description of Artificial Sequence: Synthetic oligonucleotide
  Sense strand starting at position 3190 of SEQ ID NO: 1884684
cuggucagauauucuucua

SEQ ID NO: 2284087 - RNA, 19 nt, Artificial Sequence
  Description of Artificial Sequence: Synthetic oligonucleotide
  Antisense strand to SEQ ID NO: 2284086
uagaagaauaucugaccag

SEQ ID NO: 2284088 - RNA, 19 nt, Artificial Sequence
  Description of Artificial Sequence: Synthetic oligonucleotide
  Sense strand starting at position 3238 of SEQ ID NO: 1884684
ucuaaugagcucugacuac

SEQ ID NO: 2284089 - RNA, 19 nt, Artificial Sequence
  Description of Artificial Sequence: Synthetic oligonucleotide
  Antisense strand to SEQ ID NO: 2284088
guagucagagcucauuaga

SEQ ID NO: 2284090 - RNA, 19 nt, Artificial Sequence
  Description of Artificial Sequence: Synthetic oligonucleotide
  Sense strand starting at position 3286 of SEQ ID NO: 1884684
gugucauaccuccaauuag

SEQ ID NO: 2284091 - RNA, 19 nt, Artificial Sequence
  Description of Artificial Sequence: Synthetic oligonucleotide
  Antisense strand to SEQ ID NO: 2284090
cuaauuggagguaugacac

SEQ ID NO: 2284092 - RNA, 19 nt, Artificial Sequence
  Description of Artificial Sequence: Synthetic oligonucleotide
  Sense strand starting at position 3629 of SEQ ID NO: 1884684
aagugagaaucggucucaa

SEQ ID NO: 2284093 - RNA, 19 nt, Artificial Sequence
  Description of Artificial Sequence: Synthetic oligonucleotide
  Antisense strand to SEQ ID NO: 2284092
uugagaccgauucucacuu

SEQ ID NO: 2284094 - RNA, 19 nt, Artificial Sequence
  Description of Artificial Sequence: Synthetic oligonucleotide
  Sense strand starting at position 178 of SEQ ID NO: 1884685
ugaugcuacaagugguuaa

SEQ ID NO: 2284095 - RNA, 19 nt, Artificial Sequence
  Description of Artificial Sequence: Synthetic oligonucleotide
  Antisense strand to SEQ ID NO: 2284094
uuaaccacuuguagcauca

SEQ ID NO: 2284096 - RNA, 19 nt, Artificial Sequence
  Description of Artificial Sequence: Synthetic oligonucleotide
  Sense strand starting at position 181 of SEQ ID NO: 1884685
ugcuacaagugguuaacau

SEQ ID NO: 2284097 - RNA, 19 nt, Artificial Sequence
  Description of Artificial Sequence: Synthetic oligonucleotide
  Antisense strand to SEQ ID NO: 2284096
auguuaaccacuuguagca

SEQ ID NO: 2284098 - RNA, 19 nt, Artificial Sequence
  Description of Artificial Sequence: Synthetic oligonucleotide
  Sense strand starting at position 182 of SEQ ID NO: 1884685
gcuacaagugguuaacauc

SEQ ID NO: 2284099 - RNA, 19 nt, Artificial Sequence
  Description of Artificial Sequence: Synthetic oligonucleotide
  Antisense strand to SEQ ID NO: 2284098
gauguuaaccacuuguagc

SEQ ID NO: 2284100 - RNA, 19 nt, Artificial Sequence
  Description of Artificial Sequence: Synthetic oligonucleotide
  Sense strand starting at position 287 of SEQ ID NO: 1884685
aggcauuauuuccuagugu

SEQ ID NO: 2284101 - RNA, 19 nt, Artificial Sequence
  Description of Artificial Sequence: Synthetic oligonucleotide
  Antisense strand to SEQ ID NO: 2284100
acacuaggaaauaaugccu

SEQ ID NO: 2284102 - RNA, 19 nt, Artificial Sequence
  Description of Artificial Sequence: Synthetic oligonucleotide
  Sense strand starting at position 306 of SEQ ID NO: 1884685
cuuccaguucuccauguuu

SEQ ID NO: 2284103 - RNA, 19 nt, Artificial Sequence
  Description of Artificial Sequence: Synthetic oligonucleotide
  Antisense strand to SEQ ID NO: 2284102
aaacauggagaacuggaag

SEQ ID NO: 2284104 - RNA, 19 nt, Artificial Sequence
  Description of Artificial Sequence: Synthetic oligonucleotide
  Sense strand starting at position 378 of SEQ ID NO: 1884685
aagggaugugauggacagu

SEQ ID NO: 2284105 - RNA, 19 nt, Artificial Sequence
  Description of Artificial Sequence: Synthetic oligonucleotide
  Antisense strand to SEQ ID NO: 2284104
acuguccaucacaucccuu

SEQ ID NO: 2284106 - RNA, 19 nt, Artificial Sequence
  Description of Artificial Sequence: Synthetic oligonucleotide
  Sense strand starting at position 384 of SEQ ID NO: 1884685
ugugauggacaguaucuua

SEQ ID NO: 2284107 - RNA, 19 nt, Artificial Sequence
  Description of Artificial Sequence: Synthetic oligonucleotide
  Antisense strand to SEQ ID NO: 2284106
uaagauacuguccaucaca

SEQ ID NO: 2284108 - RNA, 19 nt, Artificial Sequence
  Description of Artificial Sequence: Synthetic oligonucleotide
  Sense strand starting at position 398 of SEQ ID NO: 1884685
ucuuacugcucccuggaau

SEQ ID NO: 2284109 - RNA, 19 nt, Artificial Sequence
  Description of Artificial Sequence: Synthetic oligonucleotide
  Antisense strand to SEQ ID NO: 2284108
auuccagggagcaguaaga

SEQ ID NO: 2284110 - RNA, 19 nt, Artificial Sequence
  Description of Artificial Sequence: Synthetic oligonucleotide
  Sense strand starting at position 745 of SEQ ID NO: 1884685
ugaaccaacucauuguguu

SEQ ID NO: 2284111 - RNA, 19 nt, Artificial Sequence
  Description of Artificial Sequence: Synthetic oligonucleotide
  Antisense strand to SEQ ID NO: 2284110
aacacaaugaguugguuca

SEQ ID NO: 2284112 - RNA, 19 nt, Artificial Sequence
  Description of Artificial Sequence: Synthetic oligonucleotide
  Sense strand starting at position 826 of SEQ ID NO: 1884685
aaacauuucugguggaaac

SEQ ID NO: 2284113 - RNA, 19 nt, Artificial Sequence
  Description of Artificial Sequence: Synthetic oligonucleotide
  Antisense strand to SEQ ID NO: 2284112
guuuccaccagaaauguuu

SEQ ID NO: 2284114 - RNA, 19 nt, Artificial Sequence
  Description of Artificial Sequence: Synthetic oligonucleotide
  Sense strand starting at position 865 of SEQ ID NO: 1884685
ucaucauagugagcaauuc

SEQ ID NO: 2284115 - RNA, 19 nt, Artificial Sequence
  Description of Artificial Sequence: Synthetic oligonucleotide
  Antisense strand to SEQ ID NO: 2284114
gaauugcucacuaugauga

SEQ ID NO: 2284116 - RNA, 19 nt, Artificial Sequence
  Description of Artificial Sequence: Synthetic oligonucleotide
  Sense strand starting at position 1183 of SEQ ID NO: 1884685
gcugacuccuauucuugau

SEQ ID NO: 2284117 - RNA, 19 nt, Artificial Sequence
  Description of Artificial Sequence: Synthetic oligonucleotide
  Antisense strand to SEQ ID NO: 2284116
aucaagaauaggagucagc

SEQ ID NO: 2284118 - RNA, 19 nt, Artificial Sequence
  Description of Artificial Sequence: Synthetic oligonucleotide
  Sense strand starting at position 1485 of SEQ ID NO: 1884685
guacuaagccuuggauaau

SEQ ID NO: 2284119 - RNA, 19 nt, Artificial Sequence
  Description of Artificial Sequence: Synthetic oligonucleotide
  Antisense strand to SEQ ID NO: 2284118
auuauccaaggcuuaguac

SEQ ID NO: 2284120 - RNA, 19 nt, Artificial Sequence
  Description of Artificial Sequence: Synthetic oligonucleotide
  Sense strand starting at position 1596 of SEQ ID NO: 1884685
cucucaagaugcuuucgaa

SEQ ID NO: 2284121 - RNA, 19 nt, Artificial Sequence
  Description of Artificial Sequence: Synthetic oligonucleotide
  Antisense strand to SEQ ID NO: 2284120
uucgaaagcaucuugagag

SEQ ID NO: 2284122 - RNA, 19 nt, Artificial Sequence
  Description of Artificial Sequence: Synthetic oligonucleotide
  Sense strand starting at position 1722 of SEQ ID NO: 1884685
ugugcaacaccaugugaau

SEQ ID NO: 2284123 - RNA, 19 nt, Artificial Sequence
  Description of Artificial Sequence: Synthetic oligonucleotide
  Antisense strand to SEQ ID NO: 2284122
auucacaugguguugcaca

SEQ ID NO: 2284124 - RNA, 19 nt, Artificial Sequence
  Description of Artificial Sequence: Synthetic oligonucleotide
  Sense strand starting at position 1731 of SEQ ID NO: 1884685
ccaugugaaucucucagga

SEQ ID NO: 2284125 - RNA, 19 nt, Artificial Sequence
  Description of Artificial Sequence: Synthetic oligonucleotide
  Antisense strand to SEQ ID NO: 2284124
uccugagagauucacaugg

SEQ ID NO: 2284126 - RNA, 19 nt, Artificial Sequence
  Description of Artificial Sequence: Synthetic oligonucleotide
  Sense strand starting at position 1838 of SEQ ID NO: 1884685
auaguuuccuaucuguaag

SEQ ID NO: 2284127 - RNA, 19 nt, Artificial Sequence
  Description of Artificial Sequence: Synthetic oligonucleotide
  Antisense strand to SEQ ID NO: 2284126
cuuacagauaggaaacuau

SEQ ID NO: 2284128 - RNA, 19 nt, Artificial Sequence
  Description of Artificial Sequence: Synthetic oligonucleotide
  Sense strand starting at position 1952 of SEQ ID NO: 1884685
aaccuuucugguggaaacu

SEQ ID NO: 2284129 - RNA, 19 nt, Artificial Sequence
  Description of Artificial Sequence: Synthetic oligonucleotide
  Antisense strand to SEQ ID NO: 2284128
aguuuccaccagaaagguu

SEQ ID NO: 2284130 - RNA, 19 nt, Artificial Sequence
  Description of Artificial Sequence: Synthetic oligonucleotide
  Sense strand starting at position 1986 of SEQ ID NO: 1884685
ccaucaucacagugagcuu

SEQ ID NO: 2284131 - RNA, 19 nt, Artificial Sequence
  Description of Artificial Sequence: Synthetic oligonucleotide
  Antisense strand to SEQ ID NO: 2284130
aagcucacugugaugaugg

SEQ ID NO: 2284132 - RNA, 19 nt, Artificial Sequence
  Description of Artificial Sequence: Synthetic oligonucleotide
  Sense strand starting at position 2025 of SEQ ID NO: 1884685
agggauuaaugagauucca

SEQ ID NO: 2284133 - RNA, 19 nt, Artificial Sequence
  Description of Artificial Sequence: Synthetic oligonucleotide
  Antisense strand to SEQ ID NO: 2284132
uggaaucucauuaaucccu

SEQ ID NO: 2284134 - RNA, 19 nt, Artificial Sequence
  Description of Artificial Sequence: Synthetic oligonucleotide
  Sense strand starting at position 2058 of SEQ ID NO: 1884685
ugagaacucuggucagaua

SEQ ID NO: 2284135 - RNA, 19 nt, Artificial Sequence
  Description of Artificial Sequence: Synthetic oligonucleotide
  Antisense strand to SEQ ID NO: 2284134
uaucugaccagaguucuca

SEQ ID NO: 2284136 - RNA, 19 nt, Artificial Sequence
  Description of Artificial Sequence: Synthetic oligonucleotide
  Sense strand starting at position 2066 of SEQ ID NO: 1884685
cuggucagauauucuucua

SEQ ID NO: 2284137 - RNA, 19 nt, Artificial Sequence
  Description of Artificial Sequence: Synthetic oligonucleotide
  Antisense strand to SEQ ID NO: 2284136
uagaagaauaucugaccag

SEQ ID NO: 2284138 - RNA, 19 nt, Artificial Sequence
  Description of Artificial Sequence: Synthetic oligonucleotide
  Sense strand starting at position 2114 of SEQ ID NO: 1884685
ucuaaugagcucugacuac

SEQ ID NO: 2284139 - RNA, 19 nt, Artificial Sequence
  Description of Artificial Sequence: Synthetic oligonucleotide
  Antisense strand to SEQ ID NO: 2284138
guagucagagcucauuaga

SEQ ID NO: 2284140 - RNA, 19 nt, Artificial Sequence
  Description of Artificial Sequence: Synthetic oligonucleotide
  Sense strand starting at position 2162 of SEQ ID NO: 1884685
gugucauaccuccaauuag

SEQ ID NO: 2284141 - RNA, 19 nt, Artificial Sequence
  Description of Artificial Sequence: Synthetic oligonucleotide
  Antisense strand to SEQ ID NO: 2284140
cuaauuggagguaugacac

SEQ ID NO: 2284142 - RNA, 19 nt, Artificial Sequence
  Description of Artificial Sequence: Synthetic oligonucleotide
  Sense strand starting at position 2505 of SEQ ID NO: 1884685
aagugagaaucggucucaa

SEQ ID NO: 2284143 - RNA, 19 nt, Artificial Sequence
  Description of Artificial Sequence: Synthetic oligonucleotide
  Antisense strand to SEQ ID NO: 2284142
uugagaccgauucucacuu

SEQ ID NO: 2284144 - RNA, 19 nt, Artificial Sequence
  Description of Artificial Sequence: Synthetic oligonucleotide
  Sense strand starting at position 3024 of SEQ ID NO: 1884685
cuugacagcugugugauuu

SEQ ID NO: 2284145 - RNA, 19 nt, Artificial Sequence
  Description of Artificial Sequence: Synthetic oligonucleotide
  Antisense strand to SEQ ID NO: 2284144
aaaucacacagcugucaag

SEQ ID NO: 2284146 - RNA, 19 nt, Artificial Sequence
  Description of Artificial Sequence: Synthetic oligonucleotide
  Sense strand starting at position 3097 of SEQ ID NO: 1884685
gggugaaagccaugaagau

SEQ ID NO: 2284147 - RNA, 19 nt, Artificial Sequence
  Description of Artificial Sequence: Synthetic oligonucleotide
  Antisense strand to SEQ ID NO: 2284146
aucuucauggcuuucaccc

SEQ ID NO: 2284148 - RNA, 19 nt, Artificial Sequence
  Description of Artificial Sequence: Synthetic oligonucleotide
  Sense strand starting at position 3123 of SEQ ID NO: 1884685
aaaguauuguggucagaau

SEQ ID NO: 2284149 - RNA, 19 nt, Artificial Sequence
  Description of Artificial Sequence: Synthetic oligonucleotide
  Antisense strand to SEQ ID NO: 2284148
auucugaccacaauacuuu

SEQ ID NO: 2284150 - RNA, 19 nt, Artificial Sequence
  Description of Artificial Sequence: Synthetic oligonucleotide
  Sense strand starting at position 3124 of SEQ ID NO: 1884685
aaguauuguggucagaauu

SEQ ID NO: 2284151 - RNA, 19 nt, Artificial Sequence
  Description of Artificial Sequence: Synthetic oligonucleotide
  Antisense strand to SEQ ID NO: 2284150
aauucugaccacaauacuu

SEQ ID NO: 2284152 - RNA, 19 nt, Artificial Sequence
  Description of Artificial Sequence: Synthetic oligonucleotide
  Sense strand starting at position 3130 of SEQ ID NO: 1884685
uguggucagaauuaaacga

SEQ ID NO: 2284153 - RNA, 19 nt, Artificial Sequence
  Description of Artificial Sequence: Synthetic oligonucleotide
  Antisense strand to SEQ ID NO: 2284152
ucguuuaauucugaccaca

SEQ ID NO: 2284154 - RNA, 19 nt, Artificial Sequence
  Description of Artificial Sequence: Synthetic oligonucleotide
  Sense strand starting at position 3143 of SEQ ID NO: 1884685
aaacgaaaucaguacaugu

SEQ ID NO: 2284155 - RNA, 19 nt, Artificial Sequence
  Description of Artificial Sequence: Synthetic oligonucleotide
  Antisense strand to SEQ ID NO: 2284154
acauguacugauuucguuu

SEQ ID NO: 2284156 - RNA, 19 nt, Artificial Sequence
  Description of Artificial Sequence: Synthetic oligonucleotide
  Sense strand starting at position 3145 of SEQ ID NO: 1884685
acgaaaucaguacauguga

SEQ ID NO: 2284157 - RNA, 19 nt, Artificial Sequence
  Description of Artificial Sequence: Synthetic oligonucleotide
  Antisense strand to SEQ ID NO: 2284156
ucacauguacugauuucgu

SEQ ID NO: 2284158 - RNA, 19 nt, Artificial Sequence
  Description of Artificial Sequence: Synthetic oligonucleotide
  Sense strand starting at position 3158 of SEQ ID NO: 1884685
augugaagugcuuacaaug

SEQ ID NO: 2284159 - RNA, 19 nt, Artificial Sequence
  Description of Artificial Sequence: Synthetic oligonucleotide
  Antisense strand to SEQ ID NO: 2284158
cauuguaagcacuucacau

SEQ ID NO: 2284160 - RNA, 19 nt, Artificial Sequence
  Description of Artificial Sequence: Synthetic oligonucleotide
  Sense strand starting at position 3266 of SEQ ID NO: 1884685
ggcgaaauaggcuauguua

SEQ ID NO: 2284161 - RNA, 19 nt, Artificial Sequence
  Description of Artificial Sequence: Synthetic oligonucleotide
  Antisense strand to SEQ ID NO: 2284160
uaacauagccuauuucgcc

SEQ ID NO: 2284162 - RNA, 19 nt, Artificial Sequence
  Description of Artificial Sequence: Synthetic oligonucleotide
  Sense strand starting at position 3268 of SEQ ID NO: 1884685
cgaaauaggcuauguuaga

SEQ ID NO: 2284163 - RNA, 19 nt, Artificial Sequence
  Description of Artificial Sequence: Synthetic oligonucleotide
  Antisense strand to SEQ ID NO: 2284162
ucuaacauagccuauuucg

SEQ ID NO: 2284164 - RNA, 19 nt, Artificial Sequence
  Description of Artificial Sequence: Synthetic oligonucleotide
  Sense strand starting at position 3269 of SEQ ID NO: 1884685
gaaauaggcuauguuagac

SEQ ID NO: 2284165 - RNA, 19 nt, Artificial Sequence
  Description of Artificial Sequence: Synthetic oligonucleotide
  Antisense strand to SEQ ID NO: 2284164
gucuaacauagccuauuuc

SEQ ID NO: 2284166 - RNA, 19 nt, Artificial Sequence
  Description of Artificial Sequence: Synthetic oligonucleotide
  Sense strand starting at position 3295 of SEQ ID NO: 1884685
cucaccgaucugugaagga

SEQ ID NO: 2284167 - RNA, 19 nt, Artificial Sequence
  Description of Artificial Sequence: Synthetic oligonucleotide
  Antisense strand to SEQ ID NO: 2284166
uccuucacagaucggugag

SEQ ID NO: 2284168 - RNA, 19 nt, Artificial Sequence
  Description of Artificial Sequence: Synthetic oligonucleotide
  Sense strand starting at position 3494 of SEQ ID NO: 1884685
gucgcuucacccgagacaa

SEQ ID NO: 2284169 - RNA, 19 nt, Artificial Sequence
  Description of Artificial Sequence: Synthetic oligonucleotide
  Antisense strand to SEQ ID NO: 2284168
uugucucgggugaagcgac

SEQ ID NO: 2284170 - RNA, 19 nt, Artificial Sequence
  Description of Artificial Sequence: Synthetic oligonucleotide
  Sense strand starting at position 3917 of SEQ ID NO: 1884685
gugacuacaucucccgaaa

SEQ ID NO: 2284171 - RNA, 19 nt, Artificial Sequence
  Description of Artificial Sequence: Synthetic oligonucleotide
  Antisense strand to SEQ ID NO: 2284170
uuucgggagauguagucac

SEQ ID NO: 2284172 - RNA, 19 nt, Artificial Sequence
  Description of Artificial Sequence: Synthetic oligonucleotide
  Sense strand starting at position 3950 of SEQ ID NO: 1884685
gcaagagaucgucaaucca

SEQ ID NO: 2284173 - RNA, 19 nt, Artificial Sequence
  Description of Artificial Sequence: Synthetic oligonucleotide
  Antisense strand to SEQ ID NO: 2284172
uggauugacgaucucuugc

SEQ ID NO: 2284174 - RNA, 19 nt, Artificial Sequence
  Description of Artificial Sequence: Synthetic oligonucleotide
  Sense strand starting at position 29 of SEQ ID NO: 1884686
ccagcuggccugggagauu

SEQ ID NO: 2284175 - RNA, 19 nt, Artificial Sequence
  Description of Artificial Sequence: Synthetic oligonucleotide
  Antisense strand to SEQ ID NO: 2284174
aaucucccaggccagcugg

SEQ ID NO: 2284176 - RNA, 19 nt, Artificial Sequence
  Description of Artificial Sequence: Synthetic oligonucleotide
  Sense strand starting at position 32 of SEQ ID NO: 1884686
gcuggccugggagauuauu

SEQ ID NO: 2284177 - RNA, 19 nt, Artificial Sequence
  Description of Artificial Sequence: Synthetic oligonucleotide
  Antisense strand to SEQ ID NO: 2284176
aauaaucucccaggccagc

SEQ ID NO: 2284178 - RNA, 19 nt, Artificial Sequence
  Description of Artificial Sequence: Synthetic oligonucleotide
  Sense strand starting at position 184 of SEQ ID NO: 1884686
uauugagaaugcccaguaa

SEQ ID NO: 2284179 - RNA, 19 nt, Artificial Sequence
  Description of Artificial Sequence: Synthetic oligonucleotide
  Antisense strand to SEQ ID NO: 2284178
uuacugggcauucucaaua

SEQ ID NO: 2284180 - RNA, 19 nt, Artificial Sequence
  Description of Artificial Sequence: Synthetic oligonucleotide
  Sense strand starting at position 298 of SEQ ID NO: 1884686
uacacuugguuggcuuaau

SEQ ID NO: 2284181 - RNA, 19 nt, Artificial Sequence
  Description of Artificial Sequence: Synthetic oligonucleotide
  Antisense strand to SEQ ID NO: 2284180
auuaagccaaccaagugua

SEQ ID NO: 2284182 - RNA, 19 nt, Artificial Sequence
  Description of Artificial Sequence: Synthetic oligonucleotide
  Sense strand starting at position 487 of SEQ ID NO: 1884686
uucucagcagucugaggaa

SEQ ID NO: 2284183 - RNA, 19 nt, Artificial Sequence
  Description of Artificial Sequence: Synthetic oligonucleotide
  Antisense strand to SEQ ID NO: 2284182
uuccucagacugcugagaa

SEQ ID NO: 2284184 - RNA, 19 nt, Artificial Sequence
  Description of Artificial Sequence: Synthetic oligonucleotide
  Sense strand starting at position 627 of SEQ ID NO: 1884686
gggccuuauucuuccuuaa

SEQ ID NO: 2284185 - RNA, 19 nt, Artificial Sequence
  Description of Artificial Sequence: Synthetic oligonucleotide
  Antisense strand to SEQ ID NO: 2284184
uuaaggaagaauaaggccc

SEQ ID NO: 2284186 - RNA, 19 nt, Artificial Sequence
  Description of Artificial Sequence: Synthetic oligonucleotide
  Sense strand starting at position 700 of SEQ ID NO: 1884686
gguggaaaccgcgaauguu

SEQ ID NO: 2284187 - RNA, 19 nt, Artificial Sequence
  Description of Artificial Sequence: Synthetic oligonucleotide
  Antisense strand to SEQ ID NO: 2284186
aacauucgcgguuuccacc

SEQ ID NO: 2284188 - RNA, 19 nt, Artificial Sequence
  Description of Artificial Sequence: Synthetic oligonucleotide
  Sense strand starting at position 728 of SEQ ID NO: 1884686
ucaucauugugacccuaca

SEQ ID NO: 2284189 - RNA, 19 nt, Artificial Sequence
  Description of Artificial Sequence: Synthetic oligonucleotide
  Antisense strand to SEQ ID NO: 2284188
uguagggucacaaugauga

SEQ ID NO: 2284190 - RNA, 19 nt, Artificial Sequence
  Description of Artificial Sequence: Synthetic oligonucleotide
  Sense strand starting at position 1206 of SEQ ID NO: 1884686
uuacccuugucauuaguga

SEQ ID NO: 2284191 - RNA, 19 nt, Artificial Sequence
  Description of Artificial Sequence: Synthetic oligonucleotide
  Antisense strand to SEQ ID NO: 2284190
ucacuaaugacaaggguaa

SEQ ID NO: 2284192 - RNA, 19 nt, Artificial Sequence
  Description of Artificial Sequence: Synthetic oligonucleotide
  Sense strand starting at position 1224 of SEQ ID NO: 1884686
auaguaaucuuguucucuu

SEQ ID NO: 2284193 - RNA, 19 nt, Artificial Sequence
  Description of Artificial Sequence: Synthetic oligonucleotide
  Antisense strand to SEQ ID NO: 2284192
aagagaacaagauuacuau

SEQ ID NO: 2284194 - RNA, 19 nt, Artificial Sequence
  Description of Artificial Sequence: Synthetic oligonucleotide
  Sense strand starting at position 1273 of SEQ ID NO: 1884686
ugaguauaccauuggcauc

SEQ ID NO: 2284195 - RNA, 19 nt, Artificial Sequence
  Description of Artificial Sequence: Synthetic oligonucleotide
  Antisense strand to SEQ ID NO: 2284194
gaugccaaugguauacuca

SEQ ID NO: 2284196 - RNA, 19 nt, Artificial Sequence
  Description of Artificial Sequence: Synthetic oligonucleotide
  Sense strand starting at position 1401 of SEQ ID NO: 1884686
ucauaaaccuugguaggaa

SEQ ID NO: 2284197 - RNA, 19 nt, Artificial Sequence
  Description of Artificial Sequence: Synthetic oligonucleotide
  Antisense strand to SEQ ID NO: 2284196
uuccuaccaagguuuauga

SEQ ID NO: 2284198 - RNA, 19 nt, Artificial Sequence
  Description of Artificial Sequence: Synthetic oligonucleotide
  Sense strand starting at position 1478 of SEQ ID NO: 1884686
gaagaauggucgcucaaac

SEQ ID NO: 2284199 - RNA, 19 nt, Artificial Sequence
  Description of Artificial Sequence: Synthetic oligonucleotide
  Antisense strand to SEQ ID NO: 2284198
guuugagcgaccauucuuc

SEQ ID NO: 2284200 - RNA, 19 nt, Artificial Sequence
  Description of Artificial Sequence: Synthetic oligonucleotide
  Sense strand starting at position 1523 of SEQ ID NO: 1884686
agacuuucugguggaaacu

SEQ ID NO: 2284201 - RNA, 19 nt, Artificial Sequence
  Description of Artificial Sequence: Synthetic oligonucleotide
  Antisense strand to SEQ ID NO: 2284200
aguuuccaccagaaagucu

SEQ ID NO: 2284202 - RNA, 19 nt, Artificial Sequence
  Description of Artificial Sequence: Synthetic oligonucleotide
  Sense strand starting at position 1568 of SEQ ID NO: 1884686
uagcgagucagucaagacu

SEQ ID NO: 2284203 - RNA, 19 nt, Artificial Sequence
  Description of Artificial Sequence: Synthetic oligonucleotide
  Antisense strand to SEQ ID NO: 2284202
agucuugacugacucgcua

SEQ ID NO: 2284204 - RNA, 19 nt, Artificial Sequence
  Description of Artificial Sequence: Synthetic oligonucleotide
  Sense strand starting at position 1590 of SEQ ID NO: 1884686
cuuuaucuguuaucaguaa

SEQ ID NO: 2284205 - RNA, 19 nt, Artificial Sequence
  Description of Artificial Sequence: Synthetic oligonucleotide
  Antisense strand to SEQ ID NO: 2284204
uuacugauaacagauaaag

SEQ ID NO: 2284206 - RNA, 19 nt, Artificial Sequence
  Description of Artificial Sequence: Synthetic oligonucleotide
  Sense strand starting at position 1594 of SEQ ID NO: 1884686
aucuguuaucaguaagcca

SEQ ID NO: 2284207 - RNA, 19 nt, Artificial Sequence
  Description of Artificial Sequence: Synthetic oligonucleotide
  Antisense strand to SEQ ID NO: 2284206
uggcuuacugauaacagau

SEQ ID NO: 2284208 - RNA, 19 nt, Artificial Sequence
  Description of Artificial Sequence: Synthetic oligonucleotide
  Sense strand starting at position 1714 of SEQ ID NO: 1884686
gcuugaugaggacagucau

SEQ ID NO: 2284209 - RNA, 19 nt, Artificial Sequence
  Description of Artificial Sequence: Synthetic oligonucleotide
  Antisense strand to SEQ ID NO: 2284208
augacuguccucaucaagc

SEQ ID NO: 2284210 - RNA, 19 nt, Artificial Sequence
  Description of Artificial Sequence: Synthetic oligonucleotide
  Sense strand starting at position 1906 of SEQ ID NO: 1884686
cuaucacucgcucagacau

SEQ ID NO: 2284211 - RNA, 19 nt, Artificial Sequence
  Description of Artificial Sequence: Synthetic oligonucleotide
  Antisense strand to SEQ ID NO: 2284210
augucugagcgagugauag

SEQ ID NO: 2284212 - RNA, 19 nt, Artificial Sequence
  Description of Artificial Sequence: Synthetic oligonucleotide
  Sense strand starting at position 1963 of SEQ ID NO: 1884686
ggaaacuacgaauguuuaa

SEQ ID NO: 2284213 - RNA, 19 nt, Artificial Sequence
  Description of Artificial Sequence: Synthetic oligonucleotide
  Antisense strand to SEQ ID NO: 2284212
uuaaacauucguaguuucc

SEQ ID NO: 2284214 - RNA, 19 nt, Artificial Sequence
  Description of Artificial Sequence: Synthetic oligonucleotide
  Sense strand starting at position 2018 of SEQ ID NO: 1884686
ugccuuuaggguuaauuga

SEQ ID NO: 2284215 - RNA, 19 nt, Artificial Sequence
  Description of Artificial Sequence: Synthetic oligonucleotide
  Antisense strand to SEQ ID NO: 2284214
ucaauuaacccuaaaggca

SEQ ID NO: 2284216 - RNA, 19 nt, Artificial Sequence
  Description of Artificial Sequence: Synthetic oligonucleotide
  Sense strand starting at position 2033 of SEQ ID NO: 1884686
uugagauaccauuguuacc

SEQ ID NO: 2284217 - RNA, 19 nt, Artificial Sequence
  Description of Artificial Sequence: Synthetic oligonucleotide
  Antisense strand to SEQ ID NO: 2284216
gguaacaaugguaucucaa

SEQ ID NO: 2284218 - RNA, 19 nt, Artificial Sequence
  Description of Artificial Sequence: Synthetic oligonucleotide
  Sense strand starting at position 2418 of SEQ ID NO: 1884686
cuucuuaugcuugcgcuua

SEQ ID NO: 2284219 - RNA, 19 nt, Artificial Sequence
  Description of Artificial Sequence: Synthetic oligonucleotide
  Antisense strand to SEQ ID NO: 2284218
uaagcgcaagcauaagaag

SEQ ID NO: 2284220 - RNA, 19 nt, Artificial Sequence
  Description of Artificial Sequence: Synthetic oligonucleotide
  Sense strand starting at position 2422 of SEQ ID NO: 1884686
uuaugcuugcgcuuaaacu

SEQ ID NO: 2284221 - RNA, 19 nt, Artificial Sequence
  Description of Artificial Sequence: Synthetic oligonucleotide
  Antisense strand to SEQ ID NO: 2284220
aguuuaagcgcaagcauaa

SEQ ID NO: 2284222 - RNA, 19 nt, Artificial Sequence
  Description of Artificial Sequence: Synthetic oligonucleotide
  Sense strand starting at position 2431 of SEQ ID NO: 1884686
cgcuuaaacucagcaauaa

SEQ ID NO: 2284223 - RNA, 19 nt, Artificial Sequence
  Description of Artificial Sequence: Synthetic oligonucleotide
  Antisense strand to SEQ ID NO: 2284222
uuauugcugaguuuaagcg

SEQ ID NO: 2284224 - RNA, 19 nt, Artificial Sequence
  Description of Artificial Sequence: Synthetic oligonucleotide
  Sense strand starting at position 2666 of SEQ ID NO: 1884686
ccgaacuugcaucacaaau

SEQ ID NO: 2284225 - RNA, 19 nt, Artificial Sequence
  Description of Artificial Sequence: Synthetic oligonucleotide
  Antisense strand to SEQ ID NO: 2284224
auuugugaugcaaguucgg

SEQ ID NO: 2284226 - RNA, 19 nt, Artificial Sequence
  Description of Artificial Sequence: Synthetic oligonucleotide
  Sense strand starting at position 2838 of SEQ ID NO: 1884686
gguaacagucuaggaauaa

SEQ ID NO: 2284227 - RNA, 19 nt, Artificial Sequence
  Description of Artificial Sequence: Synthetic oligonucleotide
  Antisense strand to SEQ ID NO: 2284226
uuauuccuagacuguuacc

SEQ ID NO: 2284228 - RNA, 19 nt, Artificial Sequence
  Description of Artificial Sequence: Synthetic oligonucleotide
  Sense strand starting at position 2863 of SEQ ID NO: 1884686
gaccacagauugguaacua

SEQ ID NO: 2284229 - RNA, 19 nt, Artificial Sequence
  Description of Artificial Sequence: Synthetic oligonucleotide
  Antisense strand to SEQ ID NO: 2284228
uaguuaccaaucugugguc

SEQ ID NO: 2284230 - RNA, 19 nt, Artificial Sequence
  Description of Artificial Sequence: Synthetic oligonucleotide
  Sense strand starting at position 2867 of SEQ ID NO: 1884686
acagauugguaacuauuau

SEQ ID NO: 2284231 - RNA, 19 nt, Artificial Sequence
  Description of Artificial Sequence: Synthetic oligonucleotide
  Antisense strand to SEQ ID NO: 2284230
auaauaguuaccaaucugu

SEQ ID NO: 2284232 - RNA, 19 nt, Artificial Sequence
  Description of Artificial Sequence: Synthetic oligonucleotide
  Sense strand starting at position 2913 of SEQ ID NO: 1884686
uggauuaaugcuggugaaa

SEQ ID NO: 2284233 - RNA, 19 nt, Artificial Sequence
  Description of Artificial Sequence: Synthetic oligonucleotide
  Antisense strand to SEQ ID NO: 2284232
uuucaccagcauuaaucca

SEQ ID NO: 2284234 - RNA, 19 nt, Artificial Sequence
  Description of Artificial Sequence: Synthetic oligonucleotide
  Sense strand starting at position 2962 of SEQ ID NO: 1884686
guaaauuacuguguaauug

SEQ ID NO: 2284235 - RNA, 19 nt, Artificial Sequence
  Description of Artificial Sequence: Synthetic oligonucleotide
  Antisense strand to SEQ ID NO: 2284234
caauuacacaguaauuuac

SEQ ID NO: 2284236 - RNA, 19 nt, Artificial Sequence
  Description of Artificial Sequence: Synthetic oligonucleotide
  Sense strand starting at position 2966 of SEQ ID NO: 1884686
auuacuguguaauugucaa

SEQ ID NO: 2284237 - RNA, 19 nt, Artificial Sequence
  Description of Artificial Sequence: Synthetic oligonucleotide
  Antisense strand to SEQ ID NO: 2284236
uugacaauuacacaguaau

SEQ ID NO: 2284238 - RNA, 19 nt, Artificial Sequence
  Description of Artificial Sequence: Synthetic oligonucleotide
  Sense strand starting at position 3051 of SEQ ID NO: 1884686
ggucuuaacccugagcuga

SEQ ID NO: 2284239 - RNA, 19 nt, Artificial Sequence
  Description of Artificial Sequence: Synthetic oligonucleotide
  Antisense strand to SEQ ID NO: 2284238
ucagcucaggguuaagacc

SEQ ID NO: 2284240 - RNA, 19 nt, Artificial Sequence
  Description of Artificial Sequence: Synthetic oligonucleotide
  Sense strand starting at position 3127 of SEQ ID NO: 1884686
uuaacuacuccggaaugca

SEQ ID NO: 2284241 - RNA, 19 nt, Artificial Sequence
  Description of Artificial Sequence: Synthetic oligonucleotide
  Antisense strand to SEQ ID NO: 2284240
ugcauuccggaguaguuaa

SEQ ID NO: 2284242 - RNA, 19 nt, Artificial Sequence
  Description of Artificial Sequence: Synthetic oligonucleotide
  Sense strand starting at position 3461 of SEQ ID NO: 1884686
aguucauagguaggugaau

SEQ ID NO: 2284243 - RNA, 19 nt, Artificial Sequence
  Description of Artificial Sequence: Synthetic oligonucleotide
  Antisense strand to SEQ ID NO: 2284242
auucaccuaccuaugaacu

SEQ ID NO: 2284244 - RNA, 19 nt, Artificial Sequence
  Description of Artificial Sequence: Synthetic oligonucleotide
  Sense strand starting at position 3462 of SEQ ID NO: 1884686
guucauagguaggugaauu

SEQ ID NO: 2284245 - RNA, 19 nt, Artificial Sequence
  Description of Artificial Sequence: Synthetic oligonucleotide
  Antisense strand to SEQ ID NO: 2284244
aauucaccuaccuaugaac

SEQ ID NO: 2284246 - RNA, 19 nt, Artificial Sequence
  Description of Artificial Sequence: Synthetic oligonucleotide
  Sense strand starting at position 3541 of SEQ ID NO: 1884686
ccugaaagguuucuacaac

SEQ ID NO: 2284247 - RNA, 19 nt, Artificial Sequence
  Description of Artificial Sequence: Synthetic oligonucleotide
  Antisense strand to SEQ ID NO: 2284246
guuguagaaaccuuucagg

SEQ ID NO: 2284248 - RNA, 19 nt, Artificial Sequence
  Description of Artificial Sequence: Synthetic oligonucleotide
  Sense strand starting at position 3660 of SEQ ID NO: 1884686
uguuauauuuguucuguca

SEQ ID NO: 2284249 - RNA, 19 nt, Artificial Sequence
  Description of Artificial Sequence: Synthetic oligonucleotide
  Antisense strand to SEQ ID NO: 2284248
ugacagaacaaauauaaca

SEQ ID NO: 2284250 - RNA, 19 nt, Artificial Sequence
  Description of Artificial Sequence: Synthetic oligonucleotide
  Sense strand starting at position 3783 of SEQ ID NO: 1884686
gcuuggagugguucgguuu

SEQ ID NO: 2284251 - RNA, 19 nt, Artificial Sequence
  Description of Artificial Sequence: Synthetic oligonucleotide
  Antisense strand to SEQ ID NO: 2284250
aaaccgaaccacuccaagc

SEQ ID NO: 2284252 - RNA, 19 nt, Artificial Sequence
  Description of Artificial Sequence: Synthetic oligonucleotide
  Sense strand starting at position 3794 of SEQ ID NO: 1884686
uucgguuucccugaucauu

SEQ ID NO: 2284253 - RNA, 19 nt, Artificial Sequence
  Description of Artificial Sequence: Synthetic oligonucleotide
  Antisense strand to SEQ ID NO: 2284252
aaugaucagggaaaccgaa

SEQ ID NO: 2284254 - RNA, 19 nt, Artificial Sequence
  Description of Artificial Sequence: Synthetic oligonucleotide
  Sense strand starting at position 29 of SEQ ID NO: 1884687
cgaccuucugaauaaucuu

SEQ ID NO: 2284255 - RNA, 19 nt, Artificial Sequence
  Description of Artificial Sequence: Synthetic oligonucleotide
  Antisense strand to SEQ ID NO: 2284254
aagauuauucagaaggucg

SEQ ID NO: 2284256 - RNA, 19 nt, Artificial Sequence
  Description of Artificial Sequence: Synthetic oligonucleotide
  Sense strand starting at position 73 of SEQ ID NO: 1884687
agggcaguggcucauauaa

SEQ ID NO: 2284257 - RNA, 19 nt, Artificial Sequence
  Description of Artificial Sequence: Synthetic oligonucleotide
  Antisense strand to SEQ ID NO: 2284256
uuauaugagccacugcccu

SEQ ID NO: 2284258 - RNA, 19 nt, Artificial Sequence
  Description of Artificial Sequence: Synthetic oligonucleotide
  Sense strand starting at position 81 of SEQ ID NO: 1884687
ggcucauauaagggauuga

SEQ ID NO: 2284259 - RNA, 19 nt, Artificial Sequence
  Description of Artificial Sequence: Synthetic oligonucleotide
  Antisense strand to SEQ ID NO: 2284258
ucaaucccuuauaugagcc

SEQ ID NO: 2284260 - RNA, 19 nt, Artificial Sequence
  Description of Artificial Sequence: Synthetic oligonucleotide
  Sense strand starting at position 114 of SEQ ID NO: 1884687
ugccauguagcuuaauauu

SEQ ID NO: 2284261 - RNA, 19 nt, Artificial Sequence
  Description of Artificial Sequence: Synthetic oligonucleotide
  Antisense strand to SEQ ID NO: 2284260
aauauuaagcuacauggca

SEQ ID NO: 2284262 - RNA, 19 nt, Artificial Sequence
  Description of Artificial Sequence: Synthetic oligonucleotide
  Sense strand starting at position 276 of SEQ ID NO: 1884687
ggacuaagguuaguuugau

SEQ ID NO: 2284263 - RNA, 19 nt, Artificial Sequence
  Description of Artificial Sequence: Synthetic oligonucleotide
  Antisense strand to SEQ ID NO: 2284262
aucaaacuaaccuuagucc

SEQ ID NO: 2284264 - RNA, 19 nt, Artificial Sequence
  Description of Artificial Sequence: Synthetic oligonucleotide
  Sense strand starting at position 277 of SEQ ID NO: 1884687
gacuaagguuaguuugauc

SEQ ID NO: 2284265 - RNA, 19 nt, Artificial Sequence
  Description of Artificial Sequence: Synthetic oligonucleotide
  Antisense strand to SEQ ID NO: 2284264
gaucaaacuaaccuuaguc

SEQ ID NO: 2284266 - RNA, 19 nt, Artificial Sequence
  Description of Artificial Sequence: Synthetic oligonucleotide
  Sense strand starting at position 282 of SEQ ID NO: 1884687
agguuaguuugauccagau

SEQ ID NO: 2284267 - RNA, 19 nt, Artificial Sequence
  Description of Artificial Sequence: Synthetic oligonucleotide
  Antisense strand to SEQ ID NO: 2284266
aucuggaucaaacuaaccu

SEQ ID NO: 2284268 - RNA, 19 nt, Artificial Sequence
  Description of Artificial Sequence: Synthetic oligonucleotide
  Sense strand starting at position 459 of SEQ ID NO: 1884687
gcuggccugggagauuauu

SEQ ID NO: 2284269 - RNA, 19 nt, Artificial Sequence
  Description of Artificial Sequence: Synthetic oligonucleotide
  Antisense strand to SEQ ID NO: 2284268
aauaaucucccaggccagc

SEQ ID NO: 2284270 - RNA, 19 nt, Artificial Sequence
  Description of Artificial Sequence: Synthetic oligonucleotide
  Sense strand starting at position 611 of SEQ ID NO: 1884687
uauugagaaugcccaguaa

SEQ ID NO: 2284271 - RNA, 19 nt, Artificial Sequence
  Description of Artificial Sequence: Synthetic oligonucleotide
  Antisense strand to SEQ ID NO: 2284270
uuacugggcauucucaaua

SEQ ID NO: 2284272 - RNA, 19 nt, Artificial Sequence
  Description of Artificial Sequence: Synthetic oligonucleotide
  Sense strand starting at position 725 of SEQ ID NO: 1884687
uacacuugguuggcuuaau

SEQ ID NO: 2284273 - RNA, 19 nt, Artificial Sequence
  Description of Artificial Sequence: Synthetic oligonucleotide
  Antisense strand to SEQ ID NO: 2284272
auuaagccaaccaagugua

SEQ ID NO: 2284274 - RNA, 19 nt, Artificial Sequence
  Description of Artificial Sequence: Synthetic oligonucleotide
  Sense strand starting at position 914 of SEQ ID NO: 1884687
uucucagcagucugaggaa

SEQ ID NO: 2284275 - RNA, 19 nt, Artificial Sequence
  Description of Artificial Sequence: Synthetic oligonucleotide
  Antisense strand to SEQ ID NO: 2284274
uuccucagacugcugagaa

SEQ ID NO: 2284276 - RNA, 19 nt, Artificial Sequence
  Description of Artificial Sequence: Synthetic oligonucleotide
  Sense strand starting at position 1054 of SEQ ID NO: 1884687
gggccuuauucuuccuuaa

SEQ ID NO: 2284277 - RNA, 19 nt, Artificial Sequence
  Description of Artificial Sequence: Synthetic oligonucleotide
  Antisense strand to SEQ ID NO: 2284276
uuaaggaagaauaaggccc

SEQ ID NO: 2284278 - RNA, 19 nt, Artificial Sequence
  Description of Artificial Sequence: Synthetic oligonucleotide
  Sense strand starting at position 1155 of SEQ ID NO: 1884687
ucaucauugugacccuaca

SEQ ID NO: 2284279 - RNA, 19 nt, Artificial Sequence
  Description of Artificial Sequence: Synthetic oligonucleotide
  Antisense strand to SEQ ID NO: 2284278
uguagggucacaaugauga

SEQ ID NO: 2284280 - RNA, 19 nt, Artificial Sequence
  Description of Artificial Sequence: Synthetic oligonucleotide
  Sense strand starting at position 1633 of SEQ ID NO: 1884687
uuacccuugucauuaguga

SEQ ID NO: 2284281 - RNA, 19 nt, Artificial Sequence
  Description of Artificial Sequence: Synthetic oligonucleotide
  Antisense strand to SEQ ID NO: 2284280
ucacuaaugacaaggguaa

SEQ ID NO: 2284282 - RNA, 19 nt, Artificial Sequence
  Description of Artificial Sequence: Synthetic oligonucleotide
  Sense strand starting at position 1700 of SEQ ID NO: 1884687
ugaguauaccauuggcauc

SEQ ID NO: 2284283 - RNA, 19 nt, Artificial Sequence
  Description of Artificial Sequence: Synthetic oligonucleotide
  Antisense strand to SEQ ID NO: 2284282
gaugccaaugguauacuca

SEQ ID NO: 2284284 - RNA, 19 nt, Artificial Sequence
  Description of Artificial Sequence: Synthetic oligonucleotide
  Sense strand starting at position 1828 of SEQ ID NO: 1884687
ucauaaaccuugguaggaa

SEQ ID NO: 2284285 - RNA, 19 nt, Artificial Sequence
  Description of Artificial Sequence: Synthetic oligonucleotide
  Antisense strand to SEQ ID NO: 2284284
uuccuaccaagguuuauga

SEQ ID NO: 2284286 - RNA, 19 nt, Artificial Sequence
  Description of Artificial Sequence: Synthetic oligonucleotide
  Sense strand starting at position 1905 of SEQ ID NO: 1884687
gaagaauggucgcucaaac

SEQ ID NO: 2284287 - RNA, 19 nt, Artificial Sequence
  Description of Artificial Sequence: Synthetic oligonucleotide
  Antisense strand to SEQ ID NO: 2284286
guuugagcgaccauucuuc

SEQ ID NO: 2284288 - RNA, 19 nt, Artificial Sequence
  Description of Artificial Sequence: Synthetic oligonucleotide
  Sense strand starting at position 1950 of SEQ ID NO: 1884687
agacuuucugguggaaacu

SEQ ID NO: 2284289 - RNA, 19 nt, Artificial Sequence
  Description of Artificial Sequence: Synthetic oligonucleotide
  Antisense strand to SEQ ID NO: 2284288
aguuuccaccagaaagucu

SEQ ID NO: 2284290 - RNA, 19 nt, Artificial Sequence
  Description of Artificial Sequence: Synthetic oligonucleotide
  Sense strand starting at position 1995 of SEQ ID NO: 1884687
uagcgagucagucaagacu

SEQ ID NO: 2284291 - RNA, 19 nt, Artificial Sequence
  Description of Artificial Sequence: Synthetic oligonucleotide
  Antisense strand to SEQ ID NO: 2284290
agucuugacugacucgcua

SEQ ID NO: 2284292 - RNA, 19 nt, Artificial Sequence
  Description of Artificial Sequence: Synthetic oligonucleotide
  Sense strand starting at position 2017 of SEQ ID NO: 1884687
cuuuaucuguuaucaguaa

SEQ ID NO: 2284293 - RNA, 19 nt, Artificial Sequence
  Description of Artificial Sequence: Synthetic oligonucleotide
  Antisense strand to SEQ ID NO: 2284292
uuacugauaacagauaaag

SEQ ID NO: 2284294 - RNA, 19 nt, Artificial Sequence
  Description of Artificial Sequence: Synthetic oligonucleotide
  Sense strand starting at position 2021 of SEQ ID NO: 1884687
aucuguuaucaguaagcca

SEQ ID NO: 2284295 - RNA, 19 nt, Artificial Sequence
  Description of Artificial Sequence: Synthetic oligonucleotide
  Antisense strand to SEQ ID NO: 2284294
uggcuuacugauaacagau

SEQ ID NO: 2284296 - RNA, 19 nt, Artificial Sequence
  Description of Artificial Sequence: Synthetic oligonucleotide
  Sense strand starting at position 2141 of SEQ ID NO: 1884687
gcuugaugaggacagucau

SEQ ID NO: 2284297 - RNA, 19 nt, Artificial Sequence
  Description of Artificial Sequence: Synthetic oligonucleotide
  Antisense strand to SEQ ID NO: 2284296
augacuguccucaucaagc

SEQ ID NO: 2284298 - RNA, 19 nt, Artificial Sequence
  Description of Artificial Sequence: Synthetic oligonucleotide
  Sense strand starting at position 2333 of SEQ ID NO: 1884687
cuaucacucgcucagacau

SEQ ID NO: 2284299 - RNA, 19 nt, Artificial Sequence
  Description of Artificial Sequence: Synthetic oligonucleotide
  Antisense strand to SEQ ID NO: 2284298
augucugagcgagugauag

SEQ ID NO: 2284300 - RNA, 19 nt, Artificial Sequence
  Description of Artificial Sequence: Synthetic oligonucleotide
  Sense strand starting at position 2390 of SEQ ID NO: 1884687
ggaaacuacgaauguuuaa

SEQ ID NO: 2284301 - RNA, 19 nt, Artificial Sequence
  Description of Artificial Sequence: Synthetic oligonucleotide
  Antisense strand to SEQ ID NO: 2284300
uuaaacauucguaguuucc

SEQ ID NO: 2284302 - RNA, 19 nt, Artificial Sequence
  Description of Artificial Sequence: Synthetic oligonucleotide
  Sense strand starting at position 2445 of SEQ ID NO: 1884687
ugccuuuaggguuaauuga

SEQ ID NO: 2284303 - RNA, 19 nt, Artificial Sequence
  Description of Artificial Sequence: Synthetic oligonucleotide
  Antisense strand to SEQ ID NO: 2284302
ucaauuaacccuaaaggca

SEQ ID NO: 2284304 - RNA, 19 nt, Artificial Sequence
  Description of Artificial Sequence: Synthetic oligonucleotide
  Sense strand starting at position 2460 of SEQ ID NO: 1884687
uugagauaccauuguuacc

SEQ ID NO: 2284305 - RNA, 19 nt, Artificial Sequence
  Description of Artificial Sequence: Synthetic oligonucleotide
  Antisense strand to SEQ ID NO: 2284304
gguaacaaugguaucucaa

SEQ ID NO: 2284306 - RNA, 19 nt, Artificial Sequence
  Description of Artificial Sequence: Synthetic oligonucleotide
  Sense strand starting at position 2845 of SEQ ID NO: 1884687
cuucuuaugcuugcgcuua

SEQ ID NO: 2284307 - RNA, 19 nt, Artificial Sequence
  Description of Artificial Sequence: Synthetic oligonucleotide
  Antisense strand to SEQ ID NO: 2284306
uaagcgcaagcauaagaag

SEQ ID NO: 2284308 - RNA, 19 nt, Artificial Sequence
  Description of Artificial Sequence: Synthetic oligonucleotide
  Sense strand starting at position 2849 of SEQ ID NO: 1884687
uuaugcuugcgcuuaaacu

SEQ ID NO: 2284309 - RNA, 19 nt, Artificial Sequence
  Description of Artificial Sequence: Synthetic oligonucleotide
  Antisense strand to SEQ ID NO: 2284308
aguuuaagcgcaagcauaa

SEQ ID NO: 2284310 - RNA, 19 nt, Artificial Sequence
  Description of Artificial Sequence: Synthetic oligonucleotide
  Sense strand starting at position 3093 of SEQ ID NO: 1884687
ccgaacuugcaucacaaau

SEQ ID NO: 2284311 - RNA, 19 nt, Artificial Sequence
  Description of Artificial Sequence: Synthetic oligonucleotide
  Antisense strand to SEQ ID NO: 2284310
auuugugaugcaaguucgg

SEQ ID NO: 2284312 - RNA, 19 nt, Artificial Sequence
  Description of Artificial Sequence: Synthetic oligonucleotide
  Sense strand starting at position 3265 of SEQ ID NO: 1884687
gguaacagucuaggaauaa

SEQ ID NO: 2284313 - RNA, 19 nt, Artificial Sequence
  Description of Artificial Sequence: Synthetic oligonucleotide
  Antisense strand to SEQ ID NO: 2284312
uuauuccuagacuguuacc

SEQ ID NO: 2284314 - RNA, 19 nt, Artificial Sequence
  Description of Artificial Sequence: Synthetic oligonucleotide
  Sense strand starting at position 3290 of SEQ ID NO: 1884687
gaccacagauugguaacua

SEQ ID NO: 2284315 - RNA, 19 nt, Artificial Sequence
  Description of Artificial Sequence: Synthetic oligonucleotide
  Antisense strand to SEQ ID NO: 2284314
uaguuaccaaucugugguc

SEQ ID NO: 2284316 - RNA, 19 nt, Artificial Sequence
  Description of Artificial Sequence: Synthetic oligonucleotide
  Sense strand starting at position 3294 of SEQ ID NO: 1884687
acagauugguaacuauuau

SEQ ID NO: 2284317 - RNA, 19 nt, Artificial Sequence
  Description of Artificial Sequence: Synthetic oligonucleotide
  Antisense strand to SEQ ID NO: 2284316
auaauaguuaccaaucugu

SEQ ID NO: 2284318 - RNA, 19 nt, Artificial Sequence
  Description of Artificial Sequence: Synthetic oligonucleotide
  Sense strand starting at position 3340 of SEQ ID NO: 1884687
uggauuaaugcuggugaaa

SEQ ID NO: 2284319 - RNA, 19 nt, Artificial Sequence
  Description of Artificial Sequence: Synthetic oligonucleotide
  Antisense strand to SEQ ID NO: 2284318
uuucaccagcauuaaucca

SEQ ID NO: 2284320 - RNA, 19 nt, Artificial Sequence
  Description of Artificial Sequence: Synthetic oligonucleotide
  Sense strand starting at position 3389 of SEQ ID NO: 1884687
guaaauuacuguguaauug

SEQ ID NO: 2284321 - RNA, 19 nt, Artificial Sequence
  Description of Artificial Sequence: Synthetic oligonucleotide
  Antisense strand to SEQ ID NO: 2284320
caauuacacaguaauuuac

SEQ ID NO: 2284322 - RNA, 19 nt, Artificial Sequence
  Description of Artificial Sequence: Synthetic oligonucleotide
  Sense strand starting at position 3393 of SEQ ID NO: 1884687
auuacuguguaauugucaa

SEQ ID NO: 2284323 - RNA, 19 nt, Artificial Sequence
  Description of Artificial Sequence: Synthetic oligonucleotide
  Antisense strand to SEQ ID NO: 2284322
uugacaauuacacaguaau

SEQ ID NO: 2284324 - RNA, 19 nt, Artificial Sequence
  Description of Artificial Sequence: Synthetic oligonucleotide
  Sense strand starting at position 3478 of SEQ ID NO: 1884687
ggucuuaacccugagcuga

SEQ ID NO: 2284325 - RNA, 19 nt, Artificial Sequence
  Description of Artificial Sequence: Synthetic oligonucleotide
  Antisense strand to SEQ ID NO: 2284324
ucagcucaggguuaagacc

SEQ ID NO: 2284326 - RNA, 19 nt, Artificial Sequence
  Description of Artificial Sequence: Synthetic oligonucleotide
  Sense strand starting at position 3554 of SEQ ID NO: 1884687
uuaacuacuccggaaugca

SEQ ID NO: 2284327 - RNA, 19 nt, Artificial Sequence
  Description of Artificial Sequence: Synthetic oligonucleotide
  Antisense strand to SEQ ID NO: 2284326
ugcauuccggaguaguuaa

SEQ ID NO: 2284328 - RNA, 19 nt, Artificial Sequence
  Description of Artificial Sequence: Synthetic oligonucleotide
  Sense strand starting at position 3888 of SEQ ID NO: 1884687
aguucauagguaggugaau

SEQ ID NO: 2284329 - RNA, 19 nt, Artificial Sequence
  Description of Artificial Sequence: Synthetic oligonucleotide
  Antisense strand to SEQ ID NO: 2284328
auucaccuaccuaugaacu

SEQ ID NO: 2284330 - RNA, 19 nt, Artificial Sequence
  Description of Artificial Sequence: Synthetic oligonucleotide
  Sense strand starting at position 3889 of SEQ ID NO: 1884687
guucauagguaggugaauu

SEQ ID NO: 2284331 - RNA, 19 nt, Artificial Sequence
  Description of Artificial Sequence: Synthetic oligonucleotide
  Antisense strand to SEQ ID NO: 2284330
aauucaccuaccuaugaac

SEQ ID NO: 2284332 - RNA, 19 nt, Artificial Sequence
  Description of Artificial Sequence: Synthetic oligonucleotide
  Sense strand starting at position 3968 of SEQ ID NO: 1884687
ccugaaagguuucuacaac

SEQ ID NO: 2284333 - RNA, 19 nt, Artificial Sequence
  Description of Artificial Sequence: Synthetic oligonucleotide
  Antisense strand to SEQ ID NO: 2284332
guuguagaaaccuuucagg

SEQ ID NO: 2284334 - RNA, 19 nt, Artificial Sequence
  Description of Artificial Sequence: Synthetic oligonucleotide
  Sense strand starting at position 60 of SEQ ID NO: 1884688
uuuagucucguugagucaa

SEQ ID NO: 2284335 - RNA, 19 nt, Artificial Sequence
  Description of Artificial Sequence: Synthetic oligonucleotide
  Antisense strand to SEQ ID NO: 2284334
uugacucaacgagacuaaa

SEQ ID NO: 2284336 - RNA, 19 nt, Artificial Sequence
  Description of Artificial Sequence: Synthetic oligonucleotide
  Sense strand starting at position 129 of SEQ ID NO: 1884688
gugacauacaccuguagag

SEQ ID NO: 2284337 - RNA, 19 nt, Artificial Sequence
  Description of Artificial Sequence: Synthetic oligonucleotide
  Antisense strand to SEQ ID NO: 2284336
cucuacagguguaugucac

SEQ ID NO: 2284338 - RNA, 19 nt, Artificial Sequence
  Description of Artificial Sequence: Synthetic oligonucleotide
  Sense strand starting at position 368 of SEQ ID NO: 1884688
gggagaucagccugaccaa

SEQ ID NO: 2284339 - RNA, 19 nt, Artificial Sequence
  Description of Artificial Sequence: Synthetic oligonucleotide
  Antisense strand to SEQ ID NO: 2284338
uuggucaggcugaucuccc

SEQ ID NO: 2284340 - RNA, 19 nt, Artificial Sequence
  Description of Artificial Sequence: Synthetic oligonucleotide
  Sense strand starting at position 510 of SEQ ID NO: 1884688
gcaccauugcaaugagauc

SEQ ID NO: 2284341 - RNA, 19 nt, Artificial Sequence
  Description of Artificial Sequence: Synthetic oligonucleotide
  Antisense strand to SEQ ID NO: 2284340
gaucucauugcaauggugc

SEQ ID NO: 2284342 - RNA, 19 nt, Artificial Sequence
  Description of Artificial Sequence: Synthetic oligonucleotide
  Sense strand starting at position 710 of SEQ ID NO: 1884688
gcagcuccuccaugaauua

SEQ ID NO: 2284343 - RNA, 19 nt, Artificial Sequence
  Description of Artificial Sequence: Synthetic oligonucleotide
  Antisense strand to SEQ ID NO: 2284342
uaauucauggaggagcugc

SEQ ID NO: 2284344 - RNA, 19 nt, Artificial Sequence
  Description of Artificial Sequence: Synthetic oligonucleotide
  Sense strand starting at position 868 of SEQ ID NO: 1884688
cgaccuucugaauaaucuu

SEQ ID NO: 2284345 - RNA, 19 nt, Artificial Sequence
  Description of Artificial Sequence: Synthetic oligonucleotide
  Antisense strand to SEQ ID NO: 2284344
aagauuauucagaaggucg

SEQ ID NO: 2284346 - RNA, 19 nt, Artificial Sequence
  Description of Artificial Sequence: Synthetic oligonucleotide
  Sense strand starting at position 912 of SEQ ID NO: 1884688
agggcaguggcucauauaa

SEQ ID NO: 2284347 - RNA, 19 nt, Artificial Sequence
  Description of Artificial Sequence: Synthetic oligonucleotide
  Antisense strand to SEQ ID NO: 2284346
uuauaugagccacugcccu

SEQ ID NO: 2284348 - RNA, 19 nt, Artificial Sequence
  Description of Artificial Sequence: Synthetic oligonucleotide
  Sense strand starting at position 920 of SEQ ID NO: 1884688
ggcucauauaagggauuga

SEQ ID NO: 2284349 - RNA, 19 nt, Artificial Sequence
  Description of Artificial Sequence: Synthetic oligonucleotide
  Antisense strand to SEQ ID NO: 2284348
ucaaucccuuauaugagcc

SEQ ID NO: 2284350 - RNA, 19 nt, Artificial Sequence
  Description of Artificial Sequence: Synthetic oligonucleotide
  Sense strand starting at position 953 of SEQ ID NO: 1884688
ugccauguagcuuaauauu

SEQ ID NO: 2284351 - RNA, 19 nt, Artificial Sequence
  Description of Artificial Sequence: Synthetic oligonucleotide
  Antisense strand to SEQ ID NO: 2284350
aauauuaagcuacauggca

SEQ ID NO: 2284352 - RNA, 19 nt, Artificial Sequence
  Description of Artificial Sequence: Synthetic oligonucleotide
  Sense strand starting at position 1115 of SEQ ID NO: 1884688
ggacuaagguuaguuugau

SEQ ID NO: 2284353 - RNA, 19 nt, Artificial Sequence
  Description of Artificial Sequence: Synthetic oligonucleotide
  Antisense strand to SEQ ID NO: 2284352
aucaaacuaaccuuagucc

SEQ ID NO: 2284354 - RNA, 19 nt, Artificial Sequence
  Description of Artificial Sequence: Synthetic oligonucleotide
  Sense strand starting at position 1116 of SEQ ID NO: 1884688
gacuaagguuaguuugauc

SEQ ID NO: 2284355 - RNA, 19 nt, Artificial Sequence
  Description of Artificial Sequence: Synthetic oligonucleotide
  Antisense strand to SEQ ID NO: 2284354
gaucaaacuaaccuuaguc

SEQ ID NO: 2284356 - RNA, 19 nt, Artificial Sequence
  Description of Artificial Sequence: Synthetic oligonucleotide
  Sense strand starting at position 1121 of SEQ ID NO: 1884688
agguuaguuugauccagau

SEQ ID NO: 2284357 - RNA, 19 nt, Artificial Sequence
  Description of Artificial Sequence: Synthetic oligonucleotide
  Antisense strand to SEQ ID NO: 2284356
aucuggaucaaacuaaccu

SEQ ID NO: 2284358 - RNA, 19 nt, Artificial Sequence
  Description of Artificial Sequence: Synthetic oligonucleotide
  Sense strand starting at position 1295 of SEQ ID NO: 1884688
ccagcuggccugggagauu

SEQ ID NO: 2284359 - RNA, 19 nt, Artificial Sequence
  Description of Artificial Sequence: Synthetic oligonucleotide
  Antisense strand to SEQ ID NO: 2284358
aaucucccaggccagcugg

SEQ ID NO: 2284360 - RNA, 19 nt, Artificial Sequence
  Description of Artificial Sequence: Synthetic oligonucleotide
  Sense strand starting at position 1298 of SEQ ID NO: 1884688
gcuggccugggagauuauu

SEQ ID NO: 2284361 - RNA, 19 nt, Artificial Sequence
  Description of Artificial Sequence: Synthetic oligonucleotide
  Antisense strand to SEQ ID NO: 2284360
aauaaucucccaggccagc

SEQ ID NO: 2284362 - RNA, 19 nt, Artificial Sequence
  Description of Artificial Sequence: Synthetic oligonucleotide
  Sense strand starting at position 1450 of SEQ ID NO: 1884688
uauugagaaugcccaguaa

SEQ ID NO: 2284363 - RNA, 19 nt, Artificial Sequence
  Description of Artificial Sequence: Synthetic oligonucleotide
  Antisense strand to SEQ ID NO: 2284362
uuacugggcauucucaaua

SEQ ID NO: 2284364 - RNA, 19 nt, Artificial Sequence
  Description of Artificial Sequence: Synthetic oligonucleotide
  Sense strand starting at position 1564 of SEQ ID NO: 1884688
uacacuugguuggcuuaau

SEQ ID NO: 2284365 - RNA, 19 nt, Artificial Sequence
  Description of Artificial Sequence: Synthetic oligonucleotide
  Antisense strand to SEQ ID NO: 2284364
auuaagccaaccaagugua

SEQ ID NO: 2284366 - RNA, 19 nt, Artificial Sequence
  Description of Artificial Sequence: Synthetic oligonucleotide
  Sense strand starting at position 1753 of SEQ ID NO: 1884688
uucucagcagucugaggaa

SEQ ID NO: 2284367 - RNA, 19 nt, Artificial Sequence
  Description of Artificial Sequence: Synthetic oligonucleotide
  Antisense strand to SEQ ID NO: 2284366
uuccucagacugcugagaa

SEQ ID NO: 2284368 - RNA, 19 nt, Artificial Sequence
  Description of Artificial Sequence: Synthetic oligonucleotide
  Sense strand starting at position 1893 of SEQ ID NO: 1884688
gggccuuauucuuccuuaa

SEQ ID NO: 2284369 - RNA, 19 nt, Artificial Sequence
  Description of Artificial Sequence: Synthetic oligonucleotide
  Antisense strand to SEQ ID NO: 2284368
uuaaggaagaauaaggccc

SEQ ID NO: 2284370 - RNA, 19 nt, Artificial Sequence
  Description of Artificial Sequence: Synthetic oligonucleotide
  Sense strand starting at position 1966 of SEQ ID NO: 1884688
gguggaaaccgcgaauguu

SEQ ID NO: 2284371 - RNA, 19 nt, Artificial Sequence
  Description of Artificial Sequence: Synthetic oligonucleotide
  Antisense strand to SEQ ID NO: 2284370
aacauucgcgguuuccacc

SEQ ID NO: 2284372 - RNA, 19 nt, Artificial Sequence
  Description of Artificial Sequence: Synthetic oligonucleotide
  Sense strand starting at position 1994 of SEQ ID NO: 1884688
ucaucauugugacccuaca

SEQ ID NO: 2284373 - RNA, 19 nt, Artificial Sequence
  Description of Artificial Sequence: Synthetic oligonucleotide
  Antisense strand to SEQ ID NO: 2284372
uguagggucacaaugauga

SEQ ID NO: 2284374 - RNA, 19 nt, Artificial Sequence
  Description of Artificial Sequence: Synthetic oligonucleotide
  Sense strand starting at position 2472 of SEQ ID NO: 1884688
uuacccuugucauuaguga

SEQ ID NO: 2284375 - RNA, 19 nt, Artificial Sequence
  Description of Artificial Sequence: Synthetic oligonucleotide
  Antisense strand to SEQ ID NO: 2284374
ucacuaaugacaaggguaa

SEQ ID NO: 2284376 - RNA, 19 nt, Artificial Sequence
  Description of Artificial Sequence: Synthetic oligonucleotide
  Sense strand starting at position 2490 of SEQ ID NO: 1884688
auaguaaucuuguucucuu

SEQ ID NO: 2284377 - RNA, 19 nt, Artificial Sequence
  Description of Artificial Sequence: Synthetic oligonucleotide
  Antisense strand to SEQ ID NO: 2284376
aagagaacaagauuacuau

SEQ ID NO: 2284378 - RNA, 19 nt, Artificial Sequence
  Description of Artificial Sequence: Synthetic oligonucleotide
  Sense strand starting at position 2539 of SEQ ID NO: 1884688
ugaguauaccauuggcauc

SEQ ID NO: 2284379 - RNA, 19 nt, Artificial Sequence
  Description of Artificial Sequence: Synthetic oligonucleotide
  Antisense strand to SEQ ID NO: 2284378
gaugccaaugguauacuca

SEQ ID NO: 2284380 - RNA, 19 nt, Artificial Sequence
  Description of Artificial Sequence: Synthetic oligonucleotide
  Sense strand starting at position 2667 of SEQ ID NO: 1884688
ucauaaaccuugguaggaa

SEQ ID NO: 2284381 - RNA, 19 nt, Artificial Sequence
  Description of Artificial Sequence: Synthetic oligonucleotide
  Antisense strand to SEQ ID NO: 2284380
uuccuaccaagguuuauga

SEQ ID NO: 2284382 - RNA, 19 nt, Artificial Sequence
  Description of Artificial Sequence: Synthetic oligonucleotide
  Sense strand starting at position 2708 of SEQ ID NO: 1884688
acuccaggucugugacagu

SEQ ID NO: 2284383 - RNA, 19 nt, Artificial Sequence
  Description of Artificial Sequence: Synthetic oligonucleotide
  Antisense strand to SEQ ID NO: 2284382
acugucacagaccuggagu

SEQ ID NO: 2284384 - RNA, 19 nt, Artificial Sequence
  Description of Artificial Sequence: Synthetic oligonucleotide
  Sense strand starting at position 2744 of SEQ ID NO: 1884688
gaagaauggucgcucaaac

SEQ ID NO: 2284385 - RNA, 19 nt, Artificial Sequence
  Description of Artificial Sequence: Synthetic oligonucleotide
  Antisense strand to SEQ ID NO: 2284384
guuugagcgaccauucuuc

SEQ ID NO: 2284386 - RNA, 19 nt, Artificial Sequence
  Description of Artificial Sequence: Synthetic oligonucleotide
  Sense strand starting at position 2789 of SEQ ID NO: 1884688
agacuuucugguggaaacu

SEQ ID NO: 2284387 - RNA, 19 nt, Artificial Sequence
  Description of Artificial Sequence: Synthetic oligonucleotide
  Antisense strand to SEQ ID NO: 2284386
aguuuccaccagaaagucu

SEQ ID NO: 2284388 - RNA, 19 nt, Artificial Sequence
  Description of Artificial Sequence: Synthetic oligonucleotide
  Sense strand starting at position 2834 of SEQ ID NO: 1884688
uagcgagucagucaagacu

SEQ ID NO: 2284389 - RNA, 19 nt, Artificial Sequence
  Description of Artificial Sequence: Synthetic oligonucleotide
  Antisense strand to SEQ ID NO: 2284388
agucuugacugacucgcua

SEQ ID NO: 2284390 - RNA, 19 nt, Artificial Sequence
  Description of Artificial Sequence: Synthetic oligonucleotide
  Sense strand starting at position 2856 of SEQ ID NO: 1884688
cuuuaucuguuaucaguaa

SEQ ID NO: 2284391 - RNA, 19 nt, Artificial Sequence
  Description of Artificial Sequence: Synthetic oligonucleotide
  Antisense strand to SEQ ID NO: 2284390
uuacugauaacagauaaag

SEQ ID NO: 2284392 - RNA, 19 nt, Artificial Sequence
  Description of Artificial Sequence: Synthetic oligonucleotide
  Sense strand starting at position 2860 of SEQ ID NO: 1884688
aucuguuaucaguaagcca

SEQ ID NO: 2284393 - RNA, 19 nt, Artificial Sequence
  Description of Artificial Sequence: Synthetic oligonucleotide
  Antisense strand to SEQ ID NO: 2284392
uggcuuacugauaacagau

SEQ ID NO: 2284394 - RNA, 19 nt, Artificial Sequence
  Description of Artificial Sequence: Synthetic oligonucleotide
  Sense strand starting at position 2971 of SEQ ID NO: 1884688
ugguauuacgcuugaugag

SEQ ID NO: 2284395 - RNA, 19 nt, Artificial Sequence
  Description of Artificial Sequence: Synthetic oligonucleotide
  Antisense strand to SEQ ID NO: 2284394
cucaucaagcguaauacca

SEQ ID NO: 2284396 - RNA, 19 nt, Artificial Sequence
  Description of Artificial Sequence: Synthetic oligonucleotide
  Sense strand starting at position 2980 of SEQ ID NO: 1884688
gcuugaugaggacagucau

SEQ ID NO: 2284397 - RNA, 19 nt, Artificial Sequence
  Description of Artificial Sequence: Synthetic oligonucleotide
  Antisense strand to SEQ ID NO: 2284396
augacuguccucaucaagc

SEQ ID NO: 2284398 - RNA, 19 nt, Artificial Sequence
  Description of Artificial Sequence: Synthetic oligonucleotide
  Sense strand starting at position 3172 of SEQ ID NO: 1884688
cuaucacucgcucagacau

SEQ ID NO: 2284399 - RNA, 19 nt, Artificial Sequence
  Description of Artificial Sequence: Synthetic oligonucleotide
  Antisense strand to SEQ ID NO: 2284398
augucugagcgagugauag

SEQ ID NO: 2284400 - RNA, 19 nt, Artificial Sequence
  Description of Artificial Sequence: Synthetic oligonucleotide
  Sense strand starting at position 3229 of SEQ ID NO: 1884688
ggaaacuacgaauguuuaa

SEQ ID NO: 2284401 - RNA, 19 nt, Artificial Sequence
  Description of Artificial Sequence: Synthetic oligonucleotide
  Antisense strand to SEQ ID NO: 2284400
uuaaacauucguaguuucc

SEQ ID NO: 2284402 - RNA, 19 nt, Artificial Sequence
  Description of Artificial Sequence: Synthetic oligonucleotide
  Sense strand starting at position 3284 of SEQ ID NO: 1884688
ugccuuuaggguuaauuga

SEQ ID NO: 2284403 - RNA, 19 nt, Artificial Sequence
  Description of Artificial Sequence: Synthetic oligonucleotide
  Antisense strand to SEQ ID NO: 2284402
ucaauuaacccuaaaggca

SEQ ID NO: 2284404 - RNA, 19 nt, Artificial Sequence
  Description of Artificial Sequence: Synthetic oligonucleotide
  Sense strand starting at position 3299 of SEQ ID NO: 1884688
uugagauaccauuguuacc

SEQ ID NO: 2284405 - RNA, 19 nt, Artificial Sequence
  Description of Artificial Sequence: Synthetic oligonucleotide
  Antisense strand to SEQ ID NO: 2284404
gguaacaaugguaucucaa

SEQ ID NO: 2284406 - RNA, 19 nt, Artificial Sequence
  Description of Artificial Sequence: Synthetic oligonucleotide
  Sense strand starting at position 3684 of SEQ ID NO: 1884688
cuucuuaugcuugcgcuua

SEQ ID NO: 2284407 - RNA, 19 nt, Artificial Sequence
  Description of Artificial Sequence: Synthetic oligonucleotide
  Antisense strand to SEQ ID NO: 2284406
uaagcgcaagcauaagaag

SEQ ID NO: 2284408 - RNA, 19 nt, Artificial Sequence
  Description of Artificial Sequence: Synthetic oligonucleotide
  Sense strand starting at position 3688 of SEQ ID NO: 1884688
uuaugcuugcgcuuaaacu

SEQ ID NO: 2284409 - RNA, 19 nt, Artificial Sequence
  Description of Artificial Sequence: Synthetic oligonucleotide
  Antisense strand to SEQ ID NO: 2284408
aguuuaagcgcaagcauaa

SEQ ID NO: 2284410 - RNA, 19 nt, Artificial Sequence
  Description of Artificial Sequence: Synthetic oligonucleotide
  Sense strand starting at position 3697 of SEQ ID NO: 1884688
cgcuuaaacucagcaauaa

SEQ ID NO: 2284411 - RNA, 19 nt, Artificial Sequence
  Description of Artificial Sequence: Synthetic oligonucleotide
  Antisense strand to SEQ ID NO: 2284410
uuauugcugaguuuaagcg

SEQ ID NO: 2284412 - RNA, 19 nt, Artificial Sequence
  Description of Artificial Sequence: Synthetic oligonucleotide
  Sense strand starting at position 3932 of SEQ ID NO: 1884688
ccgaacuugcaucacaaau

SEQ ID NO: 2284413 - RNA, 19 nt, Artificial Sequence
  Description of Artificial Sequence: Synthetic oligonucleotide
  Antisense strand to SEQ ID NO: 2284412
auuugugaugcaaguucgg

SEQ ID NO: 2284414 - RNA, 19 nt, Artificial Sequence
  Description of Artificial Sequence: Synthetic oligonucleotide
  Sense strand starting at position 172 of SEQ ID NO: 1884689
aggagauggcuuugauugu

SEQ ID NO: 2284415 - RNA, 19 nt, Artificial Sequence
  Description of Artificial Sequence: Synthetic oligonucleotide
  Antisense strand to SEQ ID NO: 2284414
acaaucaaagccaucuccu

SEQ ID NO: 2284416 - RNA, 19 nt, Artificial Sequence
  Description of Artificial Sequence: Synthetic oligonucleotide
  Sense strand starting at position 554 of SEQ ID NO: 1884689
ccaguccauuuguaaugaa

SEQ ID NO: 2284417 - RNA, 19 nt, Artificial Sequence
  Description of Artificial Sequence: Synthetic oligonucleotide
  Antisense strand to SEQ ID NO: 2284416
uucauuacaaauggacugg

SEQ ID NO: 2284418 - RNA, 19 nt, Artificial Sequence
  Description of Artificial Sequence: Synthetic oligonucleotide
  Sense strand starting at position 557 of SEQ ID NO: 1884689
guccauuuguaaugaacaa

SEQ ID NO: 2284419 - RNA, 19 nt, Artificial Sequence
  Description of Artificial Sequence: Synthetic oligonucleotide
  Antisense strand to SEQ ID NO: 2284418
uuguucauuacaaauggac

SEQ ID NO: 2284420 - RNA, 19 nt, Artificial Sequence
  Description of Artificial Sequence: Synthetic oligonucleotide
  Sense strand starting at position 604 of SEQ ID NO: 1884689
uuagaaguaucauucugaa

SEQ ID NO: 2284421 - RNA, 19 nt, Artificial Sequence
  Description of Artificial Sequence: Synthetic oligonucleotide
  Antisense strand to SEQ ID NO: 2284420
uucagaaugauacuucuaa

SEQ ID NO: 2284422 - RNA, 19 nt, Artificial Sequence
  Description of Artificial Sequence: Synthetic oligonucleotide
  Sense strand starting at position 624 of SEQ ID NO: 1884689
agccauuaccucuggcaua

SEQ ID NO: 2284423 - RNA, 19 nt, Artificial Sequence
  Description of Artificial Sequence: Synthetic oligonucleotide
  Antisense strand to SEQ ID NO: 2284422
uaugccagagguaauggcu

SEQ ID NO: 2284424 - RNA, 19 nt, Artificial Sequence
  Description of Artificial Sequence: Synthetic oligonucleotide
  Sense strand starting at position 636 of SEQ ID NO: 1884689
uggcauaugccagaaucac

SEQ ID NO: 2284425 - RNA, 19 nt, Artificial Sequence
  Description of Artificial Sequence: Synthetic oligonucleotide
  Antisense strand to SEQ ID NO: 2284424
gugauucuggcauaugcca

SEQ ID NO: 2284426 - RNA, 19 nt, Artificial Sequence
  Description of Artificial Sequence: Synthetic oligonucleotide
  Sense strand starting at position 783 of SEQ ID NO: 1884689
ucacaaaugcuagauguaa

SEQ ID NO: 2284427 - RNA, 19 nt, Artificial Sequence
  Description of Artificial Sequence: Synthetic oligonucleotide
  Antisense strand to SEQ ID NO: 2284426
uuacaucuagcauuuguga

SEQ ID NO: 2284428 - RNA, 19 nt, Artificial Sequence
  Description of Artificial Sequence: Synthetic oligonucleotide
  Sense strand starting at position 1538 of SEQ ID NO: 1884689
auaggugauggccagucaa

SEQ ID NO: 2284429 - RNA, 19 nt, Artificial Sequence
  Description of Artificial Sequence: Synthetic oligonucleotide
  Antisense strand to SEQ ID NO: 2284428
uugacuggccaucaccuau

SEQ ID NO: 2284430 - RNA, 19 nt, Artificial Sequence
  Description of Artificial Sequence: Synthetic oligonucleotide
  Sense strand starting at position 1546 of SEQ ID NO: 1884689
uggccagucaaaugaguuu

SEQ ID NO: 2284431 - RNA, 19 nt, Artificial Sequence
  Description of Artificial Sequence: Synthetic oligonucleotide
  Antisense strand to SEQ ID NO: 2284430
aaacucauuugacuggcca

SEQ ID NO: 2284432 - RNA, 19 nt, Artificial Sequence
  Description of Artificial Sequence: Synthetic oligonucleotide
  Sense strand starting at position 1564 of SEQ ID NO: 1884689
uuaccugguggcuaagaua

SEQ ID NO: 2284433 - RNA, 19 nt, Artificial Sequence
  Description of Artificial Sequence: Synthetic oligonucleotide
  Antisense strand to SEQ ID NO: 2284432
uaucuuagccaccagguaa

SEQ ID NO: 2284434 - RNA, 19 nt, Artificial Sequence
  Description of Artificial Sequence: Synthetic oligonucleotide
  Sense strand starting at position 1691 of SEQ ID NO: 1884689
gcgacaaacuaauccaaac

SEQ ID NO: 2284435 - RNA, 19 nt, Artificial Sequence
  Description of Artificial Sequence: Synthetic oligonucleotide
  Antisense strand to SEQ ID NO: 2284434
guuuggauuaguuugucgc

SEQ ID NO: 2284436 - RNA, 19 nt, Artificial Sequence
  Description of Artificial Sequence: Synthetic oligonucleotide
  Sense strand starting at position 1723 of SEQ ID NO: 1884689
aaauuaggagaucggugua

SEQ ID NO: 2284437 - RNA, 19 nt, Artificial Sequence
  Description of Artificial Sequence: Synthetic oligonucleotide
  Antisense strand to SEQ ID NO: 2284436
uacaccgaucuccuaauuu

SEQ ID NO: 2284438 - RNA, 19 nt, Artificial Sequence
  Description of Artificial Sequence: Synthetic oligonucleotide
  Sense strand starting at position 1757 of SEQ ID NO: 1884689
gagccagucuagucuuauu

SEQ ID NO: 2284439 - RNA, 19 nt, Artificial Sequence
  Description of Artificial Sequence: Synthetic oligonucleotide
  Antisense strand to SEQ ID NO: 2284438
aauaagacuagacuggcuc

SEQ ID NO: 2284440 - RNA, 19 nt, Artificial Sequence
  Description of Artificial Sequence: Synthetic oligonucleotide
  Sense strand starting at position 1762 of SEQ ID NO: 1884689
agucuagucuuauuaguca

SEQ ID NO: 2284441 - RNA, 19 nt, Artificial Sequence
  Description of Artificial Sequence: Synthetic oligonucleotide
  Antisense strand to SEQ ID NO: 2284440
ugacuaauaagacuagacu

SEQ ID NO: 2284442 - RNA, 19 nt, Artificial Sequence
  Description of Artificial Sequence: Synthetic oligonucleotide
  Sense strand starting at position 1819 of SEQ ID NO: 1884689
guuccaaacccuuguucca

SEQ ID NO: 2284443 - RNA, 19 nt, Artificial Sequence
  Description of Artificial Sequence: Synthetic oligonucleotide
  Antisense strand to SEQ ID NO: 2284442
uggaacaaggguuuggaac

SEQ ID NO: 2284444 - RNA, 19 nt, Artificial Sequence
  Description of Artificial Sequence: Synthetic oligonucleotide
  Sense strand starting at position 2027 of SEQ ID NO: 1884689
acaagaaacugcucuaaug

SEQ ID NO: 2284445 - RNA, 19 nt, Artificial Sequence
  Description of Artificial Sequence: Synthetic oligonucleotide
  Antisense strand to SEQ ID NO: 2284444
cauuagagcaguuucuugu

SEQ ID NO: 2284446 - RNA, 19 nt, Artificial Sequence
  Description of Artificial Sequence: Synthetic oligonucleotide
  Sense strand starting at position 2080 of SEQ ID NO: 1884689
cuguacuugucacuguuaa

SEQ ID NO: 2284447 - RNA, 19 nt, Artificial Sequence
  Description of Artificial Sequence: Synthetic oligonucleotide
  Antisense strand to SEQ ID NO: 2284446
uuaacagugacaaguacag

SEQ ID NO: 2284448 - RNA, 19 nt, Artificial Sequence
  Description of Artificial Sequence: Synthetic oligonucleotide
  Sense strand starting at position 2081 of SEQ ID NO: 1884689
uguacuugucacuguuaag

SEQ ID NO: 2284449 - RNA, 19 nt, Artificial Sequence
  Description of Artificial Sequence: Synthetic oligonucleotide
  Antisense strand to SEQ ID NO: 2284448
cuuaacagugacaaguaca

SEQ ID NO: 2284450 - RNA, 19 nt, Artificial Sequence
  Description of Artificial Sequence: Synthetic oligonucleotide
  Sense strand starting at position 2098 of SEQ ID NO: 1884689
aggaauagauaguagacuu

SEQ ID NO: 2284451 - RNA, 19 nt, Artificial Sequence
  Description of Artificial Sequence: Synthetic oligonucleotide
  Antisense strand to SEQ ID NO: 2284450
aagucuacuaucuauuccu

SEQ ID NO: 2284452 - RNA, 19 nt, Artificial Sequence
  Description of Artificial Sequence: Synthetic oligonucleotide
  Sense strand starting at position 2147 of SEQ ID NO: 1884689
accugcaccgucuaaagaa

SEQ ID NO: 2284453 - RNA, 19 nt, Artificial Sequence
  Description of Artificial Sequence: Synthetic oligonucleotide
  Antisense strand to SEQ ID NO: 2284452
uucuuuagacggugcaggu

SEQ ID NO: 2284454 - RNA, 19 nt, Artificial Sequence
  Description of Artificial Sequence: Synthetic oligonucleotide
  Sense strand starting at position 2176 of SEQ ID NO: 1884689
guuauuuggcuuuacggua

SEQ ID NO: 2284455 - RNA, 19 nt, Artificial Sequence
  Description of Artificial Sequence: Synthetic oligonucleotide
  Antisense strand to SEQ ID NO: 2284454
uaccguaaagccaaauaac

SEQ ID NO: 2284456 - RNA, 19 nt, Artificial Sequence
  Description of Artificial Sequence: Synthetic oligonucleotide
  Sense strand starting at position 2211 of SEQ ID NO: 1884689
auccuaacucucgagaagu

SEQ ID NO: 2284457 - RNA, 19 nt, Artificial Sequence
  Description of Artificial Sequence: Synthetic oligonucleotide
  Antisense strand to SEQ ID NO: 2284456
acuucucgagaguuaggau

SEQ ID NO: 2284458 - RNA, 19 nt, Artificial Sequence
  Description of Artificial Sequence: Synthetic oligonucleotide
  Sense strand starting at position 2243 of SEQ ID NO: 1884689
uugacaucgaaguguauau

SEQ ID NO: 2284459 - RNA, 19 nt, Artificial Sequence
  Description of Artificial Sequence: Synthetic oligonucleotide
  Antisense strand to SEQ ID NO: 2284458
auauacacuucgaugucaa

SEQ ID NO: 2284460 - RNA, 19 nt, Artificial Sequence
  Description of Artificial Sequence: Synthetic oligonucleotide
  Sense strand starting at position 2247 of SEQ ID NO: 1884689
caucgaaguguauauacga

SEQ ID NO: 2284461 - RNA, 19 nt, Artificial Sequence
  Description of Artificial Sequence: Synthetic oligonucleotide
  Antisense strand to SEQ ID NO: 2284460
ucguauauacacuucgaug

SEQ ID NO: 2284462 - RNA, 19 nt, Artificial Sequence
  Description of Artificial Sequence: Synthetic oligonucleotide
  Sense strand starting at position 2307 of SEQ ID NO: 1884689
aguucuaucccauguaaug

SEQ ID NO: 2284463 - RNA, 19 nt, Artificial Sequence
  Description of Artificial Sequence: Synthetic oligonucleotide
  Antisense strand to SEQ ID NO: 2284462
cauuacaugggauagaacu

SEQ ID NO: 2284464 - RNA, 19 nt, Artificial Sequence
  Description of Artificial Sequence: Synthetic oligonucleotide
  Sense strand starting at position 2318 of SEQ ID NO: 1884689
auguaaugacaaggcguua

SEQ ID NO: 2284465 - RNA, 19 nt, Artificial Sequence
  Description of Artificial Sequence: Synthetic oligonucleotide
  Antisense strand to SEQ ID NO: 2284464
uaacgccuugucauuacau

SEQ ID NO: 2284466 - RNA, 19 nt, Artificial Sequence
  Description of Artificial Sequence: Synthetic oligonucleotide
  Sense strand starting at position 2532 of SEQ ID NO: 1884689
uacuaauuccguugaccga

SEQ ID NO: 2284467 - RNA, 19 nt, Artificial Sequence
  Description of Artificial Sequence: Synthetic oligonucleotide
  Antisense strand to SEQ ID NO: 2284466
ucggucaacggaauuagua

SEQ ID NO: 2284468 - RNA, 19 nt, Artificial Sequence
  Description of Artificial Sequence: Synthetic oligonucleotide
  Sense strand starting at position 2546 of SEQ ID NO: 1884689
accgacaaaugcucacaaa

SEQ ID NO: 2284469 - RNA, 19 nt, Artificial Sequence
  Description of Artificial Sequence: Synthetic oligonucleotide
  Antisense strand to SEQ ID NO: 2284468
uuugugagcauuugucggu

SEQ ID NO: 2284470 - RNA, 19 nt, Artificial Sequence
  Description of Artificial Sequence: Synthetic oligonucleotide
  Sense strand starting at position 2547 of SEQ ID NO: 1884689
ccgacaaaugcucacaaac

SEQ ID NO: 2284471 - RNA, 19 nt, Artificial Sequence
  Description of Artificial Sequence: Synthetic oligonucleotide
  Antisense strand to SEQ ID NO: 2284470
guuugugagcauuugucgg

SEQ ID NO: 2284472 - RNA, 19 nt, Artificial Sequence
  Description of Artificial Sequence: Synthetic oligonucleotide
  Sense strand starting at position 2564 of SEQ ID NO: 1884689
acgccuucuccgggacaga

SEQ ID NO: 2284473 - RNA, 19 nt, Artificial Sequence
  Description of Artificial Sequence: Synthetic oligonucleotide
  Antisense strand to SEQ ID NO: 2284472
ucugucccggagaaggcgu

SEQ ID NO: 2284474 - RNA, 19 nt, Artificial Sequence
  Description of Artificial Sequence: Synthetic oligonucleotide
  Sense strand starting at position 2565 of SEQ ID NO: 1884689
cgccuucuccgggacagaa

SEQ ID NO: 2284475 - RNA, 19 nt, Artificial Sequence
  Description of Artificial Sequence: Synthetic oligonucleotide
  Antisense strand to SEQ ID NO: 2284474
uucugucccggagaaggcg

SEQ ID NO: 2284476 - RNA, 19 nt, Artificial Sequence
  Description of Artificial Sequence: Synthetic oligonucleotide
  Sense strand starting at position 2887 of SEQ ID NO: 1884689
ggcggaagugaguauaaag

SEQ ID NO: 2284477 - RNA, 19 nt, Artificial Sequence
  Description of Artificial Sequence: Synthetic oligonucleotide
  Antisense strand to SEQ ID NO: 2284476
cuuuauacucacuuccgcc

SEQ ID NO: 2284478 - RNA, 19 nt, Artificial Sequence
  Description of Artificial Sequence: Synthetic oligonucleotide
  Sense strand starting at position 2946 of SEQ ID NO: 1884689
gugggugcucaugggaaau

SEQ ID NO: 2284479 - RNA, 19 nt, Artificial Sequence
  Description of Artificial Sequence: Synthetic oligonucleotide
  Antisense strand to SEQ ID NO: 2284478
auuucccaugagcacccac

SEQ ID NO: 2284480 - RNA, 19 nt, Artificial Sequence
  Description of Artificial Sequence: Synthetic oligonucleotide
  Sense strand starting at position 3102 of SEQ ID NO: 1884689
ggugcagagguggaaauua

SEQ ID NO: 2284481 - RNA, 19 nt, Artificial Sequence
  Description of Artificial Sequence: Synthetic oligonucleotide
  Antisense strand to SEQ ID NO: 2284480
uaauuuccaccucugcacc

SEQ ID NO: 2284482 - RNA, 19 nt, Artificial Sequence
  Description of Artificial Sequence: Synthetic oligonucleotide
  Sense strand starting at position 3111 of SEQ ID NO: 1884689
guggaaauuacagguauaa

SEQ ID NO: 2284483 - RNA, 19 nt, Artificial Sequence
  Description of Artificial Sequence: Synthetic oligonucleotide
  Antisense strand to SEQ ID NO: 2284482
uuauaccuguaauuuccac

SEQ ID NO: 2284484 - RNA, 19 nt, Artificial Sequence
  Description of Artificial Sequence: Synthetic oligonucleotide
  Sense strand starting at position 3145 of SEQ ID NO: 1884689
gagauuaaccagcguggaa

SEQ ID NO: 2284485 - RNA, 19 nt, Artificial Sequence
  Description of Artificial Sequence: Synthetic oligonucleotide
  Antisense strand to SEQ ID NO: 2284484
uuccacgcugguuaaucuc

SEQ ID NO: 2284486 - RNA, 19 nt, Artificial Sequence
  Description of Artificial Sequence: Synthetic oligonucleotide
  Sense strand starting at position 3210 of SEQ ID NO: 1884689
ugaaaucccucagugaaac

SEQ ID NO: 2284487 - RNA, 19 nt, Artificial Sequence
  Description of Artificial Sequence: Synthetic oligonucleotide
  Antisense strand to SEQ ID NO: 2284486
guuucacugagggauuuca

SEQ ID NO: 2284488 - RNA, 19 nt, Artificial Sequence
  Description of Artificial Sequence: Synthetic oligonucleotide
  Sense strand starting at position 3574 of SEQ ID NO: 1884689
accugauacuuacuaagug

SEQ ID NO: 2284489 - RNA, 19 nt, Artificial Sequence
  Description of Artificial Sequence: Synthetic oligonucleotide
  Antisense strand to SEQ ID NO: 2284488
cacuuaguaaguaucaggu

SEQ ID NO: 2284490 - RNA, 19 nt, Artificial Sequence
  Description of Artificial Sequence: Synthetic oligonucleotide
  Sense strand starting at position 3602 of SEQ ID NO: 1884689
cugcguucuguguccuuua

SEQ ID NO: 2284491 - RNA, 19 nt, Artificial Sequence
  Description of Artificial Sequence: Synthetic oligonucleotide
  Antisense strand to SEQ ID NO: 2284490
uaaaggacacagaacgcag

SEQ ID NO: 2284492 - RNA, 19 nt, Artificial Sequence
  Description of Artificial Sequence: Synthetic oligonucleotide
  Sense strand starting at position 3615 of SEQ ID NO: 1884689
ccuuuauguuguucucauu

SEQ ID NO: 2284493 - RNA, 19 nt, Artificial Sequence
  Description of Artificial Sequence: Synthetic oligonucleotide
  Antisense strand to SEQ ID NO: 2284492
aaugagaacaacauaaagg

SEQ ID NO: 2284494 - RNA, 19 nt, Artificial Sequence
  Description of Artificial Sequence: Synthetic oligonucleotide
  Sense strand starting at position 842 of SEQ ID NO: 1884690
uuaccagaguuauuaaguu

SEQ ID NO: 2284495 - RNA, 19 nt, Artificial Sequence
  Description of Artificial Sequence: Synthetic oligonucleotide
  Antisense strand to SEQ ID NO: 2284494
aacuuaauaacucugguaa

SEQ ID NO: 2284496 - RNA, 19 nt, Artificial Sequence
  Description of Artificial Sequence: Synthetic oligonucleotide
  Sense strand starting at position 1336 of SEQ ID NO: 1884690
gcaggaacuucuuucugga

SEQ ID NO: 2284497 - RNA, 19 nt, Artificial Sequence
  Description of Artificial Sequence: Synthetic oligonucleotide
  Antisense strand to SEQ ID NO: 2284496
uccagaaagaaguuccugc

SEQ ID NO: 2284498 - RNA, 19 nt, Artificial Sequence
  Description of Artificial Sequence: Synthetic oligonucleotide
  Sense strand starting at position 1469 of SEQ ID NO: 1884690
accagaaugugggauacaa

SEQ ID NO: 2284499 - RNA, 19 nt, Artificial Sequence
  Description of Artificial Sequence: Synthetic oligonucleotide
  Antisense strand to SEQ ID NO: 2284498
uuguaucccacauucuggu

SEQ ID NO: 2284500 - RNA, 19 nt, Artificial Sequence
  Description of Artificial Sequence: Synthetic oligonucleotide
  Sense strand starting at position 1480 of SEQ ID NO: 1884690
ggauacaaguauuaacaga

SEQ ID NO: 2284501 - RNA, 19 nt, Artificial Sequence
  Description of Artificial Sequence: Synthetic oligonucleotide
  Antisense strand to SEQ ID NO: 2284500
ucuguuaauacuuguaucc

SEQ ID NO: 2284502 - RNA, 19 nt, Artificial Sequence
  Description of Artificial Sequence: Synthetic oligonucleotide
  Sense strand starting at position 1819 of SEQ ID NO: 1884690
gagcaagcaguuuacucaa

SEQ ID NO: 2284503 - RNA, 19 nt, Artificial Sequence
  Description of Artificial Sequence: Synthetic oligonucleotide
  Antisense strand to SEQ ID NO: 2284502
uugaguaaacugcuugcuc

SEQ ID NO: 2284504 - RNA, 19 nt, Artificial Sequence
  Description of Artificial Sequence: Synthetic oligonucleotide
  Sense strand starting at position 1986 of SEQ ID NO: 1884690
cgugucaucacugaagggu

SEQ ID NO: 2284505 - RNA, 19 nt, Artificial Sequence
  Description of Artificial Sequence: Synthetic oligonucleotide
  Antisense strand to SEQ ID NO: 2284504
acccuucagugaugacacg

SEQ ID NO: 2284506 - RNA, 19 nt, Artificial Sequence
  Description of Artificial Sequence: Synthetic oligonucleotide
  Sense strand starting at position 2057 of SEQ ID NO: 1884690
gcaaaucgauucuuacaga

SEQ ID NO: 2284507 - RNA, 19 nt, Artificial Sequence
  Description of Artificial Sequence: Synthetic oligonucleotide
  Antisense strand to SEQ ID NO: 2284506
ucuguaagaaucgauuugc

SEQ ID NO: 2284508 - RNA, 19 nt, Artificial Sequence
  Description of Artificial Sequence: Synthetic oligonucleotide
  Sense strand starting at position 2145 of SEQ ID NO: 1884690
uacuuaagaugucugugga

SEQ ID NO: 2284509 - RNA, 19 nt, Artificial Sequence
  Description of Artificial Sequence: Synthetic oligonucleotide
  Antisense strand to SEQ ID NO: 2284508
uccacagacaucuuaagua

SEQ ID NO: 2284510 - RNA, 19 nt, Artificial Sequence
  Description of Artificial Sequence: Synthetic oligonucleotide
  Sense strand starting at position 2146 of SEQ ID NO: 1884690
acuuaagaugucuguggaa

SEQ ID NO: 2284511 - RNA, 19 nt, Artificial Sequence
  Description of Artificial Sequence: Synthetic oligonucleotide
  Antisense strand to SEQ ID NO: 2284510
uuccacagacaucuuaagu

SEQ ID NO: 2284512 - RNA, 19 nt, Artificial Sequence
  Description of Artificial Sequence: Synthetic oligonucleotide
  Sense strand starting at position 2562 of SEQ ID NO: 1884690
cgaaccuuaggguaauauu

SEQ ID NO: 2284513 - RNA, 19 nt, Artificial Sequence
  Description of Artificial Sequence: Synthetic oligonucleotide
  Antisense strand to SEQ ID NO: 2284512
aauauuacccuaagguucg

SEQ ID NO: 2284514 - RNA, 19 nt, Artificial Sequence
  Description of Artificial Sequence: Synthetic oligonucleotide
  Sense strand starting at position 2699 of SEQ ID NO: 1884690
ccaauuaaaugugcaaagu

SEQ ID NO: 2284515 - RNA, 19 nt, Artificial Sequence
  Description of Artificial Sequence: Synthetic oligonucleotide
  Antisense strand to SEQ ID NO: 2284514
acuuugcacauuuaauugg

SEQ ID NO: 2284516 - RNA, 19 nt, Artificial Sequence
  Description of Artificial Sequence: Synthetic oligonucleotide
  Sense strand starting at position 2709 of SEQ ID NO: 1884690
gugcaaaguccaggaauau

SEQ ID NO: 2284517 - RNA, 19 nt, Artificial Sequence
  Description of Artificial Sequence: Synthetic oligonucleotide
  Antisense strand to SEQ ID NO: 2284516
auauuccuggacuuugcac

SEQ ID NO: 2284518 - RNA, 19 nt, Artificial Sequence
  Description of Artificial Sequence: Synthetic oligonucleotide
  Sense strand starting at position 2710 of SEQ ID NO: 1884690
ugcaaaguccaggaauauc

SEQ ID NO: 2284519 - RNA, 19 nt, Artificial Sequence
  Description of Artificial Sequence: Synthetic oligonucleotide
  Antisense strand to SEQ ID NO: 2284518
gauauuccuggacuuugca

SEQ ID NO: 2284520 - RNA, 19 nt, Artificial Sequence
  Description of Artificial Sequence: Synthetic oligonucleotide
  Sense strand starting at position 2869 of SEQ ID NO: 1884690
cuaggauccuggcuaucuu

SEQ ID NO: 2284521 - RNA, 19 nt, Artificial Sequence
  Description of Artificial Sequence: Synthetic oligonucleotide
  Antisense strand to SEQ ID NO: 2284520
aagauagccaggauccuag

SEQ ID NO: 2284522 - RNA, 19 nt, Artificial Sequence
  Description of Artificial Sequence: Synthetic oligonucleotide
  Sense strand starting at position 2886 of SEQ ID NO: 1884690
uugcuauuagaacgcugau

SEQ ID NO: 2284523 - RNA, 19 nt, Artificial Sequence
  Description of Artificial Sequence: Synthetic oligonucleotide
  Antisense strand to SEQ ID NO: 2284522
aucagcguucuaauagcaa

SEQ ID NO: 2284524 - RNA, 19 nt, Artificial Sequence
  Description of Artificial Sequence: Synthetic oligonucleotide
  Sense strand starting at position 2889 of SEQ ID NO: 1884690
cuauuagaacgcugauaaa

SEQ ID NO: 2284525 - RNA, 19 nt, Artificial Sequence
  Description of Artificial Sequence: Synthetic oligonucleotide
  Antisense strand to SEQ ID NO: 2284524
uuuaucagcguucuaauag

SEQ ID NO: 2284526 - RNA, 19 nt, Artificial Sequence
  Description of Artificial Sequence: Synthetic oligonucleotide
  Sense strand starting at position 2932 of SEQ ID NO: 1884690
ccaacucauucggcaguuu

SEQ ID NO: 2284527 - RNA, 19 nt, Artificial Sequence
  Description of Artificial Sequence: Synthetic oligonucleotide
  Antisense strand to SEQ ID NO: 2284526
aaacugccgaaugaguugg

SEQ ID NO: 2284528 - RNA, 19 nt, Artificial Sequence
  Description of Artificial Sequence: Synthetic oligonucleotide
  Sense strand starting at position 2933 of SEQ ID NO: 1884690
caacucauucggcaguuua

SEQ ID NO: 2284529 - RNA, 19 nt, Artificial Sequence
  Description of Artificial Sequence: Synthetic oligonucleotide
  Antisense strand to SEQ ID NO: 2284528
uaaacugccgaaugaguug

SEQ ID NO: 2284530 - RNA, 19 nt, Artificial Sequence
  Description of Artificial Sequence: Synthetic oligonucleotide
  Sense strand starting at position 2943 of SEQ ID NO: 1884690
ggcaguuuacgcucugcga

SEQ ID NO: 2284531 - RNA, 19 nt, Artificial Sequence
  Description of Artificial Sequence: Synthetic oligonucleotide
  Antisense strand to SEQ ID NO: 2284530
ucgcagagcguaaacugcc

SEQ ID NO: 2284532 - RNA, 19 nt, Artificial Sequence
  Description of Artificial Sequence: Synthetic oligonucleotide
  Sense strand starting at position 2950 of SEQ ID NO: 1884690
uacgcucugcgagauacua

SEQ ID NO: 2284533 - RNA, 19 nt, Artificial Sequence
  Description of Artificial Sequence: Synthetic oligonucleotide
  Antisense strand to SEQ ID NO: 2284532
uaguaucucgcagagcgua

SEQ ID NO: 2284534 - RNA, 19 nt, Artificial Sequence
  Description of Artificial Sequence: Synthetic oligonucleotide
  Sense strand starting at position 2958 of SEQ ID NO: 1884690
gcgagauacuaacuggaga

SEQ ID NO: 2284535 - RNA, 19 nt, Artificial Sequence
  Description of Artificial Sequence: Synthetic oligonucleotide
  Antisense strand to SEQ ID NO: 2284534
ucuccaguuaguaucucgc

SEQ ID NO: 2284536 - RNA, 19 nt, Artificial Sequence
  Description of Artificial Sequence: Synthetic oligonucleotide
  Sense strand starting at position 3022 of SEQ ID NO: 1884690
acaacugagaggugguaua

SEQ ID NO: 2284537 - RNA, 19 nt, Artificial Sequence
  Description of Artificial Sequence: Synthetic oligonucleotide
  Antisense strand to SEQ ID NO: 2284536
uauaccaccucucaguugu

SEQ ID NO: 2284538 - RNA, 19 nt, Artificial Sequence
  Description of Artificial Sequence: Synthetic oligonucleotide
  Sense strand starting at position 3035 of SEQ ID NO: 1884690
gguauaaugguccaccuua

SEQ ID NO: 2284539 - RNA, 19 nt, Artificial Sequence
  Description of Artificial Sequence: Synthetic oligonucleotide
  Antisense strand to SEQ ID NO: 2284538
uaagguggaccauuauacc

SEQ ID NO: 2284540 - RNA, 19 nt, Artificial Sequence
  Description of Artificial Sequence: Synthetic oligonucleotide
  Sense strand starting at position 3071 of SEQ ID NO: 1884690
ggcugagagguucauuaac

SEQ ID NO: 2284541 - RNA, 19 nt, Artificial Sequence
  Description of Artificial Sequence: Synthetic oligonucleotide
  Antisense strand to SEQ ID NO: 2284540
guuaaugaaccucucagcc

SEQ ID NO: 2284542 - RNA, 19 nt, Artificial Sequence
  Description of Artificial Sequence: Synthetic oligonucleotide
  Sense strand starting at position 3321 of SEQ ID NO: 1884690
cugucauuccucuaggcaa

SEQ ID NO: 2284543 - RNA, 19 nt, Artificial Sequence
  Description of Artificial Sequence: Synthetic oligonucleotide
  Antisense strand to SEQ ID NO: 2284542
uugccuagaggaaugacag

SEQ ID NO: 2284544 - RNA, 19 nt, Artificial Sequence
  Description of Artificial Sequence: Synthetic oligonucleotide
  Sense strand starting at position 3388 of SEQ ID NO: 1884690
guugaaaucuuaccaguag

SEQ ID NO: 2284545 - RNA, 19 nt, Artificial Sequence
  Description of Artificial Sequence: Synthetic oligonucleotide
  Antisense strand to SEQ ID NO: 2284544
cuacugguaagauuucaac

SEQ ID NO: 2284546 - RNA, 19 nt, Artificial Sequence
  Description of Artificial Sequence: Synthetic oligonucleotide
  Sense strand starting at position 3430 of SEQ ID NO: 1884690
augcaacucagagguuaag

SEQ ID NO: 2284547 - RNA, 19 nt, Artificial Sequence
  Description of Artificial Sequence: Synthetic oligonucleotide
  Antisense strand to SEQ ID NO: 2284546
cuuaaccucugaguugcau

SEQ ID NO: 2284548 - RNA, 19 nt, Artificial Sequence
  Description of Artificial Sequence: Synthetic oligonucleotide
  Sense strand starting at position 3440 of SEQ ID NO: 1884690
gagguuaagugucuagauu

SEQ ID NO: 2284549 - RNA, 19 nt, Artificial Sequence
  Description of Artificial Sequence: Synthetic oligonucleotide
  Antisense strand to SEQ ID NO: 2284548
aaucuagacacuuaaccuc

SEQ ID NO: 2284550 - RNA, 19 nt, Artificial Sequence
  Description of Artificial Sequence: Synthetic oligonucleotide
  Sense strand starting at position 3469 of SEQ ID NO: 1884690
uugcaucaggucuaucuua

SEQ ID NO: 2284551 - RNA, 19 nt, Artificial Sequence
  Description of Artificial Sequence: Synthetic oligonucleotide
  Antisense strand to SEQ ID NO: 2284550
uaagauagaccugaugcaa

SEQ ID NO: 2284552 - RNA, 19 nt, Artificial Sequence
  Description of Artificial Sequence: Synthetic oligonucleotide
  Sense strand starting at position 3521 of SEQ ID NO: 1884690
cuaagcagauuugaaugau

SEQ ID NO: 2284553 - RNA, 19 nt, Artificial Sequence
  Description of Artificial Sequence: Synthetic oligonucleotide
  Antisense strand to SEQ ID NO: 2284552
aucauucaaaucugcuuag

SEQ ID NO: 2284554 - RNA, 19 nt, Artificial Sequence
  Description of Artificial Sequence: Synthetic oligonucleotide
  Sense strand starting at position 3530 of SEQ ID NO: 1884690
uuugaaugauugcuacuaa

SEQ ID NO: 2284555 - RNA, 19 nt, Artificial Sequence
  Description of Artificial Sequence: Synthetic oligonucleotide
  Antisense strand to SEQ ID NO: 2284554
uuaguagcaaucauucaaa

SEQ ID NO: 2284556 - RNA, 19 nt, Artificial Sequence
  Description of Artificial Sequence: Synthetic oligonucleotide
  Sense strand starting at position 3577 of SEQ ID NO: 1884690
ggcacuucuaccuagggau

SEQ ID NO: 2284557 - RNA, 19 nt, Artificial Sequence
  Description of Artificial Sequence: Synthetic oligonucleotide
  Antisense strand to SEQ ID NO: 2284556
aucccuagguagaagugcc

SEQ ID NO: 2284558 - RNA, 19 nt, Artificial Sequence
  Description of Artificial Sequence: Synthetic oligonucleotide
  Sense strand starting at position 3668 of SEQ ID NO: 1884690
uguaaagccuucucaagaa

SEQ ID NO: 2284559 - RNA, 19 nt, Artificial Sequence
  Description of Artificial Sequence: Synthetic oligonucleotide
  Antisense strand to SEQ ID NO: 2284558
uucuugagaaggcuuuaca

SEQ ID NO: 2284560 - RNA, 19 nt, Artificial Sequence
  Description of Artificial Sequence: Synthetic oligonucleotide
  Sense strand starting at position 3715 of SEQ ID NO: 1884690
acaguucuauuuguguuua

SEQ ID NO: 2284561 - RNA, 19 nt, Artificial Sequence
  Description of Artificial Sequence: Synthetic oligonucleotide
  Antisense strand to SEQ ID NO: 2284560
uaaacacaaauagaacugu

SEQ ID NO: 2284562 - RNA, 19 nt, Artificial Sequence
  Description of Artificial Sequence: Synthetic oligonucleotide
  Sense strand starting at position 3717 of SEQ ID NO: 1884690
aguucuauuuguguuuaac

SEQ ID NO: 2284563 - RNA, 19 nt, Artificial Sequence
  Description of Artificial Sequence: Synthetic oligonucleotide
  Antisense strand to SEQ ID NO: 2284562
guuaaacacaaauagaacu

SEQ ID NO: 2284564 - RNA, 19 nt, Artificial Sequence
  Description of Artificial Sequence: Synthetic oligonucleotide
  Sense strand starting at position 3719 of SEQ ID NO: 1884690
uucuauuuguguuuaacuc

SEQ ID NO: 2284565 - RNA, 19 nt, Artificial Sequence
  Description of Artificial Sequence: Synthetic oligonucleotide
  Antisense strand to SEQ ID NO: 2284564
gaguuaaacacaaauagaa

SEQ ID NO: 2284566 - RNA, 19 nt, Artificial Sequence
  Description of Artificial Sequence: Synthetic oligonucleotide
  Sense strand starting at position 3831 of SEQ ID NO: 1884690
gggcaugacuuaguaucuu

SEQ ID NO: 2284567 - RNA, 19 nt, Artificial Sequence
  Description of Artificial Sequence: Synthetic oligonucleotide
  Antisense strand to SEQ ID NO: 2284566
aagauacuaagucaugccc

SEQ ID NO: 2284568 - RNA, 19 nt, Artificial Sequence
  Description of Artificial Sequence: Synthetic oligonucleotide
  Sense strand starting at position 3851 of SEQ ID NO: 1884690
uuauaacccugggagacua

SEQ ID NO: 2284569 - RNA, 19 nt, Artificial Sequence
  Description of Artificial Sequence: Synthetic oligonucleotide
  Antisense strand to SEQ ID NO: 2284568
uagucucccaggguuauaa

SEQ ID NO: 2284570 - RNA, 19 nt, Artificial Sequence
  Description of Artificial Sequence: Synthetic oligonucleotide
  Sense strand starting at position 3916 of SEQ ID NO: 1884690
ggcagacauguauguugau

SEQ ID NO: 2284571 - RNA, 19 nt, Artificial Sequence
  Description of Artificial Sequence: Synthetic oligonucleotide
  Antisense strand to SEQ ID NO: 2284570
aucaacauacaugucugcc

SEQ ID NO: 2284572 - RNA, 19 nt, Artificial Sequence
  Description of Artificial Sequence: Synthetic oligonucleotide
  Sense strand starting at position 3917 of SEQ ID NO: 1884690
gcagacauguauguugaua

SEQ ID NO: 2284573 - RNA, 19 nt, Artificial Sequence
  Description of Artificial Sequence: Synthetic oligonucleotide
  Antisense strand to SEQ ID NO: 2284572
uaucaacauacaugucugc

SEQ ID NO: 2284574 - RNA, 19 nt, Artificial Sequence
  Description of Artificial Sequence: Synthetic oligonucleotide
  Sense strand starting at position 355 of SEQ ID NO: 1884691
gggugacaagaacgagauu

SEQ ID NO: 2284575 - RNA, 19 nt, Artificial Sequence
  Description of Artificial Sequence: Synthetic oligonucleotide
  Antisense strand to SEQ ID NO: 2284574
aaucucguucuugucaccc

SEQ ID NO: 2284576 - RNA, 19 nt, Artificial Sequence
  Description of Artificial Sequence: Synthetic oligonucleotide
  Sense strand starting at position 742 of SEQ ID NO: 1884691
gucacuguacucuaagacu

SEQ ID NO: 2284577 - RNA, 19 nt, Artificial Sequence
  Description of Artificial Sequence: Synthetic oligonucleotide
  Antisense strand to SEQ ID NO: 2284576
agucuuagaguacagugac

SEQ ID NO: 2284578 - RNA, 19 nt, Artificial Sequence
  Description of Artificial Sequence: Synthetic oligonucleotide
  Sense strand starting at position 785 of SEQ ID NO: 1884691
ggauguucuacucagguua

SEQ ID NO: 2284579 - RNA, 19 nt, Artificial Sequence
  Description of Artificial Sequence: Synthetic oligonucleotide
  Antisense strand to SEQ ID NO: 2284578
uaaccugaguagaacaucc

SEQ ID NO: 2284580 - RNA, 19 nt, Artificial Sequence
  Description of Artificial Sequence: Synthetic oligonucleotide
  Sense strand starting at position 885 of SEQ ID NO: 1884691
ccaguuucccauggaaauu

SEQ ID NO: 2284581 - RNA, 19 nt, Artificial Sequence
  Description of Artificial Sequence: Synthetic oligonucleotide
  Antisense strand to SEQ ID NO: 2284580
aauuuccaugggaaacugg

SEQ ID NO: 2284582 - RNA, 19 nt, Artificial Sequence
  Description of Artificial Sequence: Synthetic oligonucleotide
  Sense strand starting at position 1203 of SEQ ID NO: 1884691
aggucaguaguuuacgaaa

SEQ ID NO: 2284583 - RNA, 19 nt, Artificial Sequence
  Description of Artificial Sequence: Synthetic oligonucleotide
  Antisense strand to SEQ ID NO: 2284582
uuucguaaacuacugaccu

SEQ ID NO: 2284584 - RNA, 19 nt, Artificial Sequence
  Description of Artificial Sequence: Synthetic oligonucleotide
  Sense strand starting at position 1209 of SEQ ID NO: 1884691
guaguuuacgaaagugguc

SEQ ID NO: 2284585 - RNA, 19 nt, Artificial Sequence
  Description of Artificial Sequence: Synthetic oligonucleotide
  Antisense strand to SEQ ID NO: 2284584
gaccacuuucguaaacuac

SEQ ID NO: 2284586 - RNA, 19 nt, Artificial Sequence
  Description of Artificial Sequence: Synthetic oligonucleotide
  Sense strand starting at position 1215 of SEQ ID NO: 1884691
uacgaaaguggucaucuau

SEQ ID NO: 2284587 - RNA, 19 nt, Artificial Sequence
  Description of Artificial Sequence: Synthetic oligonucleotide
  Antisense strand to SEQ ID NO: 2284586
auagaugaccacuuucgua

SEQ ID NO: 2284588 - RNA, 19 nt, Artificial Sequence
  Description of Artificial Sequence: Synthetic oligonucleotide
  Sense strand starting at position 1532 of SEQ ID NO: 1884691
cugcuaacacuuuaaggua

SEQ ID NO: 2284589 - RNA, 19 nt, Artificial Sequence
  Description of Artificial Sequence: Synthetic oligonucleotide
  Antisense strand to SEQ ID NO: 2284588
uaccuuaaaguguuagcag

SEQ ID NO: 2284590 - RNA, 19 nt, Artificial Sequence
  Description of Artificial Sequence: Synthetic oligonucleotide
  Sense strand starting at position 1638 of SEQ ID NO: 1884691
gacagauuccugcagaggu

SEQ ID NO: 2284591 - RNA, 19 nt, Artificial Sequence
  Description of Artificial Sequence: Synthetic oligonucleotide
  Antisense strand to SEQ ID NO: 2284590
accucugcaggaaucuguc

SEQ ID NO: 2284592 - RNA, 19 nt, Artificial Sequence
  Description of Artificial Sequence: Synthetic oligonucleotide
  Sense strand starting at position 1640 of SEQ ID NO: 1884691
cagauuccugcagagguaa

SEQ ID NO: 2284593 - RNA, 19 nt, Artificial Sequence
  Description of Artificial Sequence: Synthetic oligonucleotide
  Antisense strand to SEQ ID NO: 2284592
uuaccucugcaggaaucug

SEQ ID NO: 2284594 - RNA, 19 nt, Artificial Sequence
  Description of Artificial Sequence: Synthetic oligonucleotide
  Sense strand starting at position 1711 of SEQ ID NO: 1884691
cuauguaaccuaggagcaa

SEQ ID NO: 2284595 - RNA, 19 nt, Artificial Sequence
  Description of Artificial Sequence: Synthetic oligonucleotide
  Antisense strand to SEQ ID NO: 2284594
uugcuccuagguuacauag

SEQ ID NO: 2284596 - RNA, 19 nt, Artificial Sequence
  Description of Artificial Sequence: Synthetic oligonucleotide
  Sense strand starting at position 1969 of SEQ ID NO: 1884691
gaguaagacaugugaaagu

SEQ ID NO: 2284597 - RNA, 19 nt, Artificial Sequence
  Description of Artificial Sequence: Synthetic oligonucleotide
  Antisense strand to SEQ ID NO: 2284596
acuuucacaugucuuacuc

SEQ ID NO: 2284598 - RNA, 19 nt, Artificial Sequence
  Description of Artificial Sequence: Synthetic oligonucleotide
  Sense strand starting at position 2159 of SEQ ID NO: 1884691
uauugcuuggcagaaagaa

SEQ ID NO: 2284599 - RNA, 19 nt, Artificial Sequence
  Description of Artificial Sequence: Synthetic oligonucleotide
  Antisense strand to SEQ ID NO: 2284598
uucuuucugccaagcaaua

SEQ ID NO: 2284600 - RNA, 19 nt, Artificial Sequence
  Description of Artificial Sequence: Synthetic oligonucleotide
  Sense strand starting at position 2313 of SEQ ID NO: 1884691
gucacacauugaucagacu

SEQ ID NO: 2284601 - RNA, 19 nt, Artificial Sequence
  Description of Artificial Sequence: Synthetic oligonucleotide
  Antisense strand to SEQ ID NO: 2284600
agucugaucaaugugugac

SEQ ID NO: 2284602 - RNA, 19 nt, Artificial Sequence
  Description of Artificial Sequence: Synthetic oligonucleotide
  Sense strand starting at position 2388 of SEQ ID NO: 1884691
gaucaaagacuuuggguua

SEQ ID NO: 2284603 - RNA, 19 nt, Artificial Sequence
  Description of Artificial Sequence: Synthetic oligonucleotide
  Antisense strand to SEQ ID NO: 2284602
uaacccaaagucuuugauc

SEQ ID NO: 2284604 - RNA, 19 nt, Artificial Sequence
  Description of Artificial Sequence: Synthetic oligonucleotide
  Sense strand starting at position 2671 of SEQ ID NO: 1884691
cgagauuccauguaaguca

SEQ ID NO: 2284605 - RNA, 19 nt, Artificial Sequence
  Description of Artificial Sequence: Synthetic oligonucleotide
  Antisense strand to SEQ ID NO: 2284604
ugacuuacauggaaucucg

SEQ ID NO: 2284606 - RNA, 19 nt, Artificial Sequence
  Description of Artificial Sequence: Synthetic oligonucleotide
  Sense strand starting at position 2678 of SEQ ID NO: 1884691
ccauguaagucaucacaaa

SEQ ID NO: 2284607 - RNA, 19 nt, Artificial Sequence
  Description of Artificial Sequence: Synthetic oligonucleotide
  Antisense strand to SEQ ID NO: 2284606
uuugugaugacuuacaugg

SEQ ID NO: 2284608 - RNA, 19 nt, Artificial Sequence
  Description of Artificial Sequence: Synthetic oligonucleotide
  Sense strand starting at position 2741 of SEQ ID NO: 1884691
cauugaauaccgugaaauu

SEQ ID NO: 2284609 - RNA, 19 nt, Artificial Sequence
  Description of Artificial Sequence: Synthetic oligonucleotide
  Antisense strand to SEQ ID NO: 2284608
aauuucacgguauucaaug

SEQ ID NO: 2284610 - RNA, 19 nt, Artificial Sequence
  Description of Artificial Sequence: Synthetic oligonucleotide
  Sense strand starting at position 2788 of SEQ ID NO: 1884691
guuaguaguaccuagagaa

SEQ ID NO: 2284611 - RNA, 19 nt, Artificial Sequence
  Description of Artificial Sequence: Synthetic oligonucleotide
  Antisense strand to SEQ ID NO: 2284610
uucucuagguacuacuaac

SEQ ID NO: 2284612 - RNA, 19 nt, Artificial Sequence
  Description of Artificial Sequence: Synthetic oligonucleotide
  Sense strand starting at position 2808 of SEQ ID NO: 1884691
aacaaagcugugggugaaa

SEQ ID NO: 2284613 - RNA, 19 nt, Artificial Sequence
  Description of Artificial Sequence: Synthetic oligonucleotide
  Antisense strand to SEQ ID NO: 2284612
uuucacccacagcuuuguu

SEQ ID NO: 2284614 - RNA, 19 nt, Artificial Sequence
  Description of Artificial Sequence: Synthetic oligonucleotide
  Sense strand starting at position 2810 of SEQ ID NO: 1884691
caaagcugugggugaaaga

SEQ ID NO: 2284615 - RNA, 19 nt, Artificial Sequence
  Description of Artificial Sequence: Synthetic oligonucleotide
  Antisense strand to SEQ ID NO: 2284614
ucuuucacccacagcuuug

SEQ ID NO: 2284616 - RNA, 19 nt, Artificial Sequence
  Description of Artificial Sequence: Synthetic oligonucleotide
  Sense strand starting at position 2811 of SEQ ID NO: 1884691
aaagcugugggugaaagau

SEQ ID NO: 2284617 - RNA, 19 nt, Artificial Sequence
  Description of Artificial Sequence: Synthetic oligonucleotide
  Antisense strand to SEQ ID NO: 2284616
aucuuucacccacagcuuu

SEQ ID NO: 2284618 - RNA, 19 nt, Artificial Sequence
  Description of Artificial Sequence: Synthetic oligonucleotide
  Sense strand starting at position 2820 of SEQ ID NO: 1884691
ggugaaagauuccucagac

SEQ ID NO: 2284619 - RNA, 19 nt, Artificial Sequence
  Description of Artificial Sequence: Synthetic oligonucleotide
  Antisense strand to SEQ ID NO: 2284618
gucugaggaaucuuucacc

SEQ ID NO: 2284620 - RNA, 19 nt, Artificial Sequence
  Description of Artificial Sequence: Synthetic oligonucleotide
  Sense strand starting at position 2821 of SEQ ID NO: 1884691
gugaaagauuccucagaca

SEQ ID NO: 2284621 - RNA, 19 nt, Artificial Sequence
  Description of Artificial Sequence: Synthetic oligonucleotide
  Antisense strand to SEQ ID NO: 2284620
ugucugaggaaucuuucac

SEQ ID NO: 2284622 - RNA, 19 nt, Artificial Sequence
  Description of Artificial Sequence: Synthetic oligonucleotide
  Sense strand starting at position 2858 of SEQ ID NO: 1884691
ugcguucuccaguuucuca

SEQ ID NO: 2284623 - RNA, 19 nt, Artificial Sequence
  Description of Artificial Sequence: Synthetic oligonucleotide
  Antisense strand to SEQ ID NO: 2284622
ugagaaacuggagaacgca

SEQ ID NO: 2284624 - RNA, 19 nt, Artificial Sequence
  Description of Artificial Sequence: Synthetic oligonucleotide
  Sense strand starting at position 2946 of SEQ ID NO: 1884691
uggcauaagcuguaaggaa

SEQ ID NO: 2284625 - RNA, 19 nt, Artificial Sequence
  Description of Artificial Sequence: Synthetic oligonucleotide
  Antisense strand to SEQ ID NO: 2284624
uuccuuacagcuuaugcca

SEQ ID NO: 2284626 - RNA, 19 nt, Artificial Sequence
  Description of Artificial Sequence: Synthetic oligonucleotide
  Sense strand starting at position 3231 of SEQ ID NO: 1884691
auguuuccuccucauugga

SEQ ID NO: 2284627 - RNA, 19 nt, Artificial Sequence
  Description of Artificial Sequence: Synthetic oligonucleotide
  Antisense strand to SEQ ID NO: 2284626
uccaaugaggaggaaacau

SEQ ID NO: 2284628 - RNA, 19 nt, Artificial Sequence
  Description of Artificial Sequence: Synthetic oligonucleotide
  Sense strand starting at position 3249 of SEQ ID NO: 1884691
agcagaauccuggaaagcu

SEQ ID NO: 2284629 - RNA, 19 nt, Artificial Sequence
  Description of Artificial Sequence: Synthetic oligonucleotide
  Antisense strand to SEQ ID NO: 2284628
agcuuuccaggauucugcu

SEQ ID NO: 2284630 - RNA, 19 nt, Artificial Sequence
  Description of Artificial Sequence: Synthetic oligonucleotide
  Sense strand starting at position 3306 of SEQ ID NO: 1884691
ugggcaucuaucugagaaa

SEQ ID NO: 2284631 - RNA, 19 nt, Artificial Sequence
  Description of Artificial Sequence: Synthetic oligonucleotide
  Antisense strand to SEQ ID NO: 2284630
uuucucagauagaugccca

SEQ ID NO: 2284632 - RNA, 19 nt, Artificial Sequence
  Description of Artificial Sequence: Synthetic oligonucleotide
  Sense strand starting at position 3341 of SEQ ID NO: 1884691
gugggcaucuaucuagaaa

SEQ ID NO: 2284633 - RNA, 19 nt, Artificial Sequence
  Description of Artificial Sequence: Synthetic oligonucleotide
  Antisense strand to SEQ ID NO: 2284632
uuucuagauagaugcccac

SEQ ID NO: 2284634 - RNA, 19 nt, Artificial Sequence
  Description of Artificial Sequence: Synthetic oligonucleotide
  Sense strand starting at position 3445 of SEQ ID NO: 1884691
auuagauaauaggcccaua

SEQ ID NO: 2284635 - RNA, 19 nt, Artificial Sequence
  Description of Artificial Sequence: Synthetic oligonucleotide
  Antisense strand to SEQ ID NO: 2284634
uaugggccuauuaucuaau

SEQ ID NO: 2284636 - RNA, 19 nt, Artificial Sequence
  Description of Artificial Sequence: Synthetic oligonucleotide
  Sense strand starting at position 3495 of SEQ ID NO: 1884691
ggcagacugucaucaggaa

SEQ ID NO: 2284637 - RNA, 19 nt, Artificial Sequence
  Description of Artificial Sequence: Synthetic oligonucleotide
  Antisense strand to SEQ ID NO: 2284636
uuccugaugacagucugcc

SEQ ID NO: 2284638 - RNA, 19 nt, Artificial Sequence
  Description of Artificial Sequence: Synthetic oligonucleotide
  Sense strand starting at position 3496 of SEQ ID NO: 1884691
gcagacugucaucaggaau

SEQ ID NO: 2284639 - RNA, 19 nt, Artificial Sequence
  Description of Artificial Sequence: Synthetic oligonucleotide
  Antisense strand to SEQ ID NO: 2284638
auuccugaugacagucugc

SEQ ID NO: 2284640 - RNA, 19 nt, Artificial Sequence
  Description of Artificial Sequence: Synthetic oligonucleotide
  Sense strand starting at position 3663 of SEQ ID NO: 1884691
uaacgugaucgauauaugg

SEQ ID NO: 2284641 - RNA, 19 nt, Artificial Sequence
  Description of Artificial Sequence: Synthetic oligonucleotide
  Antisense strand to SEQ ID NO: 2284640
ccauauaucgaucacguua

SEQ ID NO: 2284642 - RNA, 19 nt, Artificial Sequence
  Description of Artificial Sequence: Synthetic oligonucleotide
  Sense strand starting at position 3665 of SEQ ID NO: 1884691
acgugaucgauauauggau

SEQ ID NO: 2284643 - RNA, 19 nt, Artificial Sequence
  Description of Artificial Sequence: Synthetic oligonucleotide
  Antisense strand to SEQ ID NO: 2284642
auccauauaucgaucacgu

SEQ ID NO: 2284644 - RNA, 19 nt, Artificial Sequence
  Description of Artificial Sequence: Synthetic oligonucleotide
  Sense strand starting at position 3667 of SEQ ID NO: 1884691
gugaucgauauauggauga

SEQ ID NO: 2284645 - RNA, 19 nt, Artificial Sequence
  Description of Artificial Sequence: Synthetic oligonucleotide
  Antisense strand to SEQ ID NO: 2284644
ucauccauauaucgaucac

SEQ ID NO: 2284646 - RNA, 19 nt, Artificial Sequence
  Description of Artificial Sequence: Synthetic oligonucleotide
  Sense strand starting at position 3671 of SEQ ID NO: 1884691
ucgauauauggaugagggu

SEQ ID NO: 2284647 - RNA, 19 nt, Artificial Sequence
  Description of Artificial Sequence: Synthetic oligonucleotide
  Antisense strand to SEQ ID NO: 2284646
acccucauccauauaucga

SEQ ID NO: 2284648 - RNA, 19 nt, Artificial Sequence
  Description of Artificial Sequence: Synthetic oligonucleotide
  Sense strand starting at position 3840 of SEQ ID NO: 1884691
uuuggauaauuaccuguau

SEQ ID NO: 2284649 - RNA, 19 nt, Artificial Sequence
  Description of Artificial Sequence: Synthetic oligonucleotide
  Antisense strand to SEQ ID NO: 2284648
auacagguaauuauccaaa

SEQ ID NO: 2284650 - RNA, 19 nt, Artificial Sequence
  Description of Artificial Sequence: Synthetic oligonucleotide
  Sense strand starting at position 3841 of SEQ ID NO: 1884691
uuggauaauuaccuguauu

SEQ ID NO: 2284651 - RNA, 19 nt, Artificial Sequence
  Description of Artificial Sequence: Synthetic oligonucleotide
  Antisense strand to SEQ ID NO: 2284650
aauacagguaauuauccaa

SEQ ID NO: 2284652 - RNA, 19 nt, Artificial Sequence
  Description of Artificial Sequence: Synthetic oligonucleotide
  Sense strand starting at position 3974 of SEQ ID NO: 1884691
cucacuucucaguaguaag

SEQ ID NO: 2284653 - RNA, 19 nt, Artificial Sequence
  Description of Artificial Sequence: Synthetic oligonucleotide
  Antisense strand to SEQ ID NO: 2284652
cuuacuacugagaagugag

SEQ ID NO: 2284654 - RNA, 19 nt, Artificial Sequence
  Description of Artificial Sequence: Synthetic oligonucleotide
  Sense strand starting at position 75 of SEQ ID NO: 1884692
cgagauuccauguaaguca

SEQ ID NO: 2284655 - RNA, 19 nt, Artificial Sequence
  Description of Artificial Sequence: Synthetic oligonucleotide
  Antisense strand to SEQ ID NO: 2284654
ugacuuacauggaaucucg

SEQ ID NO: 2284656 - RNA, 19 nt, Artificial Sequence
  Description of Artificial Sequence: Synthetic oligonucleotide
  Sense strand starting at position 82 of SEQ ID NO: 1884692
ccauguaagucaucacaaa

SEQ ID NO: 2284657 - RNA, 19 nt, Artificial Sequence
  Description of Artificial Sequence: Synthetic oligonucleotide
  Antisense strand to SEQ ID NO: 2284656
uuugugaugacuuacaugg

SEQ ID NO: 2284658 - RNA, 19 nt, Artificial Sequence
  Description of Artificial Sequence: Synthetic oligonucleotide
  Sense strand starting at position 136 of SEQ ID NO: 1884692
uacugagugcauugaauac

SEQ ID NO: 2284659 - RNA, 19 nt, Artificial Sequence
  Description of Artificial Sequence: Synthetic oligonucleotide
  Antisense strand to SEQ ID NO: 2284658
guauucaaugcacucagua

SEQ ID NO: 2284660 - RNA, 19 nt, Artificial Sequence
  Description of Artificial Sequence: Synthetic oligonucleotide
  Sense strand starting at position 145 of SEQ ID NO: 1884692
cauugaauaccgugaaauu

SEQ ID NO: 2284661 - RNA, 19 nt, Artificial Sequence
  Description of Artificial Sequence: Synthetic oligonucleotide
  Antisense strand to SEQ ID NO: 2284660
aauuucacgguauucaaug

SEQ ID NO: 2284662 - RNA, 19 nt, Artificial Sequence
  Description of Artificial Sequence: Synthetic oligonucleotide
  Sense strand starting at position 192 of SEQ ID NO: 1884692
guuaguaguaccuagagaa

SEQ ID NO: 2284663 - RNA, 19 nt, Artificial Sequence
  Description of Artificial Sequence: Synthetic oligonucleotide
  Antisense strand to SEQ ID NO: 2284662
uucucuagguacuacuaac

SEQ ID NO: 2284664 - RNA, 19 nt, Artificial Sequence
  Description of Artificial Sequence: Synthetic oligonucleotide
  Sense strand starting at position 212 of SEQ ID NO: 1884692
aacaaagcugugggugaaa

SEQ ID NO: 2284665 - RNA, 19 nt, Artificial Sequence
  Description of Artificial Sequence: Synthetic oligonucleotide
  Antisense strand to SEQ ID NO: 2284664
uuucacccacagcuuuguu

SEQ ID NO: 2284666 - RNA, 19 nt, Artificial Sequence
  Description of Artificial Sequence: Synthetic oligonucleotide
  Sense strand starting at position 214 of SEQ ID NO: 1884692
caaagcugugggugaaaga

SEQ ID NO: 2284667 - RNA, 19 nt, Artificial Sequence
  Description of Artificial Sequence: Synthetic oligonucleotide
  Antisense strand to SEQ ID NO: 2284666
ucuuucacccacagcuuug

SEQ ID NO: 2284668 - RNA, 19 nt, Artificial Sequence
  Description of Artificial Sequence: Synthetic oligonucleotide
  Sense strand starting at position 215 of SEQ ID NO: 1884692
aaagcugugggugaaagau

SEQ ID NO: 2284669 - RNA, 19 nt, Artificial Sequence
  Description of Artificial Sequence: Synthetic oligonucleotide
  Antisense strand to SEQ ID NO: 2284668
aucuuucacccacagcuuu

SEQ ID NO: 2284670 - RNA, 19 nt, Artificial Sequence
  Description of Artificial Sequence: Synthetic oligonucleotide
  Sense strand starting at position 224 of SEQ ID NO: 1884692
ggugaaagauuccucagac

SEQ ID NO: 2284671 - RNA, 19 nt, Artificial Sequence
  Description of Artificial Sequence: Synthetic oligonucleotide
  Antisense strand to SEQ ID NO: 2284670
gucugaggaaucuuucacc

SEQ ID NO: 2284672 - RNA, 19 nt, Artificial Sequence
  Description of Artificial Sequence: Synthetic oligonucleotide
  Sense strand starting at position 225 of SEQ ID NO: 1884692
gugaaagauuccucagaca

SEQ ID NO: 2284673 - RNA, 19 nt, Artificial Sequence
  Description of Artificial Sequence: Synthetic oligonucleotide
  Antisense strand to SEQ ID NO: 2284672
ugucugaggaaucuuucac

SEQ ID NO: 2284674 - RNA, 19 nt, Artificial Sequence
  Description of Artificial Sequence: Synthetic oligonucleotide
  Sense strand starting at position 262 of SEQ ID NO: 1884692
ugcguucuccaguuucuca

SEQ ID NO: 2284675 - RNA, 19 nt, Artificial Sequence
  Description of Artificial Sequence: Synthetic oligonucleotide
  Antisense strand to SEQ ID NO: 2284674
ugagaaacuggagaacgca

SEQ ID NO: 2284676 - RNA, 19 nt, Artificial Sequence
  Description of Artificial Sequence: Synthetic oligonucleotide
  Sense strand starting at position 350 of SEQ ID NO: 1884692
uggcauaagcuguaaggaa

SEQ ID NO: 2284677 - RNA, 19 nt, Artificial Sequence
  Description of Artificial Sequence: Synthetic oligonucleotide
  Antisense strand to SEQ ID NO: 2284676
uuccuuacagcuuaugcca

SEQ ID NO: 2284678 - RNA, 19 nt, Artificial Sequence
  Description of Artificial Sequence: Synthetic oligonucleotide
  Sense strand starting at position 493 of SEQ ID NO: 1884692
acgguugcuaauggacaaa

SEQ ID NO: 2284679 - RNA, 19 nt, Artificial Sequence
  Description of Artificial Sequence: Synthetic oligonucleotide
  Antisense strand to SEQ ID NO: 2284678
uuuguccauuagcaaccgu

SEQ ID NO: 2284680 - RNA, 19 nt, Artificial Sequence
  Description of Artificial Sequence: Synthetic oligonucleotide
  Sense strand starting at position 635 of SEQ ID NO: 1884692
auguuuccuccucauugga

SEQ ID NO: 2284681 - RNA, 19 nt, Artificial Sequence
  Description of Artificial Sequence: Synthetic oligonucleotide
  Antisense strand to SEQ ID NO: 2284680
uccaaugaggaggaaacau

SEQ ID NO: 2284682 - RNA, 19 nt, Artificial Sequence
  Description of Artificial Sequence: Synthetic oligonucleotide
  Sense strand starting at position 653 of SEQ ID NO: 1884692
agcagaauccuggaaagcu

SEQ ID NO: 2284683 - RNA, 19 nt, Artificial Sequence
  Description of Artificial Sequence: Synthetic oligonucleotide
  Antisense strand to SEQ ID NO: 2284682
agcuuuccaggauucugcu

SEQ ID NO: 2284684 - RNA, 19 nt, Artificial Sequence
  Description of Artificial Sequence: Synthetic oligonucleotide
  Sense strand starting at position 709 of SEQ ID NO: 1884692
gugggcaucuaucugagaa

SEQ ID NO: 2284685 - RNA, 19 nt, Artificial Sequence
  Description of Artificial Sequence: Synthetic oligonucleotide
  Antisense strand to SEQ ID NO: 2284684
uucucagauagaugcccac

SEQ ID NO: 2284686 - RNA, 19 nt, Artificial Sequence
  Description of Artificial Sequence: Synthetic oligonucleotide
  Sense strand starting at position 710 of SEQ ID NO: 1884692
ugggcaucuaucugagaaa

SEQ ID NO: 2284687 - RNA, 19 nt, Artificial Sequence
  Description of Artificial Sequence: Synthetic oligonucleotide
  Antisense strand to SEQ ID NO: 2284686
uuucucagauagaugccca

SEQ ID NO: 2284688 - RNA, 19 nt, Artificial Sequence
  Description of Artificial Sequence: Synthetic oligonucleotide
  Sense strand starting at position 737 of SEQ ID NO: 1884692
auauaucagugggcaucua

SEQ ID NO: 2284689 - RNA, 19 nt, Artificial Sequence
  Description of Artificial Sequence: Synthetic oligonucleotide
  Antisense strand to SEQ ID NO: 2284688
uagaugcccacugauauau

SEQ ID NO: 2284690 - RNA, 19 nt, Artificial Sequence
  Description of Artificial Sequence: Synthetic oligonucleotide
  Sense strand starting at position 745 of SEQ ID NO: 1884692
gugggcaucuaucuagaaa

SEQ ID NO: 2284691 - RNA, 19 nt, Artificial Sequence
  Description of Artificial Sequence: Synthetic oligonucleotide
  Antisense strand to SEQ ID NO: 2284690
uuucuagauagaugcccac

SEQ ID NO: 2284692 - RNA, 19 nt, Artificial Sequence
  Description of Artificial Sequence: Synthetic oligonucleotide
  Sense strand starting at position 849 of SEQ ID NO: 1884692
auuagauaauaggcccaua

SEQ ID NO: 2284693 - RNA, 19 nt, Artificial Sequence
  Description of Artificial Sequence: Synthetic oligonucleotide
  Antisense strand to SEQ ID NO: 2284692
uaugggccuauuaucuaau

SEQ ID NO: 2284694 - RNA, 19 nt, Artificial Sequence
  Description of Artificial Sequence: Synthetic oligonucleotide
  Sense strand starting at position 899 of SEQ ID NO: 1884692
ggcagacugucaucaggaa

SEQ ID NO: 2284695 - RNA, 19 nt, Artificial Sequence
  Description of Artificial Sequence: Synthetic oligonucleotide
  Antisense strand to SEQ ID NO: 2284694
uuccugaugacagucugcc

SEQ ID NO: 2284696 - RNA, 19 nt, Artificial Sequence
  Description of Artificial Sequence: Synthetic oligonucleotide
  Sense strand starting at position 900 of SEQ ID NO: 1884692
gcagacugucaucaggaau

SEQ ID NO: 2284697 - RNA, 19 nt, Artificial Sequence
  Description of Artificial Sequence: Synthetic oligonucleotide
  Antisense strand to SEQ ID NO: 2284696
auuccugaugacagucugc

SEQ ID NO: 2284698 - RNA, 19 nt, Artificial Sequence
  Description of Artificial Sequence: Synthetic oligonucleotide
  Sense strand starting at position 1065 of SEQ ID NO: 1884692
aguaacgugaucgauauau

SEQ ID NO: 2284699 - RNA, 19 nt, Artificial Sequence
  Description of Artificial Sequence: Synthetic oligonucleotide
  Antisense strand to SEQ ID NO: 2284698
auauaucgaucacguuacu

SEQ ID NO: 2284700 - RNA, 19 nt, Artificial Sequence
  Description of Artificial Sequence: Synthetic oligonucleotide
  Sense strand starting at position 1067 of SEQ ID NO: 1884692
uaacgugaucgauauaugg

SEQ ID NO: 2284701 - RNA, 19 nt, Artificial Sequence
  Description of Artificial Sequence: Synthetic oligonucleotide
  Antisense strand to SEQ ID NO: 2284700
ccauauaucgaucacguua

SEQ ID NO: 2284702 - RNA, 19 nt, Artificial Sequence
  Description of Artificial Sequence: Synthetic oligonucleotide
  Sense strand starting at position 1069 of SEQ ID NO: 1884692
acgugaucgauauauggau

SEQ ID NO: 2284703 - RNA, 19 nt, Artificial Sequence
  Description of Artificial Sequence: Synthetic oligonucleotide
  Antisense strand to SEQ ID NO: 2284702
auccauauaucgaucacgu

SEQ ID NO: 2284704 - RNA, 19 nt, Artificial Sequence
  Description of Artificial Sequence: Synthetic oligonucleotide
  Sense strand starting at position 1071 of SEQ ID NO: 1884692
gugaucgauauauggauga

SEQ ID NO: 2284705 - RNA, 19 nt, Artificial Sequence
  Description of Artificial Sequence: Synthetic oligonucleotide
  Antisense strand to SEQ ID NO: 2284704
ucauccauauaucgaucac

SEQ ID NO: 2284706 - RNA, 19 nt, Artificial Sequence
  Description of Artificial Sequence: Synthetic oligonucleotide
  Sense strand starting at position 1075 of SEQ ID NO: 1884692
ucgauauauggaugagggu

SEQ ID NO: 2284707 - RNA, 19 nt, Artificial Sequence
  Description of Artificial Sequence: Synthetic oligonucleotide
  Antisense strand to SEQ ID NO: 2284706
acccucauccauauaucga

SEQ ID NO: 2284708 - RNA, 19 nt, Artificial Sequence
  Description of Artificial Sequence: Synthetic oligonucleotide
  Sense strand starting at position 1244 of SEQ ID NO: 1884692
uuuggauaauuaccuguau

SEQ ID NO: 2284709 - RNA, 19 nt, Artificial Sequence
  Description of Artificial Sequence: Synthetic oligonucleotide
  Antisense strand to SEQ ID NO: 2284708
auacagguaauuauccaaa

SEQ ID NO: 2284710 - RNA, 19 nt, Artificial Sequence
  Description of Artificial Sequence: Synthetic oligonucleotide
  Sense strand starting at position 1245 of SEQ ID NO: 1884692
uuggauaauuaccuguauu

SEQ ID NO: 2284711 - RNA, 19 nt, Artificial Sequence
  Description of Artificial Sequence: Synthetic oligonucleotide
  Antisense strand to SEQ ID NO: 2284710
aauacagguaauuauccaa

SEQ ID NO: 2284712 - RNA, 19 nt, Artificial Sequence
  Description of Artificial Sequence: Synthetic oligonucleotide
  Sense strand starting at position 1378 of SEQ ID NO: 1884692
cucacuucucaguaguaag

SEQ ID NO: 2284713 - RNA, 19 nt, Artificial Sequence
  Description of Artificial Sequence: Synthetic oligonucleotide
  Antisense strand to SEQ ID NO: 2284712
cuuacuacugagaagugag

SEQ ID NO: 2284714 - RNA, 19 nt, Artificial Sequence
  Description of Artificial Sequence: Synthetic oligonucleotide
  Sense strand starting at position 1447 of SEQ ID NO: 1884692
uggagugguuaucuacaag

SEQ ID NO: 2284715 - RNA, 19 nt, Artificial Sequence
  Description of Artificial Sequence: Synthetic oligonucleotide
  Antisense strand to SEQ ID NO: 2284714
cuuguagauaaccacucca

SEQ ID NO: 2284716 - RNA, 19 nt, Artificial Sequence
  Description of Artificial Sequence: Synthetic oligonucleotide
  Sense strand starting at position 1462 of SEQ ID NO: 1884692
caaggucuccucuguaaga

SEQ ID NO: 2284717 - RNA, 19 nt, Artificial Sequence
  Description of Artificial Sequence: Synthetic oligonucleotide
  Antisense strand to SEQ ID NO: 2284716
ucuuacagaggagaccuug

SEQ ID NO: 2284718 - RNA, 19 nt, Artificial Sequence
  Description of Artificial Sequence: Synthetic oligonucleotide
  Sense strand starting at position 1504 of SEQ ID NO: 1884692
ggaacauuacuguaacgcu

SEQ ID NO: 2284719 - RNA, 19 nt, Artificial Sequence
  Description of Artificial Sequence: Synthetic oligonucleotide
  Antisense strand to SEQ ID NO: 2284718
agcguuacaguaauguucc

SEQ ID NO: 2284720 - RNA, 19 nt, Artificial Sequence
  Description of Artificial Sequence: Synthetic oligonucleotide
  Sense strand starting at position 1624 of SEQ ID NO: 1884692
ucaauagggcccugacauu

SEQ ID NO: 2284721 - RNA, 19 nt, Artificial Sequence
  Description of Artificial Sequence: Synthetic oligonucleotide
  Antisense strand to SEQ ID NO: 2284720
aaugucagggcccuauuga

SEQ ID NO: 2284722 - RNA, 19 nt, Artificial Sequence
  Description of Artificial Sequence: Synthetic oligonucleotide
  Sense strand starting at position 1633 of SEQ ID NO: 1884692
cccugacauuuguugcgua

SEQ ID NO: 2284723 - RNA, 19 nt, Artificial Sequence
  Description of Artificial Sequence: Synthetic oligonucleotide
  Antisense strand to SEQ ID NO: 2284722
uacgcaacaaaugucaggg

SEQ ID NO: 2284724 - RNA, 19 nt, Artificial Sequence
  Description of Artificial Sequence: Synthetic oligonucleotide
  Sense strand starting at position 1638 of SEQ ID NO: 1884692
acauuuguugcguacagua

SEQ ID NO: 2284725 - RNA, 19 nt, Artificial Sequence
  Description of Artificial Sequence: Synthetic oligonucleotide
  Antisense strand to SEQ ID NO: 2284724
uacuguacgcaacaaaugu

SEQ ID NO: 2284726 - RNA, 19 nt, Artificial Sequence
  Description of Artificial Sequence: Synthetic oligonucleotide
  Sense strand starting at position 1768 of SEQ ID NO: 1884692
uuaagaaauggccguaaga

SEQ ID NO: 2284727 - RNA, 19 nt, Artificial Sequence
  Description of Artificial Sequence: Synthetic oligonucleotide
  Antisense strand to SEQ ID NO: 2284726
ucuuacggccauuucuuaa

SEQ ID NO: 2284728 - RNA, 19 nt, Artificial Sequence
  Description of Artificial Sequence: Synthetic oligonucleotide
  Sense strand starting at position 2808 of SEQ ID NO: 1884692
aaaguaugucaggacguaa

SEQ ID NO: 2284729 - RNA, 19 nt, Artificial Sequence
  Description of Artificial Sequence: Synthetic oligonucleotide
  Antisense strand to SEQ ID NO: 2284728
uuacguccugacauacuuu

SEQ ID NO: 2284730 - RNA, 19 nt, Artificial Sequence
  Description of Artificial Sequence: Synthetic oligonucleotide
  Sense strand starting at position 2896 of SEQ ID NO: 1884692
ucuuuagaucuuggacuac

SEQ ID NO: 2284731 - RNA, 19 nt, Artificial Sequence
  Description of Artificial Sequence: Synthetic oligonucleotide
  Antisense strand to SEQ ID NO: 2284730
guaguccaagaucuaaaga

SEQ ID NO: 2284732 - RNA, 19 nt, Artificial Sequence
  Description of Artificial Sequence: Synthetic oligonucleotide
  Sense strand starting at position 3073 of SEQ ID NO: 1884692
cugccugaucaauaugguu

SEQ ID NO: 2284733 - RNA, 19 nt, Artificial Sequence
  Description of Artificial Sequence: Synthetic oligonucleotide
  Antisense strand to SEQ ID NO: 2284732
aaccauauugaucaggcag

SEQ ID NO: 2284734 - RNA, 19 nt, Artificial Sequence
  Description of Artificial Sequence: Synthetic oligonucleotide
  Sense strand starting at position 57 of SEQ ID NO: 1884693
gaucaaagacuuuggguua

SEQ ID NO: 2284735 - RNA, 19 nt, Artificial Sequence
  Description of Artificial Sequence: Synthetic oligonucleotide
  Antisense strand to SEQ ID NO: 2284734
uaacccaaagucuuugauc

SEQ ID NO: 2284736 - RNA, 19 nt, Artificial Sequence
  Description of Artificial Sequence: Synthetic oligonucleotide
  Sense strand starting at position 340 of SEQ ID NO: 1884693
cgagauuccauguaaguca

SEQ ID NO: 2284737 - RNA, 19 nt, Artificial Sequence
  Description of Artificial Sequence: Synthetic oligonucleotide
  Antisense strand to SEQ ID NO: 2284736
ugacuuacauggaaucucg

SEQ ID NO: 2284738 - RNA, 19 nt, Artificial Sequence
  Description of Artificial Sequence: Synthetic oligonucleotide
  Sense strand starting at position 347 of SEQ ID NO: 1884693
ccauguaagucaucacaaa

SEQ ID NO: 2284739 - RNA, 19 nt, Artificial Sequence
  Description of Artificial Sequence: Synthetic oligonucleotide
  Antisense strand to SEQ ID NO: 2284738
uuugugaugacuuacaugg

SEQ ID NO: 2284740 - RNA, 19 nt, Artificial Sequence
  Description of Artificial Sequence: Synthetic oligonucleotide
  Sense strand starting at position 401 of SEQ ID NO: 1884693
uacugagugcauugaauac

SEQ ID NO: 2284741 - RNA, 19 nt, Artificial Sequence
  Description of Artificial Sequence: Synthetic oligonucleotide
  Antisense strand to SEQ ID NO: 2284740
guauucaaugcacucagua

SEQ ID NO: 2284742 - RNA, 19 nt, Artificial Sequence
  Description of Artificial Sequence: Synthetic oligonucleotide
  Sense strand starting at position 410 of SEQ ID NO: 1884693
cauugaauaccgugaaauu

SEQ ID NO: 2284743 - RNA, 19 nt, Artificial Sequence
  Description of Artificial Sequence: Synthetic oligonucleotide
  Antisense strand to SEQ ID NO: 2284742
aauuucacgguauucaaug

SEQ ID NO: 2284744 - RNA, 19 nt, Artificial Sequence
  Description of Artificial Sequence: Synthetic oligonucleotide
  Sense strand starting at position 457 of SEQ ID NO: 1884693
guuaguaguaccuagagaa

SEQ ID NO: 2284745 - RNA, 19 nt, Artificial Sequence
  Description of Artificial Sequence: Synthetic oligonucleotide
  Antisense strand to SEQ ID NO: 2284744
uucucuagguacuacuaac

SEQ ID NO: 2284746 - RNA, 19 nt, Artificial Sequence
  Description of Artificial Sequence: Synthetic oligonucleotide
  Sense strand starting at position 477 of SEQ ID NO: 1884693
aacaaagcugugggugaaa

SEQ ID NO: 2284747 - RNA, 19 nt, Artificial Sequence
  Description of Artificial Sequence: Synthetic oligonucleotide
  Antisense strand to SEQ ID NO: 2284746
uuucacccacagcuuuguu

SEQ ID NO: 2284748 - RNA, 19 nt, Artificial Sequence
  Description of Artificial Sequence: Synthetic oligonucleotide
  Sense strand starting at position 479 of SEQ ID NO: 1884693
caaagcugugggugaaaga

SEQ ID NO: 2284749 - RNA, 19 nt, Artificial Sequence
  Description of Artificial Sequence: Synthetic oligonucleotide
  Antisense strand to SEQ ID NO: 2284748
ucuuucacccacagcuuug

SEQ ID NO: 2284750 - RNA, 19 nt, Artificial Sequence
  Description of Artificial Sequence: Synthetic oligonucleotide
  Sense strand starting at position 480 of SEQ ID NO: 1884693
aaagcugugggugaaagau

SEQ ID NO: 2284751 - RNA, 19 nt, Artificial Sequence
  Description of Artificial Sequence: Synthetic oligonucleotide
  Antisense strand to SEQ ID NO: 2284750
aucuuucacccacagcuuu

SEQ ID NO: 2284752 - RNA, 19 nt, Artificial Sequence
  Description of Artificial Sequence: Synthetic oligonucleotide
  Sense strand starting at position 489 of SEQ ID NO: 1884693
ggugaaagauuccucagac

SEQ ID NO: 2284753 - RNA, 19 nt, Artificial Sequence
  Description of Artificial Sequence: Synthetic oligonucleotide
  Antisense strand to SEQ ID NO: 2284752
gucugaggaaucuuucacc

SEQ ID NO: 2284754 - RNA, 19 nt, Artificial Sequence
  Description of Artificial Sequence: Synthetic oligonucleotide
  Sense strand starting at position 490 of SEQ ID NO: 1884693
gugaaagauuccucagaca

SEQ ID NO: 2284755 - RNA, 19 nt, Artificial Sequence
  Description of Artificial Sequence: Synthetic oligonucleotide
  Antisense strand to SEQ ID NO: 2284754
ugucugaggaaucuuucac

SEQ ID NO: 2284756 - RNA, 19 nt, Artificial Sequence
  Description of Artificial Sequence: Synthetic oligonucleotide
  Sense strand starting at position 527 of SEQ ID NO: 1884693
ugcguucuccaguuucuca

SEQ ID NO: 2284757 - RNA, 19 nt, Artificial Sequence
  Description of Artificial Sequence: Synthetic oligonucleotide
  Antisense strand to SEQ ID NO: 2284756
ugagaaacuggagaacgca

SEQ ID NO: 2284758 - RNA, 19 nt, Artificial Sequence
  Description of Artificial Sequence: Synthetic oligonucleotide
  Sense strand starting at position 615 of SEQ ID NO: 1884693
uggcauaagcuguaaggaa

SEQ ID NO: 2284759 - RNA, 19 nt, Artificial Sequence
  Description of Artificial Sequence: Synthetic oligonucleotide
  Antisense strand to SEQ ID NO: 2284758
uuccuuacagcuuaugcca

SEQ ID NO: 2284760 - RNA, 19 nt, Artificial Sequence
  Description of Artificial Sequence: Synthetic oligonucleotide
  Sense strand starting at position 900 of SEQ ID NO: 1884693
auguuuccuccucauugga

SEQ ID NO: 2284761 - RNA, 19 nt, Artificial Sequence
  Description of Artificial Sequence: Synthetic oligonucleotide
  Antisense strand to SEQ ID NO: 2284760
uccaaugaggaggaaacau

SEQ ID NO: 2284762 - RNA, 19 nt, Artificial Sequence
  Description of Artificial Sequence: Synthetic oligonucleotide
  Sense strand starting at position 918 of SEQ ID NO: 1884693
agcagaauccuggaaagcu

SEQ ID NO: 2284763 - RNA, 19 nt, Artificial Sequence
  Description of Artificial Sequence: Synthetic oligonucleotide
  Antisense strand to SEQ ID NO: 2284762
agcuuuccaggauucugcu

SEQ ID NO: 2284764 - RNA, 19 nt, Artificial Sequence
  Description of Artificial Sequence: Synthetic oligonucleotide
  Sense strand starting at position 974 of SEQ ID NO: 1884693
gugggcaucuaucugagaa

SEQ ID NO: 2284765 - RNA, 19 nt, Artificial Sequence
  Description of Artificial Sequence: Synthetic oligonucleotide
  Antisense strand to SEQ ID NO: 2284764
uucucagauagaugcccac

SEQ ID NO: 2284766 - RNA, 19 nt, Artificial Sequence
  Description of Artificial Sequence: Synthetic oligonucleotide
  Sense strand starting at position 975 of SEQ ID NO: 1884693
ugggcaucuaucugagaaa

SEQ ID NO: 2284767 - RNA, 19 nt, Artificial Sequence
  Description of Artificial Sequence: Synthetic oligonucleotide
  Antisense strand to SEQ ID NO: 2284766
uuucucagauagaugccca

SEQ ID NO: 2284768 - RNA, 19 nt, Artificial Sequence
  Description of Artificial Sequence: Synthetic oligonucleotide
  Sense strand starting at position 1002 of SEQ ID NO: 1884693
auauaucagugggcaucua

SEQ ID NO: 2284769 - RNA, 19 nt, Artificial Sequence
  Description of Artificial Sequence: Synthetic oligonucleotide
  Antisense strand to SEQ ID NO: 2284768
uagaugcccacugauauau

SEQ ID NO: 2284770 - RNA, 19 nt, Artificial Sequence
  Description of Artificial Sequence: Synthetic oligonucleotide
  Sense strand starting at position 1010 of SEQ ID NO: 1884693
gugggcaucuaucuagaaa

SEQ ID NO: 2284771 - RNA, 19 nt, Artificial Sequence
  Description of Artificial Sequence: Synthetic oligonucleotide
  Antisense strand to SEQ ID NO: 2284770
uuucuagauagaugcccac

SEQ ID NO: 2284772 - RNA, 19 nt, Artificial Sequence
  Description of Artificial Sequence: Synthetic oligonucleotide
  Sense strand starting at position 1114 of SEQ ID NO: 1884693
auuagauaauaggcccaua

SEQ ID NO: 2284773 - RNA, 19 nt, Artificial Sequence
  Description of Artificial Sequence: Synthetic oligonucleotide
  Antisense strand to SEQ ID NO: 2284772
uaugggccuauuaucuaau

SEQ ID NO: 2284774 - RNA, 19 nt, Artificial Sequence
  Description of Artificial Sequence: Synthetic oligonucleotide
  Sense strand starting at position 1164 of SEQ ID NO: 1884693
ggcagacugucaucaggaa

SEQ ID NO: 2284775 - RNA, 19 nt, Artificial Sequence
  Description of Artificial Sequence: Synthetic oligonucleotide
  Antisense strand to SEQ ID NO: 2284774
uuccugaugacagucugcc

SEQ ID NO: 2284776 - RNA, 19 nt, Artificial Sequence
  Description of Artificial Sequence: Synthetic oligonucleotide
  Sense strand starting at position 1165 of SEQ ID NO: 1884693
gcagacugucaucaggaau

SEQ ID NO: 2284777 - RNA, 19 nt, Artificial Sequence
  Description of Artificial Sequence: Synthetic oligonucleotide
  Antisense strand to SEQ ID NO: 2284776
auuccugaugacagucugc

SEQ ID NO: 2284778 - RNA, 19 nt, Artificial Sequence
  Description of Artificial Sequence: Synthetic oligonucleotide
  Sense strand starting at position 1330 of SEQ ID NO: 1884693
aguaacgugaucgauauau

SEQ ID NO: 2284779 - RNA, 19 nt, Artificial Sequence
  Description of Artificial Sequence: Synthetic oligonucleotide
  Antisense strand to SEQ ID NO: 2284778
auauaucgaucacguuacu

SEQ ID NO: 2284780 - RNA, 19 nt, Artificial Sequence
  Description of Artificial Sequence: Synthetic oligonucleotide
  Sense strand starting at position 1332 of SEQ ID NO: 1884693
uaacgugaucgauauaugg

SEQ ID NO: 2284781 - RNA, 19 nt, Artificial Sequence
  Description of Artificial Sequence: Synthetic oligonucleotide
  Antisense strand to SEQ ID NO: 2284780
ccauauaucgaucacguua

SEQ ID NO: 2284782 - RNA, 19 nt, Artificial Sequence
  Description of Artificial Sequence: Synthetic oligonucleotide
  Sense strand starting at position 1334 of SEQ ID NO: 1884693
acgugaucgauauauggau

SEQ ID NO: 2284783 - RNA, 19 nt, Artificial Sequence
  Description of Artificial Sequence: Synthetic oligonucleotide
  Antisense strand to SEQ ID NO: 2284782
auccauauaucgaucacgu

SEQ ID NO: 2284784 - RNA, 19 nt, Artificial Sequence
  Description of Artificial Sequence: Synthetic oligonucleotide
  Sense strand starting at position 1336 of SEQ ID NO: 1884693
gugaucgauauauggauga

SEQ ID NO: 2284785 - RNA, 19 nt, Artificial Sequence
  Description of Artificial Sequence: Synthetic oligonucleotide
  Antisense strand to SEQ ID NO: 2284784
ucauccauauaucgaucac

SEQ ID NO: 2284786 - RNA, 19 nt, Artificial Sequence
  Description of Artificial Sequence: Synthetic oligonucleotide
  Sense strand starting at position 1340 of SEQ ID NO: 1884693
ucgauauauggaugagggu

SEQ ID NO: 2284787 - RNA, 19 nt, Artificial Sequence
  Description of Artificial Sequence: Synthetic oligonucleotide
  Antisense strand to SEQ ID NO: 2284786
acccucauccauauaucga

SEQ ID NO: 2284788 - RNA, 19 nt, Artificial Sequence
  Description of Artificial Sequence: Synthetic oligonucleotide
  Sense strand starting at position 1509 of SEQ ID NO: 1884693
uuuggauaauuaccuguau

SEQ ID NO: 2284789 - RNA, 19 nt, Artificial Sequence
  Description of Artificial Sequence: Synthetic oligonucleotide
  Antisense strand to SEQ ID NO: 2284788
auacagguaauuauccaaa

SEQ ID NO: 2284790 - RNA, 19 nt, Artificial Sequence
  Description of Artificial Sequence: Synthetic oligonucleotide
  Sense strand starting at position 1510 of SEQ ID NO: 1884693
uuggauaauuaccuguauu

SEQ ID NO: 2284791 - RNA, 19 nt, Artificial Sequence
  Description of Artificial Sequence: Synthetic oligonucleotide
  Antisense strand to SEQ ID NO: 2284790
aauacagguaauuauccaa

SEQ ID NO: 2284792 - RNA, 19 nt, Artificial Sequence
  Description of Artificial Sequence: Synthetic oligonucleotide
  Sense strand starting at position 1643 of SEQ ID NO: 1884693
cucacuucucaguaguaag

SEQ ID NO: 2284793 - RNA, 19 nt, Artificial Sequence
  Description of Artificial Sequence: Synthetic oligonucleotide
  Antisense strand to SEQ ID NO: 2284792
cuuacuacugagaagugag

SEQ ID NO: 2284794 - RNA, 19 nt, Artificial Sequence
  Description of Artificial Sequence: Synthetic oligonucleotide
  Sense strand starting at position 1712 of SEQ ID NO: 1884693
uggagugguuaucuacaag

SEQ ID NO: 2284795 - RNA, 19 nt, Artificial Sequence
  Description of Artificial Sequence: Synthetic oligonucleotide
  Antisense strand to SEQ ID NO: 2284794
cuuguagauaaccacucca

SEQ ID NO: 2284796 - RNA, 19 nt, Artificial Sequence
  Description of Artificial Sequence: Synthetic oligonucleotide
  Sense strand starting at position 1727 of SEQ ID NO: 1884693
caaggucuccucuguaaga

SEQ ID NO: 2284797 - RNA, 19 nt, Artificial Sequence
  Description of Artificial Sequence: Synthetic oligonucleotide
  Antisense strand to SEQ ID NO: 2284796
ucuuacagaggagaccuug

SEQ ID NO: 2284798 - RNA, 19 nt, Artificial Sequence
  Description of Artificial Sequence: Synthetic oligonucleotide
  Sense strand starting at position 1769 of SEQ ID NO: 1884693
ggaacauuacuguaacgcu

SEQ ID NO: 2284799 - RNA, 19 nt, Artificial Sequence
  Description of Artificial Sequence: Synthetic oligonucleotide
  Antisense strand to SEQ ID NO: 2284798
agcguuacaguaauguucc

SEQ ID NO: 2284800 - RNA, 19 nt, Artificial Sequence
  Description of Artificial Sequence: Synthetic oligonucleotide
  Sense strand starting at position 1889 of SEQ ID NO: 1884693
ucaauagggcccugacauu

SEQ ID NO: 2284801 - RNA, 19 nt, Artificial Sequence
  Description of Artificial Sequence: Synthetic oligonucleotide
  Antisense strand to SEQ ID NO: 2284800
aaugucagggcccuauuga

SEQ ID NO: 2284802 - RNA, 19 nt, Artificial Sequence
  Description of Artificial Sequence: Synthetic oligonucleotide
  Sense strand starting at position 1898 of SEQ ID NO: 1884693
cccugacauuuguugcgua

SEQ ID NO: 2284803 - RNA, 19 nt, Artificial Sequence
  Description of Artificial Sequence: Synthetic oligonucleotide
  Antisense strand to SEQ ID NO: 2284802
uacgcaacaaaugucaggg

SEQ ID NO: 2284804 - RNA, 19 nt, Artificial Sequence
  Description of Artificial Sequence: Synthetic oligonucleotide
  Sense strand starting at position 1903 of SEQ ID NO: 1884693
acauuuguugcguacagua

SEQ ID NO: 2284805 - RNA, 19 nt, Artificial Sequence
  Description of Artificial Sequence: Synthetic oligonucleotide
  Antisense strand to SEQ ID NO: 2284804
uacuguacgcaacaaaugu

SEQ ID NO: 2284806 - RNA, 19 nt, Artificial Sequence
  Description of Artificial Sequence: Synthetic oligonucleotide
  Sense strand starting at position 2033 of SEQ ID NO: 1884693
uuaagaaauggccguaaga

SEQ ID NO: 2284807 - RNA, 19 nt, Artificial Sequence
  Description of Artificial Sequence: Synthetic oligonucleotide
  Antisense strand to SEQ ID NO: 2284806
ucuuacggccauuucuuaa

SEQ ID NO: 2284808 - RNA, 19 nt, Artificial Sequence
  Description of Artificial Sequence: Synthetic oligonucleotide
  Sense strand starting at position 3073 of SEQ ID NO: 1884693
aaaguaugucaggacguaa

SEQ ID NO: 2284809 - RNA, 19 nt, Artificial Sequence
  Description of Artificial Sequence: Synthetic oligonucleotide
  Antisense strand to SEQ ID NO: 2284808
uuacguccugacauacuuu

SEQ ID NO: 2284810 - RNA, 19 nt, Artificial Sequence
  Description of Artificial Sequence: Synthetic oligonucleotide
  Sense strand starting at position 3161 of SEQ ID NO: 1884693
ucuuuagaucuuggacuac

SEQ ID NO: 2284811 - RNA, 19 nt, Artificial Sequence
  Description of Artificial Sequence: Synthetic oligonucleotide
  Antisense strand to SEQ ID NO: 2284810
guaguccaagaucuaaaga

SEQ ID NO: 2284812 - RNA, 19 nt, Artificial Sequence
  Description of Artificial Sequence: Synthetic oligonucleotide
  Sense strand starting at position 3338 of SEQ ID NO: 1884693
cugccugaucaauaugguu

SEQ ID NO: 2284813 - RNA, 19 nt, Artificial Sequence
  Description of Artificial Sequence: Synthetic oligonucleotide
  Antisense strand to SEQ ID NO: 2284812
aaccauauugaucaggcag

SEQ ID NO: 2284814 - RNA, 19 nt, Artificial Sequence
  Description of Artificial Sequence: Synthetic oligonucleotide
  Sense strand starting at position 111 of SEQ ID NO: 1884694
uauugcuuggcagaaagaa

SEQ ID NO: 2284815 - RNA, 19 nt, Artificial Sequence
  Description of Artificial Sequence: Synthetic oligonucleotide
  Antisense strand to SEQ ID NO: 2284814
uucuuucugccaagcaaua

SEQ ID NO: 2284816 - RNA, 19 nt, Artificial Sequence
  Description of Artificial Sequence: Synthetic oligonucleotide
  Sense strand starting at position 265 of SEQ ID NO: 1884694
gucacacauugaucagacu

SEQ ID NO: 2284817 - RNA, 19 nt, Artificial Sequence
  Description of Artificial Sequence: Synthetic oligonucleotide
  Antisense strand to SEQ ID NO: 2284816
agucugaucaaugugugac

SEQ ID NO: 2284818 - RNA, 19 nt, Artificial Sequence
  Description of Artificial Sequence: Synthetic oligonucleotide
  Sense strand starting at position 340 of SEQ ID NO: 1884694
gaucaaagacuuuggguua

SEQ ID NO: 2284819 - RNA, 19 nt, Artificial Sequence
  Description of Artificial Sequence: Synthetic oligonucleotide
  Antisense strand to SEQ ID NO: 2284818
uaacccaaagucuuugauc

SEQ ID NO: 2284820 - RNA, 19 nt, Artificial Sequence
  Description of Artificial Sequence: Synthetic oligonucleotide
  Sense strand starting at position 623 of SEQ ID NO: 1884694
cgagauuccauguaaguca

SEQ ID NO: 2284821 - RNA, 19 nt, Artificial Sequence
  Description of Artificial Sequence: Synthetic oligonucleotide
  Antisense strand to SEQ ID NO: 2284820
ugacuuacauggaaucucg

SEQ ID NO: 2284822 - RNA, 19 nt, Artificial Sequence
  Description of Artificial Sequence: Synthetic oligonucleotide
  Sense strand starting at position 630 of SEQ ID NO: 1884694
ccauguaagucaucacaaa

SEQ ID NO: 2284823 - RNA, 19 nt, Artificial Sequence
  Description of Artificial Sequence: Synthetic oligonucleotide
  Antisense strand to SEQ ID NO: 2284822
uuugugaugacuuacaugg

SEQ ID NO: 2284824 - RNA, 19 nt, Artificial Sequence
  Description of Artificial Sequence: Synthetic oligonucleotide
  Sense strand starting at position 684 of SEQ ID NO: 1884694
uacugagugcauugaauac

SEQ ID NO: 2284825 - RNA, 19 nt, Artificial Sequence
  Description of Artificial Sequence: Synthetic oligonucleotide
  Antisense strand to SEQ ID NO: 2284824
guauucaaugcacucagua

SEQ ID NO: 2284826 - RNA, 19 nt, Artificial Sequence
  Description of Artificial Sequence: Synthetic oligonucleotide
  Sense strand starting at position 693 of SEQ ID NO: 1884694
cauugaauaccgugaaauu

SEQ ID NO: 2284827 - RNA, 19 nt, Artificial Sequence
  Description of Artificial Sequence: Synthetic oligonucleotide
  Antisense strand to SEQ ID NO: 2284826
aauuucacgguauucaaug

SEQ ID NO: 2284828 - RNA, 19 nt, Artificial Sequence
  Description of Artificial Sequence: Synthetic oligonucleotide
  Sense strand starting at position 740 of SEQ ID NO: 1884694
guuaguaguaccuagagaa

SEQ ID NO: 2284829 - RNA, 19 nt, Artificial Sequence
  Description of Artificial Sequence: Synthetic oligonucleotide
  Antisense strand to SEQ ID NO: 2284828
uucucuagguacuacuaac

SEQ ID NO: 2284830 - RNA, 19 nt, Artificial Sequence
  Description of Artificial Sequence: Synthetic oligonucleotide
  Sense strand starting at position 760 of SEQ ID NO: 1884694
aacaaagcugugggugaaa

SEQ ID NO: 2284831 - RNA, 19 nt, Artificial Sequence
  Description of Artificial Sequence: Synthetic oligonucleotide
  Antisense strand to SEQ ID NO: 2284830
uuucacccacagcuuuguu

SEQ ID NO: 2284832 - RNA, 19 nt, Artificial Sequence
  Description of Artificial Sequence: Synthetic oligonucleotide
  Sense strand starting at position 762 of SEQ ID NO: 1884694
caaagcugugggugaaaga

SEQ ID NO: 2284833 - RNA, 19 nt, Artificial Sequence
  Description of Artificial Sequence: Synthetic oligonucleotide
  Antisense strand to SEQ ID NO: 2284832
ucuuucacccacagcuuug

SEQ ID NO: 2284834 - RNA, 19 nt, Artificial Sequence
  Description of Artificial Sequence: Synthetic oligonucleotide
  Sense strand starting at position 763 of SEQ ID NO: 1884694
aaagcugugggugaaagau

SEQ ID NO: 2284835 - RNA, 19 nt, Artificial Sequence
  Description of Artificial Sequence: Synthetic oligonucleotide
  Antisense strand to SEQ ID NO: 2284834
aucuuucacccacagcuuu

SEQ ID NO: 2284836 - RNA, 19 nt, Artificial Sequence
  Description of Artificial Sequence: Synthetic oligonucleotide
  Sense strand starting at position 772 of SEQ ID NO: 1884694
ggugaaagauuccucagac

SEQ ID NO: 2284837 - RNA, 19 nt, Artificial Sequence
  Description of Artificial Sequence: Synthetic oligonucleotide
  Antisense strand to SEQ ID NO: 2284836
gucugaggaaucuuucacc

SEQ ID NO: 2284838 - RNA, 19 nt, Artificial Sequence
  Description of Artificial Sequence: Synthetic oligonucleotide
  Sense strand starting at position 773 of SEQ ID NO: 1884694
gugaaagauuccucagaca

SEQ ID NO: 2284839 - RNA, 19 nt, Artificial Sequence
  Description of Artificial Sequence: Synthetic oligonucleotide
  Antisense strand to SEQ ID NO: 2284838
ugucugaggaaucuuucac

SEQ ID NO: 2284840 - RNA, 19 nt, Artificial Sequence
  Description of Artificial Sequence: Synthetic oligonucleotide
  Sense strand starting at position 810 of SEQ ID NO: 1884694
ugcguucuccaguuucuca

SEQ ID NO: 2284841 - RNA, 19 nt, Artificial Sequence
  Description of Artificial Sequence: Synthetic oligonucleotide
  Antisense strand to SEQ ID NO: 2284840
ugagaaacuggagaacgca

SEQ ID NO: 2284842 - RNA, 19 nt, Artificial Sequence
  Description of Artificial Sequence: Synthetic oligonucleotide
  Sense strand starting at position 898 of SEQ ID NO: 1884694
uggcauaagcuguaaggaa

SEQ ID NO: 2284843 - RNA, 19 nt, Artificial Sequence
  Description of Artificial Sequence: Synthetic oligonucleotide
  Antisense strand to SEQ ID NO: 2284842
uuccuuacagcuuaugcca

SEQ ID NO: 2284844 - RNA, 19 nt, Artificial Sequence
  Description of Artificial Sequence: Synthetic oligonucleotide
  Sense strand starting at position 1183 of SEQ ID NO: 1884694
auguuuccuccucauugga

SEQ ID NO: 2284845 - RNA, 19 nt, Artificial Sequence
  Description of Artificial Sequence: Synthetic oligonucleotide
  Antisense strand to SEQ ID NO: 2284844
uccaaugaggaggaaacau

SEQ ID NO: 2284846 - RNA, 19 nt, Artificial Sequence
  Description of Artificial Sequence: Synthetic oligonucleotide
  Sense strand starting at position 1201 of SEQ ID NO: 1884694
agcagaauccuggaaagcu

SEQ ID NO: 2284847 - RNA, 19 nt, Artificial Sequence
  Description of Artificial Sequence: Synthetic oligonucleotide
  Antisense strand to SEQ ID NO: 2284846
agcuuuccaggauucugcu

SEQ ID NO: 2284848 - RNA, 19 nt, Artificial Sequence
  Description of Artificial Sequence: Synthetic oligonucleotide
  Sense strand starting at position 1257 of SEQ ID NO: 1884694
gugggcaucuaucugagaa

SEQ ID NO: 2284849 - RNA, 19 nt, Artificial Sequence
  Description of Artificial Sequence: Synthetic oligonucleotide
  Antisense strand to SEQ ID NO: 2284848
uucucagauagaugcccac

SEQ ID NO: 2284850 - RNA, 19 nt, Artificial Sequence
  Description of Artificial Sequence: Synthetic oligonucleotide
  Sense strand starting at position 1258 of SEQ ID NO: 1884694
ugggcaucuaucugagaaa

SEQ ID NO: 2284851 - RNA, 19 nt, Artificial Sequence
  Description of Artificial Sequence: Synthetic oligonucleotide
  Antisense strand to SEQ ID NO: 2284850
uuucucagauagaugccca

SEQ ID NO: 2284852 - RNA, 19 nt, Artificial Sequence
  Description of Artificial Sequence: Synthetic oligonucleotide
  Sense strand starting at position 1285 of SEQ ID NO: 1884694
auauaucagugggcaucua

SEQ ID NO: 2284853 - RNA, 19 nt, Artificial Sequence
  Description of Artificial Sequence: Synthetic oligonucleotide
  Antisense strand to SEQ ID NO: 2284852
uagaugcccacugauauau

SEQ ID NO: 2284854 - RNA, 19 nt, Artificial Sequence
  Description of Artificial Sequence: Synthetic oligonucleotide
  Sense strand starting at position 1293 of SEQ ID NO: 1884694
gugggcaucuaucuagaaa

SEQ ID NO: 2284855 - RNA, 19 nt, Artificial Sequence
  Description of Artificial Sequence: Synthetic oligonucleotide
  Antisense strand to SEQ ID NO: 2284854
uuucuagauagaugcccac

SEQ ID NO: 2284856 - RNA, 19 nt, Artificial Sequence
  Description of Artificial Sequence: Synthetic oligonucleotide
  Sense strand starting at position 1397 of SEQ ID NO: 1884694
auuagauaauaggcccaua

SEQ ID NO: 2284857 - RNA, 19 nt, Artificial Sequence
  Description of Artificial Sequence: Synthetic oligonucleotide
  Antisense strand to SEQ ID NO: 2284856
uaugggccuauuaucuaau

SEQ ID NO: 2284858 - RNA, 19 nt, Artificial Sequence
  Description of Artificial Sequence: Synthetic oligonucleotide
  Sense strand starting at position 1447 of SEQ ID NO: 1884694
ggcagacugucaucaggaa

SEQ ID NO: 2284859 - RNA, 19 nt, Artificial Sequence
  Description of Artificial Sequence: Synthetic oligonucleotide
  Antisense strand to SEQ ID NO: 2284858
uuccugaugacagucugcc

SEQ ID NO: 2284860 - RNA, 19 nt, Artificial Sequence
  Description of Artificial Sequence: Synthetic oligonucleotide
  Sense strand starting at position 1448 of SEQ ID NO: 1884694
gcagacugucaucaggaau

SEQ ID NO: 2284861 - RNA, 19 nt, Artificial Sequence
  Description of Artificial Sequence: Synthetic oligonucleotide
  Antisense strand to SEQ ID NO: 2284860
auuccugaugacagucugc

SEQ ID NO: 2284862 - RNA, 19 nt, Artificial Sequence
  Description of Artificial Sequence: Synthetic oligonucleotide
  Sense strand starting at position 1613 of SEQ ID NO: 1884694
aguaacgugaucgauauau

SEQ ID NO: 2284863 - RNA, 19 nt, Artificial Sequence
  Description of Artificial Sequence: Synthetic oligonucleotide
  Antisense strand to SEQ ID NO: 2284862
auauaucgaucacguuacu

SEQ ID NO: 2284864 - RNA, 19 nt, Artificial Sequence
  Description of Artificial Sequence: Synthetic oligonucleotide
  Sense strand starting at position 1615 of SEQ ID NO: 1884694
uaacgugaucgauauaugg

SEQ ID NO: 2284865 - RNA, 19 nt, Artificial Sequence
  Description of Artificial Sequence: Synthetic oligonucleotide
  Antisense strand to SEQ ID NO: 2284864
ccauauaucgaucacguua

SEQ ID NO: 2284866 - RNA, 19 nt, Artificial Sequence
  Description of Artificial Sequence: Synthetic oligonucleotide
  Sense strand starting at position 1617 of SEQ ID NO: 1884694
acgugaucgauauauggau

SEQ ID NO: 2284867 - RNA, 19 nt, Artificial Sequence
  Description of Artificial Sequence: Synthetic oligonucleotide
  Antisense strand to SEQ ID NO: 2284866
auccauauaucgaucacgu

SEQ ID NO: 2284868 - RNA, 19 nt, Artificial Sequence
  Description of Artificial Sequence: Synthetic oligonucleotide
  Sense strand starting at position 1619 of SEQ ID NO: 1884694
gugaucgauauauggauga

SEQ ID NO: 2284869 - RNA, 19 nt, Artificial Sequence
  Description of Artificial Sequence: Synthetic oligonucleotide
  Antisense strand to SEQ ID NO: 2284868
ucauccauauaucgaucac

SEQ ID NO: 2284870 - RNA, 19 nt, Artificial Sequence
  Description of Artificial Sequence: Synthetic oligonucleotide
  Sense strand starting at position 1623 of SEQ ID NO: 1884694
ucgauauauggaugagggu

SEQ ID NO: 2284871 - RNA, 19 nt, Artificial Sequence
  Description of Artificial Sequence: Synthetic oligonucleotide
  Antisense strand to SEQ ID NO: 2284870
acccucauccauauaucga

SEQ ID NO: 2284872 - RNA, 19 nt, Artificial Sequence
  Description of Artificial Sequence: Synthetic oligonucleotide
  Sense strand starting at position 1792 of SEQ ID NO: 1884694
uuuggauaauuaccuguau

SEQ ID NO: 2284873 - RNA, 19 nt, Artificial Sequence
  Description of Artificial Sequence: Synthetic oligonucleotide
  Antisense strand to SEQ ID NO: 2284872
auacagguaauuauccaaa

SEQ ID NO: 2284874 - RNA, 19 nt, Artificial Sequence
  Description of Artificial Sequence: Synthetic oligonucleotide
  Sense strand starting at position 1793 of SEQ ID NO: 1884694
uuggauaauuaccuguauu

SEQ ID NO: 2284875 - RNA, 19 nt, Artificial Sequence
  Description of Artificial Sequence: Synthetic oligonucleotide
  Antisense strand to SEQ ID NO: 2284874
aauacagguaauuauccaa

SEQ ID NO: 2284876 - RNA, 19 nt, Artificial Sequence
  Description of Artificial Sequence: Synthetic oligonucleotide
  Sense strand starting at position 1926 of SEQ ID NO: 1884694
cucacuucucaguaguaag

SEQ ID NO: 2284877 - RNA, 19 nt, Artificial Sequence
  Description of Artificial Sequence: Synthetic oligonucleotide
  Antisense strand to SEQ ID NO: 2284876
cuuacuacugagaagugag

SEQ ID NO: 2284878 - RNA, 19 nt, Artificial Sequence
  Description of Artificial Sequence: Synthetic oligonucleotide
  Sense strand starting at position 1995 of SEQ ID NO: 1884694
uggagugguuaucuacaag

SEQ ID NO: 2284879 - RNA, 19 nt, Artificial Sequence
  Description of Artificial Sequence: Synthetic oligonucleotide
  Antisense strand to SEQ ID NO: 2284878
cuuguagauaaccacucca

SEQ ID NO: 2284880 - RNA, 19 nt, Artificial Sequence
  Description of Artificial Sequence: Synthetic oligonucleotide
  Sense strand starting at position 2052 of SEQ ID NO: 1884694
ggaacauuacuguaacgcu

SEQ ID NO: 2284881 - RNA, 19 nt, Artificial Sequence
  Description of Artificial Sequence: Synthetic oligonucleotide
  Antisense strand to SEQ ID NO: 2284880
agcguuacaguaauguucc

SEQ ID NO: 2284882 - RNA, 19 nt, Artificial Sequence
  Description of Artificial Sequence: Synthetic oligonucleotide
  Sense strand starting at position 2172 of SEQ ID NO: 1884694
ucaauagggcccugacauu

SEQ ID NO: 2284883 - RNA, 19 nt, Artificial Sequence
  Description of Artificial Sequence: Synthetic oligonucleotide
  Antisense strand to SEQ ID NO: 2284882
aaugucagggcccuauuga

SEQ ID NO: 2284884 - RNA, 19 nt, Artificial Sequence
  Description of Artificial Sequence: Synthetic oligonucleotide
  Sense strand starting at position 2186 of SEQ ID NO: 1884694
acauuuguugcguacagua

SEQ ID NO: 2284885 - RNA, 19 nt, Artificial Sequence
  Description of Artificial Sequence: Synthetic oligonucleotide
  Antisense strand to SEQ ID NO: 2284884
uacuguacgcaacaaaugu

SEQ ID NO: 2284886 - RNA, 19 nt, Artificial Sequence
  Description of Artificial Sequence: Synthetic oligonucleotide
  Sense strand starting at position 2316 of SEQ ID NO: 1884694
uuaagaaauggccguaaga

SEQ ID NO: 2284887 - RNA, 19 nt, Artificial Sequence
  Description of Artificial Sequence: Synthetic oligonucleotide
  Antisense strand to SEQ ID NO: 2284886
ucuuacggccauuucuuaa

SEQ ID NO: 2284888 - RNA, 19 nt, Artificial Sequence
  Description of Artificial Sequence: Synthetic oligonucleotide
  Sense strand starting at position 3356 of SEQ ID NO: 1884694
aaaguaugucaggacguaa

SEQ ID NO: 2284889 - RNA, 19 nt, Artificial Sequence
  Description of Artificial Sequence: Synthetic oligonucleotide
  Antisense strand to SEQ ID NO: 2284888
uuacguccugacauacuuu

SEQ ID NO: 2284890 - RNA, 19 nt, Artificial Sequence
  Description of Artificial Sequence: Synthetic oligonucleotide
  Sense strand starting at position 3444 of SEQ ID NO: 1884694
ucuuuagaucuuggacuac

SEQ ID NO: 2284891 - RNA, 19 nt, Artificial Sequence
  Description of Artificial Sequence: Synthetic oligonucleotide
  Antisense strand to SEQ ID NO: 2284890
guaguccaagaucuaaaga

SEQ ID NO: 2284892 - RNA, 19 nt, Artificial Sequence
  Description of Artificial Sequence: Synthetic oligonucleotide
  Sense strand starting at position 3621 of SEQ ID NO: 1884694
cugccugaucaauaugguu

SEQ ID NO: 2284893 - RNA, 19 nt, Artificial Sequence
  Description of Artificial Sequence: Synthetic oligonucleotide
  Antisense strand to SEQ ID NO: 2284892
aaccauauugaucaggcag

SEQ ID NO: 2284894 - RNA, 19 nt, Artificial Sequence
  Description of Artificial Sequence: Synthetic oligonucleotide
  Sense strand starting at position 51 of SEQ ID NO: 1884695
cuauguaaccuaggagcaa

SEQ ID NO: 2284895 - RNA, 19 nt, Artificial Sequence
  Description of Artificial Sequence: Synthetic oligonucleotide
  Antisense strand to SEQ ID NO: 2284894
uugcuccuagguuacauag

SEQ ID NO: 2284896 - RNA, 19 nt, Artificial Sequence
  Description of Artificial Sequence: Synthetic oligonucleotide
  Sense strand starting at position 175 of SEQ ID NO: 1884695
agugaugauuacucccuuu

SEQ ID NO: 2284897 - RNA, 19 nt, Artificial Sequence
  Description of Artificial Sequence: Synthetic oligonucleotide
  Antisense strand to SEQ ID NO: 2284896
aaagggaguaaucaucacu

SEQ ID NO: 2284898 - RNA, 19 nt, Artificial Sequence
  Description of Artificial Sequence: Synthetic oligonucleotide
  Sense strand starting at position 309 of SEQ ID NO: 1884695
gaguaagacaugugaaagu

SEQ ID NO: 2284899 - RNA, 19 nt, Artificial Sequence
  Description of Artificial Sequence: Synthetic oligonucleotide
  Antisense strand to SEQ ID NO: 2284898
acuuucacaugucuuacuc

SEQ ID NO: 2284900 - RNA, 19 nt, Artificial Sequence
  Description of Artificial Sequence: Synthetic oligonucleotide
  Sense strand starting at position 499 of SEQ ID NO: 1884695
uauugcuuggcagaaagaa

SEQ ID NO: 2284901 - RNA, 19 nt, Artificial Sequence
  Description of Artificial Sequence: Synthetic oligonucleotide
  Antisense strand to SEQ ID NO: 2284900
uucuuucugccaagcaaua

SEQ ID NO: 2284902 - RNA, 19 nt, Artificial Sequence
  Description of Artificial Sequence: Synthetic oligonucleotide
  Sense strand starting at position 653 of SEQ ID NO: 1884695
gucacacauugaucagacu

SEQ ID NO: 2284903 - RNA, 19 nt, Artificial Sequence
  Description of Artificial Sequence: Synthetic oligonucleotide
  Antisense strand to SEQ ID NO: 2284902
agucugaucaaugugugac

SEQ ID NO: 2284904 - RNA, 19 nt, Artificial Sequence
  Description of Artificial Sequence: Synthetic oligonucleotide
  Sense strand starting at position 728 of SEQ ID NO: 1884695
gaucaaagacuuuggguua

SEQ ID NO: 2284905 - RNA, 19 nt, Artificial Sequence
  Description of Artificial Sequence: Synthetic oligonucleotide
  Antisense strand to SEQ ID NO: 2284904
uaacccaaagucuuugauc

SEQ ID NO: 2284906 - RNA, 19 nt, Artificial Sequence
  Description of Artificial Sequence: Synthetic oligonucleotide
  Sense strand starting at position 1011 of SEQ ID NO: 1884695
cgagauuccauguaaguca

SEQ ID NO: 2284907 - RNA, 19 nt, Artificial Sequence
  Description of Artificial Sequence: Synthetic oligonucleotide
  Antisense strand to SEQ ID NO: 2284906
ugacuuacauggaaucucg

SEQ ID NO: 2284908 - RNA, 19 nt, Artificial Sequence
  Description of Artificial Sequence: Synthetic oligonucleotide
  Sense strand starting at position 1018 of SEQ ID NO: 1884695
ccauguaagucaucacaaa

SEQ ID NO: 2284909 - RNA, 19 nt, Artificial Sequence
  Description of Artificial Sequence: Synthetic oligonucleotide
  Antisense strand to SEQ ID NO: 2284908
uuugugaugacuuacaugg

SEQ ID NO: 2284910 - RNA, 19 nt, Artificial Sequence
  Description of Artificial Sequence: Synthetic oligonucleotide
  Sense strand starting at position 1081 of SEQ ID NO: 1884695
cauugaauaccgugaaauu

SEQ ID NO: 2284911 - RNA, 19 nt, Artificial Sequence
  Description of Artificial Sequence: Synthetic oligonucleotide
  Antisense strand to SEQ ID NO: 2284910
aauuucacgguauucaaug

SEQ ID NO: 2284912 - RNA, 19 nt, Artificial Sequence
  Description of Artificial Sequence: Synthetic oligonucleotide
  Sense strand starting at position 1128 of SEQ ID NO: 1884695
guuaguaguaccuagagaa

SEQ ID NO: 2284913 - RNA, 19 nt, Artificial Sequence
  Description of Artificial Sequence: Synthetic oligonucleotide
  Antisense strand to SEQ ID NO: 2284912
uucucuagguacuacuaac

SEQ ID NO: 2284914 - RNA, 19 nt, Artificial Sequence
  Description of Artificial Sequence: Synthetic oligonucleotide
  Sense strand starting at position 1148 of SEQ ID NO: 1884695
aacaaagcugugggugaaa

SEQ ID NO: 2284915 - RNA, 19 nt, Artificial Sequence
  Description of Artificial Sequence: Synthetic oligonucleotide
  Antisense strand to SEQ ID NO: 2284914
uuucacccacagcuuuguu

SEQ ID NO: 2284916 - RNA, 19 nt, Artificial Sequence
  Description of Artificial Sequence: Synthetic oligonucleotide
  Sense strand starting at position 1150 of SEQ ID NO: 1884695
caaagcugugggugaaaga

SEQ ID NO: 2284917 - RNA, 19 nt, Artificial Sequence
  Description of Artificial Sequence: Synthetic oligonucleotide
  Antisense strand to SEQ ID NO: 2284916
ucuuucacccacagcuuug

SEQ ID NO: 2284918 - RNA, 19 nt, Artificial Sequence
  Description of Artificial Sequence: Synthetic oligonucleotide
  Sense strand starting at position 1151 of SEQ ID NO: 1884695
aaagcugugggugaaagau

SEQ ID NO: 2284919 - RNA, 19 nt, Artificial Sequence
  Description of Artificial Sequence: Synthetic oligonucleotide
  Antisense strand to SEQ ID NO: 2284918
aucuuucacccacagcuuu

SEQ ID NO: 2284920 - RNA, 19 nt, Artificial Sequence
  Description of Artificial Sequence: Synthetic oligonucleotide
  Sense strand starting at position 1160 of SEQ ID NO: 1884695
ggugaaagauuccucagac

SEQ ID NO: 2284921 - RNA, 19 nt, Artificial Sequence
  Description of Artificial Sequence: Synthetic oligonucleotide
  Antisense strand to SEQ ID NO: 2284920
gucugaggaaucuuucacc

SEQ ID NO: 2284922 - RNA, 19 nt, Artificial Sequence
  Description of Artificial Sequence: Synthetic oligonucleotide
  Sense strand starting at position 1161 of SEQ ID NO: 1884695
gugaaagauuccucagaca

SEQ ID NO: 2284923 - RNA, 19 nt, Artificial Sequence
  Description of Artificial Sequence: Synthetic oligonucleotide
  Antisense strand to SEQ ID NO: 2284922
ugucugaggaaucuuucac

SEQ ID NO: 2284924 - RNA, 19 nt, Artificial Sequence
  Description of Artificial Sequence: Synthetic oligonucleotide
  Sense strand starting at position 1198 of SEQ ID NO: 1884695
ugcguucuccaguuucuca

SEQ ID NO: 2284925 - RNA, 19 nt, Artificial Sequence
  Description of Artificial Sequence: Synthetic oligonucleotide
  Antisense strand to SEQ ID NO: 2284924
ugagaaacuggagaacgca

SEQ ID NO: 2284926 - RNA, 19 nt, Artificial Sequence
  Description of Artificial Sequence: Synthetic oligonucleotide
  Sense strand starting at position 1286 of SEQ ID NO: 1884695
uggcauaagcuguaaggaa

SEQ ID NO: 2284927 - RNA, 19 nt, Artificial Sequence
  Description of Artificial Sequence: Synthetic oligonucleotide
  Antisense strand to SEQ ID NO: 2284926
uuccuuacagcuuaugcca

SEQ ID NO: 2284928 - RNA, 19 nt, Artificial Sequence
  Description of Artificial Sequence: Synthetic oligonucleotide
  Sense strand starting at position 1571 of SEQ ID NO: 1884695
auguuuccuccucauugga

SEQ ID NO: 2284929 - RNA, 19 nt, Artificial Sequence
  Description of Artificial Sequence: Synthetic oligonucleotide
  Antisense strand to SEQ ID NO: 2284928
uccaaugaggaggaaacau

SEQ ID NO: 2284930 - RNA, 19 nt, Artificial Sequence
  Description of Artificial Sequence: Synthetic oligonucleotide
  Sense strand starting at position 1589 of SEQ ID NO: 1884695
agcagaauccuggaaagcu

SEQ ID NO: 2284931 - RNA, 19 nt, Artificial Sequence
  Description of Artificial Sequence: Synthetic oligonucleotide
  Antisense strand to SEQ ID NO: 2284930
agcuuuccaggauucugcu

SEQ ID NO: 2284932 - RNA, 19 nt, Artificial Sequence
  Description of Artificial Sequence: Synthetic oligonucleotide
  Sense strand starting at position 1645 of SEQ ID NO: 1884695
gugggcaucuaucugagaa

SEQ ID NO: 2284933 - RNA, 19 nt, Artificial Sequence
  Description of Artificial Sequence: Synthetic oligonucleotide
  Antisense strand to SEQ ID NO: 2284932
uucucagauagaugcccac

SEQ ID NO: 2284934 - RNA, 19 nt, Artificial Sequence
  Description of Artificial Sequence: Synthetic oligonucleotide
  Sense strand starting at position 1646 of SEQ ID NO: 1884695
ugggcaucuaucugagaaa

SEQ ID NO: 2284935 - RNA, 19 nt, Artificial Sequence
  Description of Artificial Sequence: Synthetic oligonucleotide
  Antisense strand to SEQ ID NO: 2284934
uuucucagauagaugccca

SEQ ID NO: 2284936 - RNA, 19 nt, Artificial Sequence
  Description of Artificial Sequence: Synthetic oligonucleotide
  Sense strand starting at position 1681 of SEQ ID NO: 1884695
gugggcaucuaucuagaaa

SEQ ID NO: 2284937 - RNA, 19 nt, Artificial Sequence
  Description of Artificial Sequence: Synthetic oligonucleotide
  Antisense strand to SEQ ID NO: 2284936
uuucuagauagaugcccac

SEQ ID NO: 2284938 - RNA, 19 nt, Artificial Sequence
  Description of Artificial Sequence: Synthetic oligonucleotide
  Sense strand starting at position 1785 of SEQ ID NO: 1884695
auuagauaauaggcccaua

SEQ ID NO: 2284939 - RNA, 19 nt, Artificial Sequence
  Description of Artificial Sequence: Synthetic oligonucleotide
  Antisense strand to SEQ ID NO: 2284938
uaugggccuauuaucuaau

SEQ ID NO: 2284940 - RNA, 19 nt, Artificial Sequence
  Description of Artificial Sequence: Synthetic oligonucleotide
  Sense strand starting at position 1835 of SEQ ID NO: 1884695
ggcagacugucaucaggaa

SEQ ID NO: 2284941 - RNA, 19 nt, Artificial Sequence
  Description of Artificial Sequence: Synthetic oligonucleotide
  Antisense strand to SEQ ID NO: 2284940
uuccugaugacagucugcc

SEQ ID NO: 2284942 - RNA, 19 nt, Artificial Sequence
  Description of Artificial Sequence: Synthetic oligonucleotide
  Sense strand starting at position 1836 of SEQ ID NO: 1884695
gcagacugucaucaggaau

SEQ ID NO: 2284943 - RNA, 19 nt, Artificial Sequence
  Description of Artificial Sequence: Synthetic oligonucleotide
  Antisense strand to SEQ ID NO: 2284942
auuccugaugacagucugc

SEQ ID NO: 2284944 - RNA, 19 nt, Artificial Sequence
  Description of Artificial Sequence: Synthetic oligonucleotide
  Sense strand starting at position 2001 of SEQ ID NO: 1884695
aguaacgugaucgauauau

SEQ ID NO: 2284945 - RNA, 19 nt, Artificial Sequence
  Description of Artificial Sequence: Synthetic oligonucleotide
  Antisense strand to SEQ ID NO: 2284944
auauaucgaucacguuacu

SEQ ID NO: 2284946 - RNA, 19 nt, Artificial Sequence
  Description of Artificial Sequence: Synthetic oligonucleotide
  Sense strand starting at position 2003 of SEQ ID NO: 1884695
uaacgugaucgauauaugg

SEQ ID NO: 2284947 - RNA, 19 nt, Artificial Sequence
  Description of Artificial Sequence: Synthetic oligonucleotide
  Antisense strand to SEQ ID NO: 2284946
ccauauaucgaucacguua

SEQ ID NO: 2284948 - RNA, 19 nt, Artificial Sequence
  Description of Artificial Sequence: Synthetic oligonucleotide
  Sense strand starting at position 2005 of SEQ ID NO: 1884695
acgugaucgauauauggau

SEQ ID NO: 2284949 - RNA, 19 nt, Artificial Sequence
  Description of Artificial Sequence: Synthetic oligonucleotide
  Antisense strand to SEQ ID NO: 2284948
auccauauaucgaucacgu

SEQ ID NO: 2284950 - RNA, 19 nt, Artificial Sequence
  Description of Artificial Sequence: Synthetic oligonucleotide
  Sense strand starting at position 2007 of SEQ ID NO: 1884695
gugaucgauauauggauga

SEQ ID NO: 2284951 - RNA, 19 nt, Artificial Sequence
  Description of Artificial Sequence: Synthetic oligonucleotide
  Antisense strand to SEQ ID NO: 2284950
ucauccauauaucgaucac

SEQ ID NO: 2284952 - RNA, 19 nt, Artificial Sequence
  Description of Artificial Sequence: Synthetic oligonucleotide
  Sense strand starting at position 2011 of SEQ ID NO: 1884695
ucgauauauggaugagggu

SEQ ID NO: 2284953 - RNA, 19 nt, Artificial Sequence
  Description of Artificial Sequence: Synthetic oligonucleotide
  Antisense strand to SEQ ID NO: 2284952
acccucauccauauaucga

SEQ ID NO: 2284954 - RNA, 19 nt, Artificial Sequence
  Description of Artificial Sequence: Synthetic oligonucleotide
  Sense strand starting at position 2180 of SEQ ID NO: 1884695
uuuggauaauuaccuguau

SEQ ID NO: 2284955 - RNA, 19 nt, Artificial Sequence
  Description of Artificial Sequence: Synthetic oligonucleotide
  Antisense strand to SEQ ID NO: 2284954
auacagguaauuauccaaa

SEQ ID NO: 2284956 - RNA, 19 nt, Artificial Sequence
  Description of Artificial Sequence: Synthetic oligonucleotide
  Sense strand starting at position 2181 of SEQ ID NO: 1884695
uuggauaauuaccuguauu

SEQ ID NO: 2284957 - RNA, 19 nt, Artificial Sequence
  Description of Artificial Sequence: Synthetic oligonucleotide
  Antisense strand to SEQ ID NO: 2284956
aauacagguaauuauccaa

SEQ ID NO: 2284958 - RNA, 19 nt, Artificial Sequence
  Description of Artificial Sequence: Synthetic oligonucleotide
  Sense strand starting at position 2314 of SEQ ID NO: 1884695
cucacuucucaguaguaag

SEQ ID NO: 2284959 - RNA, 19 nt, Artificial Sequence
  Description of Artificial Sequence: Synthetic oligonucleotide
  Antisense strand to SEQ ID NO: 2284958
cuuacuacugagaagugag

SEQ ID NO: 2284960 - RNA, 19 nt, Artificial Sequence
  Description of Artificial Sequence: Synthetic oligonucleotide
  Sense strand starting at position 2383 of SEQ ID NO: 1884695
uggagugguuaucuacaag

SEQ ID NO: 2284961 - RNA, 19 nt, Artificial Sequence
  Description of Artificial Sequence: Synthetic oligonucleotide
  Antisense strand to SEQ ID NO: 2284960
cuuguagauaaccacucca

SEQ ID NO: 2284962 - RNA, 19 nt, Artificial Sequence
  Description of Artificial Sequence: Synthetic oligonucleotide
  Sense strand starting at position 2440 of SEQ ID NO: 1884695
ggaacauuacuguaacgcu

SEQ ID NO: 2284963 - RNA, 19 nt, Artificial Sequence
  Description of Artificial Sequence: Synthetic oligonucleotide
  Antisense strand to SEQ ID NO: 2284962
agcguuacaguaauguucc

SEQ ID NO: 2284964 - RNA, 19 nt, Artificial Sequence
  Description of Artificial Sequence: Synthetic oligonucleotide
  Sense strand starting at position 2560 of SEQ ID NO: 1884695
ucaauagggcccugacauu

SEQ ID NO: 2284965 - RNA, 19 nt, Artificial Sequence
  Description of Artificial Sequence: Synthetic oligonucleotide
  Antisense strand to SEQ ID NO: 2284964
aaugucagggcccuauuga

SEQ ID NO: 2284966 - RNA, 19 nt, Artificial Sequence
  Description of Artificial Sequence: Synthetic oligonucleotide
  Sense strand starting at position 2574 of SEQ ID NO: 1884695
acauuuguugcguacagua

SEQ ID NO: 2284967 - RNA, 19 nt, Artificial Sequence
  Description of Artificial Sequence: Synthetic oligonucleotide
  Antisense strand to SEQ ID NO: 2284966
uacuguacgcaacaaaugu

SEQ ID NO: 2284968 - RNA, 19 nt, Artificial Sequence
  Description of Artificial Sequence: Synthetic oligonucleotide
  Sense strand starting at position 2704 of SEQ ID NO: 1884695
uuaagaaauggccguaaga

SEQ ID NO: 2284969 - RNA, 19 nt, Artificial Sequence
  Description of Artificial Sequence: Synthetic oligonucleotide
  Antisense strand to SEQ ID NO: 2284968
ucuuacggccauuucuuaa

SEQ ID NO: 2284970 - RNA, 19 nt, Artificial Sequence
  Description of Artificial Sequence: Synthetic oligonucleotide
  Sense strand starting at position 3744 of SEQ ID NO: 1884695
aaaguaugucaggacguaa

SEQ ID NO: 2284971 - RNA, 19 nt, Artificial Sequence
  Description of Artificial Sequence: Synthetic oligonucleotide
  Antisense strand to SEQ ID NO: 2284970
uuacguccugacauacuuu

SEQ ID NO: 2284972 - RNA, 19 nt, Artificial Sequence
  Description of Artificial Sequence: Synthetic oligonucleotide
  Sense strand starting at position 3832 of SEQ ID NO: 1884695
ucuuuagaucuuggacuac

SEQ ID NO: 2284973 - RNA, 19 nt, Artificial Sequence
  Description of Artificial Sequence: Synthetic oligonucleotide
  Antisense strand to SEQ ID NO: 2284972
guaguccaagaucuaaaga

SEQ ID NO: 2284974 - RNA, 19 nt, Artificial Sequence
  Description of Artificial Sequence: Synthetic oligonucleotide
  Sense strand starting at position 270 of SEQ ID NO: 1884696
aggucaguaguuuacgaaa

SEQ ID NO: 2284975 - RNA, 19 nt, Artificial Sequence
  Description of Artificial Sequence: Synthetic oligonucleotide
  Antisense strand to SEQ ID NO: 2284974
uuucguaaacuacugaccu

SEQ ID NO: 2284976 - RNA, 19 nt, Artificial Sequence
  Description of Artificial Sequence: Synthetic oligonucleotide
  Sense strand starting at position 276 of SEQ ID NO: 1884696
guaguuuacgaaagugguc

SEQ ID NO: 2284977 - RNA, 19 nt, Artificial Sequence
  Description of Artificial Sequence: Synthetic oligonucleotide
  Antisense strand to SEQ ID NO: 2284976
gaccacuuucguaaacuac

SEQ ID NO: 2284978 - RNA, 19 nt, Artificial Sequence
  Description of Artificial Sequence: Synthetic oligonucleotide
  Sense strand starting at position 282 of SEQ ID NO: 1884696
uacgaaaguggucaucuau

SEQ ID NO: 2284979 - RNA, 19 nt, Artificial Sequence
  Description of Artificial Sequence: Synthetic oligonucleotide
  Antisense strand to SEQ ID NO: 2284978
auagaugaccacuuucgua

SEQ ID NO: 2284980 - RNA, 19 nt, Artificial Sequence
  Description of Artificial Sequence: Synthetic oligonucleotide
  Sense strand starting at position 390 of SEQ ID NO: 1884696
uuuggaaaucuguggugag

SEQ ID NO: 2284981 - RNA, 19 nt, Artificial Sequence
  Description of Artificial Sequence: Synthetic oligonucleotide
  Antisense strand to SEQ ID NO: 2284980
cucaccacagauuuccaaa

SEQ ID NO: 2284982 - RNA, 19 nt, Artificial Sequence
  Description of Artificial Sequence: Synthetic oligonucleotide
  Sense strand starting at position 599 of SEQ ID NO: 1884696
cugcuaacacuuuaaggua

SEQ ID NO: 2284983 - RNA, 19 nt, Artificial Sequence
  Description of Artificial Sequence: Synthetic oligonucleotide
  Antisense strand to SEQ ID NO: 2284982
uaccuuaaaguguuagcag

SEQ ID NO: 2284984 - RNA, 19 nt, Artificial Sequence
  Description of Artificial Sequence: Synthetic oligonucleotide
  Sense strand starting at position 705 of SEQ ID NO: 1884696
gacagauuccugcagaggu

SEQ ID NO: 2284985 - RNA, 19 nt, Artificial Sequence
  Description of Artificial Sequence: Synthetic oligonucleotide
  Antisense strand to SEQ ID NO: 2284984
accucugcaggaaucuguc

SEQ ID NO: 2284986 - RNA, 19 nt, Artificial Sequence
  Description of Artificial Sequence: Synthetic oligonucleotide
  Sense strand starting at position 707 of SEQ ID NO: 1884696
cagauuccugcagagguaa

SEQ ID NO: 2284987 - RNA, 19 nt, Artificial Sequence
  Description of Artificial Sequence: Synthetic oligonucleotide
  Antisense strand to SEQ ID NO: 2284986
uuaccucugcaggaaucug

SEQ ID NO: 2284988 - RNA, 19 nt, Artificial Sequence
  Description of Artificial Sequence: Synthetic oligonucleotide
  Sense strand starting at position 778 of SEQ ID NO: 1884696
cuauguaaccuaggagcaa

SEQ ID NO: 2284989 - RNA, 19 nt, Artificial Sequence
  Description of Artificial Sequence: Synthetic oligonucleotide
  Antisense strand to SEQ ID NO: 2284988
uugcuccuagguuacauag

SEQ ID NO: 2284990 - RNA, 19 nt, Artificial Sequence
  Description of Artificial Sequence: Synthetic oligonucleotide
  Sense strand starting at position 1036 of SEQ ID NO: 1884696
gaguaagacaugugaaagu

SEQ ID NO: 2284991 - RNA, 19 nt, Artificial Sequence
  Description of Artificial Sequence: Synthetic oligonucleotide
  Antisense strand to SEQ ID NO: 2284990
acuuucacaugucuuacuc

SEQ ID NO: 2284992 - RNA, 19 nt, Artificial Sequence
  Description of Artificial Sequence: Synthetic oligonucleotide
  Sense strand starting at position 1226 of SEQ ID NO: 1884696
uauugcuuggcagaaagaa

SEQ ID NO: 2284993 - RNA, 19 nt, Artificial Sequence
  Description of Artificial Sequence: Synthetic oligonucleotide
  Antisense strand to SEQ ID NO: 2284992
uucuuucugccaagcaaua

SEQ ID NO: 2284994 - RNA, 19 nt, Artificial Sequence
  Description of Artificial Sequence: Synthetic oligonucleotide
  Sense strand starting at position 1380 of SEQ ID NO: 1884696
gucacacauugaucagacu

SEQ ID NO: 2284995 - RNA, 19 nt, Artificial Sequence
  Description of Artificial Sequence: Synthetic oligonucleotide
  Antisense strand to SEQ ID NO: 2284994
agucugaucaaugugugac

SEQ ID NO: 2284996 - RNA, 19 nt, Artificial Sequence
  Description of Artificial Sequence: Synthetic oligonucleotide
  Sense strand starting at position 1455 of SEQ ID NO: 1884696
gaucaaagacuuuggguua

SEQ ID NO: 2284997 - RNA, 19 nt, Artificial Sequence
  Description of Artificial Sequence: Synthetic oligonucleotide
  Antisense strand to SEQ ID NO: 2284996
uaacccaaagucuuugauc

SEQ ID NO: 2284998 - RNA, 19 nt, Artificial Sequence
  Description of Artificial Sequence: Synthetic oligonucleotide
  Sense strand starting at position 1738 of SEQ ID NO: 1884696
cgagauuccauguaaguca

SEQ ID NO: 2284999 - RNA, 19 nt, Artificial Sequence
  Description of Artificial Sequence: Synthetic oligonucleotide
  Antisense strand to SEQ ID NO: 2284998
ugacuuacauggaaucucg

SEQ ID NO: 2285000 - RNA, 19 nt, Artificial Sequence
  Description of Artificial Sequence: Synthetic oligonucleotide
  Sense strand starting at position 1745 of SEQ ID NO: 1884696
ccauguaagucaucacaaa

SEQ ID NO: 2285001 - RNA, 19 nt, Artificial Sequence
  Description of Artificial Sequence: Synthetic oligonucleotide
  Antisense strand to SEQ ID NO: 2285000
uuugugaugacuuacaugg

SEQ ID NO: 2285002 - RNA, 19 nt, Artificial Sequence
  Description of Artificial Sequence: Synthetic oligonucleotide
  Sense strand starting at position 1808 of SEQ ID NO: 1884696
cauugaauaccgugaaauu

SEQ ID NO: 2285003 - RNA, 19 nt, Artificial Sequence
  Description of Artificial Sequence: Synthetic oligonucleotide
  Antisense strand to SEQ ID NO: 2285002
aauuucacgguauucaaug

SEQ ID NO: 2285004 - RNA, 19 nt, Artificial Sequence
  Description of Artificial Sequence: Synthetic oligonucleotide
  Sense strand starting at position 1855 of SEQ ID NO: 1884696
guuaguaguaccuagagaa

SEQ ID NO: 2285005 - RNA, 19 nt, Artificial Sequence
  Description of Artificial Sequence: Synthetic oligonucleotide
  Antisense strand to SEQ ID NO: 2285004
uucucuagguacuacuaac

SEQ ID NO: 2285006 - RNA, 19 nt, Artificial Sequence
  Description of Artificial Sequence: Synthetic oligonucleotide
  Sense strand starting at position 1875 of SEQ ID NO: 1884696
aacaaagcugugggugaaa

SEQ ID NO: 2285007 - RNA, 19 nt, Artificial Sequence
  Description of Artificial Sequence: Synthetic oligonucleotide
  Antisense strand to SEQ ID NO: 2285006
uuucacccacagcuuuguu

SEQ ID NO: 2285008 - RNA, 19 nt, Artificial Sequence
  Description of Artificial Sequence: Synthetic oligonucleotide
  Sense strand starting at position 1877 of SEQ ID NO: 1884696
caaagcugugggugaaaga

SEQ ID NO: 2285009 - RNA, 19 nt, Artificial Sequence
  Description of Artificial Sequence: Synthetic oligonucleotide
  Antisense strand to SEQ ID NO: 2285008
ucuuucacccacagcuuug

SEQ ID NO: 2285010 - RNA, 19 nt, Artificial Sequence
  Description of Artificial Sequence: Synthetic oligonucleotide
  Sense strand starting at position 1878 of SEQ ID NO: 1884696
aaagcugugggugaaagau

SEQ ID NO: 2285011 - RNA, 19 nt, Artificial Sequence
  Description of Artificial Sequence: Synthetic oligonucleotide
  Antisense strand to SEQ ID NO: 2285010
aucuuucacccacagcuuu

SEQ ID NO: 2285012 - RNA, 19 nt, Artificial Sequence
  Description of Artificial Sequence: Synthetic oligonucleotide
  Sense strand starting at position 1887 of SEQ ID NO: 1884696
ggugaaagauuccucagac

SEQ ID NO: 2285013 - RNA, 19 nt, Artificial Sequence
  Description of Artificial Sequence: Synthetic oligonucleotide
  Antisense strand to SEQ ID NO: 2285012
gucugaggaaucuuucacc

SEQ ID NO: 2285014 - RNA, 19 nt, Artificial Sequence
  Description of Artificial Sequence: Synthetic oligonucleotide
  Sense strand starting at position 1888 of SEQ ID NO: 1884696
gugaaagauuccucagaca

SEQ ID NO: 2285015 - RNA, 19 nt, Artificial Sequence
  Description of Artificial Sequence: Synthetic oligonucleotide
  Antisense strand to SEQ ID NO: 2285014
ugucugaggaaucuuucac

SEQ ID NO: 2285016 - RNA, 19 nt, Artificial Sequence
  Description of Artificial Sequence: Synthetic oligonucleotide
  Sense strand starting at position 1925 of SEQ ID NO: 1884696
ugcguucuccaguuucuca

SEQ ID NO: 2285017 - RNA, 19 nt, Artificial Sequence
  Description of Artificial Sequence: Synthetic oligonucleotide
  Antisense strand to SEQ ID NO: 2285016
ugagaaacuggagaacgca

SEQ ID NO: 2285018 - RNA, 19 nt, Artificial Sequence
  Description of Artificial Sequence: Synthetic oligonucleotide
  Sense strand starting at position 2013 of SEQ ID NO: 1884696
uggcauaagcuguaaggaa

SEQ ID NO: 2285019 - RNA, 19 nt, Artificial Sequence
  Description of Artificial Sequence: Synthetic oligonucleotide
  Antisense strand to SEQ ID NO: 2285018
uuccuuacagcuuaugcca

SEQ ID NO: 2285020 - RNA, 19 nt, Artificial Sequence
  Description of Artificial Sequence: Synthetic oligonucleotide
  Sense strand starting at position 2298 of SEQ ID NO: 1884696
auguuuccuccucauugga

SEQ ID NO: 2285021 - RNA, 19 nt, Artificial Sequence
  Description of Artificial Sequence: Synthetic oligonucleotide
  Antisense strand to SEQ ID NO: 2285020
uccaaugaggaggaaacau

SEQ ID NO: 2285022 - RNA, 19 nt, Artificial Sequence
  Description of Artificial Sequence: Synthetic oligonucleotide
  Sense strand starting at position 2316 of SEQ ID NO: 1884696
agcagaauccuggaaagcu

SEQ ID NO: 2285023 - RNA, 19 nt, Artificial Sequence
  Description of Artificial Sequence: Synthetic oligonucleotide
  Antisense strand to SEQ ID NO: 2285022
agcuuuccaggauucugcu

SEQ ID NO: 2285024 - RNA, 19 nt, Artificial Sequence
  Description of Artificial Sequence: Synthetic oligonucleotide
  Sense strand starting at position 2373 of SEQ ID NO: 1884696
ugggcaucuaucugagaaa

SEQ ID NO: 2285025 - RNA, 19 nt, Artificial Sequence
  Description of Artificial Sequence: Synthetic oligonucleotide
  Antisense strand to SEQ ID NO: 2285024
uuucucagauagaugccca

SEQ ID NO: 2285026 - RNA, 19 nt, Artificial Sequence
  Description of Artificial Sequence: Synthetic oligonucleotide
  Sense strand starting at position 2408 of SEQ ID NO: 1884696
gugggcaucuaucuagaaa

SEQ ID NO: 2285027 - RNA, 19 nt, Artificial Sequence
  Description of Artificial Sequence: Synthetic oligonucleotide
  Antisense strand to SEQ ID NO: 2285026
uuucuagauagaugcccac

SEQ ID NO: 2285028 - RNA, 19 nt, Artificial Sequence
  Description of Artificial Sequence: Synthetic oligonucleotide
  Sense strand starting at position 2512 of SEQ ID NO: 1884696
auuagauaauaggcccaua

SEQ ID NO: 2285029 - RNA, 19 nt, Artificial Sequence
  Description of Artificial Sequence: Synthetic oligonucleotide
  Antisense strand to SEQ ID NO: 2285028
uaugggccuauuaucuaau

SEQ ID NO: 2285030 - RNA, 19 nt, Artificial Sequence
  Description of Artificial Sequence: Synthetic oligonucleotide
  Sense strand starting at position 2562 of SEQ ID NO: 1884696
ggcagacugucaucaggaa

SEQ ID NO: 2285031 - RNA, 19 nt, Artificial Sequence
  Description of Artificial Sequence: Synthetic oligonucleotide
  Antisense strand to SEQ ID NO: 2285030
uuccugaugacagucugcc

SEQ ID NO: 2285032 - RNA, 19 nt, Artificial Sequence
  Description of Artificial Sequence: Synthetic oligonucleotide
  Sense strand starting at position 2563 of SEQ ID NO: 1884696
gcagacugucaucaggaau

SEQ ID NO: 2285033 - RNA, 19 nt, Artificial Sequence
  Description of Artificial Sequence: Synthetic oligonucleotide
  Antisense strand to SEQ ID NO: 2285032
auuccugaugacagucugc

SEQ ID NO: 2285034 - RNA, 19 nt, Artificial Sequence
  Description of Artificial Sequence: Synthetic oligonucleotide
  Sense strand starting at position 2730 of SEQ ID NO: 1884696
uaacgugaucgauauaugg

SEQ ID NO: 2285035 - RNA, 19 nt, Artificial Sequence
  Description of Artificial Sequence: Synthetic oligonucleotide
  Antisense strand to SEQ ID NO: 2285034
ccauauaucgaucacguua

SEQ ID NO: 2285036 - RNA, 19 nt, Artificial Sequence
  Description of Artificial Sequence: Synthetic oligonucleotide
  Sense strand starting at position 2732 of SEQ ID NO: 1884696
acgugaucgauauauggau

SEQ ID NO: 2285037 - RNA, 19 nt, Artificial Sequence
  Description of Artificial Sequence: Synthetic oligonucleotide
  Antisense strand to SEQ ID NO: 2285036
auccauauaucgaucacgu

SEQ ID NO: 2285038 - RNA, 19 nt, Artificial Sequence
  Description of Artificial Sequence: Synthetic oligonucleotide
  Sense strand starting at position 2734 of SEQ ID NO: 1884696
gugaucgauauauggauga

SEQ ID NO: 2285039 - RNA, 19 nt, Artificial Sequence
  Description of Artificial Sequence: Synthetic oligonucleotide
  Antisense strand to SEQ ID NO: 2285038
ucauccauauaucgaucac

SEQ ID NO: 2285040 - RNA, 19 nt, Artificial Sequence
  Description of Artificial Sequence: Synthetic oligonucleotide
  Sense strand starting at position 2738 of SEQ ID NO: 1884696
ucgauauauggaugagggu

SEQ ID NO: 2285041 - RNA, 19 nt, Artificial Sequence
  Description of Artificial Sequence: Synthetic oligonucleotide
  Antisense strand to SEQ ID NO: 2285040
acccucauccauauaucga

SEQ ID NO: 2285042 - RNA, 19 nt, Artificial Sequence
  Description of Artificial Sequence: Synthetic oligonucleotide
  Sense strand starting at position 2907 of SEQ ID NO: 1884696
uuuggauaauuaccuguau

SEQ ID NO: 2285043 - RNA, 19 nt, Artificial Sequence
  Description of Artificial Sequence: Synthetic oligonucleotide
  Antisense strand to SEQ ID NO: 2285042
auacagguaauuauccaaa

SEQ ID NO: 2285044 - RNA, 19 nt, Artificial Sequence
  Description of Artificial Sequence: Synthetic oligonucleotide
  Sense strand starting at position 2908 of SEQ ID NO: 1884696
uuggauaauuaccuguauu

SEQ ID NO: 2285045 - RNA, 19 nt, Artificial Sequence
  Description of Artificial Sequence: Synthetic oligonucleotide
  Antisense strand to SEQ ID NO: 2285044
aauacagguaauuauccaa

SEQ ID NO: 2285046 - RNA, 19 nt, Artificial Sequence
  Description of Artificial Sequence: Synthetic oligonucleotide
  Sense strand starting at position 3041 of SEQ ID NO: 1884696
cucacuucucaguaguaag

SEQ ID NO: 2285047 - RNA, 19 nt, Artificial Sequence
  Description of Artificial Sequence: Synthetic oligonucleotide
  Antisense strand to SEQ ID NO: 2285046
cuuacuacugagaagugag

SEQ ID NO: 2285048 - RNA, 19 nt, Artificial Sequence
  Description of Artificial Sequence: Synthetic oligonucleotide
  Sense strand starting at position 3110 of SEQ ID NO: 1884696
uggagugguuaucuacaag

SEQ ID NO: 2285049 - RNA, 19 nt, Artificial Sequence
  Description of Artificial Sequence: Synthetic oligonucleotide
  Antisense strand to SEQ ID NO: 2285048
cuuguagauaaccacucca

SEQ ID NO: 2285050 - RNA, 19 nt, Artificial Sequence
  Description of Artificial Sequence: Synthetic oligonucleotide
  Sense strand starting at position 3287 of SEQ ID NO: 1884696
ucaauagggcccugacauu

SEQ ID NO: 2285051 - RNA, 19 nt, Artificial Sequence
  Description of Artificial Sequence: Synthetic oligonucleotide
  Antisense strand to SEQ ID NO: 2285050
aaugucagggcccuauuga

SEQ ID NO: 2285052 - RNA, 19 nt, Artificial Sequence
  Description of Artificial Sequence: Synthetic oligonucleotide
  Sense strand starting at position 3301 of SEQ ID NO: 1884696
acauuuguugcguacagua

SEQ ID NO: 2285053 - RNA, 19 nt, Artificial Sequence
  Description of Artificial Sequence: Synthetic oligonucleotide
  Antisense strand to SEQ ID NO: 2285052
uacuguacgcaacaaaugu

SEQ ID NO: 2285054 - RNA, 19 nt, Artificial Sequence
  Description of Artificial Sequence: Synthetic oligonucleotide
  Sense strand starting at position 45 of SEQ ID NO: 1884697
gucacuguacucuaagacu

SEQ ID NO: 2285055 - RNA, 19 nt, Artificial Sequence
  Description of Artificial Sequence: Synthetic oligonucleotide
  Antisense strand to SEQ ID NO: 2285054
agucuuagaguacagugac

SEQ ID NO: 2285056 - RNA, 19 nt, Artificial Sequence
  Description of Artificial Sequence: Synthetic oligonucleotide
  Sense strand starting at position 88 of SEQ ID NO: 1884697
ggauguucuacucagguua

SEQ ID NO: 2285057 - RNA, 19 nt, Artificial Sequence
  Description of Artificial Sequence: Synthetic oligonucleotide
  Antisense strand to SEQ ID NO: 2285056
uaaccugaguagaacaucc

SEQ ID NO: 2285058 - RNA, 19 nt, Artificial Sequence
  Description of Artificial Sequence: Synthetic oligonucleotide
  Sense strand starting at position 188 of SEQ ID NO: 1884697
ccaguuucccauggaaauu

SEQ ID NO: 2285059 - RNA, 19 nt, Artificial Sequence
  Description of Artificial Sequence: Synthetic oligonucleotide
  Antisense strand to SEQ ID NO: 2285058
aauuuccaugggaaacugg

SEQ ID NO: 2285060 - RNA, 19 nt, Artificial Sequence
  Description of Artificial Sequence: Synthetic oligonucleotide
  Sense strand starting at position 506 of SEQ ID NO: 1884697
aggucaguaguuuacgaaa

SEQ ID NO: 2285061 - RNA, 19 nt, Artificial Sequence
  Description of Artificial Sequence: Synthetic oligonucleotide
  Antisense strand to SEQ ID NO: 2285060
uuucguaaacuacugaccu

SEQ ID NO: 2285062 - RNA, 19 nt, Artificial Sequence
  Description of Artificial Sequence: Synthetic oligonucleotide
  Sense strand starting at position 512 of SEQ ID NO: 1884697
guaguuuacgaaagugguc

SEQ ID NO: 2285063 - RNA, 19 nt, Artificial Sequence
  Description of Artificial Sequence: Synthetic oligonucleotide
  Antisense strand to SEQ ID NO: 2285062
gaccacuuucguaaacuac

SEQ ID NO: 2285064 - RNA, 19 nt, Artificial Sequence
  Description of Artificial Sequence: Synthetic oligonucleotide
  Sense strand starting at position 518 of SEQ ID NO: 1884697
uacgaaaguggucaucuau

SEQ ID NO: 2285065 - RNA, 19 nt, Artificial Sequence
  Description of Artificial Sequence: Synthetic oligonucleotide
  Antisense strand to SEQ ID NO: 2285064
auagaugaccacuuucgua

SEQ ID NO: 2285066 - RNA, 19 nt, Artificial Sequence
  Description of Artificial Sequence: Synthetic oligonucleotide
  Sense strand starting at position 835 of SEQ ID NO: 1884697
cugcuaacacuuuaaggua

SEQ ID NO: 2285067 - RNA, 19 nt, Artificial Sequence
  Description of Artificial Sequence: Synthetic oligonucleotide
  Antisense strand to SEQ ID NO: 2285066
uaccuuaaaguguuagcag

SEQ ID NO: 2285068 - RNA, 19 nt, Artificial Sequence
  Description of Artificial Sequence: Synthetic oligonucleotide
  Sense strand starting at position 941 of SEQ ID NO: 1884697
gacagauuccugcagaggu

SEQ ID NO: 2285069 - RNA, 19 nt, Artificial Sequence
  Description of Artificial Sequence: Synthetic oligonucleotide
  Antisense strand to SEQ ID NO: 2285068
accucugcaggaaucuguc

SEQ ID NO: 2285070 - RNA, 19 nt, Artificial Sequence
  Description of Artificial Sequence: Synthetic oligonucleotide
  Sense strand starting at position 943 of SEQ ID NO: 1884697
cagauuccugcagagguaa

SEQ ID NO: 2285071 - RNA, 19 nt, Artificial Sequence
  Description of Artificial Sequence: Synthetic oligonucleotide
  Antisense strand to SEQ ID NO: 2285070
uuaccucugcaggaaucug

SEQ ID NO: 2285072 - RNA, 19 nt, Artificial Sequence
  Description of Artificial Sequence: Synthetic oligonucleotide
  Sense strand starting at position 1014 of SEQ ID NO: 1884697
cuauguaaccuaggagcaa

SEQ ID NO: 2285073 - RNA, 19 nt, Artificial Sequence
  Description of Artificial Sequence: Synthetic oligonucleotide
  Antisense strand to SEQ ID NO: 2285072
uugcuccuagguuacauag

SEQ ID NO: 2285074 - RNA, 19 nt, Artificial Sequence
  Description of Artificial Sequence: Synthetic oligonucleotide
  Sense strand starting at position 1272 of SEQ ID NO: 1884697
gaguaagacaugugaaagu

SEQ ID NO: 2285075 - RNA, 19 nt, Artificial Sequence
  Description of Artificial Sequence: Synthetic oligonucleotide
  Antisense strand to SEQ ID NO: 2285074
acuuucacaugucuuacuc

SEQ ID NO: 2285076 - RNA, 19 nt, Artificial Sequence
  Description of Artificial Sequence: Synthetic oligonucleotide
  Sense strand starting at position 1462 of SEQ ID NO: 1884697
uauugcuuggcagaaagaa

SEQ ID NO: 2285077 - RNA, 19 nt, Artificial Sequence
  Description of Artificial Sequence: Synthetic oligonucleotide
  Antisense strand to SEQ ID NO: 2285076
uucuuucugccaagcaaua

SEQ ID NO: 2285078 - RNA, 19 nt, Artificial Sequence
  Description of Artificial Sequence: Synthetic oligonucleotide
  Sense strand starting at position 1616 of SEQ ID NO: 1884697
gucacacauugaucagacu

SEQ ID NO: 2285079 - RNA, 19 nt, Artificial Sequence
  Description of Artificial Sequence: Synthetic oligonucleotide
  Antisense strand to SEQ ID NO: 2285078
agucugaucaaugugugac

SEQ ID NO: 2285080 - RNA, 19 nt, Artificial Sequence
  Description of Artificial Sequence: Synthetic oligonucleotide
  Sense strand starting at position 1691 of SEQ ID NO: 1884697
gaucaaagacuuuggguua

SEQ ID NO: 2285081 - RNA, 19 nt, Artificial Sequence
  Description of Artificial Sequence: Synthetic oligonucleotide
  Antisense strand to SEQ ID NO: 2285080
uaacccaaagucuuugauc

SEQ ID NO: 2285082 - RNA, 19 nt, Artificial Sequence
  Description of Artificial Sequence: Synthetic oligonucleotide
  Sense strand starting at position 1974 of SEQ ID NO: 1884697
cgagauuccauguaaguca

SEQ ID NO: 2285083 - RNA, 19 nt, Artificial Sequence
  Description of Artificial Sequence: Synthetic oligonucleotide
  Antisense strand to SEQ ID NO: 2285082
ugacuuacauggaaucucg

SEQ ID NO: 2285084 - RNA, 19 nt, Artificial Sequence
  Description of Artificial Sequence: Synthetic oligonucleotide
  Sense strand starting at position 1981 of SEQ ID NO: 1884697
ccauguaagucaucacaaa

SEQ ID NO: 2285085 - RNA, 19 nt, Artificial Sequence
  Description of Artificial Sequence: Synthetic oligonucleotide
  Antisense strand to SEQ ID NO: 2285084
uuugugaugacuuacaugg

SEQ ID NO: 2285086 - RNA, 19 nt, Artificial Sequence
  Description of Artificial Sequence: Synthetic oligonucleotide
  Sense strand starting at position 2044 of SEQ ID NO: 1884697
cauugaauaccgugaaauu

SEQ ID NO: 2285087 - RNA, 19 nt, Artificial Sequence
  Description of Artificial Sequence: Synthetic oligonucleotide
  Antisense strand to SEQ ID NO: 2285086
aauuucacgguauucaaug

SEQ ID NO: 2285088 - RNA, 19 nt, Artificial Sequence
  Description of Artificial Sequence: Synthetic oligonucleotide
  Sense strand starting at position 2091 of SEQ ID NO: 1884697
guuaguaguaccuagagaa

SEQ ID NO: 2285089 - RNA, 19 nt, Artificial Sequence
  Description of Artificial Sequence: Synthetic oligonucleotide
  Antisense strand to SEQ ID NO: 2285088
uucucuagguacuacuaac

SEQ ID NO: 2285090 - RNA, 19 nt, Artificial Sequence
  Description of Artificial Sequence: Synthetic oligonucleotide
  Sense strand starting at position 2111 of SEQ ID NO: 1884697
aacaaagcugugggugaaa

SEQ ID NO: 2285091 - RNA, 19 nt, Artificial Sequence
  Description of Artificial Sequence: Synthetic oligonucleotide
  Antisense strand to SEQ ID NO: 2285090
uuucacccacagcuuuguu

SEQ ID NO: 2285092 - RNA, 19 nt, Artificial Sequence
  Description of Artificial Sequence: Synthetic oligonucleotide
  Sense strand starting at position 2113 of SEQ ID NO: 1884697
caaagcugugggugaaaga

SEQ ID NO: 2285093 - RNA, 19 nt, Artificial Sequence
  Description of Artificial Sequence: Synthetic oligonucleotide
  Antisense strand to SEQ ID NO: 2285092
ucuuucacccacagcuuug

SEQ ID NO: 2285094 - RNA, 19 nt, Artificial Sequence
  Description of Artificial Sequence: Synthetic oligonucleotide
  Sense strand starting at position 2114 of SEQ ID NO: 1884697
aaagcugugggugaaagau

SEQ ID NO: 2285095 - RNA, 19 nt, Artificial Sequence
  Description of Artificial Sequence: Synthetic oligonucleotide
  Antisense strand to SEQ ID NO: 2285094
aucuuucacccacagcuuu

SEQ ID NO: 2285096 - RNA, 19 nt, Artificial Sequence
  Description of Artificial Sequence: Synthetic oligonucleotide
  Sense strand starting at position 2123 of SEQ ID NO: 1884697
ggugaaagauuccucagac

SEQ ID NO: 2285097 - RNA, 19 nt, Artificial Sequence
  Description of Artificial Sequence: Synthetic oligonucleotide
  Antisense strand to SEQ ID NO: 2285096
gucugaggaaucuuucacc

SEQ ID NO: 2285098 - RNA, 19 nt, Artificial Sequence
  Description of Artificial Sequence: Synthetic oligonucleotide
  Sense strand starting at position 2124 of SEQ ID NO: 1884697
gugaaagauuccucagaca

SEQ ID NO: 2285099 - RNA, 19 nt, Artificial Sequence
  Description of Artificial Sequence: Synthetic oligonucleotide
  Antisense strand to SEQ ID NO: 2285098
ugucugaggaaucuuucac

SEQ ID NO: 2285100 - RNA, 19 nt, Artificial Sequence
  Description of Artificial Sequence: Synthetic oligonucleotide
  Sense strand starting at position 2161 of SEQ ID NO: 1884697
ugcguucuccaguuucuca

SEQ ID NO: 2285101 - RNA, 19 nt, Artificial Sequence
  Description of Artificial Sequence: Synthetic oligonucleotide
  Antisense strand to SEQ ID NO: 2285100
ugagaaacuggagaacgca

SEQ ID NO: 2285102 - RNA, 19 nt, Artificial Sequence
  Description of Artificial Sequence: Synthetic oligonucleotide
  Sense strand starting at position 2249 of SEQ ID NO: 1884697
uggcauaagcuguaaggaa

SEQ ID NO: 2285103 - RNA, 19 nt, Artificial Sequence
  Description of Artificial Sequence: Synthetic oligonucleotide
  Antisense strand to SEQ ID NO: 2285102
uuccuuacagcuuaugcca

SEQ ID NO: 2285104 - RNA, 19 nt, Artificial Sequence
  Description of Artificial Sequence: Synthetic oligonucleotide
  Sense strand starting at position 2534 of SEQ ID NO: 1884697
auguuuccuccucauugga

SEQ ID NO: 2285105 - RNA, 19 nt, Artificial Sequence
  Description of Artificial Sequence: Synthetic oligonucleotide
  Antisense strand to SEQ ID NO: 2285104
uccaaugaggaggaaacau

SEQ ID NO: 2285106 - RNA, 19 nt, Artificial Sequence
  Description of Artificial Sequence: Synthetic oligonucleotide
  Sense strand starting at position 2552 of SEQ ID NO: 1884697
agcagaauccuggaaagcu

SEQ ID NO: 2285107 - RNA, 19 nt, Artificial Sequence
  Description of Artificial Sequence: Synthetic oligonucleotide
  Antisense strand to SEQ ID NO: 2285106
agcuuuccaggauucugcu

SEQ ID NO: 2285108 - RNA, 19 nt, Artificial Sequence
  Description of Artificial Sequence: Synthetic oligonucleotide
  Sense strand starting at position 2609 of SEQ ID NO: 1884697
ugggcaucuaucugagaaa

SEQ ID NO: 2285109 - RNA, 19 nt, Artificial Sequence
  Description of Artificial Sequence: Synthetic oligonucleotide
  Antisense strand to SEQ ID NO: 2285108
uuucucagauagaugccca

SEQ ID NO: 2285110 - RNA, 19 nt, Artificial Sequence
  Description of Artificial Sequence: Synthetic oligonucleotide
  Sense strand starting at position 2748 of SEQ ID NO: 1884697
auuagauaauaggcccaua

SEQ ID NO: 2285111 - RNA, 19 nt, Artificial Sequence
  Description of Artificial Sequence: Synthetic oligonucleotide
  Antisense strand to SEQ ID NO: 2285110
uaugggccuauuaucuaau

SEQ ID NO: 2285112 - RNA, 19 nt, Artificial Sequence
  Description of Artificial Sequence: Synthetic oligonucleotide
  Sense strand starting at position 2798 of SEQ ID NO: 1884697
ggcagacugucaucaggaa

SEQ ID NO: 2285113 - RNA, 19 nt, Artificial Sequence
  Description of Artificial Sequence: Synthetic oligonucleotide
  Antisense strand to SEQ ID NO: 2285112
uuccugaugacagucugcc

SEQ ID NO: 2285114 - RNA, 19 nt, Artificial Sequence
  Description of Artificial Sequence: Synthetic oligonucleotide
  Sense strand starting at position 2799 of SEQ ID NO: 1884697
gcagacugucaucaggaau

SEQ ID NO: 2285115 - RNA, 19 nt, Artificial Sequence
  Description of Artificial Sequence: Synthetic oligonucleotide
  Antisense strand to SEQ ID NO: 2285114
auuccugaugacagucugc

SEQ ID NO: 2285116 - RNA, 19 nt, Artificial Sequence
  Description of Artificial Sequence: Synthetic oligonucleotide
  Sense strand starting at position 2966 of SEQ ID NO: 1884697
uaacgugaucgauauaugg

SEQ ID NO: 2285117 - RNA, 19 nt, Artificial Sequence
  Description of Artificial Sequence: Synthetic oligonucleotide
  Antisense strand to SEQ ID NO: 2285116
ccauauaucgaucacguua

SEQ ID NO: 2285118 - RNA, 19 nt, Artificial Sequence
  Description of Artificial Sequence: Synthetic oligonucleotide
  Sense strand starting at position 2968 of SEQ ID NO: 1884697
acgugaucgauauauggau

SEQ ID NO: 2285119 - RNA, 19 nt, Artificial Sequence
  Description of Artificial Sequence: Synthetic oligonucleotide
  Antisense strand to SEQ ID NO: 2285118
auccauauaucgaucacgu

SEQ ID NO: 2285120 - RNA, 19 nt, Artificial Sequence
  Description of Artificial Sequence: Synthetic oligonucleotide
  Sense strand starting at position 2970 of SEQ ID NO: 1884697
gugaucgauauauggauga

SEQ ID NO: 2285121 - RNA, 19 nt, Artificial Sequence
  Description of Artificial Sequence: Synthetic oligonucleotide
  Antisense strand to SEQ ID NO: 2285120
ucauccauauaucgaucac

SEQ ID NO: 2285122 - RNA, 19 nt, Artificial Sequence
  Description of Artificial Sequence: Synthetic oligonucleotide
  Sense strand starting at position 2974 of SEQ ID NO: 1884697
ucgauauauggaugagggu

SEQ ID NO: 2285123 - RNA, 19 nt, Artificial Sequence
  Description of Artificial Sequence: Synthetic oligonucleotide
  Antisense strand to SEQ ID NO: 2285122
acccucauccauauaucga

SEQ ID NO: 2285124 - RNA, 19 nt, Artificial Sequence
  Description of Artificial Sequence: Synthetic oligonucleotide
  Sense strand starting at position 3143 of SEQ ID NO: 1884697
uuuggauaauuaccuguau

SEQ ID NO: 2285125 - RNA, 19 nt, Artificial Sequence
  Description of Artificial Sequence: Synthetic oligonucleotide
  Antisense strand to SEQ ID NO: 2285124
auacagguaauuauccaaa

SEQ ID NO: 2285126 - RNA, 19 nt, Artificial Sequence
  Description of Artificial Sequence: Synthetic oligonucleotide
  Sense strand starting at position 3144 of SEQ ID NO: 1884697
uuggauaauuaccuguauu

SEQ ID NO: 2285127 - RNA, 19 nt, Artificial Sequence
  Description of Artificial Sequence: Synthetic oligonucleotide
  Antisense strand to SEQ ID NO: 2285126
aauacagguaauuauccaa

SEQ ID NO: 2285128 - RNA, 19 nt, Artificial Sequence
  Description of Artificial Sequence: Synthetic oligonucleotide
  Sense strand starting at position 3277 of SEQ ID NO: 1884697
cucacuucucaguaguaag

SEQ ID NO: 2285129 - RNA, 19 nt, Artificial Sequence
  Description of Artificial Sequence: Synthetic oligonucleotide
  Antisense strand to SEQ ID NO: 2285128
cuuacuacugagaagugag

SEQ ID NO: 2285130 - RNA, 19 nt, Artificial Sequence
  Description of Artificial Sequence: Synthetic oligonucleotide
  Sense strand starting at position 3346 of SEQ ID NO: 1884697
uggagugguuaucuacaag

SEQ ID NO: 2285131 - RNA, 19 nt, Artificial Sequence
  Description of Artificial Sequence: Synthetic oligonucleotide
  Antisense strand to SEQ ID NO: 2285130
cuuguagauaaccacucca

SEQ ID NO: 2285132 - RNA, 19 nt, Artificial Sequence
  Description of Artificial Sequence: Synthetic oligonucleotide
  Sense strand starting at position 3537 of SEQ ID NO: 1884697
acauuuguugcguacagua

SEQ ID NO: 2285133 - RNA, 19 nt, Artificial Sequence
  Description of Artificial Sequence: Synthetic oligonucleotide
  Antisense strand to SEQ ID NO: 2285132
uacuguacgcaacaaaugu

SEQ ID NO: 2285134 - RNA, 19 nt, Artificial Sequence
  Description of Artificial Sequence: Synthetic oligonucleotide
  Sense strand starting at position 384 of SEQ ID NO: 1884698
gucacuguacucuaagacu

SEQ ID NO: 2285135 - RNA, 19 nt, Artificial Sequence
  Description of Artificial Sequence: Synthetic oligonucleotide
  Antisense strand to SEQ ID NO: 2285134
agucuuagaguacagugac

SEQ ID NO: 2285136 - RNA, 19 nt, Artificial Sequence
  Description of Artificial Sequence: Synthetic oligonucleotide
  Sense strand starting at position 427 of SEQ ID NO: 1884698
ggauguucuacucagguua

SEQ ID NO: 2285137 - RNA, 19 nt, Artificial Sequence
  Description of Artificial Sequence: Synthetic oligonucleotide
  Antisense strand to SEQ ID NO: 2285136
uaaccugaguagaacaucc

SEQ ID NO: 2285138 - RNA, 19 nt, Artificial Sequence
  Description of Artificial Sequence: Synthetic oligonucleotide
  Sense strand starting at position 527 of SEQ ID NO: 1884698
ccaguuucccauggaaauu

SEQ ID NO: 2285139 - RNA, 19 nt, Artificial Sequence
  Description of Artificial Sequence: Synthetic oligonucleotide
  Antisense strand to SEQ ID NO: 2285138
aauuuccaugggaaacugg

SEQ ID NO: 2285140 - RNA, 19 nt, Artificial Sequence
  Description of Artificial Sequence: Synthetic oligonucleotide
  Sense strand starting at position 845 of SEQ ID NO: 1884698
aggucaguaguuuacgaaa

SEQ ID NO: 2285141 - RNA, 19 nt, Artificial Sequence
  Description of Artificial Sequence: Synthetic oligonucleotide
  Antisense strand to SEQ ID NO: 2285140
uuucguaaacuacugaccu

SEQ ID NO: 2285142 - RNA, 19 nt, Artificial Sequence
  Description of Artificial Sequence: Synthetic oligonucleotide
  Sense strand starting at position 851 of SEQ ID NO: 1884698
guaguuuacgaaagugguc

SEQ ID NO: 2285143 - RNA, 19 nt, Artificial Sequence
  Description of Artificial Sequence: Synthetic oligonucleotide
  Antisense strand to SEQ ID NO: 2285142
gaccacuuucguaaacuac

SEQ ID NO: 2285144 - RNA, 19 nt, Artificial Sequence
  Description of Artificial Sequence: Synthetic oligonucleotide
  Sense strand starting at position 857 of SEQ ID NO: 1884698
uacgaaaguggucaucuau

SEQ ID NO: 2285145 - RNA, 19 nt, Artificial Sequence
  Description of Artificial Sequence: Synthetic oligonucleotide
  Antisense strand to SEQ ID NO: 2285144
auagaugaccacuuucgua

SEQ ID NO: 2285146 - RNA, 19 nt, Artificial Sequence
  Description of Artificial Sequence: Synthetic oligonucleotide
  Sense strand starting at position 1174 of SEQ ID NO: 1884698
cugcuaacacuuuaaggua

SEQ ID NO: 2285147 - RNA, 19 nt, Artificial Sequence
  Description of Artificial Sequence: Synthetic oligonucleotide
  Antisense strand to SEQ ID NO: 2285146
uaccuuaaaguguuagcag

SEQ ID NO: 2285148 - RNA, 19 nt, Artificial Sequence
  Description of Artificial Sequence: Synthetic oligonucleotide
  Sense strand starting at position 1280 of SEQ ID NO: 1884698
gacagauuccugcagaggu

SEQ ID NO: 2285149 - RNA, 19 nt, Artificial Sequence
  Description of Artificial Sequence: Synthetic oligonucleotide
  Antisense strand to SEQ ID NO: 2285148
accucugcaggaaucuguc

SEQ ID NO: 2285150 - RNA, 19 nt, Artificial Sequence
  Description of Artificial Sequence: Synthetic oligonucleotide
  Sense strand starting at position 1282 of SEQ ID NO: 1884698
cagauuccugcagagguaa

SEQ ID NO: 2285151 - RNA, 19 nt, Artificial Sequence
  Description of Artificial Sequence: Synthetic oligonucleotide
  Antisense strand to SEQ ID NO: 2285150
uuaccucugcaggaaucug

SEQ ID NO: 2285152 - RNA, 19 nt, Artificial Sequence
  Description of Artificial Sequence: Synthetic oligonucleotide
  Sense strand starting at position 1353 of SEQ ID NO: 1884698
cuauguaaccuaggagcaa

SEQ ID NO: 2285153 - RNA, 19 nt, Artificial Sequence
  Description of Artificial Sequence: Synthetic oligonucleotide
  Antisense strand to SEQ ID NO: 2285152
uugcuccuagguuacauag

SEQ ID NO: 2285154 - RNA, 19 nt, Artificial Sequence
  Description of Artificial Sequence: Synthetic oligonucleotide
  Sense strand starting at position 1611 of SEQ ID NO: 1884698
gaguaagacaugugaaagu

SEQ ID NO: 2285155 - RNA, 19 nt, Artificial Sequence
  Description of Artificial Sequence: Synthetic oligonucleotide
  Antisense strand to SEQ ID NO: 2285154
acuuucacaugucuuacuc

SEQ ID NO: 2285156 - RNA, 19 nt, Artificial Sequence
  Description of Artificial Sequence: Synthetic oligonucleotide
  Sense strand starting at position 1801 of SEQ ID NO: 1884698
uauugcuuggcagaaagaa

SEQ ID NO: 2285157 - RNA, 19 nt, Artificial Sequence
  Description of Artificial Sequence: Synthetic oligonucleotide
  Antisense strand to SEQ ID NO: 2285156
uucuuucugccaagcaaua

SEQ ID NO: 2285158 - RNA, 19 nt, Artificial Sequence
  Description of Artificial Sequence: Synthetic oligonucleotide
  Sense strand starting at position 1955 of SEQ ID NO: 1884698
gucacacauugaucagacu

SEQ ID NO: 2285159 - RNA, 19 nt, Artificial Sequence
  Description of Artificial Sequence: Synthetic oligonucleotide
  Antisense strand to SEQ ID NO: 2285158
agucugaucaaugugugac

SEQ ID NO: 2285160 - RNA, 19 nt, Artificial Sequence
  Description of Artificial Sequence: Synthetic oligonucleotide
  Sense strand starting at position 2030 of SEQ ID NO: 1884698
gaucaaagacuuuggguua

SEQ ID NO: 2285161 - RNA, 19 nt, Artificial Sequence
  Description of Artificial Sequence: Synthetic oligonucleotide
  Antisense strand to SEQ ID NO: 2285160
uaacccaaagucuuugauc

SEQ ID NO: 2285162 - RNA, 19 nt, Artificial Sequence
  Description of Artificial Sequence: Synthetic oligonucleotide
  Sense strand starting at position 2313 of SEQ ID NO: 1884698
cgagauuccauguaaguca

SEQ ID NO: 2285163 - RNA, 19 nt, Artificial Sequence
  Description of Artificial Sequence: Synthetic oligonucleotide
  Antisense strand to SEQ ID NO: 2285162
ugacuuacauggaaucucg

SEQ ID NO: 2285164 - RNA, 19 nt, Artificial Sequence
  Description of Artificial Sequence: Synthetic oligonucleotide
  Sense strand starting at position 2320 of SEQ ID NO: 1884698
ccauguaagucaucacaaa

SEQ ID NO: 2285165 - RNA, 19 nt, Artificial Sequence
  Description of Artificial Sequence: Synthetic oligonucleotide
  Antisense strand to SEQ ID NO: 2285164
uuugugaugacuuacaugg

SEQ ID NO: 2285166 - RNA, 19 nt, Artificial Sequence
  Description of Artificial Sequence: Synthetic oligonucleotide
  Sense strand starting at position 2383 of SEQ ID NO: 1884698
cauugaauaccgugaaauu

SEQ ID NO: 2285167 - RNA, 19 nt, Artificial Sequence
  Description of Artificial Sequence: Synthetic oligonucleotide
  Antisense strand to SEQ ID NO: 2285166
aauuucacgguauucaaug

SEQ ID NO: 2285168 - RNA, 19 nt, Artificial Sequence
  Description of Artificial Sequence: Synthetic oligonucleotide
  Sense strand starting at position 2430 of SEQ ID NO: 1884698
guuaguaguaccuagagaa

SEQ ID NO: 2285169 - RNA, 19 nt, Artificial Sequence
  Description of Artificial Sequence: Synthetic oligonucleotide
  Antisense strand to SEQ ID NO: 2285168
uucucuagguacuacuaac

SEQ ID NO: 2285170 - RNA, 19 nt, Artificial Sequence
  Description of Artificial Sequence: Synthetic oligonucleotide
  Sense strand starting at position 2450 of SEQ ID NO: 1884698
aacaaagcugugggugaaa

SEQ ID NO: 2285171 - RNA, 19 nt, Artificial Sequence
  Description of Artificial Sequence: Synthetic oligonucleotide
  Antisense strand to SEQ ID NO: 2285170
uuucacccacagcuuuguu

SEQ ID NO: 2285172 - RNA, 19 nt, Artificial Sequence
  Description of Artificial Sequence: Synthetic oligonucleotide
  Sense strand starting at position 2452 of SEQ ID NO: 1884698
caaagcugugggugaaaga

SEQ ID NO: 2285173 - RNA, 19 nt, Artificial Sequence
  Description of Artificial Sequence: Synthetic oligonucleotide
  Antisense strand to SEQ ID NO: 2285172
ucuuucacccacagcuuug

SEQ ID NO: 2285174 - RNA, 19 nt, Artificial Sequence
  Description of Artificial Sequence: Synthetic oligonucleotide
  Sense strand starting at position 2453 of SEQ ID NO: 1884698
aaagcugugggugaaagau

SEQ ID NO: 2285175 - RNA, 19 nt, Artificial Sequence
  Description of Artificial Sequence: Synthetic oligonucleotide
  Antisense strand to SEQ ID NO: 2285174
aucuuucacccacagcuuu

SEQ ID NO: 2285176 - RNA, 19 nt, Artificial Sequence
  Description of Artificial Sequence: Synthetic oligonucleotide
  Sense strand starting at position 2462 of SEQ ID NO: 1884698
ggugaaagauuccucagac

SEQ ID NO: 2285177 - RNA, 19 nt, Artificial Sequence
  Description of Artificial Sequence: Synthetic oligonucleotide
  Antisense strand to SEQ ID NO: 2285176
gucugaggaaucuuucacc

SEQ ID NO: 2285178 - RNA, 19 nt, Artificial Sequence
  Description of Artificial Sequence: Synthetic oligonucleotide
  Sense strand starting at position 2463 of SEQ ID NO: 1884698
gugaaagauuccucagaca

SEQ ID NO: 2285179 - RNA, 19 nt, Artificial Sequence
  Description of Artificial Sequence: Synthetic oligonucleotide
  Antisense strand to SEQ ID NO: 2285178
ugucugaggaaucuuucac

SEQ ID NO: 2285180 - RNA, 19 nt, Artificial Sequence
  Description of Artificial Sequence: Synthetic oligonucleotide
  Sense strand starting at position 2500 of SEQ ID NO: 1884698
ugcguucuccaguuucuca

SEQ ID NO: 2285181 - RNA, 19 nt, Artificial Sequence
  Description of Artificial Sequence: Synthetic oligonucleotide
  Antisense strand to SEQ ID NO: 2285180
ugagaaacuggagaacgca

SEQ ID NO: 2285182 - RNA, 19 nt, Artificial Sequence
  Description of Artificial Sequence: Synthetic oligonucleotide
  Sense strand starting at position 2588 of SEQ ID NO: 1884698
uggcauaagcuguaaggaa

SEQ ID NO: 2285183 - RNA, 19 nt, Artificial Sequence
  Description of Artificial Sequence: Synthetic oligonucleotide
  Antisense strand to SEQ ID NO: 2285182
uuccuuacagcuuaugcca

SEQ ID NO: 2285184 - RNA, 19 nt, Artificial Sequence
  Description of Artificial Sequence: Synthetic oligonucleotide
  Sense strand starting at position 2873 of SEQ ID NO: 1884698
auguuuccuccucauugga

SEQ ID NO: 2285185 - RNA, 19 nt, Artificial Sequence
  Description of Artificial Sequence: Synthetic oligonucleotide
  Antisense strand to SEQ ID NO: 2285184
uccaaugaggaggaaacau

SEQ ID NO: 2285186 - RNA, 19 nt, Artificial Sequence
  Description of Artificial Sequence: Synthetic oligonucleotide
  Sense strand starting at position 2891 of SEQ ID NO: 1884698
agcagaauccuggaaagcu

SEQ ID NO: 2285187 - RNA, 19 nt, Artificial Sequence
  Description of Artificial Sequence: Synthetic oligonucleotide
  Antisense strand to SEQ ID NO: 2285186
agcuuuccaggauucugcu

SEQ ID NO: 2285188 - RNA, 19 nt, Artificial Sequence
  Description of Artificial Sequence: Synthetic oligonucleotide
  Sense strand starting at position 2948 of SEQ ID NO: 1884698
ugggcaucuaucugagaaa

SEQ ID NO: 2285189 - RNA, 19 nt, Artificial Sequence
  Description of Artificial Sequence: Synthetic oligonucleotide
  Antisense strand to SEQ ID NO: 2285188
uuucucagauagaugccca

SEQ ID NO: 2285190 - RNA, 19 nt, Artificial Sequence
  Description of Artificial Sequence: Synthetic oligonucleotide
  Sense strand starting at position 3087 of SEQ ID NO: 1884698
auuagauaauaggcccaua

SEQ ID NO: 2285191 - RNA, 19 nt, Artificial Sequence
  Description of Artificial Sequence: Synthetic oligonucleotide
  Antisense strand to SEQ ID NO: 2285190
uaugggccuauuaucuaau

SEQ ID NO: 2285192 - RNA, 19 nt, Artificial Sequence
  Description of Artificial Sequence: Synthetic oligonucleotide
  Sense strand starting at position 3137 of SEQ ID NO: 1884698
ggcagacugucaucaggaa

SEQ ID NO: 2285193 - RNA, 19 nt, Artificial Sequence
  Description of Artificial Sequence: Synthetic oligonucleotide
  Antisense strand to SEQ ID NO: 2285192
uuccugaugacagucugcc

SEQ ID NO: 2285194 - RNA, 19 nt, Artificial Sequence
  Description of Artificial Sequence: Synthetic oligonucleotide
  Sense strand starting at position 3138 of SEQ ID NO: 1884698
gcagacugucaucaggaau

SEQ ID NO: 2285195 - RNA, 19 nt, Artificial Sequence
  Description of Artificial Sequence: Synthetic oligonucleotide
  Antisense strand to SEQ ID NO: 2285194
auuccugaugacagucugc

SEQ ID NO: 2285196 - RNA, 19 nt, Artificial Sequence
  Description of Artificial Sequence: Synthetic oligonucleotide
  Sense strand starting at position 3305 of SEQ ID NO: 1884698
uaacgugaucgauauaugg

SEQ ID NO: 2285197 - RNA, 19 nt, Artificial Sequence
  Description of Artificial Sequence: Synthetic oligonucleotide
  Antisense strand to SEQ ID NO: 2285196
ccauauaucgaucacguua

SEQ ID NO: 2285198 - RNA, 19 nt, Artificial Sequence
  Description of Artificial Sequence: Synthetic oligonucleotide
  Sense strand starting at position 3307 of SEQ ID NO: 1884698
acgugaucgauauauggau

SEQ ID NO: 2285199 - RNA, 19 nt, Artificial Sequence
  Description of Artificial Sequence: Synthetic oligonucleotide
  Antisense strand to SEQ ID NO: 2285198
auccauauaucgaucacgu

SEQ ID NO: 2285200 - RNA, 19 nt, Artificial Sequence
  Description of Artificial Sequence: Synthetic oligonucleotide
  Sense strand starting at position 3309 of SEQ ID NO: 1884698
gugaucgauauauggauga

SEQ ID NO: 2285201 - RNA, 19 nt, Artificial Sequence
  Description of Artificial Sequence: Synthetic oligonucleotide
  Antisense strand to SEQ ID NO: 2285200
ucauccauauaucgaucac

SEQ ID NO: 2285202 - RNA, 19 nt, Artificial Sequence
  Description of Artificial Sequence: Synthetic oligonucleotide
  Sense strand starting at position 3313 of SEQ ID NO: 1884698
ucgauauauggaugagggu

SEQ ID NO: 2285203 - RNA, 19 nt, Artificial Sequence
  Description of Artificial Sequence: Synthetic oligonucleotide
  Antisense strand to SEQ ID NO: 2285202
acccucauccauauaucga

SEQ ID NO: 2285204 - RNA, 19 nt, Artificial Sequence
  Description of Artificial Sequence: Synthetic oligonucleotide
  Sense strand starting at position 3482 of SEQ ID NO: 1884698
uuuggauaauuaccuguau

SEQ ID NO: 2285205 - RNA, 19 nt, Artificial Sequence
  Description of Artificial Sequence: Synthetic oligonucleotide
  Antisense strand to SEQ ID NO: 2285204
auacagguaauuauccaaa

SEQ ID NO: 2285206 - RNA, 19 nt, Artificial Sequence
  Description of Artificial Sequence: Synthetic oligonucleotide
  Sense strand starting at position 3483 of SEQ ID NO: 1884698
uuggauaauuaccuguauu

SEQ ID NO: 2285207 - RNA, 19 nt, Artificial Sequence
  Description of Artificial Sequence: Synthetic oligonucleotide
  Antisense strand to SEQ ID NO: 2285206
aauacagguaauuauccaa

SEQ ID NO: 2285208 - RNA, 19 nt, Artificial Sequence
  Description of Artificial Sequence: Synthetic oligonucleotide
  Sense strand starting at position 3616 of SEQ ID NO: 1884698
cucacuucucaguaguaag

SEQ ID NO: 2285209 - RNA, 19 nt, Artificial Sequence
  Description of Artificial Sequence: Synthetic oligonucleotide
  Antisense strand to SEQ ID NO: 2285208
cuuacuacugagaagugag

SEQ ID NO: 2285210 - RNA, 19 nt, Artificial Sequence
  Description of Artificial Sequence: Synthetic oligonucleotide
  Sense strand starting at position 3685 of SEQ ID NO: 1884698
uggagugguuaucuacaag

SEQ ID NO: 2285211 - RNA, 19 nt, Artificial Sequence
  Description of Artificial Sequence: Synthetic oligonucleotide
  Antisense strand to SEQ ID NO: 2285210
cuuguagauaaccacucca

SEQ ID NO: 2285212 - RNA, 19 nt, Artificial Sequence
  Description of Artificial Sequence: Synthetic oligonucleotide
  Sense strand starting at position 3876 of SEQ ID NO: 1884698
acauuuguugcguacagua

SEQ ID NO: 2285213 - RNA, 19 nt, Artificial Sequence
  Description of Artificial Sequence: Synthetic oligonucleotide
  Antisense strand to SEQ ID NO: 2285212
uacuguacgcaacaaaugu

SEQ ID NO: 2285214 - RNA, 19 nt, Artificial Sequence
  Description of Artificial Sequence: Synthetic oligonucleotide
  Sense strand starting at position 126 of SEQ ID NO: 1884699
augaucauguuucugguaa

SEQ ID NO: 2285215 - RNA, 19 nt, Artificial Sequence
  Description of Artificial Sequence: Synthetic oligonucleotide
  Antisense strand to SEQ ID NO: 2285214
uuaccagaaacaugaucau

SEQ ID NO: 2285216 - RNA, 19 nt, Artificial Sequence
  Description of Artificial Sequence: Synthetic oligonucleotide
  Sense strand starting at position 326 of SEQ ID NO: 1884699
cuccuaaguggugauagau

SEQ ID NO: 2285217 - RNA, 19 nt, Artificial Sequence
  Description of Artificial Sequence: Synthetic oligonucleotide
  Antisense strand to SEQ ID NO: 2285216
aucuaucaccacuuaggag

SEQ ID NO: 2285218 - RNA, 19 nt, Artificial Sequence
  Description of Artificial Sequence: Synthetic oligonucleotide
  Sense strand starting at position 351 of SEQ ID NO: 1884699
auagcauugcuagauaaau

SEQ ID NO: 2285219 - RNA, 19 nt, Artificial Sequence
  Description of Artificial Sequence: Synthetic oligonucleotide
  Antisense strand to SEQ ID NO: 2285218
auuuaucuagcaaugcuau

SEQ ID NO: 2285220 - RNA, 19 nt, Artificial Sequence
  Description of Artificial Sequence: Synthetic oligonucleotide
  Sense strand starting at position 810 of SEQ ID NO: 1884699
gugcccauucucuagaaug

SEQ ID NO: 2285221 - RNA, 19 nt, Artificial Sequence
  Description of Artificial Sequence: Synthetic oligonucleotide
  Antisense strand to SEQ ID NO: 2285220
cauucuagagaaugggcac

SEQ ID NO: 2285222 - RNA, 19 nt, Artificial Sequence
  Description of Artificial Sequence: Synthetic oligonucleotide
  Sense strand starting at position 812 of SEQ ID NO: 1884699
gcccauucucuagaaugag

SEQ ID NO: 2285223 - RNA, 19 nt, Artificial Sequence
  Description of Artificial Sequence: Synthetic oligonucleotide
  Antisense strand to SEQ ID NO: 2285222
cucauucuagagaaugggc

SEQ ID NO: 2285224 - RNA, 19 nt, Artificial Sequence
  Description of Artificial Sequence: Synthetic oligonucleotide
  Sense strand starting at position 820 of SEQ ID NO: 1884699
ucuagaaugaggcauugua

SEQ ID NO: 2285225 - RNA, 19 nt, Artificial Sequence
  Description of Artificial Sequence: Synthetic oligonucleotide
  Antisense strand to SEQ ID NO: 2285224
uacaaugccucauucuaga

SEQ ID NO: 2285226 - RNA, 19 nt, Artificial Sequence
  Description of Artificial Sequence: Synthetic oligonucleotide
  Sense strand starting at position 855 of SEQ ID NO: 1884699
aguaguguauuuguacgaa

SEQ ID NO: 2285227 - RNA, 19 nt, Artificial Sequence
  Description of Artificial Sequence: Synthetic oligonucleotide
  Antisense strand to SEQ ID NO: 2285226
uucguacaaauacacuacu

SEQ ID NO: 2285228 - RNA, 19 nt, Artificial Sequence
  Description of Artificial Sequence: Synthetic oligonucleotide
  Sense strand starting at position 858 of SEQ ID NO: 1884699
aguguauuuguacgaaguu

SEQ ID NO: 2285229 - RNA, 19 nt, Artificial Sequence
  Description of Artificial Sequence: Synthetic oligonucleotide
  Antisense strand to SEQ ID NO: 2285228
aacuucguacaaauacacu

SEQ ID NO: 2285230 - RNA, 19 nt, Artificial Sequence
  Description of Artificial Sequence: Synthetic oligonucleotide
  Sense strand starting at position 964 of SEQ ID NO: 1884699
ggaucuaccugguucucaa

SEQ ID NO: 2285231 - RNA, 19 nt, Artificial Sequence
  Description of Artificial Sequence: Synthetic oligonucleotide
  Antisense strand to SEQ ID NO: 2285230
uugagaaccagguagaucc

SEQ ID NO: 2285232 - RNA, 19 nt, Artificial Sequence
  Description of Artificial Sequence: Synthetic oligonucleotide
  Sense strand starting at position 1071 of SEQ ID NO: 1884699
guagaaauaccagguuuaa

SEQ ID NO: 2285233 - RNA, 19 nt, Artificial Sequence
  Description of Artificial Sequence: Synthetic oligonucleotide
  Antisense strand to SEQ ID NO: 2285232
uuaaaccugguauuucuac

SEQ ID NO: 2285234 - RNA, 19 nt, Artificial Sequence
  Description of Artificial Sequence: Synthetic oligonucleotide
  Sense strand starting at position 1195 of SEQ ID NO: 1884699
gugcaauuaugacugaacu

SEQ ID NO: 2285235 - RNA, 19 nt, Artificial Sequence
  Description of Artificial Sequence: Synthetic oligonucleotide
  Antisense strand to SEQ ID NO: 2285234
aguucagucauaauugcac

SEQ ID NO: 2285236 - RNA, 19 nt, Artificial Sequence
  Description of Artificial Sequence: Synthetic oligonucleotide
  Sense strand starting at position 1196 of SEQ ID NO: 1884699
ugcaauuaugacugaacug

SEQ ID NO: 2285237 - RNA, 19 nt, Artificial Sequence
  Description of Artificial Sequence: Synthetic oligonucleotide
  Antisense strand to SEQ ID NO: 2285236
caguucagucauaauugca

SEQ ID NO: 2285238 - RNA, 19 nt, Artificial Sequence
  Description of Artificial Sequence: Synthetic oligonucleotide
  Sense strand starting at position 1236 of SEQ ID NO: 1884699
ugcaauauugcugagaaau

SEQ ID NO: 2285239 - RNA, 19 nt, Artificial Sequence
  Description of Artificial Sequence: Synthetic oligonucleotide
  Antisense strand to SEQ ID NO: 2285238
auuucucagcaauauugca

SEQ ID NO: 2285240 - RNA, 19 nt, Artificial Sequence
  Description of Artificial Sequence: Synthetic oligonucleotide
  Sense strand starting at position 1533 of SEQ ID NO: 1884699
acagguuuacgugacuuua

SEQ ID NO: 2285241 - RNA, 19 nt, Artificial Sequence
  Description of Artificial Sequence: Synthetic oligonucleotide
  Antisense strand to SEQ ID NO: 2285240
uaaagucacguaaaccugu

SEQ ID NO: 2285242 - RNA, 19 nt, Artificial Sequence
  Description of Artificial Sequence: Synthetic oligonucleotide
  Sense strand starting at position 1552 of SEQ ID NO: 1884699
ggaugaaauauguguaacu

SEQ ID NO: 2285243 - RNA, 19 nt, Artificial Sequence
  Description of Artificial Sequence: Synthetic oligonucleotide
  Antisense strand to SEQ ID NO: 2285242
aguuacacauauuucaucc

SEQ ID NO: 2285244 - RNA, 19 nt, Artificial Sequence
  Description of Artificial Sequence: Synthetic oligonucleotide
  Sense strand starting at position 1553 of SEQ ID NO: 1884699
gaugaaauauguguaacug

SEQ ID NO: 2285245 - RNA, 19 nt, Artificial Sequence
  Description of Artificial Sequence: Synthetic oligonucleotide
  Antisense strand to SEQ ID NO: 2285244
caguuacacauauuucauc

SEQ ID NO: 2285246 - RNA, 19 nt, Artificial Sequence
  Description of Artificial Sequence: Synthetic oligonucleotide
  Sense strand starting at position 1569 of SEQ ID NO: 1884699
cugccaguugaauaaugau

SEQ ID NO: 2285247 - RNA, 19 nt, Artificial Sequence
  Description of Artificial Sequence: Synthetic oligonucleotide
  Antisense strand to SEQ ID NO: 2285246
aucauuauucaacuggcag

SEQ ID NO: 2285248 - RNA, 19 nt, Artificial Sequence
  Description of Artificial Sequence: Synthetic oligonucleotide
  Sense strand starting at position 1699 of SEQ ID NO: 1884699
uguguuauaccugaaauac

SEQ ID NO: 2285249 - RNA, 19 nt, Artificial Sequence
  Description of Artificial Sequence: Synthetic oligonucleotide
  Antisense strand to SEQ ID NO: 2285248
guauuucagguauaacaca

SEQ ID NO: 2285250 - RNA, 19 nt, Artificial Sequence
  Description of Artificial Sequence: Synthetic oligonucleotide
  Sense strand starting at position 1708 of SEQ ID NO: 1884699
ccugaaauacugggauggu

SEQ ID NO: 2285251 - RNA, 19 nt, Artificial Sequence
  Description of Artificial Sequence: Synthetic oligonucleotide
  Antisense strand to SEQ ID NO: 2285250
accaucccaguauuucagg

SEQ ID NO: 2285252 - RNA, 19 nt, Artificial Sequence
  Description of Artificial Sequence: Synthetic oligonucleotide
  Sense strand starting at position 1711 of SEQ ID NO: 1884699
gaaauacugggauggugua

SEQ ID NO: 2285253 - RNA, 19 nt, Artificial Sequence
  Description of Artificial Sequence: Synthetic oligonucleotide
  Antisense strand to SEQ ID NO: 2285252
uacaccaucccaguauuuc

SEQ ID NO: 2285254 - RNA, 19 nt, Artificial Sequence
  Description of Artificial Sequence: Synthetic oligonucleotide
  Sense strand starting at position 1748 of SEQ ID NO: 1884699
uugaguccuugauuauuau

SEQ ID NO: 2285255 - RNA, 19 nt, Artificial Sequence
  Description of Artificial Sequence: Synthetic oligonucleotide
  Antisense strand to SEQ ID NO: 2285254
auaauaaucaaggacucaa

SEQ ID NO: 2285256 - RNA, 19 nt, Artificial Sequence
  Description of Artificial Sequence: Synthetic oligonucleotide
  Sense strand starting at position 1749 of SEQ ID NO: 1884699
ugaguccuugauuauuaua

SEQ ID NO: 2285257 - RNA, 19 nt, Artificial Sequence
  Description of Artificial Sequence: Synthetic oligonucleotide
  Antisense strand to SEQ ID NO: 2285256
uauaauaaucaaggacuca

SEQ ID NO: 2285258 - RNA, 19 nt, Artificial Sequence
  Description of Artificial Sequence: Synthetic oligonucleotide
  Sense strand starting at position 1751 of SEQ ID NO: 1884699
aguccuugauuauuauaag

SEQ ID NO: 2285259 - RNA, 19 nt, Artificial Sequence
  Description of Artificial Sequence: Synthetic oligonucleotide
  Antisense strand to SEQ ID NO: 2285258
cuuauaauaaucaaggacu

SEQ ID NO: 2285260 - RNA, 19 nt, Artificial Sequence
  Description of Artificial Sequence: Synthetic oligonucleotide
  Sense strand starting at position 1852 of SEQ ID NO: 1884699
aggauacauuuccaguuau

SEQ ID NO: 2285261 - RNA, 19 nt, Artificial Sequence
  Description of Artificial Sequence: Synthetic oligonucleotide
  Antisense strand to SEQ ID NO: 2285260
auaacuggaaauguauccu

SEQ ID NO: 2285262 - RNA, 19 nt, Artificial Sequence
  Description of Artificial Sequence: Synthetic oligonucleotide
  Sense strand starting at position 1898 of SEQ ID NO: 1884699
agauccaguuuauuauaca

SEQ ID NO: 2285263 - RNA, 19 nt, Artificial Sequence
  Description of Artificial Sequence: Synthetic oligonucleotide
  Antisense strand to SEQ ID NO: 2285262
uguauaauaaacuggaucu

SEQ ID NO: 2285264 - RNA, 19 nt, Artificial Sequence
  Description of Artificial Sequence: Synthetic oligonucleotide
  Sense strand starting at position 2054 of SEQ ID NO: 1884699
gcgaucacucaagaauggu

SEQ ID NO: 2285265 - RNA, 19 nt, Artificial Sequence
  Description of Artificial Sequence: Synthetic oligonucleotide
  Antisense strand to SEQ ID NO: 2285264
accauucuugagugaucgc

SEQ ID NO: 2285266 - RNA, 19 nt, Artificial Sequence
  Description of Artificial Sequence: Synthetic oligonucleotide
  Sense strand starting at position 2083 of SEQ ID NO: 1884699
ggaguaugccaauaccuaa

SEQ ID NO: 2285267 - RNA, 19 nt, Artificial Sequence
  Description of Artificial Sequence: Synthetic oligonucleotide
  Antisense strand to SEQ ID NO: 2285266
uuagguauuggcauacucc

SEQ ID NO: 2285268 - RNA, 19 nt, Artificial Sequence
  Description of Artificial Sequence: Synthetic oligonucleotide
  Sense strand starting at position 2108 of SEQ ID NO: 1884699
aaaguagauuaucugguuu

SEQ ID NO: 2285269 - RNA, 19 nt, Artificial Sequence
  Description of Artificial Sequence: Synthetic oligonucleotide
  Antisense strand to SEQ ID NO: 2285268
aaaccagauaaucuacuuu

SEQ ID NO: 2285270 - RNA, 19 nt, Artificial Sequence
  Description of Artificial Sequence: Synthetic oligonucleotide
  Sense strand starting at position 2197 of SEQ ID NO: 1884699
acaauaguccugugaguaa

SEQ ID NO: 2285271 - RNA, 19 nt, Artificial Sequence
  Description of Artificial Sequence: Synthetic oligonucleotide
  Antisense strand to SEQ ID NO: 2285270
uuacucacaggacuauugu

SEQ ID NO: 2285272 - RNA, 19 nt, Artificial Sequence
  Description of Artificial Sequence: Synthetic oligonucleotide
  Sense strand starting at position 2201 of SEQ ID NO: 1884699
uaguccugugaguaaagua

SEQ ID NO: 2285273 - RNA, 19 nt, Artificial Sequence
  Description of Artificial Sequence: Synthetic oligonucleotide
  Antisense strand to SEQ ID NO: 2285272
uacuuuacucacaggacua

SEQ ID NO: 2285274 - RNA, 19 nt, Artificial Sequence
  Description of Artificial Sequence: Synthetic oligonucleotide
  Sense strand starting at position 2363 of SEQ ID NO: 1884699
gugauucuugcugaaucac

SEQ ID NO: 2285275 - RNA, 19 nt, Artificial Sequence
  Description of Artificial Sequence: Synthetic oligonucleotide
  Antisense strand to SEQ ID NO: 2285274
gugauucagcaagaaucac

SEQ ID NO: 2285276 - RNA, 19 nt, Artificial Sequence
  Description of Artificial Sequence: Synthetic oligonucleotide
  Sense strand starting at position 2907 of SEQ ID NO: 1884699
cgacuuuggcauuauauaa

SEQ ID NO: 2285277 - RNA, 19 nt, Artificial Sequence
  Description of Artificial Sequence: Synthetic oligonucleotide
  Antisense strand to SEQ ID NO: 2285276
uuauauaaugccaaagucg

SEQ ID NO: 2285278 - RNA, 19 nt, Artificial Sequence
  Description of Artificial Sequence: Synthetic oligonucleotide
  Sense strand starting at position 2965 of SEQ ID NO: 1884699
uuaugaccuguguaaucau

SEQ ID NO: 2285279 - RNA, 19 nt, Artificial Sequence
  Description of Artificial Sequence: Synthetic oligonucleotide
  Antisense strand to SEQ ID NO: 2285278
augauuacacaggucauaa

SEQ ID NO: 2285280 - RNA, 19 nt, Artificial Sequence
  Description of Artificial Sequence: Synthetic oligonucleotide
  Sense strand starting at position 3229 of SEQ ID NO: 1884699
guagaaaugucccugaaua

SEQ ID NO: 2285281 - RNA, 19 nt, Artificial Sequence
  Description of Artificial Sequence: Synthetic oligonucleotide
  Antisense strand to SEQ ID NO: 2285280
uauucagggacauuucuac

SEQ ID NO: 2285282 - RNA, 19 nt, Artificial Sequence
  Description of Artificial Sequence: Synthetic oligonucleotide
  Sense strand starting at position 3251 of SEQ ID NO: 1884699
ugaaacuugcucugacaac

SEQ ID NO: 2285283 - RNA, 19 nt, Artificial Sequence
  Description of Artificial Sequence: Synthetic oligonucleotide
  Antisense strand to SEQ ID NO: 2285282
guugucagagcaaguuuca

SEQ ID NO: 2285284 - RNA, 19 nt, Artificial Sequence
  Description of Artificial Sequence: Synthetic oligonucleotide
  Sense strand starting at position 3379 of SEQ ID NO: 1884699
uuguguauaucaucaacau

SEQ ID NO: 2285285 - RNA, 19 nt, Artificial Sequence
  Description of Artificial Sequence: Synthetic oligonucleotide
  Antisense strand to SEQ ID NO: 2285284
auguugaugauauacacaa

SEQ ID NO: 2285286 - RNA, 19 nt, Artificial Sequence
  Description of Artificial Sequence: Synthetic oligonucleotide
  Sense strand starting at position 3380 of SEQ ID NO: 1884699
uguguauaucaucaacaug

SEQ ID NO: 2285287 - RNA, 19 nt, Artificial Sequence
  Description of Artificial Sequence: Synthetic oligonucleotide
  Antisense strand to SEQ ID NO: 2285286
cauguugaugauauacaca

SEQ ID NO: 2285288 - RNA, 19 nt, Artificial Sequence
  Description of Artificial Sequence: Synthetic oligonucleotide
  Sense strand starting at position 3449 of SEQ ID NO: 1884699
cuguuuaucuauucuacag

SEQ ID NO: 2285289 - RNA, 19 nt, Artificial Sequence
  Description of Artificial Sequence: Synthetic oligonucleotide
  Antisense strand to SEQ ID NO: 2285288
cuguagaauagauaaacag

SEQ ID NO: 2285290 - RNA, 19 nt, Artificial Sequence
  Description of Artificial Sequence: Synthetic oligonucleotide
  Sense strand starting at position 3901 of SEQ ID NO: 1884699
cuuuguccacguuaaacaa

SEQ ID NO: 2285291 - RNA, 19 nt, Artificial Sequence
  Description of Artificial Sequence: Synthetic oligonucleotide
  Antisense strand to SEQ ID NO: 2285290
uuguuuaacguggacaaag

SEQ ID NO: 2285292 - RNA, 19 nt, Artificial Sequence
  Description of Artificial Sequence: Synthetic oligonucleotide
  Sense strand starting at position 3970 of SEQ ID NO: 1884699
cucuaucguggugaucaaa

SEQ ID NO: 2285293 - RNA, 19 nt, Artificial Sequence
  Description of Artificial Sequence: Synthetic oligonucleotide
  Antisense strand to SEQ ID NO: 2285292
uuugaucaccacgauagag

SEQ ID NO: 2285294 - RNA, 19 nt, Artificial Sequence
  Description of Artificial Sequence: Synthetic oligonucleotide
  Sense strand starting at position 388 of SEQ ID NO: 1884700
gggucuaagguaggguuaa

SEQ ID NO: 2285295 - RNA, 19 nt, Artificial Sequence
  Description of Artificial Sequence: Synthetic oligonucleotide
  Antisense strand to SEQ ID NO: 2285294
uuaacccuaccuuagaccc

SEQ ID NO: 2285296 - RNA, 19 nt, Artificial Sequence
  Description of Artificial Sequence: Synthetic oligonucleotide
  Sense strand starting at position 766 of SEQ ID NO: 1884700
auaaauuguuauucgagga

SEQ ID NO: 2285297 - RNA, 19 nt, Artificial Sequence
  Description of Artificial Sequence: Synthetic oligonucleotide
  Antisense strand to SEQ ID NO: 2285296
uccucgaauaacaauuuau

SEQ ID NO: 2285298 - RNA, 19 nt, Artificial Sequence
  Description of Artificial Sequence: Synthetic oligonucleotide
  Sense strand starting at position 771 of SEQ ID NO: 1884700
uuguuauucgaggaauucc

SEQ ID NO: 2285299 - RNA, 19 nt, Artificial Sequence
  Description of Artificial Sequence: Synthetic oligonucleotide
  Antisense strand to SEQ ID NO: 2285298
ggaauuccucgaauaacaa

SEQ ID NO: 2285300 - RNA, 19 nt, Artificial Sequence
  Description of Artificial Sequence: Synthetic oligonucleotide
  Sense strand starting at position 865 of SEQ ID NO: 1884700
caaguuugcccugaagaag

SEQ ID NO: 2285301 - RNA, 19 nt, Artificial Sequence
  Description of Artificial Sequence: Synthetic oligonucleotide
  Antisense strand to SEQ ID NO: 2285300
cuucuucagggcaaacuug

SEQ ID NO: 2285302 - RNA, 19 nt, Artificial Sequence
  Description of Artificial Sequence: Synthetic oligonucleotide
  Sense strand starting at position 917 of SEQ ID NO: 1884700
ggcaacaauccuggauuau

SEQ ID NO: 2285303 - RNA, 19 nt, Artificial Sequence
  Description of Artificial Sequence: Synthetic oligonucleotide
  Antisense strand to SEQ ID NO: 2285302
auaauccaggauuguugcc

SEQ ID NO: 2285304 - RNA, 19 nt, Artificial Sequence
  Description of Artificial Sequence: Synthetic oligonucleotide
  Sense strand starting at position 918 of SEQ ID NO: 1884700
gcaacaauccuggauuauu

SEQ ID NO: 2285305 - RNA, 19 nt, Artificial Sequence
  Description of Artificial Sequence: Synthetic oligonucleotide
  Antisense strand to SEQ ID NO: 2285304
aauaauccaggauuguugc

SEQ ID NO: 2285306 - RNA, 19 nt, Artificial Sequence
  Description of Artificial Sequence: Synthetic oligonucleotide
  Sense strand starting at position 970 of SEQ ID NO: 1884700
aaacauuaggagugcuaug

SEQ ID NO: 2285307 - RNA, 19 nt, Artificial Sequence
  Description of Artificial Sequence: Synthetic oligonucleotide
  Antisense strand to SEQ ID NO: 2285306
cauagcacuccuaauguuu

SEQ ID NO: 2285308 - RNA, 19 nt, Artificial Sequence
  Description of Artificial Sequence: Synthetic oligonucleotide
  Sense strand starting at position 1051 of SEQ ID NO: 1884700
auaagcccucuuugaaaug

SEQ ID NO: 2285309 - RNA, 19 nt, Artificial Sequence
  Description of Artificial Sequence: Synthetic oligonucleotide
  Antisense strand to SEQ ID NO: 2285308
cauuucaaagagggcuuau

SEQ ID NO: 2285310 - RNA, 19 nt, Artificial Sequence
  Description of Artificial Sequence: Synthetic oligonucleotide
  Sense strand starting at position 1203 of SEQ ID NO: 1884700
augaaugagucccuagaac

SEQ ID NO: 2285311 - RNA, 19 nt, Artificial Sequence
  Description of Artificial Sequence: Synthetic oligonucleotide
  Antisense strand to SEQ ID NO: 2285310
guucuagggacucauucau

SEQ ID NO: 2285312 - RNA, 19 nt, Artificial Sequence
  Description of Artificial Sequence: Synthetic oligonucleotide
  Sense strand starting at position 1216 of SEQ ID NO: 1884700
uagaacgagccugaguuaa

SEQ ID NO: 2285313 - RNA, 19 nt, Artificial Sequence
  Description of Artificial Sequence: Synthetic oligonucleotide
  Antisense strand to SEQ ID NO: 2285312
uuaacucaggcucguucua

SEQ ID NO: 2285314 - RNA, 19 nt, Artificial Sequence
  Description of Artificial Sequence: Synthetic oligonucleotide
  Sense strand starting at position 1472 of SEQ ID NO: 1884700
uggucauguccacagcaaa

SEQ ID NO: 2285315 - RNA, 19 nt, Artificial Sequence
  Description of Artificial Sequence: Synthetic oligonucleotide
  Antisense strand to SEQ ID NO: 2285314
uuugcuguggacaugacca

SEQ ID NO: 2285316 - RNA, 19 nt, Artificial Sequence
  Description of Artificial Sequence: Synthetic oligonucleotide
  Sense strand starting at position 1589 of SEQ ID NO: 1884700
ggcuucugucaucucguuu

SEQ ID NO: 2285317 - RNA, 19 nt, Artificial Sequence
  Description of Artificial Sequence: Synthetic oligonucleotide
  Antisense strand to SEQ ID NO: 2285316
aaacgagaugacagaagcc

SEQ ID NO: 2285318 - RNA, 19 nt, Artificial Sequence
  Description of Artificial Sequence: Synthetic oligonucleotide
  Sense strand starting at position 1722 of SEQ ID NO: 1884700
guuccaaaguauccugaaa

SEQ ID NO: 2285319 - RNA, 19 nt, Artificial Sequence
  Description of Artificial Sequence: Synthetic oligonucleotide
  Antisense strand to SEQ ID NO: 2285318
uuucaggauacuuuggaac

SEQ ID NO: 2285320 - RNA, 19 nt, Artificial Sequence
  Description of Artificial Sequence: Synthetic oligonucleotide
  Sense strand starting at position 2053 of SEQ ID NO: 1884700
cuccuaaguggugauagau

SEQ ID NO: 2285321 - RNA, 19 nt, Artificial Sequence
  Description of Artificial Sequence: Synthetic oligonucleotide
  Antisense strand to SEQ ID NO: 2285320
aucuaucaccacuuaggag

SEQ ID NO: 2285322 - RNA, 19 nt, Artificial Sequence
  Description of Artificial Sequence: Synthetic oligonucleotide
  Sense strand starting at position 2078 of SEQ ID NO: 1884700
auagcauugcuagauaaau

SEQ ID NO: 2285323 - RNA, 19 nt, Artificial Sequence
  Description of Artificial Sequence: Synthetic oligonucleotide
  Antisense strand to SEQ ID NO: 2285322
auuuaucuagcaaugcuau

SEQ ID NO: 2285324 - RNA, 19 nt, Artificial Sequence
  Description of Artificial Sequence: Synthetic oligonucleotide
  Sense strand starting at position 2537 of SEQ ID NO: 1884700
gugcccauucucuagaaug

SEQ ID NO: 2285325 - RNA, 19 nt, Artificial Sequence
  Description of Artificial Sequence: Synthetic oligonucleotide
  Antisense strand to SEQ ID NO: 2285324
cauucuagagaaugggcac

SEQ ID NO: 2285326 - RNA, 19 nt, Artificial Sequence
  Description of Artificial Sequence: Synthetic oligonucleotide
  Sense strand starting at position 2539 of SEQ ID NO: 1884700
gcccauucucuagaaugag

SEQ ID NO: 2285327 - RNA, 19 nt, Artificial Sequence
  Description of Artificial Sequence: Synthetic oligonucleotide
  Antisense strand to SEQ ID NO: 2285326
cucauucuagagaaugggc

SEQ ID NO: 2285328 - RNA, 19 nt, Artificial Sequence
  Description of Artificial Sequence: Synthetic oligonucleotide
  Sense strand starting at position 2547 of SEQ ID NO: 1884700
ucuagaaugaggcauugua

SEQ ID NO: 2285329 - RNA, 19 nt, Artificial Sequence
  Description of Artificial Sequence: Synthetic oligonucleotide
  Antisense strand to SEQ ID NO: 2285328
uacaaugccucauucuaga

SEQ ID NO: 2285330 - RNA, 19 nt, Artificial Sequence
  Description of Artificial Sequence: Synthetic oligonucleotide
  Sense strand starting at position 2582 of SEQ ID NO: 1884700
aguaguguauuuguacgaa

SEQ ID NO: 2285331 - RNA, 19 nt, Artificial Sequence
  Description of Artificial Sequence: Synthetic oligonucleotide
  Antisense strand to SEQ ID NO: 2285330
uucguacaaauacacuacu

SEQ ID NO: 2285332 - RNA, 19 nt, Artificial Sequence
  Description of Artificial Sequence: Synthetic oligonucleotide
  Sense strand starting at position 2585 of SEQ ID NO: 1884700
aguguauuuguacgaaguu

SEQ ID NO: 2285333 - RNA, 19 nt, Artificial Sequence
  Description of Artificial Sequence: Synthetic oligonucleotide
  Antisense strand to SEQ ID NO: 2285332
aacuucguacaaauacacu

SEQ ID NO: 2285334 - RNA, 19 nt, Artificial Sequence
  Description of Artificial Sequence: Synthetic oligonucleotide
  Sense strand starting at position 2691 of SEQ ID NO: 1884700
ggaucuaccugguucucaa

SEQ ID NO: 2285335 - RNA, 19 nt, Artificial Sequence
  Description of Artificial Sequence: Synthetic oligonucleotide
  Antisense strand to SEQ ID NO: 2285334
uugagaaccagguagaucc

SEQ ID NO: 2285336 - RNA, 19 nt, Artificial Sequence
  Description of Artificial Sequence: Synthetic oligonucleotide
  Sense strand starting at position 2798 of SEQ ID NO: 1884700
guagaaauaccagguuuaa

SEQ ID NO: 2285337 - RNA, 19 nt, Artificial Sequence
  Description of Artificial Sequence: Synthetic oligonucleotide
  Antisense strand to SEQ ID NO: 2285336
uuaaaccugguauuucuac

SEQ ID NO: 2285338 - RNA, 19 nt, Artificial Sequence
  Description of Artificial Sequence: Synthetic oligonucleotide
  Sense strand starting at position 2922 of SEQ ID NO: 1884700
gugcaauuaugacugaacu

SEQ ID NO: 2285339 - RNA, 19 nt, Artificial Sequence
  Description of Artificial Sequence: Synthetic oligonucleotide
  Antisense strand to SEQ ID NO: 2285338
aguucagucauaauugcac

SEQ ID NO: 2285340 - RNA, 19 nt, Artificial Sequence
  Description of Artificial Sequence: Synthetic oligonucleotide
  Sense strand starting at position 2923 of SEQ ID NO: 1884700
ugcaauuaugacugaacug

SEQ ID NO: 2285341 - RNA, 19 nt, Artificial Sequence
  Description of Artificial Sequence: Synthetic oligonucleotide
  Antisense strand to SEQ ID NO: 2285340
caguucagucauaauugca

SEQ ID NO: 2285342 - RNA, 19 nt, Artificial Sequence
  Description of Artificial Sequence: Synthetic oligonucleotide
  Sense strand starting at position 2963 of SEQ ID NO: 1884700
ugcaauauugcugagaaau

SEQ ID NO: 2285343 - RNA, 19 nt, Artificial Sequence
  Description of Artificial Sequence: Synthetic oligonucleotide
  Antisense strand to SEQ ID NO: 2285342
auuucucagcaauauugca

SEQ ID NO: 2285344 - RNA, 19 nt, Artificial Sequence
  Description of Artificial Sequence: Synthetic oligonucleotide
  Sense strand starting at position 3260 of SEQ ID NO: 1884700
acagguuuacgugacuuua

SEQ ID NO: 2285345 - RNA, 19 nt, Artificial Sequence
  Description of Artificial Sequence: Synthetic oligonucleotide
  Antisense strand to SEQ ID NO: 2285344
uaaagucacguaaaccugu

SEQ ID NO: 2285346 - RNA, 19 nt, Artificial Sequence
  Description of Artificial Sequence: Synthetic oligonucleotide
  Sense strand starting at position 3279 of SEQ ID NO: 1884700
ggaugaaauauguguaacu

SEQ ID NO: 2285347 - RNA, 19 nt, Artificial Sequence
  Description of Artificial Sequence: Synthetic oligonucleotide
  Antisense strand to SEQ ID NO: 2285346
aguuacacauauuucaucc

SEQ ID NO: 2285348 - RNA, 19 nt, Artificial Sequence
  Description of Artificial Sequence: Synthetic oligonucleotide
  Sense strand starting at position 3280 of SEQ ID NO: 1884700
gaugaaauauguguaacug

SEQ ID NO: 2285349 - RNA, 19 nt, Artificial Sequence
  Description of Artificial Sequence: Synthetic oligonucleotide
  Antisense strand to SEQ ID NO: 2285348
caguuacacauauuucauc

SEQ ID NO: 2285350 - RNA, 19 nt, Artificial Sequence
  Description of Artificial Sequence: Synthetic oligonucleotide
  Sense strand starting at position 3296 of SEQ ID NO: 1884700
cugccaguugaauaaugau

SEQ ID NO: 2285351 - RNA, 19 nt, Artificial Sequence
  Description of Artificial Sequence: Synthetic oligonucleotide
  Antisense strand to SEQ ID NO: 2285350
aucauuauucaacuggcag

SEQ ID NO: 2285352 - RNA, 19 nt, Artificial Sequence
  Description of Artificial Sequence: Synthetic oligonucleotide
  Sense strand starting at position 3426 of SEQ ID NO: 1884700
uguguuauaccugaaauac

SEQ ID NO: 2285353 - RNA, 19 nt, Artificial Sequence
  Description of Artificial Sequence: Synthetic oligonucleotide
  Antisense strand to SEQ ID NO: 2285352
guauuucagguauaacaca

SEQ ID NO: 2285354 - RNA, 19 nt, Artificial Sequence
  Description of Artificial Sequence: Synthetic oligonucleotide
  Sense strand starting at position 3435 of SEQ ID NO: 1884700
ccugaaauacugggauggu

SEQ ID NO: 2285355 - RNA, 19 nt, Artificial Sequence
  Description of Artificial Sequence: Synthetic oligonucleotide
  Antisense strand to SEQ ID NO: 2285354
accaucccaguauuucagg

SEQ ID NO: 2285356 - RNA, 19 nt, Artificial Sequence
  Description of Artificial Sequence: Synthetic oligonucleotide
  Sense strand starting at position 3438 of SEQ ID NO: 1884700
gaaauacugggauggugua

SEQ ID NO: 2285357 - RNA, 19 nt, Artificial Sequence
  Description of Artificial Sequence: Synthetic oligonucleotide
  Antisense strand to SEQ ID NO: 2285356
uacaccaucccaguauuuc

SEQ ID NO: 2285358 - RNA, 19 nt, Artificial Sequence
  Description of Artificial Sequence: Synthetic oligonucleotide
  Sense strand starting at position 3475 of SEQ ID NO: 1884700
uugaguccuugauuauuau

SEQ ID NO: 2285359 - RNA, 19 nt, Artificial Sequence
  Description of Artificial Sequence: Synthetic oligonucleotide
  Antisense strand to SEQ ID NO: 2285358
auaauaaucaaggacucaa

SEQ ID NO: 2285360 - RNA, 19 nt, Artificial Sequence
  Description of Artificial Sequence: Synthetic oligonucleotide
  Sense strand starting at position 3476 of SEQ ID NO: 1884700
ugaguccuugauuauuaua

SEQ ID NO: 2285361 - RNA, 19 nt, Artificial Sequence
  Description of Artificial Sequence: Synthetic oligonucleotide
  Antisense strand to SEQ ID NO: 2285360
uauaauaaucaaggacuca

SEQ ID NO: 2285362 - RNA, 19 nt, Artificial Sequence
  Description of Artificial Sequence: Synthetic oligonucleotide
  Sense strand starting at position 3478 of SEQ ID NO: 1884700
aguccuugauuauuauaag

SEQ ID NO: 2285363 - RNA, 19 nt, Artificial Sequence
  Description of Artificial Sequence: Synthetic oligonucleotide
  Antisense strand to SEQ ID NO: 2285362
cuuauaauaaucaaggacu

SEQ ID NO: 2285364 - RNA, 19 nt, Artificial Sequence
  Description of Artificial Sequence: Synthetic oligonucleotide
  Sense strand starting at position 3625 of SEQ ID NO: 1884700
agauccaguuuauuauaca

SEQ ID NO: 2285365 - RNA, 19 nt, Artificial Sequence
  Description of Artificial Sequence: Synthetic oligonucleotide
  Antisense strand to SEQ ID NO: 2285364
uguauaauaaacuggaucu

SEQ ID NO: 2285366 - RNA, 19 nt, Artificial Sequence
  Description of Artificial Sequence: Synthetic oligonucleotide
  Sense strand starting at position 3781 of SEQ ID NO: 1884700
gcgaucacucaagaauggu

SEQ ID NO: 2285367 - RNA, 19 nt, Artificial Sequence
  Description of Artificial Sequence: Synthetic oligonucleotide
  Antisense strand to SEQ ID NO: 2285366
accauucuugagugaucgc

SEQ ID NO: 2285368 - RNA, 19 nt, Artificial Sequence
  Description of Artificial Sequence: Synthetic oligonucleotide
  Sense strand starting at position 3810 of SEQ ID NO: 1884700
ggaguaugccaauaccuaa

SEQ ID NO: 2285369 - RNA, 19 nt, Artificial Sequence
  Description of Artificial Sequence: Synthetic oligonucleotide
  Antisense strand to SEQ ID NO: 2285368
uuagguauuggcauacucc

SEQ ID NO: 2285370 - RNA, 19 nt, Artificial Sequence
  Description of Artificial Sequence: Synthetic oligonucleotide
  Sense strand starting at position 3835 of SEQ ID NO: 1884700
aaaguagauuaucugguuu

SEQ ID NO: 2285371 - RNA, 19 nt, Artificial Sequence
  Description of Artificial Sequence: Synthetic oligonucleotide
  Antisense strand to SEQ ID NO: 2285370
aaaccagauaaucuacuuu

SEQ ID NO: 2285372 - RNA, 19 nt, Artificial Sequence
  Description of Artificial Sequence: Synthetic oligonucleotide
  Sense strand starting at position 3928 of SEQ ID NO: 1884700
uaguccugugaguaaagua

SEQ ID NO: 2285373 - RNA, 19 nt, Artificial Sequence
  Description of Artificial Sequence: Synthetic oligonucleotide
  Antisense strand to SEQ ID NO: 2285372
uacuuuacucacaggacua

SEQ ID NO: 2285374 - RNA, 19 nt, Artificial Sequence
  Description of Artificial Sequence: Synthetic oligonucleotide
  Sense strand starting at position 6 of SEQ ID NO: 1884701
gcaugauaauggcuacaag

SEQ ID NO: 2285375 - RNA, 19 nt, Artificial Sequence
  Description of Artificial Sequence: Synthetic oligonucleotide
  Antisense strand to SEQ ID NO: 2285374
cuuguagccauuaucaugc

SEQ ID NO: 2285376 - RNA, 19 nt, Artificial Sequence
  Description of Artificial Sequence: Synthetic oligonucleotide
  Sense strand starting at position 101 of SEQ ID NO: 1884701
cuaucuacauacuugaguu

SEQ ID NO: 2285377 - RNA, 19 nt, Artificial Sequence
  Description of Artificial Sequence: Synthetic oligonucleotide
  Antisense strand to SEQ ID NO: 2285376
aacucaaguauguagauag

SEQ ID NO: 2285378 - RNA, 19 nt, Artificial Sequence
  Description of Artificial Sequence: Synthetic oligonucleotide
  Sense strand starting at position 105 of SEQ ID NO: 1884701
cuacauacuugaguuugga

SEQ ID NO: 2285379 - RNA, 19 nt, Artificial Sequence
  Description of Artificial Sequence: Synthetic oligonucleotide
  Antisense strand to SEQ ID NO: 2285378
uccaaacucaaguauguag

SEQ ID NO: 2285380 - RNA, 19 nt, Artificial Sequence
  Description of Artificial Sequence: Synthetic oligonucleotide
  Sense strand starting at position 108 of SEQ ID NO: 1884701
cauacuugaguuuggaaga

SEQ ID NO: 2285381 - RNA, 19 nt, Artificial Sequence
  Description of Artificial Sequence: Synthetic oligonucleotide
  Antisense strand to SEQ ID NO: 2285380
ucuuccaaacucaaguaug

SEQ ID NO: 2285382 - RNA, 19 nt, Artificial Sequence
  Description of Artificial Sequence: Synthetic oligonucleotide
  Sense strand starting at position 113 of SEQ ID NO: 1884701
uugaguuuggaagacaugu

SEQ ID NO: 2285383 - RNA, 19 nt, Artificial Sequence
  Description of Artificial Sequence: Synthetic oligonucleotide
  Antisense strand to SEQ ID NO: 2285382
acaugucuuccaaacucaa

SEQ ID NO: 2285384 - RNA, 19 nt, Artificial Sequence
  Description of Artificial Sequence: Synthetic oligonucleotide
  Sense strand starting at position 188 of SEQ ID NO: 1884701
ugagguuucucuuccaccu

SEQ ID NO: 2285385 - RNA, 19 nt, Artificial Sequence
  Description of Artificial Sequence: Synthetic oligonucleotide
  Antisense strand to SEQ ID NO: 2285384
agguggaagagaaaccuca

SEQ ID NO: 2285386 - RNA, 19 nt, Artificial Sequence
  Description of Artificial Sequence: Synthetic oligonucleotide
  Sense strand starting at position 356 of SEQ ID NO: 1884701
agaaccuucuauguuagga

SEQ ID NO: 2285387 - RNA, 19 nt, Artificial Sequence
  Description of Artificial Sequence: Synthetic oligonucleotide
  Antisense strand to SEQ ID NO: 2285386
uccuaacauagaagguucu

SEQ ID NO: 2285388 - RNA, 19 nt, Artificial Sequence
  Description of Artificial Sequence: Synthetic oligonucleotide
  Sense strand starting at position 867 of SEQ ID NO: 1884701
gugugacuaugggcaagaa

SEQ ID NO: 2285389 - RNA, 19 nt, Artificial Sequence
  Description of Artificial Sequence: Synthetic oligonucleotide
  Antisense strand to SEQ ID NO: 2285388
uucuugcccauagucacac

SEQ ID NO: 2285390 - RNA, 19 nt, Artificial Sequence
  Description of Artificial Sequence: Synthetic oligonucleotide
  Sense strand starting at position 935 of SEQ ID NO: 1884701
cuggguaguagugagaauu

SEQ ID NO: 2285391 - RNA, 19 nt, Artificial Sequence
  Description of Artificial Sequence: Synthetic oligonucleotide
  Antisense strand to SEQ ID NO: 2285390
aauucucacuacuacccag

SEQ ID NO: 2285392 - RNA, 19 nt, Artificial Sequence
  Description of Artificial Sequence: Synthetic oligonucleotide
  Sense strand starting at position 976 of SEQ ID NO: 1884701
auauuuaagcccuguguaa

SEQ ID NO: 2285393 - RNA, 19 nt, Artificial Sequence
  Description of Artificial Sequence: Synthetic oligonucleotide
  Antisense strand to SEQ ID NO: 2285392
uuacacagggcuuaaauau

SEQ ID NO: 2285394 - RNA, 19 nt, Artificial Sequence
  Description of Artificial Sequence: Synthetic oligonucleotide
  Sense strand starting at position 978 of SEQ ID NO: 1884701
auuuaagcccuguguaaau

SEQ ID NO: 2285395 - RNA, 19 nt, Artificial Sequence
  Description of Artificial Sequence: Synthetic oligonucleotide
  Antisense strand to SEQ ID NO: 2285394
auuuacacagggcuuaaau

SEQ ID NO: 2285396 - RNA, 19 nt, Artificial Sequence
  Description of Artificial Sequence: Synthetic oligonucleotide
  Sense strand starting at position 989 of SEQ ID NO: 1884701
guguaaauacauggugaca

SEQ ID NO: 2285397 - RNA, 19 nt, Artificial Sequence
  Description of Artificial Sequence: Synthetic oligonucleotide
  Antisense strand to SEQ ID NO: 2285396
ugucaccauguauuuacac

SEQ ID NO: 2285398 - RNA, 19 nt, Artificial Sequence
  Description of Artificial Sequence: Synthetic oligonucleotide
  Sense strand starting at position 1224 of SEQ ID NO: 1884701
gggacuagcucagauuucu

SEQ ID NO: 2285399 - RNA, 19 nt, Artificial Sequence
  Description of Artificial Sequence: Synthetic oligonucleotide
  Antisense strand to SEQ ID NO: 2285398
agaaaucugagcuaguccc

SEQ ID NO: 2285400 - RNA, 19 nt, Artificial Sequence
  Description of Artificial Sequence: Synthetic oligonucleotide
  Sense strand starting at position 1368 of SEQ ID NO: 1884701
acacauugauagguugagu

SEQ ID NO: 2285401 - RNA, 19 nt, Artificial Sequence
  Description of Artificial Sequence: Synthetic oligonucleotide
  Antisense strand to SEQ ID NO: 2285400
acucaaccuaucaaugugu

SEQ ID NO: 2285402 - RNA, 19 nt, Artificial Sequence
  Description of Artificial Sequence: Synthetic oligonucleotide
  Sense strand starting at position 1371 of SEQ ID NO: 1884701
cauugauagguugaguuga

SEQ ID NO: 2285403 - RNA, 19 nt, Artificial Sequence
  Description of Artificial Sequence: Synthetic oligonucleotide
  Antisense strand to SEQ ID NO: 2285402
ucaacucaaccuaucaaug

SEQ ID NO: 2285404 - RNA, 19 nt, Artificial Sequence
  Description of Artificial Sequence: Synthetic oligonucleotide
  Sense strand starting at position 1373 of SEQ ID NO: 1884701
uugauagguugaguugacu

SEQ ID NO: 2285405 - RNA, 19 nt, Artificial Sequence
  Description of Artificial Sequence: Synthetic oligonucleotide
  Antisense strand to SEQ ID NO: 2285404
agucaacucaaccuaucaa

SEQ ID NO: 2285406 - RNA, 19 nt, Artificial Sequence
  Description of Artificial Sequence: Synthetic oligonucleotide
  Sense strand starting at position 1472 of SEQ ID NO: 1884701
ugcugacaguguucagaga

SEQ ID NO: 2285407 - RNA, 19 nt, Artificial Sequence
  Description of Artificial Sequence: Synthetic oligonucleotide
  Antisense strand to SEQ ID NO: 2285406
ucucugaacacugucagca

SEQ ID NO: 2285408 - RNA, 19 nt, Artificial Sequence
  Description of Artificial Sequence: Synthetic oligonucleotide
  Sense strand starting at position 1473 of SEQ ID NO: 1884701
gcugacaguguucagagaa

SEQ ID NO: 2285409 - RNA, 19 nt, Artificial Sequence
  Description of Artificial Sequence: Synthetic oligonucleotide
  Antisense strand to SEQ ID NO: 2285408
uucucugaacacugucagc

SEQ ID NO: 2285410 - RNA, 19 nt, Artificial Sequence
  Description of Artificial Sequence: Synthetic oligonucleotide
  Sense strand starting at position 1588 of SEQ ID NO: 1884701
acggucuccuaugugaaca

SEQ ID NO: 2285411 - RNA, 19 nt, Artificial Sequence
  Description of Artificial Sequence: Synthetic oligonucleotide
  Antisense strand to SEQ ID NO: 2285410
uguucacauaggagaccgu

SEQ ID NO: 2285412 - RNA, 19 nt, Artificial Sequence
  Description of Artificial Sequence: Synthetic oligonucleotide
  Sense strand starting at position 1593 of SEQ ID NO: 1884701
cuccuaugugaacagcuau

SEQ ID NO: 2285413 - RNA, 19 nt, Artificial Sequence
  Description of Artificial Sequence: Synthetic oligonucleotide
  Antisense strand to SEQ ID NO: 2285412
auagcuguucacauaggag

SEQ ID NO: 2285414 - RNA, 19 nt, Artificial Sequence
  Description of Artificial Sequence: Synthetic oligonucleotide
  Sense strand starting at position 1712 of SEQ ID NO: 1884701
cuagauuaaugagacaaca

SEQ ID NO: 2285415 - RNA, 19 nt, Artificial Sequence
  Description of Artificial Sequence: Synthetic oligonucleotide
  Antisense strand to SEQ ID NO: 2285414
uguugucucauuaaucuag

SEQ ID NO: 2285416 - RNA, 19 nt, Artificial Sequence
  Description of Artificial Sequence: Synthetic oligonucleotide
  Sense strand starting at position 1802 of SEQ ID NO: 1884701
ucuggcucugccuaggauu

SEQ ID NO: 2285417 - RNA, 19 nt, Artificial Sequence
  Description of Artificial Sequence: Synthetic oligonucleotide
  Antisense strand to SEQ ID NO: 2285416
aauccuaggcagagccaga

SEQ ID NO: 2285418 - RNA, 19 nt, Artificial Sequence
  Description of Artificial Sequence: Synthetic oligonucleotide
  Sense strand starting at position 1862 of SEQ ID NO: 1884701
gcaagugcuccugaaagga

SEQ ID NO: 2285419 - RNA, 19 nt, Artificial Sequence
  Description of Artificial Sequence: Synthetic oligonucleotide
  Antisense strand to SEQ ID NO: 2285418
uccuuucaggagcacuugc

SEQ ID NO: 2285420 - RNA, 19 nt, Artificial Sequence
  Description of Artificial Sequence: Synthetic oligonucleotide
  Sense strand starting at position 1878 of SEQ ID NO: 1884701
ggaagagaugccugugagu

SEQ ID NO: 2285421 - RNA, 19 nt, Artificial Sequence
  Description of Artificial Sequence: Synthetic oligonucleotide
  Antisense strand to SEQ ID NO: 2285420
acucacaggcaucucuucc

SEQ ID NO: 2285422 - RNA, 19 nt, Artificial Sequence
  Description of Artificial Sequence: Synthetic oligonucleotide
  Sense strand starting at position 1880 of SEQ ID NO: 1884701
aagagaugccugugaguca

SEQ ID NO: 2285423 - RNA, 19 nt, Artificial Sequence
  Description of Artificial Sequence: Synthetic oligonucleotide
  Antisense strand to SEQ ID NO: 2285422
ugacucacaggcaucucuu

SEQ ID NO: 2285424 - RNA, 19 nt, Artificial Sequence
  Description of Artificial Sequence: Synthetic oligonucleotide
  Sense strand starting at position 1948 of SEQ ID NO: 1884701
ccuguaucaccugauacca

SEQ ID NO: 2285425 - RNA, 19 nt, Artificial Sequence
  Description of Artificial Sequence: Synthetic oligonucleotide
  Antisense strand to SEQ ID NO: 2285424
ugguaucaggugauacagg

SEQ ID NO: 2285426 - RNA, 19 nt, Artificial Sequence
  Description of Artificial Sequence: Synthetic oligonucleotide
  Sense strand starting at position 2079 of SEQ ID NO: 1884701
aggcuacugcugcagagau

SEQ ID NO: 2285427 - RNA, 19 nt, Artificial Sequence
  Description of Artificial Sequence: Synthetic oligonucleotide
  Antisense strand to SEQ ID NO: 2285426
aucucugcagcaguagccu

SEQ ID NO: 2285428 - RNA, 19 nt, Artificial Sequence
  Description of Artificial Sequence: Synthetic oligonucleotide
  Sense strand starting at position 2155 of SEQ ID NO: 1884701
ugguuccuuccaugauaaa

SEQ ID NO: 2285429 - RNA, 19 nt, Artificial Sequence
  Description of Artificial Sequence: Synthetic oligonucleotide
  Antisense strand to SEQ ID NO: 2285428
uuuaucauggaaggaacca

SEQ ID NO: 2285430 - RNA, 19 nt, Artificial Sequence
  Description of Artificial Sequence: Synthetic oligonucleotide
  Sense strand starting at position 2223 of SEQ ID NO: 1884701
gcacgaacaucuuuacgaa

SEQ ID NO: 2285431 - RNA, 19 nt, Artificial Sequence
  Description of Artificial Sequence: Synthetic oligonucleotide
  Antisense strand to SEQ ID NO: 2285430
uucguaaagauguucgugc

SEQ ID NO: 2285432 - RNA, 19 nt, Artificial Sequence
  Description of Artificial Sequence: Synthetic oligonucleotide
  Sense strand starting at position 2256 of SEQ ID NO: 1884701
ucuccaaccuagucgauaa

SEQ ID NO: 2285433 - RNA, 19 nt, Artificial Sequence
  Description of Artificial Sequence: Synthetic oligonucleotide
  Antisense strand to SEQ ID NO: 2285432
uuaucgacuagguuggaga

SEQ ID NO: 2285434 - RNA, 19 nt, Artificial Sequence
  Description of Artificial Sequence: Synthetic oligonucleotide
  Sense strand starting at position 2295 of SEQ ID NO: 1884701
ggcauuuccuaaguagcaa

SEQ ID NO: 2285435 - RNA, 19 nt, Artificial Sequence
  Description of Artificial Sequence: Synthetic oligonucleotide
  Antisense strand to SEQ ID NO: 2285434
uugcuacuuaggaaaugcc

SEQ ID NO: 2285436 - RNA, 19 nt, Artificial Sequence
  Description of Artificial Sequence: Synthetic oligonucleotide
  Sense strand starting at position 2520 of SEQ ID NO: 1884701
guaagaugauauucuucuu

SEQ ID NO: 2285437 - RNA, 19 nt, Artificial Sequence
  Description of Artificial Sequence: Synthetic oligonucleotide
  Antisense strand to SEQ ID NO: 2285436
aagaagaauaucaucuuac

SEQ ID NO: 2285438 - RNA, 19 nt, Artificial Sequence
  Description of Artificial Sequence: Synthetic oligonucleotide
  Sense strand starting at position 2730 of SEQ ID NO: 1884701
uuaauucuacuaggcaagu

SEQ ID NO: 2285439 - RNA, 19 nt, Artificial Sequence
  Description of Artificial Sequence: Synthetic oligonucleotide
  Antisense strand to SEQ ID NO: 2285438
acuugccuaguagaauuaa

SEQ ID NO: 2285440 - RNA, 19 nt, Artificial Sequence
  Description of Artificial Sequence: Synthetic oligonucleotide
  Sense strand starting at position 2919 of SEQ ID NO: 1884701
uucauagggcucgguauuu

SEQ ID NO: 2285441 - RNA, 19 nt, Artificial Sequence
  Description of Artificial Sequence: Synthetic oligonucleotide
  Antisense strand to SEQ ID NO: 2285440
aaauaccgagcccuaugaa

SEQ ID NO: 2285442 - RNA, 19 nt, Artificial Sequence
  Description of Artificial Sequence: Synthetic oligonucleotide
  Sense strand starting at position 3015 of SEQ ID NO: 1884701
cugaaagucugagugaaac

SEQ ID NO: 2285443 - RNA, 19 nt, Artificial Sequence
  Description of Artificial Sequence: Synthetic oligonucleotide
  Antisense strand to SEQ ID NO: 2285442
guuucacucagacuuucag

SEQ ID NO: 2285444 - RNA, 19 nt, Artificial Sequence
  Description of Artificial Sequence: Synthetic oligonucleotide
  Sense strand starting at position 3077 of SEQ ID NO: 1884701
ucuuuaguugcucaaugua

SEQ ID NO: 2285445 - RNA, 19 nt, Artificial Sequence
  Description of Artificial Sequence: Synthetic oligonucleotide
  Antisense strand to SEQ ID NO: 2285444
uacauugagcaacuaaaga

SEQ ID NO: 2285446 - RNA, 19 nt, Artificial Sequence
  Description of Artificial Sequence: Synthetic oligonucleotide
  Sense strand starting at position 3281 of SEQ ID NO: 1884701
gucauacuucuugaagcuu

SEQ ID NO: 2285447 - RNA, 19 nt, Artificial Sequence
  Description of Artificial Sequence: Synthetic oligonucleotide
  Antisense strand to SEQ ID NO: 2285446
aagcuucaagaaguaugac

SEQ ID NO: 2285448 - RNA, 19 nt, Artificial Sequence
  Description of Artificial Sequence: Synthetic oligonucleotide
  Sense strand starting at position 3707 of SEQ ID NO: 1884701
cugccacaucuuugauaga

SEQ ID NO: 2285449 - RNA, 19 nt, Artificial Sequence
  Description of Artificial Sequence: Synthetic oligonucleotide
  Antisense strand to SEQ ID NO: 2285448
ucuaucaaagauguggcag

SEQ ID NO: 2285450 - RNA, 19 nt, Artificial Sequence
  Description of Artificial Sequence: Synthetic oligonucleotide
  Sense strand starting at position 3790 of SEQ ID NO: 1884701
acucacauauguguacaaa

SEQ ID NO: 2285451 - RNA, 19 nt, Artificial Sequence
  Description of Artificial Sequence: Synthetic oligonucleotide
  Antisense strand to SEQ ID NO: 2285450
uuuguacacauaugugagu

SEQ ID NO: 2285452 - RNA, 19 nt, Artificial Sequence
  Description of Artificial Sequence: Synthetic oligonucleotide
  Sense strand starting at position 3791 of SEQ ID NO: 1884701
cucacauauguguacaaag

SEQ ID NO: 2285453 - RNA, 19 nt, Artificial Sequence
  Description of Artificial Sequence: Synthetic oligonucleotide
  Antisense strand to SEQ ID NO: 2285452
cuuuguacacauaugugag

SEQ ID NO: 2285454 - RNA, 19 nt, Artificial Sequence
  Description of Artificial Sequence: Synthetic oligonucleotide
  Sense strand starting at position 138 of SEQ ID NO: 1884702
cugaucaauuucugaagag

SEQ ID NO: 2285455 - RNA, 19 nt, Artificial Sequence
  Description of Artificial Sequence: Synthetic oligonucleotide
  Antisense strand to SEQ ID NO: 2285454
cucuucagaaauugaucag

SEQ ID NO: 2285456 - RNA, 19 nt, Artificial Sequence
  Description of Artificial Sequence: Synthetic oligonucleotide
  Sense strand starting at position 139 of SEQ ID NO: 1884702
ugaucaauuucugaagaga

SEQ ID NO: 2285457 - RNA, 19 nt, Artificial Sequence
  Description of Artificial Sequence: Synthetic oligonucleotide
  Antisense strand to SEQ ID NO: 2285456
ucucuucagaaauugauca

SEQ ID NO: 2285458 - RNA, 19 nt, Artificial Sequence
  Description of Artificial Sequence: Synthetic oligonucleotide
  Sense strand starting at position 240 of SEQ ID NO: 1884702
guauguaagauccauguag

SEQ ID NO: 2285459 - RNA, 19 nt, Artificial Sequence
  Description of Artificial Sequence: Synthetic oligonucleotide
  Antisense strand to SEQ ID NO: 2285458
cuacauggaucuuacauac

SEQ ID NO: 2285460 - RNA, 19 nt, Artificial Sequence
  Description of Artificial Sequence: Synthetic oligonucleotide
  Sense strand starting at position 244 of SEQ ID NO: 1884702
guaagauccauguagcaga

SEQ ID NO: 2285461 - RNA, 19 nt, Artificial Sequence
  Description of Artificial Sequence: Synthetic oligonucleotide
  Antisense strand to SEQ ID NO: 2285460
ucugcuacauggaucuuac

SEQ ID NO: 2285462 - RNA, 19 nt, Artificial Sequence
  Description of Artificial Sequence: Synthetic oligonucleotide
  Sense strand starting at position 333 of SEQ ID NO: 1884702
cucucuuuauaggugagau

SEQ ID NO: 2285463 - RNA, 19 nt, Artificial Sequence
  Description of Artificial Sequence: Synthetic oligonucleotide
  Antisense strand to SEQ ID NO: 2285462
aucucaccuauaaagagag

SEQ ID NO: 2285464 - RNA, 19 nt, Artificial Sequence
  Description of Artificial Sequence: Synthetic oligonucleotide
  Sense strand starting at position 335 of SEQ ID NO: 1884702
cucuuuauaggugagaucu

SEQ ID NO: 2285465 - RNA, 19 nt, Artificial Sequence
  Description of Artificial Sequence: Synthetic oligonucleotide
  Antisense strand to SEQ ID NO: 2285464
agaucucaccuauaaagag

SEQ ID NO: 2285466 - RNA, 19 nt, Artificial Sequence
  Description of Artificial Sequence: Synthetic oligonucleotide
  Sense strand starting at position 341 of SEQ ID NO: 1884702
auaggugagaucuguggua

SEQ ID NO: 2285467 - RNA, 19 nt, Artificial Sequence
  Description of Artificial Sequence: Synthetic oligonucleotide
  Antisense strand to SEQ ID NO: 2285466
uaccacagaucucaccuau

SEQ ID NO: 2285468 - RNA, 19 nt, Artificial Sequence
  Description of Artificial Sequence: Synthetic oligonucleotide
  Sense strand starting at position 343 of SEQ ID NO: 1884702
aggugagaucugugguaau

SEQ ID NO: 2285469 - RNA, 19 nt, Artificial Sequence
  Description of Artificial Sequence: Synthetic oligonucleotide
  Antisense strand to SEQ ID NO: 2285468
auuaccacagaucucaccu

SEQ ID NO: 2285470 - RNA, 19 nt, Artificial Sequence
  Description of Artificial Sequence: Synthetic oligonucleotide
  Sense strand starting at position 369 of SEQ ID NO: 1884702
auuaucugagcaggacaau

SEQ ID NO: 2285471 - RNA, 19 nt, Artificial Sequence
  Description of Artificial Sequence: Synthetic oligonucleotide
  Antisense strand to SEQ ID NO: 2285470
auuguccugcucagauaau

SEQ ID NO: 2285472 - RNA, 19 nt, Artificial Sequence
  Description of Artificial Sequence: Synthetic oligonucleotide
  Sense strand starting at position 381 of SEQ ID NO: 1884702
ggacaaucagacugucuga

SEQ ID NO: 2285473 - RNA, 19 nt, Artificial Sequence
  Description of Artificial Sequence: Synthetic oligonucleotide
  Antisense strand to SEQ ID NO: 2285472
ucagacagucugauugucc

SEQ ID NO: 2285474 - RNA, 19 nt, Artificial Sequence
  Description of Artificial Sequence: Synthetic oligonucleotide
  Sense strand starting at position 709 of SEQ ID NO: 1884702
uugggacacugguccaaua

SEQ ID NO: 2285475 - RNA, 19 nt, Artificial Sequence
  Description of Artificial Sequence: Synthetic oligonucleotide
  Antisense strand to SEQ ID NO: 2285474
uauuggaccagugucccaa

SEQ ID NO: 2285476 - RNA, 19 nt, Artificial Sequence
  Description of Artificial Sequence: Synthetic oligonucleotide
  Sense strand starting at position 784 of SEQ ID NO: 1884702
ugguaagaguucuuaccac

SEQ ID NO: 2285477 - RNA, 19 nt, Artificial Sequence
  Description of Artificial Sequence: Synthetic oligonucleotide
  Antisense strand to SEQ ID NO: 2285476
gugguaagaacucuuacca

SEQ ID NO: 2285478 - RNA, 19 nt, Artificial Sequence
  Description of Artificial Sequence: Synthetic oligonucleotide
  Sense strand starting at position 916 of SEQ ID NO: 1884702
gugacaggaugauuacuuu

SEQ ID NO: 2285479 - RNA, 19 nt, Artificial Sequence
  Description of Artificial Sequence: Synthetic oligonucleotide
  Antisense strand to SEQ ID NO: 2285478
aaaguaaucauccugucac

SEQ ID NO: 2285480 - RNA, 19 nt, Artificial Sequence
  Description of Artificial Sequence: Synthetic oligonucleotide
  Sense strand starting at position 922 of SEQ ID NO: 1884702
ggaugauuacuuugcuuaa

SEQ ID NO: 2285481 - RNA, 19 nt, Artificial Sequence
  Description of Artificial Sequence: Synthetic oligonucleotide
  Antisense strand to SEQ ID NO: 2285480
uuaagcaaaguaaucaucc

SEQ ID NO: 2285482 - RNA, 19 nt, Artificial Sequence
  Description of Artificial Sequence: Synthetic oligonucleotide
  Sense strand starting at position 987 of SEQ ID NO: 1884702
uugacagccucauuugcau

SEQ ID NO: 2285483 - RNA, 19 nt, Artificial Sequence
  Description of Artificial Sequence: Synthetic oligonucleotide
  Antisense strand to SEQ ID NO: 2285482
augcaaaugaggcugucaa

SEQ ID NO: 2285484 - RNA, 19 nt, Artificial Sequence
  Description of Artificial Sequence: Synthetic oligonucleotide
  Sense strand starting at position 1031 of SEQ ID NO: 1884702
aacaguuuccugugaagaa

SEQ ID NO: 2285485 - RNA, 19 nt, Artificial Sequence
  Description of Artificial Sequence: Synthetic oligonucleotide
  Antisense strand to SEQ ID NO: 2285484
uucuucacaggaaacuguu

SEQ ID NO: 2285486 - RNA, 19 nt, Artificial Sequence
  Description of Artificial Sequence: Synthetic oligonucleotide
  Sense strand starting at position 1049 of SEQ ID NO: 1884702
acacaaguaucuuuaaugu

SEQ ID NO: 2285487 - RNA, 19 nt, Artificial Sequence
  Description of Artificial Sequence: Synthetic oligonucleotide
  Antisense strand to SEQ ID NO: 2285486
acauuaaagauacuugugu

SEQ ID NO: 2285488 - RNA, 19 nt, Artificial Sequence
  Description of Artificial Sequence: Synthetic oligonucleotide
  Sense strand starting at position 1188 of SEQ ID NO: 1884702
ggauaagcgguggauuagu

SEQ ID NO: 2285489 - RNA, 19 nt, Artificial Sequence
  Description of Artificial Sequence: Synthetic oligonucleotide
  Antisense strand to SEQ ID NO: 2285488
acuaauccaccgcuuaucc

SEQ ID NO: 2285490 - RNA, 19 nt, Artificial Sequence
  Description of Artificial Sequence: Synthetic oligonucleotide
  Sense strand starting at position 1398 of SEQ ID NO: 1884702
gaggaaucauaguuaucug

SEQ ID NO: 2285491 - RNA, 19 nt, Artificial Sequence
  Description of Artificial Sequence: Synthetic oligonucleotide
  Antisense strand to SEQ ID NO: 2285490
cagauaacuaugauuccuc

SEQ ID NO: 2285492 - RNA, 19 nt, Artificial Sequence
  Description of Artificial Sequence: Synthetic oligonucleotide
  Sense strand starting at position 1646 of SEQ ID NO: 1884702
auuuaaagaucugaugcau

SEQ ID NO: 2285493 - RNA, 19 nt, Artificial Sequence
  Description of Artificial Sequence: Synthetic oligonucleotide
  Antisense strand to SEQ ID NO: 2285492
augcaucagaucuuuaaau

SEQ ID NO: 2285494 - RNA, 19 nt, Artificial Sequence
  Description of Artificial Sequence: Synthetic oligonucleotide
  Sense strand starting at position 1652 of SEQ ID NO: 1884702
agaucugaugcauacagua

SEQ ID NO: 2285495 - RNA, 19 nt, Artificial Sequence
  Description of Artificial Sequence: Synthetic oligonucleotide
  Antisense strand to SEQ ID NO: 2285494
uacuguaugcaucagaucu

SEQ ID NO: 2285496 - RNA, 19 nt, Artificial Sequence
  Description of Artificial Sequence: Synthetic oligonucleotide
  Sense strand starting at position 1701 of SEQ ID NO: 1884702
uuagaauuagcaugacuaa

SEQ ID NO: 2285497 - RNA, 19 nt, Artificial Sequence
  Description of Artificial Sequence: Synthetic oligonucleotide
  Antisense strand to SEQ ID NO: 2285496
uuagucaugcuaauucuaa

SEQ ID NO: 2285498 - RNA, 19 nt, Artificial Sequence
  Description of Artificial Sequence: Synthetic oligonucleotide
  Sense strand starting at position 1850 of SEQ ID NO: 1884702
uuaggagacuugcccucau

SEQ ID NO: 2285499 - RNA, 19 nt, Artificial Sequence
  Description of Artificial Sequence: Synthetic oligonucleotide
  Antisense strand to SEQ ID NO: 2285498
augagggcaagucuccuaa

SEQ ID NO: 2285500 - RNA, 19 nt, Artificial Sequence
  Description of Artificial Sequence: Synthetic oligonucleotide
  Sense strand starting at position 1874 of SEQ ID NO: 1884702
auaaucuucgcucacagga

SEQ ID NO: 2285501 - RNA, 19 nt, Artificial Sequence
  Description of Artificial Sequence: Synthetic oligonucleotide
  Antisense strand to SEQ ID NO: 2285500
uccugugagcgaagauuau

SEQ ID NO: 2285502 - RNA, 19 nt, Artificial Sequence
  Description of Artificial Sequence: Synthetic oligonucleotide
  Sense strand starting at position 1941 of SEQ ID NO: 1884702
cgucaagaacuccagcaua

SEQ ID NO: 2285503 - RNA, 19 nt, Artificial Sequence
  Description of Artificial Sequence: Synthetic oligonucleotide
  Antisense strand to SEQ ID NO: 2285502
uaugcuggaguucuugacg

SEQ ID NO: 2285504 - RNA, 19 nt, Artificial Sequence
  Description of Artificial Sequence: Synthetic oligonucleotide
  Sense strand starting at position 2122 of SEQ ID NO: 1884702
ggauaagagucccugacuc

SEQ ID NO: 2285505 - RNA, 19 nt, Artificial Sequence
  Description of Artificial Sequence: Synthetic oligonucleotide
  Antisense strand to SEQ ID NO: 2285504
gagucagggacucuuaucc

SEQ ID NO: 2285506 - RNA, 19 nt, Artificial Sequence
  Description of Artificial Sequence: Synthetic oligonucleotide
  Sense strand starting at position 2133 of SEQ ID NO: 1884702
ccugacucugguuauggua

SEQ ID NO: 2285507 - RNA, 19 nt, Artificial Sequence
  Description of Artificial Sequence: Synthetic oligonucleotide
  Antisense strand to SEQ ID NO: 2285506
uaccauaaccagagucagg

SEQ ID NO: 2285508 - RNA, 19 nt, Artificial Sequence
  Description of Artificial Sequence: Synthetic oligonucleotide
  Sense strand starting at position 2241 of SEQ ID NO: 1884702
ugagccaagccauaaaguu

SEQ ID NO: 2285509 - RNA, 19 nt, Artificial Sequence
  Description of Artificial Sequence: Synthetic oligonucleotide
  Antisense strand to SEQ ID NO: 2285508
aacuuuauggcuuggcuca

SEQ ID NO: 2285510 - RNA, 19 nt, Artificial Sequence
  Description of Artificial Sequence: Synthetic oligonucleotide
  Sense strand starting at position 2250 of SEQ ID NO: 1884702
ccauaaaguuaguuuaacu

SEQ ID NO: 2285511 - RNA, 19 nt, Artificial Sequence
  Description of Artificial Sequence: Synthetic oligonucleotide
  Antisense strand to SEQ ID NO: 2285510
aguuaaacuaacuuuaugg

SEQ ID NO: 2285512 - RNA, 19 nt, Artificial Sequence
  Description of Artificial Sequence: Synthetic oligonucleotide
  Sense strand starting at position 2520 of SEQ ID NO: 1884702
aagaguugauuugaacgau

SEQ ID NO: 2285513 - RNA, 19 nt, Artificial Sequence
  Description of Artificial Sequence: Synthetic oligonucleotide
  Antisense strand to SEQ ID NO: 2285512
aucguucaaaucaacucuu

SEQ ID NO: 2285514 - RNA, 19 nt, Artificial Sequence
  Description of Artificial Sequence: Synthetic oligonucleotide
  Sense strand starting at position 2796 of SEQ ID NO: 1884702
gccauaggagcaggaauaa

SEQ ID NO: 2285515 - RNA, 19 nt, Artificial Sequence
  Description of Artificial Sequence: Synthetic oligonucleotide
  Antisense strand to SEQ ID NO: 2285514
uuauuccugcuccuauggc

SEQ ID NO: 2285516 - RNA, 19 nt, Artificial Sequence
  Description of Artificial Sequence: Synthetic oligonucleotide
  Sense strand starting at position 3381 of SEQ ID NO: 1884702
cacagagucuaugugacaa

SEQ ID NO: 2285517 - RNA, 19 nt, Artificial Sequence
  Description of Artificial Sequence: Synthetic oligonucleotide
  Antisense strand to SEQ ID NO: 2285516
uugucacauagacucugug

SEQ ID NO: 2285518 - RNA, 19 nt, Artificial Sequence
  Description of Artificial Sequence: Synthetic oligonucleotide
  Sense strand starting at position 3456 of SEQ ID NO: 1884702
uuugguccauugucaagaa

SEQ ID NO: 2285519 - RNA, 19 nt, Artificial Sequence
  Description of Artificial Sequence: Synthetic oligonucleotide
  Antisense strand to SEQ ID NO: 2285518
uucuugacaauggaccaaa

SEQ ID NO: 2285520 - RNA, 19 nt, Artificial Sequence
  Description of Artificial Sequence: Synthetic oligonucleotide
  Sense strand starting at position 3512 of SEQ ID NO: 1884702
uacgguauccuuuaauuga

SEQ ID NO: 2285521 - RNA, 19 nt, Artificial Sequence
  Description of Artificial Sequence: Synthetic oligonucleotide
  Antisense strand to SEQ ID NO: 2285520
ucaauuaaaggauaccgua

SEQ ID NO: 2285522 - RNA, 19 nt, Artificial Sequence
  Description of Artificial Sequence: Synthetic oligonucleotide
  Sense strand starting at position 3653 of SEQ ID NO: 1884702
agcacauucgggcaaagua

SEQ ID NO: 2285523 - RNA, 19 nt, Artificial Sequence
  Description of Artificial Sequence: Synthetic oligonucleotide
  Antisense strand to SEQ ID NO: 2285522
uacuuugcccgaaugugcu

SEQ ID NO: 2285524 - RNA, 19 nt, Artificial Sequence
  Description of Artificial Sequence: Synthetic oligonucleotide
  Sense strand starting at position 3662 of SEQ ID NO: 1884702
gggcaaaguacugauccau

SEQ ID NO: 2285525 - RNA, 19 nt, Artificial Sequence
  Description of Artificial Sequence: Synthetic oligonucleotide
  Antisense strand to SEQ ID NO: 2285524
auggaucaguacuuugccc

SEQ ID NO: 2285526 - RNA, 19 nt, Artificial Sequence
  Description of Artificial Sequence: Synthetic oligonucleotide
  Sense strand starting at position 3768 of SEQ ID NO: 1884702
cccaguuaauggcuaaaua

SEQ ID NO: 2285527 - RNA, 19 nt, Artificial Sequence
  Description of Artificial Sequence: Synthetic oligonucleotide
  Antisense strand to SEQ ID NO: 2285526
uauuuagccauuaacuggg

SEQ ID NO: 2285528 - RNA, 19 nt, Artificial Sequence
  Description of Artificial Sequence: Synthetic oligonucleotide
  Sense strand starting at position 3769 of SEQ ID NO: 1884702
ccaguuaauggcuaaauau

SEQ ID NO: 2285529 - RNA, 19 nt, Artificial Sequence
  Description of Artificial Sequence: Synthetic oligonucleotide
  Antisense strand to SEQ ID NO: 2285528
auauuuagccauuaacugg

SEQ ID NO: 2285530 - RNA, 19 nt, Artificial Sequence
  Description of Artificial Sequence: Synthetic oligonucleotide
  Sense strand starting at position 3786 of SEQ ID NO: 1884702
auggcaaucccuuaugaug

SEQ ID NO: 2285531 - RNA, 19 nt, Artificial Sequence
  Description of Artificial Sequence: Synthetic oligonucleotide
  Antisense strand to SEQ ID NO: 2285530
caucauaagggauugccau

SEQ ID NO: 2285532 - RNA, 19 nt, Artificial Sequence
  Description of Artificial Sequence: Synthetic oligonucleotide
  Sense strand starting at position 3904 of SEQ ID NO: 1884702
cuguccucauuaucugaca

SEQ ID NO: 2285533 - RNA, 19 nt, Artificial Sequence
  Description of Artificial Sequence: Synthetic oligonucleotide
  Antisense strand to SEQ ID NO: 2285532
ugucagauaaugaggacag

SEQ ID NO: 2285534 - RNA, 19 nt, Artificial Sequence
  Description of Artificial Sequence: Synthetic oligonucleotide
  Sense strand starting at position 551 of SEQ ID NO: 1884703
cugagacuucagggugcua

SEQ ID NO: 2285535 - RNA, 19 nt, Artificial Sequence
  Description of Artificial Sequence: Synthetic oligonucleotide
  Antisense strand to SEQ ID NO: 2285534
uagcacccugaagucucag

SEQ ID NO: 2285536 - RNA, 19 nt, Artificial Sequence
  Description of Artificial Sequence: Synthetic oligonucleotide
  Sense strand starting at position 568 of SEQ ID NO: 1884703
uaccaaguacuuuggaaag

SEQ ID NO: 2285537 - RNA, 19 nt, Artificial Sequence
  Description of Artificial Sequence: Synthetic oligonucleotide
  Antisense strand to SEQ ID NO: 2285536
cuuuccaaaguacuuggua

SEQ ID NO: 2285538 - RNA, 19 nt, Artificial Sequence
  Description of Artificial Sequence: Synthetic oligonucleotide
  Sense strand starting at position 703 of SEQ ID NO: 1884703
agaguuggaggcugaauca

SEQ ID NO: 2285539 - RNA, 19 nt, Artificial Sequence
  Description of Artificial Sequence: Synthetic oligonucleotide
  Antisense strand to SEQ ID NO: 2285538
ugauucagccuccaacucu

SEQ ID NO: 2285540 - RNA, 19 nt, Artificial Sequence
  Description of Artificial Sequence: Synthetic oligonucleotide
  Sense strand starting at position 710 of SEQ ID NO: 1884703
gaggcugaaucagaaagaa

SEQ ID NO: 2285541 - RNA, 19 nt, Artificial Sequence
  Description of Artificial Sequence: Synthetic oligonucleotide
  Antisense strand to SEQ ID NO: 2285540
uucuuucugauucagccuc

SEQ ID NO: 2285542 - RNA, 19 nt, Artificial Sequence
  Description of Artificial Sequence: Synthetic oligonucleotide
  Sense strand starting at position 739 of SEQ ID NO: 1884703
cagagauggcucuacucau

SEQ ID NO: 2285543 - RNA, 19 nt, Artificial Sequence
  Description of Artificial Sequence: Synthetic oligonucleotide
  Antisense strand to SEQ ID NO: 2285542
augaguagagccaucucug

SEQ ID NO: 2285544 - RNA, 19 nt, Artificial Sequence
  Description of Artificial Sequence: Synthetic oligonucleotide
  Sense strand starting at position 908 of SEQ ID NO: 1884703
auuccauagugcuuugaaa

SEQ ID NO: 2285545 - RNA, 19 nt, Artificial Sequence
  Description of Artificial Sequence: Synthetic oligonucleotide
  Antisense strand to SEQ ID NO: 2285544
uuucaaagcacuauggaau

SEQ ID NO: 2285546 - RNA, 19 nt, Artificial Sequence
  Description of Artificial Sequence: Synthetic oligonucleotide
  Sense strand starting at position 910 of SEQ ID NO: 1884703
uccauagugcuuugaaaca

SEQ ID NO: 2285547 - RNA, 19 nt, Artificial Sequence
  Description of Artificial Sequence: Synthetic oligonucleotide
  Antisense strand to SEQ ID NO: 2285546
uguuucaaagcacuaugga

SEQ ID NO: 2285548 - RNA, 19 nt, Artificial Sequence
  Description of Artificial Sequence: Synthetic oligonucleotide
  Sense strand starting at position 1691 of SEQ ID NO: 1884703
cuuccaguuaguggugaga

SEQ ID NO: 2285549 - RNA, 19 nt, Artificial Sequence
  Description of Artificial Sequence: Synthetic oligonucleotide
  Antisense strand to SEQ ID NO: 2285548
ucucaccacuaacuggaag

SEQ ID NO: 2285550 - RNA, 19 nt, Artificial Sequence
  Description of Artificial Sequence: Synthetic oligonucleotide
  Sense strand starting at position 2040 of SEQ ID NO: 1884703
ugaaaucuaguagggcauu

SEQ ID NO: 2285551 - RNA, 19 nt, Artificial Sequence
  Description of Artificial Sequence: Synthetic oligonucleotide
  Antisense strand to SEQ ID NO: 2285550
aaugcccuacuagauuuca

SEQ ID NO: 2285552 - RNA, 19 nt, Artificial Sequence
  Description of Artificial Sequence: Synthetic oligonucleotide
  Sense strand starting at position 2046 of SEQ ID NO: 1884703
cuaguagggcauugugaca

SEQ ID NO: 2285553 - RNA, 19 nt, Artificial Sequence
  Description of Artificial Sequence: Synthetic oligonucleotide
  Antisense strand to SEQ ID NO: 2285552
ugucacaaugcccuacuag

SEQ ID NO: 2285554 - RNA, 19 nt, Artificial Sequence
  Description of Artificial Sequence: Synthetic oligonucleotide
  Sense strand starting at position 2057 of SEQ ID NO: 1884703
uugugacaucauugaccau

SEQ ID NO: 2285555 - RNA, 19 nt, Artificial Sequence
  Description of Artificial Sequence: Synthetic oligonucleotide
  Antisense strand to SEQ ID NO: 2285554
auggucaaugaugucacaa

SEQ ID NO: 2285556 - RNA, 19 nt, Artificial Sequence
  Description of Artificial Sequence: Synthetic oligonucleotide
  Sense strand starting at position 2307 of SEQ ID NO: 1884703
ggcagagauuuggaaaggu

SEQ ID NO: 2285557 - RNA, 19 nt, Artificial Sequence
  Description of Artificial Sequence: Synthetic oligonucleotide
  Antisense strand to SEQ ID NO: 2285556
accuuuccaaaucucugcc

SEQ ID NO: 2285558 - RNA, 19 nt, Artificial Sequence
  Description of Artificial Sequence: Synthetic oligonucleotide
  Sense strand starting at position 2337 of SEQ ID NO: 1884703
agguguacgacaugugaac

SEQ ID NO: 2285559 - RNA, 19 nt, Artificial Sequence
  Description of Artificial Sequence: Synthetic oligonucleotide
  Antisense strand to SEQ ID NO: 2285558
guucacaugucguacaccu

SEQ ID NO: 2285560 - RNA, 19 nt, Artificial Sequence
  Description of Artificial Sequence: Synthetic oligonucleotide
  Sense strand starting at position 2343 of SEQ ID NO: 1884703
acgacaugugaacgaaaca

SEQ ID NO: 2285561 - RNA, 19 nt, Artificial Sequence
  Description of Artificial Sequence: Synthetic oligonucleotide
  Antisense strand to SEQ ID NO: 2285560
uguuucguucacaugucgu

SEQ ID NO: 2285562 - RNA, 19 nt, Artificial Sequence
  Description of Artificial Sequence: Synthetic oligonucleotide
  Sense strand starting at position 2371 of SEQ ID NO: 1884703
acagguaaaugagacagau

SEQ ID NO: 2285563 - RNA, 19 nt, Artificial Sequence
  Description of Artificial Sequence: Synthetic oligonucleotide
  Antisense strand to SEQ ID NO: 2285562
aucugucucauuuaccugu

SEQ ID NO: 2285564 - RNA, 19 nt, Artificial Sequence
  Description of Artificial Sequence: Synthetic oligonucleotide
  Sense strand starting at position 2380 of SEQ ID NO: 1884703
ugagacagaugucucuauu

SEQ ID NO: 2285565 - RNA, 19 nt, Artificial Sequence
  Description of Artificial Sequence: Synthetic oligonucleotide
  Antisense strand to SEQ ID NO: 2285564
aauagagacaucugucuca

SEQ ID NO: 2285566 - RNA, 19 nt, Artificial Sequence
  Description of Artificial Sequence: Synthetic oligonucleotide
  Sense strand starting at position 2449 of SEQ ID NO: 1884703
augguauauccacaucuuc

SEQ ID NO: 2285567 - RNA, 19 nt, Artificial Sequence
  Description of Artificial Sequence: Synthetic oligonucleotide
  Antisense strand to SEQ ID NO: 2285566
gaagauguggauauaccau

SEQ ID NO: 2285568 - RNA, 19 nt, Artificial Sequence
  Description of Artificial Sequence: Synthetic oligonucleotide
  Sense strand starting at position 2475 of SEQ ID NO: 1884703
uggauuaguuccucuccau

SEQ ID NO: 2285569 - RNA, 19 nt, Artificial Sequence
  Description of Artificial Sequence: Synthetic oligonucleotide
  Antisense strand to SEQ ID NO: 2285568
auggagaggaacuaaucca

SEQ ID NO: 2285570 - RNA, 19 nt, Artificial Sequence
  Description of Artificial Sequence: Synthetic oligonucleotide
  Sense strand starting at position 2478 of SEQ ID NO: 1884703
auuaguuccucuccauuga

SEQ ID NO: 2285571 - RNA, 19 nt, Artificial Sequence
  Description of Artificial Sequence: Synthetic oligonucleotide
  Antisense strand to SEQ ID NO: 2285570
ucaauggagaggaacuaau

SEQ ID NO: 2285572 - RNA, 19 nt, Artificial Sequence
  Description of Artificial Sequence: Synthetic oligonucleotide
  Sense strand starting at position 2479 of SEQ ID NO: 1884703
uuaguuccucuccauugau

SEQ ID NO: 2285573 - RNA, 19 nt, Artificial Sequence
  Description of Artificial Sequence: Synthetic oligonucleotide
  Antisense strand to SEQ ID NO: 2285572
aucaauggagaggaacuaa

SEQ ID NO: 2285574 - RNA, 19 nt, Artificial Sequence
  Description of Artificial Sequence: Synthetic oligonucleotide
  Sense strand starting at position 2623 of SEQ ID NO: 1884703
acaagugguccauacucaa

SEQ ID NO: 2285575 - RNA, 19 nt, Artificial Sequence
  Description of Artificial Sequence: Synthetic oligonucleotide
  Antisense strand to SEQ ID NO: 2285574
uugaguauggaccacuugu

SEQ ID NO: 2285576 - RNA, 19 nt, Artificial Sequence
  Description of Artificial Sequence: Synthetic oligonucleotide
  Sense strand starting at position 3089 of SEQ ID NO: 1884703
uugugauauuuccugcuuc

SEQ ID NO: 2285577 - RNA, 19 nt, Artificial Sequence
  Description of Artificial Sequence: Synthetic oligonucleotide
  Antisense strand to SEQ ID NO: 2285576
gaagcaggaaauaucacaa

SEQ ID NO: 2285578 - RNA, 19 nt, Artificial Sequence
  Description of Artificial Sequence: Synthetic oligonucleotide
  Sense strand starting at position 3133 of SEQ ID NO: 1884703
agauguugaacaugguaaa

SEQ ID NO: 2285579 - RNA, 19 nt, Artificial Sequence
  Description of Artificial Sequence: Synthetic oligonucleotide
  Antisense strand to SEQ ID NO: 2285578
uuuaccauguucaacaucu

SEQ ID NO: 2285580 - RNA, 19 nt, Artificial Sequence
  Description of Artificial Sequence: Synthetic oligonucleotide
  Sense strand starting at position 3134 of SEQ ID NO: 1884703
gauguugaacaugguaaau

SEQ ID NO: 2285581 - RNA, 19 nt, Artificial Sequence
  Description of Artificial Sequence: Synthetic oligonucleotide
  Antisense strand to SEQ ID NO: 2285580
auuuaccauguucaacauc

SEQ ID NO: 2285582 - RNA, 19 nt, Artificial Sequence
  Description of Artificial Sequence: Synthetic oligonucleotide
  Sense strand starting at position 3136 of SEQ ID NO: 1884703
uguugaacaugguaaauuu

SEQ ID NO: 2285583 - RNA, 19 nt, Artificial Sequence
  Description of Artificial Sequence: Synthetic oligonucleotide
  Antisense strand to SEQ ID NO: 2285582
aaauuuaccauguucaaca

SEQ ID NO: 2285584 - RNA, 19 nt, Artificial Sequence
  Description of Artificial Sequence: Synthetic oligonucleotide
  Sense strand starting at position 3227 of SEQ ID NO: 1884703
cgaucaguuugauucuucu

SEQ ID NO: 2285585 - RNA, 19 nt, Artificial Sequence
  Description of Artificial Sequence: Synthetic oligonucleotide
  Antisense strand to SEQ ID NO: 2285584
agaagaaucaaacugaucg

SEQ ID NO: 2285586 - RNA, 19 nt, Artificial Sequence
  Description of Artificial Sequence: Synthetic oligonucleotide
  Sense strand starting at position 3282 of SEQ ID NO: 1884703
gccuuuacucuaggguuaa

SEQ ID NO: 2285587 - RNA, 19 nt, Artificial Sequence
  Description of Artificial Sequence: Synthetic oligonucleotide
  Antisense strand to SEQ ID NO: 2285586
uuaacccuagaguaaaggc

SEQ ID NO: 2285588 - RNA, 19 nt, Artificial Sequence
  Description of Artificial Sequence: Synthetic oligonucleotide
  Sense strand starting at position 3302 of SEQ ID NO: 1884703
auccgcacugcugaguuaa

SEQ ID NO: 2285589 - RNA, 19 nt, Artificial Sequence
  Description of Artificial Sequence: Synthetic oligonucleotide
  Antisense strand to SEQ ID NO: 2285588
uuaacucagcagugcggau

SEQ ID NO: 2285590 - RNA, 19 nt, Artificial Sequence
  Description of Artificial Sequence: Synthetic oligonucleotide
  Sense strand starting at position 3344 of SEQ ID NO: 1884703
cucugaggcugauuguauu

SEQ ID NO: 2285591 - RNA, 19 nt, Artificial Sequence
  Description of Artificial Sequence: Synthetic oligonucleotide
  Antisense strand to SEQ ID NO: 2285590
aauacaaucagccucagag

SEQ ID NO: 2285592 - RNA, 19 nt, Artificial Sequence
  Description of Artificial Sequence: Synthetic oligonucleotide
  Sense strand starting at position 3663 of SEQ ID NO: 1884703
cacugugcccggcauagau

SEQ ID NO: 2285593 - RNA, 19 nt, Artificial Sequence
  Description of Artificial Sequence: Synthetic oligonucleotide
  Antisense strand to SEQ ID NO: 2285592
aucuaugccgggcacagug

SEQ ID NO: 2285594 - RNA, 19 nt, Artificial Sequence
  Description of Artificial Sequence: Synthetic oligonucleotide
  Sense strand starting at position 3672 of SEQ ID NO: 1884703
cggcauagaucuuccaaau

SEQ ID NO: 2285595 - RNA, 19 nt, Artificial Sequence
  Description of Artificial Sequence: Synthetic oligonucleotide
  Antisense strand to SEQ ID NO: 2285594
auuuggaagaucuaugccg

SEQ ID NO: 2285596 - RNA, 19 nt, Artificial Sequence
  Description of Artificial Sequence: Synthetic oligonucleotide
  Sense strand starting at position 3681 of SEQ ID NO: 1884703
ucuuccaaaucuguggaau

SEQ ID NO: 2285597 - RNA, 19 nt, Artificial Sequence
  Description of Artificial Sequence: Synthetic oligonucleotide
  Antisense strand to SEQ ID NO: 2285596
auuccacagauuuggaaga

SEQ ID NO: 2285598 - RNA, 19 nt, Artificial Sequence
  Description of Artificial Sequence: Synthetic oligonucleotide
  Sense strand starting at position 3684 of SEQ ID NO: 1884703
uccaaaucuguggaauguu

SEQ ID NO: 2285599 - RNA, 19 nt, Artificial Sequence
  Description of Artificial Sequence: Synthetic oligonucleotide
  Antisense strand to SEQ ID NO: 2285598
aacauuccacagauuugga

SEQ ID NO: 2285600 - RNA, 19 nt, Artificial Sequence
  Description of Artificial Sequence: Synthetic oligonucleotide
  Sense strand starting at position 3729 of SEQ ID NO: 1884703
ccaagaaguguuuggccga

SEQ ID NO: 2285601 - RNA, 19 nt, Artificial Sequence
  Description of Artificial Sequence: Synthetic oligonucleotide
  Antisense strand to SEQ ID NO: 2285600
ucggccaaacacuucuugg

SEQ ID NO: 2285602 - RNA, 19 nt, Artificial Sequence
  Description of Artificial Sequence: Synthetic oligonucleotide
  Sense strand starting at position 3789 of SEQ ID NO: 1884703
ucccauauaugugcagaca

SEQ ID NO: 2285603 - RNA, 19 nt, Artificial Sequence
  Description of Artificial Sequence: Synthetic oligonucleotide
  Antisense strand to SEQ ID NO: 2285602
ugucugcacauauauggga

SEQ ID NO: 2285604 - RNA, 19 nt, Artificial Sequence
  Description of Artificial Sequence: Synthetic oligonucleotide
  Sense strand starting at position 3837 of SEQ ID NO: 1884703
uguggaaaucuacagagcu

SEQ ID NO: 2285605 - RNA, 19 nt, Artificial Sequence
  Description of Artificial Sequence: Synthetic oligonucleotide
  Antisense strand to SEQ ID NO: 2285604
agcucuguagauuuccaca

SEQ ID NO: 2285606 - RNA, 19 nt, Artificial Sequence
  Description of Artificial Sequence: Synthetic oligonucleotide
  Sense strand starting at position 3851 of SEQ ID NO: 1884703
gagcuuucuccauggagau

SEQ ID NO: 2285607 - RNA, 19 nt, Artificial Sequence
  Description of Artificial Sequence: Synthetic oligonucleotide
  Antisense strand to SEQ ID NO: 2285606
aucuccauggagaaagcuc

SEQ ID NO: 2285608 - RNA, 19 nt, Artificial Sequence
  Description of Artificial Sequence: Synthetic oligonucleotide
  Sense strand starting at position 3852 of SEQ ID NO: 1884703
agcuuucuccauggagauc

SEQ ID NO: 2285609 - RNA, 19 nt, Artificial Sequence
  Description of Artificial Sequence: Synthetic oligonucleotide
  Antisense strand to SEQ ID NO: 2285608
gaucuccauggagaaagcu

SEQ ID NO: 2285610 - RNA, 19 nt, Artificial Sequence
  Description of Artificial Sequence: Synthetic oligonucleotide
  Sense strand starting at position 3940 of SEQ ID NO: 1884703
gugaaaugcucaguugggu

SEQ ID NO: 2285611 - RNA, 19 nt, Artificial Sequence
  Description of Artificial Sequence: Synthetic oligonucleotide
  Antisense strand to SEQ ID NO: 2285610
acccaacugagcauuucac

SEQ ID NO: 2285612 - RNA, 19 nt, Artificial Sequence
  Description of Artificial Sequence: Synthetic oligonucleotide
  Sense strand starting at position 3953 of SEQ ID NO: 1884703
uuggguaacuccuuucugu

SEQ ID NO: 2285613 - RNA, 19 nt, Artificial Sequence
  Description of Artificial Sequence: Synthetic oligonucleotide
  Antisense strand to SEQ ID NO: 2285612
acagaaaggaguuacccaa

SEQ ID NO: 2285614 - RNA, 19 nt, Artificial Sequence
  Description of Artificial Sequence: Synthetic oligonucleotide
  Sense strand starting at position 399 of SEQ ID NO: 1884704
guugaagcaugucuugaca

SEQ ID NO: 2285615 - RNA, 19 nt, Artificial Sequence
  Description of Artificial Sequence: Synthetic oligonucleotide
  Antisense strand to SEQ ID NO: 2285614
ugucaagacaugcuucaac

SEQ ID NO: 2285616 - RNA, 19 nt, Artificial Sequence
  Description of Artificial Sequence: Synthetic oligonucleotide
  Sense strand starting at position 2007 of SEQ ID NO: 1884704
ucccuauuauucuacguuu

SEQ ID NO: 2285617 - RNA, 19 nt, Artificial Sequence
  Description of Artificial Sequence: Synthetic oligonucleotide
  Antisense strand to SEQ ID NO: 2285616
aaacguagaauaauaggga

SEQ ID NO: 2285618 - RNA, 19 nt, Artificial Sequence
  Description of Artificial Sequence: Synthetic oligonucleotide
  Sense strand starting at position 2060 of SEQ ID NO: 1884704
aggucaauuuaugggaaca

SEQ ID NO: 2285619 - RNA, 19 nt, Artificial Sequence
  Description of Artificial Sequence: Synthetic oligonucleotide
  Antisense strand to SEQ ID NO: 2285618
uguucccauaaauugaccu

SEQ ID NO: 2285620 - RNA, 19 nt, Artificial Sequence
  Description of Artificial Sequence: Synthetic oligonucleotide
  Sense strand starting at position 2197 of SEQ ID NO: 1884704
acauuacagugaugaacuu

SEQ ID NO: 2285621 - RNA, 19 nt, Artificial Sequence
  Description of Artificial Sequence: Synthetic oligonucleotide
  Antisense strand to SEQ ID NO: 2285620
aaguucaucacuguaaugu

SEQ ID NO: 2285622 - RNA, 19 nt, Artificial Sequence
  Description of Artificial Sequence: Synthetic oligonucleotide
  Sense strand starting at position 2246 of SEQ ID NO: 1884704
agccaagacugagaguuau

SEQ ID NO: 2285623 - RNA, 19 nt, Artificial Sequence
  Description of Artificial Sequence: Synthetic oligonucleotide
  Antisense strand to SEQ ID NO: 2285622
auaacucucagucuuggcu

SEQ ID NO: 2285624 - RNA, 19 nt, Artificial Sequence
  Description of Artificial Sequence: Synthetic oligonucleotide
  Sense strand starting at position 2252 of SEQ ID NO: 1884704
gacugagaguuauaaggua

SEQ ID NO: 2285625 - RNA, 19 nt, Artificial Sequence
  Description of Artificial Sequence: Synthetic oligonucleotide
  Antisense strand to SEQ ID NO: 2285624
uaccuuauaacucucaguc

SEQ ID NO: 2285626 - RNA, 19 nt, Artificial Sequence
  Description of Artificial Sequence: Synthetic oligonucleotide
  Sense strand starting at position 2283 of SEQ ID NO: 1884704
cugcacucaugauggaagu

SEQ ID NO: 2285627 - RNA, 19 nt, Artificial Sequence
  Description of Artificial Sequence: Synthetic oligonucleotide
  Antisense strand to SEQ ID NO: 2285626
acuuccaucaugagugcag

SEQ ID NO: 2285628 - RNA, 19 nt, Artificial Sequence
  Description of Artificial Sequence: Synthetic oligonucleotide
  Sense strand starting at position 2284 of SEQ ID NO: 1884704
ugcacucaugauggaaguu

SEQ ID NO: 2285629 - RNA, 19 nt, Artificial Sequence
  Description of Artificial Sequence: Synthetic oligonucleotide
  Antisense strand to SEQ ID NO: 2285628
aacuuccaucaugagugca

SEQ ID NO: 2285630 - RNA, 19 nt, Artificial Sequence
  Description of Artificial Sequence: Synthetic oligonucleotide
  Sense strand starting at position 2285 of SEQ ID NO: 1884704
gcacucaugauggaaguuu

SEQ ID NO: 2285631 - RNA, 19 nt, Artificial Sequence
  Description of Artificial Sequence: Synthetic oligonucleotide
  Antisense strand to SEQ ID NO: 2285630
aaacuuccaucaugagugc

SEQ ID NO: 2285632 - RNA, 19 nt, Artificial Sequence
  Description of Artificial Sequence: Synthetic oligonucleotide
  Sense strand starting at position 2328 of SEQ ID NO: 1884704
cucagaaaucaauagugca

SEQ ID NO: 2285633 - RNA, 19 nt, Artificial Sequence
  Description of Artificial Sequence: Synthetic oligonucleotide
  Antisense strand to SEQ ID NO: 2285632
ugcacuauugauuucugag

SEQ ID NO: 2285634 - RNA, 19 nt, Artificial Sequence
  Description of Artificial Sequence: Synthetic oligonucleotide
  Sense strand starting at position 2509 of SEQ ID NO: 1884704
ucuggaccucagugaaaua

SEQ ID NO: 2285635 - RNA, 19 nt, Artificial Sequence
  Description of Artificial Sequence: Synthetic oligonucleotide
  Antisense strand to SEQ ID NO: 2285634
uauuucacugagguccaga

SEQ ID NO: 2285636 - RNA, 19 nt, Artificial Sequence
  Description of Artificial Sequence: Synthetic oligonucleotide
  Sense strand starting at position 2611 of SEQ ID NO: 1884704
guugaagucaagcaauuag

SEQ ID NO: 2285637 - RNA, 19 nt, Artificial Sequence
  Description of Artificial Sequence: Synthetic oligonucleotide
  Antisense strand to SEQ ID NO: 2285636
cuaauugcuugacuucaac

SEQ ID NO: 2285638 - RNA, 19 nt, Artificial Sequence
  Description of Artificial Sequence: Synthetic oligonucleotide
  Sense strand starting at position 2929 of SEQ ID NO: 1884704
auggccaaaucuugaacaa

SEQ ID NO: 2285639 - RNA, 19 nt, Artificial Sequence
  Description of Artificial Sequence: Synthetic oligonucleotide
  Antisense strand to SEQ ID NO: 2285638
uuguucaagauuuggccau

SEQ ID NO: 2285640 - RNA, 19 nt, Artificial Sequence
  Description of Artificial Sequence: Synthetic oligonucleotide
  Sense strand starting at position 3002 of SEQ ID NO: 1884704
auuaaucugugcuguugua

SEQ ID NO: 2285641 - RNA, 19 nt, Artificial Sequence
  Description of Artificial Sequence: Synthetic oligonucleotide
  Antisense strand to SEQ ID NO: 2285640
uacaacagcacagauuaau

SEQ ID NO: 2285642 - RNA, 19 nt, Artificial Sequence
  Description of Artificial Sequence: Synthetic oligonucleotide
  Sense strand starting at position 3073 of SEQ ID NO: 1884704
gcaggagaauucuaaauua

SEQ ID NO: 2285643 - RNA, 19 nt, Artificial Sequence
  Description of Artificial Sequence: Synthetic oligonucleotide
  Antisense strand to SEQ ID NO: 2285642
uaauuuagaauucuccugc

SEQ ID NO: 2285644 - RNA, 19 nt, Artificial Sequence
  Description of Artificial Sequence: Synthetic oligonucleotide
  Sense strand starting at position 3192 of SEQ ID NO: 1884704
ccucaucuauguguuccau

SEQ ID NO: 2285645 - RNA, 19 nt, Artificial Sequence
  Description of Artificial Sequence: Synthetic oligonucleotide
  Antisense strand to SEQ ID NO: 2285644
auggaacacauagaugagg

SEQ ID NO: 2285646 - RNA, 19 nt, Artificial Sequence
  Description of Artificial Sequence: Synthetic oligonucleotide
  Sense strand starting at position 3194 of SEQ ID NO: 1884704
ucaucuauguguuccaugu

SEQ ID NO: 2285647 - RNA, 19 nt, Artificial Sequence
  Description of Artificial Sequence: Synthetic oligonucleotide
  Antisense strand to SEQ ID NO: 2285646
acauggaacacauagauga

SEQ ID NO: 2285648 - RNA, 19 nt, Artificial Sequence
  Description of Artificial Sequence: Synthetic oligonucleotide
  Sense strand starting at position 3198 of SEQ ID NO: 1884704
cuauguguuccauguagcu

SEQ ID NO: 2285649 - RNA, 19 nt, Artificial Sequence
  Description of Artificial Sequence: Synthetic oligonucleotide
  Antisense strand to SEQ ID NO: 2285648
agcuacauggaacacauag

SEQ ID NO: 2285650 - RNA, 19 nt, Artificial Sequence
  Description of Artificial Sequence: Synthetic oligonucleotide
  Sense strand starting at position 3254 of SEQ ID NO: 1884704
gguauaaauguuugugcug

SEQ ID NO: 2285651 - RNA, 19 nt, Artificial Sequence
  Description of Artificial Sequence: Synthetic oligonucleotide
  Antisense strand to SEQ ID NO: 2285650
cagcacaaacauuuauacc

SEQ ID NO: 2285652 - RNA, 19 nt, Artificial Sequence
  Description of Artificial Sequence: Synthetic oligonucleotide
  Sense strand starting at position 3255 of SEQ ID NO: 1884704
guauaaauguuugugcugu

SEQ ID NO: 2285653 - RNA, 19 nt, Artificial Sequence
  Description of Artificial Sequence: Synthetic oligonucleotide
  Antisense strand to SEQ ID NO: 2285652
acagcacaaacauuuauac

SEQ ID NO: 2285654 - RNA, 19 nt, Artificial Sequence
  Description of Artificial Sequence: Synthetic oligonucleotide
  Sense strand starting at position 3259 of SEQ ID NO: 1884704
aaauguuugugcuguugau

SEQ ID NO: 2285655 - RNA, 19 nt, Artificial Sequence
  Description of Artificial Sequence: Synthetic oligonucleotide
  Antisense strand to SEQ ID NO: 2285654
aucaacagcacaaacauuu

SEQ ID NO: 2285656 - RNA, 19 nt, Artificial Sequence
  Description of Artificial Sequence: Synthetic oligonucleotide
  Sense strand starting at position 3312 of SEQ ID NO: 1884704
caguguugcucagaacaug

SEQ ID NO: 2285657 - RNA, 19 nt, Artificial Sequence
  Description of Artificial Sequence: Synthetic oligonucleotide
  Antisense strand to SEQ ID NO: 2285656
cauguucugagcaacacug

SEQ ID NO: 2285658 - RNA, 19 nt, Artificial Sequence
  Description of Artificial Sequence: Synthetic oligonucleotide
  Sense strand starting at position 3321 of SEQ ID NO: 1884704
ucagaacaugcuuggacau

SEQ ID NO: 2285659 - RNA, 19 nt, Artificial Sequence
  Description of Artificial Sequence: Synthetic oligonucleotide
  Antisense strand to SEQ ID NO: 2285658
auguccaagcauguucuga

SEQ ID NO: 2285660 - RNA, 19 nt, Artificial Sequence
  Description of Artificial Sequence: Synthetic oligonucleotide
  Sense strand starting at position 3355 of SEQ ID NO: 1884704
uguguccucuuagguauga

SEQ ID NO: 2285661 - RNA, 19 nt, Artificial Sequence
  Description of Artificial Sequence: Synthetic oligonucleotide
  Antisense strand to SEQ ID NO: 2285660
ucauaccuaagaggacaca

SEQ ID NO: 2285662 - RNA, 19 nt, Artificial Sequence
  Description of Artificial Sequence: Synthetic oligonucleotide
  Sense strand starting at position 3356 of SEQ ID NO: 1884704
guguccucuuagguaugaa

SEQ ID NO: 2285663 - RNA, 19 nt, Artificial Sequence
  Description of Artificial Sequence: Synthetic oligonucleotide
  Antisense strand to SEQ ID NO: 2285662
uucauaccuaagaggacac

SEQ ID NO: 2285664 - RNA, 19 nt, Artificial Sequence
  Description of Artificial Sequence: Synthetic oligonucleotide
  Sense strand starting at position 3360 of SEQ ID NO: 1884704
ccucuuagguaugaaugga

SEQ ID NO: 2285665 - RNA, 19 nt, Artificial Sequence
  Description of Artificial Sequence: Synthetic oligonucleotide
  Antisense strand to SEQ ID NO: 2285664
uccauucauaccuaagagg

SEQ ID NO: 2285666 - RNA, 19 nt, Artificial Sequence
  Description of Artificial Sequence: Synthetic oligonucleotide
  Sense strand starting at position 3370 of SEQ ID NO: 1884704
augaauggaucccuuguca

SEQ ID NO: 2285667 - RNA, 19 nt, Artificial Sequence
  Description of Artificial Sequence: Synthetic oligonucleotide
  Antisense strand to SEQ ID NO: 2285666
ugacaagggauccauucau

SEQ ID NO: 2285668 - RNA, 19 nt, Artificial Sequence
  Description of Artificial Sequence: Synthetic oligonucleotide
  Sense strand starting at position 3374 of SEQ ID NO: 1884704
auggaucccuugucacaga

SEQ ID NO: 2285669 - RNA, 19 nt, Artificial Sequence
  Description of Artificial Sequence: Synthetic oligonucleotide
  Antisense strand to SEQ ID NO: 2285668
ucugugacaagggauccau

SEQ ID NO: 2285670 - RNA, 19 nt, Artificial Sequence
  Description of Artificial Sequence: Synthetic oligonucleotide
  Sense strand starting at position 3375 of SEQ ID NO: 1884704
uggaucccuugucacagaa

SEQ ID NO: 2285671 - RNA, 19 nt, Artificial Sequence
  Description of Artificial Sequence: Synthetic oligonucleotide
  Antisense strand to SEQ ID NO: 2285670
uucugugacaagggaucca

SEQ ID NO: 2285672 - RNA, 19 nt, Artificial Sequence
  Description of Artificial Sequence: Synthetic oligonucleotide
  Sense strand starting at position 3440 of SEQ ID NO: 1884704
gccaacuguggguagaaau

SEQ ID NO: 2285673 - RNA, 19 nt, Artificial Sequence
  Description of Artificial Sequence: Synthetic oligonucleotide
  Antisense strand to SEQ ID NO: 2285672
auuucuacccacaguuggc

SEQ ID NO: 2285674 - RNA, 19 nt, Artificial Sequence
  Description of Artificial Sequence: Synthetic oligonucleotide
  Sense strand starting at position 3554 of SEQ ID NO: 1884704
ugacuuaaaguauguugga

SEQ ID NO: 2285675 - RNA, 19 nt, Artificial Sequence
  Description of Artificial Sequence: Synthetic oligonucleotide
  Antisense strand to SEQ ID NO: 2285674
uccaacauacuuuaaguca

SEQ ID NO: 2285676 - RNA, 19 nt, Artificial Sequence
  Description of Artificial Sequence: Synthetic oligonucleotide
  Sense strand starting at position 3555 of SEQ ID NO: 1884704
gacuuaaaguauguuggaa

SEQ ID NO: 2285677 - RNA, 19 nt, Artificial Sequence
  Description of Artificial Sequence: Synthetic oligonucleotide
  Antisense strand to SEQ ID NO: 2285676
uuccaacauacuuuaaguc

SEQ ID NO: 2285678 - RNA, 19 nt, Artificial Sequence
  Description of Artificial Sequence: Synthetic oligonucleotide
  Sense strand starting at position 3585 of SEQ ID NO: 1884704
guuacaugcucauaccaag

SEQ ID NO: 2285679 - RNA, 19 nt, Artificial Sequence
  Description of Artificial Sequence: Synthetic oligonucleotide
  Antisense strand to SEQ ID NO: 2285678
cuugguaugagcauguaac

SEQ ID NO: 2285680 - RNA, 19 nt, Artificial Sequence
  Description of Artificial Sequence: Synthetic oligonucleotide
  Sense strand starting at position 3686 of SEQ ID NO: 1884704
gggacaacuguaugugaau

SEQ ID NO: 2285681 - RNA, 19 nt, Artificial Sequence
  Description of Artificial Sequence: Synthetic oligonucleotide
  Antisense strand to SEQ ID NO: 2285680
auucacauacaguuguccc

SEQ ID NO: 2285682 - RNA, 19 nt, Artificial Sequence
  Description of Artificial Sequence: Synthetic oligonucleotide
  Sense strand starting at position 3687 of SEQ ID NO: 1884704
ggacaacuguaugugaauu

SEQ ID NO: 2285683 - RNA, 19 nt, Artificial Sequence
  Description of Artificial Sequence: Synthetic oligonucleotide
  Antisense strand to SEQ ID NO: 2285682
aauucacauacaguugucc

SEQ ID NO: 2285684 - RNA, 19 nt, Artificial Sequence
  Description of Artificial Sequence: Synthetic oligonucleotide
  Sense strand starting at position 3756 of SEQ ID NO: 1884704
acaggauagcuguguauga

SEQ ID NO: 2285685 - RNA, 19 nt, Artificial Sequence
  Description of Artificial Sequence: Synthetic oligonucleotide
  Antisense strand to SEQ ID NO: 2285684
ucauacacagcuauccugu

SEQ ID NO: 2285686 - RNA, 19 nt, Artificial Sequence
  Description of Artificial Sequence: Synthetic oligonucleotide
  Sense strand starting at position 3796 of SEQ ID NO: 1884704
uuugcaaaccuuuggugaa

SEQ ID NO: 2285687 - RNA, 19 nt, Artificial Sequence
  Description of Artificial Sequence: Synthetic oligonucleotide
  Antisense strand to SEQ ID NO: 2285686
uucaccaaagguuugcaaa

SEQ ID NO: 2285688 - RNA, 19 nt, Artificial Sequence
  Description of Artificial Sequence: Synthetic oligonucleotide
  Sense strand starting at position 3797 of SEQ ID NO: 1884704
uugcaaaccuuuggugaau

SEQ ID NO: 2285689 - RNA, 19 nt, Artificial Sequence
  Description of Artificial Sequence: Synthetic oligonucleotide
  Antisense strand to SEQ ID NO: 2285688
auucaccaaagguuugcaa

SEQ ID NO: 2285690 - RNA, 19 nt, Artificial Sequence
  Description of Artificial Sequence: Synthetic oligonucleotide
  Sense strand starting at position 3806 of SEQ ID NO: 1884704
uuuggugaauaucagacuu

SEQ ID NO: 2285691 - RNA, 19 nt, Artificial Sequence
  Description of Artificial Sequence: Synthetic oligonucleotide
  Antisense strand to SEQ ID NO: 2285690
aagucugauauucaccaaa

SEQ ID NO: 2285692 - RNA, 19 nt, Artificial Sequence
  Description of Artificial Sequence: Synthetic oligonucleotide
  Sense strand starting at position 3958 of SEQ ID NO: 1884704
ugcaaaugagagugaguaa

SEQ ID NO: 2285693 - RNA, 19 nt, Artificial Sequence
  Description of Artificial Sequence: Synthetic oligonucleotide
  Antisense strand to SEQ ID NO: 2285692
uuacucacucucauuugca

SEQ ID NO: 2285694 - RNA, 19 nt, Artificial Sequence
  Description of Artificial Sequence: Synthetic oligonucleotide
  Sense strand starting at position 421 of SEQ ID NO: 1884705
uauguaagguugucaugag

SEQ ID NO: 2285695 - RNA, 19 nt, Artificial Sequence
  Description of Artificial Sequence: Synthetic oligonucleotide
  Antisense strand to SEQ ID NO: 2285694
cucaugacaaccuuacaua

SEQ ID NO: 2285696 - RNA, 19 nt, Artificial Sequence
  Description of Artificial Sequence: Synthetic oligonucleotide
  Sense strand starting at position 425 of SEQ ID NO: 1884705
uaagguugucaugaggagu

SEQ ID NO: 2285697 - RNA, 19 nt, Artificial Sequence
  Description of Artificial Sequence: Synthetic oligonucleotide
  Antisense strand to SEQ ID NO: 2285696
acuccucaugacaaccuua

SEQ ID NO: 2285698 - RNA, 19 nt, Artificial Sequence
  Description of Artificial Sequence: Synthetic oligonucleotide
  Sense strand starting at position 438 of SEQ ID NO: 1884705
aggaguaaauuggagagau

SEQ ID NO: 2285699 - RNA, 19 nt, Artificial Sequence
  Description of Artificial Sequence: Synthetic oligonucleotide
  Antisense strand to SEQ ID NO: 2285698
aucucuccaauuuacuccu

SEQ ID NO: 2285700 - RNA, 19 nt, Artificial Sequence
  Description of Artificial Sequence: Synthetic oligonucleotide
  Sense strand starting at position 452 of SEQ ID NO: 1884705
gagauuaagugagaggacu

SEQ ID NO: 2285701 - RNA, 19 nt, Artificial Sequence
  Description of Artificial Sequence: Synthetic oligonucleotide
  Antisense strand to SEQ ID NO: 2285700
aguccucucacuuaaucuc

SEQ ID NO: 2285702 - RNA, 19 nt, Artificial Sequence
  Description of Artificial Sequence: Synthetic oligonucleotide
  Sense strand starting at position 486 of SEQ ID NO: 1884705
guaggugcgaggcagaaua

SEQ ID NO: 2285703 - RNA, 19 nt, Artificial Sequence
  Description of Artificial Sequence: Synthetic oligonucleotide
  Antisense strand to SEQ ID NO: 2285702
uauucugccucgcaccuac

SEQ ID NO: 2285704 - RNA, 19 nt, Artificial Sequence
  Description of Artificial Sequence: Synthetic oligonucleotide
  Sense strand starting at position 503 of SEQ ID NO: 1884705
uagacaguugaguggauau

SEQ ID NO: 2285705 - RNA, 19 nt, Artificial Sequence
  Description of Artificial Sequence: Synthetic oligonucleotide
  Antisense strand to SEQ ID NO: 2285704
auauccacucaacugucua

SEQ ID NO: 2285706 - RNA, 19 nt, Artificial Sequence
  Description of Artificial Sequence: Synthetic oligonucleotide
  Sense strand starting at position 516 of SEQ ID NO: 1884705
ggauauuggccaugauggu

SEQ ID NO: 2285707 - RNA, 19 nt, Artificial Sequence
  Description of Artificial Sequence: Synthetic oligonucleotide
  Antisense strand to SEQ ID NO: 2285706
accaucauggccaauaucc

SEQ ID NO: 2285708 - RNA, 19 nt, Artificial Sequence
  Description of Artificial Sequence: Synthetic oligonucleotide
  Sense strand starting at position 635 of SEQ ID NO: 1884705
cagagacaguuccucuagu

SEQ ID NO: 2285709 - RNA, 19 nt, Artificial Sequence
  Description of Artificial Sequence: Synthetic oligonucleotide
  Antisense strand to SEQ ID NO: 2285708
acuagaggaacugucucug

SEQ ID NO: 2285710 - RNA, 19 nt, Artificial Sequence
  Description of Artificial Sequence: Synthetic oligonucleotide
  Sense strand starting at position 672 of SEQ ID NO: 1884705
uguggcucuucgcuguaau

SEQ ID NO: 2285711 - RNA, 19 nt, Artificial Sequence
  Description of Artificial Sequence: Synthetic oligonucleotide
  Antisense strand to SEQ ID NO: 2285710
auuacagcgaagagccaca

SEQ ID NO: 2285712 - RNA, 19 nt, Artificial Sequence
  Description of Artificial Sequence: Synthetic oligonucleotide
  Sense strand starting at position 838 of SEQ ID NO: 1884705
auagaaacgacuuguggua

SEQ ID NO: 2285713 - RNA, 19 nt, Artificial Sequence
  Description of Artificial Sequence: Synthetic oligonucleotide
  Antisense strand to SEQ ID NO: 2285712
uaccacaagucguuucuau

SEQ ID NO: 2285714 - RNA, 19 nt, Artificial Sequence
  Description of Artificial Sequence: Synthetic oligonucleotide
  Sense strand starting at position 892 of SEQ ID NO: 1884705
cugacugguagauggagau

SEQ ID NO: 2285715 - RNA, 19 nt, Artificial Sequence
  Description of Artificial Sequence: Synthetic oligonucleotide
  Antisense strand to SEQ ID NO: 2285714
aucuccaucuaccagucag

SEQ ID NO: 2285716 - RNA, 19 nt, Artificial Sequence
  Description of Artificial Sequence: Synthetic oligonucleotide
  Sense strand starting at position 969 of SEQ ID NO: 1884705
ggguucuacguggaaggaa

SEQ ID NO: 2285717 - RNA, 19 nt, Artificial Sequence
  Description of Artificial Sequence: Synthetic oligonucleotide
  Antisense strand to SEQ ID NO: 2285716
uuccuuccacguagaaccc

SEQ ID NO: 2285718 - RNA, 19 nt, Artificial Sequence
  Description of Artificial Sequence: Synthetic oligonucleotide
  Sense strand starting at position 1029 of SEQ ID NO: 1884705
gcaugugccauccggaaga

SEQ ID NO: 2285719 - RNA, 19 nt, Artificial Sequence
  Description of Artificial Sequence: Synthetic oligonucleotide
  Antisense strand to SEQ ID NO: 2285718
ucuuccggauggcacaugc

SEQ ID NO: 2285720 - RNA, 19 nt, Artificial Sequence
  Description of Artificial Sequence: Synthetic oligonucleotide
  Sense strand starting at position 1048 of SEQ ID NO: 1884705
ggagaaugucgauguaacu

SEQ ID NO: 2285721 - RNA, 19 nt, Artificial Sequence
  Description of Artificial Sequence: Synthetic oligonucleotide
  Antisense strand to SEQ ID NO: 2285720
aguuacaucgacauucucc

SEQ ID NO: 2285722 - RNA, 19 nt, Artificial Sequence
  Description of Artificial Sequence: Synthetic oligonucleotide
  Sense strand starting at position 1054 of SEQ ID NO: 1884705
ugucgauguaacugugaaa

SEQ ID NO: 2285723 - RNA, 19 nt, Artificial Sequence
  Description of Artificial Sequence: Synthetic oligonucleotide
  Antisense strand to SEQ ID NO: 2285722
uuucacaguuacaucgaca

SEQ ID NO: 2285724 - RNA, 19 nt, Artificial Sequence
  Description of Artificial Sequence: Synthetic oligonucleotide
  Sense strand starting at position 1156 of SEQ ID NO: 1884705
cugucuggcuucucugaau

SEQ ID NO: 2285725 - RNA, 19 nt, Artificial Sequence
  Description of Artificial Sequence: Synthetic oligonucleotide
  Antisense strand to SEQ ID NO: 2285724
auucagagaagccagacag

SEQ ID NO: 2285726 - RNA, 19 nt, Artificial Sequence
  Description of Artificial Sequence: Synthetic oligonucleotide
  Sense strand starting at position 1182 of SEQ ID NO: 1884705
gggagaagaugcguuugaa

SEQ ID NO: 2285727 - RNA, 19 nt, Artificial Sequence
  Description of Artificial Sequence: Synthetic oligonucleotide
  Antisense strand to SEQ ID NO: 2285726
uucaaacgcaucuucuccc

SEQ ID NO: 2285728 - RNA, 19 nt, Artificial Sequence
  Description of Artificial Sequence: Synthetic oligonucleotide
  Sense strand starting at position 1290 of SEQ ID NO: 1884705
gagccuaauggucgcaaga

SEQ ID NO: 2285729 - RNA, 19 nt, Artificial Sequence
  Description of Artificial Sequence: Synthetic oligonucleotide
  Antisense strand to SEQ ID NO: 2285728
ucuugcgaccauuaggcuc

SEQ ID NO: 2285730 - RNA, 19 nt, Artificial Sequence
  Description of Artificial Sequence: Synthetic oligonucleotide
  Sense strand starting at position 1450 of SEQ ID NO: 1884705
gggcgaacuuugcuucagu

SEQ ID NO: 2285731 - RNA, 19 nt, Artificial Sequence
  Description of Artificial Sequence: Synthetic oligonucleotide
  Antisense strand to SEQ ID NO: 2285730
acugaagcaaaguucgccc

SEQ ID NO: 2285732 - RNA, 19 nt, Artificial Sequence
  Description of Artificial Sequence: Synthetic oligonucleotide
  Sense strand starting at position 1451 of SEQ ID NO: 1884705
ggcgaacuuugcuucaguu

SEQ ID NO: 2285733 - RNA, 19 nt, Artificial Sequence
  Description of Artificial Sequence: Synthetic oligonucleotide
  Antisense strand to SEQ ID NO: 2285732
aacugaagcaaaguucgcc

SEQ ID NO: 2285734 - RNA, 19 nt, Artificial Sequence
  Description of Artificial Sequence: Synthetic oligonucleotide
  Sense strand starting at position 1594 of SEQ ID NO: 1884705
aguacugaggccugagaag

SEQ ID NO: 2285735 - RNA, 19 nt, Artificial Sequence
  Description of Artificial Sequence: Synthetic oligonucleotide
  Antisense strand to SEQ ID NO: 2285734
cuucucaggccucaguacu

SEQ ID NO: 2285736 - RNA, 19 nt, Artificial Sequence
  Description of Artificial Sequence: Synthetic oligonucleotide
  Sense strand starting at position 2118 of SEQ ID NO: 1884705
gguuuguggcugugaggua

SEQ ID NO: 2285737 - RNA, 19 nt, Artificial Sequence
  Description of Artificial Sequence: Synthetic oligonucleotide
  Antisense strand to SEQ ID NO: 2285736
uaccucacagccacaaacc

SEQ ID NO: 2285738 - RNA, 19 nt, Artificial Sequence
  Description of Artificial Sequence: Synthetic oligonucleotide
  Sense strand starting at position 2544 of SEQ ID NO: 1884705
uaaagauaaucccgguaag

SEQ ID NO: 2285739 - RNA, 19 nt, Artificial Sequence
  Description of Artificial Sequence: Synthetic oligonucleotide
  Antisense strand to SEQ ID NO: 2285738
cuuaccgggauuaucuuua

SEQ ID NO: 2285740 - RNA, 19 nt, Artificial Sequence
  Description of Artificial Sequence: Synthetic oligonucleotide
  Sense strand starting at position 2545 of SEQ ID NO: 1884705
aaagauaaucccgguaaga

SEQ ID NO: 2285741 - RNA, 19 nt, Artificial Sequence
  Description of Artificial Sequence: Synthetic oligonucleotide
  Antisense strand to SEQ ID NO: 2285740
ucuuaccgggauuaucuuu

SEQ ID NO: 2285742 - RNA, 19 nt, Artificial Sequence
  Description of Artificial Sequence: Synthetic oligonucleotide
  Sense strand starting at position 2547 of SEQ ID NO: 1884705
agauaaucccgguaagagu

SEQ ID NO: 2285743 - RNA, 19 nt, Artificial Sequence
  Description of Artificial Sequence: Synthetic oligonucleotide
  Antisense strand to SEQ ID NO: 2285742
acucuuaccgggauuaucu

SEQ ID NO: 2285744 - RNA, 19 nt, Artificial Sequence
  Description of Artificial Sequence: Synthetic oligonucleotide
  Sense strand starting at position 2612 of SEQ ID NO: 1884705
ugguuaaguggugauagag

SEQ ID NO: 2285745 - RNA, 19 nt, Artificial Sequence
  Description of Artificial Sequence: Synthetic oligonucleotide
  Antisense strand to SEQ ID NO: 2285744
cucuaucaccacuuaacca

SEQ ID NO: 2285746 - RNA, 19 nt, Artificial Sequence
  Description of Artificial Sequence: Synthetic oligonucleotide
  Sense strand starting at position 2768 of SEQ ID NO: 1884705
gcgagagucugagcucaac

SEQ ID NO: 2285747 - RNA, 19 nt, Artificial Sequence
  Description of Artificial Sequence: Synthetic oligonucleotide
  Antisense strand to SEQ ID NO: 2285746
guugagcucagacucucgc

SEQ ID NO: 2285748 - RNA, 19 nt, Artificial Sequence
  Description of Artificial Sequence: Synthetic oligonucleotide
  Sense strand starting at position 2791 of SEQ ID NO: 1884705
cccaguacugauggagaau

SEQ ID NO: 2285749 - RNA, 19 nt, Artificial Sequence
  Description of Artificial Sequence: Synthetic oligonucleotide
  Antisense strand to SEQ ID NO: 2285748
auucuccaucaguacuggg

SEQ ID NO: 2285750 - RNA, 19 nt, Artificial Sequence
  Description of Artificial Sequence: Synthetic oligonucleotide
  Sense strand starting at position 2811 of SEQ ID NO: 1884705
gaagcuagggcauaaaugu

SEQ ID NO: 2285751 - RNA, 19 nt, Artificial Sequence
  Description of Artificial Sequence: Synthetic oligonucleotide
  Antisense strand to SEQ ID NO: 2285750
acauuuaugcccuagcuuc

SEQ ID NO: 2285752 - RNA, 19 nt, Artificial Sequence
  Description of Artificial Sequence: Synthetic oligonucleotide
  Sense strand starting at position 2817 of SEQ ID NO: 1884705
agggcauaaaugugauaca

SEQ ID NO: 2285753 - RNA, 19 nt, Artificial Sequence
  Description of Artificial Sequence: Synthetic oligonucleotide
  Antisense strand to SEQ ID NO: 2285752
uguaucacauuuaugcccu

SEQ ID NO: 2285754 - RNA, 19 nt, Artificial Sequence
  Description of Artificial Sequence: Synthetic oligonucleotide
  Sense strand starting at position 2818 of SEQ ID NO: 1884705
gggcauaaaugugauacaa

SEQ ID NO: 2285755 - RNA, 19 nt, Artificial Sequence
  Description of Artificial Sequence: Synthetic oligonucleotide
  Antisense strand to SEQ ID NO: 2285754
uuguaucacauuuaugccc

SEQ ID NO: 2285756 - RNA, 19 nt, Artificial Sequence
  Description of Artificial Sequence: Synthetic oligonucleotide
  Sense strand starting at position 2820 of SEQ ID NO: 1884705
gcauaaaugugauacaaag

SEQ ID NO: 2285757 - RNA, 19 nt, Artificial Sequence
  Description of Artificial Sequence: Synthetic oligonucleotide
  Antisense strand to SEQ ID NO: 2285756
cuuuguaucacauuuaugc

SEQ ID NO: 2285758 - RNA, 19 nt, Artificial Sequence
  Description of Artificial Sequence: Synthetic oligonucleotide
  Sense strand starting at position 2845 of SEQ ID NO: 1884705
guggaugaguugccuuaua

SEQ ID NO: 2285759 - RNA, 19 nt, Artificial Sequence
  Description of Artificial Sequence: Synthetic oligonucleotide
  Antisense strand to SEQ ID NO: 2285758
uauaaggcaacucauccac

SEQ ID NO: 2285760 - RNA, 19 nt, Artificial Sequence
  Description of Artificial Sequence: Synthetic oligonucleotide
  Sense strand starting at position 3384 of SEQ ID NO: 1884705
ccugguuccaagugugcau

SEQ ID NO: 2285761 - RNA, 19 nt, Artificial Sequence
  Description of Artificial Sequence: Synthetic oligonucleotide
  Antisense strand to SEQ ID NO: 2285760
augcacacuuggaaccagg

SEQ ID NO: 2285762 - RNA, 19 nt, Artificial Sequence
  Description of Artificial Sequence: Synthetic oligonucleotide
  Sense strand starting at position 3481 of SEQ ID NO: 1884705
augaguugagcuuguuucu

SEQ ID NO: 2285763 - RNA, 19 nt, Artificial Sequence
  Description of Artificial Sequence: Synthetic oligonucleotide
  Antisense strand to SEQ ID NO: 2285762
agaaacaagcucaacucau

SEQ ID NO: 2285764 - RNA, 19 nt, Artificial Sequence
  Description of Artificial Sequence: Synthetic oligonucleotide
  Sense strand starting at position 3490 of SEQ ID NO: 1884705
gcuuguuucuucucaguuu

SEQ ID NO: 2285765 - RNA, 19 nt, Artificial Sequence
  Description of Artificial Sequence: Synthetic oligonucleotide
  Antisense strand to SEQ ID NO: 2285764
aaacugagaagaaacaagc

SEQ ID NO: 2285766 - RNA, 19 nt, Artificial Sequence
  Description of Artificial Sequence: Synthetic oligonucleotide
  Sense strand starting at position 3531 of SEQ ID NO: 1884705
gguagaggacuaugugaug

SEQ ID NO: 2285767 - RNA, 19 nt, Artificial Sequence
  Description of Artificial Sequence: Synthetic oligonucleotide
  Antisense strand to SEQ ID NO: 2285766
caucacauaguccucuacc

SEQ ID NO: 2285768 - RNA, 19 nt, Artificial Sequence
  Description of Artificial Sequence: Synthetic oligonucleotide
  Sense strand starting at position 3849 of SEQ ID NO: 1884705
uccugacuccacuguuaga

SEQ ID NO: 2285769 - RNA, 19 nt, Artificial Sequence
  Description of Artificial Sequence: Synthetic oligonucleotide
  Antisense strand to SEQ ID NO: 2285768
ucuaacaguggagucagga

SEQ ID NO: 2285770 - RNA, 19 nt, Artificial Sequence
  Description of Artificial Sequence: Synthetic oligonucleotide
  Sense strand starting at position 3852 of SEQ ID NO: 1884705
ugacuccacuguuagauca

SEQ ID NO: 2285771 - RNA, 19 nt, Artificial Sequence
  Description of Artificial Sequence: Synthetic oligonucleotide
  Antisense strand to SEQ ID NO: 2285770
ugaucuaacaguggaguca

SEQ ID NO: 2285772 - RNA, 19 nt, Artificial Sequence
  Description of Artificial Sequence: Synthetic oligonucleotide
  Sense strand starting at position 3854 of SEQ ID NO: 1884705
acuccacuguuagaucauu

SEQ ID NO: 2285773 - RNA, 19 nt, Artificial Sequence
  Description of Artificial Sequence: Synthetic oligonucleotide
  Antisense strand to SEQ ID NO: 2285772
aaugaucuaacaguggagu

SEQ ID NO: 2285774 - RNA, 19 nt, Artificial Sequence
  Description of Artificial Sequence: Synthetic oligonucleotide
  Sense strand starting at position 10 of SEQ ID NO: 1884706
uacagcuuauagguuagaa

SEQ ID NO: 2285775 - RNA, 19 nt, Artificial Sequence
  Description of Artificial Sequence: Synthetic oligonucleotide
  Antisense strand to SEQ ID NO: 2285774
uucuaaccuauaagcugua

SEQ ID NO: 2285776 - RNA, 19 nt, Artificial Sequence
  Description of Artificial Sequence: Synthetic oligonucleotide
  Sense strand starting at position 97 of SEQ ID NO: 1884706
gcauccauugccugauuua

SEQ ID NO: 2285777 - RNA, 19 nt, Artificial Sequence
  Description of Artificial Sequence: Synthetic oligonucleotide
  Antisense strand to SEQ ID NO: 2285776
uaaaucaggcaauggaugc

SEQ ID NO: 2285778 - RNA, 19 nt, Artificial Sequence
  Description of Artificial Sequence: Synthetic oligonucleotide
  Sense strand starting at position 184 of SEQ ID NO: 1884706
aaagcuauuuaguggcaga

SEQ ID NO: 2285779 - RNA, 19 nt, Artificial Sequence
  Description of Artificial Sequence: Synthetic oligonucleotide
  Antisense strand to SEQ ID NO: 2285778
ucugccacuaaauagcuuu

SEQ ID NO: 2285780 - RNA, 19 nt, Artificial Sequence
  Description of Artificial Sequence: Synthetic oligonucleotide
  Sense strand starting at position 187 of SEQ ID NO: 1884706
gcuauuuaguggcagagac

SEQ ID NO: 2285781 - RNA, 19 nt, Artificial Sequence
  Description of Artificial Sequence: Synthetic oligonucleotide
  Antisense strand to SEQ ID NO: 2285780
gucucugccacuaaauagc

SEQ ID NO: 2285782 - RNA, 19 nt, Artificial Sequence
  Description of Artificial Sequence: Synthetic oligonucleotide
  Sense strand starting at position 214 of SEQ ID NO: 1884706
gaacucaggucuccaggaa

SEQ ID NO: 2285783 - RNA, 19 nt, Artificial Sequence
  Description of Artificial Sequence: Synthetic oligonucleotide
  Antisense strand to SEQ ID NO: 2285782
uuccuggagaccugaguuc

SEQ ID NO: 2285784 - RNA, 19 nt, Artificial Sequence
  Description of Artificial Sequence: Synthetic oligonucleotide
  Sense strand starting at position 229 of SEQ ID NO: 1884706
ggaacaaaugcugguucuu

SEQ ID NO: 2285785 - RNA, 19 nt, Artificial Sequence
  Description of Artificial Sequence: Synthetic oligonucleotide
  Antisense strand to SEQ ID NO: 2285784
aagaaccagcauuuguucc

SEQ ID NO: 2285786 - RNA, 19 nt, Artificial Sequence
  Description of Artificial Sequence: Synthetic oligonucleotide
  Sense strand starting at position 234 of SEQ ID NO: 1884706
aaaugcugguucuuaaguu

SEQ ID NO: 2285787 - RNA, 19 nt, Artificial Sequence
  Description of Artificial Sequence: Synthetic oligonucleotide
  Antisense strand to SEQ ID NO: 2285786
aacuuaagaaccagcauuu

SEQ ID NO: 2285788 - RNA, 19 nt, Artificial Sequence
  Description of Artificial Sequence: Synthetic oligonucleotide
  Sense strand starting at position 278 of SEQ ID NO: 1884706
cgugauucacggcaagaac

SEQ ID NO: 2285789 - RNA, 19 nt, Artificial Sequence
  Description of Artificial Sequence: Synthetic oligonucleotide
  Antisense strand to SEQ ID NO: 2285788
guucuugccgugaaucacg

SEQ ID NO: 2285790 - RNA, 19 nt, Artificial Sequence
  Description of Artificial Sequence: Synthetic oligonucleotide
  Sense strand starting at position 295 of SEQ ID NO: 1884706
acugcaaacugugcuuaga

SEQ ID NO: 2285791 - RNA, 19 nt, Artificial Sequence
  Description of Artificial Sequence: Synthetic oligonucleotide
  Antisense strand to SEQ ID NO: 2285790
ucuaagcacaguuugcagu

SEQ ID NO: 2285792 - RNA, 19 nt, Artificial Sequence
  Description of Artificial Sequence: Synthetic oligonucleotide
  Sense strand starting at position 297 of SEQ ID NO: 1884706
ugcaaacugugcuuagauc

SEQ ID NO: 2285793 - RNA, 19 nt, Artificial Sequence
  Description of Artificial Sequence: Synthetic oligonucleotide
  Antisense strand to SEQ ID NO: 2285792
gaucuaagcacaguuugca

SEQ ID NO: 2285794 - RNA, 19 nt, Artificial Sequence
  Description of Artificial Sequence: Synthetic oligonucleotide
  Sense strand starting at position 298 of SEQ ID NO: 1884706
gcaaacugugcuuagaucu

SEQ ID NO: 2285795 - RNA, 19 nt, Artificial Sequence
  Description of Artificial Sequence: Synthetic oligonucleotide
  Antisense strand to SEQ ID NO: 2285794
agaucuaagcacaguuugc

SEQ ID NO: 2285796 - RNA, 19 nt, Artificial Sequence
  Description of Artificial Sequence: Synthetic oligonucleotide
  Sense strand starting at position 320 of SEQ ID NO: 1884706
ucaucaaauggccaaguuu

SEQ ID NO: 2285797 - RNA, 19 nt, Artificial Sequence
  Description of Artificial Sequence: Synthetic oligonucleotide
  Antisense strand to SEQ ID NO: 2285796
aaacuuggccauuugauga

SEQ ID NO: 2285798 - RNA, 19 nt, Artificial Sequence
  Description of Artificial Sequence: Synthetic oligonucleotide
  Sense strand starting at position 357 of SEQ ID NO: 1884706
uggaucaguucugucagau

SEQ ID NO: 2285799 - RNA, 19 nt, Artificial Sequence
  Description of Artificial Sequence: Synthetic oligonucleotide
  Antisense strand to SEQ ID NO: 2285798
aucugacagaacugaucca

SEQ ID NO: 2285800 - RNA, 19 nt, Artificial Sequence
  Description of Artificial Sequence: Synthetic oligonucleotide
  Sense strand starting at position 469 of SEQ ID NO: 1884706
gaggcagggacuuagucau

SEQ ID NO: 2285801 - RNA, 19 nt, Artificial Sequence
  Description of Artificial Sequence: Synthetic oligonucleotide
  Antisense strand to SEQ ID NO: 2285800
augacuaagucccugccuc

SEQ ID NO: 2285802 - RNA, 19 nt, Artificial Sequence
  Description of Artificial Sequence: Synthetic oligonucleotide
  Sense strand starting at position 475 of SEQ ID NO: 1884706
gggacuuagucauuguguu

SEQ ID NO: 2285803 - RNA, 19 nt, Artificial Sequence
  Description of Artificial Sequence: Synthetic oligonucleotide
  Antisense strand to SEQ ID NO: 2285802
aacacaaugacuaaguccc

SEQ ID NO: 2285804 - RNA, 19 nt, Artificial Sequence
  Description of Artificial Sequence: Synthetic oligonucleotide
  Sense strand starting at position 476 of SEQ ID NO: 1884706
ggacuuagucauuguguuc

SEQ ID NO: 2285805 - RNA, 19 nt, Artificial Sequence
  Description of Artificial Sequence: Synthetic oligonucleotide
  Antisense strand to SEQ ID NO: 2285804
gaacacaaugacuaagucc

SEQ ID NO: 2285806 - RNA, 19 nt, Artificial Sequence
  Description of Artificial Sequence: Synthetic oligonucleotide
  Sense strand starting at position 479 of SEQ ID NO: 1884706
cuuagucauuguguucuuu

SEQ ID NO: 2285807 - RNA, 19 nt, Artificial Sequence
  Description of Artificial Sequence: Synthetic oligonucleotide
  Antisense strand to SEQ ID NO: 2285806
aaagaacacaaugacuaag

SEQ ID NO: 2285808 - RNA, 19 nt, Artificial Sequence
  Description of Artificial Sequence: Synthetic oligonucleotide
  Sense strand starting at position 481 of SEQ ID NO: 1884706
uagucauuguguucuuuau

SEQ ID NO: 2285809 - RNA, 19 nt, Artificial Sequence
  Description of Artificial Sequence: Synthetic oligonucleotide
  Antisense strand to SEQ ID NO: 2285808
auaaagaacacaaugacua

SEQ ID NO: 2285810 - RNA, 19 nt, Artificial Sequence
  Description of Artificial Sequence: Synthetic oligonucleotide
  Sense strand starting at position 483 of SEQ ID NO: 1884706
gucauuguguucuuuauac

SEQ ID NO: 2285811 - RNA, 19 nt, Artificial Sequence
  Description of Artificial Sequence: Synthetic oligonucleotide
  Antisense strand to SEQ ID NO: 2285810
guauaaagaacacaaugac

SEQ ID NO: 2285812 - RNA, 19 nt, Artificial Sequence
  Description of Artificial Sequence: Synthetic oligonucleotide
  Sense strand starting at position 867 of SEQ ID NO: 1884706
augcaugucugacugauua

SEQ ID NO: 2285813 - RNA, 19 nt, Artificial Sequence
  Description of Artificial Sequence: Synthetic oligonucleotide
  Antisense strand to SEQ ID NO: 2285812
uaaucagucagacaugcau

SEQ ID NO: 2285814 - RNA, 19 nt, Artificial Sequence
  Description of Artificial Sequence: Synthetic oligonucleotide
  Sense strand starting at position 869 of SEQ ID NO: 1884706
gcaugucugacugauuaag

SEQ ID NO: 2285815 - RNA, 19 nt, Artificial Sequence
  Description of Artificial Sequence: Synthetic oligonucleotide
  Antisense strand to SEQ ID NO: 2285814
cuuaaucagucagacaugc

SEQ ID NO: 2285816 - RNA, 19 nt, Artificial Sequence
  Description of Artificial Sequence: Synthetic oligonucleotide
  Sense strand starting at position 1002 of SEQ ID NO: 1884706
ggcagacucuccuuacuca

SEQ ID NO: 2285817 - RNA, 19 nt, Artificial Sequence
  Description of Artificial Sequence: Synthetic oligonucleotide
  Antisense strand to SEQ ID NO: 2285816
ugaguaaggagagucugcc

SEQ ID NO: 2285818 - RNA, 19 nt, Artificial Sequence
  Description of Artificial Sequence: Synthetic oligonucleotide
  Sense strand starting at position 1051 of SEQ ID NO: 1884706
ggguucuugacagauaagc

SEQ ID NO: 2285819 - RNA, 19 nt, Artificial Sequence
  Description of Artificial Sequence: Synthetic oligonucleotide
  Antisense strand to SEQ ID NO: 2285818
gcuuaucugucaagaaccc

SEQ ID NO: 2285820 - RNA, 19 nt, Artificial Sequence
  Description of Artificial Sequence: Synthetic oligonucleotide
  Sense strand starting at position 1240 of SEQ ID NO: 1884706
agggaaugggucugauagu

SEQ ID NO: 2285821 - RNA, 19 nt, Artificial Sequence
  Description of Artificial Sequence: Synthetic oligonucleotide
  Antisense strand to SEQ ID NO: 2285820
acuaucagacccauucccu

SEQ ID NO: 2285822 - RNA, 19 nt, Artificial Sequence
  Description of Artificial Sequence: Synthetic oligonucleotide
  Sense strand starting at position 1249 of SEQ ID NO: 1884706
gucugauaguuuccuugga

SEQ ID NO: 2285823 - RNA, 19 nt, Artificial Sequence
  Description of Artificial Sequence: Synthetic oligonucleotide
  Antisense strand to SEQ ID NO: 2285822
uccaaggaaacuaucagac

SEQ ID NO: 2285824 - RNA, 19 nt, Artificial Sequence
  Description of Artificial Sequence: Synthetic oligonucleotide
  Sense strand starting at position 1462 of SEQ ID NO: 1884706
ggguuucuuccuggagaca

SEQ ID NO: 2285825 - RNA, 19 nt, Artificial Sequence
  Description of Artificial Sequence: Synthetic oligonucleotide
  Antisense strand to SEQ ID NO: 2285824
ugucuccaggaagaaaccc

SEQ ID NO: 2285826 - RNA, 19 nt, Artificial Sequence
  Description of Artificial Sequence: Synthetic oligonucleotide
  Sense strand starting at position 1463 of SEQ ID NO: 1884706
gguuucuuccuggagacag

SEQ ID NO: 2285827 - RNA, 19 nt, Artificial Sequence
  Description of Artificial Sequence: Synthetic oligonucleotide
  Antisense strand to SEQ ID NO: 2285826
cugucuccaggaagaaacc

SEQ ID NO: 2285828 - RNA, 19 nt, Artificial Sequence
  Description of Artificial Sequence: Synthetic oligonucleotide
  Sense strand starting at position 1516 of SEQ ID NO: 1884706
gagaaacuuucugaggcca

SEQ ID NO: 2285829 - RNA, 19 nt, Artificial Sequence
  Description of Artificial Sequence: Synthetic oligonucleotide
  Antisense strand to SEQ ID NO: 2285828
uggccucagaaaguuucuc

SEQ ID NO: 2285830 - RNA, 19 nt, Artificial Sequence
  Description of Artificial Sequence: Synthetic oligonucleotide
  Sense strand starting at position 1535 of SEQ ID NO: 1884706
agauaaagaguaugcaagu

SEQ ID NO: 2285831 - RNA, 19 nt, Artificial Sequence
  Description of Artificial Sequence: Synthetic oligonucleotide
  Antisense strand to SEQ ID NO: 2285830
acuugcauacucuuuaucu

SEQ ID NO: 2285832 - RNA, 19 nt, Artificial Sequence
  Description of Artificial Sequence: Synthetic oligonucleotide
  Sense strand starting at position 3254 of SEQ ID NO: 1884706
caggcugaguucucacaag

SEQ ID NO: 2285833 - RNA, 19 nt, Artificial Sequence
  Description of Artificial Sequence: Synthetic oligonucleotide
  Antisense strand to SEQ ID NO: 2285832
cuugugagaacucagccug

SEQ ID NO: 2285834 - RNA, 19 nt, Artificial Sequence
  Description of Artificial Sequence: Synthetic oligonucleotide
  Sense strand starting at position 3376 of SEQ ID NO: 1884706
ugaguugauauaugcuaag

SEQ ID NO: 2285835 - RNA, 19 nt, Artificial Sequence
  Description of Artificial Sequence: Synthetic oligonucleotide
  Antisense strand to SEQ ID NO: 2285834
cuuagcauauaucaacuca

SEQ ID NO: 2285836 - RNA, 19 nt, Artificial Sequence
  Description of Artificial Sequence: Synthetic oligonucleotide
  Sense strand starting at position 3382 of SEQ ID NO: 1884706
gauauaugcuaagugcuuu

SEQ ID NO: 2285837 - RNA, 19 nt, Artificial Sequence
  Description of Artificial Sequence: Synthetic oligonucleotide
  Antisense strand to SEQ ID NO: 2285836
aaagcacuuagcauauauc

SEQ ID NO: 2285838 - RNA, 19 nt, Artificial Sequence
  Description of Artificial Sequence: Synthetic oligonucleotide
  Sense strand starting at position 3386 of SEQ ID NO: 1884706
uaugcuaagugcuuugaaa

SEQ ID NO: 2285839 - RNA, 19 nt, Artificial Sequence
  Description of Artificial Sequence: Synthetic oligonucleotide
  Antisense strand to SEQ ID NO: 2285838
uuucaaagcacuuagcaua

SEQ ID NO: 2285840 - RNA, 19 nt, Artificial Sequence
  Description of Artificial Sequence: Synthetic oligonucleotide
  Sense strand starting at position 3450 of SEQ ID NO: 1884706
auauuucucccaugcuguu

SEQ ID NO: 2285841 - RNA, 19 nt, Artificial Sequence
  Description of Artificial Sequence: Synthetic oligonucleotide
  Antisense strand to SEQ ID NO: 2285840
aacagcaugggagaaauau

SEQ ID NO: 2285842 - RNA, 19 nt, Artificial Sequence
  Description of Artificial Sequence: Synthetic oligonucleotide
  Sense strand starting at position 3463 of SEQ ID NO: 1884706
gcuguuacucuccaaagcu

SEQ ID NO: 2285843 - RNA, 19 nt, Artificial Sequence
  Description of Artificial Sequence: Synthetic oligonucleotide
  Antisense strand to SEQ ID NO: 2285842
agcuuuggagaguaacagc

SEQ ID NO: 2285844 - RNA, 19 nt, Artificial Sequence
  Description of Artificial Sequence: Synthetic oligonucleotide
  Sense strand starting at position 3473 of SEQ ID NO: 1884706
uccaaagcugcccgauaau

SEQ ID NO: 2285845 - RNA, 19 nt, Artificial Sequence
  Description of Artificial Sequence: Synthetic oligonucleotide
  Antisense strand to SEQ ID NO: 2285844
auuaucgggcagcuuugga

SEQ ID NO: 2285846 - RNA, 19 nt, Artificial Sequence
  Description of Artificial Sequence: Synthetic oligonucleotide
  Sense strand starting at position 3779 of SEQ ID NO: 1884706
aaggaagaguuagaagagu

SEQ ID NO: 2285847 - RNA, 19 nt, Artificial Sequence
  Description of Artificial Sequence: Synthetic oligonucleotide
  Antisense strand to SEQ ID NO: 2285846
acucuucuaacucuuccuu

SEQ ID NO: 2285848 - RNA, 19 nt, Artificial Sequence
  Description of Artificial Sequence: Synthetic oligonucleotide
  Sense strand starting at position 3785 of SEQ ID NO: 1884706
gaguuagaagagugaauug

SEQ ID NO: 2285849 - RNA, 19 nt, Artificial Sequence
  Description of Artificial Sequence: Synthetic oligonucleotide
  Antisense strand to SEQ ID NO: 2285848
caauucacucuucuaacuc

SEQ ID NO: 2285850 - RNA, 19 nt, Artificial Sequence
  Description of Artificial Sequence: Synthetic oligonucleotide
  Sense strand starting at position 3853 of SEQ ID NO: 1884706
auggguuguuguucagaga

SEQ ID NO: 2285851 - RNA, 19 nt, Artificial Sequence
  Description of Artificial Sequence: Synthetic oligonucleotide
  Antisense strand to SEQ ID NO: 2285850
ucucugaacaacaacccau

SEQ ID NO: 2285852 - RNA, 19 nt, Artificial Sequence
  Description of Artificial Sequence: Synthetic oligonucleotide
  Sense strand starting at position 3953 of SEQ ID NO: 1884706
gcccucugcuucucaggaa

SEQ ID NO: 2285853 - RNA, 19 nt, Artificial Sequence
  Description of Artificial Sequence: Synthetic oligonucleotide
  Antisense strand to SEQ ID NO: 2285852
uuccugagaagcagagggc

SEQ ID NO: 2285854 - RNA, 19 nt, Artificial Sequence
  Description of Artificial Sequence: Synthetic oligonucleotide
  Sense strand starting at position 570 of SEQ ID NO: 1884707
caucuuuaccuguggguga

SEQ ID NO: 2285855 - RNA, 19 nt, Artificial Sequence
  Description of Artificial Sequence: Synthetic oligonucleotide
  Antisense strand to SEQ ID NO: 2285854
ucacccacagguaaagaug

SEQ ID NO: 2285856 - RNA, 19 nt, Artificial Sequence
  Description of Artificial Sequence: Synthetic oligonucleotide
  Sense strand starting at position 1209 of SEQ ID NO: 1884707
agcccagaguccugaguuu

SEQ ID NO: 2285857 - RNA, 19 nt, Artificial Sequence
  Description of Artificial Sequence: Synthetic oligonucleotide
  Antisense strand to SEQ ID NO: 2285856
aaacucaggacucugggcu

SEQ ID NO: 2285858 - RNA, 19 nt, Artificial Sequence
  Description of Artificial Sequence: Synthetic oligonucleotide
  Sense strand starting at position 1215 of SEQ ID NO: 1884707
gaguccugaguuugagucu

SEQ ID NO: 2285859 - RNA, 19 nt, Artificial Sequence
  Description of Artificial Sequence: Synthetic oligonucleotide
  Antisense strand to SEQ ID NO: 2285858
agacucaaacucaggacuc

SEQ ID NO: 2285860 - RNA, 19 nt, Artificial Sequence
  Description of Artificial Sequence: Synthetic oligonucleotide
  Sense strand starting at position 1238 of SEQ ID NO: 1884707
cugugucugaucuguguga

SEQ ID NO: 2285861 - RNA, 19 nt, Artificial Sequence
  Description of Artificial Sequence: Synthetic oligonucleotide
  Antisense strand to SEQ ID NO: 2285860
ucacacagaucagacacag

SEQ ID NO: 2285862 - RNA, 19 nt, Artificial Sequence
  Description of Artificial Sequence: Synthetic oligonucleotide
  Sense strand starting at position 1242 of SEQ ID NO: 1884707
gucugaucugugugaccug

SEQ ID NO: 2285863 - RNA, 19 nt, Artificial Sequence
  Description of Artificial Sequence: Synthetic oligonucleotide
  Antisense strand to SEQ ID NO: 2285862
caggucacacagaucagac

SEQ ID NO: 2285864 - RNA, 19 nt, Artificial Sequence
  Description of Artificial Sequence: Synthetic oligonucleotide
  Sense strand starting at position 1261 of SEQ ID NO: 1884707
gggcaaguuucugucuaua

SEQ ID NO: 2285865 - RNA, 19 nt, Artificial Sequence
  Description of Artificial Sequence: Synthetic oligonucleotide
  Antisense strand to SEQ ID NO: 2285864
uauagacagaaacuugccc

SEQ ID NO: 2285866 - RNA, 19 nt, Artificial Sequence
  Description of Artificial Sequence: Synthetic oligonucleotide
  Sense strand starting at position 1263 of SEQ ID NO: 1884707
gcaaguuucugucuauauc

SEQ ID NO: 2285867 - RNA, 19 nt, Artificial Sequence
  Description of Artificial Sequence: Synthetic oligonucleotide
  Antisense strand to SEQ ID NO: 2285866
gauauagacagaaacuugc

SEQ ID NO: 2285868 - RNA, 19 nt, Artificial Sequence
  Description of Artificial Sequence: Synthetic oligonucleotide
  Sense strand starting at position 1272 of SEQ ID NO: 1884707
ugucuauaucuggacuugu

SEQ ID NO: 2285869 - RNA, 19 nt, Artificial Sequence
  Description of Artificial Sequence: Synthetic oligonucleotide
  Antisense strand to SEQ ID NO: 2285868
acaaguccagauauagaca

SEQ ID NO: 2285870 - RNA, 19 nt, Artificial Sequence
  Description of Artificial Sequence: Synthetic oligonucleotide
  Sense strand starting at position 1285 of SEQ ID NO: 1884707
acuuguguuucugucugua

SEQ ID NO: 2285871 - RNA, 19 nt, Artificial Sequence
  Description of Artificial Sequence: Synthetic oligonucleotide
  Antisense strand to SEQ ID NO: 2285870
uacagacagaaacacaagu

SEQ ID NO: 2285872 - RNA, 19 nt, Artificial Sequence
  Description of Artificial Sequence: Synthetic oligonucleotide
  Sense strand starting at position 1289 of SEQ ID NO: 1884707
guguuucugucuguagcuu

SEQ ID NO: 2285873 - RNA, 19 nt, Artificial Sequence
  Description of Artificial Sequence: Synthetic oligonucleotide
  Antisense strand to SEQ ID NO: 2285872
aagcuacagacagaaacac

SEQ ID NO: 2285874 - RNA, 19 nt, Artificial Sequence
  Description of Artificial Sequence: Synthetic oligonucleotide
  Sense strand starting at position 1327 of SEQ ID NO: 1884707
agguauggguucugugauu

SEQ ID NO: 2285875 - RNA, 19 nt, Artificial Sequence
  Description of Artificial Sequence: Synthetic oligonucleotide
  Antisense strand to SEQ ID NO: 2285874
aaucacagaacccauaccu

SEQ ID NO: 2285876 - RNA, 19 nt, Artificial Sequence
  Description of Artificial Sequence: Synthetic oligonucleotide
  Sense strand starting at position 1352 of SEQ ID NO: 1884707
ugggauuccugagccagag

SEQ ID NO: 2285877 - RNA, 19 nt, Artificial Sequence
  Description of Artificial Sequence: Synthetic oligonucleotide
  Antisense strand to SEQ ID NO: 2285876
cucuggcucaggaauccca

SEQ ID NO: 2285878 - RNA, 19 nt, Artificial Sequence
  Description of Artificial Sequence: Synthetic oligonucleotide
  Sense strand starting at position 1543 of SEQ ID NO: 1884707
ccggccucccuccagaauu

SEQ ID NO: 2285879 - RNA, 19 nt, Artificial Sequence
  Description of Artificial Sequence: Synthetic oligonucleotide
  Antisense strand to SEQ ID NO: 2285878
aauucuggagggaggccgg

SEQ ID NO: 2285880 - RNA, 19 nt, Artificial Sequence
  Description of Artificial Sequence: Synthetic oligonucleotide
  Sense strand starting at position 1577 of SEQ ID NO: 1884707
uguccucugucccagcauu

SEQ ID NO: 2285881 - RNA, 19 nt, Artificial Sequence
  Description of Artificial Sequence: Synthetic oligonucleotide
  Antisense strand to SEQ ID NO: 2285880
aaugcugggacagaggaca

SEQ ID NO: 2285882 - RNA, 19 nt, Artificial Sequence
  Description of Artificial Sequence: Synthetic oligonucleotide
  Sense strand starting at position 2468 of SEQ ID NO: 1884707
uugccacauuggucaaacu

SEQ ID NO: 2285883 - RNA, 19 nt, Artificial Sequence
  Description of Artificial Sequence: Synthetic oligonucleotide
  Antisense strand to SEQ ID NO: 2285882
aguuugaccaauguggcaa

SEQ ID NO: 2285884 - RNA, 19 nt, Artificial Sequence
  Description of Artificial Sequence: Synthetic oligonucleotide
  Sense strand starting at position 2563 of SEQ ID NO: 1884707
ucauguuuguuucuugaga

SEQ ID NO: 2285885 - RNA, 19 nt, Artificial Sequence
  Description of Artificial Sequence: Synthetic oligonucleotide
  Antisense strand to SEQ ID NO: 2285884
ucucaagaaacaaacauga

SEQ ID NO: 2285886 - RNA, 19 nt, Artificial Sequence
  Description of Artificial Sequence: Synthetic oligonucleotide
  Sense strand starting at position 2564 of SEQ ID NO: 1884707
cauguuuguuucuugagac

SEQ ID NO: 2285887 - RNA, 19 nt, Artificial Sequence
  Description of Artificial Sequence: Synthetic oligonucleotide
  Antisense strand to SEQ ID NO: 2285886
gucucaagaaacaaacaug

SEQ ID NO: 2285888 - RNA, 19 nt, Artificial Sequence
  Description of Artificial Sequence: Synthetic oligonucleotide
  Sense strand starting at position 2847 of SEQ ID NO: 1884707
acuuccaguucugagguua

SEQ ID NO: 2285889 - RNA, 19 nt, Artificial Sequence
  Description of Artificial Sequence: Synthetic oligonucleotide
  Antisense strand to SEQ ID NO: 2285888
uaaccucagaacuggaagu

SEQ ID NO: 2285890 - RNA, 19 nt, Artificial Sequence
  Description of Artificial Sequence: Synthetic oligonucleotide
  Sense strand starting at position 2858 of SEQ ID NO: 1884707
ugagguuacuggcauguaa

SEQ ID NO: 2285891 - RNA, 19 nt, Artificial Sequence
  Description of Artificial Sequence: Synthetic oligonucleotide
  Antisense strand to SEQ ID NO: 2285890
uuacaugccaguaaccuca

SEQ ID NO: 2285892 - RNA, 19 nt, Artificial Sequence
  Description of Artificial Sequence: Synthetic oligonucleotide
  Sense strand starting at position 2860 of SEQ ID NO: 1884707
agguuacuggcauguaaag

SEQ ID NO: 2285893 - RNA, 19 nt, Artificial Sequence
  Description of Artificial Sequence: Synthetic oligonucleotide
  Antisense strand to SEQ ID NO: 2285892
cuuuacaugccaguaaccu

SEQ ID NO: 2285894 - RNA, 19 nt, Artificial Sequence
  Description of Artificial Sequence: Synthetic oligonucleotide
  Sense strand starting at position 2911 of SEQ ID NO: 1884707
ucauuuaucgucugcucuu

SEQ ID NO: 2285895 - RNA, 19 nt, Artificial Sequence
  Description of Artificial Sequence: Synthetic oligonucleotide
  Antisense strand to SEQ ID NO: 2285894
aagagcagacgauaaauga

SEQ ID NO: 2285896 - RNA, 19 nt, Artificial Sequence
  Description of Artificial Sequence: Synthetic oligonucleotide
  Sense strand starting at position 3191 of SEQ ID NO: 1884707
agccacgucugcucauaaa

SEQ ID NO: 2285897 - RNA, 19 nt, Artificial Sequence
  Description of Artificial Sequence: Synthetic oligonucleotide
  Antisense strand to SEQ ID NO: 2285896
uuuaugagcagacguggcu

SEQ ID NO: 2285898 - RNA, 19 nt, Artificial Sequence
  Description of Artificial Sequence: Synthetic oligonucleotide
  Sense strand starting at position 3194 of SEQ ID NO: 1884707
cacgucugcucauaaagua

SEQ ID NO: 2285899 - RNA, 19 nt, Artificial Sequence
  Description of Artificial Sequence: Synthetic oligonucleotide
  Antisense strand to SEQ ID NO: 2285898
uacuuuaugagcagacgug

SEQ ID NO: 2285900 - RNA, 19 nt, Artificial Sequence
  Description of Artificial Sequence: Synthetic oligonucleotide
  Sense strand starting at position 3224 of SEQ ID NO: 1884707
gugcacacccugcaauauu

SEQ ID NO: 2285901 - RNA, 19 nt, Artificial Sequence
  Description of Artificial Sequence: Synthetic oligonucleotide
  Antisense strand to SEQ ID NO: 2285900
aauauugcagggugugcac

SEQ ID NO: 2285902 - RNA, 19 nt, Artificial Sequence
  Description of Artificial Sequence: Synthetic oligonucleotide
  Sense strand starting at position 3233 of SEQ ID NO: 1884707
cugcaauauuacugugcua

SEQ ID NO: 2285903 - RNA, 19 nt, Artificial Sequence
  Description of Artificial Sequence: Synthetic oligonucleotide
  Antisense strand to SEQ ID NO: 2285902
uagcacaguaauauugcag

SEQ ID NO: 2285904 - RNA, 19 nt, Artificial Sequence
  Description of Artificial Sequence: Synthetic oligonucleotide
  Sense strand starting at position 3235 of SEQ ID NO: 1884707
gcaauauuacugugcuacu

SEQ ID NO: 2285905 - RNA, 19 nt, Artificial Sequence
  Description of Artificial Sequence: Synthetic oligonucleotide
  Antisense strand to SEQ ID NO: 2285904
aguagcacaguaauauugc

SEQ ID NO: 2285906 - RNA, 19 nt, Artificial Sequence
  Description of Artificial Sequence: Synthetic oligonucleotide
  Sense strand starting at position 3561 of SEQ ID NO: 1884707
agcgaauuaugggacuuau

SEQ ID NO: 2285907 - RNA, 19 nt, Artificial Sequence
  Description of Artificial Sequence: Synthetic oligonucleotide
  Antisense strand to SEQ ID NO: 2285906
auaagucccauaauucgcu

SEQ ID NO: 2285908 - RNA, 19 nt, Artificial Sequence
  Description of Artificial Sequence: Synthetic oligonucleotide
  Sense strand starting at position 3610 of SEQ ID NO: 1884707
accaaagugcgcugggaau

SEQ ID NO: 2285909 - RNA, 19 nt, Artificial Sequence
  Description of Artificial Sequence: Synthetic oligonucleotide
  Antisense strand to SEQ ID NO: 2285908
auucccagcgcacuuuggu

SEQ ID NO: 2285910 - RNA, 19 nt, Artificial Sequence
  Description of Artificial Sequence: Synthetic oligonucleotide
  Sense strand starting at position 3624 of SEQ ID NO: 1884707
ggaauucagccguagcugu

SEQ ID NO: 2285911 - RNA, 19 nt, Artificial Sequence
  Description of Artificial Sequence: Synthetic oligonucleotide
  Antisense strand to SEQ ID NO: 2285910
acagcuacggcugaauucc

SEQ ID NO: 2285912 - RNA, 19 nt, Artificial Sequence
  Description of Artificial Sequence: Synthetic oligonucleotide
  Sense strand starting at position 3632 of SEQ ID NO: 1884707
gccguagcugucuuugagu

SEQ ID NO: 2285913 - RNA, 19 nt, Artificial Sequence
  Description of Artificial Sequence: Synthetic oligonucleotide
  Antisense strand to SEQ ID NO: 2285912
acucaaagacagcuacggc

SEQ ID NO: 2285914 - RNA, 19 nt, Artificial Sequence
  Description of Artificial Sequence: Synthetic oligonucleotide
  Sense strand starting at position 3634 of SEQ ID NO: 1884707
cguagcugucuuugagugu

SEQ ID NO: 2285915 - RNA, 19 nt, Artificial Sequence
  Description of Artificial Sequence: Synthetic oligonucleotide
  Antisense strand to SEQ ID NO: 2285914
acacucaaagacagcuacg

SEQ ID NO: 2285916 - RNA, 19 nt, Artificial Sequence
  Description of Artificial Sequence: Synthetic oligonucleotide
  Sense strand starting at position 3695 of SEQ ID NO: 1884707
ggguccuccgugaaugcga

SEQ ID NO: 2285917 - RNA, 19 nt, Artificial Sequence
  Description of Artificial Sequence: Synthetic oligonucleotide
  Antisense strand to SEQ ID NO: 2285916
ucgcauucacggaggaccc

SEQ ID NO: 2285918 - RNA, 19 nt, Artificial Sequence
  Description of Artificial Sequence: Synthetic oligonucleotide
  Sense strand starting at position 3836 of SEQ ID NO: 1884707
gggaaagucuguugggcuu

SEQ ID NO: 2285919 - RNA, 19 nt, Artificial Sequence
  Description of Artificial Sequence: Synthetic oligonucleotide
  Antisense strand to SEQ ID NO: 2285918
aagcccaacagacuuuccc

SEQ ID NO: 2285920 - RNA, 19 nt, Artificial Sequence
  Description of Artificial Sequence: Synthetic oligonucleotide
  Sense strand starting at position 7 of SEQ ID NO: 1884708
aagcuuguauuacugagaa

SEQ ID NO: 2285921 - RNA, 19 nt, Artificial Sequence
  Description of Artificial Sequence: Synthetic oligonucleotide
  Antisense strand to SEQ ID NO: 2285920
uucucaguaauacaagcuu

SEQ ID NO: 2285922 - RNA, 19 nt, Artificial Sequence
  Description of Artificial Sequence: Synthetic oligonucleotide
  Sense strand starting at position 9 of SEQ ID NO: 1884708
gcuuguauuacugagaaga

SEQ ID NO: 2285923 - RNA, 19 nt, Artificial Sequence
  Description of Artificial Sequence: Synthetic oligonucleotide
  Antisense strand to SEQ ID NO: 2285922
ucuucucaguaauacaagc

SEQ ID NO: 2285924 - RNA, 19 nt, Artificial Sequence
  Description of Artificial Sequence: Synthetic oligonucleotide
  Sense strand starting at position 69 of SEQ ID NO: 1884708
agauaaagguagucagguu

SEQ ID NO: 2285925 - RNA, 19 nt, Artificial Sequence
  Description of Artificial Sequence: Synthetic oligonucleotide
  Antisense strand to SEQ ID NO: 2285924
aaccugacuaccuuuaucu

SEQ ID NO: 2285926 - RNA, 19 nt, Artificial Sequence
  Description of Artificial Sequence: Synthetic oligonucleotide
  Sense strand starting at position 88 of SEQ ID NO: 1884708
cuacuauggacaggguaua

SEQ ID NO: 2285927 - RNA, 19 nt, Artificial Sequence
  Description of Artificial Sequence: Synthetic oligonucleotide
  Antisense strand to SEQ ID NO: 2285926
uauacccuguccauaguag

SEQ ID NO: 2285928 - RNA, 19 nt, Artificial Sequence
  Description of Artificial Sequence: Synthetic oligonucleotide
  Sense strand starting at position 129 of SEQ ID NO: 1884708
ccgggacaucuuugaguga

SEQ ID NO: 2285929 - RNA, 19 nt, Artificial Sequence
  Description of Artificial Sequence: Synthetic oligonucleotide
  Antisense strand to SEQ ID NO: 2285928
ucacucaaagaugucccgg

SEQ ID NO: 2285930 - RNA, 19 nt, Artificial Sequence
  Description of Artificial Sequence: Synthetic oligonucleotide
  Sense strand starting at position 160 of SEQ ID NO: 1884708
auuaaugcuuaugccagaa

SEQ ID NO: 2285931 - RNA, 19 nt, Artificial Sequence
  Description of Artificial Sequence: Synthetic oligonucleotide
  Antisense strand to SEQ ID NO: 2285930
uucuggcauaagcauuaau

SEQ ID NO: 2285932 - RNA, 19 nt, Artificial Sequence
  Description of Artificial Sequence: Synthetic oligonucleotide
  Sense strand starting at position 164 of SEQ ID NO: 1884708
augcuuaugccagaacaau

SEQ ID NO: 2285933 - RNA, 19 nt, Artificial Sequence
  Description of Artificial Sequence: Synthetic oligonucleotide
  Antisense strand to SEQ ID NO: 2285932
auuguucuggcauaagcau

SEQ ID NO: 2285934 - RNA, 19 nt, Artificial Sequence
  Description of Artificial Sequence: Synthetic oligonucleotide
  Sense strand starting at position 203 of SEQ ID NO: 1884708
ugggcaagccaagauuaau

SEQ ID NO: 2285935 - RNA, 19 nt, Artificial Sequence
  Description of Artificial Sequence: Synthetic oligonucleotide
  Antisense strand to SEQ ID NO: 2285934
auuaaucuuggcuugccca

SEQ ID NO: 2285936 - RNA, 19 nt, Artificial Sequence
  Description of Artificial Sequence: Synthetic oligonucleotide
  Sense strand starting at position 483 of SEQ ID NO: 1884708
uguaaaugaugacucaauc

SEQ ID NO: 2285937 - RNA, 19 nt, Artificial Sequence
  Description of Artificial Sequence: Synthetic oligonucleotide
  Antisense strand to SEQ ID NO: 2285936
gauugagucaucauuuaca

SEQ ID NO: 2285938 - RNA, 19 nt, Artificial Sequence
  Description of Artificial Sequence: Synthetic oligonucleotide
  Sense strand starting at position 612 of SEQ ID NO: 1884708
cauuauguauuugauggaa

SEQ ID NO: 2285939 - RNA, 19 nt, Artificial Sequence
  Description of Artificial Sequence: Synthetic oligonucleotide
  Antisense strand to SEQ ID NO: 2285938
uuccaucaaauacauaaug

SEQ ID NO: 2285940 - RNA, 19 nt, Artificial Sequence
  Description of Artificial Sequence: Synthetic oligonucleotide
  Sense strand starting at position 802 of SEQ ID NO: 1884708
uggaauguguauucuaauu

SEQ ID NO: 2285941 - RNA, 19 nt, Artificial Sequence
  Description of Artificial Sequence: Synthetic oligonucleotide
  Antisense strand to SEQ ID NO: 2285940
aauuagaauacacauucca

SEQ ID NO: 2285942 - RNA, 19 nt, Artificial Sequence
  Description of Artificial Sequence: Synthetic oligonucleotide
  Sense strand starting at position 851 of SEQ ID NO: 1884708
cugagagacguucaagcuu

SEQ ID NO: 2285943 - RNA, 19 nt, Artificial Sequence
  Description of Artificial Sequence: Synthetic oligonucleotide
  Antisense strand to SEQ ID NO: 2285942
aagcuugaacgucucucag

SEQ ID NO: 2285944 - RNA, 19 nt, Artificial Sequence
  Description of Artificial Sequence: Synthetic oligonucleotide
  Sense strand starting at position 1108 of SEQ ID NO: 1884708
ugggcaaagggucaguuau

SEQ ID NO: 2285945 - RNA, 19 nt, Artificial Sequence
  Description of Artificial Sequence: Synthetic oligonucleotide
  Antisense strand to SEQ ID NO: 2285944
auaacugacccuuugccca

SEQ ID NO: 2285946 - RNA, 19 nt, Artificial Sequence
  Description of Artificial Sequence: Synthetic oligonucleotide
  Sense strand starting at position 1176 of SEQ ID NO: 1884708
cggaaucagguuuaucuaa

SEQ ID NO: 2285947 - RNA, 19 nt, Artificial Sequence
  Description of Artificial Sequence: Synthetic oligonucleotide
  Antisense strand to SEQ ID NO: 2285946
uuagauaaaccugauuccg

SEQ ID NO: 2285948 - RNA, 19 nt, Artificial Sequence
  Description of Artificial Sequence: Synthetic oligonucleotide
  Sense strand starting at position 1178 of SEQ ID NO: 1884708
gaaucagguuuaucuaagu

SEQ ID NO: 2285949 - RNA, 19 nt, Artificial Sequence
  Description of Artificial Sequence: Synthetic oligonucleotide
  Antisense strand to SEQ ID NO: 2285948
acuuagauaaaccugauuc

SEQ ID NO: 2285950 - RNA, 19 nt, Artificial Sequence
  Description of Artificial Sequence: Synthetic oligonucleotide
  Sense strand starting at position 1183 of SEQ ID NO: 1884708
agguuuaucuaaguuggag

SEQ ID NO: 2285951 - RNA, 19 nt, Artificial Sequence
  Description of Artificial Sequence: Synthetic oligonucleotide
  Antisense strand to SEQ ID NO: 2285950
cuccaacuuagauaaaccu

SEQ ID NO: 2285952 - RNA, 19 nt, Artificial Sequence
  Description of Artificial Sequence: Synthetic oligonucleotide
  Sense strand starting at position 1199 of SEQ ID NO: 1884708
gagucagggcucugacaca

SEQ ID NO: 2285953 - RNA, 19 nt, Artificial Sequence
  Description of Artificial Sequence: Synthetic oligonucleotide
  Antisense strand to SEQ ID NO: 2285952
ugugucagagcccugacuc

SEQ ID NO: 2285954 - RNA, 19 nt, Artificial Sequence
  Description of Artificial Sequence: Synthetic oligonucleotide
  Sense strand starting at position 1214 of SEQ ID NO: 1884708
cacaguacccuugggcaaa

SEQ ID NO: 2285955 - RNA, 19 nt, Artificial Sequence
  Description of Artificial Sequence: Synthetic oligonucleotide
  Antisense strand to SEQ ID NO: 2285954
uuugcccaaggguacugug

SEQ ID NO: 2285956 - RNA, 19 nt, Artificial Sequence
  Description of Artificial Sequence: Synthetic oligonucleotide
  Sense strand starting at position 1287 of SEQ ID NO: 1884708
gcuguaucucgagaaucaa

SEQ ID NO: 2285957 - RNA, 19 nt, Artificial Sequence
  Description of Artificial Sequence: Synthetic oligonucleotide
  Antisense strand to SEQ ID NO: 2285956
uugauucucgagauacagc

SEQ ID NO: 2285958 - RNA, 19 nt, Artificial Sequence
  Description of Artificial Sequence: Synthetic oligonucleotide
  Sense strand starting at position 1314 of SEQ ID NO: 1884708
ccuagaguccugcaguaac

SEQ ID NO: 2285959 - RNA, 19 nt, Artificial Sequence
  Description of Artificial Sequence: Synthetic oligonucleotide
  Antisense strand to SEQ ID NO: 2285958
guuacugcaggacucuagg

SEQ ID NO: 2285960 - RNA, 19 nt, Artificial Sequence
  Description of Artificial Sequence: Synthetic oligonucleotide
  Sense strand starting at position 1401 of SEQ ID NO: 1884708
auuauucugcaagacaguu

SEQ ID NO: 2285961 - RNA, 19 nt, Artificial Sequence
  Description of Artificial Sequence: Synthetic oligonucleotide
  Antisense strand to SEQ ID NO: 2285960
aacugucuugcagaauaau

SEQ ID NO: 2285962 - RNA, 19 nt, Artificial Sequence
  Description of Artificial Sequence: Synthetic oligonucleotide
  Sense strand starting at position 1486 of SEQ ID NO: 1884708
aguaguaacguauacggaa

SEQ ID NO: 2285963 - RNA, 19 nt, Artificial Sequence
  Description of Artificial Sequence: Synthetic oligonucleotide
  Antisense strand to SEQ ID NO: 2285962
uuccguauacguuacuacu

SEQ ID NO: 2285964 - RNA, 19 nt, Artificial Sequence
  Description of Artificial Sequence: Synthetic oligonucleotide
  Sense strand starting at position 1984 of SEQ ID NO: 1884708
aagcccuucccggaaguua

SEQ ID NO: 2285965 - RNA, 19 nt, Artificial Sequence
  Description of Artificial Sequence: Synthetic oligonucleotide
  Antisense strand to SEQ ID NO: 2285964
uaacuuccgggaagggcuu

SEQ ID NO: 2285966 - RNA, 19 nt, Artificial Sequence
  Description of Artificial Sequence: Synthetic oligonucleotide
  Sense strand starting at position 2145 of SEQ ID NO: 1884708
uuagcugaaggguacuaua

SEQ ID NO: 2285967 - RNA, 19 nt, Artificial Sequence
  Description of Artificial Sequence: Synthetic oligonucleotide
  Antisense strand to SEQ ID NO: 2285966
uauaguacccuucagcuaa

SEQ ID NO: 2285968 - RNA, 19 nt, Artificial Sequence
  Description of Artificial Sequence: Synthetic oligonucleotide
  Sense strand starting at position 2154 of SEQ ID NO: 1884708
ggguacuauaguugaacca

SEQ ID NO: 2285969 - RNA, 19 nt, Artificial Sequence
  Description of Artificial Sequence: Synthetic oligonucleotide
  Antisense strand to SEQ ID NO: 2285968
ugguucaacuauaguaccc

SEQ ID NO: 2285970 - RNA, 19 nt, Artificial Sequence
  Description of Artificial Sequence: Synthetic oligonucleotide
  Sense strand starting at position 2266 of SEQ ID NO: 1884708
caggcuuucccagacugua

SEQ ID NO: 2285971 - RNA, 19 nt, Artificial Sequence
  Description of Artificial Sequence: Synthetic oligonucleotide
  Antisense strand to SEQ ID NO: 2285970
uacagucugggaaagccug

SEQ ID NO: 2285972 - RNA, 19 nt, Artificial Sequence
  Description of Artificial Sequence: Synthetic oligonucleotide
  Sense strand starting at position 2434 of SEQ ID NO: 1884708
cucuuucuaguagggaaga

SEQ ID NO: 2285973 - RNA, 19 nt, Artificial Sequence
  Description of Artificial Sequence: Synthetic oligonucleotide
  Antisense strand to SEQ ID NO: 2285972
ucuucccuacuagaaagag

SEQ ID NO: 2285974 - RNA, 19 nt, Artificial Sequence
  Description of Artificial Sequence: Synthetic oligonucleotide
  Sense strand starting at position 2551 of SEQ ID NO: 1884708
acauguauaugguucuaac

SEQ ID NO: 2285975 - RNA, 19 nt, Artificial Sequence
  Description of Artificial Sequence: Synthetic oligonucleotide
  Antisense strand to SEQ ID NO: 2285974
guuagaaccauauacaugu

SEQ ID NO: 2285976 - RNA, 19 nt, Artificial Sequence
  Description of Artificial Sequence: Synthetic oligonucleotide
  Sense strand starting at position 2773 of SEQ ID NO: 1884708
gucugacuuuauuuguauu

SEQ ID NO: 2285977 - RNA, 19 nt, Artificial Sequence
  Description of Artificial Sequence: Synthetic oligonucleotide
  Antisense strand to SEQ ID NO: 2285976
aauacaaauaaagucagac

SEQ ID NO: 2285978 - RNA, 19 nt, Artificial Sequence
  Description of Artificial Sequence: Synthetic oligonucleotide
  Sense strand starting at position 3155 of SEQ ID NO: 1884708
aguauagcuuccuuauaag

SEQ ID NO: 2285979 - RNA, 19 nt, Artificial Sequence
  Description of Artificial Sequence: Synthetic oligonucleotide
  Antisense strand to SEQ ID NO: 2285978
cuuauaaggaagcuauacu

SEQ ID NO: 2285980 - RNA, 19 nt, Artificial Sequence
  Description of Artificial Sequence: Synthetic oligonucleotide
  Sense strand starting at position 3200 of SEQ ID NO: 1884708
uccaguuauggcuauauua

SEQ ID NO: 2285981 - RNA, 19 nt, Artificial Sequence
  Description of Artificial Sequence: Synthetic oligonucleotide
  Antisense strand to SEQ ID NO: 2285980
uaauauagccauaacugga

SEQ ID NO: 2285982 - RNA, 19 nt, Artificial Sequence
  Description of Artificial Sequence: Synthetic oligonucleotide
  Sense strand starting at position 3324 of SEQ ID NO: 1884708
auaugugugcuccacaaag

SEQ ID NO: 2285983 - RNA, 19 nt, Artificial Sequence
  Description of Artificial Sequence: Synthetic oligonucleotide
  Antisense strand to SEQ ID NO: 2285982
cuuuguggagcacacauau

SEQ ID NO: 2285984 - RNA, 19 nt, Artificial Sequence
  Description of Artificial Sequence: Synthetic oligonucleotide
  Sense strand starting at position 3565 of SEQ ID NO: 1884708
agauacaucugggcagacu

SEQ ID NO: 2285985 - RNA, 19 nt, Artificial Sequence
  Description of Artificial Sequence: Synthetic oligonucleotide
  Antisense strand to SEQ ID NO: 2285984
agucugcccagauguaucu

SEQ ID NO: 2285986 - RNA, 19 nt, Artificial Sequence
  Description of Artificial Sequence: Synthetic oligonucleotide
  Sense strand starting at position 3601 of SEQ ID NO: 1884708
guugguuggcccagugaag

SEQ ID NO: 2285987 - RNA, 19 nt, Artificial Sequence
  Description of Artificial Sequence: Synthetic oligonucleotide
  Antisense strand to SEQ ID NO: 2285986
cuucacugggccaaccaac

SEQ ID NO: 2285988 - RNA, 19 nt, Artificial Sequence
  Description of Artificial Sequence: Synthetic oligonucleotide
  Sense strand starting at position 3686 of SEQ ID NO: 1884708
aguugaucagugugaaaga

SEQ ID NO: 2285989 - RNA, 19 nt, Artificial Sequence
  Description of Artificial Sequence: Synthetic oligonucleotide
  Antisense strand to SEQ ID NO: 2285988
ucuuucacacugaucaacu

SEQ ID NO: 2285990 - RNA, 19 nt, Artificial Sequence
  Description of Artificial Sequence: Synthetic oligonucleotide
  Sense strand starting at position 3697 of SEQ ID NO: 1884708
gugaaagauguguguagag

SEQ ID NO: 2285991 - RNA, 19 nt, Artificial Sequence
  Description of Artificial Sequence: Synthetic oligonucleotide
  Antisense strand to SEQ ID NO: 2285990
cucuacacacaucuuucac

SEQ ID NO: 2285992 - RNA, 19 nt, Artificial Sequence
  Description of Artificial Sequence: Synthetic oligonucleotide
  Sense strand starting at position 3781 of SEQ ID NO: 1884708
aacugaagaguuggacuuu

SEQ ID NO: 2285993 - RNA, 19 nt, Artificial Sequence
  Description of Artificial Sequence: Synthetic oligonucleotide
  Antisense strand to SEQ ID NO: 2285992
aaaguccaacucuucaguu

SEQ ID NO: 2285994 - RNA, 19 nt, Artificial Sequence
  Description of Artificial Sequence: Synthetic oligonucleotide
  Sense strand starting at position 3846 of SEQ ID NO: 1884708
agguaaacuuaccugaauc

SEQ ID NO: 2285995 - RNA, 19 nt, Artificial Sequence
  Description of Artificial Sequence: Synthetic oligonucleotide
  Antisense strand to SEQ ID NO: 2285994
gauucagguaaguuuaccu

SEQ ID NO: 2285996 - RNA, 19 nt, Artificial Sequence
  Description of Artificial Sequence: Synthetic oligonucleotide
  Sense strand starting at position 3854 of SEQ ID NO: 1884708
uuaccugaaucugucagaa

SEQ ID NO: 2285997 - RNA, 19 nt, Artificial Sequence
  Description of Artificial Sequence: Synthetic oligonucleotide
  Antisense strand to SEQ ID NO: 2285996
uucugacagauucagguaa

SEQ ID NO: 2285998 - RNA, 19 nt, Artificial Sequence
  Description of Artificial Sequence: Synthetic oligonucleotide
  Sense strand starting at position 3909 of SEQ ID NO: 1884708
gucuaaauggccuaugcaa

SEQ ID NO: 2285999 - RNA, 19 nt, Artificial Sequence
  Description of Artificial Sequence: Synthetic oligonucleotide
  Antisense strand to SEQ ID NO: 2285998
uugcauaggccauuuagac

SEQ ID NO: 2286000 - RNA, 19 nt, Artificial Sequence
  Description of Artificial Sequence: Synthetic oligonucleotide
  Sense strand starting at position 395 of SEQ ID NO: 1884709
gccugaugcugaucugaca

SEQ ID NO: 2286001 - RNA, 19 nt, Artificial Sequence
  Description of Artificial Sequence: Synthetic oligonucleotide
  Antisense strand to SEQ ID NO: 2286000
ugucagaucagcaucaggc

SEQ ID NO: 2286002 - RNA, 19 nt, Artificial Sequence
  Description of Artificial Sequence: Synthetic oligonucleotide
  Sense strand starting at position 406 of SEQ ID NO: 1884709
aucugacaauggguugaua

SEQ ID NO: 2286003 - RNA, 19 nt, Artificial Sequence
  Description of Artificial Sequence: Synthetic oligonucleotide
  Antisense strand to SEQ ID NO: 2286002
uaucaacccauugucagau

SEQ ID NO: 2286004 - RNA, 19 nt, Artificial Sequence
  Description of Artificial Sequence: Synthetic oligonucleotide
  Sense strand starting at position 523 of SEQ ID NO: 1884709
gggcaaaccgacuggugau

SEQ ID NO: 2286005 - RNA, 19 nt, Artificial Sequence
  Description of Artificial Sequence: Synthetic oligonucleotide
  Antisense strand to SEQ ID NO: 2286004
aucaccagucgguuugccc

SEQ ID NO: 2286006 - RNA, 19 nt, Artificial Sequence
  Description of Artificial Sequence: Synthetic oligonucleotide
  Sense strand starting at position 699 of SEQ ID NO: 1884709
ugcagauaggccuaacucu

SEQ ID NO: 2286007 - RNA, 19 nt, Artificial Sequence
  Description of Artificial Sequence: Synthetic oligonucleotide
  Antisense strand to SEQ ID NO: 2286006
agaguuaggccuaucugca

SEQ ID NO: 2286008 - RNA, 19 nt, Artificial Sequence
  Description of Artificial Sequence: Synthetic oligonucleotide
  Sense strand starting at position 834 of SEQ ID NO: 1884709
gauccucgucccuacagau

SEQ ID NO: 2286009 - RNA, 19 nt, Artificial Sequence
  Description of Artificial Sequence: Synthetic oligonucleotide
  Antisense strand to SEQ ID NO: 2286008
aucuguagggacgaggauc

SEQ ID NO: 2286010 - RNA, 19 nt, Artificial Sequence
  Description of Artificial Sequence: Synthetic oligonucleotide
  Sense strand starting at position 841 of SEQ ID NO: 1884709
gucccuacagauuguacau

SEQ ID NO: 2286011 - RNA, 19 nt, Artificial Sequence
  Description of Artificial Sequence: Synthetic oligonucleotide
  Antisense strand to SEQ ID NO: 2286010
auguacaaucuguagggac

SEQ ID NO: 2286012 - RNA, 19 nt, Artificial Sequence
  Description of Artificial Sequence: Synthetic oligonucleotide
  Sense strand starting at position 850 of SEQ ID NO: 1884709
gauuguacauucucaggua

SEQ ID NO: 2286013 - RNA, 19 nt, Artificial Sequence
  Description of Artificial Sequence: Synthetic oligonucleotide
  Antisense strand to SEQ ID NO: 2286012
uaccugagaauguacaauc

SEQ ID NO: 2286014 - RNA, 19 nt, Artificial Sequence
  Description of Artificial Sequence: Synthetic oligonucleotide
  Sense strand starting at position 1053 of SEQ ID NO: 1884709
cagaaauuaugugcacugu

SEQ ID NO: 2286015 - RNA, 19 nt, Artificial Sequence
  Description of Artificial Sequence: Synthetic oligonucleotide
  Antisense strand to SEQ ID NO: 2286014
acagugcacauaauuucug

SEQ ID NO: 2286016 - RNA, 19 nt, Artificial Sequence
  Description of Artificial Sequence: Synthetic oligonucleotide
  Sense strand starting at position 1063 of SEQ ID NO: 1884709
gugcacugucauuagaaug

SEQ ID NO: 2286017 - RNA, 19 nt, Artificial Sequence
  Description of Artificial Sequence: Synthetic oligonucleotide
  Antisense strand to SEQ ID NO: 2286016
cauucuaaugacagugcac

SEQ ID NO: 2286018 - RNA, 19 nt, Artificial Sequence
  Description of Artificial Sequence: Synthetic oligonucleotide
  Sense strand starting at position 1213 of SEQ ID NO: 1884709
ucucuaagguccucaagga

SEQ ID NO: 2286019 - RNA, 19 nt, Artificial Sequence
  Description of Artificial Sequence: Synthetic oligonucleotide
  Antisense strand to SEQ ID NO: 2286018
uccuugaggaccuuagaga

SEQ ID NO: 2286020 - RNA, 19 nt, Artificial Sequence
  Description of Artificial Sequence: Synthetic oligonucleotide
  Sense strand starting at position 1341 of SEQ ID NO: 1884709
guucuacauccauagucua

SEQ ID NO: 2286021 - RNA, 19 nt, Artificial Sequence
  Description of Artificial Sequence: Synthetic oligonucleotide
  Antisense strand to SEQ ID NO: 2286020
uagacuauggauguagaac

SEQ ID NO: 2286022 - RNA, 19 nt, Artificial Sequence
  Description of Artificial Sequence: Synthetic oligonucleotide
  Sense strand starting at position 1380 of SEQ ID NO: 1884709
accuuccuccgauaauguu

SEQ ID NO: 2286023 - RNA, 19 nt, Artificial Sequence
  Description of Artificial Sequence: Synthetic oligonucleotide
  Antisense strand to SEQ ID NO: 2286022
aacauuaucggaggaaggu

SEQ ID NO: 2286024 - RNA, 19 nt, Artificial Sequence
  Description of Artificial Sequence: Synthetic oligonucleotide
  Sense strand starting at position 1414 of SEQ ID NO: 1884709
uacauugucgcauaugauc

SEQ ID NO: 2286025 - RNA, 19 nt, Artificial Sequence
  Description of Artificial Sequence: Synthetic oligonucleotide
  Antisense strand to SEQ ID NO: 2286024
gaucauaugcgacaaugua

SEQ ID NO: 2286026 - RNA, 19 nt, Artificial Sequence
  Description of Artificial Sequence: Synthetic oligonucleotide
  Sense strand starting at position 1422 of SEQ ID NO: 1884709
cgcauaugauccucacaau

SEQ ID NO: 2286027 - RNA, 19 nt, Artificial Sequence
  Description of Artificial Sequence: Synthetic oligonucleotide
  Antisense strand to SEQ ID NO: 2286026
auugugaggaucauaugcg

SEQ ID NO: 2286028 - RNA, 19 nt, Artificial Sequence
  Description of Artificial Sequence: Synthetic oligonucleotide
  Sense strand starting at position 1433 of SEQ ID NO: 1884709
cucacaauccagugaggca

SEQ ID NO: 2286029 - RNA, 19 nt, Artificial Sequence
  Description of Artificial Sequence: Synthetic oligonucleotide
  Antisense strand to SEQ ID NO: 2286028
ugccucacuggauugugag

SEQ ID NO: 2286030 - RNA, 19 nt, Artificial Sequence
  Description of Artificial Sequence: Synthetic oligonucleotide
  Sense strand starting at position 1566 of SEQ ID NO: 1884709
ucaugucgccggcuaacua

SEQ ID NO: 2286031 - RNA, 19 nt, Artificial Sequence
  Description of Artificial Sequence: Synthetic oligonucleotide
  Antisense strand to SEQ ID NO: 2286030
uaguuagccggcgacauga

SEQ ID NO: 2286032 - RNA, 19 nt, Artificial Sequence
  Description of Artificial Sequence: Synthetic oligonucleotide
  Sense strand starting at position 1802 of SEQ ID NO: 1884709
ggugaaacuuccuuucccu

SEQ ID NO: 2286033 - RNA, 19 nt, Artificial Sequence
  Description of Artificial Sequence: Synthetic oligonucleotide
  Antisense strand to SEQ ID NO: 2286032
agggaaaggaaguuucacc

SEQ ID NO: 2286034 - RNA, 19 nt, Artificial Sequence
  Description of Artificial Sequence: Synthetic oligonucleotide
  Sense strand starting at position 2309 of SEQ ID NO: 1884709
agauguuuacccgaaggua

SEQ ID NO: 2286035 - RNA, 19 nt, Artificial Sequence
  Description of Artificial Sequence: Synthetic oligonucleotide
  Antisense strand to SEQ ID NO: 2286034
uaccuucggguaaacaucu

SEQ ID NO: 2286036 - RNA, 19 nt, Artificial Sequence
  Description of Artificial Sequence: Synthetic oligonucleotide
  Sense strand starting at position 2347 of SEQ ID NO: 1884709
ugacgaguugagggaauaa

SEQ ID NO: 2286037 - RNA, 19 nt, Artificial Sequence
  Description of Artificial Sequence: Synthetic oligonucleotide
  Antisense strand to SEQ ID NO: 2286036
uuauucccucaacucguca

SEQ ID NO: 2286038 - RNA, 19 nt, Artificial Sequence
  Description of Artificial Sequence: Synthetic oligonucleotide
  Sense strand starting at position 2357 of SEQ ID NO: 1884709
agggaauaaucagaaagag

SEQ ID NO: 2286039 - RNA, 19 nt, Artificial Sequence
  Description of Artificial Sequence: Synthetic oligonucleotide
  Antisense strand to SEQ ID NO: 2286038
cucuuucugauuauucccu

SEQ ID NO: 2286040 - RNA, 19 nt, Artificial Sequence
  Description of Artificial Sequence: Synthetic oligonucleotide
  Sense strand starting at position 2373 of SEQ ID NO: 1884709
gagagcucccucuggaagu

SEQ ID NO: 2286041 - RNA, 19 nt, Artificial Sequence
  Description of Artificial Sequence: Synthetic oligonucleotide
  Antisense strand to SEQ ID NO: 2286040
acuuccagagggagcucuc

SEQ ID NO: 2286042 - RNA, 19 nt, Artificial Sequence
  Description of Artificial Sequence: Synthetic oligonucleotide
  Sense strand starting at position 2400 of SEQ ID NO: 1884709
ugaugaggcuaauccacau

SEQ ID NO: 2286043 - RNA, 19 nt, Artificial Sequence
  Description of Artificial Sequence: Synthetic oligonucleotide
  Antisense strand to SEQ ID NO: 2286042
auguggauuagccucauca

SEQ ID NO: 2286044 - RNA, 19 nt, Artificial Sequence
  Description of Artificial Sequence: Synthetic oligonucleotide
  Sense strand starting at position 2603 of SEQ ID NO: 1884709
guaguaaugcuaggauaca

SEQ ID NO: 2286045 - RNA, 19 nt, Artificial Sequence
  Description of Artificial Sequence: Synthetic oligonucleotide
  Antisense strand to SEQ ID NO: 2286044
uguauccuagcauuacuac

SEQ ID NO: 2286046 - RNA, 19 nt, Artificial Sequence
  Description of Artificial Sequence: Synthetic oligonucleotide
  Sense strand starting at position 2615 of SEQ ID NO: 1884709
ggauacaaaugugaagaaa

SEQ ID NO: 2286047 - RNA, 19 nt, Artificial Sequence
  Description of Artificial Sequence: Synthetic oligonucleotide
  Antisense strand to SEQ ID NO: 2286046
uuucuucacauuuguaucc

SEQ ID NO: 2286048 - RNA, 19 nt, Artificial Sequence
  Description of Artificial Sequence: Synthetic oligonucleotide
  Sense strand starting at position 2757 of SEQ ID NO: 1884709
guuaaagagauacgccaau

SEQ ID NO: 2286049 - RNA, 19 nt, Artificial Sequence
  Description of Artificial Sequence: Synthetic oligonucleotide
  Antisense strand to SEQ ID NO: 2286048
auuggcguaucucuuuaac

SEQ ID NO: 2286050 - RNA, 19 nt, Artificial Sequence
  Description of Artificial Sequence: Synthetic oligonucleotide
  Sense strand starting at position 2819 of SEQ ID NO: 1884709
ccagauuacugaguuaggu

SEQ ID NO: 2286051 - RNA, 19 nt, Artificial Sequence
  Description of Artificial Sequence: Synthetic oligonucleotide
  Antisense strand to SEQ ID NO: 2286050
accuaacucaguaaucugg

SEQ ID NO: 2286052 - RNA, 19 nt, Artificial Sequence
  Description of Artificial Sequence: Synthetic oligonucleotide
  Sense strand starting at position 2838 of SEQ ID NO: 1884709
uaaagaaugccugaggugu

SEQ ID NO: 2286053 - RNA, 19 nt, Artificial Sequence
  Description of Artificial Sequence: Synthetic oligonucleotide
  Antisense strand to SEQ ID NO: 2286052
acaccucaggcauucuuua

SEQ ID NO: 2286054 - RNA, 19 nt, Artificial Sequence
  Description of Artificial Sequence: Synthetic oligonucleotide
  Sense strand starting at position 2968 of SEQ ID NO: 1884709
uguuaaguagcuuaccuau

SEQ ID NO: 2286055 - RNA, 19 nt, Artificial Sequence
  Description of Artificial Sequence: Synthetic oligonucleotide
  Antisense strand to SEQ ID NO: 2286054
auagguaagcuacuuaaca

SEQ ID NO: 2286056 - RNA, 19 nt, Artificial Sequence
  Description of Artificial Sequence: Synthetic oligonucleotide
  Sense strand starting at position 2977 of SEQ ID NO: 1884709
gcuuaccuauggucauuua

SEQ ID NO: 2286057 - RNA, 19 nt, Artificial Sequence
  Description of Artificial Sequence: Synthetic oligonucleotide
  Antisense strand to SEQ ID NO: 2286056
uaaaugaccauagguaagc

SEQ ID NO: 2286058 - RNA, 19 nt, Artificial Sequence
  Description of Artificial Sequence: Synthetic oligonucleotide
  Sense strand starting at position 2984 of SEQ ID NO: 1884709
uauggucauuuagaaaguu

SEQ ID NO: 2286059 - RNA, 19 nt, Artificial Sequence
  Description of Artificial Sequence: Synthetic oligonucleotide
  Antisense strand to SEQ ID NO: 2286058
aacuuucuaaaugaccaua

SEQ ID NO: 2286060 - RNA, 19 nt, Artificial Sequence
  Description of Artificial Sequence: Synthetic oligonucleotide
  Sense strand starting at position 3024 of SEQ ID NO: 1884709
gguucuuaugaucauccua

SEQ ID NO: 2286061 - RNA, 19 nt, Artificial Sequence
  Description of Artificial Sequence: Synthetic oligonucleotide
  Antisense strand to SEQ ID NO: 2286060
uaggaugaucauaagaacc

SEQ ID NO: 2286062 - RNA, 19 nt, Artificial Sequence
  Description of Artificial Sequence: Synthetic oligonucleotide
  Sense strand starting at position 3279 of SEQ ID NO: 1884709
uguccaacuuugucaaaug

SEQ ID NO: 2286063 - RNA, 19 nt, Artificial Sequence
  Description of Artificial Sequence: Synthetic oligonucleotide
  Antisense strand to SEQ ID NO: 2286062
cauuugacaaaguuggaca

SEQ ID NO: 2286064 - RNA, 19 nt, Artificial Sequence
  Description of Artificial Sequence: Synthetic oligonucleotide
  Sense strand starting at position 3328 of SEQ ID NO: 1884709
ugccauuaugguugaauga

SEQ ID NO: 2286065 - RNA, 19 nt, Artificial Sequence
  Description of Artificial Sequence: Synthetic oligonucleotide
  Antisense strand to SEQ ID NO: 2286064
ucauucaaccauaauggca

SEQ ID NO: 2286066 - RNA, 19 nt, Artificial Sequence
  Description of Artificial Sequence: Synthetic oligonucleotide
  Sense strand starting at position 3329 of SEQ ID NO: 1884709
gccauuaugguugaaugau

SEQ ID NO: 2286067 - RNA, 19 nt, Artificial Sequence
  Description of Artificial Sequence: Synthetic oligonucleotide
  Antisense strand to SEQ ID NO: 2286066
aucauucaaccauaauggc

SEQ ID NO: 2286068 - RNA, 19 nt, Artificial Sequence
  Description of Artificial Sequence: Synthetic oligonucleotide
  Sense strand starting at position 3759 of SEQ ID NO: 1884709
ccaagacuggcuuaauucu

SEQ ID NO: 2286069 - RNA, 19 nt, Artificial Sequence
  Description of Artificial Sequence: Synthetic oligonucleotide
  Antisense strand to SEQ ID NO: 2286068
agaauuaagccagucuugg

SEQ ID NO: 2286070 - RNA, 19 nt, Artificial Sequence
  Description of Artificial Sequence: Synthetic oligonucleotide
  Sense strand starting at position 3767 of SEQ ID NO: 1884709
ggcuuaauucuguagcaau

SEQ ID NO: 2286071 - RNA, 19 nt, Artificial Sequence
  Description of Artificial Sequence: Synthetic oligonucleotide
  Antisense strand to SEQ ID NO: 2286070
auugcuacagaauuaagcc

SEQ ID NO: 2286072 - RNA, 19 nt, Artificial Sequence
  Description of Artificial Sequence: Synthetic oligonucleotide
  Sense strand starting at position 3814 of SEQ ID NO: 1884709
uuggaucugucuucuaauc

SEQ ID NO: 2286073 - RNA, 19 nt, Artificial Sequence
  Description of Artificial Sequence: Synthetic oligonucleotide
  Antisense strand to SEQ ID NO: 2286072
gauuagaagacagauccaa

SEQ ID NO: 2286074 - RNA, 19 nt, Artificial Sequence
  Description of Artificial Sequence: Synthetic oligonucleotide
  Sense strand starting at position 3834 of SEQ ID NO: 1884709
auauguaggcauugagaua

SEQ ID NO: 2286075 - RNA, 19 nt, Artificial Sequence
  Description of Artificial Sequence: Synthetic oligonucleotide
  Antisense strand to SEQ ID NO: 2286074
uaucucaaugccuacauau

SEQ ID NO: 2286076 - RNA, 19 nt, Artificial Sequence
  Description of Artificial Sequence: Synthetic oligonucleotide
  Sense strand starting at position 3902 of SEQ ID NO: 1884709
agagauagcuucucucaac

SEQ ID NO: 2286077 - RNA, 19 nt, Artificial Sequence
  Description of Artificial Sequence: Synthetic oligonucleotide
  Antisense strand to SEQ ID NO: 2286076
guugagagaagcuaucucu

SEQ ID NO: 2286078 - RNA, 19 nt, Artificial Sequence
  Description of Artificial Sequence: Synthetic oligonucleotide
  Sense strand starting at position 3955 of SEQ ID NO: 1884709
aguuauauccuauauguac

SEQ ID NO: 2286079 - RNA, 19 nt, Artificial Sequence
  Description of Artificial Sequence: Synthetic oligonucleotide
  Antisense strand to SEQ ID NO: 2286078
guacauauaggauauaacu

SEQ ID NO: 2286080 - RNA, 19 nt, Artificial Sequence
  Description of Artificial Sequence: Synthetic oligonucleotide
  Sense strand starting at position 30 of SEQ ID NO: 1884710
uucugucuuucccaccaga

SEQ ID NO: 2286081 - RNA, 19 nt, Artificial Sequence
  Description of Artificial Sequence: Synthetic oligonucleotide
  Antisense strand to SEQ ID NO: 2286080
ucuggugggaaagacagaa

SEQ ID NO: 2286082 - RNA, 19 nt, Artificial Sequence
  Description of Artificial Sequence: Synthetic oligonucleotide
  Sense strand starting at position 51 of SEQ ID NO: 1884710
guaggcucucugcagcaaa

SEQ ID NO: 2286083 - RNA, 19 nt, Artificial Sequence
  Description of Artificial Sequence: Synthetic oligonucleotide
  Antisense strand to SEQ ID NO: 2286082
uuugcugcagagagccuac

SEQ ID NO: 2286084 - RNA, 19 nt, Artificial Sequence
  Description of Artificial Sequence: Synthetic oligonucleotide
  Sense strand starting at position 127 of SEQ ID NO: 1884710
ugaacaaauguuuguggaa

SEQ ID NO: 2286085 - RNA, 19 nt, Artificial Sequence
  Description of Artificial Sequence: Synthetic oligonucleotide
  Antisense strand to SEQ ID NO: 2286084
uuccacaaacauuuguuca

SEQ ID NO: 2286086 - RNA, 19 nt, Artificial Sequence
  Description of Artificial Sequence: Synthetic oligonucleotide
  Sense strand starting at position 128 of SEQ ID NO: 1884710
gaacaaauguuuguggaau

SEQ ID NO: 2286087 - RNA, 19 nt, Artificial Sequence
  Description of Artificial Sequence: Synthetic oligonucleotide
  Antisense strand to SEQ ID NO: 2286086
auuccacaaacauuuguuc

SEQ ID NO: 2286088 - RNA, 19 nt, Artificial Sequence
  Description of Artificial Sequence: Synthetic oligonucleotide
  Sense strand starting at position 130 of SEQ ID NO: 1884710
acaaauguuuguggaauau

SEQ ID NO: 2286089 - RNA, 19 nt, Artificial Sequence
  Description of Artificial Sequence: Synthetic oligonucleotide
  Antisense strand to SEQ ID NO: 2286088
auauuccacaaacauuugu

SEQ ID NO: 2286090 - RNA, 19 nt, Artificial Sequence
  Description of Artificial Sequence: Synthetic oligonucleotide
  Sense strand starting at position 140 of SEQ ID NO: 1884710
guggaauaugaaugguuaa

SEQ ID NO: 2286091 - RNA, 19 nt, Artificial Sequence
  Description of Artificial Sequence: Synthetic oligonucleotide
  Antisense strand to SEQ ID NO: 2286090
uuaaccauucauauuccac

SEQ ID NO: 2286092 - RNA, 19 nt, Artificial Sequence
  Description of Artificial Sequence: Synthetic oligonucleotide
  Sense strand starting at position 152 of SEQ ID NO: 1884710
ugguuaaugacucgcaucu

SEQ ID NO: 2286093 - RNA, 19 nt, Artificial Sequence
  Description of Artificial Sequence: Synthetic oligonucleotide
  Antisense strand to SEQ ID NO: 2286092
agaugcgagucauuaacca

SEQ ID NO: 2286094 - RNA, 19 nt, Artificial Sequence
  Description of Artificial Sequence: Synthetic oligonucleotide
  Sense strand starting at position 355 of SEQ ID NO: 1884710
aucggauugccuggagaau

SEQ ID NO: 2286095 - RNA, 19 nt, Artificial Sequence
  Description of Artificial Sequence: Synthetic oligonucleotide
  Antisense strand to SEQ ID NO: 2286094
auucuccaggcaauccgau

SEQ ID NO: 2286096 - RNA, 19 nt, Artificial Sequence
  Description of Artificial Sequence: Synthetic oligonucleotide
  Sense strand starting at position 356 of SEQ ID NO: 1884710
ucggauugccuggagaaua

SEQ ID NO: 2286097 - RNA, 19 nt, Artificial Sequence
  Description of Artificial Sequence: Synthetic oligonucleotide
  Antisense strand to SEQ ID NO: 2286096
uauucuccaggcaauccga

SEQ ID NO: 2286098 - RNA, 19 nt, Artificial Sequence
  Description of Artificial Sequence: Synthetic oligonucleotide
  Sense strand starting at position 367 of SEQ ID NO: 1884710
ggagaauauuggagaguga

SEQ ID NO: 2286099 - RNA, 19 nt, Artificial Sequence
  Description of Artificial Sequence: Synthetic oligonucleotide
  Antisense strand to SEQ ID NO: 2286098
ucacucuccaauauucucc

SEQ ID NO: 2286100 - RNA, 19 nt, Artificial Sequence
  Description of Artificial Sequence: Synthetic oligonucleotide
  Sense strand starting at position 371 of SEQ ID NO: 1884710
aauauuggagagugaaugu

SEQ ID NO: 2286101 - RNA, 19 nt, Artificial Sequence
  Description of Artificial Sequence: Synthetic oligonucleotide
  Antisense strand to SEQ ID NO: 2286100
acauucacucuccaauauu

SEQ ID NO: 2286102 - RNA, 19 nt, Artificial Sequence
  Description of Artificial Sequence: Synthetic oligonucleotide
  Sense strand starting at position 856 of SEQ ID NO: 1884710
gcgucuguccugggcguaa

SEQ ID NO: 2286103 - RNA, 19 nt, Artificial Sequence
  Description of Artificial Sequence: Synthetic oligonucleotide
  Antisense strand to SEQ ID NO: 2286102
uuacgcccaggacagacgc

SEQ ID NO: 2286104 - RNA, 19 nt, Artificial Sequence
  Description of Artificial Sequence: Synthetic oligonucleotide
  Sense strand starting at position 858 of SEQ ID NO: 1884710
gucuguccugggcguaaca

SEQ ID NO: 2286105 - RNA, 19 nt, Artificial Sequence
  Description of Artificial Sequence: Synthetic oligonucleotide
  Antisense strand to SEQ ID NO: 2286104
uguuacgcccaggacagac

SEQ ID NO: 2286106 - RNA, 19 nt, Artificial Sequence
  Description of Artificial Sequence: Synthetic oligonucleotide
  Sense strand starting at position 1570 of SEQ ID NO: 1884710
cccagucgacaccauaaau

SEQ ID NO: 2286107 - RNA, 19 nt, Artificial Sequence
  Description of Artificial Sequence: Synthetic oligonucleotide
  Antisense strand to SEQ ID NO: 2286106
auuuauggugucgacuggg

SEQ ID NO: 2286108 - RNA, 19 nt, Artificial Sequence
  Description of Artificial Sequence: Synthetic oligonucleotide
  Sense strand starting at position 2608 of SEQ ID NO: 1884710
ggagacauacgauggaagu

SEQ ID NO: 2286109 - RNA, 19 nt, Artificial Sequence
  Description of Artificial Sequence: Synthetic oligonucleotide
  Antisense strand to SEQ ID NO: 2286108
acuuccaucguaugucucc

SEQ ID NO: 2286110 - RNA, 19 nt, Artificial Sequence
  Description of Artificial Sequence: Synthetic oligonucleotide
  Sense strand starting at position 2677 of SEQ ID NO: 1884710
caauauuagcgccgucauc

SEQ ID NO: 2286111 - RNA, 19 nt, Artificial Sequence
  Description of Artificial Sequence: Synthetic oligonucleotide
  Antisense strand to SEQ ID NO: 2286110
gaugacggcgcuaauauug

SEQ ID NO: 2286112 - RNA, 19 nt, Artificial Sequence
  Description of Artificial Sequence: Synthetic oligonucleotide
  Sense strand starting at position 2883 of SEQ ID NO: 1884710
ggacaagggcugugggauu

SEQ ID NO: 2286113 - RNA, 19 nt, Artificial Sequence
  Description of Artificial Sequence: Synthetic oligonucleotide
  Antisense strand to SEQ ID NO: 2286112
aaucccacagcccuugucc

SEQ ID NO: 2286114 - RNA, 19 nt, Artificial Sequence
  Description of Artificial Sequence: Synthetic oligonucleotide
  Sense strand starting at position 3034 of SEQ ID NO: 1884710
ccgggaucccuggaagucu

SEQ ID NO: 2286115 - RNA, 19 nt, Artificial Sequence
  Description of Artificial Sequence: Synthetic oligonucleotide
  Antisense strand to SEQ ID NO: 2286114
agacuuccagggaucccgg

SEQ ID NO: 2286116 - RNA, 19 nt, Artificial Sequence
  Description of Artificial Sequence: Synthetic oligonucleotide
  Sense strand starting at position 3064 of SEQ ID NO: 1884710
gaagucggaccuuguugaa

SEQ ID NO: 2286117 - RNA, 19 nt, Artificial Sequence
  Description of Artificial Sequence: Synthetic oligonucleotide
  Antisense strand to SEQ ID NO: 2286116
uucaacaagguccgacuuc

SEQ ID NO: 2286118 - RNA, 19 nt, Artificial Sequence
  Description of Artificial Sequence: Synthetic oligonucleotide
  Sense strand starting at position 3498 of SEQ ID NO: 1884710
gcccgcuauuuaguaggua

SEQ ID NO: 2286119 - RNA, 19 nt, Artificial Sequence
  Description of Artificial Sequence: Synthetic oligonucleotide
  Antisense strand to SEQ ID NO: 2286118
uaccuacuaaauagcgggc

SEQ ID NO: 2286120 - RNA, 19 nt, Artificial Sequence
  Description of Artificial Sequence: Synthetic oligonucleotide
  Sense strand starting at position 3501 of SEQ ID NO: 1884710
cgcuauuuaguagguacau

SEQ ID NO: 2286121 - RNA, 19 nt, Artificial Sequence
  Description of Artificial Sequence: Synthetic oligonucleotide
  Antisense strand to SEQ ID NO: 2286120
auguaccuacuaaauagcg

SEQ ID NO: 2286122 - RNA, 19 nt, Artificial Sequence
  Description of Artificial Sequence: Synthetic oligonucleotide
  Sense strand starting at position 3513 of SEQ ID NO: 1884710
gguacauggucgcuauuua

SEQ ID NO: 2286123 - RNA, 19 nt, Artificial Sequence
  Description of Artificial Sequence: Synthetic oligonucleotide
  Antisense strand to SEQ ID NO: 2286122
uaaauagcgaccauguacc

SEQ ID NO: 2286124 - RNA, 19 nt, Artificial Sequence
  Description of Artificial Sequence: Synthetic oligonucleotide
  Sense strand starting at position 3514 of SEQ ID NO: 1884710
guacauggucgcuauuuau

SEQ ID NO: 2286125 - RNA, 19 nt, Artificial Sequence
  Description of Artificial Sequence: Synthetic oligonucleotide
  Antisense strand to SEQ ID NO: 2286124
auaaauagcgaccauguac

SEQ ID NO: 2286126 - RNA, 19 nt, Artificial Sequence
  Description of Artificial Sequence: Synthetic oligonucleotide
  Sense strand starting at position 3517 of SEQ ID NO: 1884710
cauggucgcuauuuauaga

SEQ ID NO: 2286127 - RNA, 19 nt, Artificial Sequence
  Description of Artificial Sequence: Synthetic oligonucleotide
  Antisense strand to SEQ ID NO: 2286126
ucuauaaauagcgaccaug

SEQ ID NO: 2286128 - RNA, 19 nt, Artificial Sequence
  Description of Artificial Sequence: Synthetic oligonucleotide
  Sense strand starting at position 3560 of SEQ ID NO: 1884710
gauacaagaguuggucuga

SEQ ID NO: 2286129 - RNA, 19 nt, Artificial Sequence
  Description of Artificial Sequence: Synthetic oligonucleotide
  Antisense strand to SEQ ID NO: 2286128
ucagaccaacucuuguauc

SEQ ID NO: 2286130 - RNA, 19 nt, Artificial Sequence
  Description of Artificial Sequence: Synthetic oligonucleotide
  Sense strand starting at position 3565 of SEQ ID NO: 1884710
aagaguuggucugaggucu

SEQ ID NO: 2286131 - RNA, 19 nt, Artificial Sequence
  Description of Artificial Sequence: Synthetic oligonucleotide
  Antisense strand to SEQ ID NO: 2286130
agaccucagaccaacucuu

SEQ ID NO: 2286132 - RNA, 19 nt, Artificial Sequence
  Description of Artificial Sequence: Synthetic oligonucleotide
  Sense strand starting at position 3571 of SEQ ID NO: 1884710
uggucugaggucuaaucuu

SEQ ID NO: 2286133 - RNA, 19 nt, Artificial Sequence
  Description of Artificial Sequence: Synthetic oligonucleotide
  Antisense strand to SEQ ID NO: 2286132
aagauuagaccucagacca

SEQ ID NO: 2286134 - RNA, 19 nt, Artificial Sequence
  Description of Artificial Sequence: Synthetic oligonucleotide
  Sense strand starting at position 3610 of SEQ ID NO: 1884710
cccugacuuccuggguaac

SEQ ID NO: 2286135 - RNA, 19 nt, Artificial Sequence
  Description of Artificial Sequence: Synthetic oligonucleotide
  Antisense strand to SEQ ID NO: 2286134
guuacccaggaagucaggg

SEQ ID NO: 2286136 - RNA, 19 nt, Artificial Sequence
  Description of Artificial Sequence: Synthetic oligonucleotide
  Sense strand starting at position 3637 of SEQ ID NO: 1884710
ucugcuucuccacagguaa

SEQ ID NO: 2286137 - RNA, 19 nt, Artificial Sequence
  Description of Artificial Sequence: Synthetic oligonucleotide
  Antisense strand to SEQ ID NO: 2286136
uuaccuguggagaagcaga

SEQ ID NO: 2286138 - RNA, 19 nt, Artificial Sequence
  Description of Artificial Sequence: Synthetic oligonucleotide
  Sense strand starting at position 3661 of SEQ ID NO: 1884710
gggcgaagaugucauaauc

SEQ ID NO: 2286139 - RNA, 19 nt, Artificial Sequence
  Description of Artificial Sequence: Synthetic oligonucleotide
  Antisense strand to SEQ ID NO: 2286138
gauuaugacaucuucgccc

SEQ ID NO: 2286140 - RNA, 19 nt, Artificial Sequence
  Description of Artificial Sequence: Synthetic oligonucleotide
  Sense strand starting at position 3670 of SEQ ID NO: 1884710
ugucauaauccugggcuga

SEQ ID NO: 2286141 - RNA, 19 nt, Artificial Sequence
  Description of Artificial Sequence: Synthetic oligonucleotide
  Antisense strand to SEQ ID NO: 2286140
ucagcccaggauuaugaca

SEQ ID NO: 2286142 - RNA, 19 nt, Artificial Sequence
  Description of Artificial Sequence: Synthetic oligonucleotide
  Sense strand starting at position 3671 of SEQ ID NO: 1884710
gucauaauccugggcugag

SEQ ID NO: 2286143 - RNA, 19 nt, Artificial Sequence
  Description of Artificial Sequence: Synthetic oligonucleotide
  Antisense strand to SEQ ID NO: 2286142
cucagcccaggauuaugac

SEQ ID NO: 2286144 - RNA, 19 nt, Artificial Sequence
  Description of Artificial Sequence: Synthetic oligonucleotide
  Sense strand starting at position 3672 of SEQ ID NO: 1884710
ucauaauccugggcugaga

SEQ ID NO: 2286145 - RNA, 19 nt, Artificial Sequence
  Description of Artificial Sequence: Synthetic oligonucleotide
  Antisense strand to SEQ ID NO: 2286144
ucucagcccaggauuauga

SEQ ID NO: 2286146 - RNA, 19 nt, Artificial Sequence
  Description of Artificial Sequence: Synthetic oligonucleotide
  Sense strand starting at position 3692 of SEQ ID NO: 1884710
ggaacaagaccguggacau

SEQ ID NO: 2286147 - RNA, 19 nt, Artificial Sequence
  Description of Artificial Sequence: Synthetic oligonucleotide
  Antisense strand to SEQ ID NO: 2286146
auguccacggucuuguucc

SEQ ID NO: 2286148 - RNA, 19 nt, Artificial Sequence
  Description of Artificial Sequence: Synthetic oligonucleotide
  Sense strand starting at position 3693 of SEQ ID NO: 1884710
gaacaagaccguggacaua

SEQ ID NO: 2286149 - RNA, 19 nt, Artificial Sequence
  Description of Artificial Sequence: Synthetic oligonucleotide
  Antisense strand to SEQ ID NO: 2286148
uauguccacggucuuguuc

SEQ ID NO: 2286150 - RNA, 19 nt, Artificial Sequence
  Description of Artificial Sequence: Synthetic oligonucleotide
  Sense strand starting at position 77 of SEQ ID NO: 1884711
ggcgguucuucuggaucaa

SEQ ID NO: 2286151 - RNA, 19 nt, Artificial Sequence
  Description of Artificial Sequence: Synthetic oligonucleotide
  Antisense strand to SEQ ID NO: 2286150
uugauccagaagaaccgcc

SEQ ID NO: 2286152 - RNA, 19 nt, Artificial Sequence
  Description of Artificial Sequence: Synthetic oligonucleotide
  Sense strand starting at position 78 of SEQ ID NO: 1884711
gcgguucuucuggaucaaa

SEQ ID NO: 2286153 - RNA, 19 nt, Artificial Sequence
  Description of Artificial Sequence: Synthetic oligonucleotide
  Antisense strand to SEQ ID NO: 2286152
uuugauccagaagaaccgc

SEQ ID NO: 2286154 - RNA, 19 nt, Artificial Sequence
  Description of Artificial Sequence: Synthetic oligonucleotide
  Sense strand starting at position 292 of SEQ ID NO: 1884711
gauggaaguucggcuggaa

SEQ ID NO: 2286155 - RNA, 19 nt, Artificial Sequence
  Description of Artificial Sequence: Synthetic oligonucleotide
  Antisense strand to SEQ ID NO: 2286154
uuccagccgaacuuccauc

SEQ ID NO: 2286156 - RNA, 19 nt, Artificial Sequence
  Description of Artificial Sequence: Synthetic oligonucleotide
  Sense strand starting at position 452 of SEQ ID NO: 1884711
gugggugagcaugaauuca

SEQ ID NO: 2286157 - RNA, 19 nt, Artificial Sequence
  Description of Artificial Sequence: Synthetic oligonucleotide
  Antisense strand to SEQ ID NO: 2286156
ugaauucaugcucacccac

SEQ ID NO: 2286158 - RNA, 19 nt, Artificial Sequence
  Description of Artificial Sequence: Synthetic oligonucleotide
  Sense strand starting at position 810 of SEQ ID NO: 1884711
cagguucuguugcagaaca

SEQ ID NO: 2286159 - RNA, 19 nt, Artificial Sequence
  Description of Artificial Sequence: Synthetic oligonucleotide
  Antisense strand to SEQ ID NO: 2286158
uguucugcaacagaaccug

SEQ ID NO: 2286160 - RNA, 19 nt, Artificial Sequence
  Description of Artificial Sequence: Synthetic oligonucleotide
  Sense strand starting at position 812 of SEQ ID NO: 1884711
gguucuguugcagaacaca

SEQ ID NO: 2286161 - RNA, 19 nt, Artificial Sequence
  Description of Artificial Sequence: Synthetic oligonucleotide
  Antisense strand to SEQ ID NO: 2286160
uguguucugcaacagaacc

SEQ ID NO: 2286162 - RNA, 19 nt, Artificial Sequence
  Description of Artificial Sequence: Synthetic oligonucleotide
  Sense strand starting at position 953 of SEQ ID NO: 1884711
gcagaacggguuuggugau

SEQ ID NO: 2286163 - RNA, 19 nt, Artificial Sequence
  Description of Artificial Sequence: Synthetic oligonucleotide
  Antisense strand to SEQ ID NO: 2286162
aucaccaaacccguucugc

SEQ ID NO: 2286164 - RNA, 19 nt, Artificial Sequence
  Description of Artificial Sequence: Synthetic oligonucleotide
  Sense strand starting at position 1026 of SEQ ID NO: 1884711
cugcauagaucccagggaa

SEQ ID NO: 2286165 - RNA, 19 nt, Artificial Sequence
  Description of Artificial Sequence: Synthetic oligonucleotide
  Antisense strand to SEQ ID NO: 2286164
uucccugggaucuaugcag

SEQ ID NO: 2286166 - RNA, 19 nt, Artificial Sequence
  Description of Artificial Sequence: Synthetic oligonucleotide
  Sense strand starting at position 1231 of SEQ ID NO: 1884711
cugguuuagugggagccaa

SEQ ID NO: 2286167 - RNA, 19 nt, Artificial Sequence
  Description of Artificial Sequence: Synthetic oligonucleotide
  Antisense strand to SEQ ID NO: 2286166
uuggcucccacuaaaccag

SEQ ID NO: 2286168 - RNA, 19 nt, Artificial Sequence
  Description of Artificial Sequence: Synthetic oligonucleotide
  Sense strand starting at position 1259 of SEQ ID NO: 1884711
aaggacuggucaugugaga

SEQ ID NO: 2286169 - RNA, 19 nt, Artificial Sequence
  Description of Artificial Sequence: Synthetic oligonucleotide
  Antisense strand to SEQ ID NO: 2286168
ucucacaugaccaguccuu

SEQ ID NO: 2286170 - RNA, 19 nt, Artificial Sequence
  Description of Artificial Sequence: Synthetic oligonucleotide
  Sense strand starting at position 1343 of SEQ ID NO: 1884711
gcggguucccaucagcuua

SEQ ID NO: 2286171 - RNA, 19 nt, Artificial Sequence
  Description of Artificial Sequence: Synthetic oligonucleotide
  Antisense strand to SEQ ID NO: 2286170
uaagcugaugggaacccgc

SEQ ID NO: 2286172 - RNA, 19 nt, Artificial Sequence
  Description of Artificial Sequence: Synthetic oligonucleotide
  Sense strand starting at position 1452 of SEQ ID NO: 1884711
gcgaguagccaggaugagu

SEQ ID NO: 2286173 - RNA, 19 nt, Artificial Sequence
  Description of Artificial Sequence: Synthetic oligonucleotide
  Antisense strand to SEQ ID NO: 2286172
acucauccuggcuacucgc

SEQ ID NO: 2286174 - RNA, 19 nt, Artificial Sequence
  Description of Artificial Sequence: Synthetic oligonucleotide
  Sense strand starting at position 1870 of SEQ ID NO: 1884711
gcucgaaggcaucaucaau

SEQ ID NO: 2286175 - RNA, 19 nt, Artificial Sequence
  Description of Artificial Sequence: Synthetic oligonucleotide
  Antisense strand to SEQ ID NO: 2286174
auugaugaugccuucgagc

SEQ ID NO: 2286176 - RNA, 19 nt, Artificial Sequence
  Description of Artificial Sequence: Synthetic oligonucleotide
  Sense strand starting at position 1876 of SEQ ID NO: 1884711
aggcaucaucaaugcugaa

SEQ ID NO: 2286177 - RNA, 19 nt, Artificial Sequence
  Description of Artificial Sequence: Synthetic oligonucleotide
  Antisense strand to SEQ ID NO: 2286176
uucagcauugaugaugccu

SEQ ID NO: 2286178 - RNA, 19 nt, Artificial Sequence
  Description of Artificial Sequence: Synthetic oligonucleotide
  Sense strand starting at position 2285 of SEQ ID NO: 1884711
caaggagacuccugggaac

SEQ ID NO: 2286179 - RNA, 19 nt, Artificial Sequence
  Description of Artificial Sequence: Synthetic oligonucleotide
  Antisense strand to SEQ ID NO: 2286178
guucccaggagucuccuug

SEQ ID NO: 2286180 - RNA, 19 nt, Artificial Sequence
  Description of Artificial Sequence: Synthetic oligonucleotide
  Sense strand starting at position 2382 of SEQ ID NO: 1884711
cagagagcuuaugugucuu

SEQ ID NO: 2286181 - RNA, 19 nt, Artificial Sequence
  Description of Artificial Sequence: Synthetic oligonucleotide
  Antisense strand to SEQ ID NO: 2286180
aagacacauaagcucucug

SEQ ID NO: 2286182 - RNA, 19 nt, Artificial Sequence
  Description of Artificial Sequence: Synthetic oligonucleotide
  Sense strand starting at position 2386 of SEQ ID NO: 1884711
gagcuuaugugucuuccaa

SEQ ID NO: 2286183 - RNA, 19 nt, Artificial Sequence
  Description of Artificial Sequence: Synthetic oligonucleotide
  Antisense strand to SEQ ID NO: 2286182
uuggaagacacauaagcuc

SEQ ID NO: 2286184 - RNA, 19 nt, Artificial Sequence
  Description of Artificial Sequence: Synthetic oligonucleotide
  Sense strand starting at position 2388 of SEQ ID NO: 1884711
gcuuaugugucuuccaauu

SEQ ID NO: 2286185 - RNA, 19 nt, Artificial Sequence
  Description of Artificial Sequence: Synthetic oligonucleotide
  Antisense strand to SEQ ID NO: 2286184
aauuggaagacacauaagc

SEQ ID NO: 2286186 - RNA, 19 nt, Artificial Sequence
  Description of Artificial Sequence: Synthetic oligonucleotide
  Sense strand starting at position 2390 of SEQ ID NO: 1884711
uuaugugucuuccaauuuc

SEQ ID NO: 2286187 - RNA, 19 nt, Artificial Sequence
  Description of Artificial Sequence: Synthetic oligonucleotide
  Antisense strand to SEQ ID NO: 2286186
gaaauuggaagacacauaa

SEQ ID NO: 2286188 - RNA, 19 nt, Artificial Sequence
  Description of Artificial Sequence: Synthetic oligonucleotide
  Sense strand starting at position 2457 of SEQ ID NO: 1884711
uuuaucugcguguguuauu

SEQ ID NO: 2286189 - RNA, 19 nt, Artificial Sequence
  Description of Artificial Sequence: Synthetic oligonucleotide
  Antisense strand to SEQ ID NO: 2286188
aauaacacacgcagauaaa

SEQ ID NO: 2286190 - RNA, 19 nt, Artificial Sequence
  Description of Artificial Sequence: Synthetic oligonucleotide
  Sense strand starting at position 2462 of SEQ ID NO: 1884711
cugcguguguuauucugaa

SEQ ID NO: 2286191 - RNA, 19 nt, Artificial Sequence
  Description of Artificial Sequence: Synthetic oligonucleotide
  Antisense strand to SEQ ID NO: 2286190
uucagaauaacacacgcag

SEQ ID NO: 2286192 - RNA, 19 nt, Artificial Sequence
  Description of Artificial Sequence: Synthetic oligonucleotide
  Sense strand starting at position 3168 of SEQ ID NO: 1884711
gcagaaguacucuaugaau

SEQ ID NO: 2286193 - RNA, 19 nt, Artificial Sequence
  Description of Artificial Sequence: Synthetic oligonucleotide
  Antisense strand to SEQ ID NO: 2286192
auucauagaguacuucugc

SEQ ID NO: 2286194 - RNA, 19 nt, Artificial Sequence
  Description of Artificial Sequence: Synthetic oligonucleotide
  Sense strand starting at position 3171 of SEQ ID NO: 1884711
gaaguacucuaugaauuag

SEQ ID NO: 2286195 - RNA, 19 nt, Artificial Sequence
  Description of Artificial Sequence: Synthetic oligonucleotide
  Antisense strand to SEQ ID NO: 2286194
cuaauucauagaguacuuc

SEQ ID NO: 2286196 - RNA, 19 nt, Artificial Sequence
  Description of Artificial Sequence: Synthetic oligonucleotide
  Sense strand starting at position 3221 of SEQ ID NO: 1884711
cuuguaaguacuugggacu

SEQ ID NO: 2286197 - RNA, 19 nt, Artificial Sequence
  Description of Artificial Sequence: Synthetic oligonucleotide
  Antisense strand to SEQ ID NO: 2286196
agucccaaguacuuacaag

SEQ ID NO: 2286198 - RNA, 19 nt, Artificial Sequence
  Description of Artificial Sequence: Synthetic oligonucleotide
  Sense strand starting at position 3222 of SEQ ID NO: 1884711
uuguaaguacuugggacuu

SEQ ID NO: 2286199 - RNA, 19 nt, Artificial Sequence
  Description of Artificial Sequence: Synthetic oligonucleotide
  Antisense strand to SEQ ID NO: 2286198
aagucccaaguacuuacaa

SEQ ID NO: 2286200 - RNA, 19 nt, Artificial Sequence
  Description of Artificial Sequence: Synthetic oligonucleotide
  Sense strand starting at position 3282 of SEQ ID NO: 1884711
gcaucuauuuagggccaaa

SEQ ID NO: 2286201 - RNA, 19 nt, Artificial Sequence
  Description of Artificial Sequence: Synthetic oligonucleotide
  Antisense strand to SEQ ID NO: 2286200
uuuggcccuaaauagaugc

SEQ ID NO: 2286202 - RNA, 19 nt, Artificial Sequence
  Description of Artificial Sequence: Synthetic oligonucleotide
  Sense strand starting at position 3318 of SEQ ID NO: 1884711
uagauacaguggugaauaa

SEQ ID NO: 2286203 - RNA, 19 nt, Artificial Sequence
  Description of Artificial Sequence: Synthetic oligonucleotide
  Antisense strand to SEQ ID NO: 2286202
uuauucaccacuguaucua

SEQ ID NO: 2286204 - RNA, 19 nt, Artificial Sequence
  Description of Artificial Sequence: Synthetic oligonucleotide
  Sense strand starting at position 3355 of SEQ ID NO: 1884711
aguuucaagugcuguguga

SEQ ID NO: 2286205 - RNA, 19 nt, Artificial Sequence
  Description of Artificial Sequence: Synthetic oligonucleotide
  Antisense strand to SEQ ID NO: 2286204
ucacacagcacuugaaacu

SEQ ID NO: 2286206 - RNA, 19 nt, Artificial Sequence
  Description of Artificial Sequence: Synthetic oligonucleotide
  Sense strand starting at position 3357 of SEQ ID NO: 1884711
uuucaagugcugugugaug

SEQ ID NO: 2286207 - RNA, 19 nt, Artificial Sequence
  Description of Artificial Sequence: Synthetic oligonucleotide
  Antisense strand to SEQ ID NO: 2286206
caucacacagcacuugaaa

SEQ ID NO: 2286208 - RNA, 19 nt, Artificial Sequence
  Description of Artificial Sequence: Synthetic oligonucleotide
  Sense strand starting at position 3359 of SEQ ID NO: 1884711
ucaagugcugugugaugca

SEQ ID NO: 2286209 - RNA, 19 nt, Artificial Sequence
  Description of Artificial Sequence: Synthetic oligonucleotide
  Antisense strand to SEQ ID NO: 2286208
ugcaucacacagcacuuga

SEQ ID NO: 2286210 - RNA, 19 nt, Artificial Sequence
  Description of Artificial Sequence: Synthetic oligonucleotide
  Sense strand starting at position 3434 of SEQ ID NO: 1884711
caggaaugccgaugaugaa

SEQ ID NO: 2286211 - RNA, 19 nt, Artificial Sequence
  Description of Artificial Sequence: Synthetic oligonucleotide
  Antisense strand to SEQ ID NO: 2286210
uucaucaucggcauuccug

SEQ ID NO: 2286212 - RNA, 19 nt, Artificial Sequence
  Description of Artificial Sequence: Synthetic oligonucleotide
  Sense strand starting at position 3640 of SEQ ID NO: 1884711
ccuugagagcuuuauggac

SEQ ID NO: 2286213 - RNA, 19 nt, Artificial Sequence
  Description of Artificial Sequence: Synthetic oligonucleotide
  Antisense strand to SEQ ID NO: 2286212
guccauaaagcucucaagg

SEQ ID NO: 2286214 - RNA, 19 nt, Artificial Sequence
  Description of Artificial Sequence: Synthetic oligonucleotide
  Sense strand starting at position 3649 of SEQ ID NO: 1884711
cuuuauggaccuuagucaa

SEQ ID NO: 2286215 - RNA, 19 nt, Artificial Sequence
  Description of Artificial Sequence: Synthetic oligonucleotide
  Antisense strand to SEQ ID NO: 2286214
uugacuaagguccauaaag

SEQ ID NO: 2286216 - RNA, 19 nt, Artificial Sequence
  Description of Artificial Sequence: Synthetic oligonucleotide
  Sense strand starting at position 3656 of SEQ ID NO: 1884711
gaccuuagucaagaguucu

SEQ ID NO: 2286217 - RNA, 19 nt, Artificial Sequence
  Description of Artificial Sequence: Synthetic oligonucleotide
  Antisense strand to SEQ ID NO: 2286216
agaacucuugacuaagguc

SEQ ID NO: 2286218 - RNA, 19 nt, Artificial Sequence
  Description of Artificial Sequence: Synthetic oligonucleotide
  Sense strand starting at position 3824 of SEQ ID NO: 1884711
agugcccugccuuauuauu

SEQ ID NO: 2286219 - RNA, 19 nt, Artificial Sequence
  Description of Artificial Sequence: Synthetic oligonucleotide
  Antisense strand to SEQ ID NO: 2286218
aauaauaaggcagggcacu

SEQ ID NO: 2286220 - RNA, 19 nt, Artificial Sequence
  Description of Artificial Sequence: Synthetic oligonucleotide
  Sense strand starting at position 128 of SEQ ID NO: 1884712
ucuauaguuguauaucaag

SEQ ID NO: 2286221 - RNA, 19 nt, Artificial Sequence
  Description of Artificial Sequence: Synthetic oligonucleotide
  Antisense strand to SEQ ID NO: 2286220
cuugauauacaacuauaga

SEQ ID NO: 2286222 - RNA, 19 nt, Artificial Sequence
  Description of Artificial Sequence: Synthetic oligonucleotide
  Sense strand starting at position 134 of SEQ ID NO: 1884712
guuguauaucaagagcuca

SEQ ID NO: 2286223 - RNA, 19 nt, Artificial Sequence
  Description of Artificial Sequence: Synthetic oligonucleotide
  Antisense strand to SEQ ID NO: 2286222
ugagcucuugauauacaac

SEQ ID NO: 2286224 - RNA, 19 nt, Artificial Sequence
  Description of Artificial Sequence: Synthetic oligonucleotide
  Sense strand starting at position 142 of SEQ ID NO: 1884712
ucaagagcucaauaauguu

SEQ ID NO: 2286225 - RNA, 19 nt, Artificial Sequence
  Description of Artificial Sequence: Synthetic oligonucleotide
  Antisense strand to SEQ ID NO: 2286224
aacauuauugagcucuuga

SEQ ID NO: 2286226 - RNA, 19 nt, Artificial Sequence
  Description of Artificial Sequence: Synthetic oligonucleotide
  Sense strand starting at position 150 of SEQ ID NO: 1884712
ucaauaauguuuguagaug

SEQ ID NO: 2286227 - RNA, 19 nt, Artificial Sequence
  Description of Artificial Sequence: Synthetic oligonucleotide
  Antisense strand to SEQ ID NO: 2286226
caucuacaaacauuauuga

SEQ ID NO: 2286228 - RNA, 19 nt, Artificial Sequence
  Description of Artificial Sequence: Synthetic oligonucleotide
  Sense strand starting at position 324 of SEQ ID NO: 1884712
acaugaaucuuugccaaag

SEQ ID NO: 2286229 - RNA, 19 nt, Artificial Sequence
  Description of Artificial Sequence: Synthetic oligonucleotide
  Antisense strand to SEQ ID NO: 2286228
cuuuggcaaagauucaugu

SEQ ID NO: 2286230 - RNA, 19 nt, Artificial Sequence
  Description of Artificial Sequence: Synthetic oligonucleotide
  Sense strand starting at position 544 of SEQ ID NO: 1884712
ugagaagcaucagucuaua

SEQ ID NO: 2286231 - RNA, 19 nt, Artificial Sequence
  Description of Artificial Sequence: Synthetic oligonucleotide
  Antisense strand to SEQ ID NO: 2286230
uauagacugaugcuucuca

SEQ ID NO: 2286232 - RNA, 19 nt, Artificial Sequence
  Description of Artificial Sequence: Synthetic oligonucleotide
  Sense strand starting at position 615 of SEQ ID NO: 1884712
cuguguuaucucugaaaua

SEQ ID NO: 2286233 - RNA, 19 nt, Artificial Sequence
  Description of Artificial Sequence: Synthetic oligonucleotide
  Antisense strand to SEQ ID NO: 2286232
uauuucagagauaacacag

SEQ ID NO: 2286234 - RNA, 19 nt, Artificial Sequence
  Description of Artificial Sequence: Synthetic oligonucleotide
  Sense strand starting at position 733 of SEQ ID NO: 1884712
ugaucaucugcugaauauu

SEQ ID NO: 2286235 - RNA, 19 nt, Artificial Sequence
  Description of Artificial Sequence: Synthetic oligonucleotide
  Antisense strand to SEQ ID NO: 2286234
aauauucagcagaugauca

SEQ ID NO: 2286236 - RNA, 19 nt, Artificial Sequence
  Description of Artificial Sequence: Synthetic oligonucleotide
  Sense strand starting at position 736 of SEQ ID NO: 1884712
ucaucugcugaauauugaa

SEQ ID NO: 2286237 - RNA, 19 nt, Artificial Sequence
  Description of Artificial Sequence: Synthetic oligonucleotide
  Antisense strand to SEQ ID NO: 2286236
uucaauauucagcagauga

SEQ ID NO: 2286238 - RNA, 19 nt, Artificial Sequence
  Description of Artificial Sequence: Synthetic oligonucleotide
  Sense strand starting at position 780 of SEQ ID NO: 1884712
ugaucugucuucuuaggac

SEQ ID NO: 2286239 - RNA, 19 nt, Artificial Sequence
  Description of Artificial Sequence: Synthetic oligonucleotide
  Antisense strand to SEQ ID NO: 2286238
guccuaagaagacagauca

SEQ ID NO: 2286240 - RNA, 19 nt, Artificial Sequence
  Description of Artificial Sequence: Synthetic oligonucleotide
  Sense strand starting at position 919 of SEQ ID NO: 1884712
uuuaauaguccucaguguu

SEQ ID NO: 2286241 - RNA, 19 nt, Artificial Sequence
  Description of Artificial Sequence: Synthetic oligonucleotide
  Antisense strand to SEQ ID NO: 2286240
aacacugaggacuauuaaa

SEQ ID NO: 2286242 - RNA, 19 nt, Artificial Sequence
  Description of Artificial Sequence: Synthetic oligonucleotide
  Sense strand starting at position 966 of SEQ ID NO: 1884712
uuaauugcccuguauguaa

SEQ ID NO: 2286243 - RNA, 19 nt, Artificial Sequence
  Description of Artificial Sequence: Synthetic oligonucleotide
  Antisense strand to SEQ ID NO: 2286242
uuacauacagggcaauuaa

SEQ ID NO: 2286244 - RNA, 19 nt, Artificial Sequence
  Description of Artificial Sequence: Synthetic oligonucleotide
  Sense strand starting at position 980 of SEQ ID NO: 1884712
uguaaaguuguguaacaga

SEQ ID NO: 2286245 - RNA, 19 nt, Artificial Sequence
  Description of Artificial Sequence: Synthetic oligonucleotide
  Antisense strand to SEQ ID NO: 2286244
ucuguuacacaacuuuaca

SEQ ID NO: 2286246 - RNA, 19 nt, Artificial Sequence
  Description of Artificial Sequence: Synthetic oligonucleotide
  Sense strand starting at position 1337 of SEQ ID NO: 1884712
aaauaaggcuggucuuuga

SEQ ID NO: 2286247 - RNA, 19 nt, Artificial Sequence
  Description of Artificial Sequence: Synthetic oligonucleotide
  Antisense strand to SEQ ID NO: 2286246
ucaaagaccagccuuauuu

SEQ ID NO: 2286248 - RNA, 19 nt, Artificial Sequence
  Description of Artificial Sequence: Synthetic oligonucleotide
  Sense strand starting at position 1340 of SEQ ID NO: 1884712
uaaggcuggucuuugaauu

SEQ ID NO: 2286249 - RNA, 19 nt, Artificial Sequence
  Description of Artificial Sequence: Synthetic oligonucleotide
  Antisense strand to SEQ ID NO: 2286248
aauucaaagaccagccuua

SEQ ID NO: 2286250 - RNA, 19 nt, Artificial Sequence
  Description of Artificial Sequence: Synthetic oligonucleotide
  Sense strand starting at position 1341 of SEQ ID NO: 1884712
aaggcuggucuuugaauua

SEQ ID NO: 2286251 - RNA, 19 nt, Artificial Sequence
  Description of Artificial Sequence: Synthetic oligonucleotide
  Antisense strand to SEQ ID NO: 2286250
uaauucaaagaccagccuu

SEQ ID NO: 2286252 - RNA, 19 nt, Artificial Sequence
  Description of Artificial Sequence: Synthetic oligonucleotide
  Sense strand starting at position 1346 of SEQ ID NO: 1884712
uggucuuugaauuaacguu

SEQ ID NO: 2286253 - RNA, 19 nt, Artificial Sequence
  Description of Artificial Sequence: Synthetic oligonucleotide
  Antisense strand to SEQ ID NO: 2286252
aacguuaauucaaagacca

SEQ ID NO: 2286254 - RNA, 19 nt, Artificial Sequence
  Description of Artificial Sequence: Synthetic oligonucleotide
  Sense strand starting at position 1466 of SEQ ID NO: 1884712
ccuugcaggaauugguaua

SEQ ID NO: 2286255 - RNA, 19 nt, Artificial Sequence
  Description of Artificial Sequence: Synthetic oligonucleotide
  Antisense strand to SEQ ID NO: 2286254
uauaccaauuccugcaagg

SEQ ID NO: 2286256 - RNA, 19 nt, Artificial Sequence
  Description of Artificial Sequence: Synthetic oligonucleotide
  Sense strand starting at position 1476 of SEQ ID NO: 1884712
auugguauauccuucccuu

SEQ ID NO: 2286257 - RNA, 19 nt, Artificial Sequence
  Description of Artificial Sequence: Synthetic oligonucleotide
  Antisense strand to SEQ ID NO: 2286256
aagggaaggauauaccaau

SEQ ID NO: 2286258 - RNA, 19 nt, Artificial Sequence
  Description of Artificial Sequence: Synthetic oligonucleotide
  Sense strand starting at position 2305 of SEQ ID NO: 1884712
gggauuaaaugucuuuguu

SEQ ID NO: 2286259 - RNA, 19 nt, Artificial Sequence
  Description of Artificial Sequence: Synthetic oligonucleotide
  Antisense strand to SEQ ID NO: 2286258
aacaaagacauuuaauccc

SEQ ID NO: 2286260 - RNA, 19 nt, Artificial Sequence
  Description of Artificial Sequence: Synthetic oligonucleotide
  Sense strand starting at position 2309 of SEQ ID NO: 1884712
uuaaaugucuuuguuggga

SEQ ID NO: 2286261 - RNA, 19 nt, Artificial Sequence
  Description of Artificial Sequence: Synthetic oligonucleotide
  Antisense strand to SEQ ID NO: 2286260
ucccaacaaagacauuuaa

SEQ ID NO: 2286262 - RNA, 19 nt, Artificial Sequence
  Description of Artificial Sequence: Synthetic oligonucleotide
  Sense strand starting at position 2401 of SEQ ID NO: 1884712
ccgagagucccagguaaua

SEQ ID NO: 2286263 - RNA, 19 nt, Artificial Sequence
  Description of Artificial Sequence: Synthetic oligonucleotide
  Antisense strand to SEQ ID NO: 2286262
uauuaccugggacucucgg

SEQ ID NO: 2286264 - RNA, 19 nt, Artificial Sequence
  Description of Artificial Sequence: Synthetic oligonucleotide
  Sense strand starting at position 2603 of SEQ ID NO: 1884712
uuugauaggugcuuaucaa

SEQ ID NO: 2286265 - RNA, 19 nt, Artificial Sequence
  Description of Artificial Sequence: Synthetic oligonucleotide
  Antisense strand to SEQ ID NO: 2286264
uugauaagcaccuaucaaa

SEQ ID NO: 2286266 - RNA, 19 nt, Artificial Sequence
  Description of Artificial Sequence: Synthetic oligonucleotide
  Sense strand starting at position 2604 of SEQ ID NO: 1884712
uugauaggugcuuaucaac

SEQ ID NO: 2286267 - RNA, 19 nt, Artificial Sequence
  Description of Artificial Sequence: Synthetic oligonucleotide
  Antisense strand to SEQ ID NO: 2286266
guugauaagcaccuaucaa

SEQ ID NO: 2286268 - RNA, 19 nt, Artificial Sequence
  Description of Artificial Sequence: Synthetic oligonucleotide
  Sense strand starting at position 2646 of SEQ ID NO: 1884712
ggcagucguguguuagaac

SEQ ID NO: 2286269 - RNA, 19 nt, Artificial Sequence
  Description of Artificial Sequence: Synthetic oligonucleotide
  Antisense strand to SEQ ID NO: 2286268
guucuaacacacgacugcc

SEQ ID NO: 2286270 - RNA, 19 nt, Artificial Sequence
  Description of Artificial Sequence: Synthetic oligonucleotide
  Sense strand starting at position 2740 of SEQ ID NO: 1884712
ugucaaucuccucacaugu

SEQ ID NO: 2286271 - RNA, 19 nt, Artificial Sequence
  Description of Artificial Sequence: Synthetic oligonucleotide
  Antisense strand to SEQ ID NO: 2286270
acaugugaggagauugaca

SEQ ID NO: 2286272 - RNA, 19 nt, Artificial Sequence
  Description of Artificial Sequence: Synthetic oligonucleotide
  Sense strand starting at position 2877 of SEQ ID NO: 1884712
uuuacugagucauuacuau

SEQ ID NO: 2286273 - RNA, 19 nt, Artificial Sequence
  Description of Artificial Sequence: Synthetic oligonucleotide
  Antisense strand to SEQ ID NO: 2286272
auaguaaugacucaguaaa

SEQ ID NO: 2286274 - RNA, 19 nt, Artificial Sequence
  Description of Artificial Sequence: Synthetic oligonucleotide
  Sense strand starting at position 2960 of SEQ ID NO: 1884712
gcuaguauucuagagggag

SEQ ID NO: 2286275 - RNA, 19 nt, Artificial Sequence
  Description of Artificial Sequence: Synthetic oligonucleotide
  Antisense strand to SEQ ID NO: 2286274
cucccucuagaauacuagc

SEQ ID NO: 2286276 - RNA, 19 nt, Artificial Sequence
  Description of Artificial Sequence: Synthetic oligonucleotide
  Sense strand starting at position 3003 of SEQ ID NO: 1884712
ugaacaagauaauaucaga

SEQ ID NO: 2286277 - RNA, 19 nt, Artificial Sequence
  Description of Artificial Sequence: Synthetic oligonucleotide
  Antisense strand to SEQ ID NO: 2286276
ucugauauuaucuuguuca

SEQ ID NO: 2286278 - RNA, 19 nt, Artificial Sequence
  Description of Artificial Sequence: Synthetic oligonucleotide
  Sense strand starting at position 3014 of SEQ ID NO: 1884712
auaucagauagguguaguu

SEQ ID NO: 2286279 - RNA, 19 nt, Artificial Sequence
  Description of Artificial Sequence: Synthetic oligonucleotide
  Antisense strand to SEQ ID NO: 2286278
aacuacaccuaucugauau

SEQ ID NO: 2286280 - RNA, 19 nt, Artificial Sequence
  Description of Artificial Sequence: Synthetic oligonucleotide
  Sense strand starting at position 3016 of SEQ ID NO: 1884712
aucagauagguguaguugu

SEQ ID NO: 2286281 - RNA, 19 nt, Artificial Sequence
  Description of Artificial Sequence: Synthetic oligonucleotide
  Antisense strand to SEQ ID NO: 2286280
acaacuacaccuaucugau

SEQ ID NO: 2286282 - RNA, 19 nt, Artificial Sequence
  Description of Artificial Sequence: Synthetic oligonucleotide
  Sense strand starting at position 3023 of SEQ ID NO: 1884712
agguguaguuguuugaaga

SEQ ID NO: 2286283 - RNA, 19 nt, Artificial Sequence
  Description of Artificial Sequence: Synthetic oligonucleotide
  Antisense strand to SEQ ID NO: 2286282
ucuucaaacaacuacaccu

SEQ ID NO: 2286284 - RNA, 19 nt, Artificial Sequence
  Description of Artificial Sequence: Synthetic oligonucleotide
  Sense strand starting at position 3436 of SEQ ID NO: 1884712
gcuccuguaaucguagcua

SEQ ID NO: 2286285 - RNA, 19 nt, Artificial Sequence
  Description of Artificial Sequence: Synthetic oligonucleotide
  Antisense strand to SEQ ID NO: 2286284
uagcuacgauuacaggagc

SEQ ID NO: 2286286 - RNA, 19 nt, Artificial Sequence
  Description of Artificial Sequence: Synthetic oligonucleotide
  Sense strand starting at position 3661 of SEQ ID NO: 1884712
aacuuacguuccuuggaca

SEQ ID NO: 2286287 - RNA, 19 nt, Artificial Sequence
  Description of Artificial Sequence: Synthetic oligonucleotide
  Antisense strand to SEQ ID NO: 2286286
uguccaaggaacguaaguu

SEQ ID NO: 2286288 - RNA, 19 nt, Artificial Sequence
  Description of Artificial Sequence: Synthetic oligonucleotide
  Sense strand starting at position 3662 of SEQ ID NO: 1884712
acuuacguuccuuggacaa

SEQ ID NO: 2286289 - RNA, 19 nt, Artificial Sequence
  Description of Artificial Sequence: Synthetic oligonucleotide
  Antisense strand to SEQ ID NO: 2286288
uuguccaaggaacguaagu

SEQ ID NO: 2286290 - RNA, 19 nt, Artificial Sequence
  Description of Artificial Sequence: Synthetic oligonucleotide
  Sense strand starting at position 3682 of SEQ ID NO: 1884712
gcuuaaucacauggccaca

SEQ ID NO: 2286291 - RNA, 19 nt, Artificial Sequence
  Description of Artificial Sequence: Synthetic oligonucleotide
  Antisense strand to SEQ ID NO: 2286290
uguggccaugugauuaagc

SEQ ID NO: 2286292 - RNA, 19 nt, Artificial Sequence
  Description of Artificial Sequence: Synthetic oligonucleotide
  Sense strand starting at position 3708 of SEQ ID NO: 1884712
gcaagagaggauggugaau

SEQ ID NO: 2286293 - RNA, 19 nt, Artificial Sequence
  Description of Artificial Sequence: Synthetic oligonucleotide
  Antisense strand to SEQ ID NO: 2286292
auucaccauccucucuugc

SEQ ID NO: 2286294 - RNA, 19 nt, Artificial Sequence
  Description of Artificial Sequence: Synthetic oligonucleotide
  Sense strand starting at position 3746 of SEQ ID NO: 1884712
gggacaaaugcccagcuaa

SEQ ID NO: 2286295 - RNA, 19 nt, Artificial Sequence
  Description of Artificial Sequence: Synthetic oligonucleotide
  Antisense strand to SEQ ID NO: 2286294
uuagcugggcauuuguccc

SEQ ID NO: 2286296 - RNA, 19 nt, Artificial Sequence
  Description of Artificial Sequence: Synthetic oligonucleotide
  Sense strand starting at position 3842 of SEQ ID NO: 1884712
gucucuggcuacccaaaua

SEQ ID NO: 2286297 - RNA, 19 nt, Artificial Sequence
  Description of Artificial Sequence: Synthetic oligonucleotide
  Antisense strand to SEQ ID NO: 2286296
uauuuggguagccagagac

SEQ ID NO: 2286298 - RNA, 19 nt, Artificial Sequence
  Description of Artificial Sequence: Synthetic oligonucleotide
  Sense strand starting at position 3948 of SEQ ID NO: 1884712
agccaaaguccagaauauu

SEQ ID NO: 2286299 - RNA, 19 nt, Artificial Sequence
  Description of Artificial Sequence: Synthetic oligonucleotide
  Antisense strand to SEQ ID NO: 2286298
aauauucuggacuuuggcu

SEQ ID NO: 2286300 - RNA, 19 nt, Artificial Sequence
  Description of Artificial Sequence: Synthetic oligonucleotide
  Sense strand starting at position 32 of SEQ ID NO: 1884713
ggcagcaaauccuuauaca

SEQ ID NO: 2286301 - RNA, 19 nt, Artificial Sequence
  Description of Artificial Sequence: Synthetic oligonucleotide
  Antisense strand to SEQ ID NO: 2286300
uguauaaggauuugcugcc

SEQ ID NO: 2286302 - RNA, 19 nt, Artificial Sequence
  Description of Artificial Sequence: Synthetic oligonucleotide
  Sense strand starting at position 68 of SEQ ID NO: 1884713
gggaguguucuacaagcac

SEQ ID NO: 2286303 - RNA, 19 nt, Artificial Sequence
  Description of Artificial Sequence: Synthetic oligonucleotide
  Antisense strand to SEQ ID NO: 2286302
gugcuuguagaacacuccc

SEQ ID NO: 2286304 - RNA, 19 nt, Artificial Sequence
  Description of Artificial Sequence: Synthetic oligonucleotide
  Sense strand starting at position 151 of SEQ ID NO: 1884713
ugagaaauuugaggccaag

SEQ ID NO: 2286305 - RNA, 19 nt, Artificial Sequence
  Description of Artificial Sequence: Synthetic oligonucleotide
  Antisense strand to SEQ ID NO: 2286304
cuuggccucaaauuucuca

SEQ ID NO: 2286306 - RNA, 19 nt, Artificial Sequence
  Description of Artificial Sequence: Synthetic oligonucleotide
  Sense strand starting at position 192 of SEQ ID NO: 1884713
ggucacgucguuaguaagu

SEQ ID NO: 2286307 - RNA, 19 nt, Artificial Sequence
  Description of Artificial Sequence: Synthetic oligonucleotide
  Antisense strand to SEQ ID NO: 2286306
acuuacuaacgacgugacc

SEQ ID NO: 2286308 - RNA, 19 nt, Artificial Sequence
  Description of Artificial Sequence: Synthetic oligonucleotide
  Sense strand starting at position 270 of SEQ ID NO: 1884713
ggacuaagcugucucuuac

SEQ ID NO: 2286309 - RNA, 19 nt, Artificial Sequence
  Description of Artificial Sequence: Synthetic oligonucleotide
  Antisense strand to SEQ ID NO: 2286308
guaagagacagcuuagucc

SEQ ID NO: 2286310 - RNA, 19 nt, Artificial Sequence
  Description of Artificial Sequence: Synthetic oligonucleotide
  Sense strand starting at position 335 of SEQ ID NO: 1884713
agaagugugaagugcccua

SEQ ID NO: 2286311 - RNA, 19 nt, Artificial Sequence
  Description of Artificial Sequence: Synthetic oligonucleotide
  Antisense strand to SEQ ID NO: 2286310
uagggcacuucacacuucu

SEQ ID NO: 2286312 - RNA, 19 nt, Artificial Sequence
  Description of Artificial Sequence: Synthetic oligonucleotide
  Sense strand starting at position 385 of SEQ ID NO: 1884713
ccuggaaagcuuuaucuuu

SEQ ID NO: 2286313 - RNA, 19 nt, Artificial Sequence
  Description of Artificial Sequence: Synthetic oligonucleotide
  Antisense strand to SEQ ID NO: 2286312
aaagauaaagcuuuccagg

SEQ ID NO: 2286314 - RNA, 19 nt, Artificial Sequence
  Description of Artificial Sequence: Synthetic oligonucleotide
  Sense strand starting at position 387 of SEQ ID NO: 1884713
uggaaagcuuuaucuuuag

SEQ ID NO: 2286315 - RNA, 19 nt, Artificial Sequence
  Description of Artificial Sequence: Synthetic oligonucleotide
  Antisense strand to SEQ ID NO: 2286314
cuaaagauaaagcuuucca

SEQ ID NO: 2286316 - RNA, 19 nt, Artificial Sequence
  Description of Artificial Sequence: Synthetic oligonucleotide
  Sense strand starting at position 390 of SEQ ID NO: 1884713
aaagcuuuaucuuuagggu

SEQ ID NO: 2286317 - RNA, 19 nt, Artificial Sequence
  Description of Artificial Sequence: Synthetic oligonucleotide
  Antisense strand to SEQ ID NO: 2286316
acccuaaagauaaagcuuu

SEQ ID NO: 2286318 - RNA, 19 nt, Artificial Sequence
  Description of Artificial Sequence: Synthetic oligonucleotide
  Sense strand starting at position 391 of SEQ ID NO: 1884713
aagcuuuaucuuuaggguu

SEQ ID NO: 2286319 - RNA, 19 nt, Artificial Sequence
  Description of Artificial Sequence: Synthetic oligonucleotide
  Antisense strand to SEQ ID NO: 2286318
aacccuaaagauaaagcuu

SEQ ID NO: 2286320 - RNA, 19 nt, Artificial Sequence
  Description of Artificial Sequence: Synthetic oligonucleotide
  Sense strand starting at position 397 of SEQ ID NO: 1884713
uaucuuuaggguuaugguu

SEQ ID NO: 2286321 - RNA, 19 nt, Artificial Sequence
  Description of Artificial Sequence: Synthetic oligonucleotide
  Antisense strand to SEQ ID NO: 2286320
aaccauaacccuaaagaua

SEQ ID NO: 2286322 - RNA, 19 nt, Artificial Sequence
  Description of Artificial Sequence: Synthetic oligonucleotide
  Sense strand starting at position 403 of SEQ ID NO: 1884713
uaggguuaugguugcaaca

SEQ ID NO: 2286323 - RNA, 19 nt, Artificial Sequence
  Description of Artificial Sequence: Synthetic oligonucleotide
  Antisense strand to SEQ ID NO: 2286322
uguugcaaccauaacccua

SEQ ID NO: 2286324 - RNA, 19 nt, Artificial Sequence
  Description of Artificial Sequence: Synthetic oligonucleotide
  Sense strand starting at position 528 of SEQ ID NO: 1884713
uggaguguuagcgauuaaa

SEQ ID NO: 2286325 - RNA, 19 nt, Artificial Sequence
  Description of Artificial Sequence: Synthetic oligonucleotide
  Antisense strand to SEQ ID NO: 2286324
uuuaaucgcuaacacucca

SEQ ID NO: 2286326 - RNA, 19 nt, Artificial Sequence
  Description of Artificial Sequence: Synthetic oligonucleotide
  Sense strand starting at position 531 of SEQ ID NO: 1884713
aguguuagcgauuaaauua

SEQ ID NO: 2286327 - RNA, 19 nt, Artificial Sequence
  Description of Artificial Sequence: Synthetic oligonucleotide
  Antisense strand to SEQ ID NO: 2286326
uaauuuaaucgcuaacacu

SEQ ID NO: 2286328 - RNA, 19 nt, Artificial Sequence
  Description of Artificial Sequence: Synthetic oligonucleotide
  Sense strand starting at position 542 of SEQ ID NO: 1884713
uuaaauuagcaucgguaaa

SEQ ID NO: 2286329 - RNA, 19 nt, Artificial Sequence
  Description of Artificial Sequence: Synthetic oligonucleotide
  Antisense strand to SEQ ID NO: 2286328
uuuaccgaugcuaauuuaa

SEQ ID NO: 2286330 - RNA, 19 nt, Artificial Sequence
  Description of Artificial Sequence: Synthetic oligonucleotide
  Sense strand starting at position 1078 of SEQ ID NO: 1884713
guacucacaccacgauaaa

SEQ ID NO: 2286331 - RNA, 19 nt, Artificial Sequence
  Description of Artificial Sequence: Synthetic oligonucleotide
  Antisense strand to SEQ ID NO: 2286330
uuuaucguggugugaguac

SEQ ID NO: 2286332 - RNA, 19 nt, Artificial Sequence
  Description of Artificial Sequence: Synthetic oligonucleotide
  Sense strand starting at position 1089 of SEQ ID NO: 1884713
acgauaaacuugucaacca

SEQ ID NO: 2286333 - RNA, 19 nt, Artificial Sequence
  Description of Artificial Sequence: Synthetic oligonucleotide
  Antisense strand to SEQ ID NO: 2286332
ugguugacaaguuuaucgu

SEQ ID NO: 2286334 - RNA, 19 nt, Artificial Sequence
  Description of Artificial Sequence: Synthetic oligonucleotide
  Sense strand starting at position 1105 of SEQ ID NO: 1884713
ccaagaucguuuccuuuaa

SEQ ID NO: 2286335 - RNA, 19 nt, Artificial Sequence
  Description of Artificial Sequence: Synthetic oligonucleotide
  Antisense strand to SEQ ID NO: 2286334
uuaaaggaaacgaucuugg

SEQ ID NO: 2286336 - RNA, 19 nt, Artificial Sequence
  Description of Artificial Sequence: Synthetic oligonucleotide
  Sense strand starting at position 1146 of SEQ ID NO: 1884713
ugggaauuauuccuauucu

SEQ ID NO: 2286337 - RNA, 19 nt, Artificial Sequence
  Description of Artificial Sequence: Synthetic oligonucleotide
  Antisense strand to SEQ ID NO: 2286336
agaauaggaauaauuccca

SEQ ID NO: 2286338 - RNA, 19 nt, Artificial Sequence
  Description of Artificial Sequence: Synthetic oligonucleotide
  Sense strand starting at position 1244 of SEQ ID NO: 1884713
cgccaaacccgugcucuua

SEQ ID NO: 2286339 - RNA, 19 nt, Artificial Sequence
  Description of Artificial Sequence: Synthetic oligonucleotide
  Antisense strand to SEQ ID NO: 2286338
uaagagcacggguuuggcg

SEQ ID NO: 2286340 - RNA, 19 nt, Artificial Sequence
  Description of Artificial Sequence: Synthetic oligonucleotide
  Sense strand starting at position 1299 of SEQ ID NO: 1884713
aggauccguuaugcagaaa

SEQ ID NO: 2286341 - RNA, 19 nt, Artificial Sequence
  Description of Artificial Sequence: Synthetic oligonucleotide
  Antisense strand to SEQ ID NO: 2286340
uuucugcauaacggauccu

SEQ ID NO: 2286342 - RNA, 19 nt, Artificial Sequence
  Description of Artificial Sequence: Synthetic oligonucleotide
  Sense strand starting at position 1473 of SEQ ID NO: 1884713
gaggcuuccuuggcaaaca

SEQ ID NO: 2286343 - RNA, 19 nt, Artificial Sequence
  Description of Artificial Sequence: Synthetic oligonucleotide
  Antisense strand to SEQ ID NO: 2286342
uguuugccaaggaagccuc

SEQ ID NO: 2286344 - RNA, 19 nt, Artificial Sequence
  Description of Artificial Sequence: Synthetic oligonucleotide
  Sense strand starting at position 1537 of SEQ ID NO: 1884713
ucugacuucuggucacuua

SEQ ID NO: 2286345 - RNA, 19 nt, Artificial Sequence
  Description of Artificial Sequence: Synthetic oligonucleotide
  Antisense strand to SEQ ID NO: 2286344
uaagugaccagaagucaga

SEQ ID NO: 2286346 - RNA, 19 nt, Artificial Sequence
  Description of Artificial Sequence: Synthetic oligonucleotide
  Sense strand starting at position 1538 of SEQ ID NO: 1884713
cugacuucuggucacuuaa

SEQ ID NO: 2286347 - RNA, 19 nt, Artificial Sequence
  Description of Artificial Sequence: Synthetic oligonucleotide
  Antisense strand to SEQ ID NO: 2286346
uuaagugaccagaagucag

SEQ ID NO: 2286348 - RNA, 19 nt, Artificial Sequence
  Description of Artificial Sequence: Synthetic oligonucleotide
  Sense strand starting at position 2073 of SEQ ID NO: 1884713
ggaagugcugcgagccuau

SEQ ID NO: 2286349 - RNA, 19 nt, Artificial Sequence
  Description of Artificial Sequence: Synthetic oligonucleotide
  Antisense strand to SEQ ID NO: 2286348
auaggcucgcagcacuucc

SEQ ID NO: 2286350 - RNA, 19 nt, Artificial Sequence
  Description of Artificial Sequence: Synthetic oligonucleotide
  Sense strand starting at position 2425 of SEQ ID NO: 1884713
ugguuauaaaggcacgaaa

SEQ ID NO: 2286351 - RNA, 19 nt, Artificial Sequence
  Description of Artificial Sequence: Synthetic oligonucleotide
  Antisense strand to SEQ ID NO: 2286350
uuucgugccuuuauaacca

SEQ ID NO: 2286352 - RNA, 19 nt, Artificial Sequence
  Description of Artificial Sequence: Synthetic oligonucleotide
  Sense strand starting at position 2647 of SEQ ID NO: 1884713
accuccuuggcaggaauau

SEQ ID NO: 2286353 - RNA, 19 nt, Artificial Sequence
  Description of Artificial Sequence: Synthetic oligonucleotide
  Antisense strand to SEQ ID NO: 2286352
auauuccugccaaggaggu

SEQ ID NO: 2286354 - RNA, 19 nt, Artificial Sequence
  Description of Artificial Sequence: Synthetic oligonucleotide
  Sense strand starting at position 2648 of SEQ ID NO: 1884713
ccuccuuggcaggaauauu

SEQ ID NO: 2286355 - RNA, 19 nt, Artificial Sequence
  Description of Artificial Sequence: Synthetic oligonucleotide
  Antisense strand to SEQ ID NO: 2286354
aauauuccugccaaggagg

SEQ ID NO: 2286356 - RNA, 19 nt, Artificial Sequence
  Description of Artificial Sequence: Synthetic oligonucleotide
  Sense strand starting at position 2683 of SEQ ID NO: 1884713
auguuccgacuuuaacaga

SEQ ID NO: 2286357 - RNA, 19 nt, Artificial Sequence
  Description of Artificial Sequence: Synthetic oligonucleotide
  Antisense strand to SEQ ID NO: 2286356
ucuguuaaagucggaacau

SEQ ID NO: 2286358 - RNA, 19 nt, Artificial Sequence
  Description of Artificial Sequence: Synthetic oligonucleotide
  Sense strand starting at position 2699 of SEQ ID NO: 1884713
agaagcuaccuuugagaau

SEQ ID NO: 2286359 - RNA, 19 nt, Artificial Sequence
  Description of Artificial Sequence: Synthetic oligonucleotide
  Antisense strand to SEQ ID NO: 2286358
auucucaaagguagcuucu

SEQ ID NO: 2286360 - RNA, 19 nt, Artificial Sequence
  Description of Artificial Sequence: Synthetic oligonucleotide
  Sense strand starting at position 2847 of SEQ ID NO: 1884713
uagggcuuguauccuaaau

SEQ ID NO: 2286361 - RNA, 19 nt, Artificial Sequence
  Description of Artificial Sequence: Synthetic oligonucleotide
  Antisense strand to SEQ ID NO: 2286360
auuuaggauacaagcccua

SEQ ID NO: 2286362 - RNA, 19 nt, Artificial Sequence
  Description of Artificial Sequence: Synthetic oligonucleotide
  Sense strand starting at position 2865 of SEQ ID NO: 1884713
ucugguccucaagauucuu

SEQ ID NO: 2286363 - RNA, 19 nt, Artificial Sequence
  Description of Artificial Sequence: Synthetic oligonucleotide
  Antisense strand to SEQ ID NO: 2286362
aagaaucuugaggaccaga

SEQ ID NO: 2286364 - RNA, 19 nt, Artificial Sequence
  Description of Artificial Sequence: Synthetic oligonucleotide
  Sense strand starting at position 2971 of SEQ ID NO: 1884713
acugcaagaguuuggagua

SEQ ID NO: 2286365 - RNA, 19 nt, Artificial Sequence
  Description of Artificial Sequence: Synthetic oligonucleotide
  Antisense strand to SEQ ID NO: 2286364
uacuccaaacucuugcagu

SEQ ID NO: 2286366 - RNA, 19 nt, Artificial Sequence
  Description of Artificial Sequence: Synthetic oligonucleotide
  Sense strand starting at position 3379 of SEQ ID NO: 1884713
uuagcucagccgggagaau

SEQ ID NO: 2286367 - RNA, 19 nt, Artificial Sequence
  Description of Artificial Sequence: Synthetic oligonucleotide
  Antisense strand to SEQ ID NO: 2286366
auucucccggcugagcuaa

SEQ ID NO: 2286368 - RNA, 19 nt, Artificial Sequence
  Description of Artificial Sequence: Synthetic oligonucleotide
  Sense strand starting at position 3494 of SEQ ID NO: 1884713
uggugcucauuuguuaaga

SEQ ID NO: 2286369 - RNA, 19 nt, Artificial Sequence
  Description of Artificial Sequence: Synthetic oligonucleotide
  Antisense strand to SEQ ID NO: 2286368
ucuuaacaaaugagcacca

SEQ ID NO: 2286370 - RNA, 19 nt, Artificial Sequence
  Description of Artificial Sequence: Synthetic oligonucleotide
  Sense strand starting at position 3495 of SEQ ID NO: 1884713
ggugcucauuuguuaagau

SEQ ID NO: 2286371 - RNA, 19 nt, Artificial Sequence
  Description of Artificial Sequence: Synthetic oligonucleotide
  Antisense strand to SEQ ID NO: 2286370
aucuuaacaaaugagcacc

SEQ ID NO: 2286372 - RNA, 19 nt, Artificial Sequence
  Description of Artificial Sequence: Synthetic oligonucleotide
  Sense strand starting at position 3545 of SEQ ID NO: 1884713
ugaugacauaguugugaca

SEQ ID NO: 2286373 - RNA, 19 nt, Artificial Sequence
  Description of Artificial Sequence: Synthetic oligonucleotide
  Antisense strand to SEQ ID NO: 2286372
ugucacaacuaugucauca

SEQ ID NO: 2286374 - RNA, 19 nt, Artificial Sequence
  Description of Artificial Sequence: Synthetic oligonucleotide
  Sense strand starting at position 3564 of SEQ ID NO: 1884713
gaccaugugcucuacaaag

SEQ ID NO: 2286375 - RNA, 19 nt, Artificial Sequence
  Description of Artificial Sequence: Synthetic oligonucleotide
  Antisense strand to SEQ ID NO: 2286374
cuuuguagagcacaugguc

SEQ ID NO: 2286376 - RNA, 19 nt, Artificial Sequence
  Description of Artificial Sequence: Synthetic oligonucleotide
  Sense strand starting at position 3622 of SEQ ID NO: 1884713
gcugacugcucccuuagaa

SEQ ID NO: 2286377 - RNA, 19 nt, Artificial Sequence
  Description of Artificial Sequence: Synthetic oligonucleotide
  Antisense strand to SEQ ID NO: 2286376
uucuaagggagcagucagc

SEQ ID NO: 2286378 - RNA, 19 nt, Artificial Sequence
  Description of Artificial Sequence: Synthetic oligonucleotide
  Sense strand starting at position 3957 of SEQ ID NO: 1884713
ucuggaacuccuggguauu

SEQ ID NO: 2286379 - RNA, 19 nt, Artificial Sequence
  Description of Artificial Sequence: Synthetic oligonucleotide
  Antisense strand to SEQ ID NO: 2286378
aauacccaggaguuccaga

SEQ ID NO: 2286380 - RNA, 19 nt, Artificial Sequence
  Description of Artificial Sequence: Synthetic oligonucleotide
  Sense strand starting at position 28 of SEQ ID NO: 1884715
ugugcuauucuggauauua

SEQ ID NO: 2286381 - RNA, 19 nt, Artificial Sequence
  Description of Artificial Sequence: Synthetic oligonucleotide
  Antisense strand to SEQ ID NO: 2286380
uaauauccagaauagcaca

SEQ ID NO: 2286382 - RNA, 19 nt, Artificial Sequence
  Description of Artificial Sequence: Synthetic oligonucleotide
  Sense strand starting at position 30 of SEQ ID NO: 1884715
ugcuauucuggauauuaca

SEQ ID NO: 2286383 - RNA, 19 nt, Artificial Sequence
  Description of Artificial Sequence: Synthetic oligonucleotide
  Antisense strand to SEQ ID NO: 2286382
uguaauauccagaauagca

SEQ ID NO: 2286384 - RNA, 19 nt, Artificial Sequence
  Description of Artificial Sequence: Synthetic oligonucleotide
  Sense strand starting at position 83 of SEQ ID NO: 1884715
guuagaauagagggcaaau

SEQ ID NO: 2286385 - RNA, 19 nt, Artificial Sequence
  Description of Artificial Sequence: Synthetic oligonucleotide
  Antisense strand to SEQ ID NO: 2286384
auuugcccucuauucuaac

SEQ ID NO: 2286386 - RNA, 19 nt, Artificial Sequence
  Description of Artificial Sequence: Synthetic oligonucleotide
  Sense strand starting at position 149 of SEQ ID NO: 1884715
cccuuaguagcuuaagagu

SEQ ID NO: 2286387 - RNA, 19 nt, Artificial Sequence
  Description of Artificial Sequence: Synthetic oligonucleotide
  Antisense strand to SEQ ID NO: 2286386
acucuuaagcuacuaaggg

SEQ ID NO: 2286388 - RNA, 19 nt, Artificial Sequence
  Description of Artificial Sequence: Synthetic oligonucleotide
  Sense strand starting at position 160 of SEQ ID NO: 1884715
uuaagaguucgugagacau

SEQ ID NO: 2286389 - RNA, 19 nt, Artificial Sequence
  Description of Artificial Sequence: Synthetic oligonucleotide
  Antisense strand to SEQ ID NO: 2286388
augucucacgaacucuuaa

SEQ ID NO: 2286390 - RNA, 19 nt, Artificial Sequence
  Description of Artificial Sequence: Synthetic oligonucleotide
  Sense strand starting at position 164 of SEQ ID NO: 1884715
gaguucgugagacauugga

SEQ ID NO: 2286391 - RNA, 19 nt, Artificial Sequence
  Description of Artificial Sequence: Synthetic oligonucleotide
  Antisense strand to SEQ ID NO: 2286390
uccaaugucucacgaacuc

SEQ ID NO: 2286392 - RNA, 19 nt, Artificial Sequence
  Description of Artificial Sequence: Synthetic oligonucleotide
  Sense strand starting at position 190 of SEQ ID NO: 1884715
augguauggcuuuaaagua

SEQ ID NO: 2286393 - RNA, 19 nt, Artificial Sequence
  Description of Artificial Sequence: Synthetic oligonucleotide
  Antisense strand to SEQ ID NO: 2286392
uacuuuaaagccauaccau

SEQ ID NO: 2286394 - RNA, 19 nt, Artificial Sequence
  Description of Artificial Sequence: Synthetic oligonucleotide
  Sense strand starting at position 370 of SEQ ID NO: 1884715
ugagaauaauaucugugau

SEQ ID NO: 2286395 - RNA, 19 nt, Artificial Sequence
  Description of Artificial Sequence: Synthetic oligonucleotide
  Antisense strand to SEQ ID NO: 2286394
aucacagauauuauucuca

SEQ ID NO: 2286396 - RNA, 19 nt, Artificial Sequence
  Description of Artificial Sequence: Synthetic oligonucleotide
  Sense strand starting at position 418 of SEQ ID NO: 1884715
uguuauugaguacaauaca

SEQ ID NO: 2286397 - RNA, 19 nt, Artificial Sequence
  Description of Artificial Sequence: Synthetic oligonucleotide
  Antisense strand to SEQ ID NO: 2286396
uguauuguacucaauaaca

SEQ ID NO: 2286398 - RNA, 19 nt, Artificial Sequence
  Description of Artificial Sequence: Synthetic oligonucleotide
  Sense strand starting at position 467 of SEQ ID NO: 1884715
uuaaaccuucuuugagaag

SEQ ID NO: 2286399 - RNA, 19 nt, Artificial Sequence
  Description of Artificial Sequence: Synthetic oligonucleotide
  Antisense strand to SEQ ID NO: 2286398
cuucucaaagaagguuuaa

SEQ ID NO: 2286400 - RNA, 19 nt, Artificial Sequence
  Description of Artificial Sequence: Synthetic oligonucleotide
  Sense strand starting at position 526 of SEQ ID NO: 1884715
acuuaauaucuguggcauu

SEQ ID NO: 2286401 - RNA, 19 nt, Artificial Sequence
  Description of Artificial Sequence: Synthetic oligonucleotide
  Antisense strand to SEQ ID NO: 2286400
aaugccacagauauuaagu

SEQ ID NO: 2286402 - RNA, 19 nt, Artificial Sequence
  Description of Artificial Sequence: Synthetic oligonucleotide
  Sense strand starting at position 706 of SEQ ID NO: 1884715
uuuaaugguuguuucuaca

SEQ ID NO: 2286403 - RNA, 19 nt, Artificial Sequence
  Description of Artificial Sequence: Synthetic oligonucleotide
  Antisense strand to SEQ ID NO: 2286402
uguagaaacaaccauuaaa

SEQ ID NO: 2286404 - RNA, 19 nt, Artificial Sequence
  Description of Artificial Sequence: Synthetic oligonucleotide
  Sense strand starting at position 765 of SEQ ID NO: 1884715
gacugaucccugcacaggu

SEQ ID NO: 2286405 - RNA, 19 nt, Artificial Sequence
  Description of Artificial Sequence: Synthetic oligonucleotide
  Antisense strand to SEQ ID NO: 2286404
accugugcagggaucaguc

SEQ ID NO: 2286406 - RNA, 19 nt, Artificial Sequence
  Description of Artificial Sequence: Synthetic oligonucleotide
  Sense strand starting at position 822 of SEQ ID NO: 1884715
ugaucaucaugagcgagaa

SEQ ID NO: 2286407 - RNA, 19 nt, Artificial Sequence
  Description of Artificial Sequence: Synthetic oligonucleotide
  Antisense strand to SEQ ID NO: 2286406
uucucgcucaugaugauca

SEQ ID NO: 2286408 - RNA, 19 nt, Artificial Sequence
  Description of Artificial Sequence: Synthetic oligonucleotide
  Sense strand starting at position 823 of SEQ ID NO: 1884715
gaucaucaugagcgagaau

SEQ ID NO: 2286409 - RNA, 19 nt, Artificial Sequence
  Description of Artificial Sequence: Synthetic oligonucleotide
  Antisense strand to SEQ ID NO: 2286408
auucucgcucaugaugauc

SEQ ID NO: 2286410 - RNA, 19 nt, Artificial Sequence
  Description of Artificial Sequence: Synthetic oligonucleotide
  Sense strand starting at position 826 of SEQ ID NO: 1884715
caucaugagcgagaauacu

SEQ ID NO: 2286411 - RNA, 19 nt, Artificial Sequence
  Description of Artificial Sequence: Synthetic oligonucleotide
  Antisense strand to SEQ ID NO: 2286410
aguauucucgcucaugaug

SEQ ID NO: 2286412 - RNA, 19 nt, Artificial Sequence
  Description of Artificial Sequence: Synthetic oligonucleotide
  Sense strand starting at position 835 of SEQ ID NO: 1884715
cgagaauacuaacugccau

SEQ ID NO: 2286413 - RNA, 19 nt, Artificial Sequence
  Description of Artificial Sequence: Synthetic oligonucleotide
  Antisense strand to SEQ ID NO: 2286412
auggcaguuaguauucucg

SEQ ID NO: 2286414 - RNA, 19 nt, Artificial Sequence
  Description of Artificial Sequence: Synthetic oligonucleotide
  Sense strand starting at position 897 of SEQ ID NO: 1884715
ggauuccucagaggguaau

SEQ ID NO: 2286415 - RNA, 19 nt, Artificial Sequence
  Description of Artificial Sequence: Synthetic oligonucleotide
  Antisense strand to SEQ ID NO: 2286414
auuacccucugaggaaucc

SEQ ID NO: 2286416 - RNA, 19 nt, Artificial Sequence
  Description of Artificial Sequence: Synthetic oligonucleotide
  Sense strand starting at position 1022 of SEQ ID NO: 1884715
agugcuccucuggaagagu

SEQ ID NO: 2286417 - RNA, 19 nt, Artificial Sequence
  Description of Artificial Sequence: Synthetic oligonucleotide
  Antisense strand to SEQ ID NO: 2286416
acucuuccagaggagcacu

SEQ ID NO: 2286418 - RNA, 19 nt, Artificial Sequence
  Description of Artificial Sequence: Synthetic oligonucleotide
  Sense strand starting at position 1257 of SEQ ID NO: 1884715
cucuuaacacguugauaga

SEQ ID NO: 2286419 - RNA, 19 nt, Artificial Sequence
  Description of Artificial Sequence: Synthetic oligonucleotide
  Antisense strand to SEQ ID NO: 2286418
ucuaucaacguguuaagag

SEQ ID NO: 2286420 - RNA, 19 nt, Artificial Sequence
  Description of Artificial Sequence: Synthetic oligonucleotide
  Sense strand starting at position 1258 of SEQ ID NO: 1884715
ucuuaacacguugauagaa

SEQ ID NO: 2286421 - RNA, 19 nt, Artificial Sequence
  Description of Artificial Sequence: Synthetic oligonucleotide
  Antisense strand to SEQ ID NO: 2286420
uucuaucaacguguuaaga

SEQ ID NO: 2286422 - RNA, 19 nt, Artificial Sequence
  Description of Artificial Sequence: Synthetic oligonucleotide
  Sense strand starting at position 1528 of SEQ ID NO: 1884715
gauuaaggucucggucaua

SEQ ID NO: 2286423 - RNA, 19 nt, Artificial Sequence
  Description of Artificial Sequence: Synthetic oligonucleotide
  Antisense strand to SEQ ID NO: 2286422
uaugaccgagaccuuaauc

SEQ ID NO: 2286424 - RNA, 19 nt, Artificial Sequence
  Description of Artificial Sequence: Synthetic oligonucleotide
  Sense strand starting at position 1531 of SEQ ID NO: 1884715
uaaggucucggucauaaga

SEQ ID NO: 2286425 - RNA, 19 nt, Artificial Sequence
  Description of Artificial Sequence: Synthetic oligonucleotide
  Antisense strand to SEQ ID NO: 2286424
ucuuaugaccgagaccuua

SEQ ID NO: 2286426 - RNA, 19 nt, Artificial Sequence
  Description of Artificial Sequence: Synthetic oligonucleotide
  Sense strand starting at position 1578 of SEQ ID NO: 1884715
uucuuaagagcaugaaaca

SEQ ID NO: 2286427 - RNA, 19 nt, Artificial Sequence
  Description of Artificial Sequence: Synthetic oligonucleotide
  Antisense strand to SEQ ID NO: 2286426
uguuucaugcucuuaagaa

SEQ ID NO: 2286428 - RNA, 19 nt, Artificial Sequence
  Description of Artificial Sequence: Synthetic oligonucleotide
  Sense strand starting at position 1860 of SEQ ID NO: 1884715
guuuacuuagggcgaauca

SEQ ID NO: 2286429 - RNA, 19 nt, Artificial Sequence
  Description of Artificial Sequence: Synthetic oligonucleotide
  Antisense strand to SEQ ID NO: 2286428
ugauucgcccuaaguaaac

SEQ ID NO: 2286430 - RNA, 19 nt, Artificial Sequence
  Description of Artificial Sequence: Synthetic oligonucleotide
  Sense strand starting at position 2180 of SEQ ID NO: 1884715
gguuguugggcggaagaga

SEQ ID NO: 2286431 - RNA, 19 nt, Artificial Sequence
  Description of Artificial Sequence: Synthetic oligonucleotide
  Antisense strand to SEQ ID NO: 2286430
ucucuuccgcccaacaacc

SEQ ID NO: 2286432 - RNA, 19 nt, Artificial Sequence
  Description of Artificial Sequence: Synthetic oligonucleotide
  Sense strand starting at position 2290 of SEQ ID NO: 1884715
cagagaacugcacagucau

SEQ ID NO: 2286433 - RNA, 19 nt, Artificial Sequence
  Description of Artificial Sequence: Synthetic oligonucleotide
  Antisense strand to SEQ ID NO: 2286432
augacugugcaguucucug

SEQ ID NO: 2286434 - RNA, 19 nt, Artificial Sequence
  Description of Artificial Sequence: Synthetic oligonucleotide
  Sense strand starting at position 2378 of SEQ ID NO: 1884715
gcaagaugugguggacaag

SEQ ID NO: 2286435 - RNA, 19 nt, Artificial Sequence
  Description of Artificial Sequence: Synthetic oligonucleotide
  Antisense strand to SEQ ID NO: 2286434
cuuguccaccacaucuugc

SEQ ID NO: 2286436 - RNA, 19 nt, Artificial Sequence
  Description of Artificial Sequence: Synthetic oligonucleotide
  Sense strand starting at position 2903 of SEQ ID NO: 1884715
aucuuagagcacugaaucu

SEQ ID NO: 2286437 - RNA, 19 nt, Artificial Sequence
  Description of Artificial Sequence: Synthetic oligonucleotide
  Antisense strand to SEQ ID NO: 2286436
agauucagugcucuaagau

SEQ ID NO: 2286438 - RNA, 19 nt, Artificial Sequence
  Description of Artificial Sequence: Synthetic oligonucleotide
  Sense strand starting at position 3052 of SEQ ID NO: 1884715
augauuuguugugcguuua

SEQ ID NO: 2286439 - RNA, 19 nt, Artificial Sequence
  Description of Artificial Sequence: Synthetic oligonucleotide
  Antisense strand to SEQ ID NO: 2286438
uaaacgcacaacaaaucau

SEQ ID NO: 2286440 - RNA, 19 nt, Artificial Sequence
  Description of Artificial Sequence: Synthetic oligonucleotide
  Sense strand starting at position 3056 of SEQ ID NO: 1884715
uuuguugugcguuuagcaa

SEQ ID NO: 2286441 - RNA, 19 nt, Artificial Sequence
  Description of Artificial Sequence: Synthetic oligonucleotide
  Antisense strand to SEQ ID NO: 2286440
uugcuaaacgcacaacaaa

SEQ ID NO: 2286442 - RNA, 19 nt, Artificial Sequence
  Description of Artificial Sequence: Synthetic oligonucleotide
  Sense strand starting at position 3098 of SEQ ID NO: 1884715
gaagcucuguggcuaagaa

SEQ ID NO: 2286443 - RNA, 19 nt, Artificial Sequence
  Description of Artificial Sequence: Synthetic oligonucleotide
  Antisense strand to SEQ ID NO: 2286442
uucuuagccacagagcuuc

SEQ ID NO: 2286444 - RNA, 19 nt, Artificial Sequence
  Description of Artificial Sequence: Synthetic oligonucleotide
  Sense strand starting at position 3099 of SEQ ID NO: 1884715
aagcucuguggcuaagaaa

SEQ ID NO: 2286445 - RNA, 19 nt, Artificial Sequence
  Description of Artificial Sequence: Synthetic oligonucleotide
  Antisense strand to SEQ ID NO: 2286444
uuucuuagccacagagcuu

SEQ ID NO: 2286446 - RNA, 19 nt, Artificial Sequence
  Description of Artificial Sequence: Synthetic oligonucleotide
  Sense strand starting at position 3238 of SEQ ID NO: 1884715
uuguaauguuaggucaaca

SEQ ID NO: 2286447 - RNA, 19 nt, Artificial Sequence
  Description of Artificial Sequence: Synthetic oligonucleotide
  Antisense strand to SEQ ID NO: 2286446
uguugaccuaacauuacaa

SEQ ID NO: 2286448 - RNA, 19 nt, Artificial Sequence
  Description of Artificial Sequence: Synthetic oligonucleotide
  Sense strand starting at position 3357 of SEQ ID NO: 1884715
gcagaacauuucguaguuu

SEQ ID NO: 2286449 - RNA, 19 nt, Artificial Sequence
  Description of Artificial Sequence: Synthetic oligonucleotide
  Antisense strand to SEQ ID NO: 2286448
aaacuacgaaauguucugc

SEQ ID NO: 2286450 - RNA, 19 nt, Artificial Sequence
  Description of Artificial Sequence: Synthetic oligonucleotide
  Sense strand starting at position 3413 of SEQ ID NO: 1884715
uuuguuauggcuggaauua

SEQ ID NO: 2286451 - RNA, 19 nt, Artificial Sequence
  Description of Artificial Sequence: Synthetic oligonucleotide
  Antisense strand to SEQ ID NO: 2286450
uaauuccagccauaacaaa

SEQ ID NO: 2286452 - RNA, 19 nt, Artificial Sequence
  Description of Artificial Sequence: Synthetic oligonucleotide
  Sense strand starting at position 3458 of SEQ ID NO: 1884715
gaacuaaugcuggguccua

SEQ ID NO: 2286453 - RNA, 19 nt, Artificial Sequence
  Description of Artificial Sequence: Synthetic oligonucleotide
  Antisense strand to SEQ ID NO: 2286452
uaggacccagcauuaguuc

SEQ ID NO: 2286454 - RNA, 19 nt, Artificial Sequence
  Description of Artificial Sequence: Synthetic oligonucleotide
  Sense strand starting at position 3519 of SEQ ID NO: 1884715
gagaaaguaguuugagcaa

SEQ ID NO: 2286455 - RNA, 19 nt, Artificial Sequence
  Description of Artificial Sequence: Synthetic oligonucleotide
  Antisense strand to SEQ ID NO: 2286454
uugcucaaacuacuuucuc

SEQ ID NO: 2286456 - RNA, 19 nt, Artificial Sequence
  Description of Artificial Sequence: Synthetic oligonucleotide
  Sense strand starting at position 3522 of SEQ ID NO: 1884715
aaaguaguuugagcaaaga

SEQ ID NO: 2286457 - RNA, 19 nt, Artificial Sequence
  Description of Artificial Sequence: Synthetic oligonucleotide
  Antisense strand to SEQ ID NO: 2286456
ucuuugcucaaacuacuuu

SEQ ID NO: 2286458 - RNA, 19 nt, Artificial Sequence
  Description of Artificial Sequence: Synthetic oligonucleotide
  Sense strand starting at position 3550 of SEQ ID NO: 1884715
aagaaugagcacugaguau

SEQ ID NO: 2286459 - RNA, 19 nt, Artificial Sequence
  Description of Artificial Sequence: Synthetic oligonucleotide
  Antisense strand to SEQ ID NO: 2286458
auacucagugcucauucuu

SEQ ID NO: 2286460 - RNA, 19 nt, Artificial Sequence
  Description of Artificial Sequence: Synthetic oligonucleotide
  Sense strand starting at position 16 of SEQ ID NO: 1884714
aaguuucuagcuuaguuga

SEQ ID NO: 2286461 - RNA, 19 nt, Artificial Sequence
  Description of Artificial Sequence: Synthetic oligonucleotide
  Antisense strand to SEQ ID NO: 2286460
ucaacuaagcuagaaacuu

SEQ ID NO: 2286462 - RNA, 19 nt, Artificial Sequence
  Description of Artificial Sequence: Synthetic oligonucleotide
  Sense strand starting at position 83 of SEQ ID NO: 1884714
ugugcuauucuggauauua

SEQ ID NO: 2286463 - RNA, 19 nt, Artificial Sequence
  Description of Artificial Sequence: Synthetic oligonucleotide
  Antisense strand to SEQ ID NO: 2286462
uaauauccagaauagcaca

SEQ ID NO: 2286464 - RNA, 19 nt, Artificial Sequence
  Description of Artificial Sequence: Synthetic oligonucleotide
  Sense strand starting at position 85 of SEQ ID NO: 1884714
ugcuauucuggauauuaca

SEQ ID NO: 2286465 - RNA, 19 nt, Artificial Sequence
  Description of Artificial Sequence: Synthetic oligonucleotide
  Antisense strand to SEQ ID NO: 2286464
uguaauauccagaauagca

SEQ ID NO: 2286466 - RNA, 19 nt, Artificial Sequence
  Description of Artificial Sequence: Synthetic oligonucleotide
  Sense strand starting at position 138 of SEQ ID NO: 1884714
guuagaauagagggcaaau

SEQ ID NO: 2286467 - RNA, 19 nt, Artificial Sequence
  Description of Artificial Sequence: Synthetic oligonucleotide
  Antisense strand to SEQ ID NO: 2286466
auuugcccucuauucuaac

SEQ ID NO: 2286468 - RNA, 19 nt, Artificial Sequence
  Description of Artificial Sequence: Synthetic oligonucleotide
  Sense strand starting at position 204 of SEQ ID NO: 1884714
cccuuaguagcuuaagagu

SEQ ID NO: 2286469 - RNA, 19 nt, Artificial Sequence
  Description of Artificial Sequence: Synthetic oligonucleotide
  Antisense strand to SEQ ID NO: 2286468
acucuuaagcuacuaaggg

SEQ ID NO: 2286470 - RNA, 19 nt, Artificial Sequence
  Description of Artificial Sequence: Synthetic oligonucleotide
  Sense strand starting at position 215 of SEQ ID NO: 1884714
uuaagaguucgugagacau

SEQ ID NO: 2286471 - RNA, 19 nt, Artificial Sequence
  Description of Artificial Sequence: Synthetic oligonucleotide
  Antisense strand to SEQ ID NO: 2286470
augucucacgaacucuuaa

SEQ ID NO: 2286472 - RNA, 19 nt, Artificial Sequence
  Description of Artificial Sequence: Synthetic oligonucleotide
  Sense strand starting at position 219 of SEQ ID NO: 1884714
gaguucgugagacauugga

SEQ ID NO: 2286473 - RNA, 19 nt, Artificial Sequence
  Description of Artificial Sequence: Synthetic oligonucleotide
  Antisense strand to SEQ ID NO: 2286472
uccaaugucucacgaacuc

SEQ ID NO: 2286474 - RNA, 19 nt, Artificial Sequence
  Description of Artificial Sequence: Synthetic oligonucleotide
  Sense strand starting at position 245 of SEQ ID NO: 1884714
augguauggcuuuaaagua

SEQ ID NO: 2286475 - RNA, 19 nt, Artificial Sequence
  Description of Artificial Sequence: Synthetic oligonucleotide
  Antisense strand to SEQ ID NO: 2286474
uacuuuaaagccauaccau

SEQ ID NO: 2286476 - RNA, 19 nt, Artificial Sequence
  Description of Artificial Sequence: Synthetic oligonucleotide
  Sense strand starting at position 425 of SEQ ID NO: 1884714
ugagaauaauaucugugau

SEQ ID NO: 2286477 - RNA, 19 nt, Artificial Sequence
  Description of Artificial Sequence: Synthetic oligonucleotide
  Antisense strand to SEQ ID NO: 2286476
aucacagauauuauucuca

SEQ ID NO: 2286478 - RNA, 19 nt, Artificial Sequence
  Description of Artificial Sequence: Synthetic oligonucleotide
  Sense strand starting at position 473 of SEQ ID NO: 1884714
uguuauugaguacaauaca

SEQ ID NO: 2286479 - RNA, 19 nt, Artificial Sequence
  Description of Artificial Sequence: Synthetic oligonucleotide
  Antisense strand to SEQ ID NO: 2286478
uguauuguacucaauaaca

SEQ ID NO: 2286480 - RNA, 19 nt, Artificial Sequence
  Description of Artificial Sequence: Synthetic oligonucleotide
  Sense strand starting at position 522 of SEQ ID NO: 1884714
uuaaaccuucuuugagaag

SEQ ID NO: 2286481 - RNA, 19 nt, Artificial Sequence
  Description of Artificial Sequence: Synthetic oligonucleotide
  Antisense strand to SEQ ID NO: 2286480
cuucucaaagaagguuuaa

SEQ ID NO: 2286482 - RNA, 19 nt, Artificial Sequence
  Description of Artificial Sequence: Synthetic oligonucleotide
  Sense strand starting at position 581 of SEQ ID NO: 1884714
acuuaauaucuguggcauu

SEQ ID NO: 2286483 - RNA, 19 nt, Artificial Sequence
  Description of Artificial Sequence: Synthetic oligonucleotide
  Antisense strand to SEQ ID NO: 2286482
aaugccacagauauuaagu

SEQ ID NO: 2286484 - RNA, 19 nt, Artificial Sequence
  Description of Artificial Sequence: Synthetic oligonucleotide
  Sense strand starting at position 761 of SEQ ID NO: 1884714
uuuaaugguuguuucuaca

SEQ ID NO: 2286485 - RNA, 19 nt, Artificial Sequence
  Description of Artificial Sequence: Synthetic oligonucleotide
  Antisense strand to SEQ ID NO: 2286484
uguagaaacaaccauuaaa

SEQ ID NO: 2286486 - RNA, 19 nt, Artificial Sequence
  Description of Artificial Sequence: Synthetic oligonucleotide
  Sense strand starting at position 820 of SEQ ID NO: 1884714
gacugaucccugcacaggu

SEQ ID NO: 2286487 - RNA, 19 nt, Artificial Sequence
  Description of Artificial Sequence: Synthetic oligonucleotide
  Antisense strand to SEQ ID NO: 2286486
accugugcagggaucaguc

SEQ ID NO: 2286488 - RNA, 19 nt, Artificial Sequence
  Description of Artificial Sequence: Synthetic oligonucleotide
  Sense strand starting at position 877 of SEQ ID NO: 1884714
ugaucaucaugagcgagaa

SEQ ID NO: 2286489 - RNA, 19 nt, Artificial Sequence
  Description of Artificial Sequence: Synthetic oligonucleotide
  Antisense strand to SEQ ID NO: 2286488
uucucgcucaugaugauca

SEQ ID NO: 2286490 - RNA, 19 nt, Artificial Sequence
  Description of Artificial Sequence: Synthetic oligonucleotide
  Sense strand starting at position 878 of SEQ ID NO: 1884714
gaucaucaugagcgagaau

SEQ ID NO: 2286491 - RNA, 19 nt, Artificial Sequence
  Description of Artificial Sequence: Synthetic oligonucleotide
  Antisense strand to SEQ ID NO: 2286490
auucucgcucaugaugauc

SEQ ID NO: 2286492 - RNA, 19 nt, Artificial Sequence
  Description of Artificial Sequence: Synthetic oligonucleotide
  Sense strand starting at position 881 of SEQ ID NO: 1884714
caucaugagcgagaauacu

SEQ ID NO: 2286493 - RNA, 19 nt, Artificial Sequence
  Description of Artificial Sequence: Synthetic oligonucleotide
  Antisense strand to SEQ ID NO: 2286492
aguauucucgcucaugaug

SEQ ID NO: 2286494 - RNA, 19 nt, Artificial Sequence
  Description of Artificial Sequence: Synthetic oligonucleotide
  Sense strand starting at position 890 of SEQ ID NO: 1884714
cgagaauacuaacugccau

SEQ ID NO: 2286495 - RNA, 19 nt, Artificial Sequence
  Description of Artificial Sequence: Synthetic oligonucleotide
  Antisense strand to SEQ ID NO: 2286494
auggcaguuaguauucucg

SEQ ID NO: 2286496 - RNA, 19 nt, Artificial Sequence
  Description of Artificial Sequence: Synthetic oligonucleotide
  Sense strand starting at position 952 of SEQ ID NO: 1884714
ggauuccucagaggguaau

SEQ ID NO: 2286497 - RNA, 19 nt, Artificial Sequence
  Description of Artificial Sequence: Synthetic oligonucleotide
  Antisense strand to SEQ ID NO: 2286496
auuacccucugaggaaucc

SEQ ID NO: 2286498 - RNA, 19 nt, Artificial Sequence
  Description of Artificial Sequence: Synthetic oligonucleotide
  Sense strand starting at position 1077 of SEQ ID NO: 1884714
agugcuccucuggaagagu

SEQ ID NO: 2286499 - RNA, 19 nt, Artificial Sequence
  Description of Artificial Sequence: Synthetic oligonucleotide
  Antisense strand to SEQ ID NO: 2286498
acucuuccagaggagcacu

SEQ ID NO: 2286500 - RNA, 19 nt, Artificial Sequence
  Description of Artificial Sequence: Synthetic oligonucleotide
  Sense strand starting at position 1312 of SEQ ID NO: 1884714
cucuuaacacguugauaga

SEQ ID NO: 2286501 - RNA, 19 nt, Artificial Sequence
  Description of Artificial Sequence: Synthetic oligonucleotide
  Antisense strand to SEQ ID NO: 2286500
ucuaucaacguguuaagag

SEQ ID NO: 2286502 - RNA, 19 nt, Artificial Sequence
  Description of Artificial Sequence: Synthetic oligonucleotide
  Sense strand starting at position 1313 of SEQ ID NO: 1884714
ucuuaacacguugauagaa

SEQ ID NO: 2286503 - RNA, 19 nt, Artificial Sequence
  Description of Artificial Sequence: Synthetic oligonucleotide
  Antisense strand to SEQ ID NO: 2286502
uucuaucaacguguuaaga

SEQ ID NO: 2286504 - RNA, 19 nt, Artificial Sequence
  Description of Artificial Sequence: Synthetic oligonucleotide
  Sense strand starting at position 1583 of SEQ ID NO: 1884714
gauuaaggucucggucaua

SEQ ID NO: 2286505 - RNA, 19 nt, Artificial Sequence
  Description of Artificial Sequence: Synthetic oligonucleotide
  Antisense strand to SEQ ID NO: 2286504
uaugaccgagaccuuaauc

SEQ ID NO: 2286506 - RNA, 19 nt, Artificial Sequence
  Description of Artificial Sequence: Synthetic oligonucleotide
  Sense strand starting at position 1586 of SEQ ID NO: 1884714
uaaggucucggucauaaga

SEQ ID NO: 2286507 - RNA, 19 nt, Artificial Sequence
  Description of Artificial Sequence: Synthetic oligonucleotide
  Antisense strand to SEQ ID NO: 2286506
ucuuaugaccgagaccuua

SEQ ID NO: 2286508 - RNA, 19 nt, Artificial Sequence
  Description of Artificial Sequence: Synthetic oligonucleotide
  Sense strand starting at position 1633 of SEQ ID NO: 1884714
uucuuaagagcaugaaaca

SEQ ID NO: 2286509 - RNA, 19 nt, Artificial Sequence
  Description of Artificial Sequence: Synthetic oligonucleotide
  Antisense strand to SEQ ID NO: 2286508
uguuucaugcucuuaagaa

SEQ ID NO: 2286510 - RNA, 19 nt, Artificial Sequence
  Description of Artificial Sequence: Synthetic oligonucleotide
  Sense strand starting at position 2235 of SEQ ID NO: 1884714
gguuguugggcggaagaga

SEQ ID NO: 2286511 - RNA, 19 nt, Artificial Sequence
  Description of Artificial Sequence: Synthetic oligonucleotide
  Antisense strand to SEQ ID NO: 2286510
ucucuuccgcccaacaacc

SEQ ID NO: 2286512 - RNA, 19 nt, Artificial Sequence
  Description of Artificial Sequence: Synthetic oligonucleotide
  Sense strand starting at position 2345 of SEQ ID NO: 1884714
cagagaacugcacagucau

SEQ ID NO: 2286513 - RNA, 19 nt, Artificial Sequence
  Description of Artificial Sequence: Synthetic oligonucleotide
  Antisense strand to SEQ ID NO: 2286512
augacugugcaguucucug

SEQ ID NO: 2286514 - RNA, 19 nt, Artificial Sequence
  Description of Artificial Sequence: Synthetic oligonucleotide
  Sense strand starting at position 2433 of SEQ ID NO: 1884714
gcaagaugugguggacaag

SEQ ID NO: 2286515 - RNA, 19 nt, Artificial Sequence
  Description of Artificial Sequence: Synthetic oligonucleotide
  Antisense strand to SEQ ID NO: 2286514
cuuguccaccacaucuugc

SEQ ID NO: 2286516 - RNA, 19 nt, Artificial Sequence
  Description of Artificial Sequence: Synthetic oligonucleotide
  Sense strand starting at position 2958 of SEQ ID NO: 1884714
aucuuagagcacugaaucu

SEQ ID NO: 2286517 - RNA, 19 nt, Artificial Sequence
  Description of Artificial Sequence: Synthetic oligonucleotide
  Antisense strand to SEQ ID NO: 2286516
agauucagugcucuaagau

SEQ ID NO: 2286518 - RNA, 19 nt, Artificial Sequence
  Description of Artificial Sequence: Synthetic oligonucleotide
  Sense strand starting at position 3107 of SEQ ID NO: 1884714
augauuuguugugcguuua

SEQ ID NO: 2286519 - RNA, 19 nt, Artificial Sequence
  Description of Artificial Sequence: Synthetic oligonucleotide
  Antisense strand to SEQ ID NO: 2286518
uaaacgcacaacaaaucau

SEQ ID NO: 2286520 - RNA, 19 nt, Artificial Sequence
  Description of Artificial Sequence: Synthetic oligonucleotide
  Sense strand starting at position 3111 of SEQ ID NO: 1884714
uuuguugugcguuuagcaa

SEQ ID NO: 2286521 - RNA, 19 nt, Artificial Sequence
  Description of Artificial Sequence: Synthetic oligonucleotide
  Antisense strand to SEQ ID NO: 2286520
uugcuaaacgcacaacaaa

SEQ ID NO: 2286522 - RNA, 19 nt, Artificial Sequence
  Description of Artificial Sequence: Synthetic oligonucleotide
  Sense strand starting at position 3153 of SEQ ID NO: 1884714
gaagcucuguggcuaagaa

SEQ ID NO: 2286523 - RNA, 19 nt, Artificial Sequence
  Description of Artificial Sequence: Synthetic oligonucleotide
  Antisense strand to SEQ ID NO: 2286522
uucuuagccacagagcuuc

SEQ ID NO: 2286524 - RNA, 19 nt, Artificial Sequence
  Description of Artificial Sequence: Synthetic oligonucleotide
  Sense strand starting at position 3154 of SEQ ID NO: 1884714
aagcucuguggcuaagaaa

SEQ ID NO: 2286525 - RNA, 19 nt, Artificial Sequence
  Description of Artificial Sequence: Synthetic oligonucleotide
  Antisense strand to SEQ ID NO: 2286524
uuucuuagccacagagcuu

SEQ ID NO: 2286526 - RNA, 19 nt, Artificial Sequence
  Description of Artificial Sequence: Synthetic oligonucleotide
  Sense strand starting at position 3293 of SEQ ID NO: 1884714
uuguaauguuaggucaaca

SEQ ID NO: 2286527 - RNA, 19 nt, Artificial Sequence
  Description of Artificial Sequence: Synthetic oligonucleotide
  Antisense strand to SEQ ID NO: 2286526
uguugaccuaacauuacaa

SEQ ID NO: 2286528 - RNA, 19 nt, Artificial Sequence
  Description of Artificial Sequence: Synthetic oligonucleotide
  Sense strand starting at position 3412 of SEQ ID NO: 1884714
gcagaacauuucguaguuu

SEQ ID NO: 2286529 - RNA, 19 nt, Artificial Sequence
  Description of Artificial Sequence: Synthetic oligonucleotide
  Antisense strand to SEQ ID NO: 2286528
aaacuacgaaauguucugc

SEQ ID NO: 2286530 - RNA, 19 nt, Artificial Sequence
  Description of Artificial Sequence: Synthetic oligonucleotide
  Sense strand starting at position 3468 of SEQ ID NO: 1884714
uuuguuauggcuggaauua

SEQ ID NO: 2286531 - RNA, 19 nt, Artificial Sequence
  Description of Artificial Sequence: Synthetic oligonucleotide
  Antisense strand to SEQ ID NO: 2286530
uaauuccagccauaacaaa

SEQ ID NO: 2286532 - RNA, 19 nt, Artificial Sequence
  Description of Artificial Sequence: Synthetic oligonucleotide
  Sense strand starting at position 3513 of SEQ ID NO: 1884714
gaacuaaugcuggguccua

SEQ ID NO: 2286533 - RNA, 19 nt, Artificial Sequence
  Description of Artificial Sequence: Synthetic oligonucleotide
  Antisense strand to SEQ ID NO: 2286532
uaggacccagcauuaguuc

SEQ ID NO: 2286534 - RNA, 19 nt, Artificial Sequence
  Description of Artificial Sequence: Synthetic oligonucleotide
  Sense strand starting at position 3574 of SEQ ID NO: 1884714
gagaaaguaguuugagcaa

SEQ ID NO: 2286535 - RNA, 19 nt, Artificial Sequence
  Description of Artificial Sequence: Synthetic oligonucleotide
  Antisense strand to SEQ ID NO: 2286534
uugcucaaacuacuuucuc

SEQ ID NO: 2286536 - RNA, 19 nt, Artificial Sequence
  Description of Artificial Sequence: Synthetic oligonucleotide
  Sense strand starting at position 3577 of SEQ ID NO: 1884714
aaaguaguuugagcaaaga

SEQ ID NO: 2286537 - RNA, 19 nt, Artificial Sequence
  Description of Artificial Sequence: Synthetic oligonucleotide
  Antisense strand to SEQ ID NO: 2286536
ucuuugcucaaacuacuuu

SEQ ID NO: 2286538 - RNA, 19 nt, Artificial Sequence
  Description of Artificial Sequence: Synthetic oligonucleotide
  Sense strand starting at position 3605 of SEQ ID NO: 1884714
aagaaugagcacugaguau

SEQ ID NO: 2286539 - RNA, 19 nt, Artificial Sequence
  Description of Artificial Sequence: Synthetic oligonucleotide
  Antisense strand to SEQ ID NO: 2286538
auacucagugcucauucuu

SEQ ID NO: 2286540 - RNA, 19 nt, Artificial Sequence
  Description of Artificial Sequence: Synthetic oligonucleotide
  Sense strand starting at position 205 of SEQ ID NO: 1884716
guaagagcacuuuggaagu

SEQ ID NO: 2286541 - RNA, 19 nt, Artificial Sequence
  Description of Artificial Sequence: Synthetic oligonucleotide
  Antisense strand to SEQ ID NO: 2286540
acuuccaaagugcucuuac

SEQ ID NO: 2286542 - RNA, 19 nt, Artificial Sequence
  Description of Artificial Sequence: Synthetic oligonucleotide
  Sense strand starting at position 239 of SEQ ID NO: 1884716
uuugaauagcuuuagguaa

SEQ ID NO: 2286543 - RNA, 19 nt, Artificial Sequence
  Description of Artificial Sequence: Synthetic oligonucleotide
  Antisense strand to SEQ ID NO: 2286542
uuaccuaaagcuauucaaa

SEQ ID NO: 2286544 - RNA, 19 nt, Artificial Sequence
  Description of Artificial Sequence: Synthetic oligonucleotide
  Sense strand starting at position 350 of SEQ ID NO: 1884716
ggaauauugucacccucag

SEQ ID NO: 2286545 - RNA, 19 nt, Artificial Sequence
  Description of Artificial Sequence: Synthetic oligonucleotide
  Antisense strand to SEQ ID NO: 2286544
cugagggugacaauauucc

SEQ ID NO: 2286546 - RNA, 19 nt, Artificial Sequence
  Description of Artificial Sequence: Synthetic oligonucleotide
  Sense strand starting at position 354 of SEQ ID NO: 1884716
uauugucacccucaguagu

SEQ ID NO: 2286547 - RNA, 19 nt, Artificial Sequence
  Description of Artificial Sequence: Synthetic oligonucleotide
  Antisense strand to SEQ ID NO: 2286546
acuacugagggugacaaua

SEQ ID NO: 2286548 - RNA, 19 nt, Artificial Sequence
  Description of Artificial Sequence: Synthetic oligonucleotide
  Sense strand starting at position 403 of SEQ ID NO: 1884716
agagcugauuuauacauua

SEQ ID NO: 2286549 - RNA, 19 nt, Artificial Sequence
  Description of Artificial Sequence: Synthetic oligonucleotide
  Antisense strand to SEQ ID NO: 2286548
uaauguauaaaucagcucu

SEQ ID NO: 2286550 - RNA, 19 nt, Artificial Sequence
  Description of Artificial Sequence: Synthetic oligonucleotide
  Sense strand starting at position 464 of SEQ ID NO: 1884716
cuggauccaguguauauaa

SEQ ID NO: 2286551 - RNA, 19 nt, Artificial Sequence
  Description of Artificial Sequence: Synthetic oligonucleotide
  Antisense strand to SEQ ID NO: 2286550
uuauauacacuggauccag

SEQ ID NO: 2286552 - RNA, 19 nt, Artificial Sequence
  Description of Artificial Sequence: Synthetic oligonucleotide
  Sense strand starting at position 508 of SEQ ID NO: 1884716
ggcugacagagccaaauua

SEQ ID NO: 2286553 - RNA, 19 nt, Artificial Sequence
  Description of Artificial Sequence: Synthetic oligonucleotide
  Antisense strand to SEQ ID NO: 2286552
uaauuuggcucugucagcc

SEQ ID NO: 2286554 - RNA, 19 nt, Artificial Sequence
  Description of Artificial Sequence: Synthetic oligonucleotide
  Sense strand starting at position 518 of SEQ ID NO: 1884716
gccaaauuagacuguugga

SEQ ID NO: 2286555 - RNA, 19 nt, Artificial Sequence
  Description of Artificial Sequence: Synthetic oligonucleotide
  Antisense strand to SEQ ID NO: 2286554
uccaacagucuaauuuggc

SEQ ID NO: 2286556 - RNA, 19 nt, Artificial Sequence
  Description of Artificial Sequence: Synthetic oligonucleotide
  Sense strand starting at position 625 of SEQ ID NO: 1884716
cuaugugagcuacagacaa

SEQ ID NO: 2286557 - RNA, 19 nt, Artificial Sequence
  Description of Artificial Sequence: Synthetic oligonucleotide
  Antisense strand to SEQ ID NO: 2286556
uugucuguagcucacauag

SEQ ID NO: 2286558 - RNA, 19 nt, Artificial Sequence
  Description of Artificial Sequence: Synthetic oligonucleotide
  Sense strand starting at position 637 of SEQ ID NO: 1884716
cagacaaacuuguuaggau

SEQ ID NO: 2286559 - RNA, 19 nt, Artificial Sequence
  Description of Artificial Sequence: Synthetic oligonucleotide
  Antisense strand to SEQ ID NO: 2286558
auccuaacaaguuugucug

SEQ ID NO: 2286560 - RNA, 19 nt, Artificial Sequence
  Description of Artificial Sequence: Synthetic oligonucleotide
  Sense strand starting at position 644 of SEQ ID NO: 1884716
acuuguuaggaucacuuua

SEQ ID NO: 2286561 - RNA, 19 nt, Artificial Sequence
  Description of Artificial Sequence: Synthetic oligonucleotide
  Antisense strand to SEQ ID NO: 2286560
uaaagugauccuaacaagu

SEQ ID NO: 2286562 - RNA, 19 nt, Artificial Sequence
  Description of Artificial Sequence: Synthetic oligonucleotide
  Sense strand starting at position 646 of SEQ ID NO: 1884716
uuguuaggaucacuuuaag

SEQ ID NO: 2286563 - RNA, 19 nt, Artificial Sequence
  Description of Artificial Sequence: Synthetic oligonucleotide
  Antisense strand to SEQ ID NO: 2286562
cuuaaagugauccuaacaa

SEQ ID NO: 2286564 - RNA, 19 nt, Artificial Sequence
  Description of Artificial Sequence: Synthetic oligonucleotide
  Sense strand starting at position 649 of SEQ ID NO: 1884716
uuaggaucacuuuaaguuu

SEQ ID NO: 2286565 - RNA, 19 nt, Artificial Sequence
  Description of Artificial Sequence: Synthetic oligonucleotide
  Antisense strand to SEQ ID NO: 2286564
aaacuuaaagugauccuaa

SEQ ID NO: 2286566 - RNA, 19 nt, Artificial Sequence
  Description of Artificial Sequence: Synthetic oligonucleotide
  Sense strand starting at position 718 of SEQ ID NO: 1884716
aguauuuaguuucuacgua

SEQ ID NO: 2286567 - RNA, 19 nt, Artificial Sequence
  Description of Artificial Sequence: Synthetic oligonucleotide
  Antisense strand to SEQ ID NO: 2286566
uacguagaaacuaaauacu

SEQ ID NO: 2286568 - RNA, 19 nt, Artificial Sequence
  Description of Artificial Sequence: Synthetic oligonucleotide
  Sense strand starting at position 879 of SEQ ID NO: 1884716
ugaccuuagcuguaacuaa

SEQ ID NO: 2286569 - RNA, 19 nt, Artificial Sequence
  Description of Artificial Sequence: Synthetic oligonucleotide
  Antisense strand to SEQ ID NO: 2286568
uuaguuacagcuaagguca

SEQ ID NO: 2286570 - RNA, 19 nt, Artificial Sequence
  Description of Artificial Sequence: Synthetic oligonucleotide
  Sense strand starting at position 890 of SEQ ID NO: 1884716
guaacuaaguaauugcuaa

SEQ ID NO: 2286571 - RNA, 19 nt, Artificial Sequence
  Description of Artificial Sequence: Synthetic oligonucleotide
  Antisense strand to SEQ ID NO: 2286570
uuagcaauuacuuaguuac

SEQ ID NO: 2286572 - RNA, 19 nt, Artificial Sequence
  Description of Artificial Sequence: Synthetic oligonucleotide
  Sense strand starting at position 955 of SEQ ID NO: 1884716
uuacgugaauuauuucguu

SEQ ID NO: 2286573 - RNA, 19 nt, Artificial Sequence
  Description of Artificial Sequence: Synthetic oligonucleotide
  Antisense strand to SEQ ID NO: 2286572
aacgaaauaauucacguaa

SEQ ID NO: 2286574 - RNA, 19 nt, Artificial Sequence
  Description of Artificial Sequence: Synthetic oligonucleotide
  Sense strand starting at position 959 of SEQ ID NO: 1884716
gugaauuauuucguuuaac

SEQ ID NO: 2286575 - RNA, 19 nt, Artificial Sequence
  Description of Artificial Sequence: Synthetic oligonucleotide
  Antisense strand to SEQ ID NO: 2286574
guuaaacgaaauaauucac

SEQ ID NO: 2286576 - RNA, 19 nt, Artificial Sequence
  Description of Artificial Sequence: Synthetic oligonucleotide
  Sense strand starting at position 1153 of SEQ ID NO: 1884716
cugaucuggcuuuaugacu

SEQ ID NO: 2286577 - RNA, 19 nt, Artificial Sequence
  Description of Artificial Sequence: Synthetic oligonucleotide
  Antisense strand to SEQ ID NO: 2286576
agucauaaagccagaucag

SEQ ID NO: 2286578 - RNA, 19 nt, Artificial Sequence
  Description of Artificial Sequence: Synthetic oligonucleotide
  Sense strand starting at position 1258 of SEQ ID NO: 1884716
cugccuagcgucguuauca

SEQ ID NO: 2286579 - RNA, 19 nt, Artificial Sequence
  Description of Artificial Sequence: Synthetic oligonucleotide
  Antisense strand to SEQ ID NO: 2286578
ugauaacgacgcuaggcag

SEQ ID NO: 2286580 - RNA, 19 nt, Artificial Sequence
  Description of Artificial Sequence: Synthetic oligonucleotide
  Sense strand starting at position 1908 of SEQ ID NO: 1884716
cccaguaaccgcgagacaa

SEQ ID NO: 2286581 - RNA, 19 nt, Artificial Sequence
  Description of Artificial Sequence: Synthetic oligonucleotide
  Antisense strand to SEQ ID NO: 2286580
uugucucgcgguuacuggg

SEQ ID NO: 2286582 - RNA, 19 nt, Artificial Sequence
  Description of Artificial Sequence: Synthetic oligonucleotide
  Sense strand starting at position 2140 of SEQ ID NO: 1884716
cugugauuagucggcauuu

SEQ ID NO: 2286583 - RNA, 19 nt, Artificial Sequence
  Description of Artificial Sequence: Synthetic oligonucleotide
  Antisense strand to SEQ ID NO: 2286582
aaaugccgacuaaucacag

SEQ ID NO: 2286584 - RNA, 19 nt, Artificial Sequence
  Description of Artificial Sequence: Synthetic oligonucleotide
  Sense strand starting at position 2141 of SEQ ID NO: 1884716
ugugauuagucggcauuuc

SEQ ID NO: 2286585 - RNA, 19 nt, Artificial Sequence
  Description of Artificial Sequence: Synthetic oligonucleotide
  Antisense strand to SEQ ID NO: 2286584
gaaaugccgacuaaucaca

SEQ ID NO: 2286586 - RNA, 19 nt, Artificial Sequence
  Description of Artificial Sequence: Synthetic oligonucleotide
  Sense strand starting at position 2224 of SEQ ID NO: 1884716
cagagagugcuugaucuaa

SEQ ID NO: 2286587 - RNA, 19 nt, Artificial Sequence
  Description of Artificial Sequence: Synthetic oligonucleotide
  Antisense strand to SEQ ID NO: 2286586
uuagaucaagcacucucug

SEQ ID NO: 2286588 - RNA, 19 nt, Artificial Sequence
  Description of Artificial Sequence: Synthetic oligonucleotide
  Sense strand starting at position 2314 of SEQ ID NO: 1884716
acguacaaccugugaagau

SEQ ID NO: 2286589 - RNA, 19 nt, Artificial Sequence
  Description of Artificial Sequence: Synthetic oligonucleotide
  Antisense strand to SEQ ID NO: 2286588
aucuucacagguuguacgu

SEQ ID NO: 2286590 - RNA, 19 nt, Artificial Sequence
  Description of Artificial Sequence: Synthetic oligonucleotide
  Sense strand starting at position 2701 of SEQ ID NO: 1884716
uggacaugauggcuuguaa

SEQ ID NO: 2286591 - RNA, 19 nt, Artificial Sequence
  Description of Artificial Sequence: Synthetic oligonucleotide
  Antisense strand to SEQ ID NO: 2286590
uuacaagccaucaugucca

SEQ ID NO: 2286592 - RNA, 19 nt, Artificial Sequence
  Description of Artificial Sequence: Synthetic oligonucleotide
  Sense strand starting at position 2771 of SEQ ID NO: 1884716
ugagguugcggugagaaau

SEQ ID NO: 2286593 - RNA, 19 nt, Artificial Sequence
  Description of Artificial Sequence: Synthetic oligonucleotide
  Antisense strand to SEQ ID NO: 2286592
auuucucaccgcaaccuca

SEQ ID NO: 2286594 - RNA, 19 nt, Artificial Sequence
  Description of Artificial Sequence: Synthetic oligonucleotide
  Sense strand starting at position 2885 of SEQ ID NO: 1884716
guaggaaauuauuccauga

SEQ ID NO: 2286595 - RNA, 19 nt, Artificial Sequence
  Description of Artificial Sequence: Synthetic oligonucleotide
  Antisense strand to SEQ ID NO: 2286594
ucauggaauaauuuccuac

SEQ ID NO: 2286596 - RNA, 19 nt, Artificial Sequence
  Description of Artificial Sequence: Synthetic oligonucleotide
  Sense strand starting at position 2887 of SEQ ID NO: 1884716
aggaaauuauuccaugaaa

SEQ ID NO: 2286597 - RNA, 19 nt, Artificial Sequence
  Description of Artificial Sequence: Synthetic oligonucleotide
  Antisense strand to SEQ ID NO: 2286596
uuucauggaauaauuuccu

SEQ ID NO: 2286598 - RNA, 19 nt, Artificial Sequence
  Description of Artificial Sequence: Synthetic oligonucleotide
  Sense strand starting at position 2916 of SEQ ID NO: 1884716
auaauuccucuguauuagu

SEQ ID NO: 2286599 - RNA, 19 nt, Artificial Sequence
  Description of Artificial Sequence: Synthetic oligonucleotide
  Antisense strand to SEQ ID NO: 2286598
acuaauacagaggaauuau

SEQ ID NO: 2286600 - RNA, 19 nt, Artificial Sequence
  Description of Artificial Sequence: Synthetic oligonucleotide
  Sense strand starting at position 2924 of SEQ ID NO: 1884716
ucuguauuaguauaacagu

SEQ ID NO: 2286601 - RNA, 19 nt, Artificial Sequence
  Description of Artificial Sequence: Synthetic oligonucleotide
  Antisense strand to SEQ ID NO: 2286600
acuguuauacuaauacaga

SEQ ID NO: 2286602 - RNA, 19 nt, Artificial Sequence
  Description of Artificial Sequence: Synthetic oligonucleotide
  Sense strand starting at position 3087 of SEQ ID NO: 1884716
gcaauuaauucugugaacu

SEQ ID NO: 2286603 - RNA, 19 nt, Artificial Sequence
  Description of Artificial Sequence: Synthetic oligonucleotide
  Antisense strand to SEQ ID NO: 2286602
aguucacagaauuaauugc

SEQ ID NO: 2286604 - RNA, 19 nt, Artificial Sequence
  Description of Artificial Sequence: Synthetic oligonucleotide
  Sense strand starting at position 3632 of SEQ ID NO: 1884716
ugagaaguauuugacacau

SEQ ID NO: 2286605 - RNA, 19 nt, Artificial Sequence
  Description of Artificial Sequence: Synthetic oligonucleotide
  Antisense strand to SEQ ID NO: 2286604
augugucaaauacuucuca

SEQ ID NO: 2286606 - RNA, 19 nt, Artificial Sequence
  Description of Artificial Sequence: Synthetic oligonucleotide
  Sense strand starting at position 3634 of SEQ ID NO: 1884716
agaaguauuugacacauaa

SEQ ID NO: 2286607 - RNA, 19 nt, Artificial Sequence
  Description of Artificial Sequence: Synthetic oligonucleotide
  Antisense strand to SEQ ID NO: 2286606
uuaugugucaaauacuucu

SEQ ID NO: 2286608 - RNA, 19 nt, Artificial Sequence
  Description of Artificial Sequence: Synthetic oligonucleotide
  Sense strand starting at position 3736 of SEQ ID NO: 1884716
auuaaaugugcuuaagaca

SEQ ID NO: 2286609 - RNA, 19 nt, Artificial Sequence
  Description of Artificial Sequence: Synthetic oligonucleotide
  Antisense strand to SEQ ID NO: 2286608
ugucuuaagcacauuuaau

SEQ ID NO: 2286610 - RNA, 19 nt, Artificial Sequence
  Description of Artificial Sequence: Synthetic oligonucleotide
  Sense strand starting at position 3835 of SEQ ID NO: 1884716
gugugauaagagugacuga

SEQ ID NO: 2286611 - RNA, 19 nt, Artificial Sequence
  Description of Artificial Sequence: Synthetic oligonucleotide
  Antisense strand to SEQ ID NO: 2286610
ucagucacucuuaucacac

SEQ ID NO: 2286612 - RNA, 19 nt, Artificial Sequence
  Description of Artificial Sequence: Synthetic oligonucleotide
  Sense strand starting at position 3860 of SEQ ID NO: 1884716
cgcagauugcaauagcaga

SEQ ID NO: 2286613 - RNA, 19 nt, Artificial Sequence
  Description of Artificial Sequence: Synthetic oligonucleotide
  Antisense strand to SEQ ID NO: 2286612
ucugcuauugcaaucugcg

SEQ ID NO: 2286614 - RNA, 19 nt, Artificial Sequence
  Description of Artificial Sequence: Synthetic oligonucleotide
  Sense strand starting at position 3906 of SEQ ID NO: 1884716
gcuguaaagucucccagga

SEQ ID NO: 2286615 - RNA, 19 nt, Artificial Sequence
  Description of Artificial Sequence: Synthetic oligonucleotide
  Antisense strand to SEQ ID NO: 2286614
uccugggagacuuuacagc

SEQ ID NO: 2286616 - RNA, 19 nt, Artificial Sequence
  Description of Artificial Sequence: Synthetic oligonucleotide
  Sense strand starting at position 3910 of SEQ ID NO: 1884716
uaaagucucccaggaagca

SEQ ID NO: 2286617 - RNA, 19 nt, Artificial Sequence
  Description of Artificial Sequence: Synthetic oligonucleotide
  Antisense strand to SEQ ID NO: 2286616
ugcuuccugggagacuuua

SEQ ID NO: 2286618 - RNA, 19 nt, Artificial Sequence
  Description of Artificial Sequence: Synthetic oligonucleotide
  Sense strand starting at position 3948 of SEQ ID NO: 1884716
gaggaugaauaggaauuaa

SEQ ID NO: 2286619 - RNA, 19 nt, Artificial Sequence
  Description of Artificial Sequence: Synthetic oligonucleotide
  Antisense strand to SEQ ID NO: 2286618
uuaauuccuauucauccuc

SEQ ID NO: 2286620 - RNA, 19 nt, Artificial Sequence
  Description of Artificial Sequence: Synthetic oligonucleotide
  Sense strand starting at position 331 of SEQ ID NO: 1884717
gcucaauugccacauguag

SEQ ID NO: 2286621 - RNA, 19 nt, Artificial Sequence
  Description of Artificial Sequence: Synthetic oligonucleotide
  Antisense strand to SEQ ID NO: 2286620
cuacauguggcaauugagc

SEQ ID NO: 2286622 - RNA, 19 nt, Artificial Sequence
  Description of Artificial Sequence: Synthetic oligonucleotide
  Sense strand starting at position 338 of SEQ ID NO: 1884717
ugccacauguagcuagaua

SEQ ID NO: 2286623 - RNA, 19 nt, Artificial Sequence
  Description of Artificial Sequence: Synthetic oligonucleotide
  Antisense strand to SEQ ID NO: 2286622
uaucuagcuacauguggca

SEQ ID NO: 2286624 - RNA, 19 nt, Artificial Sequence
  Description of Artificial Sequence: Synthetic oligonucleotide
  Sense strand starting at position 349 of SEQ ID NO: 1884717
gcuagauagugguuauacu

SEQ ID NO: 2286625 - RNA, 19 nt, Artificial Sequence
  Description of Artificial Sequence: Synthetic oligonucleotide
  Antisense strand to SEQ ID NO: 2286624
aguauaaccacuaucuagc

SEQ ID NO: 2286626 - RNA, 19 nt, Artificial Sequence
  Description of Artificial Sequence: Synthetic oligonucleotide
  Sense strand starting at position 350 of SEQ ID NO: 1884717
cuagauagugguuauacua

SEQ ID NO: 2286627 - RNA, 19 nt, Artificial Sequence
  Description of Artificial Sequence: Synthetic oligonucleotide
  Antisense strand to SEQ ID NO: 2286626
uaguauaaccacuaucuag

SEQ ID NO: 2286628 - RNA, 19 nt, Artificial Sequence
  Description of Artificial Sequence: Synthetic oligonucleotide
  Sense strand starting at position 357 of SEQ ID NO: 1884717
gugguuauacuauggagcu

SEQ ID NO: 2286629 - RNA, 19 nt, Artificial Sequence
  Description of Artificial Sequence: Synthetic oligonucleotide
  Antisense strand to SEQ ID NO: 2286628
agcuccauaguauaaccac

SEQ ID NO: 2286630 - RNA, 19 nt, Artificial Sequence
  Description of Artificial Sequence: Synthetic oligonucleotide
  Sense strand starting at position 402 of SEQ ID NO: 1884717
cuugguguuucuccauuaa

SEQ ID NO: 2286631 - RNA, 19 nt, Artificial Sequence
  Description of Artificial Sequence: Synthetic oligonucleotide
  Antisense strand to SEQ ID NO: 2286630
uuaauggagaaacaccaag

SEQ ID NO: 2286632 - RNA, 19 nt, Artificial Sequence
  Description of Artificial Sequence: Synthetic oligonucleotide
  Sense strand starting at position 406 of SEQ ID NO: 1884717
guguuucuccauuaaacag

SEQ ID NO: 2286633 - RNA, 19 nt, Artificial Sequence
  Description of Artificial Sequence: Synthetic oligonucleotide
  Antisense strand to SEQ ID NO: 2286632
cuguuuaauggagaaacac

SEQ ID NO: 2286634 - RNA, 19 nt, Artificial Sequence
  Description of Artificial Sequence: Synthetic oligonucleotide
  Sense strand starting at position 789 of SEQ ID NO: 1884717
cagauacguuguguuagau

SEQ ID NO: 2286635 - RNA, 19 nt, Artificial Sequence
  Description of Artificial Sequence: Synthetic oligonucleotide
  Antisense strand to SEQ ID NO: 2286634
aucuaacacaacguaucug

SEQ ID NO: 2286636 - RNA, 19 nt, Artificial Sequence
  Description of Artificial Sequence: Synthetic oligonucleotide
  Sense strand starting at position 818 of SEQ ID NO: 1884717
cuaagaaucacaugggcga

SEQ ID NO: 2286637 - RNA, 19 nt, Artificial Sequence
  Description of Artificial Sequence: Synthetic oligonucleotide
  Antisense strand to SEQ ID NO: 2286636
ucgcccaugugauucuuag

SEQ ID NO: 2286638 - RNA, 19 nt, Artificial Sequence
  Description of Artificial Sequence: Synthetic oligonucleotide
  Sense strand starting at position 1258 of SEQ ID NO: 1884717
acggguauuacauggagca

SEQ ID NO: 2286639 - RNA, 19 nt, Artificial Sequence
  Description of Artificial Sequence: Synthetic oligonucleotide
  Antisense strand to SEQ ID NO: 2286638
ugcuccauguaauacccgu

SEQ ID NO: 2286640 - RNA, 19 nt, Artificial Sequence
  Description of Artificial Sequence: Synthetic oligonucleotide
  Sense strand starting at position 1259 of SEQ ID NO: 1884717
cggguauuacauggagcau

SEQ ID NO: 2286641 - RNA, 19 nt, Artificial Sequence
  Description of Artificial Sequence: Synthetic oligonucleotide
  Antisense strand to SEQ ID NO: 2286640
augcuccauguaauacccg

SEQ ID NO: 2286642 - RNA, 19 nt, Artificial Sequence
  Description of Artificial Sequence: Synthetic oligonucleotide
  Sense strand starting at position 1433 of SEQ ID NO: 1884717
ggagaaugugccgaucuaa

SEQ ID NO: 2286643 - RNA, 19 nt, Artificial Sequence
  Description of Artificial Sequence: Synthetic oligonucleotide
  Antisense strand to SEQ ID NO: 2286642
uuagaucggcacauucucc

SEQ ID NO: 2286644 - RNA, 19 nt, Artificial Sequence
  Description of Artificial Sequence: Synthetic oligonucleotide
  Sense strand starting at position 1985 of SEQ ID NO: 1884717
aggacuuuccagcgcaaug

SEQ ID NO: 2286645 - RNA, 19 nt, Artificial Sequence
  Description of Artificial Sequence: Synthetic oligonucleotide
  Antisense strand to SEQ ID NO: 2286644
cauugcgcuggaaaguccu

SEQ ID NO: 2286646 - RNA, 19 nt, Artificial Sequence
  Description of Artificial Sequence: Synthetic oligonucleotide
  Sense strand starting at position 3099 of SEQ ID NO: 1884717
cugauaauuuaguggguaa

SEQ ID NO: 2286647 - RNA, 19 nt, Artificial Sequence
  Description of Artificial Sequence: Synthetic oligonucleotide
  Antisense strand to SEQ ID NO: 2286646
uuacccacuaaauuaucag

SEQ ID NO: 2286648 - RNA, 19 nt, Artificial Sequence
  Description of Artificial Sequence: Synthetic oligonucleotide
  Sense strand starting at position 3242 of SEQ ID NO: 1884717
accugugcuuccucuuuga

SEQ ID NO: 2286649 - RNA, 19 nt, Artificial Sequence
  Description of Artificial Sequence: Synthetic oligonucleotide
  Antisense strand to SEQ ID NO: 2286648
ucaaagaggaagcacaggu

SEQ ID NO: 2286650 - RNA, 19 nt, Artificial Sequence
  Description of Artificial Sequence: Synthetic oligonucleotide
  Sense strand starting at position 3245 of SEQ ID NO: 1884717
ugugcuuccucuuugauga

SEQ ID NO: 2286651 - RNA, 19 nt, Artificial Sequence
  Description of Artificial Sequence: Synthetic oligonucleotide
  Antisense strand to SEQ ID NO: 2286650
ucaucaaagaggaagcaca

SEQ ID NO: 2286652 - RNA, 19 nt, Artificial Sequence
  Description of Artificial Sequence: Synthetic oligonucleotide
  Sense strand starting at position 3246 of SEQ ID NO: 1884717
gugcuuccucuuugaugag

SEQ ID NO: 2286653 - RNA, 19 nt, Artificial Sequence
  Description of Artificial Sequence: Synthetic oligonucleotide
  Antisense strand to SEQ ID NO: 2286652
cucaucaaagaggaagcac

SEQ ID NO: 2286654 - RNA, 19 nt, Artificial Sequence
  Description of Artificial Sequence: Synthetic oligonucleotide
  Sense strand starting at position 3318 of SEQ ID NO: 1884717
acagaaugacauugcguuu

SEQ ID NO: 2286655 - RNA, 19 nt, Artificial Sequence
  Description of Artificial Sequence: Synthetic oligonucleotide
  Antisense strand to SEQ ID NO: 2286654
aaacgcaaugucauucugu

SEQ ID NO: 2286656 - RNA, 19 nt, Artificial Sequence
  Description of Artificial Sequence: Synthetic oligonucleotide
  Sense strand starting at position 3470 of SEQ ID NO: 1884717
cacgucuccugacuuugaa

SEQ ID NO: 2286657 - RNA, 19 nt, Artificial Sequence
  Description of Artificial Sequence: Synthetic oligonucleotide
  Antisense strand to SEQ ID NO: 2286656
uucaaagucaggagacgug

SEQ ID NO: 2286658 - RNA, 19 nt, Artificial Sequence
  Description of Artificial Sequence: Synthetic oligonucleotide
  Sense strand starting at position 3529 of SEQ ID NO: 1884717
uauguauugugaucaugua

SEQ ID NO: 2286659 - RNA, 19 nt, Artificial Sequence
  Description of Artificial Sequence: Synthetic oligonucleotide
  Antisense strand to SEQ ID NO: 2286658
uacaugaucacaauacaua

SEQ ID NO: 2286660 - RNA, 19 nt, Artificial Sequence
  Description of Artificial Sequence: Synthetic oligonucleotide
  Sense strand starting at position 3530 of SEQ ID NO: 1884717
auguauugugaucauguau

SEQ ID NO: 2286661 - RNA, 19 nt, Artificial Sequence
  Description of Artificial Sequence: Synthetic oligonucleotide
  Antisense strand to SEQ ID NO: 2286660
auacaugaucacaauacau

SEQ ID NO: 2286662 - RNA, 19 nt, Artificial Sequence
  Description of Artificial Sequence: Synthetic oligonucleotide
  Sense strand starting at position 3600 of SEQ ID NO: 1884717
augucuuaugcuuaucuga

SEQ ID NO: 2286663 - RNA, 19 nt, Artificial Sequence
  Description of Artificial Sequence: Synthetic oligonucleotide
  Antisense strand to SEQ ID NO: 2286662
ucagauaagcauaagacau

SEQ ID NO: 2286664 - RNA, 19 nt, Artificial Sequence
  Description of Artificial Sequence: Synthetic oligonucleotide
  Sense strand starting at position 3602 of SEQ ID NO: 1884717
gucuuaugcuuaucugaau

SEQ ID NO: 2286665 - RNA, 19 nt, Artificial Sequence
  Description of Artificial Sequence: Synthetic oligonucleotide
  Antisense strand to SEQ ID NO: 2286664
auucagauaagcauaagac

SEQ ID NO: 2286666 - RNA, 19 nt, Artificial Sequence
  Description of Artificial Sequence: Synthetic oligonucleotide
  Sense strand starting at position 3624 of SEQ ID NO: 1884717
ccuuauugagcacaagauc

SEQ ID NO: 2286667 - RNA, 19 nt, Artificial Sequence
  Description of Artificial Sequence: Synthetic oligonucleotide
  Antisense strand to SEQ ID NO: 2286666
gaucuugugcucaauaagg

SEQ ID NO: 2286668 - RNA, 19 nt, Artificial Sequence
  Description of Artificial Sequence: Synthetic oligonucleotide
  Sense strand starting at position 3651 of SEQ ID NO: 1884717
agcaaaugcucacuaagug

SEQ ID NO: 2286669 - RNA, 19 nt, Artificial Sequence
  Description of Artificial Sequence: Synthetic oligonucleotide
  Antisense strand to SEQ ID NO: 2286668
cacuuagugagcauuugcu

SEQ ID NO: 2286670 - RNA, 19 nt, Artificial Sequence
  Description of Artificial Sequence: Synthetic oligonucleotide
  Sense strand starting at position 3660 of SEQ ID NO: 1884717
ucacuaagugguugcugaa

SEQ ID NO: 2286671 - RNA, 19 nt, Artificial Sequence
  Description of Artificial Sequence: Synthetic oligonucleotide
  Antisense strand to SEQ ID NO: 2286670
uucagcaaccacuuaguga

SEQ ID NO: 2286672 - RNA, 19 nt, Artificial Sequence
  Description of Artificial Sequence: Synthetic oligonucleotide
  Sense strand starting at position 3673 of SEQ ID NO: 1884717
gcugaauacguuugugaau

SEQ ID NO: 2286673 - RNA, 19 nt, Artificial Sequence
  Description of Artificial Sequence: Synthetic oligonucleotide
  Antisense strand to SEQ ID NO: 2286672
auucacaaacguauucagc

SEQ ID NO: 2286674 - RNA, 19 nt, Artificial Sequence
  Description of Artificial Sequence: Synthetic oligonucleotide
  Sense strand starting at position 3674 of SEQ ID NO: 1884717
cugaauacguuugugaauu

SEQ ID NO: 2286675 - RNA, 19 nt, Artificial Sequence
  Description of Artificial Sequence: Synthetic oligonucleotide
  Antisense strand to SEQ ID NO: 2286674
aauucacaaacguauucag

SEQ ID NO: 2286676 - RNA, 19 nt, Artificial Sequence
  Description of Artificial Sequence: Synthetic oligonucleotide
  Sense strand starting at position 3680 of SEQ ID NO: 1884717
acguuugugaauugucaau

SEQ ID NO: 2286677 - RNA, 19 nt, Artificial Sequence
  Description of Artificial Sequence: Synthetic oligonucleotide
  Antisense strand to SEQ ID NO: 2286676
auugacaauucacaaacgu

SEQ ID NO: 2286678 - RNA, 19 nt, Artificial Sequence
  Description of Artificial Sequence: Synthetic oligonucleotide
  Sense strand starting at position 3682 of SEQ ID NO: 1884717
guuugugaauugucaauag

SEQ ID NO: 2286679 - RNA, 19 nt, Artificial Sequence
  Description of Artificial Sequence: Synthetic oligonucleotide
  Antisense strand to SEQ ID NO: 2286678
cuauugacaauucacaaac

SEQ ID NO: 2286680 - RNA, 19 nt, Artificial Sequence
  Description of Artificial Sequence: Synthetic oligonucleotide
  Sense strand starting at position 3686 of SEQ ID NO: 1884717
gugaauugucaauagcucu

SEQ ID NO: 2286681 - RNA, 19 nt, Artificial Sequence
  Description of Artificial Sequence: Synthetic oligonucleotide
  Antisense strand to SEQ ID NO: 2286680
agagcuauugacaauucac

SEQ ID NO: 2286682 - RNA, 19 nt, Artificial Sequence
  Description of Artificial Sequence: Synthetic oligonucleotide
  Sense strand starting at position 3692 of SEQ ID NO: 1884717
ugucaauagcucugccaga

SEQ ID NO: 2286683 - RNA, 19 nt, Artificial Sequence
  Description of Artificial Sequence: Synthetic oligonucleotide
  Antisense strand to SEQ ID NO: 2286682
ucuggcagagcuauugaca

SEQ ID NO: 2286684 - RNA, 19 nt, Artificial Sequence
  Description of Artificial Sequence: Synthetic oligonucleotide
  Sense strand starting at position 3697 of SEQ ID NO: 1884717
auagcucugccagacauau

SEQ ID NO: 2286685 - RNA, 19 nt, Artificial Sequence
  Description of Artificial Sequence: Synthetic oligonucleotide
  Antisense strand to SEQ ID NO: 2286684
auaugucuggcagagcuau

SEQ ID NO: 2286686 - RNA, 19 nt, Artificial Sequence
  Description of Artificial Sequence: Synthetic oligonucleotide
  Sense strand starting at position 3706 of SEQ ID NO: 1884717
ccagacauaucacuguaua

SEQ ID NO: 2286687 - RNA, 19 nt, Artificial Sequence
  Description of Artificial Sequence: Synthetic oligonucleotide
  Antisense strand to SEQ ID NO: 2286686
uauacagugauaugucugg

SEQ ID NO: 2286688 - RNA, 19 nt, Artificial Sequence
  Description of Artificial Sequence: Synthetic oligonucleotide
  Sense strand starting at position 3869 of SEQ ID NO: 1884717
guaguuguucugucuguca

SEQ ID NO: 2286689 - RNA, 19 nt, Artificial Sequence
  Description of Artificial Sequence: Synthetic oligonucleotide
  Antisense strand to SEQ ID NO: 2286688
ugacagacagaacaacuac

SEQ ID NO: 2286690 - RNA, 19 nt, Artificial Sequence
  Description of Artificial Sequence: Synthetic oligonucleotide
  Sense strand starting at position 3880 of SEQ ID NO: 1884717
gucugucaaccaggaauua

SEQ ID NO: 2286691 - RNA, 19 nt, Artificial Sequence
  Description of Artificial Sequence: Synthetic oligonucleotide
  Antisense strand to SEQ ID NO: 2286690
uaauuccugguugacagac

SEQ ID NO: 2286692 - RNA, 19 nt, Artificial Sequence
  Description of Artificial Sequence: Synthetic oligonucleotide
  Sense strand starting at position 3900 of SEQ ID NO: 1884717
aagcaaaguuuccugggaa

SEQ ID NO: 2286693 - RNA, 19 nt, Artificial Sequence
  Description of Artificial Sequence: Synthetic oligonucleotide
  Antisense strand to SEQ ID NO: 2286692
uucccaggaaacuuugcuu

SEQ ID NO: 2286694 - RNA, 19 nt, Artificial Sequence
  Description of Artificial Sequence: Synthetic oligonucleotide
  Sense strand starting at position 3907 of SEQ ID NO: 1884717
guuuccugggaagaguaua

SEQ ID NO: 2286695 - RNA, 19 nt, Artificial Sequence
  Description of Artificial Sequence: Synthetic oligonucleotide
  Antisense strand to SEQ ID NO: 2286694
uauacucuucccaggaaac

SEQ ID NO: 2286696 - RNA, 19 nt, Artificial Sequence
  Description of Artificial Sequence: Synthetic oligonucleotide
  Sense strand starting at position 3915 of SEQ ID NO: 1884717
ggaagaguauacuaaacug

SEQ ID NO: 2286697 - RNA, 19 nt, Artificial Sequence
  Description of Artificial Sequence: Synthetic oligonucleotide
  Antisense strand to SEQ ID NO: 2286696
caguuuaguauacucuucc

SEQ ID NO: 2286698 - RNA, 19 nt, Artificial Sequence
  Description of Artificial Sequence: Synthetic oligonucleotide
  Sense strand starting at position 3957 of SEQ ID NO: 1884717
guguguacuuccuuucuag

SEQ ID NO: 2286699 - RNA, 19 nt, Artificial Sequence
  Description of Artificial Sequence: Synthetic oligonucleotide
  Antisense strand to SEQ ID NO: 2286698
cuagaaaggaaguacacac

SEQ ID NO: 2286700 - RNA, 19 nt, Artificial Sequence
  Description of Artificial Sequence: Synthetic oligonucleotide
  Sense strand starting at position 52 of SEQ ID NO: 1884718
guccuaaguccuuacaucu

SEQ ID NO: 2286701 - RNA, 19 nt, Artificial Sequence
  Description of Artificial Sequence: Synthetic oligonucleotide
  Antisense strand to SEQ ID NO: 2286700
agauguaaggacuuaggac

SEQ ID NO: 2286702 - RNA, 19 nt, Artificial Sequence
  Description of Artificial Sequence: Synthetic oligonucleotide
  Sense strand starting at position 112 of SEQ ID NO: 1884718
agcuguguaaucucugcga

SEQ ID NO: 2286703 - RNA, 19 nt, Artificial Sequence
  Description of Artificial Sequence: Synthetic oligonucleotide
  Antisense strand to SEQ ID NO: 2286702
ucgcagagauuacacagcu

SEQ ID NO: 2286704 - RNA, 19 nt, Artificial Sequence
  Description of Artificial Sequence: Synthetic oligonucleotide
  Sense strand starting at position 159 of SEQ ID NO: 1884718
gggucauaucguuuccgug

SEQ ID NO: 2286705 - RNA, 19 nt, Artificial Sequence
  Description of Artificial Sequence: Synthetic oligonucleotide
  Antisense strand to SEQ ID NO: 2286704
cacggaaacgauaugaccc

SEQ ID NO: 2286706 - RNA, 19 nt, Artificial Sequence
  Description of Artificial Sequence: Synthetic oligonucleotide
  Sense strand starting at position 190 of SEQ ID NO: 1884718
ggugagucucgggaagaug

SEQ ID NO: 2286707 - RNA, 19 nt, Artificial Sequence
  Description of Artificial Sequence: Synthetic oligonucleotide
  Antisense strand to SEQ ID NO: 2286706
caucuucccgagacucacc

SEQ ID NO: 2286708 - RNA, 19 nt, Artificial Sequence
  Description of Artificial Sequence: Synthetic oligonucleotide
  Sense strand starting at position 269 of SEQ ID NO: 1884718
agugaccugcccuagaaau

SEQ ID NO: 2286709 - RNA, 19 nt, Artificial Sequence
  Description of Artificial Sequence: Synthetic oligonucleotide
  Antisense strand to SEQ ID NO: 2286708
auuucuagggcaggucacu

SEQ ID NO: 2286710 - RNA, 19 nt, Artificial Sequence
  Description of Artificial Sequence: Synthetic oligonucleotide
  Sense strand starting at position 477 of SEQ ID NO: 1884718
cuuugauccuggcucaaag

SEQ ID NO: 2286711 - RNA, 19 nt, Artificial Sequence
  Description of Artificial Sequence: Synthetic oligonucleotide
  Antisense strand to SEQ ID NO: 2286710
cuuugagccaggaucaaag

SEQ ID NO: 2286712 - RNA, 19 nt, Artificial Sequence
  Description of Artificial Sequence: Synthetic oligonucleotide
  Sense strand starting at position 525 of SEQ ID NO: 1884718
cuacaaccgcacuaagaau

SEQ ID NO: 2286713 - RNA, 19 nt, Artificial Sequence
  Description of Artificial Sequence: Synthetic oligonucleotide
  Antisense strand to SEQ ID NO: 2286712
auucuuagugcgguuguag

SEQ ID NO: 2286714 - RNA, 19 nt, Artificial Sequence
  Description of Artificial Sequence: Synthetic oligonucleotide
  Sense strand starting at position 537 of SEQ ID NO: 1884718
uaagaauuguucuugccag

SEQ ID NO: 2286715 - RNA, 19 nt, Artificial Sequence
  Description of Artificial Sequence: Synthetic oligonucleotide
  Antisense strand to SEQ ID NO: 2286714
cuggcaagaacaauucuua

SEQ ID NO: 2286716 - RNA, 19 nt, Artificial Sequence
  Description of Artificial Sequence: Synthetic oligonucleotide
  Sense strand starting at position 579 of SEQ ID NO: 1884718
aagugcucagguugggaau

SEQ ID NO: 2286717 - RNA, 19 nt, Artificial Sequence
  Description of Artificial Sequence: Synthetic oligonucleotide
  Antisense strand to SEQ ID NO: 2286716
auucccaaccugagcacuu

SEQ ID NO: 2286718 - RNA, 19 nt, Artificial Sequence
  Description of Artificial Sequence: Synthetic oligonucleotide
  Sense strand starting at position 580 of SEQ ID NO: 1884718
agugcucagguugggaaua

SEQ ID NO: 2286719 - RNA, 19 nt, Artificial Sequence
  Description of Artificial Sequence: Synthetic oligonucleotide
  Antisense strand to SEQ ID NO: 2286718
uauucccaaccugagcacu

SEQ ID NO: 2286720 - RNA, 19 nt, Artificial Sequence
  Description of Artificial Sequence: Synthetic oligonucleotide
  Sense strand starting at position 791 of SEQ ID NO: 1884718
agcuguccuccuugaaaga

SEQ ID NO: 2286721 - RNA, 19 nt, Artificial Sequence
  Description of Artificial Sequence: Synthetic oligonucleotide
  Antisense strand to SEQ ID NO: 2286720
ucuuucaaggaggacagcu

SEQ ID NO: 2286722 - RNA, 19 nt, Artificial Sequence
  Description of Artificial Sequence: Synthetic oligonucleotide
  Sense strand starting at position 792 of SEQ ID NO: 1884718
gcuguccuccuugaaagau

SEQ ID NO: 2286723 - RNA, 19 nt, Artificial Sequence
  Description of Artificial Sequence: Synthetic oligonucleotide
  Antisense strand to SEQ ID NO: 2286722
aucuuucaaggaggacagc

SEQ ID NO: 2286724 - RNA, 19 nt, Artificial Sequence
  Description of Artificial Sequence: Synthetic oligonucleotide
  Sense strand starting at position 1400 of SEQ ID NO: 1884718
ccuggagacauugggcaaa

SEQ ID NO: 2286725 - RNA, 19 nt, Artificial Sequence
  Description of Artificial Sequence: Synthetic oligonucleotide
  Antisense strand to SEQ ID NO: 2286724
uuugcccaaugucuccagg

SEQ ID NO: 2286726 - RNA, 19 nt, Artificial Sequence
  Description of Artificial Sequence: Synthetic oligonucleotide
  Sense strand starting at position 1609 of SEQ ID NO: 1884718
acagaauucucagcugaug

SEQ ID NO: 2286727 - RNA, 19 nt, Artificial Sequence
  Description of Artificial Sequence: Synthetic oligonucleotide
  Antisense strand to SEQ ID NO: 2286726
caucagcugagaauucugu

SEQ ID NO: 2286728 - RNA, 19 nt, Artificial Sequence
  Description of Artificial Sequence: Synthetic oligonucleotide
  Sense strand starting at position 1611 of SEQ ID NO: 1884718
agaauucucagcugaugga

SEQ ID NO: 2286729 - RNA, 19 nt, Artificial Sequence
  Description of Artificial Sequence: Synthetic oligonucleotide
  Antisense strand to SEQ ID NO: 2286728
uccaucagcugagaauucu

SEQ ID NO: 2286730 - RNA, 19 nt, Artificial Sequence
  Description of Artificial Sequence: Synthetic oligonucleotide
  Sense strand starting at position 1986 of SEQ ID NO: 1884718
gccaaacuggaaugauuau

SEQ ID NO: 2286731 - RNA, 19 nt, Artificial Sequence
  Description of Artificial Sequence: Synthetic oligonucleotide
  Antisense strand to SEQ ID NO: 2286730
auaaucauuccaguuuggc

SEQ ID NO: 2286732 - RNA, 19 nt, Artificial Sequence
  Description of Artificial Sequence: Synthetic oligonucleotide
  Sense strand starting at position 1993 of SEQ ID NO: 1884718
uggaaugauuaugugucuu

SEQ ID NO: 2286733 - RNA, 19 nt, Artificial Sequence
  Description of Artificial Sequence: Synthetic oligonucleotide
  Antisense strand to SEQ ID NO: 2286732
aagacacauaaucauucca

SEQ ID NO: 2286734 - RNA, 19 nt, Artificial Sequence
  Description of Artificial Sequence: Synthetic oligonucleotide
  Sense strand starting at position 2089 of SEQ ID NO: 1884718
acaccuaaggcguaacaaa

SEQ ID NO: 2286735 - RNA, 19 nt, Artificial Sequence
  Description of Artificial Sequence: Synthetic oligonucleotide
  Antisense strand to SEQ ID NO: 2286734
uuuguuacgccuuaggugu

SEQ ID NO: 2286736 - RNA, 19 nt, Artificial Sequence
  Description of Artificial Sequence: Synthetic oligonucleotide
  Sense strand starting at position 2314 of SEQ ID NO: 1884718
agcaauaggauuggaaagu

SEQ ID NO: 2286737 - RNA, 19 nt, Artificial Sequence
  Description of Artificial Sequence: Synthetic oligonucleotide
  Antisense strand to SEQ ID NO: 2286736
acuuuccaauccuauugcu

SEQ ID NO: 2286738 - RNA, 19 nt, Artificial Sequence
  Description of Artificial Sequence: Synthetic oligonucleotide
  Sense strand starting at position 2344 of SEQ ID NO: 1884718
gagggaguuucuucucuua

SEQ ID NO: 2286739 - RNA, 19 nt, Artificial Sequence
  Description of Artificial Sequence: Synthetic oligonucleotide
  Antisense strand to SEQ ID NO: 2286738
uaagagaagaaacucccuc

SEQ ID NO: 2286740 - RNA, 19 nt, Artificial Sequence
  Description of Artificial Sequence: Synthetic oligonucleotide
  Sense strand starting at position 2346 of SEQ ID NO: 1884718
gggaguuucuucucuuagg

SEQ ID NO: 2286741 - RNA, 19 nt, Artificial Sequence
  Description of Artificial Sequence: Synthetic oligonucleotide
  Antisense strand to SEQ ID NO: 2286740
ccuaagagaagaaacuccc

SEQ ID NO: 2286742 - RNA, 19 nt, Artificial Sequence
  Description of Artificial Sequence: Synthetic oligonucleotide
  Sense strand starting at position 2355 of SEQ ID NO: 1884718
uucucuuagggagguaaga

SEQ ID NO: 2286743 - RNA, 19 nt, Artificial Sequence
  Description of Artificial Sequence: Synthetic oligonucleotide
  Antisense strand to SEQ ID NO: 2286742
ucuuaccucccuaagagaa

SEQ ID NO: 2286744 - RNA, 19 nt, Artificial Sequence
  Description of Artificial Sequence: Synthetic oligonucleotide
  Sense strand starting at position 2519 of SEQ ID NO: 1884718
cggagucauuuccuucuuu

SEQ ID NO: 2286745 - RNA, 19 nt, Artificial Sequence
  Description of Artificial Sequence: Synthetic oligonucleotide
  Antisense strand to SEQ ID NO: 2286744
aaagaaggaaaugacuccg

SEQ ID NO: 2286746 - RNA, 19 nt, Artificial Sequence
  Description of Artificial Sequence: Synthetic oligonucleotide
  Sense strand starting at position 2868 of SEQ ID NO: 1884718
agguguugugcgccaccau

SEQ ID NO: 2286747 - RNA, 19 nt, Artificial Sequence
  Description of Artificial Sequence: Synthetic oligonucleotide
  Antisense strand to SEQ ID NO: 2286746
augguggcgcacaacaccu

SEQ ID NO: 2286748 - RNA, 19 nt, Artificial Sequence
  Description of Artificial Sequence: Synthetic oligonucleotide
  Sense strand starting at position 3141 of SEQ ID NO: 1884718
cuuggauaauuguccacau

SEQ ID NO: 2286749 - RNA, 19 nt, Artificial Sequence
  Description of Artificial Sequence: Synthetic oligonucleotide
  Antisense strand to SEQ ID NO: 2286748
auguggacaauuauccaag

SEQ ID NO: 2286750 - RNA, 19 nt, Artificial Sequence
  Description of Artificial Sequence: Synthetic oligonucleotide
  Sense strand starting at position 3142 of SEQ ID NO: 1884718
uuggauaauuguccacauu

SEQ ID NO: 2286751 - RNA, 19 nt, Artificial Sequence
  Description of Artificial Sequence: Synthetic oligonucleotide
  Antisense strand to SEQ ID NO: 2286750
aauguggacaauuauccaa

SEQ ID NO: 2286752 - RNA, 19 nt, Artificial Sequence
  Description of Artificial Sequence: Synthetic oligonucleotide
  Sense strand starting at position 3306 of SEQ ID NO: 1884718
ggguuagacguguguauuu

SEQ ID NO: 2286753 - RNA, 19 nt, Artificial Sequence
  Description of Artificial Sequence: Synthetic oligonucleotide
  Antisense strand to SEQ ID NO: 2286752
aaauacacacgucuaaccc

SEQ ID NO: 2286754 - RNA, 19 nt, Artificial Sequence
  Description of Artificial Sequence: Synthetic oligonucleotide
  Sense strand starting at position 3308 of SEQ ID NO: 1884718
guuagacguguguauuugu

SEQ ID NO: 2286755 - RNA, 19 nt, Artificial Sequence
  Description of Artificial Sequence: Synthetic oligonucleotide
  Antisense strand to SEQ ID NO: 2286754
acaaauacacacgucuaac

SEQ ID NO: 2286756 - RNA, 19 nt, Artificial Sequence
  Description of Artificial Sequence: Synthetic oligonucleotide
  Sense strand starting at position 3321 of SEQ ID NO: 1884718
auuuguccuucuguugaua

SEQ ID NO: 2286757 - RNA, 19 nt, Artificial Sequence
  Description of Artificial Sequence: Synthetic oligonucleotide
  Antisense strand to SEQ ID NO: 2286756
uaucaacagaaggacaaau

SEQ ID NO: 2286758 - RNA, 19 nt, Artificial Sequence
  Description of Artificial Sequence: Synthetic oligonucleotide
  Sense strand starting at position 3421 of SEQ ID NO: 1884718
agccuauggacaugaagua

SEQ ID NO: 2286759 - RNA, 19 nt, Artificial Sequence
  Description of Artificial Sequence: Synthetic oligonucleotide
  Antisense strand to SEQ ID NO: 2286758
uacuucauguccauaggcu

SEQ ID NO: 2286760 - RNA, 19 nt, Artificial Sequence
  Description of Artificial Sequence: Synthetic oligonucleotide
  Sense strand starting at position 3437 of SEQ ID NO: 1884718
guaguuucgggcagaguug

SEQ ID NO: 2286761 - RNA, 19 nt, Artificial Sequence
  Description of Artificial Sequence: Synthetic oligonucleotide
  Antisense strand to SEQ ID NO: 2286760
caacucugcccgaaacuac

SEQ ID NO: 2286762 - RNA, 19 nt, Artificial Sequence
  Description of Artificial Sequence: Synthetic oligonucleotide
  Sense strand starting at position 3515 of SEQ ID NO: 1884718
gaacacaaguguuugaaag

SEQ ID NO: 2286763 - RNA, 19 nt, Artificial Sequence
  Description of Artificial Sequence: Synthetic oligonucleotide
  Antisense strand to SEQ ID NO: 2286762
cuuucaaacacuuguguuc

SEQ ID NO: 2286764 - RNA, 19 nt, Artificial Sequence
  Description of Artificial Sequence: Synthetic oligonucleotide
  Sense strand starting at position 3536 of SEQ ID NO: 1884718
ccagguucaugguuuggga

SEQ ID NO: 2286765 - RNA, 19 nt, Artificial Sequence
  Description of Artificial Sequence: Synthetic oligonucleotide
  Antisense strand to SEQ ID NO: 2286764
ucccaaaccaugaaccugg

SEQ ID NO: 2286766 - RNA, 19 nt, Artificial Sequence
  Description of Artificial Sequence: Synthetic oligonucleotide
  Sense strand starting at position 3538 of SEQ ID NO: 1884718
agguucaugguuugggaua

SEQ ID NO: 2286767 - RNA, 19 nt, Artificial Sequence
  Description of Artificial Sequence: Synthetic oligonucleotide
  Antisense strand to SEQ ID NO: 2286766
uaucccaaaccaugaaccu

SEQ ID NO: 2286768 - RNA, 19 nt, Artificial Sequence
  Description of Artificial Sequence: Synthetic oligonucleotide
  Sense strand starting at position 3598 of SEQ ID NO: 1884718
aauaccggaucuguguaau

SEQ ID NO: 2286769 - RNA, 19 nt, Artificial Sequence
  Description of Artificial Sequence: Synthetic oligonucleotide
  Antisense strand to SEQ ID NO: 2286768
auuacacagauccgguauu

SEQ ID NO: 2286770 - RNA, 19 nt, Artificial Sequence
  Description of Artificial Sequence: Synthetic oligonucleotide
  Sense strand starting at position 3601 of SEQ ID NO: 1884718
accggaucuguguaaugga

SEQ ID NO: 2286771 - RNA, 19 nt, Artificial Sequence
  Description of Artificial Sequence: Synthetic oligonucleotide
  Antisense strand to SEQ ID NO: 2286770
uccauuacacagauccggu

SEQ ID NO: 2286772 - RNA, 19 nt, Artificial Sequence
  Description of Artificial Sequence: Synthetic oligonucleotide
  Sense strand starting at position 3615 of SEQ ID NO: 1884718
auggauuauuggccaaauc

SEQ ID NO: 2286773 - RNA, 19 nt, Artificial Sequence
  Description of Artificial Sequence: Synthetic oligonucleotide
  Antisense strand to SEQ ID NO: 2286772
gauuuggccaauaauccau

SEQ ID NO: 2286774 - RNA, 19 nt, Artificial Sequence
  Description of Artificial Sequence: Synthetic oligonucleotide
  Sense strand starting at position 3616 of SEQ ID NO: 1884718
uggauuauuggccaaaucu

SEQ ID NO: 2286775 - RNA, 19 nt, Artificial Sequence
  Description of Artificial Sequence: Synthetic oligonucleotide
  Antisense strand to SEQ ID NO: 2286774
agauuuggccaauaaucca

SEQ ID NO: 2286776 - RNA, 19 nt, Artificial Sequence
  Description of Artificial Sequence: Synthetic oligonucleotide
  Sense strand starting at position 3625 of SEQ ID NO: 1884718
ggccaaaucucagcugaug

SEQ ID NO: 2286777 - RNA, 19 nt, Artificial Sequence
  Description of Artificial Sequence: Synthetic oligonucleotide
  Antisense strand to SEQ ID NO: 2286776
caucagcugagauuuggcc

SEQ ID NO: 2286778 - RNA, 19 nt, Artificial Sequence
  Description of Artificial Sequence: Synthetic oligonucleotide
  Sense strand starting at position 3666 of SEQ ID NO: 1884718
gucucugagcagcagagau

SEQ ID NO: 2286779 - RNA, 19 nt, Artificial Sequence
  Description of Artificial Sequence: Synthetic oligonucleotide
  Antisense strand to SEQ ID NO: 2286778
aucucugcugcucagagac

SEQ ID NO: 2286780 - RNA, 19 nt, Artificial Sequence
  Description of Artificial Sequence: Synthetic oligonucleotide
  Sense strand starting at position 398 of SEQ ID NO: 1884719
uuguucuacagauggagga

SEQ ID NO: 2286781 - RNA, 19 nt, Artificial Sequence
  Description of Artificial Sequence: Synthetic oligonucleotide
  Antisense strand to SEQ ID NO: 2286780
uccuccaucuguagaacaa

SEQ ID NO: 2286782 - RNA, 19 nt, Artificial Sequence
  Description of Artificial Sequence: Synthetic oligonucleotide
  Sense strand starting at position 749 of SEQ ID NO: 1884719
ugaguacgauucuugaaag

SEQ ID NO: 2286783 - RNA, 19 nt, Artificial Sequence
  Description of Artificial Sequence: Synthetic oligonucleotide
  Antisense strand to SEQ ID NO: 2286782
cuuucaagaaucguacuca

SEQ ID NO: 2286784 - RNA, 19 nt, Artificial Sequence
  Description of Artificial Sequence: Synthetic oligonucleotide
  Sense strand starting at position 770 of SEQ ID NO: 1884719
gguauaaacucugucuuug

SEQ ID NO: 2286785 - RNA, 19 nt, Artificial Sequence
  Description of Artificial Sequence: Synthetic oligonucleotide
  Antisense strand to SEQ ID NO: 2286784
caaagacagaguuuauacc

SEQ ID NO: 2286786 - RNA, 19 nt, Artificial Sequence
  Description of Artificial Sequence: Synthetic oligonucleotide
  Sense strand starting at position 806 of SEQ ID NO: 1884719
gucagacugcuccauggau

SEQ ID NO: 2286787 - RNA, 19 nt, Artificial Sequence
  Description of Artificial Sequence: Synthetic oligonucleotide
  Antisense strand to SEQ ID NO: 2286786
auccauggagcagucugac

SEQ ID NO: 2286788 - RNA, 19 nt, Artificial Sequence
  Description of Artificial Sequence: Synthetic oligonucleotide
  Sense strand starting at position 842 of SEQ ID NO: 1884719
gguaaauugcaagguugag

SEQ ID NO: 2286789 - RNA, 19 nt, Artificial Sequence
  Description of Artificial Sequence: Synthetic oligonucleotide
  Antisense strand to SEQ ID NO: 2286788
cucaaccuugcaauuuacc

SEQ ID NO: 2286790 - RNA, 19 nt, Artificial Sequence
  Description of Artificial Sequence: Synthetic oligonucleotide
  Sense strand starting at position 1002 of SEQ ID NO: 1884719
uccucaggugugcaaagau

SEQ ID NO: 2286791 - RNA, 19 nt, Artificial Sequence
  Description of Artificial Sequence: Synthetic oligonucleotide
  Antisense strand to SEQ ID NO: 2286790
aucuuugcacaccugagga

SEQ ID NO: 2286792 - RNA, 19 nt, Artificial Sequence
  Description of Artificial Sequence: Synthetic oligonucleotide
  Sense strand starting at position 1097 of SEQ ID NO: 1884719
gggaaagcugagcaaagua

SEQ ID NO: 2286793 - RNA, 19 nt, Artificial Sequence
  Description of Artificial Sequence: Synthetic oligonucleotide
  Antisense strand to SEQ ID NO: 2286792
uacuuugcucagcuuuccc

SEQ ID NO: 2286794 - RNA, 19 nt, Artificial Sequence
  Description of Artificial Sequence: Synthetic oligonucleotide
  Sense strand starting at position 1112 of SEQ ID NO: 1884719
aguagagcuguugagaguu

SEQ ID NO: 2286795 - RNA, 19 nt, Artificial Sequence
  Description of Artificial Sequence: Synthetic oligonucleotide
  Antisense strand to SEQ ID NO: 2286794
aacucucaacagcucuacu

SEQ ID NO: 2286796 - RNA, 19 nt, Artificial Sequence
  Description of Artificial Sequence: Synthetic oligonucleotide
  Sense strand starting at position 1417 of SEQ ID NO: 1884719
agagcuaugcccgaacaca

SEQ ID NO: 2286797 - RNA, 19 nt, Artificial Sequence
  Description of Artificial Sequence: Synthetic oligonucleotide
  Antisense strand to SEQ ID NO: 2286796
uguguucgggcauagcucu

SEQ ID NO: 2286798 - RNA, 19 nt, Artificial Sequence
  Description of Artificial Sequence: Synthetic oligonucleotide
  Sense strand starting at position 1571 of SEQ ID NO: 1884719
ucaaauugccaauagguca

SEQ ID NO: 2286799 - RNA, 19 nt, Artificial Sequence
  Description of Artificial Sequence: Synthetic oligonucleotide
  Antisense strand to SEQ ID NO: 2286798
ugaccuauuggcaauuuga

SEQ ID NO: 2286800 - RNA, 19 nt, Artificial Sequence
  Description of Artificial Sequence: Synthetic oligonucleotide
  Sense strand starting at position 1579 of SEQ ID NO: 1884719
ccaauaggucagcaccuau

SEQ ID NO: 2286801 - RNA, 19 nt, Artificial Sequence
  Description of Artificial Sequence: Synthetic oligonucleotide
  Antisense strand to SEQ ID NO: 2286800
auaggugcugaccuauugg

SEQ ID NO: 2286802 - RNA, 19 nt, Artificial Sequence
  Description of Artificial Sequence: Synthetic oligonucleotide
  Sense strand starting at position 1592 of SEQ ID NO: 1884719
accuaugugguuuagaaca

SEQ ID NO: 2286803 - RNA, 19 nt, Artificial Sequence
  Description of Artificial Sequence: Synthetic oligonucleotide
  Antisense strand to SEQ ID NO: 2286802
uguucuaaaccacauaggu

SEQ ID NO: 2286804 - RNA, 19 nt, Artificial Sequence
  Description of Artificial Sequence: Synthetic oligonucleotide
  Sense strand starting at position 1706 of SEQ ID NO: 1884719
ugaggaugcucccugaauu

SEQ ID NO: 2286805 - RNA, 19 nt, Artificial Sequence
  Description of Artificial Sequence: Synthetic oligonucleotide
  Antisense strand to SEQ ID NO: 2286804
aauucagggagcauccuca

SEQ ID NO: 2286806 - RNA, 19 nt, Artificial Sequence
  Description of Artificial Sequence: Synthetic oligonucleotide
  Sense strand starting at position 1716 of SEQ ID NO: 1884719
cccugaauuucugcgugag

SEQ ID NO: 2286807 - RNA, 19 nt, Artificial Sequence
  Description of Artificial Sequence: Synthetic oligonucleotide
  Antisense strand to SEQ ID NO: 2286806
cucacgcagaaauucaggg

SEQ ID NO: 2286808 - RNA, 19 nt, Artificial Sequence
  Description of Artificial Sequence: Synthetic oligonucleotide
  Sense strand starting at position 1717 of SEQ ID NO: 1884719
ccugaauuucugcgugaga

SEQ ID NO: 2286809 - RNA, 19 nt, Artificial Sequence
  Description of Artificial Sequence: Synthetic oligonucleotide
  Antisense strand to SEQ ID NO: 2286808
ucucacgcagaaauucagg

SEQ ID NO: 2286810 - RNA, 19 nt, Artificial Sequence
  Description of Artificial Sequence: Synthetic oligonucleotide
  Sense strand starting at position 1719 of SEQ ID NO: 1884719
ugaauuucugcgugagagc

SEQ ID NO: 2286811 - RNA, 19 nt, Artificial Sequence
  Description of Artificial Sequence: Synthetic oligonucleotide
  Antisense strand to SEQ ID NO: 2286810
gcucucacgcagaaauuca

SEQ ID NO: 2286812 - RNA, 19 nt, Artificial Sequence
  Description of Artificial Sequence: Synthetic oligonucleotide
  Sense strand starting at position 1720 of SEQ ID NO: 1884719
gaauuucugcgugagagcu

SEQ ID NO: 2286813 - RNA, 19 nt, Artificial Sequence
  Description of Artificial Sequence: Synthetic oligonucleotide
  Antisense strand to SEQ ID NO: 2286812
agcucucacgcagaaauuc

SEQ ID NO: 2286814 - RNA, 19 nt, Artificial Sequence
  Description of Artificial Sequence: Synthetic oligonucleotide
  Sense strand starting at position 1800 of SEQ ID NO: 1884719
gugcgaucccaggauacuu

SEQ ID NO: 2286815 - RNA, 19 nt, Artificial Sequence
  Description of Artificial Sequence: Synthetic oligonucleotide
  Antisense strand to SEQ ID NO: 2286814
aaguauccugggaucgcac

SEQ ID NO: 2286816 - RNA, 19 nt, Artificial Sequence
  Description of Artificial Sequence: Synthetic oligonucleotide
  Sense strand starting at position 1819 of SEQ ID NO: 1884719
ggaagucggcaugaucagu

SEQ ID NO: 2286817 - RNA, 19 nt, Artificial Sequence
  Description of Artificial Sequence: Synthetic oligonucleotide
  Antisense strand to SEQ ID NO: 2286816
acugaucaugccgacuucc

SEQ ID NO: 2286818 - RNA, 19 nt, Artificial Sequence
  Description of Artificial Sequence: Synthetic oligonucleotide
  Sense strand starting at position 1832 of SEQ ID NO: 1884719
aucagucaucucugaggac

SEQ ID NO: 2286819 - RNA, 19 nt, Artificial Sequence
  Description of Artificial Sequence: Synthetic oligonucleotide
  Antisense strand to SEQ ID NO: 2286818
guccucagagaugacugau

SEQ ID NO: 2286820 - RNA, 19 nt, Artificial Sequence
  Description of Artificial Sequence: Synthetic oligonucleotide
  Sense strand starting at position 1885 of SEQ ID NO: 1884719
ggcucaucucaggaaacuc

SEQ ID NO: 2286821 - RNA, 19 nt, Artificial Sequence
  Description of Artificial Sequence: Synthetic oligonucleotide
  Antisense strand to SEQ ID NO: 2286820
gaguuuccugagaugagcc

SEQ ID NO: 2286822 - RNA, 19 nt, Artificial Sequence
  Description of Artificial Sequence: Synthetic oligonucleotide
  Sense strand starting at position 1956 of SEQ ID NO: 1884719
accugucauggcugagaca

SEQ ID NO: 2286823 - RNA, 19 nt, Artificial Sequence
  Description of Artificial Sequence: Synthetic oligonucleotide
  Antisense strand to SEQ ID NO: 2286822
ugucucagccaugacaggu

SEQ ID NO: 2286824 - RNA, 19 nt, Artificial Sequence
  Description of Artificial Sequence: Synthetic oligonucleotide
  Sense strand starting at position 1957 of SEQ ID NO: 1884719
ccugucauggcugagacau

SEQ ID NO: 2286825 - RNA, 19 nt, Artificial Sequence
  Description of Artificial Sequence: Synthetic oligonucleotide
  Antisense strand to SEQ ID NO: 2286824
augucucagccaugacagg

SEQ ID NO: 2286826 - RNA, 19 nt, Artificial Sequence
  Description of Artificial Sequence: Synthetic oligonucleotide
  Sense strand starting at position 2180 of SEQ ID NO: 1884719
ggcuuacccgaagaacuuu

SEQ ID NO: 2286827 - RNA, 19 nt, Artificial Sequence
  Description of Artificial Sequence: Synthetic oligonucleotide
  Antisense strand to SEQ ID NO: 2286826
aaaguucuucggguaagcc

SEQ ID NO: 2286828 - RNA, 19 nt, Artificial Sequence
  Description of Artificial Sequence: Synthetic oligonucleotide
  Sense strand starting at position 2561 of SEQ ID NO: 1884719
ccgagcuuucuguuccuuu

SEQ ID NO: 2286829 - RNA, 19 nt, Artificial Sequence
  Description of Artificial Sequence: Synthetic oligonucleotide
  Antisense strand to SEQ ID NO: 2286828
aaaggaacagaaagcucgg

SEQ ID NO: 2286830 - RNA, 19 nt, Artificial Sequence
  Description of Artificial Sequence: Synthetic oligonucleotide
  Sense strand starting at position 3025 of SEQ ID NO: 1884719
gugagaaaggugggaacuu

SEQ ID NO: 2286831 - RNA, 19 nt, Artificial Sequence
  Description of Artificial Sequence: Synthetic oligonucleotide
  Antisense strand to SEQ ID NO: 2286830
aaguucccaccuuucucac

SEQ ID NO: 2286832 - RNA, 19 nt, Artificial Sequence
  Description of Artificial Sequence: Synthetic oligonucleotide
  Sense strand starting at position 3232 of SEQ ID NO: 1884719
gggcaaucucugcaugaug

SEQ ID NO: 2286833 - RNA, 19 nt, Artificial Sequence
  Description of Artificial Sequence: Synthetic oligonucleotide
  Antisense strand to SEQ ID NO: 2286832
caucaugcagagauugccc

SEQ ID NO: 2286834 - RNA, 19 nt, Artificial Sequence
  Description of Artificial Sequence: Synthetic oligonucleotide
  Sense strand starting at position 3234 of SEQ ID NO: 1884719
gcaaucucugcaugaugac

SEQ ID NO: 2286835 - RNA, 19 nt, Artificial Sequence
  Description of Artificial Sequence: Synthetic oligonucleotide
  Antisense strand to SEQ ID NO: 2286834
gucaucaugcagagauugc

SEQ ID NO: 2286836 - RNA, 19 nt, Artificial Sequence
  Description of Artificial Sequence: Synthetic oligonucleotide
  Sense strand starting at position 3261 of SEQ ID NO: 1884719
gguuauauccaacaaggcu

SEQ ID NO: 2286837 - RNA, 19 nt, Artificial Sequence
  Description of Artificial Sequence: Synthetic oligonucleotide
  Antisense strand to SEQ ID NO: 2286836
agccuuguuggauauaacc

SEQ ID NO: 2286838 - RNA, 19 nt, Artificial Sequence
  Description of Artificial Sequence: Synthetic oligonucleotide
  Sense strand starting at position 3322 of SEQ ID NO: 1884719
uaaugacuguuaccgaaau

SEQ ID NO: 2286839 - RNA, 19 nt, Artificial Sequence
  Description of Artificial Sequence: Synthetic oligonucleotide
  Antisense strand to SEQ ID NO: 2286838
auuucgguaacagucauua

SEQ ID NO: 2286840 - RNA, 19 nt, Artificial Sequence
  Description of Artificial Sequence: Synthetic oligonucleotide
  Sense strand starting at position 3335 of SEQ ID NO: 1884719
cgaaaugaguuccugaaac

SEQ ID NO: 2286841 - RNA, 19 nt, Artificial Sequence
  Description of Artificial Sequence: Synthetic oligonucleotide
  Antisense strand to SEQ ID NO: 2286840
guuucaggaacucauuucg

SEQ ID NO: 2286842 - RNA, 19 nt, Artificial Sequence
  Description of Artificial Sequence: Synthetic oligonucleotide
  Sense strand starting at position 3407 of SEQ ID NO: 1884719
cuagaucuguuccuuacuu

SEQ ID NO: 2286843 - RNA, 19 nt, Artificial Sequence
  Description of Artificial Sequence: Synthetic oligonucleotide
  Antisense strand to SEQ ID NO: 2286842
aaguaaggaacagaucuag

SEQ ID NO: 2286844 - RNA, 19 nt, Artificial Sequence
  Description of Artificial Sequence: Synthetic oligonucleotide
  Sense strand starting at position 3463 of SEQ ID NO: 1884719
gggacaauuucucaggguu

SEQ ID NO: 2286845 - RNA, 19 nt, Artificial Sequence
  Description of Artificial Sequence: Synthetic oligonucleotide
  Antisense strand to SEQ ID NO: 2286844
aacccugagaaauuguccc

SEQ ID NO: 2286846 - RNA, 19 nt, Artificial Sequence
  Description of Artificial Sequence: Synthetic oligonucleotide
  Sense strand starting at position 3476 of SEQ ID NO: 1884719
aggguuguuccauggauua

SEQ ID NO: 2286847 - RNA, 19 nt, Artificial Sequence
  Description of Artificial Sequence: Synthetic oligonucleotide
  Antisense strand to SEQ ID NO: 2286846
uaauccauggaacaacccu

SEQ ID NO: 2286848 - RNA, 19 nt, Artificial Sequence
  Description of Artificial Sequence: Synthetic oligonucleotide
  Sense strand starting at position 3478 of SEQ ID NO: 1884719
gguuguuccauggauuaua

SEQ ID NO: 2286849 - RNA, 19 nt, Artificial Sequence
  Description of Artificial Sequence: Synthetic oligonucleotide
  Antisense strand to SEQ ID NO: 2286848
uauaauccauggaacaacc

SEQ ID NO: 2286850 - RNA, 19 nt, Artificial Sequence
  Description of Artificial Sequence: Synthetic oligonucleotide
  Sense strand starting at position 3588 of SEQ ID NO: 1884719
ggauuaaugucuuccucug

SEQ ID NO: 2286851 - RNA, 19 nt, Artificial Sequence
  Description of Artificial Sequence: Synthetic oligonucleotide
  Antisense strand to SEQ ID NO: 2286850
cagaggaagacauuaaucc

SEQ ID NO: 2286852 - RNA, 19 nt, Artificial Sequence
  Description of Artificial Sequence: Synthetic oligonucleotide
  Sense strand starting at position 3631 of SEQ ID NO: 1884719
aaagaagauucucugaguu

SEQ ID NO: 2286853 - RNA, 19 nt, Artificial Sequence
  Description of Artificial Sequence: Synthetic oligonucleotide
  Antisense strand to SEQ ID NO: 2286852
aacucagagaaucuucuuu

SEQ ID NO: 2286854 - RNA, 19 nt, Artificial Sequence
  Description of Artificial Sequence: Synthetic oligonucleotide
  Sense strand starting at position 3635 of SEQ ID NO: 1884719
aagauucucugaguugauc

SEQ ID NO: 2286855 - RNA, 19 nt, Artificial Sequence
  Description of Artificial Sequence: Synthetic oligonucleotide
  Antisense strand to SEQ ID NO: 2286854
gaucaacucagagaaucuu

SEQ ID NO: 2286856 - RNA, 19 nt, Artificial Sequence
  Description of Artificial Sequence: Synthetic oligonucleotide
  Sense strand starting at position 3641 of SEQ ID NO: 1884719
cucugaguugaucaggcaa

SEQ ID NO: 2286857 - RNA, 19 nt, Artificial Sequence
  Description of Artificial Sequence: Synthetic oligonucleotide
  Antisense strand to SEQ ID NO: 2286856
uugccugaucaacucagag

SEQ ID NO: 2286858 - RNA, 19 nt, Artificial Sequence
  Description of Artificial Sequence: Synthetic oligonucleotide
  Sense strand starting at position 3943 of SEQ ID NO: 1884719
guaacaguuguaggcagaa

SEQ ID NO: 2286859 - RNA, 19 nt, Artificial Sequence
  Description of Artificial Sequence: Synthetic oligonucleotide
  Antisense strand to SEQ ID NO: 2286858
uucugccuacaacuguuac

SEQ ID NO: 2286860 - RNA, 19 nt, Artificial Sequence
  Description of Artificial Sequence: Synthetic oligonucleotide
  Sense strand starting at position 37 of SEQ ID NO: 1884720
ugcaaauaugagcauguga

SEQ ID NO: 2286861 - RNA, 19 nt, Artificial Sequence
  Description of Artificial Sequence: Synthetic oligonucleotide
  Antisense strand to SEQ ID NO: 2286860
ucacaugcucauauuugca

SEQ ID NO: 2286862 - RNA, 19 nt, Artificial Sequence
  Description of Artificial Sequence: Synthetic oligonucleotide
  Sense strand starting at position 328 of SEQ ID NO: 1884720
aucacuucuccaggaagcu

SEQ ID NO: 2286863 - RNA, 19 nt, Artificial Sequence
  Description of Artificial Sequence: Synthetic oligonucleotide
  Antisense strand to SEQ ID NO: 2286862
agcuuccuggagaagugau

SEQ ID NO: 2286864 - RNA, 19 nt, Artificial Sequence
  Description of Artificial Sequence: Synthetic oligonucleotide
  Sense strand starting at position 329 of SEQ ID NO: 1884720
ucacuucuccaggaagcuu

SEQ ID NO: 2286865 - RNA, 19 nt, Artificial Sequence
  Description of Artificial Sequence: Synthetic oligonucleotide
  Antisense strand to SEQ ID NO: 2286864
aagcuuccuggagaaguga

SEQ ID NO: 2286866 - RNA, 19 nt, Artificial Sequence
  Description of Artificial Sequence: Synthetic oligonucleotide
  Sense strand starting at position 337 of SEQ ID NO: 1884720
ccaggaagcuuccuucuau

SEQ ID NO: 2286867 - RNA, 19 nt, Artificial Sequence
  Description of Artificial Sequence: Synthetic oligonucleotide
  Antisense strand to SEQ ID NO: 2286866
auagaaggaagcuuccugg

SEQ ID NO: 2286868 - RNA, 19 nt, Artificial Sequence
  Description of Artificial Sequence: Synthetic oligonucleotide
  Sense strand starting at position 376 of SEQ ID NO: 1884720
ccuauauugugcucauuua

SEQ ID NO: 2286869 - RNA, 19 nt, Artificial Sequence
  Description of Artificial Sequence: Synthetic oligonucleotide
  Antisense strand to SEQ ID NO: 2286868
uaaaugagcacaauauagg

SEQ ID NO: 2286870 - RNA, 19 nt, Artificial Sequence
  Description of Artificial Sequence: Synthetic oligonucleotide
  Sense strand starting at position 651 of SEQ ID NO: 1884720
uuuauaauccaguagggua

SEQ ID NO: 2286871 - RNA, 19 nt, Artificial Sequence
  Description of Artificial Sequence: Synthetic oligonucleotide
  Antisense strand to SEQ ID NO: 2286870
uacccuacuggauuauaaa

SEQ ID NO: 2286872 - RNA, 19 nt, Artificial Sequence
  Description of Artificial Sequence: Synthetic oligonucleotide
  Sense strand starting at position 753 of SEQ ID NO: 1884720
gguuguacccaaugaggau

SEQ ID NO: 2286873 - RNA, 19 nt, Artificial Sequence
  Description of Artificial Sequence: Synthetic oligonucleotide
  Antisense strand to SEQ ID NO: 2286872
auccucauuggguacaacc

SEQ ID NO: 2286874 - RNA, 19 nt, Artificial Sequence
  Description of Artificial Sequence: Synthetic oligonucleotide
  Sense strand starting at position 776 of SEQ ID NO: 1884720
gccugaaaugcugacucca

SEQ ID NO: 2286875 - RNA, 19 nt, Artificial Sequence
  Description of Artificial Sequence: Synthetic oligonucleotide
  Antisense strand to SEQ ID NO: 2286874
uggagucagcauuucaggc

SEQ ID NO: 2286876 - RNA, 19 nt, Artificial Sequence
  Description of Artificial Sequence: Synthetic oligonucleotide
  Sense strand starting at position 794 of SEQ ID NO: 1884720
aggacaguauuggcuuaaa

SEQ ID NO: 2286877 - RNA, 19 nt, Artificial Sequence
  Description of Artificial Sequence: Synthetic oligonucleotide
  Antisense strand to SEQ ID NO: 2286876
uuuaagccaauacuguccu

SEQ ID NO: 2286878 - RNA, 19 nt, Artificial Sequence
  Description of Artificial Sequence: Synthetic oligonucleotide
  Sense strand starting at position 797 of SEQ ID NO: 1884720
acaguauuggcuuaaaugu

SEQ ID NO: 2286879 - RNA, 19 nt, Artificial Sequence
  Description of Artificial Sequence: Synthetic oligonucleotide
  Antisense strand to SEQ ID NO: 2286878
acauuuaagccaauacugu

SEQ ID NO: 2286880 - RNA, 19 nt, Artificial Sequence
  Description of Artificial Sequence: Synthetic oligonucleotide
  Sense strand starting at position 1382 of SEQ ID NO: 1884720
gagagaauuccagggcaug

SEQ ID NO: 2286881 - RNA, 19 nt, Artificial Sequence
  Description of Artificial Sequence: Synthetic oligonucleotide
  Antisense strand to SEQ ID NO: 2286880
caugcccuggaauucucuc

SEQ ID NO: 2286882 - RNA, 19 nt, Artificial Sequence
  Description of Artificial Sequence: Synthetic oligonucleotide
  Sense strand starting at position 1427 of SEQ ID NO: 1884720
caaggaagcuuggcuuuaa

SEQ ID NO: 2286883 - RNA, 19 nt, Artificial Sequence
  Description of Artificial Sequence: Synthetic oligonucleotide
  Antisense strand to SEQ ID NO: 2286882
uuaaagccaagcuuccuug

SEQ ID NO: 2286884 - RNA, 19 nt, Artificial Sequence
  Description of Artificial Sequence: Synthetic oligonucleotide
  Sense strand starting at position 1428 of SEQ ID NO: 1884720
aaggaagcuuggcuuuaaa

SEQ ID NO: 2286885 - RNA, 19 nt, Artificial Sequence
  Description of Artificial Sequence: Synthetic oligonucleotide
  Antisense strand to SEQ ID NO: 2286884
uuuaaagccaagcuuccuu

SEQ ID NO: 2286886 - RNA, 19 nt, Artificial Sequence
  Description of Artificial Sequence: Synthetic oligonucleotide
  Sense strand starting at position 1601 of SEQ ID NO: 1884720
uuuguugagcaccacauau

SEQ ID NO: 2286887 - RNA, 19 nt, Artificial Sequence
  Description of Artificial Sequence: Synthetic oligonucleotide
  Antisense strand to SEQ ID NO: 2286886
auauguggugcucaacaaa

SEQ ID NO: 2286888 - RNA, 19 nt, Artificial Sequence
  Description of Artificial Sequence: Synthetic oligonucleotide
  Sense strand starting at position 1621 of SEQ ID NO: 1884720
ugcaaagcacuugauagau

SEQ ID NO: 2286889 - RNA, 19 nt, Artificial Sequence
  Description of Artificial Sequence: Synthetic oligonucleotide
  Antisense strand to SEQ ID NO: 2286888
aucuaucaagugcuuugca

SEQ ID NO: 2286890 - RNA, 19 nt, Artificial Sequence
  Description of Artificial Sequence: Synthetic oligonucleotide
  Sense strand starting at position 1828 of SEQ ID NO: 1884720
ggcacagagacguaaccuu

SEQ ID NO: 2286891 - RNA, 19 nt, Artificial Sequence
  Description of Artificial Sequence: Synthetic oligonucleotide
  Antisense strand to SEQ ID NO: 2286890
aagguuacgucucugugcc

SEQ ID NO: 2286892 - RNA, 19 nt, Artificial Sequence
  Description of Artificial Sequence: Synthetic oligonucleotide
  Sense strand starting at position 1882 of SEQ ID NO: 1884720
gggucuacuaggcaauguu

SEQ ID NO: 2286893 - RNA, 19 nt, Artificial Sequence
  Description of Artificial Sequence: Synthetic oligonucleotide
  Antisense strand to SEQ ID NO: 2286892
aacauugccuaguagaccc

SEQ ID NO: 2286894 - RNA, 19 nt, Artificial Sequence
  Description of Artificial Sequence: Synthetic oligonucleotide
  Sense strand starting at position 1913 of SEQ ID NO: 1884720
ucaggccagcauugauuaa

SEQ ID NO: 2286895 - RNA, 19 nt, Artificial Sequence
  Description of Artificial Sequence: Synthetic oligonucleotide
  Antisense strand to SEQ ID NO: 2286894
uuaaucaaugcuggccuga

SEQ ID NO: 2286896 - RNA, 19 nt, Artificial Sequence
  Description of Artificial Sequence: Synthetic oligonucleotide
  Sense strand starting at position 1917 of SEQ ID NO: 1884720
gccagcauugauuaaagcu

SEQ ID NO: 2286897 - RNA, 19 nt, Artificial Sequence
  Description of Artificial Sequence: Synthetic oligonucleotide
  Antisense strand to SEQ ID NO: 2286896
agcuuuaaucaaugcuggc

SEQ ID NO: 2286898 - RNA, 19 nt, Artificial Sequence
  Description of Artificial Sequence: Synthetic oligonucleotide
  Sense strand starting at position 2267 of SEQ ID NO: 1884720
cugacagagcuguauugga

SEQ ID NO: 2286899 - RNA, 19 nt, Artificial Sequence
  Description of Artificial Sequence: Synthetic oligonucleotide
  Antisense strand to SEQ ID NO: 2286898
uccaauacagcucugucag

SEQ ID NO: 2286900 - RNA, 19 nt, Artificial Sequence
  Description of Artificial Sequence: Synthetic oligonucleotide
  Sense strand starting at position 2271 of SEQ ID NO: 1884720
cagagcuguauuggagaga

SEQ ID NO: 2286901 - RNA, 19 nt, Artificial Sequence
  Description of Artificial Sequence: Synthetic oligonucleotide
  Antisense strand to SEQ ID NO: 2286900
ucucuccaauacagcucug

SEQ ID NO: 2286902 - RNA, 19 nt, Artificial Sequence
  Description of Artificial Sequence: Synthetic oligonucleotide
  Sense strand starting at position 2276 of SEQ ID NO: 1884720
cuguauuggagagaccgau

SEQ ID NO: 2286903 - RNA, 19 nt, Artificial Sequence
  Description of Artificial Sequence: Synthetic oligonucleotide
  Antisense strand to SEQ ID NO: 2286902
aucggucucuccaauacag

SEQ ID NO: 2286904 - RNA, 19 nt, Artificial Sequence
  Description of Artificial Sequence: Synthetic oligonucleotide
  Sense strand starting at position 2399 of SEQ ID NO: 1884720
gggugaugauggaagaucu

SEQ ID NO: 2286905 - RNA, 19 nt, Artificial Sequence
  Description of Artificial Sequence: Synthetic oligonucleotide
  Antisense strand to SEQ ID NO: 2286904
agaucuuccaucaucaccc

SEQ ID NO: 2286906 - RNA, 19 nt, Artificial Sequence
  Description of Artificial Sequence: Synthetic oligonucleotide
  Sense strand starting at position 2406 of SEQ ID NO: 1884720
gauggaagaucuuugucac

SEQ ID NO: 2286907 - RNA, 19 nt, Artificial Sequence
  Description of Artificial Sequence: Synthetic oligonucleotide
  Antisense strand to SEQ ID NO: 2286906
gugacaaagaucuuccauc

SEQ ID NO: 2286908 - RNA, 19 nt, Artificial Sequence
  Description of Artificial Sequence: Synthetic oligonucleotide
  Sense strand starting at position 2588 of SEQ ID NO: 1884720
aggcacaucucuuuagaca

SEQ ID NO: 2286909 - RNA, 19 nt, Artificial Sequence
  Description of Artificial Sequence: Synthetic oligonucleotide
  Antisense strand to SEQ ID NO: 2286908
ugucuaaagagaugugccu

SEQ ID NO: 2286910 - RNA, 19 nt, Artificial Sequence
  Description of Artificial Sequence: Synthetic oligonucleotide
  Sense strand starting at position 2589 of SEQ ID NO: 1884720
ggcacaucucuuuagacaa

SEQ ID NO: 2286911 - RNA, 19 nt, Artificial Sequence
  Description of Artificial Sequence: Synthetic oligonucleotide
  Antisense strand to SEQ ID NO: 2286910
uugucuaaagagaugugcc

SEQ ID NO: 2286912 - RNA, 19 nt, Artificial Sequence
  Description of Artificial Sequence: Synthetic oligonucleotide
  Sense strand starting at position 2819 of SEQ ID NO: 1884720
uugagauauugccuauaaa

SEQ ID NO: 2286913 - RNA, 19 nt, Artificial Sequence
  Description of Artificial Sequence: Synthetic oligonucleotide
  Antisense strand to SEQ ID NO: 2286912
uuuauaggcaauaucucaa

SEQ ID NO: 2286914 - RNA, 19 nt, Artificial Sequence
  Description of Artificial Sequence: Synthetic oligonucleotide
  Sense strand starting at position 2967 of SEQ ID NO: 1884720
ccucauacacuguauuagu

SEQ ID NO: 2286915 - RNA, 19 nt, Artificial Sequence
  Description of Artificial Sequence: Synthetic oligonucleotide
  Antisense strand to SEQ ID NO: 2286914
acuaauacaguguaugagg

SEQ ID NO: 2286916 - RNA, 19 nt, Artificial Sequence
  Description of Artificial Sequence: Synthetic oligonucleotide
  Sense strand starting at position 3040 of SEQ ID NO: 1884720
agaaguucucacuguucca

SEQ ID NO: 2286917 - RNA, 19 nt, Artificial Sequence
  Description of Artificial Sequence: Synthetic oligonucleotide
  Antisense strand to SEQ ID NO: 2286916
uggaacagugagaacuucu

SEQ ID NO: 2286918 - RNA, 19 nt, Artificial Sequence
  Description of Artificial Sequence: Synthetic oligonucleotide
  Sense strand starting at position 3139 of SEQ ID NO: 1884720
gagcaaggccucuaacaug

SEQ ID NO: 2286919 - RNA, 19 nt, Artificial Sequence
  Description of Artificial Sequence: Synthetic oligonucleotide
  Antisense strand to SEQ ID NO: 2286918
cauguuagaggccuugcuc

SEQ ID NO: 2286920 - RNA, 19 nt, Artificial Sequence
  Description of Artificial Sequence: Synthetic oligonucleotide
  Sense strand starting at position 3262 of SEQ ID NO: 1884720
ucaugaagguuucuugauc

SEQ ID NO: 2286921 - RNA, 19 nt, Artificial Sequence
  Description of Artificial Sequence: Synthetic oligonucleotide
  Antisense strand to SEQ ID NO: 2286920
gaucaagaaaccuucauga

SEQ ID NO: 2286922 - RNA, 19 nt, Artificial Sequence
  Description of Artificial Sequence: Synthetic oligonucleotide
  Sense strand starting at position 3263 of SEQ ID NO: 1884720
caugaagguuucuugauca

SEQ ID NO: 2286923 - RNA, 19 nt, Artificial Sequence
  Description of Artificial Sequence: Synthetic oligonucleotide
  Antisense strand to SEQ ID NO: 2286922
ugaucaagaaaccuucaug

SEQ ID NO: 2286924 - RNA, 19 nt, Artificial Sequence
  Description of Artificial Sequence: Synthetic oligonucleotide
  Sense strand starting at position 3267 of SEQ ID NO: 1884720
aagguuucuugaucaugaa

SEQ ID NO: 2286925 - RNA, 19 nt, Artificial Sequence
  Description of Artificial Sequence: Synthetic oligonucleotide
  Antisense strand to SEQ ID NO: 2286924
uucaugaucaagaaaccuu

SEQ ID NO: 2286926 - RNA, 19 nt, Artificial Sequence
  Description of Artificial Sequence: Synthetic oligonucleotide
  Sense strand starting at position 3461 of SEQ ID NO: 1884720
agaggucagcugugaauua

SEQ ID NO: 2286927 - RNA, 19 nt, Artificial Sequence
  Description of Artificial Sequence: Synthetic oligonucleotide
  Antisense strand to SEQ ID NO: 2286926
uaauucacagcugaccucu

SEQ ID NO: 2286928 - RNA, 19 nt, Artificial Sequence
  Description of Artificial Sequence: Synthetic oligonucleotide
  Sense strand starting at position 3532 of SEQ ID NO: 1884720
ugaggucuccuaggacaau

SEQ ID NO: 2286929 - RNA, 19 nt, Artificial Sequence
  Description of Artificial Sequence: Synthetic oligonucleotide
  Antisense strand to SEQ ID NO: 2286928
auuguccuaggagaccuca

SEQ ID NO: 2286930 - RNA, 19 nt, Artificial Sequence
  Description of Artificial Sequence: Synthetic oligonucleotide
  Sense strand starting at position 3663 of SEQ ID NO: 1884720
agauguaaguaacuguuau

SEQ ID NO: 2286931 - RNA, 19 nt, Artificial Sequence
  Description of Artificial Sequence: Synthetic oligonucleotide
  Antisense strand to SEQ ID NO: 2286930
auaacaguuacuuacaucu

SEQ ID NO: 2286932 - RNA, 19 nt, Artificial Sequence
  Description of Artificial Sequence: Synthetic oligonucleotide
  Sense strand starting at position 3735 of SEQ ID NO: 1884720
aauagcugcccugaggaua

SEQ ID NO: 2286933 - RNA, 19 nt, Artificial Sequence
  Description of Artificial Sequence: Synthetic oligonucleotide
  Antisense strand to SEQ ID NO: 2286932
uauccucagggcagcuauu

SEQ ID NO: 2286934 - RNA, 19 nt, Artificial Sequence
  Description of Artificial Sequence: Synthetic oligonucleotide
  Sense strand starting at position 3757 of SEQ ID NO: 1884720
agaagagggcuuugcaaug

SEQ ID NO: 2286935 - RNA, 19 nt, Artificial Sequence
  Description of Artificial Sequence: Synthetic oligonucleotide
  Antisense strand to SEQ ID NO: 2286934
cauugcaaagcccucuucu

SEQ ID NO: 2286936 - RNA, 19 nt, Artificial Sequence
  Description of Artificial Sequence: Synthetic oligonucleotide
  Sense strand starting at position 3762 of SEQ ID NO: 1884720
agggcuuugcaauggagga

SEQ ID NO: 2286937 - RNA, 19 nt, Artificial Sequence
  Description of Artificial Sequence: Synthetic oligonucleotide
  Antisense strand to SEQ ID NO: 2286936
uccuccauugcaaagcccu

SEQ ID NO: 2286938 - RNA, 19 nt, Artificial Sequence
  Description of Artificial Sequence: Synthetic oligonucleotide
  Sense strand starting at position 3836 of SEQ ID NO: 1884720
aaauauauugcacguaaug

SEQ ID NO: 2286939 - RNA, 19 nt, Artificial Sequence
  Description of Artificial Sequence: Synthetic oligonucleotide
  Antisense strand to SEQ ID NO: 2286938
cauuacgugcaauauauuu

SEQ ID NO: 2286940 - RNA, 19 nt, Artificial Sequence
  Description of Artificial Sequence: Synthetic oligonucleotide
  Sense strand starting at position 122 of SEQ ID NO: 1884721
accagauauuaagcuuugu

SEQ ID NO: 2286941 - RNA, 19 nt, Artificial Sequence
  Description of Artificial Sequence: Synthetic oligonucleotide
  Antisense strand to SEQ ID NO: 2286940
acaaagcuuaauaucuggu

SEQ ID NO: 2286942 - RNA, 19 nt, Artificial Sequence
  Description of Artificial Sequence: Synthetic oligonucleotide
  Sense strand starting at position 142 of SEQ ID NO: 1884721
ugucuuguuccauagaaau

SEQ ID NO: 2286943 - RNA, 19 nt, Artificial Sequence
  Description of Artificial Sequence: Synthetic oligonucleotide
  Antisense strand to SEQ ID NO: 2286942
auuucuauggaacaagaca

SEQ ID NO: 2286944 - RNA, 19 nt, Artificial Sequence
  Description of Artificial Sequence: Synthetic oligonucleotide
  Sense strand starting at position 178 of SEQ ID NO: 1884721
ccuguuugccuacaucaua

SEQ ID NO: 2286945 - RNA, 19 nt, Artificial Sequence
  Description of Artificial Sequence: Synthetic oligonucleotide
  Antisense strand to SEQ ID NO: 2286944
uaugauguaggcaaacagg

SEQ ID NO: 2286946 - RNA, 19 nt, Artificial Sequence
  Description of Artificial Sequence: Synthetic oligonucleotide
  Sense strand starting at position 201 of SEQ ID NO: 1884721
gaggccuagcuuugagaac

SEQ ID NO: 2286947 - RNA, 19 nt, Artificial Sequence
  Description of Artificial Sequence: Synthetic oligonucleotide
  Antisense strand to SEQ ID NO: 2286946
guucucaaagcuaggccuc

SEQ ID NO: 2286948 - RNA, 19 nt, Artificial Sequence
  Description of Artificial Sequence: Synthetic oligonucleotide
  Sense strand starting at position 283 of SEQ ID NO: 1884721
aaaugagaggcugguuuaa

SEQ ID NO: 2286949 - RNA, 19 nt, Artificial Sequence
  Description of Artificial Sequence: Synthetic oligonucleotide
  Antisense strand to SEQ ID NO: 2286948
uuaaaccagccucucauuu

SEQ ID NO: 2286950 - RNA, 19 nt, Artificial Sequence
  Description of Artificial Sequence: Synthetic oligonucleotide
  Sense strand starting at position 285 of SEQ ID NO: 1884721
augagaggcugguuuaaug

SEQ ID NO: 2286951 - RNA, 19 nt, Artificial Sequence
  Description of Artificial Sequence: Synthetic oligonucleotide
  Antisense strand to SEQ ID NO: 2286950
cauuaaaccagccucucau

SEQ ID NO: 2286952 - RNA, 19 nt, Artificial Sequence
  Description of Artificial Sequence: Synthetic oligonucleotide
  Sense strand starting at position 317 of SEQ ID NO: 1884721
cucaauuacuagcccgauu

SEQ ID NO: 2286953 - RNA, 19 nt, Artificial Sequence
  Description of Artificial Sequence: Synthetic oligonucleotide
  Antisense strand to SEQ ID NO: 2286952
aaucgggcuaguaauugag

SEQ ID NO: 2286954 - RNA, 19 nt, Artificial Sequence
  Description of Artificial Sequence: Synthetic oligonucleotide
  Sense strand starting at position 431 of SEQ ID NO: 1884721
uauggcauccuguaugcua

SEQ ID NO: 2286955 - RNA, 19 nt, Artificial Sequence
  Description of Artificial Sequence: Synthetic oligonucleotide
  Antisense strand to SEQ ID NO: 2286954
uagcauacaggaugccaua

SEQ ID NO: 2286956 - RNA, 19 nt, Artificial Sequence
  Description of Artificial Sequence: Synthetic oligonucleotide
  Sense strand starting at position 460 of SEQ ID NO: 1884721
auuaaaggucccuggaaac

SEQ ID NO: 2286957 - RNA, 19 nt, Artificial Sequence
  Description of Artificial Sequence: Synthetic oligonucleotide
  Antisense strand to SEQ ID NO: 2286956
guuuccagggaccuuuaau

SEQ ID NO: 2286958 - RNA, 19 nt, Artificial Sequence
  Description of Artificial Sequence: Synthetic oligonucleotide
  Sense strand starting at position 494 of SEQ ID NO: 1884721
gcagcuuuacucugauaac

SEQ ID NO: 2286959 - RNA, 19 nt, Artificial Sequence
  Description of Artificial Sequence: Synthetic oligonucleotide
  Antisense strand to SEQ ID NO: 2286958
guuaucagaguaaagcugc

SEQ ID NO: 2286960 - RNA, 19 nt, Artificial Sequence
  Description of Artificial Sequence: Synthetic oligonucleotide
  Sense strand starting at position 976 of SEQ ID NO: 1884721
aagggaaagugcuuuaagu

SEQ ID NO: 2286961 - RNA, 19 nt, Artificial Sequence
  Description of Artificial Sequence: Synthetic oligonucleotide
  Antisense strand to SEQ ID NO: 2286960
acuuaaagcacuuucccuu

SEQ ID NO: 2286962 - RNA, 19 nt, Artificial Sequence
  Description of Artificial Sequence: Synthetic oligonucleotide
  Sense strand starting at position 978 of SEQ ID NO: 1884721
gggaaagugcuuuaaguuu

SEQ ID NO: 2286963 - RNA, 19 nt, Artificial Sequence
  Description of Artificial Sequence: Synthetic oligonucleotide
  Antisense strand to SEQ ID NO: 2286962
aaacuuaaagcacuuuccc

SEQ ID NO: 2286964 - RNA, 19 nt, Artificial Sequence
  Description of Artificial Sequence: Synthetic oligonucleotide
  Sense strand starting at position 1167 of SEQ ID NO: 1884721
guguacacucuagaaaugu

SEQ ID NO: 2286965 - RNA, 19 nt, Artificial Sequence
  Description of Artificial Sequence: Synthetic oligonucleotide
  Antisense strand to SEQ ID NO: 2286964
acauuucuagaguguacac

SEQ ID NO: 2286966 - RNA, 19 nt, Artificial Sequence
  Description of Artificial Sequence: Synthetic oligonucleotide
  Sense strand starting at position 1401 of SEQ ID NO: 1884721
cguuauacacguguaugua

SEQ ID NO: 2286967 - RNA, 19 nt, Artificial Sequence
  Description of Artificial Sequence: Synthetic oligonucleotide
  Antisense strand to SEQ ID NO: 2286966
uacauacacguguauaacg

SEQ ID NO: 2286968 - RNA, 19 nt, Artificial Sequence
  Description of Artificial Sequence: Synthetic oligonucleotide
  Sense strand starting at position 1553 of SEQ ID NO: 1884721
uuuagacucgaugaugguu

SEQ ID NO: 2286969 - RNA, 19 nt, Artificial Sequence
  Description of Artificial Sequence: Synthetic oligonucleotide
  Antisense strand to SEQ ID NO: 2286968
aaccaucaucgagucuaaa

SEQ ID NO: 2286970 - RNA, 19 nt, Artificial Sequence
  Description of Artificial Sequence: Synthetic oligonucleotide
  Sense strand starting at position 1582 of SEQ ID NO: 1884721
acuuaauagucucuaaguc

SEQ ID NO: 2286971 - RNA, 19 nt, Artificial Sequence
  Description of Artificial Sequence: Synthetic oligonucleotide
  Antisense strand to SEQ ID NO: 2286970
gacuuagagacuauuaagu

SEQ ID NO: 2286972 - RNA, 19 nt, Artificial Sequence
  Description of Artificial Sequence: Synthetic oligonucleotide
  Sense strand starting at position 1622 of SEQ ID NO: 1884721
gguguccucagagagguaa

SEQ ID NO: 2286973 - RNA, 19 nt, Artificial Sequence
  Description of Artificial Sequence: Synthetic oligonucleotide
  Antisense strand to SEQ ID NO: 2286972
uuaccucucugaggacacc

SEQ ID NO: 2286974 - RNA, 19 nt, Artificial Sequence
  Description of Artificial Sequence: Synthetic oligonucleotide
  Sense strand starting at position 2080 of SEQ ID NO: 1884721
agucuaguugucgcuuuau

SEQ ID NO: 2286975 - RNA, 19 nt, Artificial Sequence
  Description of Artificial Sequence: Synthetic oligonucleotide
  Antisense strand to SEQ ID NO: 2286974
auaaagcgacaacuagacu

SEQ ID NO: 2286976 - RNA, 19 nt, Artificial Sequence
  Description of Artificial Sequence: Synthetic oligonucleotide
  Sense strand starting at position 2090 of SEQ ID NO: 1884721
ucgcuuuauccgccuaagu

SEQ ID NO: 2286977 - RNA, 19 nt, Artificial Sequence
  Description of Artificial Sequence: Synthetic oligonucleotide
  Antisense strand to SEQ ID NO: 2286976
acuuaggcggauaaagcga

SEQ ID NO: 2286978 - RNA, 19 nt, Artificial Sequence
  Description of Artificial Sequence: Synthetic oligonucleotide
  Sense strand starting at position 2162 of SEQ ID NO: 1884721
auagcacuuccugaacguu

SEQ ID NO: 2286979 - RNA, 19 nt, Artificial Sequence
  Description of Artificial Sequence: Synthetic oligonucleotide
  Antisense strand to SEQ ID NO: 2286978
aacguucaggaagugcuau

SEQ ID NO: 2286980 - RNA, 19 nt, Artificial Sequence
  Description of Artificial Sequence: Synthetic oligonucleotide
  Sense strand starting at position 2170 of SEQ ID NO: 1884721
uccugaacguucucauaag

SEQ ID NO: 2286981 - RNA, 19 nt, Artificial Sequence
  Description of Artificial Sequence: Synthetic oligonucleotide
  Antisense strand to SEQ ID NO: 2286980
cuuaugagaacguucagga

SEQ ID NO: 2286982 - RNA, 19 nt, Artificial Sequence
  Description of Artificial Sequence: Synthetic oligonucleotide
  Sense strand starting at position 2191 of SEQ ID NO: 1884721
gacggaaguaguuguugaa

SEQ ID NO: 2286983 - RNA, 19 nt, Artificial Sequence
  Description of Artificial Sequence: Synthetic oligonucleotide
  Antisense strand to SEQ ID NO: 2286982
uucaacaacuacuuccguc

SEQ ID NO: 2286984 - RNA, 19 nt, Artificial Sequence
  Description of Artificial Sequence: Synthetic oligonucleotide
  Sense strand starting at position 2276 of SEQ ID NO: 1884721
ccuugaaagcauuguccaa

SEQ ID NO: 2286985 - RNA, 19 nt, Artificial Sequence
  Description of Artificial Sequence: Synthetic oligonucleotide
  Antisense strand to SEQ ID NO: 2286984
uuggacaaugcuuucaagg

SEQ ID NO: 2286986 - RNA, 19 nt, Artificial Sequence
  Description of Artificial Sequence: Synthetic oligonucleotide
  Sense strand starting at position 2278 of SEQ ID NO: 1884721
uugaaagcauuguccaaug

SEQ ID NO: 2286987 - RNA, 19 nt, Artificial Sequence
  Description of Artificial Sequence: Synthetic oligonucleotide
  Antisense strand to SEQ ID NO: 2286986
cauuggacaaugcuuucaa

SEQ ID NO: 2286988 - RNA, 19 nt, Artificial Sequence
  Description of Artificial Sequence: Synthetic oligonucleotide
  Sense strand starting at position 2788 of SEQ ID NO: 1884721
agugcaucuccguuacugu

SEQ ID NO: 2286989 - RNA, 19 nt, Artificial Sequence
  Description of Artificial Sequence: Synthetic oligonucleotide
  Antisense strand to SEQ ID NO: 2286988
acaguaacggagaugcacu

SEQ ID NO: 2286990 - RNA, 19 nt, Artificial Sequence
  Description of Artificial Sequence: Synthetic oligonucleotide
  Sense strand starting at position 2839 of SEQ ID NO: 1884721
acugguuuaugucucucua

SEQ ID NO: 2286991 - RNA, 19 nt, Artificial Sequence
  Description of Artificial Sequence: Synthetic oligonucleotide
  Antisense strand to SEQ ID NO: 2286990
uagagagacauaaaccagu

SEQ ID NO: 2286992 - RNA, 19 nt, Artificial Sequence
  Description of Artificial Sequence: Synthetic oligonucleotide
  Sense strand starting at position 2841 of SEQ ID NO: 1884721
ugguuuaugucucucuaaa

SEQ ID NO: 2286993 - RNA, 19 nt, Artificial Sequence
  Description of Artificial Sequence: Synthetic oligonucleotide
  Antisense strand to SEQ ID NO: 2286992
uuuagagagacauaaacca

SEQ ID NO: 2286994 - RNA, 19 nt, Artificial Sequence
  Description of Artificial Sequence: Synthetic oligonucleotide
  Sense strand starting at position 3166 of SEQ ID NO: 1884721
aggguuugaguuuggaacu

SEQ ID NO: 2286995 - RNA, 19 nt, Artificial Sequence
  Description of Artificial Sequence: Synthetic oligonucleotide
  Antisense strand to SEQ ID NO: 2286994
aguuccaaacucaaacccu

SEQ ID NO: 2286996 - RNA, 19 nt, Artificial Sequence
  Description of Artificial Sequence: Synthetic oligonucleotide
  Sense strand starting at position 3229 of SEQ ID NO: 1884721
acaggucucccacagacuu

SEQ ID NO: 2286997 - RNA, 19 nt, Artificial Sequence
  Description of Artificial Sequence: Synthetic oligonucleotide
  Antisense strand to SEQ ID NO: 2286996
aagucugugggagaccugu

SEQ ID NO: 2286998 - RNA, 19 nt, Artificial Sequence
  Description of Artificial Sequence: Synthetic oligonucleotide
  Sense strand starting at position 3290 of SEQ ID NO: 1884721
ccggcauuuccuggucuga

SEQ ID NO: 2286999 - RNA, 19 nt, Artificial Sequence
  Description of Artificial Sequence: Synthetic oligonucleotide
  Antisense strand to SEQ ID NO: 2286998
ucagaccaggaaaugccgg

SEQ ID NO: 2287000 - RNA, 19 nt, Artificial Sequence
  Description of Artificial Sequence: Synthetic oligonucleotide
  Sense strand starting at position 3292 of SEQ ID NO: 1884721
ggcauuuccuggucugauc

SEQ ID NO: 2287001 - RNA, 19 nt, Artificial Sequence
  Description of Artificial Sequence: Synthetic oligonucleotide
  Antisense strand to SEQ ID NO: 2287000
gaucagaccaggaaaugcc

SEQ ID NO: 2287002 - RNA, 19 nt, Artificial Sequence
  Description of Artificial Sequence: Synthetic oligonucleotide
  Sense strand starting at position 3295 of SEQ ID NO: 1884721
auuuccuggucugaucaaa

SEQ ID NO: 2287003 - RNA, 19 nt, Artificial Sequence
  Description of Artificial Sequence: Synthetic oligonucleotide
  Antisense strand to SEQ ID NO: 2287002
uuugaucagaccaggaaau

SEQ ID NO: 2287004 - RNA, 19 nt, Artificial Sequence
  Description of Artificial Sequence: Synthetic oligonucleotide
  Sense strand starting at position 3361 of SEQ ID NO: 1884721
uugaguaccuauguaccaa

SEQ ID NO: 2287005 - RNA, 19 nt, Artificial Sequence
  Description of Artificial Sequence: Synthetic oligonucleotide
  Antisense strand to SEQ ID NO: 2287004
uugguacauagguacucaa

SEQ ID NO: 2287006 - RNA, 19 nt, Artificial Sequence
  Description of Artificial Sequence: Synthetic oligonucleotide
  Sense strand starting at position 3394 of SEQ ID NO: 1884721
gcuggagacaguugugaac

SEQ ID NO: 2287007 - RNA, 19 nt, Artificial Sequence
  Description of Artificial Sequence: Synthetic oligonucleotide
  Antisense strand to SEQ ID NO: 2287006
guucacaacugucuccagc

SEQ ID NO: 2287008 - RNA, 19 nt, Artificial Sequence
  Description of Artificial Sequence: Synthetic oligonucleotide
  Sense strand starting at position 3409 of SEQ ID NO: 1884721
gaacaagacugacaagaug

SEQ ID NO: 2287009 - RNA, 19 nt, Artificial Sequence
  Description of Artificial Sequence: Synthetic oligonucleotide
  Antisense strand to SEQ ID NO: 2287008
caucuugucagucuuguuc

SEQ ID NO: 2287010 - RNA, 19 nt, Artificial Sequence
  Description of Artificial Sequence: Synthetic oligonucleotide
  Sense strand starting at position 3441 of SEQ ID NO: 1884721
ggauguacauuucagugga

SEQ ID NO: 2287011 - RNA, 19 nt, Artificial Sequence
  Description of Artificial Sequence: Synthetic oligonucleotide
  Antisense strand to SEQ ID NO: 2287010
uccacugaaauguacaucc

SEQ ID NO: 2287012 - RNA, 19 nt, Artificial Sequence
  Description of Artificial Sequence: Synthetic oligonucleotide
  Sense strand starting at position 3473 of SEQ ID NO: 1884721
acaagauaaugucagaaag

SEQ ID NO: 2287013 - RNA, 19 nt, Artificial Sequence
  Description of Artificial Sequence: Synthetic oligonucleotide
  Antisense strand to SEQ ID NO: 2287012
cuuucugacauuaucuugu

SEQ ID NO: 2287014 - RNA, 19 nt, Artificial Sequence
  Description of Artificial Sequence: Synthetic oligonucleotide
  Sense strand starting at position 3481 of SEQ ID NO: 1884721
augucagaaagugguuaau

SEQ ID NO: 2287015 - RNA, 19 nt, Artificial Sequence
  Description of Artificial Sequence: Synthetic oligonucleotide
  Antisense strand to SEQ ID NO: 2287014
auuaaccacuuucugacau

SEQ ID NO: 2287016 - RNA, 19 nt, Artificial Sequence
  Description of Artificial Sequence: Synthetic oligonucleotide
  Sense strand starting at position 3484 of SEQ ID NO: 1884721
ucagaaagugguuaaugcu

SEQ ID NO: 2287017 - RNA, 19 nt, Artificial Sequence
  Description of Artificial Sequence: Synthetic oligonucleotide
  Antisense strand to SEQ ID NO: 2287016
agcauuaaccacuuucuga

SEQ ID NO: 2287018 - RNA, 19 nt, Artificial Sequence
  Description of Artificial Sequence: Synthetic oligonucleotide
  Sense strand starting at position 3834 of SEQ ID NO: 1884721
gaacuacuuuagcuagagu

SEQ ID NO: 2287019 - RNA, 19 nt, Artificial Sequence
  Description of Artificial Sequence: Synthetic oligonucleotide
  Antisense strand to SEQ ID NO: 2287018
acucuagcuaaaguaguuc

SEQ ID NO: 2287020 - RNA, 19 nt, Artificial Sequence
  Description of Artificial Sequence: Synthetic oligonucleotide
  Sense strand starting at position 122 of SEQ ID NO: 1884722
accagauauuaagcuuugu

SEQ ID NO: 2287021 - RNA, 19 nt, Artificial Sequence
  Description of Artificial Sequence: Synthetic oligonucleotide
  Antisense strand to SEQ ID NO: 2287020
acaaagcuuaauaucuggu

SEQ ID NO: 2287022 - RNA, 19 nt, Artificial Sequence
  Description of Artificial Sequence: Synthetic oligonucleotide
  Sense strand starting at position 142 of SEQ ID NO: 1884722
ugucuuguuccauagaaau

SEQ ID NO: 2287023 - RNA, 19 nt, Artificial Sequence
  Description of Artificial Sequence: Synthetic oligonucleotide
  Antisense strand to SEQ ID NO: 2287022
auuucuauggaacaagaca

SEQ ID NO: 2287024 - RNA, 19 nt, Artificial Sequence
  Description of Artificial Sequence: Synthetic oligonucleotide
  Sense strand starting at position 178 of SEQ ID NO: 1884722
ccuguuugccuacaucaua

SEQ ID NO: 2287025 - RNA, 19 nt, Artificial Sequence
  Description of Artificial Sequence: Synthetic oligonucleotide
  Antisense strand to SEQ ID NO: 2287024
uaugauguaggcaaacagg

SEQ ID NO: 2287026 - RNA, 19 nt, Artificial Sequence
  Description of Artificial Sequence: Synthetic oligonucleotide
  Sense strand starting at position 201 of SEQ ID NO: 1884722
gaggccuagcuuugagaac

SEQ ID NO: 2287027 - RNA, 19 nt, Artificial Sequence
  Description of Artificial Sequence: Synthetic oligonucleotide
  Antisense strand to SEQ ID NO: 2287026
guucucaaagcuaggccuc

SEQ ID NO: 2287028 - RNA, 19 nt, Artificial Sequence
  Description of Artificial Sequence: Synthetic oligonucleotide
  Sense strand starting at position 283 of SEQ ID NO: 1884722
aaaugagaggcugguuuaa

SEQ ID NO: 2287029 - RNA, 19 nt, Artificial Sequence
  Description of Artificial Sequence: Synthetic oligonucleotide
  Antisense strand to SEQ ID NO: 2287028
uuaaaccagccucucauuu

SEQ ID NO: 2287030 - RNA, 19 nt, Artificial Sequence
  Description of Artificial Sequence: Synthetic oligonucleotide
  Sense strand starting at position 285 of SEQ ID NO: 1884722
augagaggcugguuuaaug

SEQ ID NO: 2287031 - RNA, 19 nt, Artificial Sequence
  Description of Artificial Sequence: Synthetic oligonucleotide
  Antisense strand to SEQ ID NO: 2287030
cauuaaaccagccucucau

SEQ ID NO: 2287032 - RNA, 19 nt, Artificial Sequence
  Description of Artificial Sequence: Synthetic oligonucleotide
  Sense strand starting at position 317 of SEQ ID NO: 1884722
cucaauuacuagcccgauu

SEQ ID NO: 2287033 - RNA, 19 nt, Artificial Sequence
  Description of Artificial Sequence: Synthetic oligonucleotide
  Antisense strand to SEQ ID NO: 2287032
aaucgggcuaguaauugag

SEQ ID NO: 2287034 - RNA, 19 nt, Artificial Sequence
  Description of Artificial Sequence: Synthetic oligonucleotide
  Sense strand starting at position 431 of SEQ ID NO: 1884722
uauggcauccuguaugcua

SEQ ID NO: 2287035 - RNA, 19 nt, Artificial Sequence
  Description of Artificial Sequence: Synthetic oligonucleotide
  Antisense strand to SEQ ID NO: 2287034
uagcauacaggaugccaua

SEQ ID NO: 2287036 - RNA, 19 nt, Artificial Sequence
  Description of Artificial Sequence: Synthetic oligonucleotide
  Sense strand starting at position 460 of SEQ ID NO: 1884722
auuaaaggucccuggaaac

SEQ ID NO: 2287037 - RNA, 19 nt, Artificial Sequence
  Description of Artificial Sequence: Synthetic oligonucleotide
  Antisense strand to SEQ ID NO: 2287036
guuuccagggaccuuuaau

SEQ ID NO: 2287038 - RNA, 19 nt, Artificial Sequence
  Description of Artificial Sequence: Synthetic oligonucleotide
  Sense strand starting at position 494 of SEQ ID NO: 1884722
gcagcuuuacucugauaac

SEQ ID NO: 2287039 - RNA, 19 nt, Artificial Sequence
  Description of Artificial Sequence: Synthetic oligonucleotide
  Antisense strand to SEQ ID NO: 2287038
guuaucagaguaaagcugc

SEQ ID NO: 2287040 - RNA, 19 nt, Artificial Sequence
  Description of Artificial Sequence: Synthetic oligonucleotide
  Sense strand starting at position 976 of SEQ ID NO: 1884722
aagggaaagugcuuuaagu

SEQ ID NO: 2287041 - RNA, 19 nt, Artificial Sequence
  Description of Artificial Sequence: Synthetic oligonucleotide
  Antisense strand to SEQ ID NO: 2287040
acuuaaagcacuuucccuu

SEQ ID NO: 2287042 - RNA, 19 nt, Artificial Sequence
  Description of Artificial Sequence: Synthetic oligonucleotide
  Sense strand starting at position 978 of SEQ ID NO: 1884722
gggaaagugcuuuaaguuu

SEQ ID NO: 2287043 - RNA, 19 nt, Artificial Sequence
  Description of Artificial Sequence: Synthetic oligonucleotide
  Antisense strand to SEQ ID NO: 2287042
aaacuuaaagcacuuuccc

SEQ ID NO: 2287044 - RNA, 19 nt, Artificial Sequence
  Description of Artificial Sequence: Synthetic oligonucleotide
  Sense strand starting at position 1167 of SEQ ID NO: 1884722
guguacacucuagaaaugu

SEQ ID NO: 2287045 - RNA, 19 nt, Artificial Sequence
  Description of Artificial Sequence: Synthetic oligonucleotide
  Antisense strand to SEQ ID NO: 2287044
acauuucuagaguguacac

SEQ ID NO: 2287046 - RNA, 19 nt, Artificial Sequence
  Description of Artificial Sequence: Synthetic oligonucleotide
  Sense strand starting at position 1401 of SEQ ID NO: 1884722
cguuauacacguguaugua

SEQ ID NO: 2287047 - RNA, 19 nt, Artificial Sequence
  Description of Artificial Sequence: Synthetic oligonucleotide
  Antisense strand to SEQ ID NO: 2287046
uacauacacguguauaacg

SEQ ID NO: 2287048 - RNA, 19 nt, Artificial Sequence
  Description of Artificial Sequence: Synthetic oligonucleotide
  Sense strand starting at position 1553 of SEQ ID NO: 1884722
uuuagacucgaugaugguu

SEQ ID NO: 2287049 - RNA, 19 nt, Artificial Sequence
  Description of Artificial Sequence: Synthetic oligonucleotide
  Antisense strand to SEQ ID NO: 2287048
aaccaucaucgagucuaaa

SEQ ID NO: 2287050 - RNA, 19 nt, Artificial Sequence
  Description of Artificial Sequence: Synthetic oligonucleotide
  Sense strand starting at position 1582 of SEQ ID NO: 1884722
acuuaauagucucuaaguc

SEQ ID NO: 2287051 - RNA, 19 nt, Artificial Sequence
  Description of Artificial Sequence: Synthetic oligonucleotide
  Antisense strand to SEQ ID NO: 2287050
gacuuagagacuauuaagu

SEQ ID NO: 2287052 - RNA, 19 nt, Artificial Sequence
  Description of Artificial Sequence: Synthetic oligonucleotide
  Sense strand starting at position 1622 of SEQ ID NO: 1884722
gguguccucagagagguaa

SEQ ID NO: 2287053 - RNA, 19 nt, Artificial Sequence
  Description of Artificial Sequence: Synthetic oligonucleotide
  Antisense strand to SEQ ID NO: 2287052
uuaccucucugaggacacc

SEQ ID NO: 2287054 - RNA, 19 nt, Artificial Sequence
  Description of Artificial Sequence: Synthetic oligonucleotide
  Sense strand starting at position 2080 of SEQ ID NO: 1884722
agucuaguugucgcuuuau

SEQ ID NO: 2287055 - RNA, 19 nt, Artificial Sequence
  Description of Artificial Sequence: Synthetic oligonucleotide
  Antisense strand to SEQ ID NO: 2287054
auaaagcgacaacuagacu

SEQ ID NO: 2287056 - RNA, 19 nt, Artificial Sequence
  Description of Artificial Sequence: Synthetic oligonucleotide
  Sense strand starting at position 2090 of SEQ ID NO: 1884722
ucgcuuuauccgccuaagu

SEQ ID NO: 2287057 - RNA, 19 nt, Artificial Sequence
  Description of Artificial Sequence: Synthetic oligonucleotide
  Antisense strand to SEQ ID NO: 2287056
acuuaggcggauaaagcga

SEQ ID NO: 2287058 - RNA, 19 nt, Artificial Sequence
  Description of Artificial Sequence: Synthetic oligonucleotide
  Sense strand starting at position 2162 of SEQ ID NO: 1884722
auagcacuuccugaacguu

SEQ ID NO: 2287059 - RNA, 19 nt, Artificial Sequence
  Description of Artificial Sequence: Synthetic oligonucleotide
  Antisense strand to SEQ ID NO: 2287058
aacguucaggaagugcuau

SEQ ID NO: 2287060 - RNA, 19 nt, Artificial Sequence
  Description of Artificial Sequence: Synthetic oligonucleotide
  Sense strand starting at position 2170 of SEQ ID NO: 1884722
uccugaacguucucauaag

SEQ ID NO: 2287061 - RNA, 19 nt, Artificial Sequence
  Description of Artificial Sequence: Synthetic oligonucleotide
  Antisense strand to SEQ ID NO: 2287060
cuuaugagaacguucagga

SEQ ID NO: 2287062 - RNA, 19 nt, Artificial Sequence
  Description of Artificial Sequence: Synthetic oligonucleotide
  Sense strand starting at position 2191 of SEQ ID NO: 1884722
gacggaaguaguuguugaa

SEQ ID NO: 2287063 - RNA, 19 nt, Artificial Sequence
  Description of Artificial Sequence: Synthetic oligonucleotide
  Antisense strand to SEQ ID NO: 2287062
uucaacaacuacuuccguc

SEQ ID NO: 2287064 - RNA, 19 nt, Artificial Sequence
  Description of Artificial Sequence: Synthetic oligonucleotide
  Sense strand starting at position 2276 of SEQ ID NO: 1884722
ccuugaaagcauuguccaa

SEQ ID NO: 2287065 - RNA, 19 nt, Artificial Sequence
  Description of Artificial Sequence: Synthetic oligonucleotide
  Antisense strand to SEQ ID NO: 2287064
uuggacaaugcuuucaagg

SEQ ID NO: 2287066 - RNA, 19 nt, Artificial Sequence
  Description of Artificial Sequence: Synthetic oligonucleotide
  Sense strand starting at position 2278 of SEQ ID NO: 1884722
uugaaagcauuguccaaug

SEQ ID NO: 2287067 - RNA, 19 nt, Artificial Sequence
  Description of Artificial Sequence: Synthetic oligonucleotide
  Antisense strand to SEQ ID NO: 2287066
cauuggacaaugcuuucaa

SEQ ID NO: 2287068 - RNA, 19 nt, Artificial Sequence
  Description of Artificial Sequence: Synthetic oligonucleotide
  Sense strand starting at position 2788 of SEQ ID NO: 1884722
agugcaucuccguuacugu

SEQ ID NO: 2287069 - RNA, 19 nt, Artificial Sequence
  Description of Artificial Sequence: Synthetic oligonucleotide
  Antisense strand to SEQ ID NO: 2287068
acaguaacggagaugcacu

SEQ ID NO: 2287070 - RNA, 19 nt, Artificial Sequence
  Description of Artificial Sequence: Synthetic oligonucleotide
  Sense strand starting at position 2839 of SEQ ID NO: 1884722
acugguuuaugucucucua

SEQ ID NO: 2287071 - RNA, 19 nt, Artificial Sequence
  Description of Artificial Sequence: Synthetic oligonucleotide
  Antisense strand to SEQ ID NO: 2287070
uagagagacauaaaccagu

SEQ ID NO: 2287072 - RNA, 19 nt, Artificial Sequence
  Description of Artificial Sequence: Synthetic oligonucleotide
  Sense strand starting at position 2841 of SEQ ID NO: 1884722
ugguuuaugucucucuaaa

SEQ ID NO: 2287073 - RNA, 19 nt, Artificial Sequence
  Description of Artificial Sequence: Synthetic oligonucleotide
  Antisense strand to SEQ ID NO: 2287072
uuuagagagacauaaacca

SEQ ID NO: 2287074 - RNA, 19 nt, Artificial Sequence
  Description of Artificial Sequence: Synthetic oligonucleotide
  Sense strand starting at position 3166 of SEQ ID NO: 1884722
aggguuugaguuuggaacu

SEQ ID NO: 2287075 - RNA, 19 nt, Artificial Sequence
  Description of Artificial Sequence: Synthetic oligonucleotide
  Antisense strand to SEQ ID NO: 2287074
aguuccaaacucaaacccu

SEQ ID NO: 2287076 - RNA, 19 nt, Artificial Sequence
  Description of Artificial Sequence: Synthetic oligonucleotide
  Sense strand starting at position 3229 of SEQ ID NO: 1884722
acaggucucccacagacuu

SEQ ID NO: 2287077 - RNA, 19 nt, Artificial Sequence
  Description of Artificial Sequence: Synthetic oligonucleotide
  Antisense strand to SEQ ID NO: 2287076
aagucugugggagaccugu

SEQ ID NO: 2287078 - RNA, 19 nt, Artificial Sequence
  Description of Artificial Sequence: Synthetic oligonucleotide
  Sense strand starting at position 3290 of SEQ ID NO: 1884722
ccggcauuuccuggucuga

SEQ ID NO: 2287079 - RNA, 19 nt, Artificial Sequence
  Description of Artificial Sequence: Synthetic oligonucleotide
  Antisense strand to SEQ ID NO: 2287078
ucagaccaggaaaugccgg

SEQ ID NO: 2287080 - RNA, 19 nt, Artificial Sequence
  Description of Artificial Sequence: Synthetic oligonucleotide
  Sense strand starting at position 3292 of SEQ ID NO: 1884722
ggcauuuccuggucugauc

SEQ ID NO: 2287081 - RNA, 19 nt, Artificial Sequence
  Description of Artificial Sequence: Synthetic oligonucleotide
  Antisense strand to SEQ ID NO: 2287080
gaucagaccaggaaaugcc

SEQ ID NO: 2287082 - RNA, 19 nt, Artificial Sequence
  Description of Artificial Sequence: Synthetic oligonucleotide
  Sense strand starting at position 3295 of SEQ ID NO: 1884722
auuuccuggucugaucaaa

SEQ ID NO: 2287083 - RNA, 19 nt, Artificial Sequence
  Description of Artificial Sequence: Synthetic oligonucleotide
  Antisense strand to SEQ ID NO: 2287082
uuugaucagaccaggaaau

SEQ ID NO: 2287084 - RNA, 19 nt, Artificial Sequence
  Description of Artificial Sequence: Synthetic oligonucleotide
  Sense strand starting at position 3361 of SEQ ID NO: 1884722
uugaguaccuauguaccaa

SEQ ID NO: 2287085 - RNA, 19 nt, Artificial Sequence
  Description of Artificial Sequence: Synthetic oligonucleotide
  Antisense strand to SEQ ID NO: 2287084
uugguacauagguacucaa

SEQ ID NO: 2287086 - RNA, 19 nt, Artificial Sequence
  Description of Artificial Sequence: Synthetic oligonucleotide
  Sense strand starting at position 3394 of SEQ ID NO: 1884722
gcuggagacaguugugaac

SEQ ID NO: 2287087 - RNA, 19 nt, Artificial Sequence
  Description of Artificial Sequence: Synthetic oligonucleotide
  Antisense strand to SEQ ID NO: 2287086
guucacaacugucuccagc

SEQ ID NO: 2287088 - RNA, 19 nt, Artificial Sequence
  Description of Artificial Sequence: Synthetic oligonucleotide
  Sense strand starting at position 3409 of SEQ ID NO: 1884722
gaacaagacugacaagaug

SEQ ID NO: 2287089 - RNA, 19 nt, Artificial Sequence
  Description of Artificial Sequence: Synthetic oligonucleotide
  Antisense strand to SEQ ID NO: 2287088
caucuugucagucuuguuc

SEQ ID NO: 2287090 - RNA, 19 nt, Artificial Sequence
  Description of Artificial Sequence: Synthetic oligonucleotide
  Sense strand starting at position 3441 of SEQ ID NO: 1884722
ggauguacauuucagugga

SEQ ID NO: 2287091 - RNA, 19 nt, Artificial Sequence
  Description of Artificial Sequence: Synthetic oligonucleotide
  Antisense strand to SEQ ID NO: 2287090
uccacugaaauguacaucc

SEQ ID NO: 2287092 - RNA, 19 nt, Artificial Sequence
  Description of Artificial Sequence: Synthetic oligonucleotide
  Sense strand starting at position 3473 of SEQ ID NO: 1884722
acaagauaaugucagaaag

SEQ ID NO: 2287093 - RNA, 19 nt, Artificial Sequence
  Description of Artificial Sequence: Synthetic oligonucleotide
  Antisense strand to SEQ ID NO: 2287092
cuuucugacauuaucuugu

SEQ ID NO: 2287094 - RNA, 19 nt, Artificial Sequence
  Description of Artificial Sequence: Synthetic oligonucleotide
  Sense strand starting at position 3481 of SEQ ID NO: 1884722
augucagaaagugguuaau

SEQ ID NO: 2287095 - RNA, 19 nt, Artificial Sequence
  Description of Artificial Sequence: Synthetic oligonucleotide
  Antisense strand to SEQ ID NO: 2287094
auuaaccacuuucugacau

SEQ ID NO: 2287096 - RNA, 19 nt, Artificial Sequence
  Description of Artificial Sequence: Synthetic oligonucleotide
  Sense strand starting at position 3484 of SEQ ID NO: 1884722
ucagaaagugguuaaugcu

SEQ ID NO: 2287097 - RNA, 19 nt, Artificial Sequence
  Description of Artificial Sequence: Synthetic oligonucleotide
  Antisense strand to SEQ ID NO: 2287096
agcauuaaccacuuucuga

SEQ ID NO: 2287098 - RNA, 19 nt, Artificial Sequence
  Description of Artificial Sequence: Synthetic oligonucleotide
  Sense strand starting at position 3834 of SEQ ID NO: 1884722
gaacuacuuuagcuagagu

SEQ ID NO: 2287099 - RNA, 19 nt, Artificial Sequence
  Description of Artificial Sequence: Synthetic oligonucleotide
  Antisense strand to SEQ ID NO: 2287098
acucuagcuaaaguaguuc

SEQ ID NO: 2287100 - RNA, 19 nt, Artificial Sequence
  Description of Artificial Sequence: Synthetic oligonucleotide
  Sense strand starting at position 4 of SEQ ID NO: 1884723
gaaucuaguguuuagcgga

SEQ ID NO: 2287101 - RNA, 19 nt, Artificial Sequence
  Description of Artificial Sequence: Synthetic oligonucleotide
  Antisense strand to SEQ ID NO: 2287100
uccgcuaaacacuagauuc

SEQ ID NO: 2287102 - RNA, 19 nt, Artificial Sequence
  Description of Artificial Sequence: Synthetic oligonucleotide
  Sense strand starting at position 89 of SEQ ID NO: 1884723
ggaugagcucacugaggau

SEQ ID NO: 2287103 - RNA, 19 nt, Artificial Sequence
  Description of Artificial Sequence: Synthetic oligonucleotide
  Antisense strand to SEQ ID NO: 2287102
auccucagugagcucaucc

SEQ ID NO: 2287104 - RNA, 19 nt, Artificial Sequence
  Description of Artificial Sequence: Synthetic oligonucleotide
  Sense strand starting at position 95 of SEQ ID NO: 1884723
gcucacugaggauguagau

SEQ ID NO: 2287105 - RNA, 19 nt, Artificial Sequence
  Description of Artificial Sequence: Synthetic oligonucleotide
  Antisense strand to SEQ ID NO: 2287104
aucuacauccucagugagc

SEQ ID NO: 2287106 - RNA, 19 nt, Artificial Sequence
  Description of Artificial Sequence: Synthetic oligonucleotide
  Sense strand starting at position 128 of SEQ ID NO: 1884723
aggacugagcccugaggua

SEQ ID NO: 2287107 - RNA, 19 nt, Artificial Sequence
  Description of Artificial Sequence: Synthetic oligonucleotide
  Antisense strand to SEQ ID NO: 2287106
uaccucagggcucaguccu

SEQ ID NO: 2287108 - RNA, 19 nt, Artificial Sequence
  Description of Artificial Sequence: Synthetic oligonucleotide
  Sense strand starting at position 146 of SEQ ID NO: 1884723
aaggcacuccgauguuaag

SEQ ID NO: 2287109 - RNA, 19 nt, Artificial Sequence
  Description of Artificial Sequence: Synthetic oligonucleotide
  Antisense strand to SEQ ID NO: 2287108
cuuaacaucggagugccuu

SEQ ID NO: 2287110 - RNA, 19 nt, Artificial Sequence
  Description of Artificial Sequence: Synthetic oligonucleotide
  Sense strand starting at position 153 of SEQ ID NO: 1884723
uccgauguuaaggagucaa

SEQ ID NO: 2287111 - RNA, 19 nt, Artificial Sequence
  Description of Artificial Sequence: Synthetic oligonucleotide
  Antisense strand to SEQ ID NO: 2287110
uugacuccuuaacaucgga

SEQ ID NO: 2287112 - RNA, 19 nt, Artificial Sequence
  Description of Artificial Sequence: Synthetic oligonucleotide
  Sense strand starting at position 167 of SEQ ID NO: 1884723
gucaaaguguuaccagugu

SEQ ID NO: 2287113 - RNA, 19 nt, Artificial Sequence
  Description of Artificial Sequence: Synthetic oligonucleotide
  Antisense strand to SEQ ID NO: 2287112
acacugguaacacuuugac

SEQ ID NO: 2287114 - RNA, 19 nt, Artificial Sequence
  Description of Artificial Sequence: Synthetic oligonucleotide
  Sense strand starting at position 342 of SEQ ID NO: 1884723
ggguuaguuucacagggaa

SEQ ID NO: 2287115 - RNA, 19 nt, Artificial Sequence
  Description of Artificial Sequence: Synthetic oligonucleotide
  Antisense strand to SEQ ID NO: 2287114
uucccugugaaacuaaccc

SEQ ID NO: 2287116 - RNA, 19 nt, Artificial Sequence
  Description of Artificial Sequence: Synthetic oligonucleotide
  Sense strand starting at position 359 of SEQ ID NO: 1884723
aagggauugguccaggcau

SEQ ID NO: 2287117 - RNA, 19 nt, Artificial Sequence
  Description of Artificial Sequence: Synthetic oligonucleotide
  Antisense strand to SEQ ID NO: 2287116
augccuggaccaaucccuu

SEQ ID NO: 2287118 - RNA, 19 nt, Artificial Sequence
  Description of Artificial Sequence: Synthetic oligonucleotide
  Sense strand starting at position 360 of SEQ ID NO: 1884723
agggauugguccaggcaug

SEQ ID NO: 2287119 - RNA, 19 nt, Artificial Sequence
  Description of Artificial Sequence: Synthetic oligonucleotide
  Antisense strand to SEQ ID NO: 2287118
caugccuggaccaaucccu

SEQ ID NO: 2287120 - RNA, 19 nt, Artificial Sequence
  Description of Artificial Sequence: Synthetic oligonucleotide
  Sense strand starting at position 391 of SEQ ID NO: 1884723
uugucuagugcuucucagu

SEQ ID NO: 2287121 - RNA, 19 nt, Artificial Sequence
  Description of Artificial Sequence: Synthetic oligonucleotide
  Antisense strand to SEQ ID NO: 2287120
acugagaagcacuagacaa

SEQ ID NO: 2287122 - RNA, 19 nt, Artificial Sequence
  Description of Artificial Sequence: Synthetic oligonucleotide
  Sense strand starting at position 396 of SEQ ID NO: 1884723
uagugcuucucaguagcuu

SEQ ID NO: 2287123 - RNA, 19 nt, Artificial Sequence
  Description of Artificial Sequence: Synthetic oligonucleotide
  Antisense strand to SEQ ID NO: 2287122
aagcuacugagaagcacua

SEQ ID NO: 2287124 - RNA, 19 nt, Artificial Sequence
  Description of Artificial Sequence: Synthetic oligonucleotide
  Sense strand starting at position 500 of SEQ ID NO: 1884723
ggguaacaauaguugaagu

SEQ ID NO: 2287125 - RNA, 19 nt, Artificial Sequence
  Description of Artificial Sequence: Synthetic oligonucleotide
  Antisense strand to SEQ ID NO: 2287124
acuucaacuauuguuaccc

SEQ ID NO: 2287126 - RNA, 19 nt, Artificial Sequence
  Description of Artificial Sequence: Synthetic oligonucleotide
  Sense strand starting at position 501 of SEQ ID NO: 1884723
gguaacaauaguugaagua

SEQ ID NO: 2287127 - RNA, 19 nt, Artificial Sequence
  Description of Artificial Sequence: Synthetic oligonucleotide
  Antisense strand to SEQ ID NO: 2287126
uacuucaacuauuguuacc

SEQ ID NO: 2287128 - RNA, 19 nt, Artificial Sequence
  Description of Artificial Sequence: Synthetic oligonucleotide
  Sense strand starting at position 502 of SEQ ID NO: 1884723
guaacaauaguugaaguau

SEQ ID NO: 2287129 - RNA, 19 nt, Artificial Sequence
  Description of Artificial Sequence: Synthetic oligonucleotide
  Antisense strand to SEQ ID NO: 2287128
auacuucaacuauuguuac

SEQ ID NO: 2287130 - RNA, 19 nt, Artificial Sequence
  Description of Artificial Sequence: Synthetic oligonucleotide
  Sense strand starting at position 517 of SEQ ID NO: 1884723
guauaagucuaacugcaca

SEQ ID NO: 2287131 - RNA, 19 nt, Artificial Sequence
  Description of Artificial Sequence: Synthetic oligonucleotide
  Antisense strand to SEQ ID NO: 2287130
ugugcaguuagacuuauac

SEQ ID NO: 2287132 - RNA, 19 nt, Artificial Sequence
  Description of Artificial Sequence: Synthetic oligonucleotide
  Sense strand starting at position 607 of SEQ ID NO: 1884723
uguggauuggcuggauguu

SEQ ID NO: 2287133 - RNA, 19 nt, Artificial Sequence
  Description of Artificial Sequence: Synthetic oligonucleotide
  Antisense strand to SEQ ID NO: 2287132
aacauccagccaauccaca

SEQ ID NO: 2287134 - RNA, 19 nt, Artificial Sequence
  Description of Artificial Sequence: Synthetic oligonucleotide
  Sense strand starting at position 608 of SEQ ID NO: 1884723
guggauuggcuggauguua

SEQ ID NO: 2287135 - RNA, 19 nt, Artificial Sequence
  Description of Artificial Sequence: Synthetic oligonucleotide
  Antisense strand to SEQ ID NO: 2287134
uaacauccagccaauccac

SEQ ID NO: 2287136 - RNA, 19 nt, Artificial Sequence
  Description of Artificial Sequence: Synthetic oligonucleotide
  Sense strand starting at position 616 of SEQ ID NO: 1884723
gcuggauguuaagcuacaa

SEQ ID NO: 2287137 - RNA, 19 nt, Artificial Sequence
  Description of Artificial Sequence: Synthetic oligonucleotide
  Antisense strand to SEQ ID NO: 2287136
uuguagcuuaacauccagc

SEQ ID NO: 2287138 - RNA, 19 nt, Artificial Sequence
  Description of Artificial Sequence: Synthetic oligonucleotide
  Sense strand starting at position 736 of SEQ ID NO: 1884723
agauguggucuuugggaua

SEQ ID NO: 2287139 - RNA, 19 nt, Artificial Sequence
  Description of Artificial Sequence: Synthetic oligonucleotide
  Antisense strand to SEQ ID NO: 2287138
uaucccaaagaccacaucu

SEQ ID NO: 2287140 - RNA, 19 nt, Artificial Sequence
  Description of Artificial Sequence: Synthetic oligonucleotide
  Sense strand starting at position 739 of SEQ ID NO: 1884723
uguggucuuugggauaaga

SEQ ID NO: 2287141 - RNA, 19 nt, Artificial Sequence
  Description of Artificial Sequence: Synthetic oligonucleotide
  Antisense strand to SEQ ID NO: 2287140
ucuuaucccaaagaccaca

SEQ ID NO: 2287142 - RNA, 19 nt, Artificial Sequence
  Description of Artificial Sequence: Synthetic oligonucleotide
  Sense strand starting at position 831 of SEQ ID NO: 1884723
gcuguaguucccggaggac

SEQ ID NO: 2287143 - RNA, 19 nt, Artificial Sequence
  Description of Artificial Sequence: Synthetic oligonucleotide
  Antisense strand to SEQ ID NO: 2287142
guccuccgggaacuacagc

SEQ ID NO: 2287144 - RNA, 19 nt, Artificial Sequence
  Description of Artificial Sequence: Synthetic oligonucleotide
  Sense strand starting at position 879 of SEQ ID NO: 1884723
agagaucacugacaaagag

SEQ ID NO: 2287145 - RNA, 19 nt, Artificial Sequence
  Description of Artificial Sequence: Synthetic oligonucleotide
  Antisense strand to SEQ ID NO: 2287144
cucuuugucagugaucucu

SEQ ID NO: 2287146 - RNA, 19 nt, Artificial Sequence
  Description of Artificial Sequence: Synthetic oligonucleotide
  Sense strand starting at position 909 of SEQ ID NO: 1884723
gugguuguguuaccggaaa

SEQ ID NO: 2287147 - RNA, 19 nt, Artificial Sequence
  Description of Artificial Sequence: Synthetic oligonucleotide
  Antisense strand to SEQ ID NO: 2287146
uuuccgguaacacaaccac

SEQ ID NO: 2287148 - RNA, 19 nt, Artificial Sequence
  Description of Artificial Sequence: Synthetic oligonucleotide
  Sense strand starting at position 2883 of SEQ ID NO: 1884723
ucuaguuggucccauagau

SEQ ID NO: 2287149 - RNA, 19 nt, Artificial Sequence
  Description of Artificial Sequence: Synthetic oligonucleotide
  Antisense strand to SEQ ID NO: 2287148
aucuaugggaccaacuaga

SEQ ID NO: 2287150 - RNA, 19 nt, Artificial Sequence
  Description of Artificial Sequence: Synthetic oligonucleotide
  Sense strand starting at position 2887 of SEQ ID NO: 1884723
guuggucccauagaugaug

SEQ ID NO: 2287151 - RNA, 19 nt, Artificial Sequence
  Description of Artificial Sequence: Synthetic oligonucleotide
  Antisense strand to SEQ ID NO: 2287150
caucaucuaugggaccaac

SEQ ID NO: 2287152 - RNA, 19 nt, Artificial Sequence
  Description of Artificial Sequence: Synthetic oligonucleotide
  Sense strand starting at position 3065 of SEQ ID NO: 1884723
gaauucucuccugagaguu

SEQ ID NO: 2287153 - RNA, 19 nt, Artificial Sequence
  Description of Artificial Sequence: Synthetic oligonucleotide
  Antisense strand to SEQ ID NO: 2287152
aacucucaggagagaauuc

SEQ ID NO: 2287154 - RNA, 19 nt, Artificial Sequence
  Description of Artificial Sequence: Synthetic oligonucleotide
  Sense strand starting at position 3075 of SEQ ID NO: 1884723
cugagaguugccuggcagu

SEQ ID NO: 2287155 - RNA, 19 nt, Artificial Sequence
  Description of Artificial Sequence: Synthetic oligonucleotide
  Antisense strand to SEQ ID NO: 2287154
acugccaggcaacucucag

SEQ ID NO: 2287156 - RNA, 19 nt, Artificial Sequence
  Description of Artificial Sequence: Synthetic oligonucleotide
  Sense strand starting at position 3085 of SEQ ID NO: 1884723
ccuggcaguuucuucuaua

SEQ ID NO: 2287157 - RNA, 19 nt, Artificial Sequence
  Description of Artificial Sequence: Synthetic oligonucleotide
  Antisense strand to SEQ ID NO: 2287156
uauagaagaaacugccagg

SEQ ID NO: 2287158 - RNA, 19 nt, Artificial Sequence
  Description of Artificial Sequence: Synthetic oligonucleotide
  Sense strand starting at position 3086 of SEQ ID NO: 1884723
cuggcaguuucuucuauag

SEQ ID NO: 2287159 - RNA, 19 nt, Artificial Sequence
  Description of Artificial Sequence: Synthetic oligonucleotide
  Antisense strand to SEQ ID NO: 2287158
cuauagaagaaacugccag

SEQ ID NO: 2287160 - RNA, 19 nt, Artificial Sequence
  Description of Artificial Sequence: Synthetic oligonucleotide
  Sense strand starting at position 3104 of SEQ ID NO: 1884723
gcauuaauauugcaggaga

SEQ ID NO: 2287161 - RNA, 19 nt, Artificial Sequence
  Description of Artificial Sequence: Synthetic oligonucleotide
  Antisense strand to SEQ ID NO: 2287160
ucuccugcaauauuaaugc

SEQ ID NO: 2287162 - RNA, 19 nt, Artificial Sequence
  Description of Artificial Sequence: Synthetic oligonucleotide
  Sense strand starting at position 3107 of SEQ ID NO: 1884723
uuaauauugcaggagagcu

SEQ ID NO: 2287163 - RNA, 19 nt, Artificial Sequence
  Description of Artificial Sequence: Synthetic oligonucleotide
  Antisense strand to SEQ ID NO: 2287162
agcucuccugcaauauuaa

SEQ ID NO: 2287164 - RNA, 19 nt, Artificial Sequence
  Description of Artificial Sequence: Synthetic oligonucleotide
  Sense strand starting at position 3189 of SEQ ID NO: 1884723
gccuucuugcauugcugua

SEQ ID NO: 2287165 - RNA, 19 nt, Artificial Sequence
  Description of Artificial Sequence: Synthetic oligonucleotide
  Antisense strand to SEQ ID NO: 2287164
uacagcaaugcaagaaggc

SEQ ID NO: 2287166 - RNA, 19 nt, Artificial Sequence
  Description of Artificial Sequence: Synthetic oligonucleotide
  Sense strand starting at position 3597 of SEQ ID NO: 1884723
caggcugucgugagcggua

SEQ ID NO: 2287167 - RNA, 19 nt, Artificial Sequence
  Description of Artificial Sequence: Synthetic oligonucleotide
  Antisense strand to SEQ ID NO: 2287166
uaccgcucacgacagccug

SEQ ID NO: 2287168 - RNA, 19 nt, Artificial Sequence
  Description of Artificial Sequence: Synthetic oligonucleotide
  Sense strand starting at position 3602 of SEQ ID NO: 1884723
ugucgugagcgguacaguu

SEQ ID NO: 2287169 - RNA, 19 nt, Artificial Sequence
  Description of Artificial Sequence: Synthetic oligonucleotide
  Antisense strand to SEQ ID NO: 2287168
aacuguaccgcucacgaca

SEQ ID NO: 2287170 - RNA, 19 nt, Artificial Sequence
  Description of Artificial Sequence: Synthetic oligonucleotide
  Sense strand starting at position 3757 of SEQ ID NO: 1884723
uccacaaguccugguguuu

SEQ ID NO: 2287171 - RNA, 19 nt, Artificial Sequence
  Description of Artificial Sequence: Synthetic oligonucleotide
  Antisense strand to SEQ ID NO: 2287170
aaacaccaggacuugugga

SEQ ID NO: 2287172 - RNA, 19 nt, Artificial Sequence
  Description of Artificial Sequence: Synthetic oligonucleotide
  Sense strand starting at position 3769 of SEQ ID NO: 1884723
gguguuucucccgaggaga

SEQ ID NO: 2287173 - RNA, 19 nt, Artificial Sequence
  Description of Artificial Sequence: Synthetic oligonucleotide
  Antisense strand to SEQ ID NO: 2287172
ucuccucgggagaaacacc

SEQ ID NO: 2287174 - RNA, 19 nt, Artificial Sequence
  Description of Artificial Sequence: Synthetic oligonucleotide
  Sense strand starting at position 3771 of SEQ ID NO: 1884723
uguuucucccgaggagaua

SEQ ID NO: 2287175 - RNA, 19 nt, Artificial Sequence
  Description of Artificial Sequence: Synthetic oligonucleotide
  Antisense strand to SEQ ID NO: 2287174
uaucuccucgggagaaaca

SEQ ID NO: 2287176 - RNA, 19 nt, Artificial Sequence
  Description of Artificial Sequence: Synthetic oligonucleotide
  Sense strand starting at position 3772 of SEQ ID NO: 1884723
guuucucccgaggagauaa

SEQ ID NO: 2287177 - RNA, 19 nt, Artificial Sequence
  Description of Artificial Sequence: Synthetic oligonucleotide
  Antisense strand to SEQ ID NO: 2287176
uuaucuccucgggagaaac

SEQ ID NO: 2287178 - RNA, 19 nt, Artificial Sequence
  Description of Artificial Sequence: Synthetic oligonucleotide
  Sense strand starting at position 3879 of SEQ ID NO: 1884723
uccugacacuuaugagacu

SEQ ID NO: 2287179 - RNA, 19 nt, Artificial Sequence
  Description of Artificial Sequence: Synthetic oligonucleotide
  Antisense strand to SEQ ID NO: 2287178
agucucauaagugucagga

SEQ ID NO: 2287180 - RNA, 19 nt, Artificial Sequence
  Description of Artificial Sequence: Synthetic oligonucleotide
  Sense strand starting at position 57 of SEQ ID NO: 1884724
ucucauauaugugcucaua

SEQ ID NO: 2287181 - RNA, 19 nt, Artificial Sequence
  Description of Artificial Sequence: Synthetic oligonucleotide
  Antisense strand to SEQ ID NO: 2287180
uaugagcacauauaugaga

SEQ ID NO: 2287182 - RNA, 19 nt, Artificial Sequence
  Description of Artificial Sequence: Synthetic oligonucleotide
  Sense strand starting at position 59 of SEQ ID NO: 1884724
ucauauaugugcucauaua

SEQ ID NO: 2287183 - RNA, 19 nt, Artificial Sequence
  Description of Artificial Sequence: Synthetic oligonucleotide
  Antisense strand to SEQ ID NO: 2287182
uauaugagcacauauauga

SEQ ID NO: 2287184 - RNA, 19 nt, Artificial Sequence
  Description of Artificial Sequence: Synthetic oligonucleotide
  Sense strand starting at position 202 of SEQ ID NO: 1884724
ucauauauuuacgaggaag

SEQ ID NO: 2287185 - RNA, 19 nt, Artificial Sequence
  Description of Artificial Sequence: Synthetic oligonucleotide
  Antisense strand to SEQ ID NO: 2287184
cuuccucguaaauauauga

SEQ ID NO: 2287186 - RNA, 19 nt, Artificial Sequence
  Description of Artificial Sequence: Synthetic oligonucleotide
  Sense strand starting at position 352 of SEQ ID NO: 1884724
ugugcuccuuuggauuauu

SEQ ID NO: 2287187 - RNA, 19 nt, Artificial Sequence
  Description of Artificial Sequence: Synthetic oligonucleotide
  Antisense strand to SEQ ID NO: 2287186
aauaauccaaaggagcaca

SEQ ID NO: 2287188 - RNA, 19 nt, Artificial Sequence
  Description of Artificial Sequence: Synthetic oligonucleotide
  Sense strand starting at position 360 of SEQ ID NO: 1884724
uuuggauuauucuccaaag

SEQ ID NO: 2287189 - RNA, 19 nt, Artificial Sequence
  Description of Artificial Sequence: Synthetic oligonucleotide
  Antisense strand to SEQ ID NO: 2287188
cuuuggagaauaauccaaa

SEQ ID NO: 2287190 - RNA, 19 nt, Artificial Sequence
  Description of Artificial Sequence: Synthetic oligonucleotide
  Sense strand starting at position 450 of SEQ ID NO: 1884724
uggcaugauuuguguguuu

SEQ ID NO: 2287191 - RNA, 19 nt, Artificial Sequence
  Description of Artificial Sequence: Synthetic oligonucleotide
  Antisense strand to SEQ ID NO: 2287190
aaacacacaaaucaugcca

SEQ ID NO: 2287192 - RNA, 19 nt, Artificial Sequence
  Description of Artificial Sequence: Synthetic oligonucleotide
  Sense strand starting at position 714 of SEQ ID NO: 1884724
gucuacauuucucgccaca

SEQ ID NO: 2287193 - RNA, 19 nt, Artificial Sequence
  Description of Artificial Sequence: Synthetic oligonucleotide
  Antisense strand to SEQ ID NO: 2287192
uguggcgagaaauguagac

SEQ ID NO: 2287194 - RNA, 19 nt, Artificial Sequence
  Description of Artificial Sequence: Synthetic oligonucleotide
  Sense strand starting at position 729 of SEQ ID NO: 1884724
cacauuucccguuaugugu

SEQ ID NO: 2287195 - RNA, 19 nt, Artificial Sequence
  Description of Artificial Sequence: Synthetic oligonucleotide
  Antisense strand to SEQ ID NO: 2287194
acacauaacgggaaaugug

SEQ ID NO: 2287196 - RNA, 19 nt, Artificial Sequence
  Description of Artificial Sequence: Synthetic oligonucleotide
  Sense strand starting at position 731 of SEQ ID NO: 1884724
cauuucccguuauguguua

SEQ ID NO: 2287197 - RNA, 19 nt, Artificial Sequence
  Description of Artificial Sequence: Synthetic oligonucleotide
  Antisense strand to SEQ ID NO: 2287196
uaacacauaacgggaaaug

SEQ ID NO: 2287198 - RNA, 19 nt, Artificial Sequence
  Description of Artificial Sequence: Synthetic oligonucleotide
  Sense strand starting at position 849 of SEQ ID NO: 1884724
guacuugcccaccaggauu

SEQ ID NO: 2287199 - RNA, 19 nt, Artificial Sequence
  Description of Artificial Sequence: Synthetic oligonucleotide
  Antisense strand to SEQ ID NO: 2287198
aauccuggugggcaaguac

SEQ ID NO: 2287200 - RNA, 19 nt, Artificial Sequence
  Description of Artificial Sequence: Synthetic oligonucleotide
  Sense strand starting at position 1003 of SEQ ID NO: 1884724
guauuccuauagguuugua

SEQ ID NO: 2287201 - RNA, 19 nt, Artificial Sequence
  Description of Artificial Sequence: Synthetic oligonucleotide
  Antisense strand to SEQ ID NO: 2287200
uacaaaccuauaggaauac

SEQ ID NO: 2287202 - RNA, 19 nt, Artificial Sequence
  Description of Artificial Sequence: Synthetic oligonucleotide
  Sense strand starting at position 1008 of SEQ ID NO: 1884724
ccuauagguuuguauggaa

SEQ ID NO: 2287203 - RNA, 19 nt, Artificial Sequence
  Description of Artificial Sequence: Synthetic oligonucleotide
  Antisense strand to SEQ ID NO: 2287202
uuccauacaaaccuauagg

SEQ ID NO: 2287204 - RNA, 19 nt, Artificial Sequence
  Description of Artificial Sequence: Synthetic oligonucleotide
  Sense strand starting at position 1139 of SEQ ID NO: 1884724
uuuauugaauuccggaaag

SEQ ID NO: 2287205 - RNA, 19 nt, Artificial Sequence
  Description of Artificial Sequence: Synthetic oligonucleotide
  Antisense strand to SEQ ID NO: 2287204
cuuuccggaauucaauaaa

SEQ ID NO: 2287206 - RNA, 19 nt, Artificial Sequence
  Description of Artificial Sequence: Synthetic oligonucleotide
  Sense strand starting at position 1155 of SEQ ID NO: 1884724
aagguuauggguugagauc

SEQ ID NO: 2287207 - RNA, 19 nt, Artificial Sequence
  Description of Artificial Sequence: Synthetic oligonucleotide
  Antisense strand to SEQ ID NO: 2287206
gaucucaacccauaaccuu

SEQ ID NO: 2287208 - RNA, 19 nt, Artificial Sequence
  Description of Artificial Sequence: Synthetic oligonucleotide
  Sense strand starting at position 1205 of SEQ ID NO: 1884724
cacuauaaguucccggaga

SEQ ID NO: 2287209 - RNA, 19 nt, Artificial Sequence
  Description of Artificial Sequence: Synthetic oligonucleotide
  Antisense strand to SEQ ID NO: 2287208
ucuccgggaacuuauagug

SEQ ID NO: 2287210 - RNA, 19 nt, Artificial Sequence
  Description of Artificial Sequence: Synthetic oligonucleotide
  Sense strand starting at position 1206 of SEQ ID NO: 1884724
acuauaaguucccggagaa

SEQ ID NO: 2287211 - RNA, 19 nt, Artificial Sequence
  Description of Artificial Sequence: Synthetic oligonucleotide
  Antisense strand to SEQ ID NO: 2287210
uucuccgggaacuuauagu

SEQ ID NO: 2287212 - RNA, 19 nt, Artificial Sequence
  Description of Artificial Sequence: Synthetic oligonucleotide
  Sense strand starting at position 1207 of SEQ ID NO: 1884724
cuauaaguucccggagaag

SEQ ID NO: 2287213 - RNA, 19 nt, Artificial Sequence
  Description of Artificial Sequence: Synthetic oligonucleotide
  Antisense strand to SEQ ID NO: 2287212
cuucuccgggaacuuauag

SEQ ID NO: 2287214 - RNA, 19 nt, Artificial Sequence
  Description of Artificial Sequence: Synthetic oligonucleotide
  Sense strand starting at position 1210 of SEQ ID NO: 1884724
uaaguucccggagaaggua

SEQ ID NO: 2287215 - RNA, 19 nt, Artificial Sequence
  Description of Artificial Sequence: Synthetic oligonucleotide
  Antisense strand to SEQ ID NO: 2287214
uaccuucuccgggaacuua

SEQ ID NO: 2287216 - RNA, 19 nt, Artificial Sequence
  Description of Artificial Sequence: Synthetic oligonucleotide
  Sense strand starting at position 1218 of SEQ ID NO: 1884724
cggagaagguagaguaaua

SEQ ID NO: 2287217 - RNA, 19 nt, Artificial Sequence
  Description of Artificial Sequence: Synthetic oligonucleotide
  Antisense strand to SEQ ID NO: 2287216
uauuacucuaccuucuccg

SEQ ID NO: 2287218 - RNA, 19 nt, Artificial Sequence
  Description of Artificial Sequence: Synthetic oligonucleotide
  Sense strand starting at position 1468 of SEQ ID NO: 1884724
ccucauguuugucaaacgu

SEQ ID NO: 2287219 - RNA, 19 nt, Artificial Sequence
  Description of Artificial Sequence: Synthetic oligonucleotide
  Antisense strand to SEQ ID NO: 2287218
acguuugacaaacaugagg

SEQ ID NO: 2287220 - RNA, 19 nt, Artificial Sequence
  Description of Artificial Sequence: Synthetic oligonucleotide
  Sense strand starting at position 1472 of SEQ ID NO: 1884724
auguuugucaaacgugaga

SEQ ID NO: 2287221 - RNA, 19 nt, Artificial Sequence
  Description of Artificial Sequence: Synthetic oligonucleotide
  Antisense strand to SEQ ID NO: 2287220
ucucacguuugacaaacau

SEQ ID NO: 2287222 - RNA, 19 nt, Artificial Sequence
  Description of Artificial Sequence: Synthetic oligonucleotide
  Sense strand starting at position 1474 of SEQ ID NO: 1884724
guuugucaaacgugagaag

SEQ ID NO: 2287223 - RNA, 19 nt, Artificial Sequence
  Description of Artificial Sequence: Synthetic oligonucleotide
  Antisense strand to SEQ ID NO: 2287222
cuucucacguuugacaaac

SEQ ID NO: 2287224 - RNA, 19 nt, Artificial Sequence
  Description of Artificial Sequence: Synthetic oligonucleotide
  Sense strand starting at position 1475 of SEQ ID NO: 1884724
uuugucaaacgugagaagu

SEQ ID NO: 2287225 - RNA, 19 nt, Artificial Sequence
  Description of Artificial Sequence: Synthetic oligonucleotide
  Antisense strand to SEQ ID NO: 2287224
acuucucacguuugacaaa

SEQ ID NO: 2287226 - RNA, 19 nt, Artificial Sequence
  Description of Artificial Sequence: Synthetic oligonucleotide
  Sense strand starting at position 1677 of SEQ ID NO: 1884724
gcuccugagaguuggaaua

SEQ ID NO: 2287227 - RNA, 19 nt, Artificial Sequence
  Description of Artificial Sequence: Synthetic oligonucleotide
  Antisense strand to SEQ ID NO: 2287226
uauuccaacucucaggagc

SEQ ID NO: 2287228 - RNA, 19 nt, Artificial Sequence
  Description of Artificial Sequence: Synthetic oligonucleotide
  Sense strand starting at position 1679 of SEQ ID NO: 1884724
uccugagaguuggaauaca

SEQ ID NO: 2287229 - RNA, 19 nt, Artificial Sequence
  Description of Artificial Sequence: Synthetic oligonucleotide
  Antisense strand to SEQ ID NO: 2287228
uguauuccaacucucagga

SEQ ID NO: 2287230 - RNA, 19 nt, Artificial Sequence
  Description of Artificial Sequence: Synthetic oligonucleotide
  Sense strand starting at position 1971 of SEQ ID NO: 1884724
ggaaguaguucaugcagau

SEQ ID NO: 2287231 - RNA, 19 nt, Artificial Sequence
  Description of Artificial Sequence: Synthetic oligonucleotide
  Antisense strand to SEQ ID NO: 2287230
aucugcaugaacuacuucc

SEQ ID NO: 2287232 - RNA, 19 nt, Artificial Sequence
  Description of Artificial Sequence: Synthetic oligonucleotide
  Sense strand starting at position 2104 of SEQ ID NO: 1884724
ggugauacgugauagcuau

SEQ ID NO: 2287233 - RNA, 19 nt, Artificial Sequence
  Description of Artificial Sequence: Synthetic oligonucleotide
  Antisense strand to SEQ ID NO: 2287232
auagcuaucacguaucacc

SEQ ID NO: 2287234 - RNA, 19 nt, Artificial Sequence
  Description of Artificial Sequence: Synthetic oligonucleotide
  Sense strand starting at position 2134 of SEQ ID NO: 1884724
gacagugcucauuaaagug

SEQ ID NO: 2287235 - RNA, 19 nt, Artificial Sequence
  Description of Artificial Sequence: Synthetic oligonucleotide
  Antisense strand to SEQ ID NO: 2287234
cacuuuaaugagcacuguc

SEQ ID NO: 2287236 - RNA, 19 nt, Artificial Sequence
  Description of Artificial Sequence: Synthetic oligonucleotide
  Sense strand starting at position 2196 of SEQ ID NO: 1884724
cgaagagagucuucaggcu

SEQ ID NO: 2287237 - RNA, 19 nt, Artificial Sequence
  Description of Artificial Sequence: Synthetic oligonucleotide
  Antisense strand to SEQ ID NO: 2287236
agccugaagacucucuucg

SEQ ID NO: 2287238 - RNA, 19 nt, Artificial Sequence
  Description of Artificial Sequence: Synthetic oligonucleotide
  Sense strand starting at position 2317 of SEQ ID NO: 1884724
cgauaugaaacucgaguuu

SEQ ID NO: 2287239 - RNA, 19 nt, Artificial Sequence
  Description of Artificial Sequence: Synthetic oligonucleotide
  Antisense strand to SEQ ID NO: 2287238
aaacucgaguuucauaucg

SEQ ID NO: 2287240 - RNA, 19 nt, Artificial Sequence
  Description of Artificial Sequence: Synthetic oligonucleotide
  Sense strand starting at position 2709 of SEQ ID NO: 1884724
acaguuauauuacuauggu

SEQ ID NO: 2287241 - RNA, 19 nt, Artificial Sequence
  Description of Artificial Sequence: Synthetic oligonucleotide
  Antisense strand to SEQ ID NO: 2287240
accauaguaauauaacugu

SEQ ID NO: 2287242 - RNA, 19 nt, Artificial Sequence
  Description of Artificial Sequence: Synthetic oligonucleotide
  Sense strand starting at position 2746 of SEQ ID NO: 1884724
uguugacuugacuggacua

SEQ ID NO: 2287243 - RNA, 19 nt, Artificial Sequence
  Description of Artificial Sequence: Synthetic oligonucleotide
  Antisense strand to SEQ ID NO: 2287242
uaguccagucaagucaaca

SEQ ID NO: 2287244 - RNA, 19 nt, Artificial Sequence
  Description of Artificial Sequence: Synthetic oligonucleotide
  Sense strand starting at position 2747 of SEQ ID NO: 1884724
guugacuugacuggacuaa

SEQ ID NO: 2287245 - RNA, 19 nt, Artificial Sequence
  Description of Artificial Sequence: Synthetic oligonucleotide
  Antisense strand to SEQ ID NO: 2287244
uuaguccagucaagucaac

SEQ ID NO: 2287246 - RNA, 19 nt, Artificial Sequence
  Description of Artificial Sequence: Synthetic oligonucleotide
  Sense strand starting at position 2981 of SEQ ID NO: 1884724
ucgguaucuccaggacaca

SEQ ID NO: 2287247 - RNA, 19 nt, Artificial Sequence
  Description of Artificial Sequence: Synthetic oligonucleotide
  Antisense strand to SEQ ID NO: 2287246
uguguccuggagauaccga

SEQ ID NO: 2287248 - RNA, 19 nt, Artificial Sequence
  Description of Artificial Sequence: Synthetic oligonucleotide
  Sense strand starting at position 2982 of SEQ ID NO: 1884724
cgguaucuccaggacacaa

SEQ ID NO: 2287249 - RNA, 19 nt, Artificial Sequence
  Description of Artificial Sequence: Synthetic oligonucleotide
  Antisense strand to SEQ ID NO: 2287248
uuguguccuggagauaccg

SEQ ID NO: 2287250 - RNA, 19 nt, Artificial Sequence
  Description of Artificial Sequence: Synthetic oligonucleotide
  Sense strand starting at position 3248 of SEQ ID NO: 1884724
augguauacgaaggcaauu

SEQ ID NO: 2287251 - RNA, 19 nt, Artificial Sequence
  Description of Artificial Sequence: Synthetic oligonucleotide
  Antisense strand to SEQ ID NO: 2287250
aauugccuucguauaccau

SEQ ID NO: 2287252 - RNA, 19 nt, Artificial Sequence
  Description of Artificial Sequence: Synthetic oligonucleotide
  Sense strand starting at position 3539 of SEQ ID NO: 1884724
ugagguaagccucaguuaa

SEQ ID NO: 2287253 - RNA, 19 nt, Artificial Sequence
  Description of Artificial Sequence: Synthetic oligonucleotide
  Antisense strand to SEQ ID NO: 2287252
uuaacugaggcuuaccuca

SEQ ID NO: 2287254 - RNA, 19 nt, Artificial Sequence
  Description of Artificial Sequence: Synthetic oligonucleotide
  Sense strand starting at position 3625 of SEQ ID NO: 1884724
uuucuaagcuaagguauuu

SEQ ID NO: 2287255 - RNA, 19 nt, Artificial Sequence
  Description of Artificial Sequence: Synthetic oligonucleotide
  Antisense strand to SEQ ID NO: 2287254
aaauaccuuagcuuagaaa

SEQ ID NO: 2287256 - RNA, 19 nt, Artificial Sequence
  Description of Artificial Sequence: Synthetic oligonucleotide
  Sense strand starting at position 3776 of SEQ ID NO: 1884724
cuuaauuaaguguagcaau

SEQ ID NO: 2287257 - RNA, 19 nt, Artificial Sequence
  Description of Artificial Sequence: Synthetic oligonucleotide
  Antisense strand to SEQ ID NO: 2287256
auugcuacacuuaauuaag

SEQ ID NO: 2287258 - RNA, 19 nt, Artificial Sequence
  Description of Artificial Sequence: Synthetic oligonucleotide
  Sense strand starting at position 3787 of SEQ ID NO: 1884724
guagcaauauuaguacauu

SEQ ID NO: 2287259 - RNA, 19 nt, Artificial Sequence
  Description of Artificial Sequence: Synthetic oligonucleotide
  Antisense strand to SEQ ID NO: 2287258
aauguacuaauauugcuac

SEQ ID NO: 2287260 - RNA, 19 nt, Artificial Sequence
  Description of Artificial Sequence: Synthetic oligonucleotide
  Sense strand starting at position 30 of SEQ ID NO: 1884725
guaucagugugacuggauu

SEQ ID NO: 2287261 - RNA, 19 nt, Artificial Sequence
  Description of Artificial Sequence: Synthetic oligonucleotide
  Antisense strand to SEQ ID NO: 2287260
aauccagucacacugauac

SEQ ID NO: 2287262 - RNA, 19 nt, Artificial Sequence
  Description of Artificial Sequence: Synthetic oligonucleotide
  Sense strand starting at position 32 of SEQ ID NO: 1884725
aucagugugacuggauuaa

SEQ ID NO: 2287263 - RNA, 19 nt, Artificial Sequence
  Description of Artificial Sequence: Synthetic oligonucleotide
  Antisense strand to SEQ ID NO: 2287262
uuaauccagucacacugau

SEQ ID NO: 2287264 - RNA, 19 nt, Artificial Sequence
  Description of Artificial Sequence: Synthetic oligonucleotide
  Sense strand starting at position 184 of SEQ ID NO: 1884725
gcugguagcucagauagaa

SEQ ID NO: 2287265 - RNA, 19 nt, Artificial Sequence
  Description of Artificial Sequence: Synthetic oligonucleotide
  Antisense strand to SEQ ID NO: 2287264
uucuaucugagcuaccagc

SEQ ID NO: 2287266 - RNA, 19 nt, Artificial Sequence
  Description of Artificial Sequence: Synthetic oligonucleotide
  Sense strand starting at position 385 of SEQ ID NO: 1884725
gguagagucauguguagcu

SEQ ID NO: 2287267 - RNA, 19 nt, Artificial Sequence
  Description of Artificial Sequence: Synthetic oligonucleotide
  Antisense strand to SEQ ID NO: 2287266
agcuacacaugacucuacc

SEQ ID NO: 2287268 - RNA, 19 nt, Artificial Sequence
  Description of Artificial Sequence: Synthetic oligonucleotide
  Sense strand starting at position 392 of SEQ ID NO: 1884725
ucauguguagcuugaugac

SEQ ID NO: 2287269 - RNA, 19 nt, Artificial Sequence
  Description of Artificial Sequence: Synthetic oligonucleotide
  Antisense strand to SEQ ID NO: 2287268
gucaucaagcuacacauga

SEQ ID NO: 2287270 - RNA, 19 nt, Artificial Sequence
  Description of Artificial Sequence: Synthetic oligonucleotide
  Sense strand starting at position 398 of SEQ ID NO: 1884725
guagcuugaugacagauau

SEQ ID NO: 2287271 - RNA, 19 nt, Artificial Sequence
  Description of Artificial Sequence: Synthetic oligonucleotide
  Antisense strand to SEQ ID NO: 2287270
auaucugucaucaagcuac

SEQ ID NO: 2287272 - RNA, 19 nt, Artificial Sequence
  Description of Artificial Sequence: Synthetic oligonucleotide
  Sense strand starting at position 690 of SEQ ID NO: 1884725
aagugaugugccugccaca

SEQ ID NO: 2287273 - RNA, 19 nt, Artificial Sequence
  Description of Artificial Sequence: Synthetic oligonucleotide
  Antisense strand to SEQ ID NO: 2287272
uguggcaggcacaucacuu

SEQ ID NO: 2287274 - RNA, 19 nt, Artificial Sequence
  Description of Artificial Sequence: Synthetic oligonucleotide
  Sense strand starting at position 872 of SEQ ID NO: 1884725
cagcauguucuguacggua

SEQ ID NO: 2287275 - RNA, 19 nt, Artificial Sequence
  Description of Artificial Sequence: Synthetic oligonucleotide
  Antisense strand to SEQ ID NO: 2287274
uaccguacagaacaugcug

SEQ ID NO: 2287276 - RNA, 19 nt, Artificial Sequence
  Description of Artificial Sequence: Synthetic oligonucleotide
  Sense strand starting at position 874 of SEQ ID NO: 1884725
gcauguucuguacgguaua

SEQ ID NO: 2287277 - RNA, 19 nt, Artificial Sequence
  Description of Artificial Sequence: Synthetic oligonucleotide
  Antisense strand to SEQ ID NO: 2287276
uauaccguacagaacaugc

SEQ ID NO: 2287278 - RNA, 19 nt, Artificial Sequence
  Description of Artificial Sequence: Synthetic oligonucleotide
  Sense strand starting at position 886 of SEQ ID NO: 1884725
cgguauacuguaggcaauu

SEQ ID NO: 2287279 - RNA, 19 nt, Artificial Sequence
  Description of Artificial Sequence: Synthetic oligonucleotide
  Antisense strand to SEQ ID NO: 2287278
aauugccuacaguauaccg

SEQ ID NO: 2287280 - RNA, 19 nt, Artificial Sequence
  Description of Artificial Sequence: Synthetic oligonucleotide
  Sense strand starting at position 1531 of SEQ ID NO: 1884725
gugcacauauauguauuaa

SEQ ID NO: 2287281 - RNA, 19 nt, Artificial Sequence
  Description of Artificial Sequence: Synthetic oligonucleotide
  Antisense strand to SEQ ID NO: 2287280
uuaauacauauaugugcac

SEQ ID NO: 2287282 - RNA, 19 nt, Artificial Sequence
  Description of Artificial Sequence: Synthetic oligonucleotide
  Sense strand starting at position 1809 of SEQ ID NO: 1884725
accgcuggguucuuugaau

SEQ ID NO: 2287283 - RNA, 19 nt, Artificial Sequence
  Description of Artificial Sequence: Synthetic oligonucleotide
  Antisense strand to SEQ ID NO: 2287282
auucaaagaacccagcggu

SEQ ID NO: 2287284 - RNA, 19 nt, Artificial Sequence
  Description of Artificial Sequence: Synthetic oligonucleotide
  Sense strand starting at position 2056 of SEQ ID NO: 1884725
auaagacgauuagguuuau

SEQ ID NO: 2287285 - RNA, 19 nt, Artificial Sequence
  Description of Artificial Sequence: Synthetic oligonucleotide
  Antisense strand to SEQ ID NO: 2287284
auaaaccuaaucgucuuau

SEQ ID NO: 2287286 - RNA, 19 nt, Artificial Sequence
  Description of Artificial Sequence: Synthetic oligonucleotide
  Sense strand starting at position 2146 of SEQ ID NO: 1884725
ugaagugaaucauauguaa

SEQ ID NO: 2287287 - RNA, 19 nt, Artificial Sequence
  Description of Artificial Sequence: Synthetic oligonucleotide
  Antisense strand to SEQ ID NO: 2287286
uuacauaugauucacuuca

SEQ ID NO: 2287288 - RNA, 19 nt, Artificial Sequence
  Description of Artificial Sequence: Synthetic oligonucleotide
  Sense strand starting at position 2149 of SEQ ID NO: 1884725
agugaaucauauguaacau

SEQ ID NO: 2287289 - RNA, 19 nt, Artificial Sequence
  Description of Artificial Sequence: Synthetic oligonucleotide
  Antisense strand to SEQ ID NO: 2287288
auguuacauaugauucacu

SEQ ID NO: 2287290 - RNA, 19 nt, Artificial Sequence
  Description of Artificial Sequence: Synthetic oligonucleotide
  Sense strand starting at position 2555 of SEQ ID NO: 1884725
ccuaaaugcugcuuuagua

SEQ ID NO: 2287291 - RNA, 19 nt, Artificial Sequence
  Description of Artificial Sequence: Synthetic oligonucleotide
  Antisense strand to SEQ ID NO: 2287290
uacuaaagcagcauuuagg

SEQ ID NO: 2287292 - RNA, 19 nt, Artificial Sequence
  Description of Artificial Sequence: Synthetic oligonucleotide
  Sense strand starting at position 2579 of SEQ ID NO: 1884725
auaggcuauucccagagaa

SEQ ID NO: 2287293 - RNA, 19 nt, Artificial Sequence
  Description of Artificial Sequence: Synthetic oligonucleotide
  Antisense strand to SEQ ID NO: 2287292
uucucugggaauagccuau

SEQ ID NO: 2287294 - RNA, 19 nt, Artificial Sequence
  Description of Artificial Sequence: Synthetic oligonucleotide
  Sense strand starting at position 2581 of SEQ ID NO: 1884725
aggcuauucccagagaagu

SEQ ID NO: 2287295 - RNA, 19 nt, Artificial Sequence
  Description of Artificial Sequence: Synthetic oligonucleotide
  Antisense strand to SEQ ID NO: 2287294
acuucucugggaauagccu

SEQ ID NO: 2287296 - RNA, 19 nt, Artificial Sequence
  Description of Artificial Sequence: Synthetic oligonucleotide
  Sense strand starting at position 2669 of SEQ ID NO: 1884725
ccacuaauuugaggucucu

SEQ ID NO: 2287297 - RNA, 19 nt, Artificial Sequence
  Description of Artificial Sequence: Synthetic oligonucleotide
  Antisense strand to SEQ ID NO: 2287296
agagaccucaaauuagugg

SEQ ID NO: 2287298 - RNA, 19 nt, Artificial Sequence
  Description of Artificial Sequence: Synthetic oligonucleotide
  Sense strand starting at position 2709 of SEQ ID NO: 1884725
ccaaucucaugggugaaau

SEQ ID NO: 2287299 - RNA, 19 nt, Artificial Sequence
  Description of Artificial Sequence: Synthetic oligonucleotide
  Antisense strand to SEQ ID NO: 2287298
auuucacccaugagauugg

SEQ ID NO: 2287300 - RNA, 19 nt, Artificial Sequence
  Description of Artificial Sequence: Synthetic oligonucleotide
  Sense strand starting at position 2710 of SEQ ID NO: 1884725
caaucucaugggugaaaua

SEQ ID NO: 2287301 - RNA, 19 nt, Artificial Sequence
  Description of Artificial Sequence: Synthetic oligonucleotide
  Antisense strand to SEQ ID NO: 2287300
uauuucacccaugagauug

SEQ ID NO: 2287302 - RNA, 19 nt, Artificial Sequence
  Description of Artificial Sequence: Synthetic oligonucleotide
  Sense strand starting at position 2754 of SEQ ID NO: 1884725
ccacauagugcaugauguu

SEQ ID NO: 2287303 - RNA, 19 nt, Artificial Sequence
  Description of Artificial Sequence: Synthetic oligonucleotide
  Antisense strand to SEQ ID NO: 2287302
aacaucaugcacuaugugg

SEQ ID NO: 2287304 - RNA, 19 nt, Artificial Sequence
  Description of Artificial Sequence: Synthetic oligonucleotide
  Sense strand starting at position 2770 of SEQ ID NO: 1884725
guuguaugaugacuagaaa

SEQ ID NO: 2287305 - RNA, 19 nt, Artificial Sequence
  Description of Artificial Sequence: Synthetic oligonucleotide
  Antisense strand to SEQ ID NO: 2287304
uuucuagucaucauacaac

SEQ ID NO: 2287306 - RNA, 19 nt, Artificial Sequence
  Description of Artificial Sequence: Synthetic oligonucleotide
  Sense strand starting at position 2782 of SEQ ID NO: 1884725
cuagaaaugcaauguaaua

SEQ ID NO: 2287307 - RNA, 19 nt, Artificial Sequence
  Description of Artificial Sequence: Synthetic oligonucleotide
  Antisense strand to SEQ ID NO: 2287306
uauuacauugcauuucuag

SEQ ID NO: 2287308 - RNA, 19 nt, Artificial Sequence
  Description of Artificial Sequence: Synthetic oligonucleotide
  Sense strand starting at position 2851 of SEQ ID NO: 1884725
gaauccaaaugauagggau

SEQ ID NO: 2287309 - RNA, 19 nt, Artificial Sequence
  Description of Artificial Sequence: Synthetic oligonucleotide
  Antisense strand to SEQ ID NO: 2287308
aucccuaucauuuggauuc

SEQ ID NO: 2287310 - RNA, 19 nt, Artificial Sequence
  Description of Artificial Sequence: Synthetic oligonucleotide
  Sense strand starting at position 2904 of SEQ ID NO: 1884725
guugucaugugacaauuaa

SEQ ID NO: 2287311 - RNA, 19 nt, Artificial Sequence
  Description of Artificial Sequence: Synthetic oligonucleotide
  Antisense strand to SEQ ID NO: 2287310
uuaauugucacaugacaac

SEQ ID NO: 2287312 - RNA, 19 nt, Artificial Sequence
  Description of Artificial Sequence: Synthetic oligonucleotide
  Sense strand starting at position 3001 of SEQ ID NO: 1884725
uauagucaagagugcuuau

SEQ ID NO: 2287313 - RNA, 19 nt, Artificial Sequence
  Description of Artificial Sequence: Synthetic oligonucleotide
  Antisense strand to SEQ ID NO: 2287312
auaagcacucuugacuaua

SEQ ID NO: 2287314 - RNA, 19 nt, Artificial Sequence
  Description of Artificial Sequence: Synthetic oligonucleotide
  Sense strand starting at position 3004 of SEQ ID NO: 1884725
agucaagagugcuuaugua

SEQ ID NO: 2287315 - RNA, 19 nt, Artificial Sequence
  Description of Artificial Sequence: Synthetic oligonucleotide
  Antisense strand to SEQ ID NO: 2287314
uacauaagcacucuugacu

SEQ ID NO: 2287316 - RNA, 19 nt, Artificial Sequence
  Description of Artificial Sequence: Synthetic oligonucleotide
  Sense strand starting at position 3050 of SEQ ID NO: 1884725
acauacaaaucauggagaa

SEQ ID NO: 2287317 - RNA, 19 nt, Artificial Sequence
  Description of Artificial Sequence: Synthetic oligonucleotide
  Antisense strand to SEQ ID NO: 2287316
uucuccaugauuuguaugu

SEQ ID NO: 2287318 - RNA, 19 nt, Artificial Sequence
  Description of Artificial Sequence: Synthetic oligonucleotide
  Sense strand starting at position 3074 of SEQ ID NO: 1884725
aucuaugguuaugugcaau

SEQ ID NO: 2287319 - RNA, 19 nt, Artificial Sequence
  Description of Artificial Sequence: Synthetic oligonucleotide
  Antisense strand to SEQ ID NO: 2287318
auugcacauaaccauagau

SEQ ID NO: 2287320 - RNA, 19 nt, Artificial Sequence
  Description of Artificial Sequence: Synthetic oligonucleotide
  Sense strand starting at position 3077 of SEQ ID NO: 1884725
uaugguuaugugcaauagu

SEQ ID NO: 2287321 - RNA, 19 nt, Artificial Sequence
  Description of Artificial Sequence: Synthetic oligonucleotide
  Antisense strand to SEQ ID NO: 2287320
acuauugcacauaaccaua

SEQ ID NO: 2287322 - RNA, 19 nt, Artificial Sequence
  Description of Artificial Sequence: Synthetic oligonucleotide
  Sense strand starting at position 3441 of SEQ ID NO: 1884725
gggugcaugugcaaugaga

SEQ ID NO: 2287323 - RNA, 19 nt, Artificial Sequence
  Description of Artificial Sequence: Synthetic oligonucleotide
  Antisense strand to SEQ ID NO: 2287322
ucucauugcacaugcaccc

SEQ ID NO: 2287324 - RNA, 19 nt, Artificial Sequence
  Description of Artificial Sequence: Synthetic oligonucleotide
  Sense strand starting at position 3443 of SEQ ID NO: 1884725
gugcaugugcaaugagaac

SEQ ID NO: 2287325 - RNA, 19 nt, Artificial Sequence
  Description of Artificial Sequence: Synthetic oligonucleotide
  Antisense strand to SEQ ID NO: 2287324
guucucauugcacaugcac

SEQ ID NO: 2287326 - RNA, 19 nt, Artificial Sequence
  Description of Artificial Sequence: Synthetic oligonucleotide
  Sense strand starting at position 3478 of SEQ ID NO: 1884725
agguuugaguuaccaggga

SEQ ID NO: 2287327 - RNA, 19 nt, Artificial Sequence
  Description of Artificial Sequence: Synthetic oligonucleotide
  Antisense strand to SEQ ID NO: 2287326
ucccugguaacucaaaccu

SEQ ID NO: 2287328 - RNA, 19 nt, Artificial Sequence
  Description of Artificial Sequence: Synthetic oligonucleotide
  Sense strand starting at position 3482 of SEQ ID NO: 1884725
uugaguuaccagggaucaa

SEQ ID NO: 2287329 - RNA, 19 nt, Artificial Sequence
  Description of Artificial Sequence: Synthetic oligonucleotide
  Antisense strand to SEQ ID NO: 2287328
uugaucccugguaacucaa

SEQ ID NO: 2287330 - RNA, 19 nt, Artificial Sequence
  Description of Artificial Sequence: Synthetic oligonucleotide
  Sense strand starting at position 3572 of SEQ ID NO: 1884725
uucugaauaucaugaugaa

SEQ ID NO: 2287331 - RNA, 19 nt, Artificial Sequence
  Description of Artificial Sequence: Synthetic oligonucleotide
  Antisense strand to SEQ ID NO: 2287330
uucaucaugauauucagaa

SEQ ID NO: 2287332 - RNA, 19 nt, Artificial Sequence
  Description of Artificial Sequence: Synthetic oligonucleotide
  Sense strand starting at position 3575 of SEQ ID NO: 1884725
ugaauaucaugaugaaauc

SEQ ID NO: 2287333 - RNA, 19 nt, Artificial Sequence
  Description of Artificial Sequence: Synthetic oligonucleotide
  Antisense strand to SEQ ID NO: 2287332
gauuucaucaugauauuca

SEQ ID NO: 2287334 - RNA, 19 nt, Artificial Sequence
  Description of Artificial Sequence: Synthetic oligonucleotide
  Sense strand starting at position 3690 of SEQ ID NO: 1884725
ggcagugcuuguguugaag

SEQ ID NO: 2287335 - RNA, 19 nt, Artificial Sequence
  Description of Artificial Sequence: Synthetic oligonucleotide
  Antisense strand to SEQ ID NO: 2287334
cuucaacacaagcacugcc

SEQ ID NO: 2287336 - RNA, 19 nt, Artificial Sequence
  Description of Artificial Sequence: Synthetic oligonucleotide
  Sense strand starting at position 3859 of SEQ ID NO: 1884725
gagguuguggguugaaucu

SEQ ID NO: 2287337 - RNA, 19 nt, Artificial Sequence
  Description of Artificial Sequence: Synthetic oligonucleotide
  Antisense strand to SEQ ID NO: 2287336
agauucaacccacaaccuc

SEQ ID NO: 2287338 - RNA, 19 nt, Artificial Sequence
  Description of Artificial Sequence: Synthetic oligonucleotide
  Sense strand starting at position 3960 of SEQ ID NO: 1884725
aguguauaauaagugcuua

SEQ ID NO: 2287339 - RNA, 19 nt, Artificial Sequence
  Description of Artificial Sequence: Synthetic oligonucleotide
  Antisense strand to SEQ ID NO: 2287338
uaagcacuuauuauacacu

SEQ ID NO: 2287340 - RNA, 19 nt, Artificial Sequence
  Description of Artificial Sequence: Synthetic oligonucleotide
  Sense strand starting at position 29 of SEQ ID NO: 1884726
guaucagugugacuggauu

SEQ ID NO: 2287341 - RNA, 19 nt, Artificial Sequence
  Description of Artificial Sequence: Synthetic oligonucleotide
  Antisense strand to SEQ ID NO: 2287340
aauccagucacacugauac

SEQ ID NO: 2287342 - RNA, 19 nt, Artificial Sequence
  Description of Artificial Sequence: Synthetic oligonucleotide
  Sense strand starting at position 31 of SEQ ID NO: 1884726
aucagugugacuggauuaa

SEQ ID NO: 2287343 - RNA, 19 nt, Artificial Sequence
  Description of Artificial Sequence: Synthetic oligonucleotide
  Antisense strand to SEQ ID NO: 2287342
uuaauccagucacacugau

SEQ ID NO: 2287344 - RNA, 19 nt, Artificial Sequence
  Description of Artificial Sequence: Synthetic oligonucleotide
  Sense strand starting at position 689 of SEQ ID NO: 1884726
aagugaugugccugccaca

SEQ ID NO: 2287345 - RNA, 19 nt, Artificial Sequence
  Description of Artificial Sequence: Synthetic oligonucleotide
  Antisense strand to SEQ ID NO: 2287344
uguggcaggcacaucacuu

SEQ ID NO: 2287346 - RNA, 19 nt, Artificial Sequence
  Description of Artificial Sequence: Synthetic oligonucleotide
  Sense strand starting at position 871 of SEQ ID NO: 1884726
cagcauguucuguacggua

SEQ ID NO: 2287347 - RNA, 19 nt, Artificial Sequence
  Description of Artificial Sequence: Synthetic oligonucleotide
  Antisense strand to SEQ ID NO: 2287346
uaccguacagaacaugcug

SEQ ID NO: 2287348 - RNA, 19 nt, Artificial Sequence
  Description of Artificial Sequence: Synthetic oligonucleotide
  Sense strand starting at position 873 of SEQ ID NO: 1884726
gcauguucuguacgguaua

SEQ ID NO: 2287349 - RNA, 19 nt, Artificial Sequence
  Description of Artificial Sequence: Synthetic oligonucleotide
  Antisense strand to SEQ ID NO: 2287348
uauaccguacagaacaugc

SEQ ID NO: 2287350 - RNA, 19 nt, Artificial Sequence
  Description of Artificial Sequence: Synthetic oligonucleotide
  Sense strand starting at position 885 of SEQ ID NO: 1884726
cgguauacuguaggcaauu

SEQ ID NO: 2287351 - RNA, 19 nt, Artificial Sequence
  Description of Artificial Sequence: Synthetic oligonucleotide
  Antisense strand to SEQ ID NO: 2287350
aauugccuacaguauaccg

SEQ ID NO: 2287352 - RNA, 19 nt, Artificial Sequence
  Description of Artificial Sequence: Synthetic oligonucleotide
  Sense strand starting at position 1003 of SEQ ID NO: 1884726
guuugugguugacugaaau

SEQ ID NO: 2287353 - RNA, 19 nt, Artificial Sequence
  Description of Artificial Sequence: Synthetic oligonucleotide
  Antisense strand to SEQ ID NO: 2287352
auuucagucaaccacaaac

SEQ ID NO: 2287354 - RNA, 19 nt, Artificial Sequence
  Description of Artificial Sequence: Synthetic oligonucleotide
  Sense strand starting at position 1016 of SEQ ID NO: 1884726
ugaaauggcucaugaaugu

SEQ ID NO: 2287355 - RNA, 19 nt, Artificial Sequence
  Description of Artificial Sequence: Synthetic oligonucleotide
  Antisense strand to SEQ ID NO: 2287354
acauucaugagccauuuca

SEQ ID NO: 2287356 - RNA, 19 nt, Artificial Sequence
  Description of Artificial Sequence: Synthetic oligonucleotide
  Sense strand starting at position 1520 of SEQ ID NO: 1884726
acacacuuaugugcacaua

SEQ ID NO: 2287357 - RNA, 19 nt, Artificial Sequence
  Description of Artificial Sequence: Synthetic oligonucleotide
  Antisense strand to SEQ ID NO: 2287356
uaugugcacauaagugugu

SEQ ID NO: 2287358 - RNA, 19 nt, Artificial Sequence
  Description of Artificial Sequence: Synthetic oligonucleotide
  Sense strand starting at position 1808 of SEQ ID NO: 1884726
accgcuggguucuuugaau

SEQ ID NO: 2287359 - RNA, 19 nt, Artificial Sequence
  Description of Artificial Sequence: Synthetic oligonucleotide
  Antisense strand to SEQ ID NO: 2287358
auucaaagaacccagcggu

SEQ ID NO: 2287360 - RNA, 19 nt, Artificial Sequence
  Description of Artificial Sequence: Synthetic oligonucleotide
  Sense strand starting at position 1820 of SEQ ID NO: 1884726
uuugaaugguucccacagu

SEQ ID NO: 2287361 - RNA, 19 nt, Artificial Sequence
  Description of Artificial Sequence: Synthetic oligonucleotide
  Antisense strand to SEQ ID NO: 2287360
acugugggaaccauucaaa

SEQ ID NO: 2287362 - RNA, 19 nt, Artificial Sequence
  Description of Artificial Sequence: Synthetic oligonucleotide
  Sense strand starting at position 1861 of SEQ ID NO: 1884726
uuaaguacuccucaaguuc

SEQ ID NO: 2287363 - RNA, 19 nt, Artificial Sequence
  Description of Artificial Sequence: Synthetic oligonucleotide
  Antisense strand to SEQ ID NO: 2287362
gaacuugaggaguacuuaa

SEQ ID NO: 2287364 - RNA, 19 nt, Artificial Sequence
  Description of Artificial Sequence: Synthetic oligonucleotide
  Sense strand starting at position 2055 of SEQ ID NO: 1884726
auaagacgauuagguuuau

SEQ ID NO: 2287365 - RNA, 19 nt, Artificial Sequence
  Description of Artificial Sequence: Synthetic oligonucleotide
  Antisense strand to SEQ ID NO: 2287364
auaaaccuaaucgucuuau

SEQ ID NO: 2287366 - RNA, 19 nt, Artificial Sequence
  Description of Artificial Sequence: Synthetic oligonucleotide
  Sense strand starting at position 2061 of SEQ ID NO: 1884726
cgauuagguuuaugcagua

SEQ ID NO: 2287367 - RNA, 19 nt, Artificial Sequence
  Description of Artificial Sequence: Synthetic oligonucleotide
  Antisense strand to SEQ ID NO: 2287366
uacugcauaaaccuaaucg

SEQ ID NO: 2287368 - RNA, 19 nt, Artificial Sequence
  Description of Artificial Sequence: Synthetic oligonucleotide
  Sense strand starting at position 2145 of SEQ ID NO: 1884726
ugaagugaaucauauguaa

SEQ ID NO: 2287369 - RNA, 19 nt, Artificial Sequence
  Description of Artificial Sequence: Synthetic oligonucleotide
  Antisense strand to SEQ ID NO: 2287368
uuacauaugauucacuuca

SEQ ID NO: 2287370 - RNA, 19 nt, Artificial Sequence
  Description of Artificial Sequence: Synthetic oligonucleotide
  Sense strand starting at position 2148 of SEQ ID NO: 1884726
agugaaucauauguaacau

SEQ ID NO: 2287371 - RNA, 19 nt, Artificial Sequence
  Description of Artificial Sequence: Synthetic oligonucleotide
  Antisense strand to SEQ ID NO: 2287370
auguuacauaugauucacu

SEQ ID NO: 2287372 - RNA, 19 nt, Artificial Sequence
  Description of Artificial Sequence: Synthetic oligonucleotide
  Sense strand starting at position 2248 of SEQ ID NO: 1884726
gcauuccucuaagggcaua

SEQ ID NO: 2287373 - RNA, 19 nt, Artificial Sequence
  Description of Artificial Sequence: Synthetic oligonucleotide
  Antisense strand to SEQ ID NO: 2287372
uaugcccuuagaggaaugc

SEQ ID NO: 2287374 - RNA, 19 nt, Artificial Sequence
  Description of Artificial Sequence: Synthetic oligonucleotide
  Sense strand starting at position 2511 of SEQ ID NO: 1884726
uccaaagugcuuuggagua

SEQ ID NO: 2287375 - RNA, 19 nt, Artificial Sequence
  Description of Artificial Sequence: Synthetic oligonucleotide
  Antisense strand to SEQ ID NO: 2287374
uacuccaaagcacuuugga

SEQ ID NO: 2287376 - RNA, 19 nt, Artificial Sequence
  Description of Artificial Sequence: Synthetic oligonucleotide
  Sense strand starting at position 2513 of SEQ ID NO: 1884726
caaagugcuuuggaguaca

SEQ ID NO: 2287377 - RNA, 19 nt, Artificial Sequence
  Description of Artificial Sequence: Synthetic oligonucleotide
  Antisense strand to SEQ ID NO: 2287376
uguacuccaaagcacuuug

SEQ ID NO: 2287378 - RNA, 19 nt, Artificial Sequence
  Description of Artificial Sequence: Synthetic oligonucleotide
  Sense strand starting at position 2759 of SEQ ID NO: 1884726
agugcaugauguuguauga

SEQ ID NO: 2287379 - RNA, 19 nt, Artificial Sequence
  Description of Artificial Sequence: Synthetic oligonucleotide
  Antisense strand to SEQ ID NO: 2287378
ucauacaacaucaugcacu

SEQ ID NO: 2287380 - RNA, 19 nt, Artificial Sequence
  Description of Artificial Sequence: Synthetic oligonucleotide
  Sense strand starting at position 2766 of SEQ ID NO: 1884726
gauguuguaugaugacuag

SEQ ID NO: 2287381 - RNA, 19 nt, Artificial Sequence
  Description of Artificial Sequence: Synthetic oligonucleotide
  Antisense strand to SEQ ID NO: 2287380
cuagucaucauacaacauc

SEQ ID NO: 2287382 - RNA, 19 nt, Artificial Sequence
  Description of Artificial Sequence: Synthetic oligonucleotide
  Sense strand starting at position 2769 of SEQ ID NO: 1884726
guuguaugaugacuagaaa

SEQ ID NO: 2287383 - RNA, 19 nt, Artificial Sequence
  Description of Artificial Sequence: Synthetic oligonucleotide
  Antisense strand to SEQ ID NO: 2287382
uuucuagucaucauacaac

SEQ ID NO: 2287384 - RNA, 19 nt, Artificial Sequence
  Description of Artificial Sequence: Synthetic oligonucleotide
  Sense strand starting at position 2903 of SEQ ID NO: 1884726
guugucaugugacaauuaa

SEQ ID NO: 2287385 - RNA, 19 nt, Artificial Sequence
  Description of Artificial Sequence: Synthetic oligonucleotide
  Antisense strand to SEQ ID NO: 2287384
uuaauugucacaugacaac

SEQ ID NO: 2287386 - RNA, 19 nt, Artificial Sequence
  Description of Artificial Sequence: Synthetic oligonucleotide
  Sense strand starting at position 3472 of SEQ ID NO: 1884726
cuuucugagguuugaguua

SEQ ID NO: 2287387 - RNA, 19 nt, Artificial Sequence
  Description of Artificial Sequence: Synthetic oligonucleotide
  Antisense strand to SEQ ID NO: 2287386
uaacucaaaccucagaaag

SEQ ID NO: 2287388 - RNA, 19 nt, Artificial Sequence
  Description of Artificial Sequence: Synthetic oligonucleotide
  Sense strand starting at position 3562 of SEQ ID NO: 1884726
guucccugcuguucugaau

SEQ ID NO: 2287389 - RNA, 19 nt, Artificial Sequence
  Description of Artificial Sequence: Synthetic oligonucleotide
  Antisense strand to SEQ ID NO: 2287388
auucagaacagcagggaac

SEQ ID NO: 2287390 - RNA, 19 nt, Artificial Sequence
  Description of Artificial Sequence: Synthetic oligonucleotide
  Sense strand starting at position 3568 of SEQ ID NO: 1884726
ugcuguucugaauaucaug

SEQ ID NO: 2287391 - RNA, 19 nt, Artificial Sequence
  Description of Artificial Sequence: Synthetic oligonucleotide
  Antisense strand to SEQ ID NO: 2287390
caugauauucagaacagca

SEQ ID NO: 2287392 - RNA, 19 nt, Artificial Sequence
  Description of Artificial Sequence: Synthetic oligonucleotide
  Sense strand starting at position 3573 of SEQ ID NO: 1884726
uucugaauaucaugaugaa

SEQ ID NO: 2287393 - RNA, 19 nt, Artificial Sequence
  Description of Artificial Sequence: Synthetic oligonucleotide
  Antisense strand to SEQ ID NO: 2287392
uucaucaugauauucagaa

SEQ ID NO: 2287394 - RNA, 19 nt, Artificial Sequence
  Description of Artificial Sequence: Synthetic oligonucleotide
  Sense strand starting at position 3576 of SEQ ID NO: 1884726
ugaauaucaugaugaaauc

SEQ ID NO: 2287395 - RNA, 19 nt, Artificial Sequence
  Description of Artificial Sequence: Synthetic oligonucleotide
  Antisense strand to SEQ ID NO: 2287394
gauuucaucaugauauuca

SEQ ID NO: 2287396 - RNA, 19 nt, Artificial Sequence
  Description of Artificial Sequence: Synthetic oligonucleotide
  Sense strand starting at position 3961 of SEQ ID NO: 1884726
aguguauaauaagugcuua

SEQ ID NO: 2287397 - RNA, 19 nt, Artificial Sequence
  Description of Artificial Sequence: Synthetic oligonucleotide
  Antisense strand to SEQ ID NO: 2287396
uaagcacuuauuauacacu

SEQ ID NO: 2287398 - RNA, 19 nt, Artificial Sequence
  Description of Artificial Sequence: Synthetic oligonucleotide
  Sense strand starting at position 942 of SEQ ID NO: 1884727
gucagagucacaugugaga

SEQ ID NO: 2287399 - RNA, 19 nt, Artificial Sequence
  Description of Artificial Sequence: Synthetic oligonucleotide
  Antisense strand to SEQ ID NO: 2287398
ucucacaugugacucugac

SEQ ID NO: 2287400 - RNA, 19 nt, Artificial Sequence
  Description of Artificial Sequence: Synthetic oligonucleotide
  Sense strand starting at position 1033 of SEQ ID NO: 1884727
gagcuaaaguuguuaauau

SEQ ID NO: 2287401 - RNA, 19 nt, Artificial Sequence
  Description of Artificial Sequence: Synthetic oligonucleotide
  Antisense strand to SEQ ID NO: 2287400
auauuaacaacuuuagcuc

SEQ ID NO: 2287402 - RNA, 19 nt, Artificial Sequence
  Description of Artificial Sequence: Synthetic oligonucleotide
  Sense strand starting at position 1112 of SEQ ID NO: 1884727
gaggauucccagggaggca

SEQ ID NO: 2287403 - RNA, 19 nt, Artificial Sequence
  Description of Artificial Sequence: Synthetic oligonucleotide
  Antisense strand to SEQ ID NO: 2287402
ugccucccugggaauccuc

SEQ ID NO: 2287404 - RNA, 19 nt, Artificial Sequence
  Description of Artificial Sequence: Synthetic oligonucleotide
  Sense strand starting at position 1124 of SEQ ID NO: 1884727
ggaggcaggcauuaacuau

SEQ ID NO: 2287405 - RNA, 19 nt, Artificial Sequence
  Description of Artificial Sequence: Synthetic oligonucleotide
  Antisense strand to SEQ ID NO: 2287404
auaguuaaugccugccucc

SEQ ID NO: 2287406 - RNA, 19 nt, Artificial Sequence
  Description of Artificial Sequence: Synthetic oligonucleotide
  Sense strand starting at position 1364 of SEQ ID NO: 1884727
ugcuaucuaugguuccuaa

SEQ ID NO: 2287407 - RNA, 19 nt, Artificial Sequence
  Description of Artificial Sequence: Synthetic oligonucleotide
  Antisense strand to SEQ ID NO: 2287406
uuaggaaccauagauagca

SEQ ID NO: 2287408 - RNA, 19 nt, Artificial Sequence
  Description of Artificial Sequence: Synthetic oligonucleotide
  Sense strand starting at position 1527 of SEQ ID NO: 1884727
ggucaaggauuccuguguu

SEQ ID NO: 2287409 - RNA, 19 nt, Artificial Sequence
  Description of Artificial Sequence: Synthetic oligonucleotide
  Antisense strand to SEQ ID NO: 2287408
aacacaggaauccuugacc

SEQ ID NO: 2287410 - RNA, 19 nt, Artificial Sequence
  Description of Artificial Sequence: Synthetic oligonucleotide
  Sense strand starting at position 1530 of SEQ ID NO: 1884727
caaggauuccuguguuacc

SEQ ID NO: 2287411 - RNA, 19 nt, Artificial Sequence
  Description of Artificial Sequence: Synthetic oligonucleotide
  Antisense strand to SEQ ID NO: 2287410
gguaacacaggaauccuug

SEQ ID NO: 2287412 - RNA, 19 nt, Artificial Sequence
  Description of Artificial Sequence: Synthetic oligonucleotide
  Sense strand starting at position 1535 of SEQ ID NO: 1884727
auuccuguguuacccaaga

SEQ ID NO: 2287413 - RNA, 19 nt, Artificial Sequence
  Description of Artificial Sequence: Synthetic oligonucleotide
  Antisense strand to SEQ ID NO: 2287412
ucuuggguaacacaggaau

SEQ ID NO: 2287414 - RNA, 19 nt, Artificial Sequence
  Description of Artificial Sequence: Synthetic oligonucleotide
  Sense strand starting at position 1849 of SEQ ID NO: 1884727
gggauucagggcugaauug

SEQ ID NO: 2287415 - RNA, 19 nt, Artificial Sequence
  Description of Artificial Sequence: Synthetic oligonucleotide
  Antisense strand to SEQ ID NO: 2287414
caauucagcccugaauccc

SEQ ID NO: 2287416 - RNA, 19 nt, Artificial Sequence
  Description of Artificial Sequence: Synthetic oligonucleotide
  Sense strand starting at position 1859 of SEQ ID NO: 1884727
gcugaauugaagggacacu

SEQ ID NO: 2287417 - RNA, 19 nt, Artificial Sequence
  Description of Artificial Sequence: Synthetic oligonucleotide
  Antisense strand to SEQ ID NO: 2287416
agugucccuucaauucagc

SEQ ID NO: 2287418 - RNA, 19 nt, Artificial Sequence
  Description of Artificial Sequence: Synthetic oligonucleotide
  Sense strand starting at position 1995 of SEQ ID NO: 1884727
cgaccauauccaggaaguu

SEQ ID NO: 2287419 - RNA, 19 nt, Artificial Sequence
  Description of Artificial Sequence: Synthetic oligonucleotide
  Antisense strand to SEQ ID NO: 2287418
aacuuccuggauauggucg

SEQ ID NO: 2287420 - RNA, 19 nt, Artificial Sequence
  Description of Artificial Sequence: Synthetic oligonucleotide
  Sense strand starting at position 2124 of SEQ ID NO: 1884727
cuucuccuucuaugucaga

SEQ ID NO: 2287421 - RNA, 19 nt, Artificial Sequence
  Description of Artificial Sequence: Synthetic oligonucleotide
  Antisense strand to SEQ ID NO: 2287420
ucugacauagaaggagaag

SEQ ID NO: 2287422 - RNA, 19 nt, Artificial Sequence
  Description of Artificial Sequence: Synthetic oligonucleotide
  Sense strand starting at position 2173 of SEQ ID NO: 1884727
auggcagugaggugcuaaa

SEQ ID NO: 2287423 - RNA, 19 nt, Artificial Sequence
  Description of Artificial Sequence: Synthetic oligonucleotide
  Antisense strand to SEQ ID NO: 2287422
uuuagcaccucacugccau

SEQ ID NO: 2287424 - RNA, 19 nt, Artificial Sequence
  Description of Artificial Sequence: Synthetic oligonucleotide
  Sense strand starting at position 2200 of SEQ ID NO: 1884727
gggugaagucaaugacaug

SEQ ID NO: 2287425 - RNA, 19 nt, Artificial Sequence
  Description of Artificial Sequence: Synthetic oligonucleotide
  Antisense strand to SEQ ID NO: 2287424
caugucauugacuucaccc

SEQ ID NO: 2287426 - RNA, 19 nt, Artificial Sequence
  Description of Artificial Sequence: Synthetic oligonucleotide
  Sense strand starting at position 2201 of SEQ ID NO: 1884727
ggugaagucaaugacaugu

SEQ ID NO: 2287427 - RNA, 19 nt, Artificial Sequence
  Description of Artificial Sequence: Synthetic oligonucleotide
  Antisense strand to SEQ ID NO: 2287426
acaugucauugacuucacc

SEQ ID NO: 2287428 - RNA, 19 nt, Artificial Sequence
  Description of Artificial Sequence: Synthetic oligonucleotide
  Sense strand starting at position 2243 of SEQ ID NO: 1884727
aggugaucuuaugugaaca

SEQ ID NO: 2287429 - RNA, 19 nt, Artificial Sequence
  Description of Artificial Sequence: Synthetic oligonucleotide
  Antisense strand to SEQ ID NO: 2287428
uguucacauaagaucaccu

SEQ ID NO: 2287430 - RNA, 19 nt, Artificial Sequence
  Description of Artificial Sequence: Synthetic oligonucleotide
  Sense strand starting at position 2244 of SEQ ID NO: 1884727
ggugaucuuaugugaacau

SEQ ID NO: 2287431 - RNA, 19 nt, Artificial Sequence
  Description of Artificial Sequence: Synthetic oligonucleotide
  Antisense strand to SEQ ID NO: 2287430
auguucacauaagaucacc

SEQ ID NO: 2287432 - RNA, 19 nt, Artificial Sequence
  Description of Artificial Sequence: Synthetic oligonucleotide
  Sense strand starting at position 2292 of SEQ ID NO: 1884727
gcuggugugaccugaacca

SEQ ID NO: 2287433 - RNA, 19 nt, Artificial Sequence
  Description of Artificial Sequence: Synthetic oligonucleotide
  Antisense strand to SEQ ID NO: 2287432
ugguucaggucacaccagc

SEQ ID NO: 2287434 - RNA, 19 nt, Artificial Sequence
  Description of Artificial Sequence: Synthetic oligonucleotide
  Sense strand starting at position 2326 of SEQ ID NO: 1884727
ggauacuccgaaugugagu

SEQ ID NO: 2287435 - RNA, 19 nt, Artificial Sequence
  Description of Artificial Sequence: Synthetic oligonucleotide
  Antisense strand to SEQ ID NO: 2287434
acucacauucggaguaucc

SEQ ID NO: 2287436 - RNA, 19 nt, Artificial Sequence
  Description of Artificial Sequence: Synthetic oligonucleotide
  Sense strand starting at position 2339 of SEQ ID NO: 1884727
gugaguaucaccugggaca

SEQ ID NO: 2287437 - RNA, 19 nt, Artificial Sequence
  Description of Artificial Sequence: Synthetic oligonucleotide
  Antisense strand to SEQ ID NO: 2287436
ugucccaggugauacucac

SEQ ID NO: 2287438 - RNA, 19 nt, Artificial Sequence
  Description of Artificial Sequence: Synthetic oligonucleotide
  Sense strand starting at position 2361 of SEQ ID NO: 1884727
ugucuauuaggagggaaug

SEQ ID NO: 2287439 - RNA, 19 nt, Artificial Sequence
  Description of Artificial Sequence: Synthetic oligonucleotide
  Antisense strand to SEQ ID NO: 2287438
cauucccuccuaauagaca

SEQ ID NO: 2287440 - RNA, 19 nt, Artificial Sequence
  Description of Artificial Sequence: Synthetic oligonucleotide
  Sense strand starting at position 2849 of SEQ ID NO: 1884727
auguuaucuucuccaagua

SEQ ID NO: 2287441 - RNA, 19 nt, Artificial Sequence
  Description of Artificial Sequence: Synthetic oligonucleotide
  Antisense strand to SEQ ID NO: 2287440
uacuuggagaagauaacau

SEQ ID NO: 2287442 - RNA, 19 nt, Artificial Sequence
  Description of Artificial Sequence: Synthetic oligonucleotide
  Sense strand starting at position 2850 of SEQ ID NO: 1884727
uguuaucuucuccaaguag

SEQ ID NO: 2287443 - RNA, 19 nt, Artificial Sequence
  Description of Artificial Sequence: Synthetic oligonucleotide
  Antisense strand to SEQ ID NO: 2287442
cuacuuggagaagauaaca

SEQ ID NO: 2287444 - RNA, 19 nt, Artificial Sequence
  Description of Artificial Sequence: Synthetic oligonucleotide
  Sense strand starting at position 2917 of SEQ ID NO: 1884727
agcucauaucucugugauc

SEQ ID NO: 2287445 - RNA, 19 nt, Artificial Sequence
  Description of Artificial Sequence: Synthetic oligonucleotide
  Antisense strand to SEQ ID NO: 2287444
gaucacagagauaugagcu

SEQ ID NO: 2287446 - RNA, 19 nt, Artificial Sequence
  Description of Artificial Sequence: Synthetic oligonucleotide
  Sense strand starting at position 3464 of SEQ ID NO: 1884727
ggcuuacagucugugagga

SEQ ID NO: 2287447 - RNA, 19 nt, Artificial Sequence
  Description of Artificial Sequence: Synthetic oligonucleotide
  Antisense strand to SEQ ID NO: 2287446
uccucacagacuguaagcc

SEQ ID NO: 2287448 - RNA, 19 nt, Artificial Sequence
  Description of Artificial Sequence: Synthetic oligonucleotide
  Sense strand starting at position 3518 of SEQ ID NO: 1884727
ugguaaaugcuaggacuaa

SEQ ID NO: 2287449 - RNA, 19 nt, Artificial Sequence
  Description of Artificial Sequence: Synthetic oligonucleotide
  Antisense strand to SEQ ID NO: 2287448
uuaguccuagcauuuacca

SEQ ID NO: 2287450 - RNA, 19 nt, Artificial Sequence
  Description of Artificial Sequence: Synthetic oligonucleotide
  Sense strand starting at position 3553 of SEQ ID NO: 1884727
gggacuguuauggguguuu

SEQ ID NO: 2287451 - RNA, 19 nt, Artificial Sequence
  Description of Artificial Sequence: Synthetic oligonucleotide
  Antisense strand to SEQ ID NO: 2287450
aaacacccauaacaguccc

SEQ ID NO: 2287452 - RNA, 19 nt, Artificial Sequence
  Description of Artificial Sequence: Synthetic oligonucleotide
  Sense strand starting at position 3555 of SEQ ID NO: 1884727
gacuguuauggguguuuag

SEQ ID NO: 2287453 - RNA, 19 nt, Artificial Sequence
  Description of Artificial Sequence: Synthetic oligonucleotide
  Antisense strand to SEQ ID NO: 2287452
cuaaacacccauaacaguc

SEQ ID NO: 2287454 - RNA, 19 nt, Artificial Sequence
  Description of Artificial Sequence: Synthetic oligonucleotide
  Sense strand starting at position 3558 of SEQ ID NO: 1884727
uguuauggguguuuaggga

SEQ ID NO: 2287455 - RNA, 19 nt, Artificial Sequence
  Description of Artificial Sequence: Synthetic oligonucleotide
  Antisense strand to SEQ ID NO: 2287454
ucccuaaacacccauaaca

SEQ ID NO: 2287456 - RNA, 19 nt, Artificial Sequence
  Description of Artificial Sequence: Synthetic oligonucleotide
  Sense strand starting at position 3688 of SEQ ID NO: 1884727
aggcaagugcuccaggaaa

SEQ ID NO: 2287457 - RNA, 19 nt, Artificial Sequence
  Description of Artificial Sequence: Synthetic oligonucleotide
  Antisense strand to SEQ ID NO: 2287456
uuuccuggagcacuugccu

SEQ ID NO: 2287458 - RNA, 19 nt, Artificial Sequence
  Description of Artificial Sequence: Synthetic oligonucleotide
  Sense strand starting at position 3690 of SEQ ID NO: 1884727
gcaagugcuccaggaaaug

SEQ ID NO: 2287459 - RNA, 19 nt, Artificial Sequence
  Description of Artificial Sequence: Synthetic oligonucleotide
  Antisense strand to SEQ ID NO: 2287458
cauuuccuggagcacuugc

SEQ ID NO: 2287460 - RNA, 19 nt, Artificial Sequence
  Description of Artificial Sequence: Synthetic oligonucleotide
  Sense strand starting at position 3695 of SEQ ID NO: 1884727
ugcuccaggaaaugugaau

SEQ ID NO: 2287461 - RNA, 19 nt, Artificial Sequence
  Description of Artificial Sequence: Synthetic oligonucleotide
  Antisense strand to SEQ ID NO: 2287460
auucacauuuccuggagca

SEQ ID NO: 2287462 - RNA, 19 nt, Artificial Sequence
  Description of Artificial Sequence: Synthetic oligonucleotide
  Sense strand starting at position 3721 of SEQ ID NO: 1884727
ggccuagacaaaugugaau

SEQ ID NO: 2287463 - RNA, 19 nt, Artificial Sequence
  Description of Artificial Sequence: Synthetic oligonucleotide
  Antisense strand to SEQ ID NO: 2287462
auucacauuugucuaggcc

SEQ ID NO: 2287464 - RNA, 19 nt, Artificial Sequence
  Description of Artificial Sequence: Synthetic oligonucleotide
  Sense strand starting at position 3737 of SEQ ID NO: 1884727
aauaucauguggucgggaa

SEQ ID NO: 2287465 - RNA, 19 nt, Artificial Sequence
  Description of Artificial Sequence: Synthetic oligonucleotide
  Antisense strand to SEQ ID NO: 2287464
uucccgaccacaugauauu

SEQ ID NO: 2287466 - RNA, 19 nt, Artificial Sequence
  Description of Artificial Sequence: Synthetic oligonucleotide
  Sense strand starting at position 3741 of SEQ ID NO: 1884727
ucauguggucgggaaccua

SEQ ID NO: 2287467 - RNA, 19 nt, Artificial Sequence
  Description of Artificial Sequence: Synthetic oligonucleotide
  Antisense strand to SEQ ID NO: 2287466
uagguucccgaccacauga

SEQ ID NO: 2287468 - RNA, 19 nt, Artificial Sequence
  Description of Artificial Sequence: Synthetic oligonucleotide
  Sense strand starting at position 3759 of SEQ ID NO: 1884727
aaaucaguccuguagagca

SEQ ID NO: 2287469 - RNA, 19 nt, Artificial Sequence
  Description of Artificial Sequence: Synthetic oligonucleotide
  Antisense strand to SEQ ID NO: 2287468
ugcucuacaggacugauuu

SEQ ID NO: 2287470 - RNA, 19 nt, Artificial Sequence
  Description of Artificial Sequence: Synthetic oligonucleotide
  Sense strand starting at position 3797 of SEQ ID NO: 1884727
gggugcacgcucagugaau

SEQ ID NO: 2287471 - RNA, 19 nt, Artificial Sequence
  Description of Artificial Sequence: Synthetic oligonucleotide
  Antisense strand to SEQ ID NO: 2287470
auucacugagcgugcaccc

SEQ ID NO: 2287472 - RNA, 19 nt, Artificial Sequence
  Description of Artificial Sequence: Synthetic oligonucleotide
  Sense strand starting at position 3837 of SEQ ID NO: 1884727
auguuaaacuucuccaugu

SEQ ID NO: 2287473 - RNA, 19 nt, Artificial Sequence
  Description of Artificial Sequence: Synthetic oligonucleotide
  Antisense strand to SEQ ID NO: 2287472
acauggagaaguuuaacau

SEQ ID NO: 2287474 - RNA, 19 nt, Artificial Sequence
  Description of Artificial Sequence: Synthetic oligonucleotide
  Sense strand starting at position 3838 of SEQ ID NO: 1884727
uguuaaacuucuccaugua

SEQ ID NO: 2287475 - RNA, 19 nt, Artificial Sequence
  Description of Artificial Sequence: Synthetic oligonucleotide
  Antisense strand to SEQ ID NO: 2287474
uacauggagaaguuuaaca

SEQ ID NO: 2287476 - RNA, 19 nt, Artificial Sequence
  Description of Artificial Sequence: Synthetic oligonucleotide
  Sense strand starting at position 3839 of SEQ ID NO: 1884727
guuaaacuucuccauguac

SEQ ID NO: 2287477 - RNA, 19 nt, Artificial Sequence
  Description of Artificial Sequence: Synthetic oligonucleotide
  Antisense strand to SEQ ID NO: 2287476
guacauggagaaguuuaac

SEQ ID NO: 2287478 - RNA, 19 nt, Artificial Sequence
  Description of Artificial Sequence: Synthetic oligonucleotide
  Sense strand starting at position 176 of SEQ ID NO: 1884728
gaaccacgcccucaaguuu

SEQ ID NO: 2287479 - RNA, 19 nt, Artificial Sequence
  Description of Artificial Sequence: Synthetic oligonucleotide
  Antisense strand to SEQ ID NO: 2287478
aaacuugagggcgugguuc

SEQ ID NO: 2287480 - RNA, 19 nt, Artificial Sequence
  Description of Artificial Sequence: Synthetic oligonucleotide
  Sense strand starting at position 271 of SEQ ID NO: 1884728
ugccaugagcccuaacuau

SEQ ID NO: 2287481 - RNA, 19 nt, Artificial Sequence
  Description of Artificial Sequence: Synthetic oligonucleotide
  Antisense strand to SEQ ID NO: 2287480
auaguuagggcucauggca

SEQ ID NO: 2287482 - RNA, 19 nt, Artificial Sequence
  Description of Artificial Sequence: Synthetic oligonucleotide
  Sense strand starting at position 391 of SEQ ID NO: 1884728
agagcuuugcgagcuugua

SEQ ID NO: 2287483 - RNA, 19 nt, Artificial Sequence
  Description of Artificial Sequence: Synthetic oligonucleotide
  Antisense strand to SEQ ID NO: 2287482
uacaagcucgcaaagcucu

SEQ ID NO: 2287484 - RNA, 19 nt, Artificial Sequence
  Description of Artificial Sequence: Synthetic oligonucleotide
  Sense strand starting at position 425 of SEQ ID NO: 1884728
agcacaacaucucuuggaa

SEQ ID NO: 2287485 - RNA, 19 nt, Artificial Sequence
  Description of Artificial Sequence: Synthetic oligonucleotide
  Antisense strand to SEQ ID NO: 2287484
uuccaagagauguugugcu

SEQ ID NO: 2287486 - RNA, 19 nt, Artificial Sequence
  Description of Artificial Sequence: Synthetic oligonucleotide
  Sense strand starting at position 658 of SEQ ID NO: 1884728
aggaaaugcuuauuaugug

SEQ ID NO: 2287487 - RNA, 19 nt, Artificial Sequence
  Description of Artificial Sequence: Synthetic oligonucleotide
  Antisense strand to SEQ ID NO: 2287486
cacauaauaagcauuuccu

SEQ ID NO: 2287488 - RNA, 19 nt, Artificial Sequence
  Description of Artificial Sequence: Synthetic oligonucleotide
  Sense strand starting at position 668 of SEQ ID NO: 1884728
uauuaugugccagauauga

SEQ ID NO: 2287489 - RNA, 19 nt, Artificial Sequence
  Description of Artificial Sequence: Synthetic oligonucleotide
  Antisense strand to SEQ ID NO: 2287488
ucauaucuggcacauaaua

SEQ ID NO: 2287490 - RNA, 19 nt, Artificial Sequence
  Description of Artificial Sequence: Synthetic oligonucleotide
  Sense strand starting at position 1037 of SEQ ID NO: 1884728
gguuuccaugcauacugau

SEQ ID NO: 2287491 - RNA, 19 nt, Artificial Sequence
  Description of Artificial Sequence: Synthetic oligonucleotide
  Antisense strand to SEQ ID NO: 2287490
aucaguaugcauggaaacc

SEQ ID NO: 2287492 - RNA, 19 nt, Artificial Sequence
  Description of Artificial Sequence: Synthetic oligonucleotide
  Sense strand starting at position 1158 of SEQ ID NO: 1884728
aaagucuucucagcagaug

SEQ ID NO: 2287493 - RNA, 19 nt, Artificial Sequence
  Description of Artificial Sequence: Synthetic oligonucleotide
  Antisense strand to SEQ ID NO: 2287492
caucugcugagaagacuuu

SEQ ID NO: 2287494 - RNA, 19 nt, Artificial Sequence
  Description of Artificial Sequence: Synthetic oligonucleotide
  Sense strand starting at position 1159 of SEQ ID NO: 1884728
aagucuucucagcagaugu

SEQ ID NO: 2287495 - RNA, 19 nt, Artificial Sequence
  Description of Artificial Sequence: Synthetic oligonucleotide
  Antisense strand to SEQ ID NO: 2287494
acaucugcugagaagacuu

SEQ ID NO: 2287496 - RNA, 19 nt, Artificial Sequence
  Description of Artificial Sequence: Synthetic oligonucleotide
  Sense strand starting at position 1226 of SEQ ID NO: 1884728
acuuauagucaguguugaa

SEQ ID NO: 2287497 - RNA, 19 nt, Artificial Sequence
  Description of Artificial Sequence: Synthetic oligonucleotide
  Antisense strand to SEQ ID NO: 2287496
uucaacacugacuauaagu

SEQ ID NO: 2287498 - RNA, 19 nt, Artificial Sequence
  Description of Artificial Sequence: Synthetic oligonucleotide
  Sense strand starting at position 1387 of SEQ ID NO: 1884728
auguccuuccaagaagcuu

SEQ ID NO: 2287499 - RNA, 19 nt, Artificial Sequence
  Description of Artificial Sequence: Synthetic oligonucleotide
  Antisense strand to SEQ ID NO: 2287498
aagcuucuuggaaggacau

SEQ ID NO: 2287500 - RNA, 19 nt, Artificial Sequence
  Description of Artificial Sequence: Synthetic oligonucleotide
  Sense strand starting at position 1414 of SEQ ID NO: 1884728
ucucgaggugauugauuau

SEQ ID NO: 2287501 - RNA, 19 nt, Artificial Sequence
  Description of Artificial Sequence: Synthetic oligonucleotide
  Antisense strand to SEQ ID NO: 2287500
auaaucaaucaccucgaga

SEQ ID NO: 2287502 - RNA, 19 nt, Artificial Sequence
  Description of Artificial Sequence: Synthetic oligonucleotide
  Sense strand starting at position 1420 of SEQ ID NO: 1884728
ggugauugauuauucccaa

SEQ ID NO: 2287503 - RNA, 19 nt, Artificial Sequence
  Description of Artificial Sequence: Synthetic oligonucleotide
  Antisense strand to SEQ ID NO: 2287502
uugggaauaaucaaucacc

SEQ ID NO: 2287504 - RNA, 19 nt, Artificial Sequence
  Description of Artificial Sequence: Synthetic oligonucleotide
  Sense strand starting at position 1421 of SEQ ID NO: 1884728
gugauugauuauucccaau

SEQ ID NO: 2287505 - RNA, 19 nt, Artificial Sequence
  Description of Artificial Sequence: Synthetic oligonucleotide
  Antisense strand to SEQ ID NO: 2287504
auugggaauaaucaaucac

SEQ ID NO: 2287506 - RNA, 19 nt, Artificial Sequence
  Description of Artificial Sequence: Synthetic oligonucleotide
  Sense strand starting at position 1530 of SEQ ID NO: 1884728
gcuguaugagcagugcagu

SEQ ID NO: 2287507 - RNA, 19 nt, Artificial Sequence
  Description of Artificial Sequence: Synthetic oligonucleotide
  Antisense strand to SEQ ID NO: 2287506
acugcacugcucauacagc

SEQ ID NO: 2287508 - RNA, 19 nt, Artificial Sequence
  Description of Artificial Sequence: Synthetic oligonucleotide
  Sense strand starting at position 1639 of SEQ ID NO: 1884728
cuugacuuggagcaguaau

SEQ ID NO: 2287509 - RNA, 19 nt, Artificial Sequence
  Description of Artificial Sequence: Synthetic oligonucleotide
  Antisense strand to SEQ ID NO: 2287508
auuacugcuccaagucaag

SEQ ID NO: 2287510 - RNA, 19 nt, Artificial Sequence
  Description of Artificial Sequence: Synthetic oligonucleotide
  Sense strand starting at position 2275 of SEQ ID NO: 1884728
ccuugcuaucuuuaugaga

SEQ ID NO: 2287511 - RNA, 19 nt, Artificial Sequence
  Description of Artificial Sequence: Synthetic oligonucleotide
  Antisense strand to SEQ ID NO: 2287510
ucucauaaagauagcaagg

SEQ ID NO: 2287512 - RNA, 19 nt, Artificial Sequence
  Description of Artificial Sequence: Synthetic oligonucleotide
  Sense strand starting at position 2283 of SEQ ID NO: 1884728
ucuuuaugagaucaagcua

SEQ ID NO: 2287513 - RNA, 19 nt, Artificial Sequence
  Description of Artificial Sequence: Synthetic oligonucleotide
  Antisense strand to SEQ ID NO: 2287512
uagcuugaucucauaaaga

SEQ ID NO: 2287514 - RNA, 19 nt, Artificial Sequence
  Description of Artificial Sequence: Synthetic oligonucleotide
  Sense strand starting at position 2459 of SEQ ID NO: 1884728
ugacaagaauagcucaguu

SEQ ID NO: 2287515 - RNA, 19 nt, Artificial Sequence
  Description of Artificial Sequence: Synthetic oligonucleotide
  Antisense strand to SEQ ID NO: 2287514
aacugagcuauucuuguca

SEQ ID NO: 2287516 - RNA, 19 nt, Artificial Sequence
  Description of Artificial Sequence: Synthetic oligonucleotide
  Sense strand starting at position 2463 of SEQ ID NO: 1884728
aagaauagcucaguugagu

SEQ ID NO: 2287517 - RNA, 19 nt, Artificial Sequence
  Description of Artificial Sequence: Synthetic oligonucleotide
  Antisense strand to SEQ ID NO: 2287516
acucaacugagcuauucuu

SEQ ID NO: 2287518 - RNA, 19 nt, Artificial Sequence
  Description of Artificial Sequence: Synthetic oligonucleotide
  Sense strand starting at position 2485 of SEQ ID NO: 1884728
gcgugaauggcugaugaac

SEQ ID NO: 2287519 - RNA, 19 nt, Artificial Sequence
  Description of Artificial Sequence: Synthetic oligonucleotide
  Antisense strand to SEQ ID NO: 2287518
guucaucagccauucacgc

SEQ ID NO: 2287520 - RNA, 19 nt, Artificial Sequence
  Description of Artificial Sequence: Synthetic oligonucleotide
  Sense strand starting at position 2525 of SEQ ID NO: 1884728
uucggugauuuguuaugca

SEQ ID NO: 2287521 - RNA, 19 nt, Artificial Sequence
  Description of Artificial Sequence: Synthetic oligonucleotide
  Antisense strand to SEQ ID NO: 2287520
ugcauaacaaaucaccgaa

SEQ ID NO: 2287522 - RNA, 19 nt, Artificial Sequence
  Description of Artificial Sequence: Synthetic oligonucleotide
  Sense strand starting at position 2533 of SEQ ID NO: 1884728
uuuguuaugcaauagcuaa

SEQ ID NO: 2287523 - RNA, 19 nt, Artificial Sequence
  Description of Artificial Sequence: Synthetic oligonucleotide
  Antisense strand to SEQ ID NO: 2287522
uuagcuauugcauaacaaa

SEQ ID NO: 2287524 - RNA, 19 nt, Artificial Sequence
  Description of Artificial Sequence: Synthetic oligonucleotide
  Sense strand starting at position 2595 of SEQ ID NO: 1884728
aaagguugauuccuaguua

SEQ ID NO: 2287525 - RNA, 19 nt, Artificial Sequence
  Description of Artificial Sequence: Synthetic oligonucleotide
  Antisense strand to SEQ ID NO: 2287524
uaacuaggaaucaaccuuu

SEQ ID NO: 2287526 - RNA, 19 nt, Artificial Sequence
  Description of Artificial Sequence: Synthetic oligonucleotide
  Sense strand starting at position 2606 of SEQ ID NO: 1884728
ccuaguuaccugcaagaag

SEQ ID NO: 2287527 - RNA, 19 nt, Artificial Sequence
  Description of Artificial Sequence: Synthetic oligonucleotide
  Antisense strand to SEQ ID NO: 2287526
cuucuugcagguaacuagg

SEQ ID NO: 2287528 - RNA, 19 nt, Artificial Sequence
  Description of Artificial Sequence: Synthetic oligonucleotide
  Sense strand starting at position 2627 of SEQ ID NO: 1884728
agcacuuuauagguacuaa

SEQ ID NO: 2287529 - RNA, 19 nt, Artificial Sequence
  Description of Artificial Sequence: Synthetic oligonucleotide
  Antisense strand to SEQ ID NO: 2287528
uuaguaccuauaaagugcu

SEQ ID NO: 2287530 - RNA, 19 nt, Artificial Sequence
  Description of Artificial Sequence: Synthetic oligonucleotide
  Sense strand starting at position 2803 of SEQ ID NO: 1884728
gccaaauagcaagauaagu

SEQ ID NO: 2287531 - RNA, 19 nt, Artificial Sequence
  Description of Artificial Sequence: Synthetic oligonucleotide
  Antisense strand to SEQ ID NO: 2287530
acuuaucuugcuauuuggc

SEQ ID NO: 2287532 - RNA, 19 nt, Artificial Sequence
  Description of Artificial Sequence: Synthetic oligonucleotide
  Sense strand starting at position 3005 of SEQ ID NO: 1884728
aggagagauguuuguagca

SEQ ID NO: 2287533 - RNA, 19 nt, Artificial Sequence
  Description of Artificial Sequence: Synthetic oligonucleotide
  Antisense strand to SEQ ID NO: 2287532
ugcuacaaacaucucuccu

SEQ ID NO: 2287534 - RNA, 19 nt, Artificial Sequence
  Description of Artificial Sequence: Synthetic oligonucleotide
  Sense strand starting at position 3088 of SEQ ID NO: 1884728
gagguuagaccucagagcu

SEQ ID NO: 2287535 - RNA, 19 nt, Artificial Sequence
  Description of Artificial Sequence: Synthetic oligonucleotide
  Antisense strand to SEQ ID NO: 2287534
agcucugaggucuaaccuc

SEQ ID NO: 2287536 - RNA, 19 nt, Artificial Sequence
  Description of Artificial Sequence: Synthetic oligonucleotide
  Sense strand starting at position 3155 of SEQ ID NO: 1884728
gaauacagcuggucugaac

SEQ ID NO: 2287537 - RNA, 19 nt, Artificial Sequence
  Description of Artificial Sequence: Synthetic oligonucleotide
  Antisense strand to SEQ ID NO: 2287536
guucagaccagcuguauuc

SEQ ID NO: 2287538 - RNA, 19 nt, Artificial Sequence
  Description of Artificial Sequence: Synthetic oligonucleotide
  Sense strand starting at position 3162 of SEQ ID NO: 1884728
gcuggucugaacugaaaug

SEQ ID NO: 2287539 - RNA, 19 nt, Artificial Sequence
  Description of Artificial Sequence: Synthetic oligonucleotide
  Antisense strand to SEQ ID NO: 2287538
cauuucaguucagaccagc

SEQ ID NO: 2287540 - RNA, 19 nt, Artificial Sequence
  Description of Artificial Sequence: Synthetic oligonucleotide
  Sense strand starting at position 3169 of SEQ ID NO: 1884728
ugaacugaaaugugcugaa

SEQ ID NO: 2287541 - RNA, 19 nt, Artificial Sequence
  Description of Artificial Sequence: Synthetic oligonucleotide
  Antisense strand to SEQ ID NO: 2287540
uucagcacauuucaguuca

SEQ ID NO: 2287542 - RNA, 19 nt, Artificial Sequence
  Description of Artificial Sequence: Synthetic oligonucleotide
  Sense strand starting at position 3249 of SEQ ID NO: 1884728
auuguauauugaccauaga

SEQ ID NO: 2287543 - RNA, 19 nt, Artificial Sequence
  Description of Artificial Sequence: Synthetic oligonucleotide
  Antisense strand to SEQ ID NO: 2287542
ucuauggucaauauacaau

SEQ ID NO: 2287544 - RNA, 19 nt, Artificial Sequence
  Description of Artificial Sequence: Synthetic oligonucleotide
  Sense strand starting at position 3274 of SEQ ID NO: 1884728
ugguuacauacuggguuaa

SEQ ID NO: 2287545 - RNA, 19 nt, Artificial Sequence
  Description of Artificial Sequence: Synthetic oligonucleotide
  Antisense strand to SEQ ID NO: 2287544
uuaacccaguauguaacca

SEQ ID NO: 2287546 - RNA, 19 nt, Artificial Sequence
  Description of Artificial Sequence: Synthetic oligonucleotide
  Sense strand starting at position 3275 of SEQ ID NO: 1884728
gguuacauacuggguuaaa

SEQ ID NO: 2287547 - RNA, 19 nt, Artificial Sequence
  Description of Artificial Sequence: Synthetic oligonucleotide
  Antisense strand to SEQ ID NO: 2287546
uuuaacccaguauguaacc

SEQ ID NO: 2287548 - RNA, 19 nt, Artificial Sequence
  Description of Artificial Sequence: Synthetic oligonucleotide
  Sense strand starting at position 3276 of SEQ ID NO: 1884728
guuacauacuggguuaaau

SEQ ID NO: 2287549 - RNA, 19 nt, Artificial Sequence
  Description of Artificial Sequence: Synthetic oligonucleotide
  Antisense strand to SEQ ID NO: 2287548
auuuaacccaguauguaac

SEQ ID NO: 2287550 - RNA, 19 nt, Artificial Sequence
  Description of Artificial Sequence: Synthetic oligonucleotide
  Sense strand starting at position 3487 of SEQ ID NO: 1884728
ucuucuuuccauuggugaa

SEQ ID NO: 2287551 - RNA, 19 nt, Artificial Sequence
  Description of Artificial Sequence: Synthetic oligonucleotide
  Antisense strand to SEQ ID NO: 2287550
uucaccaauggaaagaaga

SEQ ID NO: 2287552 - RNA, 19 nt, Artificial Sequence
  Description of Artificial Sequence: Synthetic oligonucleotide
  Sense strand starting at position 3557 of SEQ ID NO: 1884728
auguaaauauccucuaggu

SEQ ID NO: 2287553 - RNA, 19 nt, Artificial Sequence
  Description of Artificial Sequence: Synthetic oligonucleotide
  Antisense strand to SEQ ID NO: 2287552
accuagaggauauuuacau

SEQ ID NO: 2287554 - RNA, 19 nt, Artificial Sequence
  Description of Artificial Sequence: Synthetic oligonucleotide
  Sense strand starting at position 3629 of SEQ ID NO: 1884728
cuguccuugcugucucauu

SEQ ID NO: 2287555 - RNA, 19 nt, Artificial Sequence
  Description of Artificial Sequence: Synthetic oligonucleotide
  Antisense strand to SEQ ID NO: 2287554
aaugagacagcaaggacag

SEQ ID NO: 2287556 - RNA, 19 nt, Artificial Sequence
  Description of Artificial Sequence: Synthetic oligonucleotide
  Sense strand starting at position 3793 of SEQ ID NO: 1884728
ggccuuugucccgacagag

SEQ ID NO: 2287557 - RNA, 19 nt, Artificial Sequence
  Description of Artificial Sequence: Synthetic oligonucleotide
  Antisense strand to SEQ ID NO: 2287556
cucugucgggacaaaggcc

SEQ ID NO: 2287558 - RNA, 19 nt, Artificial Sequence
  Description of Artificial Sequence: Synthetic oligonucleotide
  Sense strand starting at position 134 of SEQ ID NO: 1884729
gagcccuaucugggauguu

SEQ ID NO: 2287559 - RNA, 19 nt, Artificial Sequence
  Description of Artificial Sequence: Synthetic oligonucleotide
  Antisense strand to SEQ ID NO: 2287558
aacaucccagauagggcuc

SEQ ID NO: 2287560 - RNA, 19 nt, Artificial Sequence
  Description of Artificial Sequence: Synthetic oligonucleotide
  Sense strand starting at position 144 of SEQ ID NO: 1884729
ugggauguugaguagguga

SEQ ID NO: 2287561 - RNA, 19 nt, Artificial Sequence
  Description of Artificial Sequence: Synthetic oligonucleotide
  Antisense strand to SEQ ID NO: 2287560
ucaccuacucaacauccca

SEQ ID NO: 2287562 - RNA, 19 nt, Artificial Sequence
  Description of Artificial Sequence: Synthetic oligonucleotide
  Sense strand starting at position 146 of SEQ ID NO: 1884729
ggauguugaguaggugaca

SEQ ID NO: 2287563 - RNA, 19 nt, Artificial Sequence
  Description of Artificial Sequence: Synthetic oligonucleotide
  Antisense strand to SEQ ID NO: 2287562
ugucaccuacucaacaucc

SEQ ID NO: 2287564 - RNA, 19 nt, Artificial Sequence
  Description of Artificial Sequence: Synthetic oligonucleotide
  Sense strand starting at position 194 of SEQ ID NO: 1884729
uccaaacuguuccugaagu

SEQ ID NO: 2287565 - RNA, 19 nt, Artificial Sequence
  Description of Artificial Sequence: Synthetic oligonucleotide
  Antisense strand to SEQ ID NO: 2287564
acuucaggaacaguuugga

SEQ ID NO: 2287566 - RNA, 19 nt, Artificial Sequence
  Description of Artificial Sequence: Synthetic oligonucleotide
  Sense strand starting at position 196 of SEQ ID NO: 1884729
caaacuguuccugaaguag

SEQ ID NO: 2287567 - RNA, 19 nt, Artificial Sequence
  Description of Artificial Sequence: Synthetic oligonucleotide
  Antisense strand to SEQ ID NO: 2287566
cuacuucaggaacaguuug

SEQ ID NO: 2287568 - RNA, 19 nt, Artificial Sequence
  Description of Artificial Sequence: Synthetic oligonucleotide
  Sense strand starting at position 340 of SEQ ID NO: 1884729
ggacaacuuccaggcaaua

SEQ ID NO: 2287569 - RNA, 19 nt, Artificial Sequence
  Description of Artificial Sequence: Synthetic oligonucleotide
  Antisense strand to SEQ ID NO: 2287568
uauugccuggaaguugucc

SEQ ID NO: 2287570 - RNA, 19 nt, Artificial Sequence
  Description of Artificial Sequence: Synthetic oligonucleotide
  Sense strand starting at position 555 of SEQ ID NO: 1884729
ugacuuauuugggaucuga

SEQ ID NO: 2287571 - RNA, 19 nt, Artificial Sequence
  Description of Artificial Sequence: Synthetic oligonucleotide
  Antisense strand to SEQ ID NO: 2287570
ucagaucccaaauaaguca

SEQ ID NO: 2287572 - RNA, 19 nt, Artificial Sequence
  Description of Artificial Sequence: Synthetic oligonucleotide
  Sense strand starting at position 875 of SEQ ID NO: 1884729
cucucuuuguauuuguaga

SEQ ID NO: 2287573 - RNA, 19 nt, Artificial Sequence
  Description of Artificial Sequence: Synthetic oligonucleotide
  Antisense strand to SEQ ID NO: 2287572
ucuacaaauacaaagagag

SEQ ID NO: 2287574 - RNA, 19 nt, Artificial Sequence
  Description of Artificial Sequence: Synthetic oligonucleotide
  Sense strand starting at position 1049 of SEQ ID NO: 1884729
agcggcauccacugaugaa

SEQ ID NO: 2287575 - RNA, 19 nt, Artificial Sequence
  Description of Artificial Sequence: Synthetic oligonucleotide
  Antisense strand to SEQ ID NO: 2287574
uucaucaguggaugccgcu

SEQ ID NO: 2287576 - RNA, 19 nt, Artificial Sequence
  Description of Artificial Sequence: Synthetic oligonucleotide
  Sense strand starting at position 1050 of SEQ ID NO: 1884729
gcggcauccacugaugaaa

SEQ ID NO: 2287577 - RNA, 19 nt, Artificial Sequence
  Description of Artificial Sequence: Synthetic oligonucleotide
  Antisense strand to SEQ ID NO: 2287576
uuucaucaguggaugccgc

SEQ ID NO: 2287578 - RNA, 19 nt, Artificial Sequence
  Description of Artificial Sequence: Synthetic oligonucleotide
  Sense strand starting at position 1096 of SEQ ID NO: 1884729
cuacauaagcauggacaua

SEQ ID NO: 2287579 - RNA, 19 nt, Artificial Sequence
  Description of Artificial Sequence: Synthetic oligonucleotide
  Antisense strand to SEQ ID NO: 2287578
uauguccaugcuuauguag

SEQ ID NO: 2287580 - RNA, 19 nt, Artificial Sequence
  Description of Artificial Sequence: Synthetic oligonucleotide
  Sense strand starting at position 1107 of SEQ ID NO: 1884729
uggacauaaccaugacugu

SEQ ID NO: 2287581 - RNA, 19 nt, Artificial Sequence
  Description of Artificial Sequence: Synthetic oligonucleotide
  Antisense strand to SEQ ID NO: 2287580
acagucaugguuaugucca

SEQ ID NO: 2287582 - RNA, 19 nt, Artificial Sequence
  Description of Artificial Sequence: Synthetic oligonucleotide
  Sense strand starting at position 1165 of SEQ ID NO: 1884729
uaaugaugaugcuugguuu

SEQ ID NO: 2287583 - RNA, 19 nt, Artificial Sequence
  Description of Artificial Sequence: Synthetic oligonucleotide
  Antisense strand to SEQ ID NO: 2287582
aaaccaagcaucaucauua

SEQ ID NO: 2287584 - RNA, 19 nt, Artificial Sequence
  Description of Artificial Sequence: Synthetic oligonucleotide
  Sense strand starting at position 1192 of SEQ ID NO: 1884729
ugugucauuccucagacuc

SEQ ID NO: 2287585 - RNA, 19 nt, Artificial Sequence
  Description of Artificial Sequence: Synthetic oligonucleotide
  Antisense strand to SEQ ID NO: 2287584
gagucugaggaaugacaca

SEQ ID NO: 2287586 - RNA, 19 nt, Artificial Sequence
  Description of Artificial Sequence: Synthetic oligonucleotide
  Sense strand starting at position 1531 of SEQ ID NO: 1884729
uggguagagaucugccaaa

SEQ ID NO: 2287587 - RNA, 19 nt, Artificial Sequence
  Description of Artificial Sequence: Synthetic oligonucleotide
  Antisense strand to SEQ ID NO: 2287586
uuuggcagaucucuaccca

SEQ ID NO: 2287588 - RNA, 19 nt, Artificial Sequence
  Description of Artificial Sequence: Synthetic oligonucleotide
  Sense strand starting at position 1786 of SEQ ID NO: 1884729
gcacuaguucuggacccuu

SEQ ID NO: 2287589 - RNA, 19 nt, Artificial Sequence
  Description of Artificial Sequence: Synthetic oligonucleotide
  Antisense strand to SEQ ID NO: 2287588
aaggguccagaacuagugc

SEQ ID NO: 2287590 - RNA, 19 nt, Artificial Sequence
  Description of Artificial Sequence: Synthetic oligonucleotide
  Sense strand starting at position 2588 of SEQ ID NO: 1884729
guggaugcugcacacuaaa

SEQ ID NO: 2287591 - RNA, 19 nt, Artificial Sequence
  Description of Artificial Sequence: Synthetic oligonucleotide
  Antisense strand to SEQ ID NO: 2287590
uuuagugugcagcauccac

SEQ ID NO: 2287592 - RNA, 19 nt, Artificial Sequence
  Description of Artificial Sequence: Synthetic oligonucleotide
  Sense strand starting at position 2615 of SEQ ID NO: 1884729
ggcacuguuccgcugagca

SEQ ID NO: 2287593 - RNA, 19 nt, Artificial Sequence
  Description of Artificial Sequence: Synthetic oligonucleotide
  Antisense strand to SEQ ID NO: 2287592
ugcucagcggaacagugcc

SEQ ID NO: 2287594 - RNA, 19 nt, Artificial Sequence
  Description of Artificial Sequence: Synthetic oligonucleotide
  Sense strand starting at position 2895 of SEQ ID NO: 1884729
acagcuugucuggaaaccu

SEQ ID NO: 2287595 - RNA, 19 nt, Artificial Sequence
  Description of Artificial Sequence: Synthetic oligonucleotide
  Antisense strand to SEQ ID NO: 2287594
agguuuccagacaagcugu

SEQ ID NO: 2287596 - RNA, 19 nt, Artificial Sequence
  Description of Artificial Sequence: Synthetic oligonucleotide
  Sense strand starting at position 3000 of SEQ ID NO: 1884729
gggacuauguguaauggag

SEQ ID NO: 2287597 - RNA, 19 nt, Artificial Sequence
  Description of Artificial Sequence: Synthetic oligonucleotide
  Antisense strand to SEQ ID NO: 2287596
cuccauuacacauaguccc

SEQ ID NO: 2287598 - RNA, 19 nt, Artificial Sequence
  Description of Artificial Sequence: Synthetic oligonucleotide
  Sense strand starting at position 3006 of SEQ ID NO: 1884729
auguguaauggagggccua

SEQ ID NO: 2287599 - RNA, 19 nt, Artificial Sequence
  Description of Artificial Sequence: Synthetic oligonucleotide
  Antisense strand to SEQ ID NO: 2287598
uaggcccuccauuacacau

SEQ ID NO: 2287600 - RNA, 19 nt, Artificial Sequence
  Description of Artificial Sequence: Synthetic oligonucleotide
  Sense strand starting at position 3027 of SEQ ID NO: 1884729
ggguguuaacagugacauu

SEQ ID NO: 2287601 - RNA, 19 nt, Artificial Sequence
  Description of Artificial Sequence: Synthetic oligonucleotide
  Antisense strand to SEQ ID NO: 2287600
aaugucacuguuaacaccc

SEQ ID NO: 2287602 - RNA, 19 nt, Artificial Sequence
  Description of Artificial Sequence: Synthetic oligonucleotide
  Sense strand starting at position 3119 of SEQ ID NO: 1884729
ggauguauagcacauaauu

SEQ ID NO: 2287603 - RNA, 19 nt, Artificial Sequence
  Description of Artificial Sequence: Synthetic oligonucleotide
  Antisense strand to SEQ ID NO: 2287602
aauuaugugcuauacaucc

SEQ ID NO: 2287604 - RNA, 19 nt, Artificial Sequence
  Description of Artificial Sequence: Synthetic oligonucleotide
  Sense strand starting at position 3179 of SEQ ID NO: 1884729
uccauauagccagaugacu

SEQ ID NO: 2287605 - RNA, 19 nt, Artificial Sequence
  Description of Artificial Sequence: Synthetic oligonucleotide
  Antisense strand to SEQ ID NO: 2287604
agucaucuggcuauaugga

SEQ ID NO: 2287606 - RNA, 19 nt, Artificial Sequence
  Description of Artificial Sequence: Synthetic oligonucleotide
  Sense strand starting at position 3188 of SEQ ID NO: 1884729
ccagaugacugucccagaa

SEQ ID NO: 2287607 - RNA, 19 nt, Artificial Sequence
  Description of Artificial Sequence: Synthetic oligonucleotide
  Antisense strand to SEQ ID NO: 2287606
uucugggacagucaucugg

SEQ ID NO: 2287608 - RNA, 19 nt, Artificial Sequence
  Description of Artificial Sequence: Synthetic oligonucleotide
  Sense strand starting at position 3220 of SEQ ID NO: 1884729
augaguuucgccuaacucu

SEQ ID NO: 2287609 - RNA, 19 nt, Artificial Sequence
  Description of Artificial Sequence: Synthetic oligonucleotide
  Antisense strand to SEQ ID NO: 2287608
agaguuaggcgaaacucau

SEQ ID NO: 2287610 - RNA, 19 nt, Artificial Sequence
  Description of Artificial Sequence: Synthetic oligonucleotide
  Sense strand starting at position 3316 of SEQ ID NO: 1884729
guuaacaaguaaguugaaa

SEQ ID NO: 2287611 - RNA, 19 nt, Artificial Sequence
  Description of Artificial Sequence: Synthetic oligonucleotide
  Antisense strand to SEQ ID NO: 2287610
uuucaacuuacuuguuaac

SEQ ID NO: 2287612 - RNA, 19 nt, Artificial Sequence
  Description of Artificial Sequence: Synthetic oligonucleotide
  Sense strand starting at position 3324 of SEQ ID NO: 1884729
guaaguugaaagugaaaca

SEQ ID NO: 2287613 - RNA, 19 nt, Artificial Sequence
  Description of Artificial Sequence: Synthetic oligonucleotide
  Antisense strand to SEQ ID NO: 2287612
uguuucacuuucaacuuac

SEQ ID NO: 2287614 - RNA, 19 nt, Artificial Sequence
  Description of Artificial Sequence: Synthetic oligonucleotide
  Sense strand starting at position 3385 of SEQ ID NO: 1884729
gugacuucuuugcugaaua

SEQ ID NO: 2287615 - RNA, 19 nt, Artificial Sequence
  Description of Artificial Sequence: Synthetic oligonucleotide
  Antisense strand to SEQ ID NO: 2287614
uauucagcaaagaagucac

SEQ ID NO: 2287616 - RNA, 19 nt, Artificial Sequence
  Description of Artificial Sequence: Synthetic oligonucleotide
  Sense strand starting at position 3390 of SEQ ID NO: 1884729
uucuuugcugaauagguua

SEQ ID NO: 2287617 - RNA, 19 nt, Artificial Sequence
  Description of Artificial Sequence: Synthetic oligonucleotide
  Antisense strand to SEQ ID NO: 2287616
uaaccuauucagcaaagaa

SEQ ID NO: 2287618 - RNA, 19 nt, Artificial Sequence
  Description of Artificial Sequence: Synthetic oligonucleotide
  Sense strand starting at position 3393 of SEQ ID NO: 1884729
uuugcugaauagguuaaua

SEQ ID NO: 2287619 - RNA, 19 nt, Artificial Sequence
  Description of Artificial Sequence: Synthetic oligonucleotide
  Antisense strand to SEQ ID NO: 2287618
uauuaaccuauucagcaaa

SEQ ID NO: 2287620 - RNA, 19 nt, Artificial Sequence
  Description of Artificial Sequence: Synthetic oligonucleotide
  Sense strand starting at position 3395 of SEQ ID NO: 1884729
ugcugaauagguuaauagu

SEQ ID NO: 2287621 - RNA, 19 nt, Artificial Sequence
  Description of Artificial Sequence: Synthetic oligonucleotide
  Antisense strand to SEQ ID NO: 2287620
acuauuaaccuauucagca

SEQ ID NO: 2287622 - RNA, 19 nt, Artificial Sequence
  Description of Artificial Sequence: Synthetic oligonucleotide
  Sense strand starting at position 3401 of SEQ ID NO: 1884729
auagguuaauaguuucuga

SEQ ID NO: 2287623 - RNA, 19 nt, Artificial Sequence
  Description of Artificial Sequence: Synthetic oligonucleotide
  Antisense strand to SEQ ID NO: 2287622
ucagaaacuauuaaccuau

SEQ ID NO: 2287624 - RNA, 19 nt, Artificial Sequence
  Description of Artificial Sequence: Synthetic oligonucleotide
  Sense strand starting at position 3404 of SEQ ID NO: 1884729
gguuaauaguuucugaaua

SEQ ID NO: 2287625 - RNA, 19 nt, Artificial Sequence
  Description of Artificial Sequence: Synthetic oligonucleotide
  Antisense strand to SEQ ID NO: 2287624
uauucagaaacuauuaacc

SEQ ID NO: 2287626 - RNA, 19 nt, Artificial Sequence
  Description of Artificial Sequence: Synthetic oligonucleotide
  Sense strand starting at position 3487 of SEQ ID NO: 1884729
uguaaucugcauuaguagu

SEQ ID NO: 2287627 - RNA, 19 nt, Artificial Sequence
  Description of Artificial Sequence: Synthetic oligonucleotide
  Antisense strand to SEQ ID NO: 2287626
acuacuaaugcagauuaca

SEQ ID NO: 2287628 - RNA, 19 nt, Artificial Sequence
  Description of Artificial Sequence: Synthetic oligonucleotide
  Sense strand starting at position 3520 of SEQ ID NO: 1884729
cuuucucaggucuagacaa

SEQ ID NO: 2287629 - RNA, 19 nt, Artificial Sequence
  Description of Artificial Sequence: Synthetic oligonucleotide
  Antisense strand to SEQ ID NO: 2287628
uugucuagaccugagaaag

SEQ ID NO: 2287630 - RNA, 19 nt, Artificial Sequence
  Description of Artificial Sequence: Synthetic oligonucleotide
  Sense strand starting at position 3620 of SEQ ID NO: 1884729
ugaugugacugagcaucga

SEQ ID NO: 2287631 - RNA, 19 nt, Artificial Sequence
  Description of Artificial Sequence: Synthetic oligonucleotide
  Antisense strand to SEQ ID NO: 2287630
ucgaugcucagucacauca

SEQ ID NO: 2287632 - RNA, 19 nt, Artificial Sequence
  Description of Artificial Sequence: Synthetic oligonucleotide
  Sense strand starting at position 3643 of SEQ ID NO: 1884729
cgaggagaugcucagcagu

SEQ ID NO: 2287633 - RNA, 19 nt, Artificial Sequence
  Description of Artificial Sequence: Synthetic oligonucleotide
  Antisense strand to SEQ ID NO: 2287632
acugcugagcaucuccucg

SEQ ID NO: 2287634 - RNA, 19 nt, Artificial Sequence
  Description of Artificial Sequence: Synthetic oligonucleotide
  Sense strand starting at position 3747 of SEQ ID NO: 1884729
ucaguauauuaccuuugua

SEQ ID NO: 2287635 - RNA, 19 nt, Artificial Sequence
  Description of Artificial Sequence: Synthetic oligonucleotide
  Antisense strand to SEQ ID NO: 2287634
uacaaagguaauauacuga

SEQ ID NO: 2287636 - RNA, 19 nt, Artificial Sequence
  Description of Artificial Sequence: Synthetic oligonucleotide
  Sense strand starting at position 3750 of SEQ ID NO: 1884729
guauauuaccuuuguaaac

SEQ ID NO: 2287637 - RNA, 19 nt, Artificial Sequence
  Description of Artificial Sequence: Synthetic oligonucleotide
  Antisense strand to SEQ ID NO: 2287636
guuuacaaagguaauauac

SEQ ID NO: 2287638 - RNA, 19 nt, Artificial Sequence
  Description of Artificial Sequence: Synthetic oligonucleotide
  Sense strand starting at position 79 of SEQ ID NO: 1884730
gacuguugcgaugaggaag

SEQ ID NO: 2287639 - RNA, 19 nt, Artificial Sequence
  Description of Artificial Sequence: Synthetic oligonucleotide
  Antisense strand to SEQ ID NO: 2287638
cuuccucaucgcaacaguc

SEQ ID NO: 2287640 - RNA, 19 nt, Artificial Sequence
  Description of Artificial Sequence: Synthetic oligonucleotide
  Sense strand starting at position 342 of SEQ ID NO: 1884730
caaacuggguugccugaaa

SEQ ID NO: 2287641 - RNA, 19 nt, Artificial Sequence
  Description of Artificial Sequence: Synthetic oligonucleotide
  Antisense strand to SEQ ID NO: 2287640
uuucaggcaacccaguuug

SEQ ID NO: 2287642 - RNA, 19 nt, Artificial Sequence
  Description of Artificial Sequence: Synthetic oligonucleotide
  Sense strand starting at position 376 of SEQ ID NO: 1884730
uguccuuaguggcugaaau

SEQ ID NO: 2287643 - RNA, 19 nt, Artificial Sequence
  Description of Artificial Sequence: Synthetic oligonucleotide
  Antisense strand to SEQ ID NO: 2287642
auuucagccacuaaggaca

SEQ ID NO: 2287644 - RNA, 19 nt, Artificial Sequence
  Description of Artificial Sequence: Synthetic oligonucleotide
  Sense strand starting at position 421 of SEQ ID NO: 1884730
ggauguaacagugaaugcu

SEQ ID NO: 2287645 - RNA, 19 nt, Artificial Sequence
  Description of Artificial Sequence: Synthetic oligonucleotide
  Antisense strand to SEQ ID NO: 2287644
agcauucacuguuacaucc

SEQ ID NO: 2287646 - RNA, 19 nt, Artificial Sequence
  Description of Artificial Sequence: Synthetic oligonucleotide
  Sense strand starting at position 560 of SEQ ID NO: 1884730
guuugagcugucccuuugu

SEQ ID NO: 2287647 - RNA, 19 nt, Artificial Sequence
  Description of Artificial Sequence: Synthetic oligonucleotide
  Antisense strand to SEQ ID NO: 2287646
acaaagggacagcucaaac

SEQ ID NO: 2287648 - RNA, 19 nt, Artificial Sequence
  Description of Artificial Sequence: Synthetic oligonucleotide
  Sense strand starting at position 608 of SEQ ID NO: 1884730
agcacucagacauggguaa

SEQ ID NO: 2287649 - RNA, 19 nt, Artificial Sequence
  Description of Artificial Sequence: Synthetic oligonucleotide
  Antisense strand to SEQ ID NO: 2287648
uuacccaugucugagugcu

SEQ ID NO: 2287650 - RNA, 19 nt, Artificial Sequence
  Description of Artificial Sequence: Synthetic oligonucleotide
  Sense strand starting at position 609 of SEQ ID NO: 1884730
gcacucagacauggguaau

SEQ ID NO: 2287651 - RNA, 19 nt, Artificial Sequence
  Description of Artificial Sequence: Synthetic oligonucleotide
  Antisense strand to SEQ ID NO: 2287650
auuacccaugucugagugc

SEQ ID NO: 2287652 - RNA, 19 nt, Artificial Sequence
  Description of Artificial Sequence: Synthetic oligonucleotide
  Sense strand starting at position 793 of SEQ ID NO: 1884730
ggccucuuuaugggaagga

SEQ ID NO: 2287653 - RNA, 19 nt, Artificial Sequence
  Description of Artificial Sequence: Synthetic oligonucleotide
  Antisense strand to SEQ ID NO: 2287652
uccuucccauaaagaggcc

SEQ ID NO: 2287654 - RNA, 19 nt, Artificial Sequence
  Description of Artificial Sequence: Synthetic oligonucleotide
  Sense strand starting at position 864 of SEQ ID NO: 1884730
agagguuuggcuuggucua

SEQ ID NO: 2287655 - RNA, 19 nt, Artificial Sequence
  Description of Artificial Sequence: Synthetic oligonucleotide
  Antisense strand to SEQ ID NO: 2287654
uagaccaagccaaaccucu

SEQ ID NO: 2287656 - RNA, 19 nt, Artificial Sequence
  Description of Artificial Sequence: Synthetic oligonucleotide
  Sense strand starting at position 865 of SEQ ID NO: 1884730
gagguuuggcuuggucuaa

SEQ ID NO: 2287657 - RNA, 19 nt, Artificial Sequence
  Description of Artificial Sequence: Synthetic oligonucleotide
  Antisense strand to SEQ ID NO: 2287656
uuagaccaagccaaaccuc

SEQ ID NO: 2287658 - RNA, 19 nt, Artificial Sequence
  Description of Artificial Sequence: Synthetic oligonucleotide
  Sense strand starting at position 866 of SEQ ID NO: 1884730
agguuuggcuuggucuaaa

SEQ ID NO: 2287659 - RNA, 19 nt, Artificial Sequence
  Description of Artificial Sequence: Synthetic oligonucleotide
  Antisense strand to SEQ ID NO: 2287658
uuuagaccaagccaaaccu

SEQ ID NO: 2287660 - RNA, 19 nt, Artificial Sequence
  Description of Artificial Sequence: Synthetic oligonucleotide
  Sense strand starting at position 919 of SEQ ID NO: 1884730
gucacacaguuaucaauag

SEQ ID NO: 2287661 - RNA, 19 nt, Artificial Sequence
  Description of Artificial Sequence: Synthetic oligonucleotide
  Antisense strand to SEQ ID NO: 2287660
cuauugauaacugugugac

SEQ ID NO: 2287662 - RNA, 19 nt, Artificial Sequence
  Description of Artificial Sequence: Synthetic oligonucleotide
  Sense strand starting at position 1059 of SEQ ID NO: 1884730
uaggcuggaucucuuugau

SEQ ID NO: 2287663 - RNA, 19 nt, Artificial Sequence
  Description of Artificial Sequence: Synthetic oligonucleotide
  Antisense strand to SEQ ID NO: 2287662
aucaaagagauccagccua

SEQ ID NO: 2287664 - RNA, 19 nt, Artificial Sequence
  Description of Artificial Sequence: Synthetic oligonucleotide
  Sense strand starting at position 1103 of SEQ ID NO: 1884730
gcagauucugcacagcuuu

SEQ ID NO: 2287665 - RNA, 19 nt, Artificial Sequence
  Description of Artificial Sequence: Synthetic oligonucleotide
  Antisense strand to SEQ ID NO: 2287664
aaagcugugcagaaucugc

SEQ ID NO: 2287666 - RNA, 19 nt, Artificial Sequence
  Description of Artificial Sequence: Synthetic oligonucleotide
  Sense strand starting at position 1118 of SEQ ID NO: 1884730
cuuugugaaucauucucga

SEQ ID NO: 2287667 - RNA, 19 nt, Artificial Sequence
  Description of Artificial Sequence: Synthetic oligonucleotide
  Antisense strand to SEQ ID NO: 2287666
ucgagaaugauucacaaag

SEQ ID NO: 2287668 - RNA, 19 nt, Artificial Sequence
  Description of Artificial Sequence: Synthetic oligonucleotide
  Sense strand starting at position 1121 of SEQ ID NO: 1884730
ugugaaucauucucgaaau

SEQ ID NO: 2287669 - RNA, 19 nt, Artificial Sequence
  Description of Artificial Sequence: Synthetic oligonucleotide
  Antisense strand to SEQ ID NO: 2287668
auuucgagaaugauucaca

SEQ ID NO: 2287670 - RNA, 19 nt, Artificial Sequence
  Description of Artificial Sequence: Synthetic oligonucleotide
  Sense strand starting at position 1231 of SEQ ID NO: 1884730
ccggcucugccugaaggau

SEQ ID NO: 2287671 - RNA, 19 nt, Artificial Sequence
  Description of Artificial Sequence: Synthetic oligonucleotide
  Antisense strand to SEQ ID NO: 2287670
auccuucaggcagagccgg

SEQ ID NO: 2287672 - RNA, 19 nt, Artificial Sequence
  Description of Artificial Sequence: Synthetic oligonucleotide
  Sense strand starting at position 1629 of SEQ ID NO: 1884730
agaagaucgacucguuuag

SEQ ID NO: 2287673 - RNA, 19 nt, Artificial Sequence
  Description of Artificial Sequence: Synthetic oligonucleotide
  Antisense strand to SEQ ID NO: 2287672
cuaaacgagucgaucuucu

SEQ ID NO: 2287674 - RNA, 19 nt, Artificial Sequence
  Description of Artificial Sequence: Synthetic oligonucleotide
  Sense strand starting at position 1853 of SEQ ID NO: 1884730
gaccuuaugccggaauucu

SEQ ID NO: 2287675 - RNA, 19 nt, Artificial Sequence
  Description of Artificial Sequence: Synthetic oligonucleotide
  Antisense strand to SEQ ID NO: 2287674
agaauuccggcauaagguc

SEQ ID NO: 2287676 - RNA, 19 nt, Artificial Sequence
  Description of Artificial Sequence: Synthetic oligonucleotide
  Sense strand starting at position 2155 of SEQ ID NO: 1884730
gggcuucaagcugguauuu

SEQ ID NO: 2287677 - RNA, 19 nt, Artificial Sequence
  Description of Artificial Sequence: Synthetic oligonucleotide
  Antisense strand to SEQ ID NO: 2287676
aaauaccagcuugaagccc

SEQ ID NO: 2287678 - RNA, 19 nt, Artificial Sequence
  Description of Artificial Sequence: Synthetic oligonucleotide
  Sense strand starting at position 2178 of SEQ ID NO: 1884730
ggaagugguaccugaacac

SEQ ID NO: 2287679 - RNA, 19 nt, Artificial Sequence
  Description of Artificial Sequence: Synthetic oligonucleotide
  Antisense strand to SEQ ID NO: 2287678
guguucagguaccacuucc

SEQ ID NO: 2287680 - RNA, 19 nt, Artificial Sequence
  Description of Artificial Sequence: Synthetic oligonucleotide
  Sense strand starting at position 2192 of SEQ ID NO: 1884730
aacacaugcguuugaggaa

SEQ ID NO: 2287681 - RNA, 19 nt, Artificial Sequence
  Description of Artificial Sequence: Synthetic oligonucleotide
  Antisense strand to SEQ ID NO: 2287680
uuccucaaacgcauguguu

SEQ ID NO: 2287682 - RNA, 19 nt, Artificial Sequence
  Description of Artificial Sequence: Synthetic oligonucleotide
  Sense strand starting at position 2755 of SEQ ID NO: 1884730
aucaauccuuguucuguga

SEQ ID NO: 2287683 - RNA, 19 nt, Artificial Sequence
  Description of Artificial Sequence: Synthetic oligonucleotide
  Antisense strand to SEQ ID NO: 2287682
ucacagaacaaggauugau

SEQ ID NO: 2287684 - RNA, 19 nt, Artificial Sequence
  Description of Artificial Sequence: Synthetic oligonucleotide
  Sense strand starting at position 2759 of SEQ ID NO: 1884730
auccuuguucugugaauuc

SEQ ID NO: 2287685 - RNA, 19 nt, Artificial Sequence
  Description of Artificial Sequence: Synthetic oligonucleotide
  Antisense strand to SEQ ID NO: 2287684
gaauucacagaacaaggau

SEQ ID NO: 2287686 - RNA, 19 nt, Artificial Sequence
  Description of Artificial Sequence: Synthetic oligonucleotide
  Sense strand starting at position 3065 of SEQ ID NO: 1884730
gugcaaagacaaugaugaa

SEQ ID NO: 2287687 - RNA, 19 nt, Artificial Sequence
  Description of Artificial Sequence: Synthetic oligonucleotide
  Antisense strand to SEQ ID NO: 2287686
uucaucauugucuuugcac

SEQ ID NO: 2287688 - RNA, 19 nt, Artificial Sequence
  Description of Artificial Sequence: Synthetic oligonucleotide
  Sense strand starting at position 3189 of SEQ ID NO: 1884730
guguaaaucagaggcuaag

SEQ ID NO: 2287689 - RNA, 19 nt, Artificial Sequence
  Description of Artificial Sequence: Synthetic oligonucleotide
  Antisense strand to SEQ ID NO: 2287688
cuuagccucugauuuacac

SEQ ID NO: 2287690 - RNA, 19 nt, Artificial Sequence
  Description of Artificial Sequence: Synthetic oligonucleotide
  Sense strand starting at position 3212 of SEQ ID NO: 1884730
gggcuugugccugaacuua

SEQ ID NO: 2287691 - RNA, 19 nt, Artificial Sequence
  Description of Artificial Sequence: Synthetic oligonucleotide
  Antisense strand to SEQ ID NO: 2287690
uaaguucaggcacaagccc

SEQ ID NO: 2287692 - RNA, 19 nt, Artificial Sequence
  Description of Artificial Sequence: Synthetic oligonucleotide
  Sense strand starting at position 3249 of SEQ ID NO: 1884730
gcccuuugugcccugucaa

SEQ ID NO: 2287693 - RNA, 19 nt, Artificial Sequence
  Description of Artificial Sequence: Synthetic oligonucleotide
  Antisense strand to SEQ ID NO: 2287692
uugacagggcacaaagggc

SEQ ID NO: 2287694 - RNA, 19 nt, Artificial Sequence
  Description of Artificial Sequence: Synthetic oligonucleotide
  Sense strand starting at position 3471 of SEQ ID NO: 1884730
acuauuaagucagcgauaa

SEQ ID NO: 2287695 - RNA, 19 nt, Artificial Sequence
  Description of Artificial Sequence: Synthetic oligonucleotide
  Antisense strand to SEQ ID NO: 2287694
uuaucgcugacuuaauagu

SEQ ID NO: 2287696 - RNA, 19 nt, Artificial Sequence
  Description of Artificial Sequence: Synthetic oligonucleotide
  Sense strand starting at position 3472 of SEQ ID NO: 1884730
cuauuaagucagcgauaaa

SEQ ID NO: 2287697 - RNA, 19 nt, Artificial Sequence
  Description of Artificial Sequence: Synthetic oligonucleotide
  Antisense strand to SEQ ID NO: 2287696
uuuaucgcugacuuaauag

SEQ ID NO: 2287698 - RNA, 19 nt, Artificial Sequence
  Description of Artificial Sequence: Synthetic oligonucleotide
  Sense strand starting at position 3587 of SEQ ID NO: 1884730
aaugucauauggcuguuua

SEQ ID NO: 2287699 - RNA, 19 nt, Artificial Sequence
  Description of Artificial Sequence: Synthetic oligonucleotide
  Antisense strand to SEQ ID NO: 2287698
uaaacagccauaugacauu

SEQ ID NO: 2287700 - RNA, 19 nt, Artificial Sequence
  Description of Artificial Sequence: Synthetic oligonucleotide
  Sense strand starting at position 3624 of SEQ ID NO: 1884730
ggcagaggugaaugaaugu

SEQ ID NO: 2287701 - RNA, 19 nt, Artificial Sequence
  Description of Artificial Sequence: Synthetic oligonucleotide
  Antisense strand to SEQ ID NO: 2287700
acauucauucaccucugcc

SEQ ID NO: 2287702 - RNA, 19 nt, Artificial Sequence
  Description of Artificial Sequence: Synthetic oligonucleotide
  Sense strand starting at position 3631 of SEQ ID NO: 1884730
gugaaugaauguccuuauc

SEQ ID NO: 2287703 - RNA, 19 nt, Artificial Sequence
  Description of Artificial Sequence: Synthetic oligonucleotide
  Antisense strand to SEQ ID NO: 2287702
gauaaggacauucauucac

SEQ ID NO: 2287704 - RNA, 19 nt, Artificial Sequence
  Description of Artificial Sequence: Synthetic oligonucleotide
  Sense strand starting at position 3794 of SEQ ID NO: 1884730
ucaagcuuccuuggagaca

SEQ ID NO: 2287705 - RNA, 19 nt, Artificial Sequence
  Description of Artificial Sequence: Synthetic oligonucleotide
  Antisense strand to SEQ ID NO: 2287704
ugucuccaaggaagcuuga

SEQ ID NO: 2287706 - RNA, 19 nt, Artificial Sequence
  Description of Artificial Sequence: Synthetic oligonucleotide
  Sense strand starting at position 3899 of SEQ ID NO: 1884730
cuuccuccugugugaagau

SEQ ID NO: 2287707 - RNA, 19 nt, Artificial Sequence
  Description of Artificial Sequence: Synthetic oligonucleotide
  Antisense strand to SEQ ID NO: 2287706
aucuucacacaggaggaag

SEQ ID NO: 2287708 - RNA, 19 nt, Artificial Sequence
  Description of Artificial Sequence: Synthetic oligonucleotide
  Sense strand starting at position 3918 of SEQ ID NO: 1884730
agcuguguuugcuuuauuu

SEQ ID NO: 2287709 - RNA, 19 nt, Artificial Sequence
  Description of Artificial Sequence: Synthetic oligonucleotide
  Antisense strand to SEQ ID NO: 2287708
aaauaaagcaaacacagcu

SEQ ID NO: 2287710 - RNA, 19 nt, Artificial Sequence
  Description of Artificial Sequence: Synthetic oligonucleotide
  Sense strand starting at position 3920 of SEQ ID NO: 1884730
cuguguuugcuuuauuuac

SEQ ID NO: 2287711 - RNA, 19 nt, Artificial Sequence
  Description of Artificial Sequence: Synthetic oligonucleotide
  Antisense strand to SEQ ID NO: 2287710
guaaauaaagcaaacacag

SEQ ID NO: 2287712 - RNA, 19 nt, Artificial Sequence
  Description of Artificial Sequence: Synthetic oligonucleotide
  Sense strand starting at position 3922 of SEQ ID NO: 1884730
guguuugcuuuauuuacca

SEQ ID NO: 2287713 - RNA, 19 nt, Artificial Sequence
  Description of Artificial Sequence: Synthetic oligonucleotide
  Antisense strand to SEQ ID NO: 2287712
ugguaaauaaagcaaacac

SEQ ID NO: 2287714 - RNA, 19 nt, Artificial Sequence
  Description of Artificial Sequence: Synthetic oligonucleotide
  Sense strand starting at position 3940 of SEQ ID NO: 1884730
acuauaugccuagaacagu

SEQ ID NO: 2287715 - RNA, 19 nt, Artificial Sequence
  Description of Artificial Sequence: Synthetic oligonucleotide
  Antisense strand to SEQ ID NO: 2287714
acuguucuaggcauauagu

SEQ ID NO: 2287716 - RNA, 19 nt, Artificial Sequence
  Description of Artificial Sequence: Synthetic oligonucleotide
  Sense strand starting at position 3980 of SEQ ID NO: 1884730
aaacaaauuuguugaguga

SEQ ID NO: 2287717 - RNA, 19 nt, Artificial Sequence
  Description of Artificial Sequence: Synthetic oligonucleotide
  Antisense strand to SEQ ID NO: 2287716
ucacucaacaaauuuguuu

SEQ ID NO: 2287718 - RNA, 19 nt, Artificial Sequence
  Description of Artificial Sequence: Synthetic oligonucleotide
  Sense strand starting at position 218 of SEQ ID NO: 1884731
agccaaaguccucagaaug

SEQ ID NO: 2287719 - RNA, 19 nt, Artificial Sequence
  Description of Artificial Sequence: Synthetic oligonucleotide
  Antisense strand to SEQ ID NO: 2287718
cauucugaggacuuuggcu

SEQ ID NO: 2287720 - RNA, 19 nt, Artificial Sequence
  Description of Artificial Sequence: Synthetic oligonucleotide
  Sense strand starting at position 331 of SEQ ID NO: 1884731
ugacuuuguucuuccucga

SEQ ID NO: 2287721 - RNA, 19 nt, Artificial Sequence
  Description of Artificial Sequence: Synthetic oligonucleotide
  Antisense strand to SEQ ID NO: 2287720
ucgaggaagaacaaaguca

SEQ ID NO: 2287722 - RNA, 19 nt, Artificial Sequence
  Description of Artificial Sequence: Synthetic oligonucleotide
  Sense strand starting at position 334 of SEQ ID NO: 1884731
cuuuguucuuccucgaaag

SEQ ID NO: 2287723 - RNA, 19 nt, Artificial Sequence
  Description of Artificial Sequence: Synthetic oligonucleotide
  Antisense strand to SEQ ID NO: 2287722
cuuucgaggaagaacaaag

SEQ ID NO: 2287724 - RNA, 19 nt, Artificial Sequence
  Description of Artificial Sequence: Synthetic oligonucleotide
  Sense strand starting at position 335 of SEQ ID NO: 1884731
uuuguucuuccucgaaagu

SEQ ID NO: 2287725 - RNA, 19 nt, Artificial Sequence
  Description of Artificial Sequence: Synthetic oligonucleotide
  Antisense strand to SEQ ID NO: 2287724
acuuucgaggaagaacaaa

SEQ ID NO: 2287726 - RNA, 19 nt, Artificial Sequence
  Description of Artificial Sequence: Synthetic oligonucleotide
  Sense strand starting at position 336 of SEQ ID NO: 1884731
uuguucuuccucgaaagug

SEQ ID NO: 2287727 - RNA, 19 nt, Artificial Sequence
  Description of Artificial Sequence: Synthetic oligonucleotide
  Antisense strand to SEQ ID NO: 2287726
cacuuucgaggaagaacaa

SEQ ID NO: 2287728 - RNA, 19 nt, Artificial Sequence
  Description of Artificial Sequence: Synthetic oligonucleotide
  Sense strand starting at position 447 of SEQ ID NO: 1884731
ucccucaggucacuugaau

SEQ ID NO: 2287729 - RNA, 19 nt, Artificial Sequence
  Description of Artificial Sequence: Synthetic oligonucleotide
  Antisense strand to SEQ ID NO: 2287728
auucaagugaccugaggga

SEQ ID NO: 2287730 - RNA, 19 nt, Artificial Sequence
  Description of Artificial Sequence: Synthetic oligonucleotide
  Sense strand starting at position 637 of SEQ ID NO: 1884731
gagugacuggcauguccaa

SEQ ID NO: 2287731 - RNA, 19 nt, Artificial Sequence
  Description of Artificial Sequence: Synthetic oligonucleotide
  Antisense strand to SEQ ID NO: 2287730
uuggacaugccagucacuc

SEQ ID NO: 2287732 - RNA, 19 nt, Artificial Sequence
  Description of Artificial Sequence: Synthetic oligonucleotide
  Sense strand starting at position 644 of SEQ ID NO: 1884731
uggcauguccaauauccau

SEQ ID NO: 2287733 - RNA, 19 nt, Artificial Sequence
  Description of Artificial Sequence: Synthetic oligonucleotide
  Antisense strand to SEQ ID NO: 2287732
auggauauuggacaugcca

SEQ ID NO: 2287734 - RNA, 19 nt, Artificial Sequence
  Description of Artificial Sequence: Synthetic oligonucleotide
  Sense strand starting at position 1234 of SEQ ID NO: 1884731
ggaaucgugccuuggacaa

SEQ ID NO: 2287735 - RNA, 19 nt, Artificial Sequence
  Description of Artificial Sequence: Synthetic oligonucleotide
  Antisense strand to SEQ ID NO: 2287734
uuguccaaggcacgauucc

SEQ ID NO: 2287736 - RNA, 19 nt, Artificial Sequence
  Description of Artificial Sequence: Synthetic oligonucleotide
  Sense strand starting at position 1294 of SEQ ID NO: 1884731
ucagacauguuuguaggua

SEQ ID NO: 2287737 - RNA, 19 nt, Artificial Sequence
  Description of Artificial Sequence: Synthetic oligonucleotide
  Antisense strand to SEQ ID NO: 2287736
uaccuacaaacaugucuga

SEQ ID NO: 2287738 - RNA, 19 nt, Artificial Sequence
  Description of Artificial Sequence: Synthetic oligonucleotide
  Sense strand starting at position 1298 of SEQ ID NO: 1884731
acauguuuguagguagaaa

SEQ ID NO: 2287739 - RNA, 19 nt, Artificial Sequence
  Description of Artificial Sequence: Synthetic oligonucleotide
  Antisense strand to SEQ ID NO: 2287738
uuucuaccuacaaacaugu

SEQ ID NO: 2287740 - RNA, 19 nt, Artificial Sequence
  Description of Artificial Sequence: Synthetic oligonucleotide
  Sense strand starting at position 1329 of SEQ ID NO: 1884731
ccucuugauugcgucugau

SEQ ID NO: 2287741 - RNA, 19 nt, Artificial Sequence
  Description of Artificial Sequence: Synthetic oligonucleotide
  Antisense strand to SEQ ID NO: 2287740
aucagacgcaaucaagagg

SEQ ID NO: 2287742 - RNA, 19 nt, Artificial Sequence
  Description of Artificial Sequence: Synthetic oligonucleotide
  Sense strand starting at position 1332 of SEQ ID NO: 1884731
cuugauugcgucugauuuc

SEQ ID NO: 2287743 - RNA, 19 nt, Artificial Sequence
  Description of Artificial Sequence: Synthetic oligonucleotide
  Antisense strand to SEQ ID NO: 2287742
gaaaucagacgcaaucaag

SEQ ID NO: 2287744 - RNA, 19 nt, Artificial Sequence
  Description of Artificial Sequence: Synthetic oligonucleotide
  Sense strand starting at position 1335 of SEQ ID NO: 1884731
gauugcgucugauuucucu

SEQ ID NO: 2287745 - RNA, 19 nt, Artificial Sequence
  Description of Artificial Sequence: Synthetic oligonucleotide
  Antisense strand to SEQ ID NO: 2287744
agagaaaucagacgcaauc

SEQ ID NO: 2287746 - RNA, 19 nt, Artificial Sequence
  Description of Artificial Sequence: Synthetic oligonucleotide
  Sense strand starting at position 1339 of SEQ ID NO: 1884731
gcgucugauuucucuggga

SEQ ID NO: 2287747 - RNA, 19 nt, Artificial Sequence
  Description of Artificial Sequence: Synthetic oligonucleotide
  Antisense strand to SEQ ID NO: 2287746
ucccagagaaaucagacgc

SEQ ID NO: 2287748 - RNA, 19 nt, Artificial Sequence
  Description of Artificial Sequence: Synthetic oligonucleotide
  Sense strand starting at position 1342 of SEQ ID NO: 1884731
ucugauuucucugggaaau

SEQ ID NO: 2287749 - RNA, 19 nt, Artificial Sequence
  Description of Artificial Sequence: Synthetic oligonucleotide
  Antisense strand to SEQ ID NO: 2287748
auuucccagagaaaucaga

SEQ ID NO: 2287750 - RNA, 19 nt, Artificial Sequence
  Description of Artificial Sequence: Synthetic oligonucleotide
  Sense strand starting at position 1344 of SEQ ID NO: 1884731
ugauuucucugggaaauag

SEQ ID NO: 2287751 - RNA, 19 nt, Artificial Sequence
  Description of Artificial Sequence: Synthetic oligonucleotide
  Antisense strand to SEQ ID NO: 2287750
cuauuucccagagaaauca

SEQ ID NO: 2287752 - RNA, 19 nt, Artificial Sequence
  Description of Artificial Sequence: Synthetic oligonucleotide
  Sense strand starting at position 1383 of SEQ ID NO: 1884731
gagaguagcgauggagaga

SEQ ID NO: 2287753 - RNA, 19 nt, Artificial Sequence
  Description of Artificial Sequence: Synthetic oligonucleotide
  Antisense strand to SEQ ID NO: 2287752
ucucuccaucgcuacucuc

SEQ ID NO: 2287754 - RNA, 19 nt, Artificial Sequence
  Description of Artificial Sequence: Synthetic oligonucleotide
  Sense strand starting at position 1697 of SEQ ID NO: 1884731
cggagagugucuuugacag

SEQ ID NO: 2287755 - RNA, 19 nt, Artificial Sequence
  Description of Artificial Sequence: Synthetic oligonucleotide
  Antisense strand to SEQ ID NO: 2287754
cugucaaagacacucuccg

SEQ ID NO: 2287756 - RNA, 19 nt, Artificial Sequence
  Description of Artificial Sequence: Synthetic oligonucleotide
  Sense strand starting at position 1704 of SEQ ID NO: 1884731
ugucuuugacagcagagaa

SEQ ID NO: 2287757 - RNA, 19 nt, Artificial Sequence
  Description of Artificial Sequence: Synthetic oligonucleotide
  Antisense strand to SEQ ID NO: 2287756
uucucugcugucaaagaca

SEQ ID NO: 2287758 - RNA, 19 nt, Artificial Sequence
  Description of Artificial Sequence: Synthetic oligonucleotide
  Sense strand starting at position 2272 of SEQ ID NO: 1884731
ccgguucgacucguccaua

SEQ ID NO: 2287759 - RNA, 19 nt, Artificial Sequence
  Description of Artificial Sequence: Synthetic oligonucleotide
  Antisense strand to SEQ ID NO: 2287758
uauggacgagucgaaccgg

SEQ ID NO: 2287760 - RNA, 19 nt, Artificial Sequence
  Description of Artificial Sequence: Synthetic oligonucleotide
  Sense strand starting at position 2373 of SEQ ID NO: 1884731
aaguaagguguccacgaca

SEQ ID NO: 2287761 - RNA, 19 nt, Artificial Sequence
  Description of Artificial Sequence: Synthetic oligonucleotide
  Antisense strand to SEQ ID NO: 2287760
ugucguggacaccuuacuu

SEQ ID NO: 2287762 - RNA, 19 nt, Artificial Sequence
  Description of Artificial Sequence: Synthetic oligonucleotide
  Sense strand starting at position 2386 of SEQ ID NO: 1884731
acgacauucugggcagagu

SEQ ID NO: 2287763 - RNA, 19 nt, Artificial Sequence
  Description of Artificial Sequence: Synthetic oligonucleotide
  Antisense strand to SEQ ID NO: 2287762
acucugcccagaaugucgu

SEQ ID NO: 2287764 - RNA, 19 nt, Artificial Sequence
  Description of Artificial Sequence: Synthetic oligonucleotide
  Sense strand starting at position 2410 of SEQ ID NO: 1884731
cuagaaauauagggagaga

SEQ ID NO: 2287765 - RNA, 19 nt, Artificial Sequence
  Description of Artificial Sequence: Synthetic oligonucleotide
  Antisense strand to SEQ ID NO: 2287764
ucucucccuauauuucuag

SEQ ID NO: 2287766 - RNA, 19 nt, Artificial Sequence
  Description of Artificial Sequence: Synthetic oligonucleotide
  Sense strand starting at position 2507 of SEQ ID NO: 1884731
gagccaacugugugcugau

SEQ ID NO: 2287767 - RNA, 19 nt, Artificial Sequence
  Description of Artificial Sequence: Synthetic oligonucleotide
  Antisense strand to SEQ ID NO: 2287766
aucagcacacaguuggcuc

SEQ ID NO: 2287768 - RNA, 19 nt, Artificial Sequence
  Description of Artificial Sequence: Synthetic oligonucleotide
  Sense strand starting at position 2514 of SEQ ID NO: 1884731
cugugugcugaucagugua

SEQ ID NO: 2287769 - RNA, 19 nt, Artificial Sequence
  Description of Artificial Sequence: Synthetic oligonucleotide
  Antisense strand to SEQ ID NO: 2287768
uacacugaucagcacacag

SEQ ID NO: 2287770 - RNA, 19 nt, Artificial Sequence
  Description of Artificial Sequence: Synthetic oligonucleotide
  Sense strand starting at position 2517 of SEQ ID NO: 1884731
ugugcugaucaguguauuc

SEQ ID NO: 2287771 - RNA, 19 nt, Artificial Sequence
  Description of Artificial Sequence: Synthetic oligonucleotide
  Antisense strand to SEQ ID NO: 2287770
gaauacacugaucagcaca

SEQ ID NO: 2287772 - RNA, 19 nt, Artificial Sequence
  Description of Artificial Sequence: Synthetic oligonucleotide
  Sense strand starting at position 2519 of SEQ ID NO: 1884731
ugcugaucaguguauucua

SEQ ID NO: 2287773 - RNA, 19 nt, Artificial Sequence
  Description of Artificial Sequence: Synthetic oligonucleotide
  Antisense strand to SEQ ID NO: 2287772
uagaauacacugaucagca

SEQ ID NO: 2287774 - RNA, 19 nt, Artificial Sequence
  Description of Artificial Sequence: Synthetic oligonucleotide
  Sense strand starting at position 2641 of SEQ ID NO: 1884731
cucacucgcugcucuuaaa

SEQ ID NO: 2287775 - RNA, 19 nt, Artificial Sequence
  Description of Artificial Sequence: Synthetic oligonucleotide
  Antisense strand to SEQ ID NO: 2287774
uuuaagagcagcgagugag

SEQ ID NO: 2287776 - RNA, 19 nt, Artificial Sequence
  Description of Artificial Sequence: Synthetic oligonucleotide
  Sense strand starting at position 2858 of SEQ ID NO: 1884731
uagcccuucccugaagagu

SEQ ID NO: 2287777 - RNA, 19 nt, Artificial Sequence
  Description of Artificial Sequence: Synthetic oligonucleotide
  Antisense strand to SEQ ID NO: 2287776
acucuucagggaagggcua

SEQ ID NO: 2287778 - RNA, 19 nt, Artificial Sequence
  Description of Artificial Sequence: Synthetic oligonucleotide
  Sense strand starting at position 2864 of SEQ ID NO: 1884731
uucccugaagagugaacau

SEQ ID NO: 2287779 - RNA, 19 nt, Artificial Sequence
  Description of Artificial Sequence: Synthetic oligonucleotide
  Antisense strand to SEQ ID NO: 2287778
auguucacucuucagggaa

SEQ ID NO: 2287780 - RNA, 19 nt, Artificial Sequence
  Description of Artificial Sequence: Synthetic oligonucleotide
  Sense strand starting at position 2902 of SEQ ID NO: 1884731
gccuuuagaaugggacuga

SEQ ID NO: 2287781 - RNA, 19 nt, Artificial Sequence
  Description of Artificial Sequence: Synthetic oligonucleotide
  Antisense strand to SEQ ID NO: 2287780
ucagucccauucuaaaggc

SEQ ID NO: 2287782 - RNA, 19 nt, Artificial Sequence
  Description of Artificial Sequence: Synthetic oligonucleotide
  Sense strand starting at position 2954 of SEQ ID NO: 1884731
cuggaaugggcaugagaac

SEQ ID NO: 2287783 - RNA, 19 nt, Artificial Sequence
  Description of Artificial Sequence: Synthetic oligonucleotide
  Antisense strand to SEQ ID NO: 2287782
guucucaugcccauuccag

SEQ ID NO: 2287784 - RNA, 19 nt, Artificial Sequence
  Description of Artificial Sequence: Synthetic oligonucleotide
  Sense strand starting at position 3052 of SEQ ID NO: 1884731
gcuguagaugcaugucaga

SEQ ID NO: 2287785 - RNA, 19 nt, Artificial Sequence
  Description of Artificial Sequence: Synthetic oligonucleotide
  Antisense strand to SEQ ID NO: 2287784
ucugacaugcaucuacagc

SEQ ID NO: 2287786 - RNA, 19 nt, Artificial Sequence
  Description of Artificial Sequence: Synthetic oligonucleotide
  Sense strand starting at position 3137 of SEQ ID NO: 1884731
ucaguagccugugcuaaga

SEQ ID NO: 2287787 - RNA, 19 nt, Artificial Sequence
  Description of Artificial Sequence: Synthetic oligonucleotide
  Antisense strand to SEQ ID NO: 2287786
ucuuagcacaggcuacuga

SEQ ID NO: 2287788 - RNA, 19 nt, Artificial Sequence
  Description of Artificial Sequence: Synthetic oligonucleotide
  Sense strand starting at position 3454 of SEQ ID NO: 1884731
acuggacgucuaggaagau

SEQ ID NO: 2287789 - RNA, 19 nt, Artificial Sequence
  Description of Artificial Sequence: Synthetic oligonucleotide
  Antisense strand to SEQ ID NO: 2287788
aucuuccuagacguccagu

SEQ ID NO: 2287790 - RNA, 19 nt, Artificial Sequence
  Description of Artificial Sequence: Synthetic oligonucleotide
  Sense strand starting at position 3487 of SEQ ID NO: 1884731
gcccuucccaguuauggga

SEQ ID NO: 2287791 - RNA, 19 nt, Artificial Sequence
  Description of Artificial Sequence: Synthetic oligonucleotide
  Antisense strand to SEQ ID NO: 2287790
ucccauaacugggaagggc

SEQ ID NO: 2287792 - RNA, 19 nt, Artificial Sequence
  Description of Artificial Sequence: Synthetic oligonucleotide
  Sense strand starting at position 3502 of SEQ ID NO: 1884731
gggacauggucaguucaga

SEQ ID NO: 2287793 - RNA, 19 nt, Artificial Sequence
  Description of Artificial Sequence: Synthetic oligonucleotide
  Antisense strand to SEQ ID NO: 2287792
ucugaacugaccauguccc

SEQ ID NO: 2287794 - RNA, 19 nt, Artificial Sequence
  Description of Artificial Sequence: Synthetic oligonucleotide
  Sense strand starting at position 3534 of SEQ ID NO: 1884731
guucucuggcauuagaaag

SEQ ID NO: 2287795 - RNA, 19 nt, Artificial Sequence
  Description of Artificial Sequence: Synthetic oligonucleotide
  Antisense strand to SEQ ID NO: 2287794
cuuucuaaugccagagaac

SEQ ID NO: 2287796 - RNA, 19 nt, Artificial Sequence
  Description of Artificial Sequence: Synthetic oligonucleotide
  Sense strand starting at position 3917 of SEQ ID NO: 1884731
cugguaaggcgcuauuauu

SEQ ID NO: 2287797 - RNA, 19 nt, Artificial Sequence
  Description of Artificial Sequence: Synthetic oligonucleotide
  Antisense strand to SEQ ID NO: 2287796
aauaauagcgccuuaccag

SEQ ID NO: 2287798 - RNA, 19 nt, Artificial Sequence
  Description of Artificial Sequence: Synthetic oligonucleotide
  Sense strand starting at position 287 of SEQ ID NO: 1884732
guugaagugaagugguaca

SEQ ID NO: 2287799 - RNA, 19 nt, Artificial Sequence
  Description of Artificial Sequence: Synthetic oligonucleotide
  Antisense strand to SEQ ID NO: 2287798
uguaccacuucacuucaac

SEQ ID NO: 2287800 - RNA, 19 nt, Artificial Sequence
  Description of Artificial Sequence: Synthetic oligonucleotide
  Sense strand starting at position 623 of SEQ ID NO: 1884732
cccagugcuuugguaggau

SEQ ID NO: 2287801 - RNA, 19 nt, Artificial Sequence
  Description of Artificial Sequence: Synthetic oligonucleotide
  Antisense strand to SEQ ID NO: 2287800
auccuaccaaagcacuggg

SEQ ID NO: 2287802 - RNA, 19 nt, Artificial Sequence
  Description of Artificial Sequence: Synthetic oligonucleotide
  Sense strand starting at position 788 of SEQ ID NO: 1884732
aagacaacccucugagagu

SEQ ID NO: 2287803 - RNA, 19 nt, Artificial Sequence
  Description of Artificial Sequence: Synthetic oligonucleotide
  Antisense strand to SEQ ID NO: 2287802
acucucagaggguugucuu

SEQ ID NO: 2287804 - RNA, 19 nt, Artificial Sequence
  Description of Artificial Sequence: Synthetic oligonucleotide
  Sense strand starting at position 797 of SEQ ID NO: 1884732
cucugagaguagcuauuau

SEQ ID NO: 2287805 - RNA, 19 nt, Artificial Sequence
  Description of Artificial Sequence: Synthetic oligonucleotide
  Antisense strand to SEQ ID NO: 2287804
auaauagcuacucucagag

SEQ ID NO: 2287806 - RNA, 19 nt, Artificial Sequence
  Description of Artificial Sequence: Synthetic oligonucleotide
  Sense strand starting at position 804 of SEQ ID NO: 1884732
aguagcuauuaucucuaua

SEQ ID NO: 2287807 - RNA, 19 nt, Artificial Sequence
  Description of Artificial Sequence: Synthetic oligonucleotide
  Antisense strand to SEQ ID NO: 2287806
uauagagauaauagcuacu

SEQ ID NO: 2287808 - RNA, 19 nt, Artificial Sequence
  Description of Artificial Sequence: Synthetic oligonucleotide
  Sense strand starting at position 807 of SEQ ID NO: 1884732
agcuauuaucucuauagua

SEQ ID NO: 2287809 - RNA, 19 nt, Artificial Sequence
  Description of Artificial Sequence: Synthetic oligonucleotide
  Antisense strand to SEQ ID NO: 2287808
uacuauagagauaauagcu

SEQ ID NO: 2287810 - RNA, 19 nt, Artificial Sequence
  Description of Artificial Sequence: Synthetic oligonucleotide
  Sense strand starting at position 809 of SEQ ID NO: 1884732
cuauuaucucuauaguagu

SEQ ID NO: 2287811 - RNA, 19 nt, Artificial Sequence
  Description of Artificial Sequence: Synthetic oligonucleotide
  Antisense strand to SEQ ID NO: 2287810
acuacuauagagauaauag

SEQ ID NO: 2287812 - RNA, 19 nt, Artificial Sequence
  Description of Artificial Sequence: Synthetic oligonucleotide
  Sense strand starting at position 815 of SEQ ID NO: 1884732
ucucuauaguagucugaca

SEQ ID NO: 2287813 - RNA, 19 nt, Artificial Sequence
  Description of Artificial Sequence: Synthetic oligonucleotide
  Antisense strand to SEQ ID NO: 2287812
ugucagacuacuauagaga

SEQ ID NO: 2287814 - RNA, 19 nt, Artificial Sequence
  Description of Artificial Sequence: Synthetic oligonucleotide
  Sense strand starting at position 817 of SEQ ID NO: 1884732
ucuauaguagucugacaac

SEQ ID NO: 2287815 - RNA, 19 nt, Artificial Sequence
  Description of Artificial Sequence: Synthetic oligonucleotide
  Antisense strand to SEQ ID NO: 2287814
guugucagacuacuauaga

SEQ ID NO: 2287816 - RNA, 19 nt, Artificial Sequence
  Description of Artificial Sequence: Synthetic oligonucleotide
  Sense strand starting at position 862 of SEQ ID NO: 1884732
auggaauaaugucaggaca

SEQ ID NO: 2287817 - RNA, 19 nt, Artificial Sequence
  Description of Artificial Sequence: Synthetic oligonucleotide
  Antisense strand to SEQ ID NO: 2287816
uguccugacauuauuccau

SEQ ID NO: 2287818 - RNA, 19 nt, Artificial Sequence
  Description of Artificial Sequence: Synthetic oligonucleotide
  Sense strand starting at position 1120 of SEQ ID NO: 1884732
ugaagaaguugggugguua

SEQ ID NO: 2287819 - RNA, 19 nt, Artificial Sequence
  Description of Artificial Sequence: Synthetic oligonucleotide
  Antisense strand to SEQ ID NO: 2287818
uaaccacccaacuucuuca

SEQ ID NO: 2287820 - RNA, 19 nt, Artificial Sequence
  Description of Artificial Sequence: Synthetic oligonucleotide
  Sense strand starting at position 1121 of SEQ ID NO: 1884732
gaagaaguugggugguuag

SEQ ID NO: 2287821 - RNA, 19 nt, Artificial Sequence
  Description of Artificial Sequence: Synthetic oligonucleotide
  Antisense strand to SEQ ID NO: 2287820
cuaaccacccaacuucuuc

SEQ ID NO: 2287822 - RNA, 19 nt, Artificial Sequence
  Description of Artificial Sequence: Synthetic oligonucleotide
  Sense strand starting at position 1200 of SEQ ID NO: 1884732
gcaagaaaucucugauccc

SEQ ID NO: 2287823 - RNA, 19 nt, Artificial Sequence
  Description of Artificial Sequence: Synthetic oligonucleotide
  Antisense strand to SEQ ID NO: 2287822
gggaucagagauuucuugc

SEQ ID NO: 2287824 - RNA, 19 nt, Artificial Sequence
  Description of Artificial Sequence: Synthetic oligonucleotide
  Sense strand starting at position 1304 of SEQ ID NO: 1884732
ccguguuugguguuuguca

SEQ ID NO: 2287825 - RNA, 19 nt, Artificial Sequence
  Description of Artificial Sequence: Synthetic oligonucleotide
  Antisense strand to SEQ ID NO: 2287824
ugacaaacaccaaacacgg

SEQ ID NO: 2287826 - RNA, 19 nt, Artificial Sequence
  Description of Artificial Sequence: Synthetic oligonucleotide
  Sense strand starting at position 1311 of SEQ ID NO: 1884732
ugguguuugucagcauuug

SEQ ID NO: 2287827 - RNA, 19 nt, Artificial Sequence
  Description of Artificial Sequence: Synthetic oligonucleotide
  Antisense strand to SEQ ID NO: 2287826
caaaugcugacaaacacca

SEQ ID NO: 2287828 - RNA, 19 nt, Artificial Sequence
  Description of Artificial Sequence: Synthetic oligonucleotide
  Sense strand starting at position 1312 of SEQ ID NO: 1884732
gguguuugucagcauuuga

SEQ ID NO: 2287829 - RNA, 19 nt, Artificial Sequence
  Description of Artificial Sequence: Synthetic oligonucleotide
  Antisense strand to SEQ ID NO: 2287828
ucaaaugcugacaaacacc

SEQ ID NO: 2287830 - RNA, 19 nt, Artificial Sequence
  Description of Artificial Sequence: Synthetic oligonucleotide
  Sense strand starting at position 1634 of SEQ ID NO: 1884732
acaccuugucuagguaaac

SEQ ID NO: 2287831 - RNA, 19 nt, Artificial Sequence
  Description of Artificial Sequence: Synthetic oligonucleotide
  Antisense strand to SEQ ID NO: 2287830
guuuaccuagacaaggugu

SEQ ID NO: 2287832 - RNA, 19 nt, Artificial Sequence
  Description of Artificial Sequence: Synthetic oligonucleotide
  Sense strand starting at position 1987 of SEQ ID NO: 1884732
agcccuagguccuucgaga

SEQ ID NO: 2287833 - RNA, 19 nt, Artificial Sequence
  Description of Artificial Sequence: Synthetic oligonucleotide
  Antisense strand to SEQ ID NO: 2287832
ucucgaaggaccuagggcu

SEQ ID NO: 2287834 - RNA, 19 nt, Artificial Sequence
  Description of Artificial Sequence: Synthetic oligonucleotide
  Sense strand starting at position 1995 of SEQ ID NO: 1884732
guccuucgagacuagaguu

SEQ ID NO: 2287835 - RNA, 19 nt, Artificial Sequence
  Description of Artificial Sequence: Synthetic oligonucleotide
  Antisense strand to SEQ ID NO: 2287834
aacucuagucucgaaggac

SEQ ID NO: 2287836 - RNA, 19 nt, Artificial Sequence
  Description of Artificial Sequence: Synthetic oligonucleotide
  Sense strand starting at position 2047 of SEQ ID NO: 1884732
ccgggagagcccugaauuc

SEQ ID NO: 2287837 - RNA, 19 nt, Artificial Sequence
  Description of Artificial Sequence: Synthetic oligonucleotide
  Antisense strand to SEQ ID NO: 2287836
gaauucagggcucucccgg

SEQ ID NO: 2287838 - RNA, 19 nt, Artificial Sequence
  Description of Artificial Sequence: Synthetic oligonucleotide
  Sense strand starting at position 2067 of SEQ ID NO: 1884732
cccaguuuccuggguggaa

SEQ ID NO: 2287839 - RNA, 19 nt, Artificial Sequence
  Description of Artificial Sequence: Synthetic oligonucleotide
  Antisense strand to SEQ ID NO: 2287838
uuccacccaggaaacuggg

SEQ ID NO: 2287840 - RNA, 19 nt, Artificial Sequence
  Description of Artificial Sequence: Synthetic oligonucleotide
  Sense strand starting at position 2177 of SEQ ID NO: 1884732
cggaauaugugcccagaug

SEQ ID NO: 2287841 - RNA, 19 nt, Artificial Sequence
  Description of Artificial Sequence: Synthetic oligonucleotide
  Antisense strand to SEQ ID NO: 2287840
caucugggcacauauuccg

SEQ ID NO: 2287842 - RNA, 19 nt, Artificial Sequence
  Description of Artificial Sequence: Synthetic oligonucleotide
  Sense strand starting at position 2225 of SEQ ID NO: 1884732
aguagaguguuccugggau

SEQ ID NO: 2287843 - RNA, 19 nt, Artificial Sequence
  Description of Artificial Sequence: Synthetic oligonucleotide
  Antisense strand to SEQ ID NO: 2287842
aucccaggaacacucuacu

SEQ ID NO: 2287844 - RNA, 19 nt, Artificial Sequence
  Description of Artificial Sequence: Synthetic oligonucleotide
  Sense strand starting at position 2315 of SEQ ID NO: 1884732
ggauuaaaugcauguacac

SEQ ID NO: 2287845 - RNA, 19 nt, Artificial Sequence
  Description of Artificial Sequence: Synthetic oligonucleotide
  Antisense strand to SEQ ID NO: 2287844
guguacaugcauuuaaucc

SEQ ID NO: 2287846 - RNA, 19 nt, Artificial Sequence
  Description of Artificial Sequence: Synthetic oligonucleotide
  Sense strand starting at position 2380 of SEQ ID NO: 1884732
ucugacgugcaucagaauu

SEQ ID NO: 2287847 - RNA, 19 nt, Artificial Sequence
  Description of Artificial Sequence: Synthetic oligonucleotide
  Antisense strand to SEQ ID NO: 2287846
aauucugaugcacgucaga

SEQ ID NO: 2287848 - RNA, 19 nt, Artificial Sequence
  Description of Artificial Sequence: Synthetic oligonucleotide
  Sense strand starting at position 3031 of SEQ ID NO: 1884732
uuuagaaaguucccaagua

SEQ ID NO: 2287849 - RNA, 19 nt, Artificial Sequence
  Description of Artificial Sequence: Synthetic oligonucleotide
  Antisense strand to SEQ ID NO: 2287848
uacuugggaacuuucuaaa

SEQ ID NO: 2287850 - RNA, 19 nt, Artificial Sequence
  Description of Artificial Sequence: Synthetic oligonucleotide
  Sense strand starting at position 3162 of SEQ ID NO: 1884732
ucaauacuggccuggacaa

SEQ ID NO: 2287851 - RNA, 19 nt, Artificial Sequence
  Description of Artificial Sequence: Synthetic oligonucleotide
  Antisense strand to SEQ ID NO: 2287850
uuguccaggccaguauuga

SEQ ID NO: 2287852 - RNA, 19 nt, Artificial Sequence
  Description of Artificial Sequence: Synthetic oligonucleotide
  Sense strand starting at position 3232 of SEQ ID NO: 1884732
agcuuaagugacugaugga

SEQ ID NO: 2287853 - RNA, 19 nt, Artificial Sequence
  Description of Artificial Sequence: Synthetic oligonucleotide
  Antisense strand to SEQ ID NO: 2287852
uccaucagucacuuaagcu

SEQ ID NO: 2287854 - RNA, 19 nt, Artificial Sequence
  Description of Artificial Sequence: Synthetic oligonucleotide
  Sense strand starting at position 3246 of SEQ ID NO: 1884732
auggaaugugcugagugaa

SEQ ID NO: 2287855 - RNA, 19 nt, Artificial Sequence
  Description of Artificial Sequence: Synthetic oligonucleotide
  Antisense strand to SEQ ID NO: 2287854
uucacucagcacauuccau

SEQ ID NO: 2287856 - RNA, 19 nt, Artificial Sequence
  Description of Artificial Sequence: Synthetic oligonucleotide
  Sense strand starting at position 3272 of SEQ ID NO: 1884732
guggaaauguggaggauaa

SEQ ID NO: 2287857 - RNA, 19 nt, Artificial Sequence
  Description of Artificial Sequence: Synthetic oligonucleotide
  Antisense strand to SEQ ID NO: 2287856
uuauccuccacauuuccac

SEQ ID NO: 2287858 - RNA, 19 nt, Artificial Sequence
  Description of Artificial Sequence: Synthetic oligonucleotide
  Sense strand starting at position 3426 of SEQ ID NO: 1884732
aggguucugacuuggacaa

SEQ ID NO: 2287859 - RNA, 19 nt, Artificial Sequence
  Description of Artificial Sequence: Synthetic oligonucleotide
  Antisense strand to SEQ ID NO: 2287858
uuguccaagucagaacccu

SEQ ID NO: 2287860 - RNA, 19 nt, Artificial Sequence
  Description of Artificial Sequence: Synthetic oligonucleotide
  Sense strand starting at position 3483 of SEQ ID NO: 1884732
cagggaacgaucuggaguu

SEQ ID NO: 2287861 - RNA, 19 nt, Artificial Sequence
  Description of Artificial Sequence: Synthetic oligonucleotide
  Antisense strand to SEQ ID NO: 2287860
aacuccagaucguucccug

SEQ ID NO: 2287862 - RNA, 19 nt, Artificial Sequence
  Description of Artificial Sequence: Synthetic oligonucleotide
  Sense strand starting at position 3490 of SEQ ID NO: 1884732
cgaucuggaguucagauua

SEQ ID NO: 2287863 - RNA, 19 nt, Artificial Sequence
  Description of Artificial Sequence: Synthetic oligonucleotide
  Antisense strand to SEQ ID NO: 2287862
uaaucugaacuccagaucg

SEQ ID NO: 2287864 - RNA, 19 nt, Artificial Sequence
  Description of Artificial Sequence: Synthetic oligonucleotide
  Sense strand starting at position 3556 of SEQ ID NO: 1884732
caaaguggcccuugaaaca

SEQ ID NO: 2287865 - RNA, 19 nt, Artificial Sequence
  Description of Artificial Sequence: Synthetic oligonucleotide
  Antisense strand to SEQ ID NO: 2287864
uguuucaagggccacuuug

SEQ ID NO: 2287866 - RNA, 19 nt, Artificial Sequence
  Description of Artificial Sequence: Synthetic oligonucleotide
  Sense strand starting at position 3628 of SEQ ID NO: 1884732
acuuguucuuugccaggga

SEQ ID NO: 2287867 - RNA, 19 nt, Artificial Sequence
  Description of Artificial Sequence: Synthetic oligonucleotide
  Antisense strand to SEQ ID NO: 2287866
ucccuggcaaagaacaagu

SEQ ID NO: 2287868 - RNA, 19 nt, Artificial Sequence
  Description of Artificial Sequence: Synthetic oligonucleotide
  Sense strand starting at position 3683 of SEQ ID NO: 1884732
uauggucugugagcuagaa

SEQ ID NO: 2287869 - RNA, 19 nt, Artificial Sequence
  Description of Artificial Sequence: Synthetic oligonucleotide
  Antisense strand to SEQ ID NO: 2287868
uucuagcucacagaccaua

SEQ ID NO: 2287870 - RNA, 19 nt, Artificial Sequence
  Description of Artificial Sequence: Synthetic oligonucleotide
  Sense strand starting at position 3685 of SEQ ID NO: 1884732
uggucugugagcuagaaug

SEQ ID NO: 2287871 - RNA, 19 nt, Artificial Sequence
  Description of Artificial Sequence: Synthetic oligonucleotide
  Antisense strand to SEQ ID NO: 2287870
cauucuagcucacagacca

SEQ ID NO: 2287872 - RNA, 19 nt, Artificial Sequence
  Description of Artificial Sequence: Synthetic oligonucleotide
  Sense strand starting at position 3687 of SEQ ID NO: 1884732
gucugugagcuagaauggu

SEQ ID NO: 2287873 - RNA, 19 nt, Artificial Sequence
  Description of Artificial Sequence: Synthetic oligonucleotide
  Antisense strand to SEQ ID NO: 2287872
accauucuagcucacagac

SEQ ID NO: 2287874 - RNA, 19 nt, Artificial Sequence
  Description of Artificial Sequence: Synthetic oligonucleotide
  Sense strand starting at position 3784 of SEQ ID NO: 1884732
ccguaacucuuauuggaac

SEQ ID NO: 2287875 - RNA, 19 nt, Artificial Sequence
  Description of Artificial Sequence: Synthetic oligonucleotide
  Antisense strand to SEQ ID NO: 2287874
guuccaauaagaguuacgg

SEQ ID NO: 2287876 - RNA, 19 nt, Artificial Sequence
  Description of Artificial Sequence: Synthetic oligonucleotide
  Sense strand starting at position 3826 of SEQ ID NO: 1884732
uaugaucuauggcugcuua

SEQ ID NO: 2287877 - RNA, 19 nt, Artificial Sequence
  Description of Artificial Sequence: Synthetic oligonucleotide
  Antisense strand to SEQ ID NO: 2287876
uaagcagccauagaucaua

SEQ ID NO: 2287878 - RNA, 19 nt, Artificial Sequence
  Description of Artificial Sequence: Synthetic oligonucleotide
  Sense strand starting at position 139 of SEQ ID NO: 1884733
ccgcgaaagguuuagggau

SEQ ID NO: 2287879 - RNA, 19 nt, Artificial Sequence
  Description of Artificial Sequence: Synthetic oligonucleotide
  Antisense strand to SEQ ID NO: 2287878
aucccuaaaccuuucgcgg

SEQ ID NO: 2287880 - RNA, 19 nt, Artificial Sequence
  Description of Artificial Sequence: Synthetic oligonucleotide
  Sense strand starting at position 140 of SEQ ID NO: 1884733
cgcgaaagguuuagggaua

SEQ ID NO: 2287881 - RNA, 19 nt, Artificial Sequence
  Description of Artificial Sequence: Synthetic oligonucleotide
  Antisense strand to SEQ ID NO: 2287880
uaucccuaaaccuuucgcg

SEQ ID NO: 2287882 - RNA, 19 nt, Artificial Sequence
  Description of Artificial Sequence: Synthetic oligonucleotide
  Sense strand starting at position 152 of SEQ ID NO: 1884733
agggauagaucguguggga

SEQ ID NO: 2287883 - RNA, 19 nt, Artificial Sequence
  Description of Artificial Sequence: Synthetic oligonucleotide
  Antisense strand to SEQ ID NO: 2287882
ucccacacgaucuaucccu

SEQ ID NO: 2287884 - RNA, 19 nt, Artificial Sequence
  Description of Artificial Sequence: Synthetic oligonucleotide
  Sense strand starting at position 154 of SEQ ID NO: 1884733
ggauagaucgugugggaga

SEQ ID NO: 2287885 - RNA, 19 nt, Artificial Sequence
  Description of Artificial Sequence: Synthetic oligonucleotide
  Antisense strand to SEQ ID NO: 2287884
ucucccacacgaucuaucc

SEQ ID NO: 2287886 - RNA, 19 nt, Artificial Sequence
  Description of Artificial Sequence: Synthetic oligonucleotide
  Sense strand starting at position 194 of SEQ ID NO: 1884733
ggcagugucuuguagaauc

SEQ ID NO: 2287887 - RNA, 19 nt, Artificial Sequence
  Description of Artificial Sequence: Synthetic oligonucleotide
  Antisense strand to SEQ ID NO: 2287886
gauucuacaagacacugcc

SEQ ID NO: 2287888 - RNA, 19 nt, Artificial Sequence
  Description of Artificial Sequence: Synthetic oligonucleotide
  Sense strand starting at position 196 of SEQ ID NO: 1884733
cagugucuuguagaaucuu

SEQ ID NO: 2287889 - RNA, 19 nt, Artificial Sequence
  Description of Artificial Sequence: Synthetic oligonucleotide
  Antisense strand to SEQ ID NO: 2287888
aagauucuacaagacacug

SEQ ID NO: 2287890 - RNA, 19 nt, Artificial Sequence
  Description of Artificial Sequence: Synthetic oligonucleotide
  Sense strand starting at position 301 of SEQ ID NO: 1884733
gcucaagugccgcaucuuu

SEQ ID NO: 2287891 - RNA, 19 nt, Artificial Sequence
  Description of Artificial Sequence: Synthetic oligonucleotide
  Antisense strand to SEQ ID NO: 2287890
aaagaugcggcacuugagc

SEQ ID NO: 2287892 - RNA, 19 nt, Artificial Sequence
  Description of Artificial Sequence: Synthetic oligonucleotide
  Sense strand starting at position 1467 of SEQ ID NO: 1884733
ccgacaguucuagaagcaa

SEQ ID NO: 2287893 - RNA, 19 nt, Artificial Sequence
  Description of Artificial Sequence: Synthetic oligonucleotide
  Antisense strand to SEQ ID NO: 2287892
uugcuucuagaacugucgg

SEQ ID NO: 2287894 - RNA, 19 nt, Artificial Sequence
  Description of Artificial Sequence: Synthetic oligonucleotide
  Sense strand starting at position 1522 of SEQ ID NO: 1884733
uucuuugaagcuugacuga

SEQ ID NO: 2287895 - RNA, 19 nt, Artificial Sequence
  Description of Artificial Sequence: Synthetic oligonucleotide
  Antisense strand to SEQ ID NO: 2287894
ucagucaagcuucaaagaa

SEQ ID NO: 2287896 - RNA, 19 nt, Artificial Sequence
  Description of Artificial Sequence: Synthetic oligonucleotide
  Sense strand starting at position 1525 of SEQ ID NO: 1884733
uuugaagcuugacugaguu

SEQ ID NO: 2287897 - RNA, 19 nt, Artificial Sequence
  Description of Artificial Sequence: Synthetic oligonucleotide
  Antisense strand to SEQ ID NO: 2287896
aacucagucaagcuucaaa

SEQ ID NO: 2287898 - RNA, 19 nt, Artificial Sequence
  Description of Artificial Sequence: Synthetic oligonucleotide
  Sense strand starting at position 1538 of SEQ ID NO: 1884733
ugaguucuuucugcgcuuu

SEQ ID NO: 2287899 - RNA, 19 nt, Artificial Sequence
  Description of Artificial Sequence: Synthetic oligonucleotide
  Antisense strand to SEQ ID NO: 2287898
aaagcgcagaaagaacuca

SEQ ID NO: 2287900 - RNA, 19 nt, Artificial Sequence
  Description of Artificial Sequence: Synthetic oligonucleotide
  Sense strand starting at position 2748 of SEQ ID NO: 1884733
aggccaggauguuuccuaa

SEQ ID NO: 2287901 - RNA, 19 nt, Artificial Sequence
  Description of Artificial Sequence: Synthetic oligonucleotide
  Antisense strand to SEQ ID NO: 2287900
uuaggaaacauccuggccu

SEQ ID NO: 2287902 - RNA, 19 nt, Artificial Sequence
  Description of Artificial Sequence: Synthetic oligonucleotide
  Sense strand starting at position 3042 of SEQ ID NO: 1884733
gccugacuguucgcaagag

SEQ ID NO: 2287903 - RNA, 19 nt, Artificial Sequence
  Description of Artificial Sequence: Synthetic oligonucleotide
  Antisense strand to SEQ ID NO: 2287902
cucuugcgaacagucaggc

SEQ ID NO: 2287904 - RNA, 19 nt, Artificial Sequence
  Description of Artificial Sequence: Synthetic oligonucleotide
  Sense strand starting at position 3080 of SEQ ID NO: 1884733
cccuuagaguccgagagau

SEQ ID NO: 2287905 - RNA, 19 nt, Artificial Sequence
  Description of Artificial Sequence: Synthetic oligonucleotide
  Antisense strand to SEQ ID NO: 2287904
aucucucggacucuaaggg

SEQ ID NO: 2287906 - RNA, 19 nt, Artificial Sequence
  Description of Artificial Sequence: Synthetic oligonucleotide
  Sense strand starting at position 3082 of SEQ ID NO: 1884733
cuuagaguccgagagauuc

SEQ ID NO: 2287907 - RNA, 19 nt, Artificial Sequence
  Description of Artificial Sequence: Synthetic oligonucleotide
  Antisense strand to SEQ ID NO: 2287906
gaaucucucggacucuaag

SEQ ID NO: 2287908 - RNA, 19 nt, Artificial Sequence
  Description of Artificial Sequence: Synthetic oligonucleotide
  Sense strand starting at position 3092 of SEQ ID NO: 1884733
gagagauuccgggacugcu

SEQ ID NO: 2287909 - RNA, 19 nt, Artificial Sequence
  Description of Artificial Sequence: Synthetic oligonucleotide
  Antisense strand to SEQ ID NO: 2287908
agcagucccggaaucucuc

SEQ ID NO: 2287910 - RNA, 19 nt, Artificial Sequence
  Description of Artificial Sequence: Synthetic oligonucleotide
  Sense strand starting at position 3191 of SEQ ID NO: 1884733
ccaaauugucaccaagcgu

SEQ ID NO: 2287911 - RNA, 19 nt, Artificial Sequence
  Description of Artificial Sequence: Synthetic oligonucleotide
  Antisense strand to SEQ ID NO: 2287910
acgcuuggugacaauuugg

SEQ ID NO: 2287912 - RNA, 19 nt, Artificial Sequence
  Description of Artificial Sequence: Synthetic oligonucleotide
  Sense strand starting at position 3349 of SEQ ID NO: 1884733
gugcacauuaaguaucgua

SEQ ID NO: 2287913 - RNA, 19 nt, Artificial Sequence
  Description of Artificial Sequence: Synthetic oligonucleotide
  Antisense strand to SEQ ID NO: 2287912
uacgauacuuaaugugcac

SEQ ID NO: 2287914 - RNA, 19 nt, Artificial Sequence
  Description of Artificial Sequence: Synthetic oligonucleotide
  Sense strand starting at position 3354 of SEQ ID NO: 1884733
cauuaaguaucguagagaa

SEQ ID NO: 2287915 - RNA, 19 nt, Artificial Sequence
  Description of Artificial Sequence: Synthetic oligonucleotide
  Antisense strand to SEQ ID NO: 2287914
uucucuacgauacuuaaug

SEQ ID NO: 2287916 - RNA, 19 nt, Artificial Sequence
  Description of Artificial Sequence: Synthetic oligonucleotide
  Sense strand starting at position 3356 of SEQ ID NO: 1884733
uuaaguaucguagagaacu

SEQ ID NO: 2287917 - RNA, 19 nt, Artificial Sequence
  Description of Artificial Sequence: Synthetic oligonucleotide
  Antisense strand to SEQ ID NO: 2287916
aguucucuacgauacuuaa

SEQ ID NO: 2287918 - RNA, 19 nt, Artificial Sequence
  Description of Artificial Sequence: Synthetic oligonucleotide
  Sense strand starting at position 3420 of SEQ ID NO: 1884733
agcgucguguccguggaua

SEQ ID NO: 2287919 - RNA, 19 nt, Artificial Sequence
  Description of Artificial Sequence: Synthetic oligonucleotide
  Antisense strand to SEQ ID NO: 2287918
uauccacggacacgacgcu

SEQ ID NO: 2287920 - RNA, 19 nt, Artificial Sequence
  Description of Artificial Sequence: Synthetic oligonucleotide
  Sense strand starting at position 3444 of SEQ ID NO: 1884733
cgcguaugguaauacagaa

SEQ ID NO: 2287921 - RNA, 19 nt, Artificial Sequence
  Description of Artificial Sequence: Synthetic oligonucleotide
  Antisense strand to SEQ ID NO: 2287920
uucuguauuaccauacgcg

SEQ ID NO: 2287922 - RNA, 19 nt, Artificial Sequence
  Description of Artificial Sequence: Synthetic oligonucleotide
  Sense strand starting at position 3521 of SEQ ID NO: 1884733
gaacuugacuuauccgagu

SEQ ID NO: 2287923 - RNA, 19 nt, Artificial Sequence
  Description of Artificial Sequence: Synthetic oligonucleotide
  Antisense strand to SEQ ID NO: 2287922
acucggauaagucaaguuc

SEQ ID NO: 2287924 - RNA, 19 nt, Artificial Sequence
  Description of Artificial Sequence: Synthetic oligonucleotide
  Sense strand starting at position 3524 of SEQ ID NO: 1884733
cuugacuuauccgagucca

SEQ ID NO: 2287925 - RNA, 19 nt, Artificial Sequence
  Description of Artificial Sequence: Synthetic oligonucleotide
  Antisense strand to SEQ ID NO: 2287924
uggacucggauaagucaag

SEQ ID NO: 2287926 - RNA, 19 nt, Artificial Sequence
  Description of Artificial Sequence: Synthetic oligonucleotide
  Sense strand starting at position 3587 of SEQ ID NO: 1884733
cgagcuuuggccuuucuuu

SEQ ID NO: 2287927 - RNA, 19 nt, Artificial Sequence
  Description of Artificial Sequence: Synthetic oligonucleotide
  Antisense strand to SEQ ID NO: 2287926
aaagaaaggccaaagcucg

SEQ ID NO: 2287928 - RNA, 19 nt, Artificial Sequence
  Description of Artificial Sequence: Synthetic oligonucleotide
  Sense strand starting at position 3693 of SEQ ID NO: 1884733
aggguuauucgcugugcuu

SEQ ID NO: 2287929 - RNA, 19 nt, Artificial Sequence
  Description of Artificial Sequence: Synthetic oligonucleotide
  Antisense strand to SEQ ID NO: 2287928
aagcacagcgaauaacccu

SEQ ID NO: 2287930 - RNA, 19 nt, Artificial Sequence
  Description of Artificial Sequence: Synthetic oligonucleotide
  Sense strand starting at position 3694 of SEQ ID NO: 1884733
ggguuauucgcugugcuua

SEQ ID NO: 2287931 - RNA, 19 nt, Artificial Sequence
  Description of Artificial Sequence: Synthetic oligonucleotide
  Antisense strand to SEQ ID NO: 2287930
uaagcacagcgaauaaccc

SEQ ID NO: 2287932 - RNA, 19 nt, Artificial Sequence
  Description of Artificial Sequence: Synthetic oligonucleotide
  Sense strand starting at position 3695 of SEQ ID NO: 1884733
gguuauucgcugugcuuag

SEQ ID NO: 2287933 - RNA, 19 nt, Artificial Sequence
  Description of Artificial Sequence: Synthetic oligonucleotide
  Antisense strand to SEQ ID NO: 2287932
cuaagcacagcgaauaacc

SEQ ID NO: 2287934 - RNA, 19 nt, Artificial Sequence
  Description of Artificial Sequence: Synthetic oligonucleotide
  Sense strand starting at position 3696 of SEQ ID NO: 1884733
guuauucgcugugcuuagu

SEQ ID NO: 2287935 - RNA, 19 nt, Artificial Sequence
  Description of Artificial Sequence: Synthetic oligonucleotide
  Antisense strand to SEQ ID NO: 2287934
acuaagcacagcgaauaac

SEQ ID NO: 2287936 - RNA, 19 nt, Artificial Sequence
  Description of Artificial Sequence: Synthetic oligonucleotide
  Sense strand starting at position 3702 of SEQ ID NO: 1884733
cgcugugcuuagucaggau

SEQ ID NO: 2287937 - RNA, 19 nt, Artificial Sequence
  Description of Artificial Sequence: Synthetic oligonucleotide
  Antisense strand to SEQ ID NO: 2287936
auccugacuaagcacagcg

SEQ ID NO: 2287938 - RNA, 19 nt, Artificial Sequence
  Description of Artificial Sequence: Synthetic oligonucleotide
  Sense strand starting at position 3705 of SEQ ID NO: 1884733
ugugcuuagucaggauaca

SEQ ID NO: 2287939 - RNA, 19 nt, Artificial Sequence
  Description of Artificial Sequence: Synthetic oligonucleotide
  Antisense strand to SEQ ID NO: 2287938
uguauccugacuaagcaca

SEQ ID NO: 2287940 - RNA, 19 nt, Artificial Sequence
  Description of Artificial Sequence: Synthetic oligonucleotide
  Sense strand starting at position 3706 of SEQ ID NO: 1884733
gugcuuagucaggauacaa

SEQ ID NO: 2287941 - RNA, 19 nt, Artificial Sequence
  Description of Artificial Sequence: Synthetic oligonucleotide
  Antisense strand to SEQ ID NO: 2287940
uuguauccugacuaagcac

SEQ ID NO: 2287942 - RNA, 19 nt, Artificial Sequence
  Description of Artificial Sequence: Synthetic oligonucleotide
  Sense strand starting at position 3728 of SEQ ID NO: 1884733
gggaacucggcacacgaua

SEQ ID NO: 2287943 - RNA, 19 nt, Artificial Sequence
  Description of Artificial Sequence: Synthetic oligonucleotide
  Antisense strand to SEQ ID NO: 2287942
uaucgugugccgaguuccc

SEQ ID NO: 2287944 - RNA, 19 nt, Artificial Sequence
  Description of Artificial Sequence: Synthetic oligonucleotide
  Sense strand starting at position 3742 of SEQ ID NO: 1884733
cgauaaguaucagguuggu

SEQ ID NO: 2287945 - RNA, 19 nt, Artificial Sequence
  Description of Artificial Sequence: Synthetic oligonucleotide
  Antisense strand to SEQ ID NO: 2287944
accaaccugauacuuaucg

SEQ ID NO: 2287946 - RNA, 19 nt, Artificial Sequence
  Description of Artificial Sequence: Synthetic oligonucleotide
  Sense strand starting at position 3860 of SEQ ID NO: 1884733
aguggauuuccacgcuauu

SEQ ID NO: 2287947 - RNA, 19 nt, Artificial Sequence
  Description of Artificial Sequence: Synthetic oligonucleotide
  Antisense strand to SEQ ID NO: 2287946
aauagcguggaaauccacu

SEQ ID NO: 2287948 - RNA, 19 nt, Artificial Sequence
  Description of Artificial Sequence: Synthetic oligonucleotide
  Sense strand starting at position 3869 of SEQ ID NO: 1884733
ccacgcuauugagaaccua

SEQ ID NO: 2287949 - RNA, 19 nt, Artificial Sequence
  Description of Artificial Sequence: Synthetic oligonucleotide
  Antisense strand to SEQ ID NO: 2287948
uagguucucaauagcgugg

SEQ ID NO: 2287950 - RNA, 19 nt, Artificial Sequence
  Description of Artificial Sequence: Synthetic oligonucleotide
  Sense strand starting at position 3886 of SEQ ID NO: 1884733
uaagccaguucgguuugau

SEQ ID NO: 2287951 - RNA, 19 nt, Artificial Sequence
  Description of Artificial Sequence: Synthetic oligonucleotide
  Antisense strand to SEQ ID NO: 2287950
aucaaaccgaacuggcuua

SEQ ID NO: 2287952 - RNA, 19 nt, Artificial Sequence
  Description of Artificial Sequence: Synthetic oligonucleotide
  Sense strand starting at position 3894 of SEQ ID NO: 1884733
uucgguuugauucgguaau

SEQ ID NO: 2287953 - RNA, 19 nt, Artificial Sequence
  Description of Artificial Sequence: Synthetic oligonucleotide
  Antisense strand to SEQ ID NO: 2287952
auuaccgaaucaaaccgaa

SEQ ID NO: 2287954 - RNA, 19 nt, Artificial Sequence
  Description of Artificial Sequence: Synthetic oligonucleotide
  Sense strand starting at position 3896 of SEQ ID NO: 1884733
cgguuugauucgguaauuu

SEQ ID NO: 2287955 - RNA, 19 nt, Artificial Sequence
  Description of Artificial Sequence: Synthetic oligonucleotide
  Antisense strand to SEQ ID NO: 2287954
aaauuaccgaaucaaaccg

SEQ ID NO: 2287956 - RNA, 19 nt, Artificial Sequence
  Description of Artificial Sequence: Synthetic oligonucleotide
  Sense strand starting at position 3920 of SEQ ID NO: 1884733
acgcuuuacuaauacaaug

SEQ ID NO: 2287957 - RNA, 19 nt, Artificial Sequence
  Description of Artificial Sequence: Synthetic oligonucleotide
  Antisense strand to SEQ ID NO: 2287956
cauuguauuaguaaagcgu

SEQ ID NO: 2287958 - RNA, 19 nt, Artificial Sequence
  Description of Artificial Sequence: Synthetic oligonucleotide
  Sense strand starting at position 185 of SEQ ID NO: 1884734
ccacaaggauucugagaaa

SEQ ID NO: 2287959 - RNA, 19 nt, Artificial Sequence
  Description of Artificial Sequence: Synthetic oligonucleotide
  Antisense strand to SEQ ID NO: 2287958
uuucucagaauccuugugg

SEQ ID NO: 2287960 - RNA, 19 nt, Artificial Sequence
  Description of Artificial Sequence: Synthetic oligonucleotide
  Sense strand starting at position 311 of SEQ ID NO: 1884734
ggcagagauuuacgugucu

SEQ ID NO: 2287961 - RNA, 19 nt, Artificial Sequence
  Description of Artificial Sequence: Synthetic oligonucleotide
  Antisense strand to SEQ ID NO: 2287960
agacacguaaaucucugcc

SEQ ID NO: 2287962 - RNA, 19 nt, Artificial Sequence
  Description of Artificial Sequence: Synthetic oligonucleotide
  Sense strand starting at position 451 of SEQ ID NO: 1884734
uucguuuggaaaugaaagu

SEQ ID NO: 2287963 - RNA, 19 nt, Artificial Sequence
  Description of Artificial Sequence: Synthetic oligonucleotide
  Antisense strand to SEQ ID NO: 2287962
acuuucauuuccaaacgaa

SEQ ID NO: 2287964 - RNA, 19 nt, Artificial Sequence
  Description of Artificial Sequence: Synthetic oligonucleotide
  Sense strand starting at position 503 of SEQ ID NO: 1884734
acaguugaguccuaguuaa

SEQ ID NO: 2287965 - RNA, 19 nt, Artificial Sequence
  Description of Artificial Sequence: Synthetic oligonucleotide
  Antisense strand to SEQ ID NO: 2287964
uuaacuaggacucaacugu

SEQ ID NO: 2287966 - RNA, 19 nt, Artificial Sequence
  Description of Artificial Sequence: Synthetic oligonucleotide
  Sense strand starting at position 660 of SEQ ID NO: 1884734
ccgcgaaagguuuagggau

SEQ ID NO: 2287967 - RNA, 19 nt, Artificial Sequence
  Description of Artificial Sequence: Synthetic oligonucleotide
  Antisense strand to SEQ ID NO: 2287966
aucccuaaaccuuucgcgg

SEQ ID NO: 2287968 - RNA, 19 nt, Artificial Sequence
  Description of Artificial Sequence: Synthetic oligonucleotide
  Sense strand starting at position 661 of SEQ ID NO: 1884734
cgcgaaagguuuagggaua

SEQ ID NO: 2287969 - RNA, 19 nt, Artificial Sequence
  Description of Artificial Sequence: Synthetic oligonucleotide
  Antisense strand to SEQ ID NO: 2287968
uaucccuaaaccuuucgcg

SEQ ID NO: 2287970 - RNA, 19 nt, Artificial Sequence
  Description of Artificial Sequence: Synthetic oligonucleotide
  Sense strand starting at position 673 of SEQ ID NO: 1884734
agggauagaucguguggga

SEQ ID NO: 2287971 - RNA, 19 nt, Artificial Sequence
  Description of Artificial Sequence: Synthetic oligonucleotide
  Antisense strand to SEQ ID NO: 2287970
ucccacacgaucuaucccu

SEQ ID NO: 2287972 - RNA, 19 nt, Artificial Sequence
  Description of Artificial Sequence: Synthetic oligonucleotide
  Sense strand starting at position 675 of SEQ ID NO: 1884734
ggauagaucgugugggaga

SEQ ID NO: 2287973 - RNA, 19 nt, Artificial Sequence
  Description of Artificial Sequence: Synthetic oligonucleotide
  Antisense strand to SEQ ID NO: 2287972
ucucccacacgaucuaucc

SEQ ID NO: 2287974 - RNA, 19 nt, Artificial Sequence
  Description of Artificial Sequence: Synthetic oligonucleotide
  Sense strand starting at position 715 of SEQ ID NO: 1884734
ggcagugucuuguagaauc

SEQ ID NO: 2287975 - RNA, 19 nt, Artificial Sequence
  Description of Artificial Sequence: Synthetic oligonucleotide
  Antisense strand to SEQ ID NO: 2287974
gauucuacaagacacugcc

SEQ ID NO: 2287976 - RNA, 19 nt, Artificial Sequence
  Description of Artificial Sequence: Synthetic oligonucleotide
  Sense strand starting at position 717 of SEQ ID NO: 1884734
cagugucuuguagaaucuu

SEQ ID NO: 2287977 - RNA, 19 nt, Artificial Sequence
  Description of Artificial Sequence: Synthetic oligonucleotide
  Antisense strand to SEQ ID NO: 2287976
aagauucuacaagacacug

SEQ ID NO: 2287978 - RNA, 19 nt, Artificial Sequence
  Description of Artificial Sequence: Synthetic oligonucleotide
  Sense strand starting at position 822 of SEQ ID NO: 1884734
gcucaagugccgcaucuuu

SEQ ID NO: 2287979 - RNA, 19 nt, Artificial Sequence
  Description of Artificial Sequence: Synthetic oligonucleotide
  Antisense strand to SEQ ID NO: 2287978
aaagaugcggcacuugagc

SEQ ID NO: 2287980 - RNA, 19 nt, Artificial Sequence
  Description of Artificial Sequence: Synthetic oligonucleotide
  Sense strand starting at position 1988 of SEQ ID NO: 1884734
ccgacaguucuagaagcaa

SEQ ID NO: 2287981 - RNA, 19 nt, Artificial Sequence
  Description of Artificial Sequence: Synthetic oligonucleotide
  Antisense strand to SEQ ID NO: 2287980
uugcuucuagaacugucgg

SEQ ID NO: 2287982 - RNA, 19 nt, Artificial Sequence
  Description of Artificial Sequence: Synthetic oligonucleotide
  Sense strand starting at position 2037 of SEQ ID NO: 1884734
auacgcuucuuugaagcuu

SEQ ID NO: 2287983 - RNA, 19 nt, Artificial Sequence
  Description of Artificial Sequence: Synthetic oligonucleotide
  Antisense strand to SEQ ID NO: 2287982
aagcuucaaagaagcguau

SEQ ID NO: 2287984 - RNA, 19 nt, Artificial Sequence
  Description of Artificial Sequence: Synthetic oligonucleotide
  Sense strand starting at position 2043 of SEQ ID NO: 1884734
uucuuugaagcuugacuga

SEQ ID NO: 2287985 - RNA, 19 nt, Artificial Sequence
  Description of Artificial Sequence: Synthetic oligonucleotide
  Antisense strand to SEQ ID NO: 2287984
ucagucaagcuucaaagaa

SEQ ID NO: 2287986 - RNA, 19 nt, Artificial Sequence
  Description of Artificial Sequence: Synthetic oligonucleotide
  Sense strand starting at position 2046 of SEQ ID NO: 1884734
uuugaagcuugacugaguu

SEQ ID NO: 2287987 - RNA, 19 nt, Artificial Sequence
  Description of Artificial Sequence: Synthetic oligonucleotide
  Antisense strand to SEQ ID NO: 2287986
aacucagucaagcuucaaa

SEQ ID NO: 2287988 - RNA, 19 nt, Artificial Sequence
  Description of Artificial Sequence: Synthetic oligonucleotide
  Sense strand starting at position 2058 of SEQ ID NO: 1884734
cugaguucuuucugcgcuu

SEQ ID NO: 2287989 - RNA, 19 nt, Artificial Sequence
  Description of Artificial Sequence: Synthetic oligonucleotide
  Antisense strand to SEQ ID NO: 2287988
aagcgcagaaagaacucag

SEQ ID NO: 2287990 - RNA, 19 nt, Artificial Sequence
  Description of Artificial Sequence: Synthetic oligonucleotide
  Sense strand starting at position 2059 of SEQ ID NO: 1884734
ugaguucuuucugcgcuuu

SEQ ID NO: 2287991 - RNA, 19 nt, Artificial Sequence
  Description of Artificial Sequence: Synthetic oligonucleotide
  Antisense strand to SEQ ID NO: 2287990
aaagcgcagaaagaacuca

SEQ ID NO: 2287992 - RNA, 19 nt, Artificial Sequence
  Description of Artificial Sequence: Synthetic oligonucleotide
  Sense strand starting at position 3269 of SEQ ID NO: 1884734
aggccaggauguuuccuaa

SEQ ID NO: 2287993 - RNA, 19 nt, Artificial Sequence
  Description of Artificial Sequence: Synthetic oligonucleotide
  Antisense strand to SEQ ID NO: 2287992
uuaggaaacauccuggccu

SEQ ID NO: 2287994 - RNA, 19 nt, Artificial Sequence
  Description of Artificial Sequence: Synthetic oligonucleotide
  Sense strand starting at position 3563 of SEQ ID NO: 1884734
gccugacuguucgcaagag

SEQ ID NO: 2287995 - RNA, 19 nt, Artificial Sequence
  Description of Artificial Sequence: Synthetic oligonucleotide
  Antisense strand to SEQ ID NO: 2287994
cucuugcgaacagucaggc

SEQ ID NO: 2287996 - RNA, 19 nt, Artificial Sequence
  Description of Artificial Sequence: Synthetic oligonucleotide
  Sense strand starting at position 3601 of SEQ ID NO: 1884734
cccuuagaguccgagagau

SEQ ID NO: 2287997 - RNA, 19 nt, Artificial Sequence
  Description of Artificial Sequence: Synthetic oligonucleotide
  Antisense strand to SEQ ID NO: 2287996
aucucucggacucuaaggg

SEQ ID NO: 2287998 - RNA, 19 nt, Artificial Sequence
  Description of Artificial Sequence: Synthetic oligonucleotide
  Sense strand starting at position 3603 of SEQ ID NO: 1884734
cuuagaguccgagagauuc

SEQ ID NO: 2287999 - RNA, 19 nt, Artificial Sequence
  Description of Artificial Sequence: Synthetic oligonucleotide
  Antisense strand to SEQ ID NO: 2287998
gaaucucucggacucuaag

SEQ ID NO: 2288000 - RNA, 19 nt, Artificial Sequence
  Description of Artificial Sequence: Synthetic oligonucleotide
  Sense strand starting at position 3613 of SEQ ID NO: 1884734
gagagauuccgggacugcu

SEQ ID NO: 2288001 - RNA, 19 nt, Artificial Sequence
  Description of Artificial Sequence: Synthetic oligonucleotide
  Antisense strand to SEQ ID NO: 2288000
agcagucccggaaucucuc

SEQ ID NO: 2288002 - RNA, 19 nt, Artificial Sequence
  Description of Artificial Sequence: Synthetic oligonucleotide
  Sense strand starting at position 3712 of SEQ ID NO: 1884734
ccaaauugucaccaagcgu

SEQ ID NO: 2288003 - RNA, 19 nt, Artificial Sequence
  Description of Artificial Sequence: Synthetic oligonucleotide
  Antisense strand to SEQ ID NO: 2288002
acgcuuggugacaauuugg

SEQ ID NO: 2288004 - RNA, 19 nt, Artificial Sequence
  Description of Artificial Sequence: Synthetic oligonucleotide
  Sense strand starting at position 3870 of SEQ ID NO: 1884734
gugcacauuaaguaucgua

SEQ ID NO: 2288005 - RNA, 19 nt, Artificial Sequence
  Description of Artificial Sequence: Synthetic oligonucleotide
  Antisense strand to SEQ ID NO: 2288004
uacgauacuuaaugugcac

SEQ ID NO: 2288006 - RNA, 19 nt, Artificial Sequence
  Description of Artificial Sequence: Synthetic oligonucleotide
  Sense strand starting at position 3875 of SEQ ID NO: 1884734
cauuaaguaucguagagaa

SEQ ID NO: 2288007 - RNA, 19 nt, Artificial Sequence
  Description of Artificial Sequence: Synthetic oligonucleotide
  Antisense strand to SEQ ID NO: 2288006
uucucuacgauacuuaaug

SEQ ID NO: 2288008 - RNA, 19 nt, Artificial Sequence
  Description of Artificial Sequence: Synthetic oligonucleotide
  Sense strand starting at position 3877 of SEQ ID NO: 1884734
uuaaguaucguagagaacu

SEQ ID NO: 2288009 - RNA, 19 nt, Artificial Sequence
  Description of Artificial Sequence: Synthetic oligonucleotide
  Antisense strand to SEQ ID NO: 2288008
aguucucuacgauacuuaa

SEQ ID NO: 2288010 - RNA, 19 nt, Artificial Sequence
  Description of Artificial Sequence: Synthetic oligonucleotide
  Sense strand starting at position 3941 of SEQ ID NO: 1884734
agcgucguguccguggaua

SEQ ID NO: 2288011 - RNA, 19 nt, Artificial Sequence
  Description of Artificial Sequence: Synthetic oligonucleotide
  Antisense strand to SEQ ID NO: 2288010
uauccacggacacgacgcu

SEQ ID NO: 2288012 - RNA, 19 nt, Artificial Sequence
  Description of Artificial Sequence: Synthetic oligonucleotide
  Sense strand starting at position 3953 of SEQ ID NO: 1884734
guggauagcucccgcguau

SEQ ID NO: 2288013 - RNA, 19 nt, Artificial Sequence
  Description of Artificial Sequence: Synthetic oligonucleotide
  Antisense strand to SEQ ID NO: 2288012
auacgcgggagcuauccac

SEQ ID NO: 2288014 - RNA, 19 nt, Artificial Sequence
  Description of Artificial Sequence: Synthetic oligonucleotide
  Sense strand starting at position 3965 of SEQ ID NO: 1884734
cgcguaugguaauacagaa

SEQ ID NO: 2288015 - RNA, 19 nt, Artificial Sequence
  Description of Artificial Sequence: Synthetic oligonucleotide
  Antisense strand to SEQ ID NO: 2288014
uucuguauuaccauacgcg

SEQ ID NO: 2288016 - RNA, 19 nt, Artificial Sequence
  Description of Artificial Sequence: Synthetic oligonucleotide
  Sense strand starting at position 9 of SEQ ID NO: 1884735
uacugaagucaaugucaug

SEQ ID NO: 2288017 - RNA, 19 nt, Artificial Sequence
  Description of Artificial Sequence: Synthetic oligonucleotide
  Antisense strand to SEQ ID NO: 2288016
caugacauugacuucagua

SEQ ID NO: 2288018 - RNA, 19 nt, Artificial Sequence
  Description of Artificial Sequence: Synthetic oligonucleotide
  Sense strand starting at position 30 of SEQ ID NO: 1884735
augguugacgcaggauuau

SEQ ID NO: 2288019 - RNA, 19 nt, Artificial Sequence
  Description of Artificial Sequence: Synthetic oligonucleotide
  Antisense strand to SEQ ID NO: 2288018
auaauccugcgucaaccau

SEQ ID NO: 2288020 - RNA, 19 nt, Artificial Sequence
  Description of Artificial Sequence: Synthetic oligonucleotide
  Sense strand starting at position 39 of SEQ ID NO: 1884735
gcaggauuauauguauaag

SEQ ID NO: 2288021 - RNA, 19 nt, Artificial Sequence
  Description of Artificial Sequence: Synthetic oligonucleotide
  Antisense strand to SEQ ID NO: 2288020
cuuauacauauaauccugc

SEQ ID NO: 2288022 - RNA, 19 nt, Artificial Sequence
  Description of Artificial Sequence: Synthetic oligonucleotide
  Sense strand starting at position 42 of SEQ ID NO: 1884735
ggauuauauguauaagugu

SEQ ID NO: 2288023 - RNA, 19 nt, Artificial Sequence
  Description of Artificial Sequence: Synthetic oligonucleotide
  Antisense strand to SEQ ID NO: 2288022
acacuuauacauauaaucc

SEQ ID NO: 2288024 - RNA, 19 nt, Artificial Sequence
  Description of Artificial Sequence: Synthetic oligonucleotide
  Sense strand starting at position 72 of SEQ ID NO: 1884735
aucagaggucuuuggguau

SEQ ID NO: 2288025 - RNA, 19 nt, Artificial Sequence
  Description of Artificial Sequence: Synthetic oligonucleotide
  Antisense strand to SEQ ID NO: 2288024
auacccaaagaccucugau

SEQ ID NO: 2288026 - RNA, 19 nt, Artificial Sequence
  Description of Artificial Sequence: Synthetic oligonucleotide
  Sense strand starting at position 75 of SEQ ID NO: 1884735
agaggucuuuggguauuga

SEQ ID NO: 2288027 - RNA, 19 nt, Artificial Sequence
  Description of Artificial Sequence: Synthetic oligonucleotide
  Antisense strand to SEQ ID NO: 2288026
ucaauacccaaagaccucu

SEQ ID NO: 2288028 - RNA, 19 nt, Artificial Sequence
  Description of Artificial Sequence: Synthetic oligonucleotide
  Sense strand starting at position 76 of SEQ ID NO: 1884735
gaggucuuuggguauugaa

SEQ ID NO: 2288029 - RNA, 19 nt, Artificial Sequence
  Description of Artificial Sequence: Synthetic oligonucleotide
  Antisense strand to SEQ ID NO: 2288028
uucaauacccaaagaccuc

SEQ ID NO: 2288030 - RNA, 19 nt, Artificial Sequence
  Description of Artificial Sequence: Synthetic oligonucleotide
  Sense strand starting at position 139 of SEQ ID NO: 1884735
gugagaaaccguuaggcau

SEQ ID NO: 2288031 - RNA, 19 nt, Artificial Sequence
  Description of Artificial Sequence: Synthetic oligonucleotide
  Antisense strand to SEQ ID NO: 2288030
augccuaacgguuucucac

SEQ ID NO: 2288032 - RNA, 19 nt, Artificial Sequence
  Description of Artificial Sequence: Synthetic oligonucleotide
  Sense strand starting at position 174 of SEQ ID NO: 1884735
cugaaauugcaauggauug

SEQ ID NO: 2288033 - RNA, 19 nt, Artificial Sequence
  Description of Artificial Sequence: Synthetic oligonucleotide
  Antisense strand to SEQ ID NO: 2288032
caauccauugcaauuucag

SEQ ID NO: 2288034 - RNA, 19 nt, Artificial Sequence
  Description of Artificial Sequence: Synthetic oligonucleotide
  Sense strand starting at position 175 of SEQ ID NO: 1884735
ugaaauugcaauggauugu

SEQ ID NO: 2288035 - RNA, 19 nt, Artificial Sequence
  Description of Artificial Sequence: Synthetic oligonucleotide
  Antisense strand to SEQ ID NO: 2288034
acaauccauugcaauuuca

SEQ ID NO: 2288036 - RNA, 19 nt, Artificial Sequence
  Description of Artificial Sequence: Synthetic oligonucleotide
  Sense strand starting at position 200 of SEQ ID NO: 1884735
gcauucugucuggaucaca

SEQ ID NO: 2288037 - RNA, 19 nt, Artificial Sequence
  Description of Artificial Sequence: Synthetic oligonucleotide
  Antisense strand to SEQ ID NO: 2288036
ugugauccagacagaaugc

SEQ ID NO: 2288038 - RNA, 19 nt, Artificial Sequence
  Description of Artificial Sequence: Synthetic oligonucleotide
  Sense strand starting at position 286 of SEQ ID NO: 1884735
cuguguuagcaggaugauc

SEQ ID NO: 2288039 - RNA, 19 nt, Artificial Sequence
  Description of Artificial Sequence: Synthetic oligonucleotide
  Antisense strand to SEQ ID NO: 2288038
gaucauccugcuaacacag

SEQ ID NO: 2288040 - RNA, 19 nt, Artificial Sequence
  Description of Artificial Sequence: Synthetic oligonucleotide
  Sense strand starting at position 865 of SEQ ID NO: 1884735
guguaacucucacuggaac

SEQ ID NO: 2288041 - RNA, 19 nt, Artificial Sequence
  Description of Artificial Sequence: Synthetic oligonucleotide
  Antisense strand to SEQ ID NO: 2288040
guuccagugagaguuacac

SEQ ID NO: 2288042 - RNA, 19 nt, Artificial Sequence
  Description of Artificial Sequence: Synthetic oligonucleotide
  Sense strand starting at position 866 of SEQ ID NO: 1884735
uguaacucucacuggaaca

SEQ ID NO: 2288043 - RNA, 19 nt, Artificial Sequence
  Description of Artificial Sequence: Synthetic oligonucleotide
  Antisense strand to SEQ ID NO: 2288042
uguuccagugagaguuaca

SEQ ID NO: 2288044 - RNA, 19 nt, Artificial Sequence
  Description of Artificial Sequence: Synthetic oligonucleotide
  Sense strand starting at position 968 of SEQ ID NO: 1884735
acaguauauccauguguac

SEQ ID NO: 2288045 - RNA, 19 nt, Artificial Sequence
  Description of Artificial Sequence: Synthetic oligonucleotide
  Antisense strand to SEQ ID NO: 2288044
guacacauggauauacugu

SEQ ID NO: 2288046 - RNA, 19 nt, Artificial Sequence
  Description of Artificial Sequence: Synthetic oligonucleotide
  Sense strand starting at position 971 of SEQ ID NO: 1884735
guauauccauguguacaca

SEQ ID NO: 2288047 - RNA, 19 nt, Artificial Sequence
  Description of Artificial Sequence: Synthetic oligonucleotide
  Antisense strand to SEQ ID NO: 2288046
uguguacacauggauauac

SEQ ID NO: 2288048 - RNA, 19 nt, Artificial Sequence
  Description of Artificial Sequence: Synthetic oligonucleotide
  Sense strand starting at position 1326 of SEQ ID NO: 1884735
ccaaguuguagucaugaag

SEQ ID NO: 2288049 - RNA, 19 nt, Artificial Sequence
  Description of Artificial Sequence: Synthetic oligonucleotide
  Antisense strand to SEQ ID NO: 2288048
cuucaugacuacaacuugg

SEQ ID NO: 2288050 - RNA, 19 nt, Artificial Sequence
  Description of Artificial Sequence: Synthetic oligonucleotide
  Sense strand starting at position 1329 of SEQ ID NO: 1884735
aguuguagucaugaagguu

SEQ ID NO: 2288051 - RNA, 19 nt, Artificial Sequence
  Description of Artificial Sequence: Synthetic oligonucleotide
  Antisense strand to SEQ ID NO: 2288050
aaccuucaugacuacaacu

SEQ ID NO: 2288052 - RNA, 19 nt, Artificial Sequence
  Description of Artificial Sequence: Synthetic oligonucleotide
  Sense strand starting at position 1354 of SEQ ID NO: 1884735
ggcaguucugaauaaucuc

SEQ ID NO: 2288053 - RNA, 19 nt, Artificial Sequence
  Description of Artificial Sequence: Synthetic oligonucleotide
  Antisense strand to SEQ ID NO: 2288052
gagauuauucagaacugcc

SEQ ID NO: 2288054 - RNA, 19 nt, Artificial Sequence
  Description of Artificial Sequence: Synthetic oligonucleotide
  Sense strand starting at position 2030 of SEQ ID NO: 1884735
cacagucaugugugacuua

SEQ ID NO: 2288055 - RNA, 19 nt, Artificial Sequence
  Description of Artificial Sequence: Synthetic oligonucleotide
  Antisense strand to SEQ ID NO: 2288054
uaagucacacaugacugug

SEQ ID NO: 2288056 - RNA, 19 nt, Artificial Sequence
  Description of Artificial Sequence: Synthetic oligonucleotide
  Sense strand starting at position 2033 of SEQ ID NO: 1884735
agucaugugugacuuaaca

SEQ ID NO: 2288057 - RNA, 19 nt, Artificial Sequence
  Description of Artificial Sequence: Synthetic oligonucleotide
  Antisense strand to SEQ ID NO: 2288056
uguuaagucacacaugacu

SEQ ID NO: 2288058 - RNA, 19 nt, Artificial Sequence
  Description of Artificial Sequence: Synthetic oligonucleotide
  Sense strand starting at position 2098 of SEQ ID NO: 1884735
gugcaaacaccauggauua

SEQ ID NO: 2288059 - RNA, 19 nt, Artificial Sequence
  Description of Artificial Sequence: Synthetic oligonucleotide
  Antisense strand to SEQ ID NO: 2288058
uaauccaugguguuugcac

SEQ ID NO: 2288060 - RNA, 19 nt, Artificial Sequence
  Description of Artificial Sequence: Synthetic oligonucleotide
  Sense strand starting at position 2099 of SEQ ID NO: 1884735
ugcaaacaccauggauuaa

SEQ ID NO: 2288061 - RNA, 19 nt, Artificial Sequence
  Description of Artificial Sequence: Synthetic oligonucleotide
  Antisense strand to SEQ ID NO: 2288060
uuaauccaugguguuugca

SEQ ID NO: 2288062 - RNA, 19 nt, Artificial Sequence
  Description of Artificial Sequence: Synthetic oligonucleotide
  Sense strand starting at position 2435 of SEQ ID NO: 1884735
aggaaugaagcuugccaga

SEQ ID NO: 2288063 - RNA, 19 nt, Artificial Sequence
  Description of Artificial Sequence: Synthetic oligonucleotide
  Antisense strand to SEQ ID NO: 2288062
ucuggcaagcuucauuccu

SEQ ID NO: 2288064 - RNA, 19 nt, Artificial Sequence
  Description of Artificial Sequence: Synthetic oligonucleotide
  Sense strand starting at position 2453 of SEQ ID NO: 1884735
acuggaaguugcucuaagu

SEQ ID NO: 2288065 - RNA, 19 nt, Artificial Sequence
  Description of Artificial Sequence: Synthetic oligonucleotide
  Antisense strand to SEQ ID NO: 2288064
acuuagagcaacuuccagu

SEQ ID NO: 2288066 - RNA, 19 nt, Artificial Sequence
  Description of Artificial Sequence: Synthetic oligonucleotide
  Sense strand starting at position 2489 of SEQ ID NO: 1884735
gugagugaaucuguacacu

SEQ ID NO: 2288067 - RNA, 19 nt, Artificial Sequence
  Description of Artificial Sequence: Synthetic oligonucleotide
  Antisense strand to SEQ ID NO: 2288066
aguguacagauucacucac

SEQ ID NO: 2288068 - RNA, 19 nt, Artificial Sequence
  Description of Artificial Sequence: Synthetic oligonucleotide
  Sense strand starting at position 2492 of SEQ ID NO: 1884735
agugaaucuguacacuaug

SEQ ID NO: 2288069 - RNA, 19 nt, Artificial Sequence
  Description of Artificial Sequence: Synthetic oligonucleotide
  Antisense strand to SEQ ID NO: 2288068
cauaguguacagauucacu

SEQ ID NO: 2288070 - RNA, 19 nt, Artificial Sequence
  Description of Artificial Sequence: Synthetic oligonucleotide
  Sense strand starting at position 2520 of SEQ ID NO: 1884735
ugaacauuguaugccuaga

SEQ ID NO: 2288071 - RNA, 19 nt, Artificial Sequence
  Description of Artificial Sequence: Synthetic oligonucleotide
  Antisense strand to SEQ ID NO: 2288070
ucuaggcauacaauguuca

SEQ ID NO: 2288072 - RNA, 19 nt, Artificial Sequence
  Description of Artificial Sequence: Synthetic oligonucleotide
  Sense strand starting at position 2525 of SEQ ID NO: 1884735
auuguaugccuagacuaca

SEQ ID NO: 2288073 - RNA, 19 nt, Artificial Sequence
  Description of Artificial Sequence: Synthetic oligonucleotide
  Antisense strand to SEQ ID NO: 2288072
uguagucuaggcauacaau

SEQ ID NO: 2288074 - RNA, 19 nt, Artificial Sequence
  Description of Artificial Sequence: Synthetic oligonucleotide
  Sense strand starting at position 2915 of SEQ ID NO: 1884735
ugauaauaaugccugcaua

SEQ ID NO: 2288075 - RNA, 19 nt, Artificial Sequence
  Description of Artificial Sequence: Synthetic oligonucleotide
  Antisense strand to SEQ ID NO: 2288074
uaugcaggcauuauuauca

SEQ ID NO: 2288076 - RNA, 19 nt, Artificial Sequence
  Description of Artificial Sequence: Synthetic oligonucleotide
  Sense strand starting at position 3166 of SEQ ID NO: 1884735
uguauuguacuaugacauu

SEQ ID NO: 2288077 - RNA, 19 nt, Artificial Sequence
  Description of Artificial Sequence: Synthetic oligonucleotide
  Antisense strand to SEQ ID NO: 2288076
aaugucauaguacaauaca

SEQ ID NO: 2288078 - RNA, 19 nt, Artificial Sequence
  Description of Artificial Sequence: Synthetic oligonucleotide
  Sense strand starting at position 3172 of SEQ ID NO: 1884735
guacuaugacauuauguug

SEQ ID NO: 2288079 - RNA, 19 nt, Artificial Sequence
  Description of Artificial Sequence: Synthetic oligonucleotide
  Antisense strand to SEQ ID NO: 2288078
caacauaaugucauaguac

SEQ ID NO: 2288080 - RNA, 19 nt, Artificial Sequence
  Description of Artificial Sequence: Synthetic oligonucleotide
  Sense strand starting at position 3178 of SEQ ID NO: 1884735
ugacauuauguuggcuaca

SEQ ID NO: 2288081 - RNA, 19 nt, Artificial Sequence
  Description of Artificial Sequence: Synthetic oligonucleotide
  Antisense strand to SEQ ID NO: 2288080
uguagccaacauaauguca

SEQ ID NO: 2288082 - RNA, 19 nt, Artificial Sequence
  Description of Artificial Sequence: Synthetic oligonucleotide
  Sense strand starting at position 3179 of SEQ ID NO: 1884735
gacauuauguuggcuacaa

SEQ ID NO: 2288083 - RNA, 19 nt, Artificial Sequence
  Description of Artificial Sequence: Synthetic oligonucleotide
  Antisense strand to SEQ ID NO: 2288082
uuguagccaacauaauguc

SEQ ID NO: 2288084 - RNA, 19 nt, Artificial Sequence
  Description of Artificial Sequence: Synthetic oligonucleotide
  Sense strand starting at position 3180 of SEQ ID NO: 1884735
acauuauguuggcuacaau

SEQ ID NO: 2288085 - RNA, 19 nt, Artificial Sequence
  Description of Artificial Sequence: Synthetic oligonucleotide
  Antisense strand to SEQ ID NO: 2288084
auuguagccaacauaaugu

SEQ ID NO: 2288086 - RNA, 19 nt, Artificial Sequence
  Description of Artificial Sequence: Synthetic oligonucleotide
  Sense strand starting at position 3181 of SEQ ID NO: 1884735
cauuauguuggcuacaaug

SEQ ID NO: 2288087 - RNA, 19 nt, Artificial Sequence
  Description of Artificial Sequence: Synthetic oligonucleotide
  Antisense strand to SEQ ID NO: 2288086
cauuguagccaacauaaug

SEQ ID NO: 2288088 - RNA, 19 nt, Artificial Sequence
  Description of Artificial Sequence: Synthetic oligonucleotide
  Sense strand starting at position 3218 of SEQ ID NO: 1884735
uuaucagcucuguauuagu

SEQ ID NO: 2288089 - RNA, 19 nt, Artificial Sequence
  Description of Artificial Sequence: Synthetic oligonucleotide
  Antisense strand to SEQ ID NO: 2288088
acuaauacagagcugauaa

SEQ ID NO: 2288090 - RNA, 19 nt, Artificial Sequence
  Description of Artificial Sequence: Synthetic oligonucleotide
  Sense strand starting at position 3522 of SEQ ID NO: 1884735
gugcuaaaugggcaugaga

SEQ ID NO: 2288091 - RNA, 19 nt, Artificial Sequence
  Description of Artificial Sequence: Synthetic oligonucleotide
  Antisense strand to SEQ ID NO: 2288090
ucucaugcccauuuagcac

SEQ ID NO: 2288092 - RNA, 19 nt, Artificial Sequence
  Description of Artificial Sequence: Synthetic oligonucleotide
  Sense strand starting at position 3524 of SEQ ID NO: 1884735
gcuaaaugggcaugagaaa

SEQ ID NO: 2288093 - RNA, 19 nt, Artificial Sequence
  Description of Artificial Sequence: Synthetic oligonucleotide
  Antisense strand to SEQ ID NO: 2288092
uuucucaugcccauuuagc

SEQ ID NO: 2288094 - RNA, 19 nt, Artificial Sequence
  Description of Artificial Sequence: Synthetic oligonucleotide
  Sense strand starting at position 3811 of SEQ ID NO: 1884735
agagcaaacucuuuggcaa

SEQ ID NO: 2288095 - RNA, 19 nt, Artificial Sequence
  Description of Artificial Sequence: Synthetic oligonucleotide
  Antisense strand to SEQ ID NO: 2288094
uugccaaagaguuugcucu

SEQ ID NO: 2288096 - RNA, 19 nt, Artificial Sequence
  Description of Artificial Sequence: Synthetic oligonucleotide
  Sense strand starting at position 270 of SEQ ID NO: 1884736
guaaacaagauguguaaag

SEQ ID NO: 2288097 - RNA, 19 nt, Artificial Sequence
  Description of Artificial Sequence: Synthetic oligonucleotide
  Antisense strand to SEQ ID NO: 2288096
cuuuacacaucuuguuuac

SEQ ID NO: 2288098 - RNA, 19 nt, Artificial Sequence
  Description of Artificial Sequence: Synthetic oligonucleotide
  Sense strand starting at position 282 of SEQ ID NO: 1884736
uguaaagauugguuuggga

SEQ ID NO: 2288099 - RNA, 19 nt, Artificial Sequence
  Description of Artificial Sequence: Synthetic oligonucleotide
  Antisense strand to SEQ ID NO: 2288098
ucccaaaccaaucuuuaca

SEQ ID NO: 2288100 - RNA, 19 nt, Artificial Sequence
  Description of Artificial Sequence: Synthetic oligonucleotide
  Sense strand starting at position 432 of SEQ ID NO: 1884736
gggauagcccuaggagaua

SEQ ID NO: 2288101 - RNA, 19 nt, Artificial Sequence
  Description of Artificial Sequence: Synthetic oligonucleotide
  Antisense strand to SEQ ID NO: 2288100
uaucuccuagggcuauccc

SEQ ID NO: 2288102 - RNA, 19 nt, Artificial Sequence
  Description of Artificial Sequence: Synthetic oligonucleotide
  Sense strand starting at position 526 of SEQ ID NO: 1884736
aguugugcacccuagaacu

SEQ ID NO: 2288103 - RNA, 19 nt, Artificial Sequence
  Description of Artificial Sequence: Synthetic oligonucleotide
  Antisense strand to SEQ ID NO: 2288102
aguucuagggugcacaacu

SEQ ID NO: 2288104 - RNA, 19 nt, Artificial Sequence
  Description of Artificial Sequence: Synthetic oligonucleotide
  Sense strand starting at position 528 of SEQ ID NO: 1884736
uugugcacccuagaacuua

SEQ ID NO: 2288105 - RNA, 19 nt, Artificial Sequence
  Description of Artificial Sequence: Synthetic oligonucleotide
  Antisense strand to SEQ ID NO: 2288104
uaaguucuagggugcacaa

SEQ ID NO: 2288106 - RNA, 19 nt, Artificial Sequence
  Description of Artificial Sequence: Synthetic oligonucleotide
  Sense strand starting at position 584 of SEQ ID NO: 1884736
uugguuugggagcacauau

SEQ ID NO: 2288107 - RNA, 19 nt, Artificial Sequence
  Description of Artificial Sequence: Synthetic oligonucleotide
  Antisense strand to SEQ ID NO: 2288106
auaugugcucccaaaccaa

SEQ ID NO: 2288108 - RNA, 19 nt, Artificial Sequence
  Description of Artificial Sequence: Synthetic oligonucleotide
  Sense strand starting at position 813 of SEQ ID NO: 1884736
cuuacuauagggugagaug

SEQ ID NO: 2288109 - RNA, 19 nt, Artificial Sequence
  Description of Artificial Sequence: Synthetic oligonucleotide
  Antisense strand to SEQ ID NO: 2288108
caucucacccuauaguaag

SEQ ID NO: 2288110 - RNA, 19 nt, Artificial Sequence
  Description of Artificial Sequence: Synthetic oligonucleotide
  Sense strand starting at position 866 of SEQ ID NO: 1884736
augucaguccuaggaaauu

SEQ ID NO: 2288111 - RNA, 19 nt, Artificial Sequence
  Description of Artificial Sequence: Synthetic oligonucleotide
  Antisense strand to SEQ ID NO: 2288110
aauuuccuaggacugacau

SEQ ID NO: 2288112 - RNA, 19 nt, Artificial Sequence
  Description of Artificial Sequence: Synthetic oligonucleotide
  Sense strand starting at position 904 of SEQ ID NO: 1884736
gcuauuaaggguuagguuu

SEQ ID NO: 2288113 - RNA, 19 nt, Artificial Sequence
  Description of Artificial Sequence: Synthetic oligonucleotide
  Antisense strand to SEQ ID NO: 2288112
aaaccuaacccuuaauagc

SEQ ID NO: 2288114 - RNA, 19 nt, Artificial Sequence
  Description of Artificial Sequence: Synthetic oligonucleotide
  Sense strand starting at position 1251 of SEQ ID NO: 1884736
ggcacagaaccauggcuua

SEQ ID NO: 2288115 - RNA, 19 nt, Artificial Sequence
  Description of Artificial Sequence: Synthetic oligonucleotide
  Antisense strand to SEQ ID NO: 2288114
uaagccaugguucugugcc

SEQ ID NO: 2288116 - RNA, 19 nt, Artificial Sequence
  Description of Artificial Sequence: Synthetic oligonucleotide
  Sense strand starting at position 1298 of SEQ ID NO: 1884736
agaguauuucagggcgggu

SEQ ID NO: 2288117 - RNA, 19 nt, Artificial Sequence
  Description of Artificial Sequence: Synthetic oligonucleotide
  Antisense strand to SEQ ID NO: 2288116
acccgcccugaaauacucu

SEQ ID NO: 2288118 - RNA, 19 nt, Artificial Sequence
  Description of Artificial Sequence: Synthetic oligonucleotide
  Sense strand starting at position 1602 of SEQ ID NO: 1884736
agaaguaaagggcgaguuu

SEQ ID NO: 2288119 - RNA, 19 nt, Artificial Sequence
  Description of Artificial Sequence: Synthetic oligonucleotide
  Antisense strand to SEQ ID NO: 2288118
aaacucgcccuuuacuucu

SEQ ID NO: 2288120 - RNA, 19 nt, Artificial Sequence
  Description of Artificial Sequence: Synthetic oligonucleotide
  Sense strand starting at position 1625 of SEQ ID NO: 1884736
ccuagauuccagugggaac

SEQ ID NO: 2288121 - RNA, 19 nt, Artificial Sequence
  Description of Artificial Sequence: Synthetic oligonucleotide
  Antisense strand to SEQ ID NO: 2288120
guucccacuggaaucuagg

SEQ ID NO: 2288122 - RNA, 19 nt, Artificial Sequence
  Description of Artificial Sequence: Synthetic oligonucleotide
  Sense strand starting at position 2079 of SEQ ID NO: 1884736
cgcaaaucuggcgcugauu

SEQ ID NO: 2288123 - RNA, 19 nt, Artificial Sequence
  Description of Artificial Sequence: Synthetic oligonucleotide
  Antisense strand to SEQ ID NO: 2288122
aaucagcgccagauuugcg

SEQ ID NO: 2288124 - RNA, 19 nt, Artificial Sequence
  Description of Artificial Sequence: Synthetic oligonucleotide
  Sense strand starting at position 2104 of SEQ ID NO: 1884736
cggcagagucgcucgugaa

SEQ ID NO: 2288125 - RNA, 19 nt, Artificial Sequence
  Description of Artificial Sequence: Synthetic oligonucleotide
  Antisense strand to SEQ ID NO: 2288124
uucacgagcgacucugccg

SEQ ID NO: 2288126 - RNA, 19 nt, Artificial Sequence
  Description of Artificial Sequence: Synthetic oligonucleotide
  Sense strand starting at position 2190 of SEQ ID NO: 1884736
aucggaucucuauggagau

SEQ ID NO: 2288127 - RNA, 19 nt, Artificial Sequence
  Description of Artificial Sequence: Synthetic oligonucleotide
  Antisense strand to SEQ ID NO: 2288126
aucuccauagagauccgau

SEQ ID NO: 2288128 - RNA, 19 nt, Artificial Sequence
  Description of Artificial Sequence: Synthetic oligonucleotide
  Sense strand starting at position 2203 of SEQ ID NO: 1884736
ggagauggccuaggcgaua

SEQ ID NO: 2288129 - RNA, 19 nt, Artificial Sequence
  Description of Artificial Sequence: Synthetic oligonucleotide
  Antisense strand to SEQ ID NO: 2288128
uaucgccuaggccaucucc

SEQ ID NO: 2288130 - RNA, 19 nt, Artificial Sequence
  Description of Artificial Sequence: Synthetic oligonucleotide
  Sense strand starting at position 2215 of SEQ ID NO: 1884736
ggcgauaucccugagcuga

SEQ ID NO: 2288131 - RNA, 19 nt, Artificial Sequence
  Description of Artificial Sequence: Synthetic oligonucleotide
  Antisense strand to SEQ ID NO: 2288130
ucagcucagggauaucgcc

SEQ ID NO: 2288132 - RNA, 19 nt, Artificial Sequence
  Description of Artificial Sequence: Synthetic oligonucleotide
  Sense strand starting at position 2217 of SEQ ID NO: 1884736
cgauaucccugagcugaga

SEQ ID NO: 2288133 - RNA, 19 nt, Artificial Sequence
  Description of Artificial Sequence: Synthetic oligonucleotide
  Antisense strand to SEQ ID NO: 2288132
ucucagcucagggauaucg

SEQ ID NO: 2288134 - RNA, 19 nt, Artificial Sequence
  Description of Artificial Sequence: Synthetic oligonucleotide
  Sense strand starting at position 2502 of SEQ ID NO: 1884736
cgcugauggagaugaaaua

SEQ ID NO: 2288135 - RNA, 19 nt, Artificial Sequence
  Description of Artificial Sequence: Synthetic oligonucleotide
  Antisense strand to SEQ ID NO: 2288134
uauuucaucuccaucagcg

SEQ ID NO: 2288136 - RNA, 19 nt, Artificial Sequence
  Description of Artificial Sequence: Synthetic oligonucleotide
  Sense strand starting at position 2515 of SEQ ID NO: 1884736
gaaauagagagaugguguu

SEQ ID NO: 2288137 - RNA, 19 nt, Artificial Sequence
  Description of Artificial Sequence: Synthetic oligonucleotide
  Antisense strand to SEQ ID NO: 2288136
aacaccaucucucuauuuc

SEQ ID NO: 2288138 - RNA, 19 nt, Artificial Sequence
  Description of Artificial Sequence: Synthetic oligonucleotide
  Sense strand starting at position 2858 of SEQ ID NO: 1884736
ugauacuugucaguuuaac

SEQ ID NO: 2288139 - RNA, 19 nt, Artificial Sequence
  Description of Artificial Sequence: Synthetic oligonucleotide
  Antisense strand to SEQ ID NO: 2288138
guuaaacugacaaguauca

SEQ ID NO: 2288140 - RNA, 19 nt, Artificial Sequence
  Description of Artificial Sequence: Synthetic oligonucleotide
  Sense strand starting at position 2866 of SEQ ID NO: 1884736
gucaguuuaaccggaagga

SEQ ID NO: 2288141 - RNA, 19 nt, Artificial Sequence
  Description of Artificial Sequence: Synthetic oligonucleotide
  Antisense strand to SEQ ID NO: 2288140
uccuuccgguuaaacugac

SEQ ID NO: 2288142 - RNA, 19 nt, Artificial Sequence
  Description of Artificial Sequence: Synthetic oligonucleotide
  Sense strand starting at position 2953 of SEQ ID NO: 1884736
gauucuuuguccucgagaa

SEQ ID NO: 2288143 - RNA, 19 nt, Artificial Sequence
  Description of Artificial Sequence: Synthetic oligonucleotide
  Antisense strand to SEQ ID NO: 2288142
uucucgaggacaaagaauc

SEQ ID NO: 2288144 - RNA, 19 nt, Artificial Sequence
  Description of Artificial Sequence: Synthetic oligonucleotide
  Sense strand starting at position 2954 of SEQ ID NO: 1884736
auucuuuguccucgagaaa

SEQ ID NO: 2288145 - RNA, 19 nt, Artificial Sequence
  Description of Artificial Sequence: Synthetic oligonucleotide
  Antisense strand to SEQ ID NO: 2288144
uuucucgaggacaaagaau

SEQ ID NO: 2288146 - RNA, 19 nt, Artificial Sequence
  Description of Artificial Sequence: Synthetic oligonucleotide
  Sense strand starting at position 2955 of SEQ ID NO: 1884736
uucuuuguccucgagaaau

SEQ ID NO: 2288147 - RNA, 19 nt, Artificial Sequence
  Description of Artificial Sequence: Synthetic oligonucleotide
  Antisense strand to SEQ ID NO: 2288146
auuucucgaggacaaagaa

SEQ ID NO: 2288148 - RNA, 19 nt, Artificial Sequence
  Description of Artificial Sequence: Synthetic oligonucleotide
  Sense strand starting at position 2957 of SEQ ID NO: 1884736
cuuuguccucgagaaauuc

SEQ ID NO: 2288149 - RNA, 19 nt, Artificial Sequence
  Description of Artificial Sequence: Synthetic oligonucleotide
  Antisense strand to SEQ ID NO: 2288148
gaauuucucgaggacaaag

SEQ ID NO: 2288150 - RNA, 19 nt, Artificial Sequence
  Description of Artificial Sequence: Synthetic oligonucleotide
  Sense strand starting at position 3003 of SEQ ID NO: 1884736
ugaggaccuucuuucugaa

SEQ ID NO: 2288151 - RNA, 19 nt, Artificial Sequence
  Description of Artificial Sequence: Synthetic oligonucleotide
  Antisense strand to SEQ ID NO: 2288150
uucagaaagaagguccuca

SEQ ID NO: 2288152 - RNA, 19 nt, Artificial Sequence
  Description of Artificial Sequence: Synthetic oligonucleotide
  Sense strand starting at position 3172 of SEQ ID NO: 1884736
gggcuuuaugcuguugcua

SEQ ID NO: 2288153 - RNA, 19 nt, Artificial Sequence
  Description of Artificial Sequence: Synthetic oligonucleotide
  Antisense strand to SEQ ID NO: 2288152
uagcaacagcauaaagccc

SEQ ID NO: 2288154 - RNA, 19 nt, Artificial Sequence
  Description of Artificial Sequence: Synthetic oligonucleotide
  Sense strand starting at position 3191 of SEQ ID NO: 1884736
guaugagacccucgacuuu

SEQ ID NO: 2288155 - RNA, 19 nt, Artificial Sequence
  Description of Artificial Sequence: Synthetic oligonucleotide
  Antisense strand to SEQ ID NO: 2288154
aaagucgagggucucauac

SEQ ID NO: 2288156 - RNA, 19 nt, Artificial Sequence
  Description of Artificial Sequence: Synthetic oligonucleotide
  Sense strand starting at position 3331 of SEQ ID NO: 1884736
gggcuaugcagucaaacuu

SEQ ID NO: 2288157 - RNA, 19 nt, Artificial Sequence
  Description of Artificial Sequence: Synthetic oligonucleotide
  Antisense strand to SEQ ID NO: 2288156
aaguuugacugcauagccc

SEQ ID NO: 2288158 - RNA, 19 nt, Artificial Sequence
  Description of Artificial Sequence: Synthetic oligonucleotide
  Sense strand starting at position 3411 of SEQ ID NO: 1884736
ucuguuuaucucuaaagug

SEQ ID NO: 2288159 - RNA, 19 nt, Artificial Sequence
  Description of Artificial Sequence: Synthetic oligonucleotide
  Antisense strand to SEQ ID NO: 2288158
cacuuuagagauaaacaga

SEQ ID NO: 2288160 - RNA, 19 nt, Artificial Sequence
  Description of Artificial Sequence: Synthetic oligonucleotide
  Sense strand starting at position 3487 of SEQ ID NO: 1884736
caguaauuggcauacagua

SEQ ID NO: 2288161 - RNA, 19 nt, Artificial Sequence
  Description of Artificial Sequence: Synthetic oligonucleotide
  Antisense strand to SEQ ID NO: 2288160
uacuguaugccaauuacug

SEQ ID NO: 2288162 - RNA, 19 nt, Artificial Sequence
  Description of Artificial Sequence: Synthetic oligonucleotide
  Sense strand starting at position 3517 of SEQ ID NO: 1884736
gucauuagacauuguuuac

SEQ ID NO: 2288163 - RNA, 19 nt, Artificial Sequence
  Description of Artificial Sequence: Synthetic oligonucleotide
  Antisense strand to SEQ ID NO: 2288162
guaaacaaugucuaaugac

SEQ ID NO: 2288164 - RNA, 19 nt, Artificial Sequence
  Description of Artificial Sequence: Synthetic oligonucleotide
  Sense strand starting at position 3521 of SEQ ID NO: 1884736
uuagacauuguuuaccuga

SEQ ID NO: 2288165 - RNA, 19 nt, Artificial Sequence
  Description of Artificial Sequence: Synthetic oligonucleotide
  Antisense strand to SEQ ID NO: 2288164
ucagguaaacaaugucuaa

SEQ ID NO: 2288166 - RNA, 19 nt, Artificial Sequence
  Description of Artificial Sequence: Synthetic oligonucleotide
  Sense strand starting at position 3524 of SEQ ID NO: 1884736
gacauuguuuaccugagga

SEQ ID NO: 2288167 - RNA, 19 nt, Artificial Sequence
  Description of Artificial Sequence: Synthetic oligonucleotide
  Antisense strand to SEQ ID NO: 2288166
uccucagguaaacaauguc

SEQ ID NO: 2288168 - RNA, 19 nt, Artificial Sequence
  Description of Artificial Sequence: Synthetic oligonucleotide
  Sense strand starting at position 3645 of SEQ ID NO: 1884736
cauugaugagguuguacuu

SEQ ID NO: 2288169 - RNA, 19 nt, Artificial Sequence
  Description of Artificial Sequence: Synthetic oligonucleotide
  Antisense strand to SEQ ID NO: 2288168
aaguacaaccucaucaaug

SEQ ID NO: 2288170 - RNA, 19 nt, Artificial Sequence
  Description of Artificial Sequence: Synthetic oligonucleotide
  Sense strand starting at position 3760 of SEQ ID NO: 1884736
gcaucuaaauugccaagau

SEQ ID NO: 2288171 - RNA, 19 nt, Artificial Sequence
  Description of Artificial Sequence: Synthetic oligonucleotide
  Antisense strand to SEQ ID NO: 2288170
aucuuggcaauuuagaugc

SEQ ID NO: 2288172 - RNA, 19 nt, Artificial Sequence
  Description of Artificial Sequence: Synthetic oligonucleotide
  Sense strand starting at position 3834 of SEQ ID NO: 1884736
guccaagaucugcauugca

SEQ ID NO: 2288173 - RNA, 19 nt, Artificial Sequence
  Description of Artificial Sequence: Synthetic oligonucleotide
  Antisense strand to SEQ ID NO: 2288172
ugcaaugcagaucuuggac

SEQ ID NO: 2288174 - RNA, 19 nt, Artificial Sequence
  Description of Artificial Sequence: Synthetic oligonucleotide
  Sense strand starting at position 3842 of SEQ ID NO: 1884736
ucugcauugcaguaaagaa

SEQ ID NO: 2288175 - RNA, 19 nt, Artificial Sequence
  Description of Artificial Sequence: Synthetic oligonucleotide
  Antisense strand to SEQ ID NO: 2288174
uucuuuacugcaaugcaga

SEQ ID NO: 2288176 - RNA, 19 nt, Artificial Sequence
  Description of Artificial Sequence: Synthetic oligonucleotide
  Sense strand starting at position 50 of SEQ ID NO: 1884737
acucacguugcagagauua

SEQ ID NO: 2288177 - RNA, 19 nt, Artificial Sequence
  Description of Artificial Sequence: Synthetic oligonucleotide
  Antisense strand to SEQ ID NO: 2288176
uaaucucugcaacgugagu

SEQ ID NO: 2288178 - RNA, 19 nt, Artificial Sequence
  Description of Artificial Sequence: Synthetic oligonucleotide
  Sense strand starting at position 52 of SEQ ID NO: 1884737
ucacguugcagagauuauc

SEQ ID NO: 2288179 - RNA, 19 nt, Artificial Sequence
  Description of Artificial Sequence: Synthetic oligonucleotide
  Antisense strand to SEQ ID NO: 2288178
gauaaucucugcaacguga

SEQ ID NO: 2288180 - RNA, 19 nt, Artificial Sequence
  Description of Artificial Sequence: Synthetic oligonucleotide
  Sense strand starting at position 58 of SEQ ID NO: 1884737
ugcagagauuauccucuau

SEQ ID NO: 2288181 - RNA, 19 nt, Artificial Sequence
  Description of Artificial Sequence: Synthetic oligonucleotide
  Antisense strand to SEQ ID NO: 2288180
auagaggauaaucucugca

SEQ ID NO: 2288182 - RNA, 19 nt, Artificial Sequence
  Description of Artificial Sequence: Synthetic oligonucleotide
  Sense strand starting at position 249 of SEQ ID NO: 1884737
cugaaucuguaaguacaga

SEQ ID NO: 2288183 - RNA, 19 nt, Artificial Sequence
  Description of Artificial Sequence: Synthetic oligonucleotide
  Antisense strand to SEQ ID NO: 2288182
ucuguacuuacagauucag

SEQ ID NO: 2288184 - RNA, 19 nt, Artificial Sequence
  Description of Artificial Sequence: Synthetic oligonucleotide
  Sense strand starting at position 316 of SEQ ID NO: 1884737
auguuaacuuagcugacau

SEQ ID NO: 2288185 - RNA, 19 nt, Artificial Sequence
  Description of Artificial Sequence: Synthetic oligonucleotide
  Antisense strand to SEQ ID NO: 2288184
augucagcuaaguuaacau

SEQ ID NO: 2288186 - RNA, 19 nt, Artificial Sequence
  Description of Artificial Sequence: Synthetic oligonucleotide
  Sense strand starting at position 480 of SEQ ID NO: 1884737
uuaggucugguguaaguca

SEQ ID NO: 2288187 - RNA, 19 nt, Artificial Sequence
  Description of Artificial Sequence: Synthetic oligonucleotide
  Antisense strand to SEQ ID NO: 2288186
ugacuuacaccagaccuaa

SEQ ID NO: 2288188 - RNA, 19 nt, Artificial Sequence
  Description of Artificial Sequence: Synthetic oligonucleotide
  Sense strand starting at position 628 of SEQ ID NO: 1884737
ugaauugaauagucaaugu

SEQ ID NO: 2288189 - RNA, 19 nt, Artificial Sequence
  Description of Artificial Sequence: Synthetic oligonucleotide
  Antisense strand to SEQ ID NO: 2288188
acauugacuauucaauuca

SEQ ID NO: 2288190 - RNA, 19 nt, Artificial Sequence
  Description of Artificial Sequence: Synthetic oligonucleotide
  Sense strand starting at position 632 of SEQ ID NO: 1884737
uugaauagucaaugugauu

SEQ ID NO: 2288191 - RNA, 19 nt, Artificial Sequence
  Description of Artificial Sequence: Synthetic oligonucleotide
  Antisense strand to SEQ ID NO: 2288190
aaucacauugacuauucaa

SEQ ID NO: 2288192 - RNA, 19 nt, Artificial Sequence
  Description of Artificial Sequence: Synthetic oligonucleotide
  Sense strand starting at position 753 of SEQ ID NO: 1884737
cucuauuacgucuagguaa

SEQ ID NO: 2288193 - RNA, 19 nt, Artificial Sequence
  Description of Artificial Sequence: Synthetic oligonucleotide
  Antisense strand to SEQ ID NO: 2288192
uuaccuagacguaauagag

SEQ ID NO: 2288194 - RNA, 19 nt, Artificial Sequence
  Description of Artificial Sequence: Synthetic oligonucleotide
  Sense strand starting at position 755 of SEQ ID NO: 1884737
cuauuacgucuagguaaua

SEQ ID NO: 2288195 - RNA, 19 nt, Artificial Sequence
  Description of Artificial Sequence: Synthetic oligonucleotide
  Antisense strand to SEQ ID NO: 2288194
uauuaccuagacguaauag

SEQ ID NO: 2288196 - RNA, 19 nt, Artificial Sequence
  Description of Artificial Sequence: Synthetic oligonucleotide
  Sense strand starting at position 756 of SEQ ID NO: 1884737
uauuacgucuagguaauaa

SEQ ID NO: 2288197 - RNA, 19 nt, Artificial Sequence
  Description of Artificial Sequence: Synthetic oligonucleotide
  Antisense strand to SEQ ID NO: 2288196
uuauuaccuagacguaaua

SEQ ID NO: 2288198 - RNA, 19 nt, Artificial Sequence
  Description of Artificial Sequence: Synthetic oligonucleotide
  Sense strand starting at position 806 of SEQ ID NO: 1884737
ggaugaaguuccuacauuu

SEQ ID NO: 2288199 - RNA, 19 nt, Artificial Sequence
  Description of Artificial Sequence: Synthetic oligonucleotide
  Antisense strand to SEQ ID NO: 2288198
aaauguaggaacuucaucc

SEQ ID NO: 2288200 - RNA, 19 nt, Artificial Sequence
  Description of Artificial Sequence: Synthetic oligonucleotide
  Sense strand starting at position 1119 of SEQ ID NO: 1884737
gggcaugugauguaauacu

SEQ ID NO: 2288201 - RNA, 19 nt, Artificial Sequence
  Description of Artificial Sequence: Synthetic oligonucleotide
  Antisense strand to SEQ ID NO: 2288200
aguauuacaucacaugccc

SEQ ID NO: 2288202 - RNA, 19 nt, Artificial Sequence
  Description of Artificial Sequence: Synthetic oligonucleotide
  Sense strand starting at position 1399 of SEQ ID NO: 1884737
caggaugucacguggagua

SEQ ID NO: 2288203 - RNA, 19 nt, Artificial Sequence
  Description of Artificial Sequence: Synthetic oligonucleotide
  Antisense strand to SEQ ID NO: 2288202
uacuccacgugacauccug

SEQ ID NO: 2288204 - RNA, 19 nt, Artificial Sequence
  Description of Artificial Sequence: Synthetic oligonucleotide
  Sense strand starting at position 2230 of SEQ ID NO: 1884737
cggcugugucucgcgacaa

SEQ ID NO: 2288205 - RNA, 19 nt, Artificial Sequence
  Description of Artificial Sequence: Synthetic oligonucleotide
  Antisense strand to SEQ ID NO: 2288204
uugucgcgagacacagccg

SEQ ID NO: 2288206 - RNA, 19 nt, Artificial Sequence
  Description of Artificial Sequence: Synthetic oligonucleotide
  Sense strand starting at position 2566 of SEQ ID NO: 1884737
ucgcuucuccuuuaagaaa

SEQ ID NO: 2288207 - RNA, 19 nt, Artificial Sequence
  Description of Artificial Sequence: Synthetic oligonucleotide
  Antisense strand to SEQ ID NO: 2288206
uuucuuaaaggagaagcga

SEQ ID NO: 2288208 - RNA, 19 nt, Artificial Sequence
  Description of Artificial Sequence: Synthetic oligonucleotide
  Sense strand starting at position 2726 of SEQ ID NO: 1884737
ucuuauuucgccuaggcuu

SEQ ID NO: 2288209 - RNA, 19 nt, Artificial Sequence
  Description of Artificial Sequence: Synthetic oligonucleotide
  Antisense strand to SEQ ID NO: 2288208
aagccuaggcgaaauaaga

SEQ ID NO: 2288210 - RNA, 19 nt, Artificial Sequence
  Description of Artificial Sequence: Synthetic oligonucleotide
  Sense strand starting at position 2733 of SEQ ID NO: 1884737
ucgccuaggcuuuaggaaa

SEQ ID NO: 2288211 - RNA, 19 nt, Artificial Sequence
  Description of Artificial Sequence: Synthetic oligonucleotide
  Antisense strand to SEQ ID NO: 2288210
uuuccuaaagccuaggcga

SEQ ID NO: 2288212 - RNA, 19 nt, Artificial Sequence
  Description of Artificial Sequence: Synthetic oligonucleotide
  Sense strand starting at position 2786 of SEQ ID NO: 1884737
ggagguucuaacugaguca

SEQ ID NO: 2288213 - RNA, 19 nt, Artificial Sequence
  Description of Artificial Sequence: Synthetic oligonucleotide
  Antisense strand to SEQ ID NO: 2288212
ugacucaguuagaaccucc

SEQ ID NO: 2288214 - RNA, 19 nt, Artificial Sequence
  Description of Artificial Sequence: Synthetic oligonucleotide
  Sense strand starting at position 2789 of SEQ ID NO: 1884737
gguucuaacugagucacga

SEQ ID NO: 2288215 - RNA, 19 nt, Artificial Sequence
  Description of Artificial Sequence: Synthetic oligonucleotide
  Antisense strand to SEQ ID NO: 2288214
ucgugacucaguuagaacc

SEQ ID NO: 2288216 - RNA, 19 nt, Artificial Sequence
  Description of Artificial Sequence: Synthetic oligonucleotide
  Sense strand starting at position 2808 of SEQ ID NO: 1884737
cgggaaagguaguuuacuu

SEQ ID NO: 2288217 - RNA, 19 nt, Artificial Sequence
  Description of Artificial Sequence: Synthetic oligonucleotide
  Antisense strand to SEQ ID NO: 2288216
aaguaaacuaccuuucccg

SEQ ID NO: 2288218 - RNA, 19 nt, Artificial Sequence
  Description of Artificial Sequence: Synthetic oligonucleotide
  Sense strand starting at position 3067 of SEQ ID NO: 1884737
ucaugucuacauuauugau

SEQ ID NO: 2288219 - RNA, 19 nt, Artificial Sequence
  Description of Artificial Sequence: Synthetic oligonucleotide
  Antisense strand to SEQ ID NO: 2288218
aucaauaauguagacauga

SEQ ID NO: 2288220 - RNA, 19 nt, Artificial Sequence
  Description of Artificial Sequence: Synthetic oligonucleotide
  Sense strand starting at position 3101 of SEQ ID NO: 1884737
gugagucacucaccuguga

SEQ ID NO: 2288221 - RNA, 19 nt, Artificial Sequence
  Description of Artificial Sequence: Synthetic oligonucleotide
  Antisense strand to SEQ ID NO: 2288220
ucacaggugagugacucac

SEQ ID NO: 2288222 - RNA, 19 nt, Artificial Sequence
  Description of Artificial Sequence: Synthetic oligonucleotide
  Sense strand starting at position 3123 of SEQ ID NO: 1884737
ccuagaggucagcgacuaa

SEQ ID NO: 2288223 - RNA, 19 nt, Artificial Sequence
  Description of Artificial Sequence: Synthetic oligonucleotide
  Antisense strand to SEQ ID NO: 2288222
uuagucgcugaccucuagg

SEQ ID NO: 2288224 - RNA, 19 nt, Artificial Sequence
  Description of Artificial Sequence: Synthetic oligonucleotide
  Sense strand starting at position 3127 of SEQ ID NO: 1884737
gaggucagcgacuaaaucu

SEQ ID NO: 2288225 - RNA, 19 nt, Artificial Sequence
  Description of Artificial Sequence: Synthetic oligonucleotide
  Antisense strand to SEQ ID NO: 2288224
agauuuagucgcugaccuc

SEQ ID NO: 2288226 - RNA, 19 nt, Artificial Sequence
  Description of Artificial Sequence: Synthetic oligonucleotide
  Sense strand starting at position 3136 of SEQ ID NO: 1884737
gacuaaaucugguuccaug

SEQ ID NO: 2288227 - RNA, 19 nt, Artificial Sequence
  Description of Artificial Sequence: Synthetic oligonucleotide
  Antisense strand to SEQ ID NO: 2288226
cauggaaccagauuuaguc

SEQ ID NO: 2288228 - RNA, 19 nt, Artificial Sequence
  Description of Artificial Sequence: Synthetic oligonucleotide
  Sense strand starting at position 3192 of SEQ ID NO: 1884737
cuacucaguuggcucuuaa

SEQ ID NO: 2288229 - RNA, 19 nt, Artificial Sequence
  Description of Artificial Sequence: Synthetic oligonucleotide
  Antisense strand to SEQ ID NO: 2288228
uuaagagccaacugaguag

SEQ ID NO: 2288230 - RNA, 19 nt, Artificial Sequence
  Description of Artificial Sequence: Synthetic oligonucleotide
  Sense strand starting at position 3199 of SEQ ID NO: 1884737
guuggcucuuaaucaaauc

SEQ ID NO: 2288231 - RNA, 19 nt, Artificial Sequence
  Description of Artificial Sequence: Synthetic oligonucleotide
  Antisense strand to SEQ ID NO: 2288230
gauuugauuaagagccaac

SEQ ID NO: 2288232 - RNA, 19 nt, Artificial Sequence
  Description of Artificial Sequence: Synthetic oligonucleotide
  Sense strand starting at position 3328 of SEQ ID NO: 1884737
gguugugagcgugacauga

SEQ ID NO: 2288233 - RNA, 19 nt, Artificial Sequence
  Description of Artificial Sequence: Synthetic oligonucleotide
  Antisense strand to SEQ ID NO: 2288232
ucaugucacgcucacaacc

SEQ ID NO: 2288234 - RNA, 19 nt, Artificial Sequence
  Description of Artificial Sequence: Synthetic oligonucleotide
  Sense strand starting at position 3403 of SEQ ID NO: 1884737
ucugcuucugcgguuuaua

SEQ ID NO: 2288235 - RNA, 19 nt, Artificial Sequence
  Description of Artificial Sequence: Synthetic oligonucleotide
  Antisense strand to SEQ ID NO: 2288234
uauaaaccgcagaagcaga

SEQ ID NO: 2288236 - RNA, 19 nt, Artificial Sequence
  Description of Artificial Sequence: Synthetic oligonucleotide
  Sense strand starting at position 3405 of SEQ ID NO: 1884737
ugcuucugcgguuuauaca

SEQ ID NO: 2288237 - RNA, 19 nt, Artificial Sequence
  Description of Artificial Sequence: Synthetic oligonucleotide
  Antisense strand to SEQ ID NO: 2288236
uguauaaaccgcagaagca

SEQ ID NO: 2288238 - RNA, 19 nt, Artificial Sequence
  Description of Artificial Sequence: Synthetic oligonucleotide
  Sense strand starting at position 3497 of SEQ ID NO: 1884737
gggaauuuccguugcaguu

SEQ ID NO: 2288239 - RNA, 19 nt, Artificial Sequence
  Description of Artificial Sequence: Synthetic oligonucleotide
  Antisense strand to SEQ ID NO: 2288238
aacugcaacggaaauuccc

SEQ ID NO: 2288240 - RNA, 19 nt, Artificial Sequence
  Description of Artificial Sequence: Synthetic oligonucleotide
  Sense strand starting at position 3693 of SEQ ID NO: 1884737
aguuaaacuguagacaagu

SEQ ID NO: 2288241 - RNA, 19 nt, Artificial Sequence
  Description of Artificial Sequence: Synthetic oligonucleotide
  Antisense strand to SEQ ID NO: 2288240
acuugucuacaguuuaacu

SEQ ID NO: 2288242 - RNA, 19 nt, Artificial Sequence
  Description of Artificial Sequence: Synthetic oligonucleotide
  Sense strand starting at position 3732 of SEQ ID NO: 1884737
ccaguacuuugacucagau

SEQ ID NO: 2288243 - RNA, 19 nt, Artificial Sequence
  Description of Artificial Sequence: Synthetic oligonucleotide
  Antisense strand to SEQ ID NO: 2288242
aucugagucaaaguacugg

SEQ ID NO: 2288244 - RNA, 19 nt, Artificial Sequence
  Description of Artificial Sequence: Synthetic oligonucleotide
  Sense strand starting at position 3830 of SEQ ID NO: 1884737
guaauaaucgauuggcaua

SEQ ID NO: 2288245 - RNA, 19 nt, Artificial Sequence
  Description of Artificial Sequence: Synthetic oligonucleotide
  Antisense strand to SEQ ID NO: 2288244
uaugccaaucgauuauuac

SEQ ID NO: 2288246 - RNA, 19 nt, Artificial Sequence
  Description of Artificial Sequence: Synthetic oligonucleotide
  Sense strand starting at position 3867 of SEQ ID NO: 1884737
uaagauugaguuuguagug

SEQ ID NO: 2288247 - RNA, 19 nt, Artificial Sequence
  Description of Artificial Sequence: Synthetic oligonucleotide
  Antisense strand to SEQ ID NO: 2288246
cacuacaaacucaaucuua

SEQ ID NO: 2288248 - RNA, 19 nt, Artificial Sequence
  Description of Artificial Sequence: Synthetic oligonucleotide
  Sense strand starting at position 3868 of SEQ ID NO: 1884737
aagauugaguuuguaguga

SEQ ID NO: 2288249 - RNA, 19 nt, Artificial Sequence
  Description of Artificial Sequence: Synthetic oligonucleotide
  Antisense strand to SEQ ID NO: 2288248
ucacuacaaacucaaucuu

SEQ ID NO: 2288250 - RNA, 19 nt, Artificial Sequence
  Description of Artificial Sequence: Synthetic oligonucleotide
  Sense strand starting at position 3873 of SEQ ID NO: 1884737
ugaguuuguagugagcaga

SEQ ID NO: 2288251 - RNA, 19 nt, Artificial Sequence
  Description of Artificial Sequence: Synthetic oligonucleotide
  Antisense strand to SEQ ID NO: 2288250
ucugcucacuacaaacuca

SEQ ID NO: 2288252 - RNA, 19 nt, Artificial Sequence
  Description of Artificial Sequence: Synthetic oligonucleotide
  Sense strand starting at position 3876 of SEQ ID NO: 1884737
guuuguagugagcagacuu

SEQ ID NO: 2288253 - RNA, 19 nt, Artificial Sequence
  Description of Artificial Sequence: Synthetic oligonucleotide
  Antisense strand to SEQ ID NO: 2288252
aagucugcucacuacaaac

SEQ ID NO: 2288254 - RNA, 19 nt, Artificial Sequence
  Description of Artificial Sequence: Synthetic oligonucleotide
  Sense strand starting at position 3916 of SEQ ID NO: 1884737
uccaauggaugcucaaagu

SEQ ID NO: 2288255 - RNA, 19 nt, Artificial Sequence
  Description of Artificial Sequence: Synthetic oligonucleotide
  Antisense strand to SEQ ID NO: 2288254
acuuugagcauccauugga

SEQ ID NO: 2288256 - RNA, 19 nt, Artificial Sequence
  Description of Artificial Sequence: Synthetic oligonucleotide
  Sense strand starting at position 70 of SEQ ID NO: 1884738
gcuauucuauuccuuggga

SEQ ID NO: 2288257 - RNA, 19 nt, Artificial Sequence
  Description of Artificial Sequence: Synthetic oligonucleotide
  Antisense strand to SEQ ID NO: 2288256
ucccaaggaauagaauagc

SEQ ID NO: 2288258 - RNA, 19 nt, Artificial Sequence
  Description of Artificial Sequence: Synthetic oligonucleotide
  Sense strand starting at position 73 of SEQ ID NO: 1884738
auucuauuccuugggagau

SEQ ID NO: 2288259 - RNA, 19 nt, Artificial Sequence
  Description of Artificial Sequence: Synthetic oligonucleotide
  Antisense strand to SEQ ID NO: 2288258
aucucccaaggaauagaau

SEQ ID NO: 2288260 - RNA, 19 nt, Artificial Sequence
  Description of Artificial Sequence: Synthetic oligonucleotide
  Sense strand starting at position 332 of SEQ ID NO: 1884738
augugucuccagggauuga

SEQ ID NO: 2288261 - RNA, 19 nt, Artificial Sequence
  Description of Artificial Sequence: Synthetic oligonucleotide
  Antisense strand to SEQ ID NO: 2288260
ucaaucccuggagacacau

SEQ ID NO: 2288262 - RNA, 19 nt, Artificial Sequence
  Description of Artificial Sequence: Synthetic oligonucleotide
  Sense strand starting at position 333 of SEQ ID NO: 1884738
ugugucuccagggauugaa

SEQ ID NO: 2288263 - RNA, 19 nt, Artificial Sequence
  Description of Artificial Sequence: Synthetic oligonucleotide
  Antisense strand to SEQ ID NO: 2288262
uucaaucccuggagacaca

SEQ ID NO: 2288264 - RNA, 19 nt, Artificial Sequence
  Description of Artificial Sequence: Synthetic oligonucleotide
  Sense strand starting at position 349 of SEQ ID NO: 1884738
gaaaguuggguugggugaa

SEQ ID NO: 2288265 - RNA, 19 nt, Artificial Sequence
  Description of Artificial Sequence: Synthetic oligonucleotide
  Antisense strand to SEQ ID NO: 2288264
uucacccaacccaacuuuc

SEQ ID NO: 2288266 - RNA, 19 nt, Artificial Sequence
  Description of Artificial Sequence: Synthetic oligonucleotide
  Sense strand starting at position 387 of SEQ ID NO: 1884738
gugguuaccucuuuagagg

SEQ ID NO: 2288267 - RNA, 19 nt, Artificial Sequence
  Description of Artificial Sequence: Synthetic oligonucleotide
  Antisense strand to SEQ ID NO: 2288266
ccucuaaagagguaaccac

SEQ ID NO: 2288268 - RNA, 19 nt, Artificial Sequence
  Description of Artificial Sequence: Synthetic oligonucleotide
  Sense strand starting at position 478 of SEQ ID NO: 1884738
caggcuguccucugagaaa

SEQ ID NO: 2288269 - RNA, 19 nt, Artificial Sequence
  Description of Artificial Sequence: Synthetic oligonucleotide
  Antisense strand to SEQ ID NO: 2288268
uuucucagaggacagccug

SEQ ID NO: 2288270 - RNA, 19 nt, Artificial Sequence
  Description of Artificial Sequence: Synthetic oligonucleotide
  Sense strand starting at position 554 of SEQ ID NO: 1884738
cuguguuaucccuggacaa

SEQ ID NO: 2288271 - RNA, 19 nt, Artificial Sequence
  Description of Artificial Sequence: Synthetic oligonucleotide
  Antisense strand to SEQ ID NO: 2288270
uuguccagggauaacacag

SEQ ID NO: 2288272 - RNA, 19 nt, Artificial Sequence
  Description of Artificial Sequence: Synthetic oligonucleotide
  Sense strand starting at position 556 of SEQ ID NO: 1884738
guguuaucccuggacaaua

SEQ ID NO: 2288273 - RNA, 19 nt, Artificial Sequence
  Description of Artificial Sequence: Synthetic oligonucleotide
  Antisense strand to SEQ ID NO: 2288272
uauuguccagggauaacac

SEQ ID NO: 2288274 - RNA, 19 nt, Artificial Sequence
  Description of Artificial Sequence: Synthetic oligonucleotide
  Sense strand starting at position 610 of SEQ ID NO: 1884738
agcaaaucacccugucaag

SEQ ID NO: 2288275 - RNA, 19 nt, Artificial Sequence
  Description of Artificial Sequence: Synthetic oligonucleotide
  Antisense strand to SEQ ID NO: 2288274
cuugacagggugauuugcu

SEQ ID NO: 2288276 - RNA, 19 nt, Artificial Sequence
  Description of Artificial Sequence: Synthetic oligonucleotide
  Sense strand starting at position 749 of SEQ ID NO: 1884738
uccugucacguggaaugau

SEQ ID NO: 2288277 - RNA, 19 nt, Artificial Sequence
  Description of Artificial Sequence: Synthetic oligonucleotide
  Antisense strand to SEQ ID NO: 2288276
aucauuccacgugacagga

SEQ ID NO: 2288278 - RNA, 19 nt, Artificial Sequence
  Description of Artificial Sequence: Synthetic oligonucleotide
  Sense strand starting at position 1172 of SEQ ID NO: 1884738
cucagaugcguuucuugca

SEQ ID NO: 2288279 - RNA, 19 nt, Artificial Sequence
  Description of Artificial Sequence: Synthetic oligonucleotide
  Antisense strand to SEQ ID NO: 2288278
ugcaagaaacgcaucugag

SEQ ID NO: 2288280 - RNA, 19 nt, Artificial Sequence
  Description of Artificial Sequence: Synthetic oligonucleotide
  Sense strand starting at position 1303 of SEQ ID NO: 1884738
cguaacuguaccgaacuaa

SEQ ID NO: 2288281 - RNA, 19 nt, Artificial Sequence
  Description of Artificial Sequence: Synthetic oligonucleotide
  Antisense strand to SEQ ID NO: 2288280
uuaguucgguacaguuacg

SEQ ID NO: 2288282 - RNA, 19 nt, Artificial Sequence
  Description of Artificial Sequence: Synthetic oligonucleotide
  Sense strand starting at position 1314 of SEQ ID NO: 1884738
cgaacuaaugaaugaaugu

SEQ ID NO: 2288283 - RNA, 19 nt, Artificial Sequence
  Description of Artificial Sequence: Synthetic oligonucleotide
  Antisense strand to SEQ ID NO: 2288282
acauucauucauuaguucg

SEQ ID NO: 2288284 - RNA, 19 nt, Artificial Sequence
  Description of Artificial Sequence: Synthetic oligonucleotide
  Sense strand starting at position 1471 of SEQ ID NO: 1884738
caaggacucccucgagaga

SEQ ID NO: 2288285 - RNA, 19 nt, Artificial Sequence
  Description of Artificial Sequence: Synthetic oligonucleotide
  Antisense strand to SEQ ID NO: 2288284
ucucucgagggaguccuug

SEQ ID NO: 2288286 - RNA, 19 nt, Artificial Sequence
  Description of Artificial Sequence: Synthetic oligonucleotide
  Sense strand starting at position 1926 of SEQ ID NO: 1884738
gagcucugucgggacaaag

SEQ ID NO: 2288287 - RNA, 19 nt, Artificial Sequence
  Description of Artificial Sequence: Synthetic oligonucleotide
  Antisense strand to SEQ ID NO: 2288286
cuuugucccgacagagcuc

SEQ ID NO: 2288288 - RNA, 19 nt, Artificial Sequence
  Description of Artificial Sequence: Synthetic oligonucleotide
  Sense strand starting at position 1981 of SEQ ID NO: 1884738
agacaugugccugauugga

SEQ ID NO: 2288289 - RNA, 19 nt, Artificial Sequence
  Description of Artificial Sequence: Synthetic oligonucleotide
  Antisense strand to SEQ ID NO: 2288288
uccaaucaggcacaugucu

SEQ ID NO: 2288290 - RNA, 19 nt, Artificial Sequence
  Description of Artificial Sequence: Synthetic oligonucleotide
  Sense strand starting at position 1983 of SEQ ID NO: 1884738
acaugugccugauuggaca

SEQ ID NO: 2288291 - RNA, 19 nt, Artificial Sequence
  Description of Artificial Sequence: Synthetic oligonucleotide
  Antisense strand to SEQ ID NO: 2288290
uguccaaucaggcacaugu

SEQ ID NO: 2288292 - RNA, 19 nt, Artificial Sequence
  Description of Artificial Sequence: Synthetic oligonucleotide
  Sense strand starting at position 2012 of SEQ ID NO: 1884738
cuacuccucugauuggaua

SEQ ID NO: 2288293 - RNA, 19 nt, Artificial Sequence
  Description of Artificial Sequence: Synthetic oligonucleotide
  Antisense strand to SEQ ID NO: 2288292
uauccaaucagaggaguag

SEQ ID NO: 2288294 - RNA, 19 nt, Artificial Sequence
  Description of Artificial Sequence: Synthetic oligonucleotide
  Sense strand starting at position 2190 of SEQ ID NO: 1884738
uugugacugcgguuauguu

SEQ ID NO: 2288295 - RNA, 19 nt, Artificial Sequence
  Description of Artificial Sequence: Synthetic oligonucleotide
  Antisense strand to SEQ ID NO: 2288294
aacauaaccgcagucacaa

SEQ ID NO: 2288296 - RNA, 19 nt, Artificial Sequence
  Description of Artificial Sequence: Synthetic oligonucleotide
  Sense strand starting at position 2197 of SEQ ID NO: 1884738
ugcgguuauguuuauuuau

SEQ ID NO: 2288297 - RNA, 19 nt, Artificial Sequence
  Description of Artificial Sequence: Synthetic oligonucleotide
  Antisense strand to SEQ ID NO: 2288296
auaaauaaacauaaccgca

SEQ ID NO: 2288298 - RNA, 19 nt, Artificial Sequence
  Description of Artificial Sequence: Synthetic oligonucleotide
  Sense strand starting at position 2417 of SEQ ID NO: 1884738
cuaagaaacaggugaaguu

SEQ ID NO: 2288299 - RNA, 19 nt, Artificial Sequence
  Description of Artificial Sequence: Synthetic oligonucleotide
  Antisense strand to SEQ ID NO: 2288298
aacuucaccuguuucuuag

SEQ ID NO: 2288300 - RNA, 19 nt, Artificial Sequence
  Description of Artificial Sequence: Synthetic oligonucleotide
  Sense strand starting at position 2424 of SEQ ID NO: 1884738
acaggugaaguugauugua

SEQ ID NO: 2288301 - RNA, 19 nt, Artificial Sequence
  Description of Artificial Sequence: Synthetic oligonucleotide
  Antisense strand to SEQ ID NO: 2288300
uacaaucaacuucaccugu

SEQ ID NO: 2288302 - RNA, 19 nt, Artificial Sequence
  Description of Artificial Sequence: Synthetic oligonucleotide
  Sense strand starting at position 2426 of SEQ ID NO: 1884738
aggugaaguugauuguaau

SEQ ID NO: 2288303 - RNA, 19 nt, Artificial Sequence
  Description of Artificial Sequence: Synthetic oligonucleotide
  Antisense strand to SEQ ID NO: 2288302
auuacaaucaacuucaccu

SEQ ID NO: 2288304 - RNA, 19 nt, Artificial Sequence
  Description of Artificial Sequence: Synthetic oligonucleotide
  Sense strand starting at position 2427 of SEQ ID NO: 1884738
ggugaaguugauuguaaua

SEQ ID NO: 2288305 - RNA, 19 nt, Artificial Sequence
  Description of Artificial Sequence: Synthetic oligonucleotide
  Antisense strand to SEQ ID NO: 2288304
uauuacaaucaacuucacc

SEQ ID NO: 2288306 - RNA, 19 nt, Artificial Sequence
  Description of Artificial Sequence: Synthetic oligonucleotide
  Sense strand starting at position 2516 of SEQ ID NO: 1884738
guacuaaaucuuugaagcu

SEQ ID NO: 2288307 - RNA, 19 nt, Artificial Sequence
  Description of Artificial Sequence: Synthetic oligonucleotide
  Antisense strand to SEQ ID NO: 2288306
agcuucaaagauuuaguac

SEQ ID NO: 2288308 - RNA, 19 nt, Artificial Sequence
  Description of Artificial Sequence: Synthetic oligonucleotide
  Sense strand starting at position 2528 of SEQ ID NO: 1884738
ugaagcucacucuguauuu

SEQ ID NO: 2288309 - RNA, 19 nt, Artificial Sequence
  Description of Artificial Sequence: Synthetic oligonucleotide
  Antisense strand to SEQ ID NO: 2288308
aaauacagagugagcuuca

SEQ ID NO: 2288310 - RNA, 19 nt, Artificial Sequence
  Description of Artificial Sequence: Synthetic oligonucleotide
  Sense strand starting at position 2751 of SEQ ID NO: 1884738
acgagauggugauccuaga

SEQ ID NO: 2288311 - RNA, 19 nt, Artificial Sequence
  Description of Artificial Sequence: Synthetic oligonucleotide
  Antisense strand to SEQ ID NO: 2288310
ucuaggaucaccaucucgu

SEQ ID NO: 2288312 - RNA, 19 nt, Artificial Sequence
  Description of Artificial Sequence: Synthetic oligonucleotide
  Sense strand starting at position 2807 of SEQ ID NO: 1884738
gaggacugcugcccaucaa

SEQ ID NO: 2288313 - RNA, 19 nt, Artificial Sequence
  Description of Artificial Sequence: Synthetic oligonucleotide
  Antisense strand to SEQ ID NO: 2288312
uugaugggcagcaguccuc

SEQ ID NO: 2288314 - RNA, 19 nt, Artificial Sequence
  Description of Artificial Sequence: Synthetic oligonucleotide
  Sense strand starting at position 2808 of SEQ ID NO: 1884738
aggacugcugcccaucaau

SEQ ID NO: 2288315 - RNA, 19 nt, Artificial Sequence
  Description of Artificial Sequence: Synthetic oligonucleotide
  Antisense strand to SEQ ID NO: 2288314
auugaugggcagcaguccu

SEQ ID NO: 2288316 - RNA, 19 nt, Artificial Sequence
  Description of Artificial Sequence: Synthetic oligonucleotide
  Sense strand starting at position 2885 of SEQ ID NO: 1884738
acauuuagauauggaggaa

SEQ ID NO: 2288317 - RNA, 19 nt, Artificial Sequence
  Description of Artificial Sequence: Synthetic oligonucleotide
  Antisense strand to SEQ ID NO: 2288316
uuccuccauaucuaaaugu

SEQ ID NO: 2288318 - RNA, 19 nt, Artificial Sequence
  Description of Artificial Sequence: Synthetic oligonucleotide
  Sense strand starting at position 2934 of SEQ ID NO: 1884738
uggccuuagcccuaaugau

SEQ ID NO: 2288319 - RNA, 19 nt, Artificial Sequence
  Description of Artificial Sequence: Synthetic oligonucleotide
  Antisense strand to SEQ ID NO: 2288318
aucauuagggcuaaggcca

SEQ ID NO: 2288320 - RNA, 19 nt, Artificial Sequence
  Description of Artificial Sequence: Synthetic oligonucleotide
  Sense strand starting at position 3033 of SEQ ID NO: 1884738
ugcauuucuguaugacgga

SEQ ID NO: 2288321 - RNA, 19 nt, Artificial Sequence
  Description of Artificial Sequence: Synthetic oligonucleotide
  Antisense strand to SEQ ID NO: 2288320
uccgucauacagaaaugca

SEQ ID NO: 2288322 - RNA, 19 nt, Artificial Sequence
  Description of Artificial Sequence: Synthetic oligonucleotide
  Sense strand starting at position 3038 of SEQ ID NO: 1884738
uucuguaugacggaacauu

SEQ ID NO: 2288323 - RNA, 19 nt, Artificial Sequence
  Description of Artificial Sequence: Synthetic oligonucleotide
  Antisense strand to SEQ ID NO: 2288322
aauguuccgucauacagaa

SEQ ID NO: 2288324 - RNA, 19 nt, Artificial Sequence
  Description of Artificial Sequence: Synthetic oligonucleotide
  Sense strand starting at position 3047 of SEQ ID NO: 1884738
acggaacauuaucuuacaa

SEQ ID NO: 2288325 - RNA, 19 nt, Artificial Sequence
  Description of Artificial Sequence: Synthetic oligonucleotide
  Antisense strand to SEQ ID NO: 2288324
uuguaagauaauguuccgu

SEQ ID NO: 2288326 - RNA, 19 nt, Artificial Sequence
  Description of Artificial Sequence: Synthetic oligonucleotide
  Sense strand starting at position 3221 of SEQ ID NO: 1884738
aauagcucaugauugaguu

SEQ ID NO: 2288327 - RNA, 19 nt, Artificial Sequence
  Description of Artificial Sequence: Synthetic oligonucleotide
  Antisense strand to SEQ ID NO: 2288326
aacucaaucaugagcuauu

SEQ ID NO: 2288328 - RNA, 19 nt, Artificial Sequence
  Description of Artificial Sequence: Synthetic oligonucleotide
  Sense strand starting at position 3433 of SEQ ID NO: 1884738
uucugauagcuugaucuca

SEQ ID NO: 2288329 - RNA, 19 nt, Artificial Sequence
  Description of Artificial Sequence: Synthetic oligonucleotide
  Antisense strand to SEQ ID NO: 2288328
ugagaucaagcuaucagaa

SEQ ID NO: 2288330 - RNA, 19 nt, Artificial Sequence
  Description of Artificial Sequence: Synthetic oligonucleotide
  Sense strand starting at position 3435 of SEQ ID NO: 1884738
cugauagcuugaucucaua

SEQ ID NO: 2288331 - RNA, 19 nt, Artificial Sequence
  Description of Artificial Sequence: Synthetic oligonucleotide
  Antisense strand to SEQ ID NO: 2288330
uaugagaucaagcuaucag

SEQ ID NO: 2288332 - RNA, 19 nt, Artificial Sequence
  Description of Artificial Sequence: Synthetic oligonucleotide
  Sense strand starting at position 3934 of SEQ ID NO: 1884738
agaugcaaaguuugggaaa

SEQ ID NO: 2288333 - RNA, 19 nt, Artificial Sequence
  Description of Artificial Sequence: Synthetic oligonucleotide
  Antisense strand to SEQ ID NO: 2288332
uuucccaaacuuugcaucu

SEQ ID NO: 2288334 - RNA, 19 nt, Artificial Sequence
  Description of Artificial Sequence: Synthetic oligonucleotide
  Sense strand starting at position 3978 of SEQ ID NO: 1884738
gcuguaagagcacacaaua

SEQ ID NO: 2288335 - RNA, 19 nt, Artificial Sequence
  Description of Artificial Sequence: Synthetic oligonucleotide
  Antisense strand to SEQ ID NO: 2288334
uauugugugcucuuacagc

SEQ ID NO: 2288336 - RNA, 19 nt, Artificial Sequence
  Description of Artificial Sequence: Synthetic oligonucleotide
  Sense strand starting at position 1062 of SEQ ID NO: 1884739
aggagcauuacugagcaau

SEQ ID NO: 2288337 - RNA, 19 nt, Artificial Sequence
  Description of Artificial Sequence: Synthetic oligonucleotide
  Antisense strand to SEQ ID NO: 2288336
auugcucaguaaugcuccu

SEQ ID NO: 2288338 - RNA, 19 nt, Artificial Sequence
  Description of Artificial Sequence: Synthetic oligonucleotide
  Sense strand starting at position 1065 of SEQ ID NO: 1884739
agcauuacugagcaaugga

SEQ ID NO: 2288339 - RNA, 19 nt, Artificial Sequence
  Description of Artificial Sequence: Synthetic oligonucleotide
  Antisense strand to SEQ ID NO: 2288338
uccauugcucaguaaugcu

SEQ ID NO: 2288340 - RNA, 19 nt, Artificial Sequence
  Description of Artificial Sequence: Synthetic oligonucleotide
  Sense strand starting at position 1068 of SEQ ID NO: 1884739
auuacugagcaauggaaca

SEQ ID NO: 2288341 - RNA, 19 nt, Artificial Sequence
  Description of Artificial Sequence: Synthetic oligonucleotide
  Antisense strand to SEQ ID NO: 2288340
uguuccauugcucaguaau

SEQ ID NO: 2288342 - RNA, 19 nt, Artificial Sequence
  Description of Artificial Sequence: Synthetic oligonucleotide
  Sense strand starting at position 1758 of SEQ ID NO: 1884739
ggugcuaacaguggagaga

SEQ ID NO: 2288343 - RNA, 19 nt, Artificial Sequence
  Description of Artificial Sequence: Synthetic oligonucleotide
  Antisense strand to SEQ ID NO: 2288342
ucucuccacuguuagcacc

SEQ ID NO: 2288344 - RNA, 19 nt, Artificial Sequence
  Description of Artificial Sequence: Synthetic oligonucleotide
  Sense strand starting at position 2032 of SEQ ID NO: 1884739
gggaauguuccagguccuc

SEQ ID NO: 2288345 - RNA, 19 nt, Artificial Sequence
  Description of Artificial Sequence: Synthetic oligonucleotide
  Antisense strand to SEQ ID NO: 2288344
gaggaccuggaacauuccc

SEQ ID NO: 2288346 - RNA, 19 nt, Artificial Sequence
  Description of Artificial Sequence: Synthetic oligonucleotide
  Sense strand starting at position 2079 of SEQ ID NO: 1884739
ggaugacgucgcugcaagu

SEQ ID NO: 2288347 - RNA, 19 nt, Artificial Sequence
  Description of Artificial Sequence: Synthetic oligonucleotide
  Antisense strand to SEQ ID NO: 2288346
acuugcagcgacgucaucc

SEQ ID NO: 2288348 - RNA, 19 nt, Artificial Sequence
  Description of Artificial Sequence: Synthetic oligonucleotide
  Sense strand starting at position 2903 of SEQ ID NO: 1884739
ugaaauagguacuaccuua

SEQ ID NO: 2288349 - RNA, 19 nt, Artificial Sequence
  Description of Artificial Sequence: Synthetic oligonucleotide
  Antisense strand to SEQ ID NO: 2288348
uaagguaguaccuauuuca

SEQ ID NO: 2288350 - RNA, 19 nt, Artificial Sequence
  Description of Artificial Sequence: Synthetic oligonucleotide
  Sense strand starting at position 2961 of SEQ ID NO: 1884739
guuacuaaguuagugacaa

SEQ ID NO: 2288351 - RNA, 19 nt, Artificial Sequence
  Description of Artificial Sequence: Synthetic oligonucleotide
  Antisense strand to SEQ ID NO: 2288350
uugucacuaacuuaguaac

SEQ ID NO: 2288352 - RNA, 19 nt, Artificial Sequence
  Description of Artificial Sequence: Synthetic oligonucleotide
  Sense strand starting at position 2962 of SEQ ID NO: 1884739
uuacuaaguuagugacaaa

SEQ ID NO: 2288353 - RNA, 19 nt, Artificial Sequence
  Description of Artificial Sequence: Synthetic oligonucleotide
  Antisense strand to SEQ ID NO: 2288352
uuugucacuaacuuaguaa

SEQ ID NO: 2288354 - RNA, 19 nt, Artificial Sequence
  Description of Artificial Sequence: Synthetic oligonucleotide
  Sense strand starting at position 2965 of SEQ ID NO: 1884739
cuaaguuagugacaaagcu

SEQ ID NO: 2288355 - RNA, 19 nt, Artificial Sequence
  Description of Artificial Sequence: Synthetic oligonucleotide
  Antisense strand to SEQ ID NO: 2288354
agcuuugucacuaacuuag

SEQ ID NO: 2288356 - RNA, 19 nt, Artificial Sequence
  Description of Artificial Sequence: Synthetic oligonucleotide
  Sense strand starting at position 3150 of SEQ ID NO: 1884739
gaaaucagaguauggcuau

SEQ ID NO: 2288357 - RNA, 19 nt, Artificial Sequence
  Description of Artificial Sequence: Synthetic oligonucleotide
  Antisense strand to SEQ ID NO: 2288356
auagccauacucugauuuc

SEQ ID NO: 2288358 - RNA, 19 nt, Artificial Sequence
  Description of Artificial Sequence: Synthetic oligonucleotide
  Sense strand starting at position 3156 of SEQ ID NO: 1884739
agaguauggcuaugggaac

SEQ ID NO: 2288359 - RNA, 19 nt, Artificial Sequence
  Description of Artificial Sequence: Synthetic oligonucleotide
  Antisense strand to SEQ ID NO: 2288358
guucccauagccauacucu

SEQ ID NO: 2288360 - RNA, 19 nt, Artificial Sequence
  Description of Artificial Sequence: Synthetic oligonucleotide
  Sense strand starting at position 3157 of SEQ ID NO: 1884739
gaguauggcuaugggaaca

SEQ ID NO: 2288361 - RNA, 19 nt, Artificial Sequence
  Description of Artificial Sequence: Synthetic oligonucleotide
  Antisense strand to SEQ ID NO: 2288360
uguucccauagccauacuc

SEQ ID NO: 2288362 - RNA, 19 nt, Artificial Sequence
  Description of Artificial Sequence: Synthetic oligonucleotide
  Sense strand starting at position 3250 of SEQ ID NO: 1884739
guacuuuaaggauaugcuu

SEQ ID NO: 2288363 - RNA, 19 nt, Artificial Sequence
  Description of Artificial Sequence: Synthetic oligonucleotide
  Antisense strand to SEQ ID NO: 2288362
aagcauauccuuaaaguac

SEQ ID NO: 2288364 - RNA, 19 nt, Artificial Sequence
  Description of Artificial Sequence: Synthetic oligonucleotide
  Sense strand starting at position 3256 of SEQ ID NO: 1884739
uaaggauaugcuuguugca

SEQ ID NO: 2288365 - RNA, 19 nt, Artificial Sequence
  Description of Artificial Sequence: Synthetic oligonucleotide
  Antisense strand to SEQ ID NO: 2288364
ugcaacaagcauauccuua

SEQ ID NO: 2288366 - RNA, 19 nt, Artificial Sequence
  Description of Artificial Sequence: Synthetic oligonucleotide
  Sense strand starting at position 3258 of SEQ ID NO: 1884739
aggauaugcuuguugcaaa

SEQ ID NO: 2288367 - RNA, 19 nt, Artificial Sequence
  Description of Artificial Sequence: Synthetic oligonucleotide
  Antisense strand to SEQ ID NO: 2288366
uuugcaacaagcauauccu

SEQ ID NO: 2288368 - RNA, 19 nt, Artificial Sequence
  Description of Artificial Sequence: Synthetic oligonucleotide
  Sense strand starting at position 3271 of SEQ ID NO: 1884739
ugcaaaucauuagcuguau

SEQ ID NO: 2288369 - RNA, 19 nt, Artificial Sequence
  Description of Artificial Sequence: Synthetic oligonucleotide
  Antisense strand to SEQ ID NO: 2288368
auacagcuaaugauuugca

SEQ ID NO: 2288370 - RNA, 19 nt, Artificial Sequence
  Description of Artificial Sequence: Synthetic oligonucleotide
  Sense strand starting at position 3285 of SEQ ID NO: 1884739
uguaucacugaccaagagu

SEQ ID NO: 2288371 - RNA, 19 nt, Artificial Sequence
  Description of Artificial Sequence: Synthetic oligonucleotide
  Antisense strand to SEQ ID NO: 2288370
acucuuggucagugauaca

SEQ ID NO: 2288372 - RNA, 19 nt, Artificial Sequence
  Description of Artificial Sequence: Synthetic oligonucleotide
  Sense strand starting at position 3298 of SEQ ID NO: 1884739
aagaguguuuauuccugaa

SEQ ID NO: 2288373 - RNA, 19 nt, Artificial Sequence
  Description of Artificial Sequence: Synthetic oligonucleotide
  Antisense strand to SEQ ID NO: 2288372
uucaggaauaaacacucuu

SEQ ID NO: 2288374 - RNA, 19 nt, Artificial Sequence
  Description of Artificial Sequence: Synthetic oligonucleotide
  Sense strand starting at position 3300 of SEQ ID NO: 1884739
gaguguuuauuccugaaau

SEQ ID NO: 2288375 - RNA, 19 nt, Artificial Sequence
  Description of Artificial Sequence: Synthetic oligonucleotide
  Antisense strand to SEQ ID NO: 2288374
auuucaggaauaaacacuc

SEQ ID NO: 2288376 - RNA, 19 nt, Artificial Sequence
  Description of Artificial Sequence: Synthetic oligonucleotide
  Sense strand starting at position 3301 of SEQ ID NO: 1884739
aguguuuauuccugaaaua

SEQ ID NO: 2288377 - RNA, 19 nt, Artificial Sequence
  Description of Artificial Sequence: Synthetic oligonucleotide
  Antisense strand to SEQ ID NO: 2288376
uauuucaggaauaaacacu

SEQ ID NO: 2288378 - RNA, 19 nt, Artificial Sequence
  Description of Artificial Sequence: Synthetic oligonucleotide
  Sense strand starting at position 3302 of SEQ ID NO: 1884739
guguuuauuccugaaauac

SEQ ID NO: 2288379 - RNA, 19 nt, Artificial Sequence
  Description of Artificial Sequence: Synthetic oligonucleotide
  Antisense strand to SEQ ID NO: 2288378
guauuucaggaauaaacac

SEQ ID NO: 2288380 - RNA, 19 nt, Artificial Sequence
  Description of Artificial Sequence: Synthetic oligonucleotide
  Sense strand starting at position 3345 of SEQ ID NO: 1884739
ggcacaauaucccaugcua

SEQ ID NO: 2288381 - RNA, 19 nt, Artificial Sequence
  Description of Artificial Sequence: Synthetic oligonucleotide
  Antisense strand to SEQ ID NO: 2288380
uagcaugggauauugugcc

SEQ ID NO: 2288382 - RNA, 19 nt, Artificial Sequence
  Description of Artificial Sequence: Synthetic oligonucleotide
  Sense strand starting at position 3403 of SEQ ID NO: 1884739
aaacucaccgcagaguaaa

SEQ ID NO: 2288383 - RNA, 19 nt, Artificial Sequence
  Description of Artificial Sequence: Synthetic oligonucleotide
  Antisense strand to SEQ ID NO: 2288382
uuuacucugcggugaguuu

SEQ ID NO: 2288384 - RNA, 19 nt, Artificial Sequence
  Description of Artificial Sequence: Synthetic oligonucleotide
  Sense strand starting at position 3429 of SEQ ID NO: 1884739
gauacacaucugggucauu

SEQ ID NO: 2288385 - RNA, 19 nt, Artificial Sequence
  Description of Artificial Sequence: Synthetic oligonucleotide
  Antisense strand to SEQ ID NO: 2288384
aaugacccagauguguauc

SEQ ID NO: 2288386 - RNA, 19 nt, Artificial Sequence
  Description of Artificial Sequence: Synthetic oligonucleotide
  Sense strand starting at position 3430 of SEQ ID NO: 1884739
auacacaucugggucauua

SEQ ID NO: 2288387 - RNA, 19 nt, Artificial Sequence
  Description of Artificial Sequence: Synthetic oligonucleotide
  Antisense strand to SEQ ID NO: 2288386
uaaugacccagauguguau

SEQ ID NO: 2288388 - RNA, 19 nt, Artificial Sequence
  Description of Artificial Sequence: Synthetic oligonucleotide
  Sense strand starting at position 3434 of SEQ ID NO: 1884739
acaucugggucauuauaau

SEQ ID NO: 2288389 - RNA, 19 nt, Artificial Sequence
  Description of Artificial Sequence: Synthetic oligonucleotide
  Antisense strand to SEQ ID NO: 2288388
auuauaaugacccagaugu

SEQ ID NO: 2288390 - RNA, 19 nt, Artificial Sequence
  Description of Artificial Sequence: Synthetic oligonucleotide
  Sense strand starting at position 3440 of SEQ ID NO: 1884739
gggucauuauaaugaucag

SEQ ID NO: 2288391 - RNA, 19 nt, Artificial Sequence
  Description of Artificial Sequence: Synthetic oligonucleotide
  Antisense strand to SEQ ID NO: 2288390
cugaucauuauaaugaccc

SEQ ID NO: 2288392 - RNA, 19 nt, Artificial Sequence
  Description of Artificial Sequence: Synthetic oligonucleotide
  Sense strand starting at position 3640 of SEQ ID NO: 1884739
agugauguaucuucuacau

SEQ ID NO: 2288393 - RNA, 19 nt, Artificial Sequence
  Description of Artificial Sequence: Synthetic oligonucleotide
  Antisense strand to SEQ ID NO: 2288392
auguagaagauacaucacu

SEQ ID NO: 2288394 - RNA, 19 nt, Artificial Sequence
  Description of Artificial Sequence: Synthetic oligonucleotide
  Sense strand starting at position 3642 of SEQ ID NO: 1884739
ugauguaucuucuacaucu

SEQ ID NO: 2288395 - RNA, 19 nt, Artificial Sequence
  Description of Artificial Sequence: Synthetic oligonucleotide
  Antisense strand to SEQ ID NO: 2288394
agauguagaagauacauca

SEQ ID NO: 2288396 - RNA, 19 nt, Artificial Sequence
  Description of Artificial Sequence: Synthetic oligonucleotide
  Sense strand starting at position 3644 of SEQ ID NO: 1884739
auguaucuucuacaucuga

SEQ ID NO: 2288397 - RNA, 19 nt, Artificial Sequence
  Description of Artificial Sequence: Synthetic oligonucleotide
  Antisense strand to SEQ ID NO: 2288396
ucagauguagaagauacau

SEQ ID NO: 2288398 - RNA, 19 nt, Artificial Sequence
  Description of Artificial Sequence: Synthetic oligonucleotide
  Sense strand starting at position 3676 of SEQ ID NO: 1884739
aguuuauucuuuccaggaa

SEQ ID NO: 2288399 - RNA, 19 nt, Artificial Sequence
  Description of Artificial Sequence: Synthetic oligonucleotide
  Antisense strand to SEQ ID NO: 2288398
uuccuggaaagaauaaacu

SEQ ID NO: 2288400 - RNA, 19 nt, Artificial Sequence
  Description of Artificial Sequence: Synthetic oligonucleotide
  Sense strand starting at position 3677 of SEQ ID NO: 1884739
guuuauucuuuccaggaaa

SEQ ID NO: 2288401 - RNA, 19 nt, Artificial Sequence
  Description of Artificial Sequence: Synthetic oligonucleotide
  Antisense strand to SEQ ID NO: 2288400
uuuccuggaaagaauaaac

SEQ ID NO: 2288402 - RNA, 19 nt, Artificial Sequence
  Description of Artificial Sequence: Synthetic oligonucleotide
  Sense strand starting at position 3679 of SEQ ID NO: 1884739
uuauucuuuccaggaaagc

SEQ ID NO: 2288403 - RNA, 19 nt, Artificial Sequence
  Description of Artificial Sequence: Synthetic oligonucleotide
  Antisense strand to SEQ ID NO: 2288402
gcuuuccuggaaagaauaa

SEQ ID NO: 2288404 - RNA, 19 nt, Artificial Sequence
  Description of Artificial Sequence: Synthetic oligonucleotide
  Sense strand starting at position 3803 of SEQ ID NO: 1884739
ucuuauaugugacucacca

SEQ ID NO: 2288405 - RNA, 19 nt, Artificial Sequence
  Description of Artificial Sequence: Synthetic oligonucleotide
  Antisense strand to SEQ ID NO: 2288404
uggugagucacauauaaga

SEQ ID NO: 2288406 - RNA, 19 nt, Artificial Sequence
  Description of Artificial Sequence: Synthetic oligonucleotide
  Sense strand starting at position 3866 of SEQ ID NO: 1884739
ccauuugccucagagaaua

SEQ ID NO: 2288407 - RNA, 19 nt, Artificial Sequence
  Description of Artificial Sequence: Synthetic oligonucleotide
  Antisense strand to SEQ ID NO: 2288406
uauucucugaggcaaaugg

SEQ ID NO: 2288408 - RNA, 19 nt, Artificial Sequence
  Description of Artificial Sequence: Synthetic oligonucleotide
  Sense strand starting at position 3876 of SEQ ID NO: 1884739
cagagaauacuggguuguu

SEQ ID NO: 2288409 - RNA, 19 nt, Artificial Sequence
  Description of Artificial Sequence: Synthetic oligonucleotide
  Antisense strand to SEQ ID NO: 2288408
aacaacccaguauucucug

SEQ ID NO: 2288410 - RNA, 19 nt, Artificial Sequence
  Description of Artificial Sequence: Synthetic oligonucleotide
  Sense strand starting at position 3877 of SEQ ID NO: 1884739
agagaauacuggguuguua

SEQ ID NO: 2288411 - RNA, 19 nt, Artificial Sequence
  Description of Artificial Sequence: Synthetic oligonucleotide
  Antisense strand to SEQ ID NO: 2288410
uaacaacccaguauucucu

SEQ ID NO: 2288412 - RNA, 19 nt, Artificial Sequence
  Description of Artificial Sequence: Synthetic oligonucleotide
  Sense strand starting at position 3879 of SEQ ID NO: 1884739
agaauacuggguuguuaug

SEQ ID NO: 2288413 - RNA, 19 nt, Artificial Sequence
  Description of Artificial Sequence: Synthetic oligonucleotide
  Antisense strand to SEQ ID NO: 2288412
cauaacaacccaguauucu

SEQ ID NO: 2288414 - RNA, 19 nt, Artificial Sequence
  Description of Artificial Sequence: Synthetic oligonucleotide
  Sense strand starting at position 3885 of SEQ ID NO: 1884739
cuggguuguuaugacaaga

SEQ ID NO: 2288415 - RNA, 19 nt, Artificial Sequence
  Description of Artificial Sequence: Synthetic oligonucleotide
  Antisense strand to SEQ ID NO: 2288414
ucuugucauaacaacccag

SEQ ID NO: 2288416 - RNA, 19 nt, Artificial Sequence
  Description of Artificial Sequence: Synthetic oligonucleotide
  Sense strand starting at position 29 of SEQ ID NO: 1884740
uaaucuguuccagacgauu

SEQ ID NO: 2288417 - RNA, 19 nt, Artificial Sequence
  Description of Artificial Sequence: Synthetic oligonucleotide
  Antisense strand to SEQ ID NO: 2288416
aaucgucuggaacagauua

SEQ ID NO: 2288418 - RNA, 19 nt, Artificial Sequence
  Description of Artificial Sequence: Synthetic oligonucleotide
  Sense strand starting at position 512 of SEQ ID NO: 1884740
ucaaucugguuaguaauga

SEQ ID NO: 2288419 - RNA, 19 nt, Artificial Sequence
  Description of Artificial Sequence: Synthetic oligonucleotide
  Antisense strand to SEQ ID NO: 2288418
ucauuacuaaccagauuga

SEQ ID NO: 2288420 - RNA, 19 nt, Artificial Sequence
  Description of Artificial Sequence: Synthetic oligonucleotide
  Sense strand starting at position 542 of SEQ ID NO: 1884740
agauacuuugaagguauau

SEQ ID NO: 2288421 - RNA, 19 nt, Artificial Sequence
  Description of Artificial Sequence: Synthetic oligonucleotide
  Antisense strand to SEQ ID NO: 2288420
auauaccuucaaaguaucu

SEQ ID NO: 2288422 - RNA, 19 nt, Artificial Sequence
  Description of Artificial Sequence: Synthetic oligonucleotide
  Sense strand starting at position 732 of SEQ ID NO: 1884740
cgaagaagguuaucugaga

SEQ ID NO: 2288423 - RNA, 19 nt, Artificial Sequence
  Description of Artificial Sequence: Synthetic oligonucleotide
  Antisense strand to SEQ ID NO: 2288422
ucucagauaaccuucuucg

SEQ ID NO: 2288424 - RNA, 19 nt, Artificial Sequence
  Description of Artificial Sequence: Synthetic oligonucleotide
  Sense strand starting at position 766 of SEQ ID NO: 1884740
gaauaaugagcaggguuua

SEQ ID NO: 2288425 - RNA, 19 nt, Artificial Sequence
  Description of Artificial Sequence: Synthetic oligonucleotide
  Antisense strand to SEQ ID NO: 2288424
uaaacccugcucauuauuc

SEQ ID NO: 2288426 - RNA, 19 nt, Artificial Sequence
  Description of Artificial Sequence: Synthetic oligonucleotide
  Sense strand starting at position 767 of SEQ ID NO: 1884740
aauaaugagcaggguuuau

SEQ ID NO: 2288427 - RNA, 19 nt, Artificial Sequence
  Description of Artificial Sequence: Synthetic oligonucleotide
  Antisense strand to SEQ ID NO: 2288426
auaaacccugcucauuauu

SEQ ID NO: 2288428 - RNA, 19 nt, Artificial Sequence
  Description of Artificial Sequence: Synthetic oligonucleotide
  Sense strand starting at position 883 of SEQ ID NO: 1884740
ggaucugccuaaucagauu

SEQ ID NO: 2288429 - RNA, 19 nt, Artificial Sequence
  Description of Artificial Sequence: Synthetic oligonucleotide
  Antisense strand to SEQ ID NO: 2288428
aaucugauuaggcagaucc

SEQ ID NO: 2288430 - RNA, 19 nt, Artificial Sequence
  Description of Artificial Sequence: Synthetic oligonucleotide
  Sense strand starting at position 894 of SEQ ID NO: 1884740
aucagauuggugcacucau

SEQ ID NO: 2288431 - RNA, 19 nt, Artificial Sequence
  Description of Artificial Sequence: Synthetic oligonucleotide
  Antisense strand to SEQ ID NO: 2288430
augagugcaccaaucugau

SEQ ID NO: 2288432 - RNA, 19 nt, Artificial Sequence
  Description of Artificial Sequence: Synthetic oligonucleotide
  Sense strand starting at position 906 of SEQ ID NO: 1884740
cacucauguuuacuggaga

SEQ ID NO: 2288433 - RNA, 19 nt, Artificial Sequence
  Description of Artificial Sequence: Synthetic oligonucleotide
  Antisense strand to SEQ ID NO: 2288432
ucuccaguaaacaugagug

SEQ ID NO: 2288434 - RNA, 19 nt, Artificial Sequence
  Description of Artificial Sequence: Synthetic oligonucleotide
  Sense strand starting at position 1010 of SEQ ID NO: 1884740
aaauauugcuuugugaaga

SEQ ID NO: 2288435 - RNA, 19 nt, Artificial Sequence
  Description of Artificial Sequence: Synthetic oligonucleotide
  Antisense strand to SEQ ID NO: 2288434
ucuucacaaagcaauauuu

SEQ ID NO: 2288436 - RNA, 19 nt, Artificial Sequence
  Description of Artificial Sequence: Synthetic oligonucleotide
  Sense strand starting at position 1015 of SEQ ID NO: 1884740
uugcuuugugaagacaaac

SEQ ID NO: 2288437 - RNA, 19 nt, Artificial Sequence
  Description of Artificial Sequence: Synthetic oligonucleotide
  Antisense strand to SEQ ID NO: 2288436
guuugucuucacaaagcaa

SEQ ID NO: 2288438 - RNA, 19 nt, Artificial Sequence
  Description of Artificial Sequence: Synthetic oligonucleotide
  Sense strand starting at position 1114 of SEQ ID NO: 1884740
gauaguaaggcuggaacuu

SEQ ID NO: 2288439 - RNA, 19 nt, Artificial Sequence
  Description of Artificial Sequence: Synthetic oligonucleotide
  Antisense strand to SEQ ID NO: 2288438
aaguuccagccuuacuauc

SEQ ID NO: 2288440 - RNA, 19 nt, Artificial Sequence
  Description of Artificial Sequence: Synthetic oligonucleotide
  Sense strand starting at position 1242 of SEQ ID NO: 1884740
ucuagagucuucccacaga

SEQ ID NO: 2288441 - RNA, 19 nt, Artificial Sequence
  Description of Artificial Sequence: Synthetic oligonucleotide
  Antisense strand to SEQ ID NO: 2288440
ucugugggaagacucuaga

SEQ ID NO: 2288442 - RNA, 19 nt, Artificial Sequence
  Description of Artificial Sequence: Synthetic oligonucleotide
  Sense strand starting at position 1245 of SEQ ID NO: 1884740
agagucuucccacagaccu

SEQ ID NO: 2288443 - RNA, 19 nt, Artificial Sequence
  Description of Artificial Sequence: Synthetic oligonucleotide
  Antisense strand to SEQ ID NO: 2288442
aggucugugggaagacucu

SEQ ID NO: 2288444 - RNA, 19 nt, Artificial Sequence
  Description of Artificial Sequence: Synthetic oligonucleotide
  Sense strand starting at position 1473 of SEQ ID NO: 1884740
uggaucgaauccucuuuga

SEQ ID NO: 2288445 - RNA, 19 nt, Artificial Sequence
  Description of Artificial Sequence: Synthetic oligonucleotide
  Antisense strand to SEQ ID NO: 2288444
ucaaagaggauucgaucca

SEQ ID NO: 2288446 - RNA, 19 nt, Artificial Sequence
  Description of Artificial Sequence: Synthetic oligonucleotide
  Sense strand starting at position 1477 of SEQ ID NO: 1884740
ucgaauccucuuugacaua

SEQ ID NO: 2288447 - RNA, 19 nt, Artificial Sequence
  Description of Artificial Sequence: Synthetic oligonucleotide
  Antisense strand to SEQ ID NO: 2288446
uaugucaaagaggauucga

SEQ ID NO: 2288448 - RNA, 19 nt, Artificial Sequence
  Description of Artificial Sequence: Synthetic oligonucleotide
  Sense strand starting at position 1664 of SEQ ID NO: 1884740
aguaaaguuccagggaaua

SEQ ID NO: 2288449 - RNA, 19 nt, Artificial Sequence
  Description of Artificial Sequence: Synthetic oligonucleotide
  Antisense strand to SEQ ID NO: 2288448
uauucccuggaacuuuacu

SEQ ID NO: 2288450 - RNA, 19 nt, Artificial Sequence
  Description of Artificial Sequence: Synthetic oligonucleotide
  Sense strand starting at position 1717 of SEQ ID NO: 1884740
gugauauuagaagguggga

SEQ ID NO: 2288451 - RNA, 19 nt, Artificial Sequence
  Description of Artificial Sequence: Synthetic oligonucleotide
  Antisense strand to SEQ ID NO: 2288450
ucccaccuucuaauaucac

SEQ ID NO: 2288452 - RNA, 19 nt, Artificial Sequence
  Description of Artificial Sequence: Synthetic oligonucleotide
  Sense strand starting at position 1747 of SEQ ID NO: 1884740
cuauacuguguggauuaau

SEQ ID NO: 2288453 - RNA, 19 nt, Artificial Sequence
  Description of Artificial Sequence: Synthetic oligonucleotide
  Antisense strand to SEQ ID NO: 2288452
auuaauccacacaguauag

SEQ ID NO: 2288454 - RNA, 19 nt, Artificial Sequence
  Description of Artificial Sequence: Synthetic oligonucleotide
  Sense strand starting at position 1771 of SEQ ID NO: 1884740
gauccauguuauccagaga

SEQ ID NO: 2288455 - RNA, 19 nt, Artificial Sequence
  Description of Artificial Sequence: Synthetic oligonucleotide
  Antisense strand to SEQ ID NO: 2288454
ucucuggauaacauggauc

SEQ ID NO: 2288456 - RNA, 19 nt, Artificial Sequence
  Description of Artificial Sequence: Synthetic oligonucleotide
  Sense strand starting at position 1776 of SEQ ID NO: 1884740
auguuauccagagaauucg

SEQ ID NO: 2288457 - RNA, 19 nt, Artificial Sequence
  Description of Artificial Sequence: Synthetic oligonucleotide
  Antisense strand to SEQ ID NO: 2288456
cgaauucucuggauaacau

SEQ ID NO: 2288458 - RNA, 19 nt, Artificial Sequence
  Description of Artificial Sequence: Synthetic oligonucleotide
  Sense strand starting at position 1793 of SEQ ID NO: 1884740
cgggucuuagaucaaugau

SEQ ID NO: 2288459 - RNA, 19 nt, Artificial Sequence
  Description of Artificial Sequence: Synthetic oligonucleotide
  Antisense strand to SEQ ID NO: 2288458
aucauugaucuaagacccg

SEQ ID NO: 2288460 - RNA, 19 nt, Artificial Sequence
  Description of Artificial Sequence: Synthetic oligonucleotide
  Sense strand starting at position 1796 of SEQ ID NO: 1884740
gucuuagaucaaugauaau

SEQ ID NO: 2288461 - RNA, 19 nt, Artificial Sequence
  Description of Artificial Sequence: Synthetic oligonucleotide
  Antisense strand to SEQ ID NO: 2288460
auuaucauugaucuaagac

SEQ ID NO: 2288462 - RNA, 19 nt, Artificial Sequence
  Description of Artificial Sequence: Synthetic oligonucleotide
  Sense strand starting at position 1891 of SEQ ID NO: 1884740
gguugucagaaguaaacuu

SEQ ID NO: 2288463 - RNA, 19 nt, Artificial Sequence
  Description of Artificial Sequence: Synthetic oligonucleotide
  Antisense strand to SEQ ID NO: 2288462
aaguuuacuucugacaacc

SEQ ID NO: 2288464 - RNA, 19 nt, Artificial Sequence
  Description of Artificial Sequence: Synthetic oligonucleotide
  Sense strand starting at position 2011 of SEQ ID NO: 1884740
aauaaugcuuugguauaga

SEQ ID NO: 2288465 - RNA, 19 nt, Artificial Sequence
  Description of Artificial Sequence: Synthetic oligonucleotide
  Antisense strand to SEQ ID NO: 2288464
ucuauaccaaagcauuauu

SEQ ID NO: 2288466 - RNA, 19 nt, Artificial Sequence
  Description of Artificial Sequence: Synthetic oligonucleotide
  Sense strand starting at position 2014 of SEQ ID NO: 1884740
aaugcuuugguauagacaa

SEQ ID NO: 2288467 - RNA, 19 nt, Artificial Sequence
  Description of Artificial Sequence: Synthetic oligonucleotide
  Antisense strand to SEQ ID NO: 2288466
uugucuauaccaaagcauu

SEQ ID NO: 2288468 - RNA, 19 nt, Artificial Sequence
  Description of Artificial Sequence: Synthetic oligonucleotide
  Sense strand starting at position 2165 of SEQ ID NO: 1884740
gggcuaacugcagauuaaa

SEQ ID NO: 2288469 - RNA, 19 nt, Artificial Sequence
  Description of Artificial Sequence: Synthetic oligonucleotide
  Antisense strand to SEQ ID NO: 2288468
uuuaaucugcaguuagccc

SEQ ID NO: 2288470 - RNA, 19 nt, Artificial Sequence
  Description of Artificial Sequence: Synthetic oligonucleotide
  Sense strand starting at position 2196 of SEQ ID NO: 1884740
ccuguauaaccucacaguu

SEQ ID NO: 2288471 - RNA, 19 nt, Artificial Sequence
  Description of Artificial Sequence: Synthetic oligonucleotide
  Antisense strand to SEQ ID NO: 2288470
aacugugagguuauacagg

SEQ ID NO: 2288472 - RNA, 19 nt, Artificial Sequence
  Description of Artificial Sequence: Synthetic oligonucleotide
  Sense strand starting at position 2250 of SEQ ID NO: 1884740
aggaucugguccuuuacau

SEQ ID NO: 2288473 - RNA, 19 nt, Artificial Sequence
  Description of Artificial Sequence: Synthetic oligonucleotide
  Antisense strand to SEQ ID NO: 2288472
auguaaaggaccagauccu

SEQ ID NO: 2288474 - RNA, 19 nt, Artificial Sequence
  Description of Artificial Sequence: Synthetic oligonucleotide
  Sense strand starting at position 2373 of SEQ ID NO: 1884740
agaggaugugcuugaacau

SEQ ID NO: 2288475 - RNA, 19 nt, Artificial Sequence
  Description of Artificial Sequence: Synthetic oligonucleotide
  Antisense strand to SEQ ID NO: 2288474
auguucaagcacauccucu

SEQ ID NO: 2288476 - RNA, 19 nt, Artificial Sequence
  Description of Artificial Sequence: Synthetic oligonucleotide
  Sense strand starting at position 2597 of SEQ ID NO: 1884740
ugugcuagauuguugauuu

SEQ ID NO: 2288477 - RNA, 19 nt, Artificial Sequence
  Description of Artificial Sequence: Synthetic oligonucleotide
  Antisense strand to SEQ ID NO: 2288476
aaaucaacaaucuagcaca

SEQ ID NO: 2288478 - RNA, 19 nt, Artificial Sequence
  Description of Artificial Sequence: Synthetic oligonucleotide
  Sense strand starting at position 2683 of SEQ ID NO: 1884740
guauguucggcuuugaggu

SEQ ID NO: 2288479 - RNA, 19 nt, Artificial Sequence
  Description of Artificial Sequence: Synthetic oligonucleotide
  Antisense strand to SEQ ID NO: 2288478
accucaaagccgaacauac

SEQ ID NO: 2288480 - RNA, 19 nt, Artificial Sequence
  Description of Artificial Sequence: Synthetic oligonucleotide
  Sense strand starting at position 2763 of SEQ ID NO: 1884740
uuuagaguccaccauucuu

SEQ ID NO: 2288481 - RNA, 19 nt, Artificial Sequence
  Description of Artificial Sequence: Synthetic oligonucleotide
  Antisense strand to SEQ ID NO: 2288480
aagaaugguggacucuaaa

SEQ ID NO: 2288482 - RNA, 19 nt, Artificial Sequence
  Description of Artificial Sequence: Synthetic oligonucleotide
  Sense strand starting at position 2975 of SEQ ID NO: 1884740
gugugagcucuccacaaag

SEQ ID NO: 2288483 - RNA, 19 nt, Artificial Sequence
  Description of Artificial Sequence: Synthetic oligonucleotide
  Antisense strand to SEQ ID NO: 2288482
cuuuguggagagcucacac

SEQ ID NO: 2288484 - RNA, 19 nt, Artificial Sequence
  Description of Artificial Sequence: Synthetic oligonucleotide
  Sense strand starting at position 2977 of SEQ ID NO: 1884740
gugagcucuccacaaagau

SEQ ID NO: 2288485 - RNA, 19 nt, Artificial Sequence
  Description of Artificial Sequence: Synthetic oligonucleotide
  Antisense strand to SEQ ID NO: 2288484
aucuuuguggagagcucac

SEQ ID NO: 2288486 - RNA, 19 nt, Artificial Sequence
  Description of Artificial Sequence: Synthetic oligonucleotide
  Sense strand starting at position 2998 of SEQ ID NO: 1884740
acgauugggcuugagcaaa

SEQ ID NO: 2288487 - RNA, 19 nt, Artificial Sequence
  Description of Artificial Sequence: Synthetic oligonucleotide
  Antisense strand to SEQ ID NO: 2288486
uuugcucaagcccaaucgu

SEQ ID NO: 2288488 - RNA, 19 nt, Artificial Sequence
  Description of Artificial Sequence: Synthetic oligonucleotide
  Sense strand starting at position 3334 of SEQ ID NO: 1884740
augacuuguccugacuuua

SEQ ID NO: 2288489 - RNA, 19 nt, Artificial Sequence
  Description of Artificial Sequence: Synthetic oligonucleotide
  Antisense strand to SEQ ID NO: 2288488
uaaagucaggacaagucau

SEQ ID NO: 2288490 - RNA, 19 nt, Artificial Sequence
  Description of Artificial Sequence: Synthetic oligonucleotide
  Sense strand starting at position 3562 of SEQ ID NO: 1884740
cagcauaugcguuauuuaa

SEQ ID NO: 2288491 - RNA, 19 nt, Artificial Sequence
  Description of Artificial Sequence: Synthetic oligonucleotide
  Antisense strand to SEQ ID NO: 2288490
uuaaauaacgcauaugcug

SEQ ID NO: 2288492 - RNA, 19 nt, Artificial Sequence
  Description of Artificial Sequence: Synthetic oligonucleotide
  Sense strand starting at position 3564 of SEQ ID NO: 1884740
gcauaugcguuauuuaaag

SEQ ID NO: 2288493 - RNA, 19 nt, Artificial Sequence
  Description of Artificial Sequence: Synthetic oligonucleotide
  Antisense strand to SEQ ID NO: 2288492
cuuuaaauaacgcauaugc

SEQ ID NO: 2288494 - RNA, 19 nt, Artificial Sequence
  Description of Artificial Sequence: Synthetic oligonucleotide
  Sense strand starting at position 3639 of SEQ ID NO: 1884740
cugaaaugucauggaucua

SEQ ID NO: 2288495 - RNA, 19 nt, Artificial Sequence
  Description of Artificial Sequence: Synthetic oligonucleotide
  Antisense strand to SEQ ID NO: 2288494
uagauccaugacauuucag

SEQ ID NO: 2288496 - RNA, 19 nt, Artificial Sequence
  Description of Artificial Sequence: Synthetic oligonucleotide
  Sense strand starting at position 108 of SEQ ID NO: 1884741
uagccaugaugcucuggau

SEQ ID NO: 2288497 - RNA, 19 nt, Artificial Sequence
  Description of Artificial Sequence: Synthetic oligonucleotide
  Antisense strand to SEQ ID NO: 2288496
auccagagcaucauggcua

SEQ ID NO: 2288498 - RNA, 19 nt, Artificial Sequence
  Description of Artificial Sequence: Synthetic oligonucleotide
  Sense strand starting at position 162 of SEQ ID NO: 1884741
gcugcuugccaugagcuua

SEQ ID NO: 2288499 - RNA, 19 nt, Artificial Sequence
  Description of Artificial Sequence: Synthetic oligonucleotide
  Antisense strand to SEQ ID NO: 2288498
uaagcucauggcaagcagc

SEQ ID NO: 2288500 - RNA, 19 nt, Artificial Sequence
  Description of Artificial Sequence: Synthetic oligonucleotide
  Sense strand starting at position 167 of SEQ ID NO: 1884741
uugccaugagcuuacaauc

SEQ ID NO: 2288501 - RNA, 19 nt, Artificial Sequence
  Description of Artificial Sequence: Synthetic oligonucleotide
  Antisense strand to SEQ ID NO: 2288500
gauuguaagcucauggcaa

SEQ ID NO: 2288502 - RNA, 19 nt, Artificial Sequence
  Description of Artificial Sequence: Synthetic oligonucleotide
  Sense strand starting at position 177 of SEQ ID NO: 1884741
cuuacaaucugguuuggaa

SEQ ID NO: 2288503 - RNA, 19 nt, Artificial Sequence
  Description of Artificial Sequence: Synthetic oligonucleotide
  Antisense strand to SEQ ID NO: 2288502
uuccaaaccagauuguaag

SEQ ID NO: 2288504 - RNA, 19 nt, Artificial Sequence
  Description of Artificial Sequence: Synthetic oligonucleotide
  Sense strand starting at position 179 of SEQ ID NO: 1884741
uacaaucugguuuggaaga

SEQ ID NO: 2288505 - RNA, 19 nt, Artificial Sequence
  Description of Artificial Sequence: Synthetic oligonucleotide
  Antisense strand to SEQ ID NO: 2288504
ucuuccaaaccagauugua

SEQ ID NO: 2288506 - RNA, 19 nt, Artificial Sequence
  Description of Artificial Sequence: Synthetic oligonucleotide
  Sense strand starting at position 181 of SEQ ID NO: 1884741
caaucugguuuggaagaca

SEQ ID NO: 2288507 - RNA, 19 nt, Artificial Sequence
  Description of Artificial Sequence: Synthetic oligonucleotide
  Antisense strand to SEQ ID NO: 2288506
ugucuuccaaaccagauug

SEQ ID NO: 2288508 - RNA, 19 nt, Artificial Sequence
  Description of Artificial Sequence: Synthetic oligonucleotide
  Sense strand starting at position 236 of SEQ ID NO: 1884741
auacaaaugugucuguaug

SEQ ID NO: 2288509 - RNA, 19 nt, Artificial Sequence
  Description of Artificial Sequence: Synthetic oligonucleotide
  Antisense strand to SEQ ID NO: 2288508
cauacagacacauuuguau

SEQ ID NO: 2288510 - RNA, 19 nt, Artificial Sequence
  Description of Artificial Sequence: Synthetic oligonucleotide
  Sense strand starting at position 237 of SEQ ID NO: 1884741
uacaaaugugucuguaugu

SEQ ID NO: 2288511 - RNA, 19 nt, Artificial Sequence
  Description of Artificial Sequence: Synthetic oligonucleotide
  Antisense strand to SEQ ID NO: 2288510
acauacagacacauuugua

SEQ ID NO: 2288512 - RNA, 19 nt, Artificial Sequence
  Description of Artificial Sequence: Synthetic oligonucleotide
  Sense strand starting at position 247 of SEQ ID NO: 1884741
ucuguauguguauacgaga

SEQ ID NO: 2288513 - RNA, 19 nt, Artificial Sequence
  Description of Artificial Sequence: Synthetic oligonucleotide
  Antisense strand to SEQ ID NO: 2288512
ucucguauacacauacaga

SEQ ID NO: 2288514 - RNA, 19 nt, Artificial Sequence
  Description of Artificial Sequence: Synthetic oligonucleotide
  Sense strand starting at position 250 of SEQ ID NO: 1884741
guauguguauacgagauga

SEQ ID NO: 2288515 - RNA, 19 nt, Artificial Sequence
  Description of Artificial Sequence: Synthetic oligonucleotide
  Antisense strand to SEQ ID NO: 2288514
ucaucucguauacacauac

SEQ ID NO: 2288516 - RNA, 19 nt, Artificial Sequence
  Description of Artificial Sequence: Synthetic oligonucleotide
  Sense strand starting at position 252 of SEQ ID NO: 1884741
auguguauacgagaugaca

SEQ ID NO: 2288517 - RNA, 19 nt, Artificial Sequence
  Description of Artificial Sequence: Synthetic oligonucleotide
  Antisense strand to SEQ ID NO: 2288516
ugucaucucguauacacau

SEQ ID NO: 2288518 - RNA, 19 nt, Artificial Sequence
  Description of Artificial Sequence: Synthetic oligonucleotide
  Sense strand starting at position 254 of SEQ ID NO: 1884741
guguauacgagaugacacu

SEQ ID NO: 2288519 - RNA, 19 nt, Artificial Sequence
  Description of Artificial Sequence: Synthetic oligonucleotide
  Antisense strand to SEQ ID NO: 2288518
agugucaucucguauacac

SEQ ID NO: 2288520 - RNA, 19 nt, Artificial Sequence
  Description of Artificial Sequence: Synthetic oligonucleotide
  Sense strand starting at position 263 of SEQ ID NO: 1884741
agaugacacugggauaaua

SEQ ID NO: 2288521 - RNA, 19 nt, Artificial Sequence
  Description of Artificial Sequence: Synthetic oligonucleotide
  Antisense strand to SEQ ID NO: 2288520
uauuaucccagugucaucu

SEQ ID NO: 2288522 - RNA, 19 nt, Artificial Sequence
  Description of Artificial Sequence: Synthetic oligonucleotide
  Sense strand starting at position 336 of SEQ ID NO: 1884741
ucucuacauguuuaaaugu

SEQ ID NO: 2288523 - RNA, 19 nt, Artificial Sequence
  Description of Artificial Sequence: Synthetic oligonucleotide
  Antisense strand to SEQ ID NO: 2288522
acauuuaaacauguagaga

SEQ ID NO: 2288524 - RNA, 19 nt, Artificial Sequence
  Description of Artificial Sequence: Synthetic oligonucleotide
  Sense strand starting at position 345 of SEQ ID NO: 1884741
guuuaaauguucuuugaag

SEQ ID NO: 2288525 - RNA, 19 nt, Artificial Sequence
  Description of Artificial Sequence: Synthetic oligonucleotide
  Antisense strand to SEQ ID NO: 2288524
cuucaaagaacauuuaaac

SEQ ID NO: 2288526 - RNA, 19 nt, Artificial Sequence
  Description of Artificial Sequence: Synthetic oligonucleotide
  Sense strand starting at position 347 of SEQ ID NO: 1884741
uuaaauguucuuugaagac

SEQ ID NO: 2288527 - RNA, 19 nt, Artificial Sequence
  Description of Artificial Sequence: Synthetic oligonucleotide
  Antisense strand to SEQ ID NO: 2288526
gucuucaaagaacauuuaa

SEQ ID NO: 2288528 - RNA, 19 nt, Artificial Sequence
  Description of Artificial Sequence: Synthetic oligonucleotide
  Sense strand starting at position 379 of SEQ ID NO: 1884741
gcuugaauuuguuaucagu

SEQ ID NO: 2288529 - RNA, 19 nt, Artificial Sequence
  Description of Artificial Sequence: Synthetic oligonucleotide
  Antisense strand to SEQ ID NO: 2288528
acugauaacaaauucaagc

SEQ ID NO: 2288530 - RNA, 19 nt, Artificial Sequence
  Description of Artificial Sequence: Synthetic oligonucleotide
  Sense strand starting at position 412 of SEQ ID NO: 1884741
ugguguauuuagccaauau

SEQ ID NO: 2288531 - RNA, 19 nt, Artificial Sequence
  Description of Artificial Sequence: Synthetic oligonucleotide
  Antisense strand to SEQ ID NO: 2288530
auauuggcuaaauacacca

SEQ ID NO: 2288532 - RNA, 19 nt, Artificial Sequence
  Description of Artificial Sequence: Synthetic oligonucleotide
  Sense strand starting at position 471 of SEQ ID NO: 1884741
gccuguauacgaugacuau

SEQ ID NO: 2288533 - RNA, 19 nt, Artificial Sequence
  Description of Artificial Sequence: Synthetic oligonucleotide
  Antisense strand to SEQ ID NO: 2288532
auagucaucguauacaggc

SEQ ID NO: 2288534 - RNA, 19 nt, Artificial Sequence
  Description of Artificial Sequence: Synthetic oligonucleotide
  Sense strand starting at position 474 of SEQ ID NO: 1884741
uguauacgaugacuaugaa

SEQ ID NO: 2288535 - RNA, 19 nt, Artificial Sequence
  Description of Artificial Sequence: Synthetic oligonucleotide
  Antisense strand to SEQ ID NO: 2288534
uucauagucaucguauaca

SEQ ID NO: 2288536 - RNA, 19 nt, Artificial Sequence
  Description of Artificial Sequence: Synthetic oligonucleotide
  Sense strand starting at position 516 of SEQ ID NO: 1884741
uucucuagguaauaacaga

SEQ ID NO: 2288537 - RNA, 19 nt, Artificial Sequence
  Description of Artificial Sequence: Synthetic oligonucleotide
  Antisense strand to SEQ ID NO: 2288536
ucuguuauuaccuagagaa

SEQ ID NO: 2288538 - RNA, 19 nt, Artificial Sequence
  Description of Artificial Sequence: Synthetic oligonucleotide
  Sense strand starting at position 530 of SEQ ID NO: 1884741
acagaauugcugugucaug

SEQ ID NO: 2288539 - RNA, 19 nt, Artificial Sequence
  Description of Artificial Sequence: Synthetic oligonucleotide
  Antisense strand to SEQ ID NO: 2288538
caugacacagcaauucugu

SEQ ID NO: 2288540 - RNA, 19 nt, Artificial Sequence
  Description of Artificial Sequence: Synthetic oligonucleotide
  Sense strand starting at position 1105 of SEQ ID NO: 1884741
cggugacaaugauaaugau

SEQ ID NO: 2288541 - RNA, 19 nt, Artificial Sequence
  Description of Artificial Sequence: Synthetic oligonucleotide
  Antisense strand to SEQ ID NO: 2288540
aucauuaucauugucaccg

SEQ ID NO: 2288542 - RNA, 19 nt, Artificial Sequence
  Description of Artificial Sequence: Synthetic oligonucleotide
  Sense strand starting at position 1108 of SEQ ID NO: 1884741
ugacaaugauaaugauaca

SEQ ID NO: 2288543 - RNA, 19 nt, Artificial Sequence
  Description of Artificial Sequence: Synthetic oligonucleotide
  Antisense strand to SEQ ID NO: 2288542
uguaucauuaucauuguca

SEQ ID NO: 2288544 - RNA, 19 nt, Artificial Sequence
  Description of Artificial Sequence: Synthetic oligonucleotide
  Sense strand starting at position 1261 of SEQ ID NO: 1884741
cucuguuaauuugauaaag

SEQ ID NO: 2288545 - RNA, 19 nt, Artificial Sequence
  Description of Artificial Sequence: Synthetic oligonucleotide
  Antisense strand to SEQ ID NO: 2288544
cuuuaucaaauuaacagag

SEQ ID NO: 2288546 - RNA, 19 nt, Artificial Sequence
  Description of Artificial Sequence: Synthetic oligonucleotide
  Sense strand starting at position 1263 of SEQ ID NO: 1884741
cuguuaauuugauaaagga

SEQ ID NO: 2288547 - RNA, 19 nt, Artificial Sequence
  Description of Artificial Sequence: Synthetic oligonucleotide
  Antisense strand to SEQ ID NO: 2288546
uccuuuaucaaauuaacag

SEQ ID NO: 2288548 - RNA, 19 nt, Artificial Sequence
  Description of Artificial Sequence: Synthetic oligonucleotide
  Sense strand starting at position 1276 of SEQ ID NO: 1884741
aaaggaaaggcgugucuuu

SEQ ID NO: 2288549 - RNA, 19 nt, Artificial Sequence
  Description of Artificial Sequence: Synthetic oligonucleotide
  Antisense strand to SEQ ID NO: 2288548
aaagacacgccuuuccuuu

SEQ ID NO: 2288550 - RNA, 19 nt, Artificial Sequence
  Description of Artificial Sequence: Synthetic oligonucleotide
  Sense strand starting at position 1281 of SEQ ID NO: 1884741
aaaggcgugucuuuagguu

SEQ ID NO: 2288551 - RNA, 19 nt, Artificial Sequence
  Description of Artificial Sequence: Synthetic oligonucleotide
  Antisense strand to SEQ ID NO: 2288550
aaccuaaagacacgccuuu

SEQ ID NO: 2288552 - RNA, 19 nt, Artificial Sequence
  Description of Artificial Sequence: Synthetic oligonucleotide
  Sense strand starting at position 1288 of SEQ ID NO: 1884741
ugucuuuagguuugcuuau

SEQ ID NO: 2288553 - RNA, 19 nt, Artificial Sequence
  Description of Artificial Sequence: Synthetic oligonucleotide
  Antisense strand to SEQ ID NO: 2288552
auaagcaaaccuaaagaca

SEQ ID NO: 2288554 - RNA, 19 nt, Artificial Sequence
  Description of Artificial Sequence: Synthetic oligonucleotide
  Sense strand starting at position 1289 of SEQ ID NO: 1884741
gucuuuagguuugcuuauu

SEQ ID NO: 2288555 - RNA, 19 nt, Artificial Sequence
  Description of Artificial Sequence: Synthetic oligonucleotide
  Antisense strand to SEQ ID NO: 2288554
aauaagcaaaccuaaagac

SEQ ID NO: 2288556 - RNA, 19 nt, Artificial Sequence
  Description of Artificial Sequence: Synthetic oligonucleotide
  Sense strand starting at position 1290 of SEQ ID NO: 1884741
ucuuuagguuugcuuauuu

SEQ ID NO: 2288557 - RNA, 19 nt, Artificial Sequence
  Description of Artificial Sequence: Synthetic oligonucleotide
  Antisense strand to SEQ ID NO: 2288556
aaauaagcaaaccuaaaga

SEQ ID NO: 2288558 - RNA, 19 nt, Artificial Sequence
  Description of Artificial Sequence: Synthetic oligonucleotide
  Sense strand starting at position 1334 of SEQ ID NO: 1884741
acauguuaugaaugccauu

SEQ ID NO: 2288559 - RNA, 19 nt, Artificial Sequence
  Description of Artificial Sequence: Synthetic oligonucleotide
  Antisense strand to SEQ ID NO: 2288558
aauggcauucauaacaugu

SEQ ID NO: 2288560 - RNA, 19 nt, Artificial Sequence
  Description of Artificial Sequence: Synthetic oligonucleotide
  Sense strand starting at position 1345 of SEQ ID NO: 1884741
augccauuguauuaacagu

SEQ ID NO: 2288561 - RNA, 19 nt, Artificial Sequence
  Description of Artificial Sequence: Synthetic oligonucleotide
  Antisense strand to SEQ ID NO: 2288560
acuguuaauacaauggcau

SEQ ID NO: 2288562 - RNA, 19 nt, Artificial Sequence
  Description of Artificial Sequence: Synthetic oligonucleotide
  Sense strand starting at position 1361 of SEQ ID NO: 1884741
aguacuucuguuuaauuga

SEQ ID NO: 2288563 - RNA, 19 nt, Artificial Sequence
  Description of Artificial Sequence: Synthetic oligonucleotide
  Antisense strand to SEQ ID NO: 2288562
ucaauuaaacagaaguacu

SEQ ID NO: 2288564 - RNA, 19 nt, Artificial Sequence
  Description of Artificial Sequence: Synthetic oligonucleotide
  Sense strand starting at position 1494 of SEQ ID NO: 1884741
auaaucuuguacccaggaa

SEQ ID NO: 2288565 - RNA, 19 nt, Artificial Sequence
  Description of Artificial Sequence: Synthetic oligonucleotide
  Antisense strand to SEQ ID NO: 2288564
uuccuggguacaagauuau

SEQ ID NO: 2288566 - RNA, 19 nt, Artificial Sequence
  Description of Artificial Sequence: Synthetic oligonucleotide
  Sense strand starting at position 1614 of SEQ ID NO: 1884741
gcuauuuccuguuacgaaa

SEQ ID NO: 2288567 - RNA, 19 nt, Artificial Sequence
  Description of Artificial Sequence: Synthetic oligonucleotide
  Antisense strand to SEQ ID NO: 2288566
uuucguaacaggaaauagc

SEQ ID NO: 2288568 - RNA, 19 nt, Artificial Sequence
  Description of Artificial Sequence: Synthetic oligonucleotide
  Sense strand starting at position 1617 of SEQ ID NO: 1884741
auuuccuguuacgaaauaa

SEQ ID NO: 2288569 - RNA, 19 nt, Artificial Sequence
  Description of Artificial Sequence: Synthetic oligonucleotide
  Antisense strand to SEQ ID NO: 2288568
uuauuucguaacaggaaau

SEQ ID NO: 2288570 - RNA, 19 nt, Artificial Sequence
  Description of Artificial Sequence: Synthetic oligonucleotide
  Sense strand starting at position 3686 of SEQ ID NO: 1884741
augagauagcaguaguauc

SEQ ID NO: 2288571 - RNA, 19 nt, Artificial Sequence
  Description of Artificial Sequence: Synthetic oligonucleotide
  Antisense strand to SEQ ID NO: 2288570
gauacuacugcuaucucau

SEQ ID NO: 2288572 - RNA, 19 nt, Artificial Sequence
  Description of Artificial Sequence: Synthetic oligonucleotide
  Sense strand starting at position 3741 of SEQ ID NO: 1884741
cuaaacugcucaguaaaug

SEQ ID NO: 2288573 - RNA, 19 nt, Artificial Sequence
  Description of Artificial Sequence: Synthetic oligonucleotide
  Antisense strand to SEQ ID NO: 2288572
cauuuacugagcaguuuag

SEQ ID NO: 2288574 - RNA, 19 nt, Artificial Sequence
  Description of Artificial Sequence: Synthetic oligonucleotide
  Sense strand starting at position 3749 of SEQ ID NO: 1884741
cucaguaaauguuaguaca

SEQ ID NO: 2288575 - RNA, 19 nt, Artificial Sequence
  Description of Artificial Sequence: Synthetic oligonucleotide
  Antisense strand to SEQ ID NO: 2288574
uguacuaacauuuacugag

SEQ ID NO: 2288576 - RNA, 19 nt, Artificial Sequence
  Description of Artificial Sequence: Synthetic oligonucleotide
  Sense strand starting at position 1991 of SEQ ID NO: 1884742
uucggcaguuucuuuagua

SEQ ID NO: 2288577 - RNA, 19 nt, Artificial Sequence
  Description of Artificial Sequence: Synthetic oligonucleotide
  Antisense strand to SEQ ID NO: 2288576
uacuaaagaaacugccgaa

SEQ ID NO: 2288578 - RNA, 19 nt, Artificial Sequence
  Description of Artificial Sequence: Synthetic oligonucleotide
  Sense strand starting at position 1992 of SEQ ID NO: 1884742
ucggcaguuucuuuaguau

SEQ ID NO: 2288579 - RNA, 19 nt, Artificial Sequence
  Description of Artificial Sequence: Synthetic oligonucleotide
  Antisense strand to SEQ ID NO: 2288578
auacuaaagaaacugccga

SEQ ID NO: 2288580 - RNA, 19 nt, Artificial Sequence
  Description of Artificial Sequence: Synthetic oligonucleotide
  Sense strand starting at position 2085 of SEQ ID NO: 1884742
guagaaggccuguagugau

SEQ ID NO: 2288581 - RNA, 19 nt, Artificial Sequence
  Description of Artificial Sequence: Synthetic oligonucleotide
  Antisense strand to SEQ ID NO: 2288580
aucacuacaggccuucuac

SEQ ID NO: 2288582 - RNA, 19 nt, Artificial Sequence
  Description of Artificial Sequence: Synthetic oligonucleotide
  Sense strand starting at position 2328 of SEQ ID NO: 1884742
ucagcucuccuuugucagu

SEQ ID NO: 2288583 - RNA, 19 nt, Artificial Sequence
  Description of Artificial Sequence: Synthetic oligonucleotide
  Antisense strand to SEQ ID NO: 2288582
acugacaaaggagagcuga

SEQ ID NO: 2288584 - RNA, 19 nt, Artificial Sequence
  Description of Artificial Sequence: Synthetic oligonucleotide
  Sense strand starting at position 2376 of SEQ ID NO: 1884742
ucuguauguggauguccaa

SEQ ID NO: 2288585 - RNA, 19 nt, Artificial Sequence
  Description of Artificial Sequence: Synthetic oligonucleotide
  Antisense strand to SEQ ID NO: 2288584
uuggacauccacauacaga

SEQ ID NO: 2288586 - RNA, 19 nt, Artificial Sequence
  Description of Artificial Sequence: Synthetic oligonucleotide
  Sense strand starting at position 2472 of SEQ ID NO: 1884742
uuuccuaaugcacggauau

SEQ ID NO: 2288587 - RNA, 19 nt, Artificial Sequence
  Description of Artificial Sequence: Synthetic oligonucleotide
  Antisense strand to SEQ ID NO: 2288586
auauccgugcauuaggaaa

SEQ ID NO: 2288588 - RNA, 19 nt, Artificial Sequence
  Description of Artificial Sequence: Synthetic oligonucleotide
  Sense strand starting at position 2473 of SEQ ID NO: 1884742
uuccuaaugcacggauaua

SEQ ID NO: 2288589 - RNA, 19 nt, Artificial Sequence
  Description of Artificial Sequence: Synthetic oligonucleotide
  Antisense strand to SEQ ID NO: 2288588
uauauccgugcauuaggaa

SEQ ID NO: 2288590 - RNA, 19 nt, Artificial Sequence
  Description of Artificial Sequence: Synthetic oligonucleotide
  Sense strand starting at position 2484 of SEQ ID NO: 1884742
cggauauauuguguuaagu

SEQ ID NO: 2288591 - RNA, 19 nt, Artificial Sequence
  Description of Artificial Sequence: Synthetic oligonucleotide
  Antisense strand to SEQ ID NO: 2288590
acuuaacacaauauauccg

SEQ ID NO: 2288592 - RNA, 19 nt, Artificial Sequence
  Description of Artificial Sequence: Synthetic oligonucleotide
  Sense strand starting at position 2909 of SEQ ID NO: 1884742
ugacuaaccaggugucuag

SEQ ID NO: 2288593 - RNA, 19 nt, Artificial Sequence
  Description of Artificial Sequence: Synthetic oligonucleotide
  Antisense strand to SEQ ID NO: 2288592
cuagacaccugguuaguca

SEQ ID NO: 2288594 - RNA, 19 nt, Artificial Sequence
  Description of Artificial Sequence: Synthetic oligonucleotide
  Sense strand starting at position 2912 of SEQ ID NO: 1884742
cuaaccaggugucuaguua

SEQ ID NO: 2288595 - RNA, 19 nt, Artificial Sequence
  Description of Artificial Sequence: Synthetic oligonucleotide
  Antisense strand to SEQ ID NO: 2288594
uaacuagacaccugguuag

SEQ ID NO: 2288596 - RNA, 19 nt, Artificial Sequence
  Description of Artificial Sequence: Synthetic oligonucleotide
  Sense strand starting at position 2913 of SEQ ID NO: 1884742
uaaccaggugucuaguuaa

SEQ ID NO: 2288597 - RNA, 19 nt, Artificial Sequence
  Description of Artificial Sequence: Synthetic oligonucleotide
  Antisense strand to SEQ ID NO: 2288596
uuaacuagacaccugguua

SEQ ID NO: 2288598 - RNA, 19 nt, Artificial Sequence
  Description of Artificial Sequence: Synthetic oligonucleotide
  Sense strand starting at position 2916 of SEQ ID NO: 1884742
ccaggugucuaguuaacau

SEQ ID NO: 2288599 - RNA, 19 nt, Artificial Sequence
  Description of Artificial Sequence: Synthetic oligonucleotide
  Antisense strand to SEQ ID NO: 2288598
auguuaacuagacaccugg

SEQ ID NO: 2288600 - RNA, 19 nt, Artificial Sequence
  Description of Artificial Sequence: Synthetic oligonucleotide
  Sense strand starting at position 3005 of SEQ ID NO: 1884742
accugaaaugucuguggaa

SEQ ID NO: 2288601 - RNA, 19 nt, Artificial Sequence
  Description of Artificial Sequence: Synthetic oligonucleotide
  Antisense strand to SEQ ID NO: 2288600
uuccacagacauuucaggu

SEQ ID NO: 2288602 - RNA, 19 nt, Artificial Sequence
  Description of Artificial Sequence: Synthetic oligonucleotide
  Sense strand starting at position 3006 of SEQ ID NO: 1884742
ccugaaaugucuguggaag

SEQ ID NO: 2288603 - RNA, 19 nt, Artificial Sequence
  Description of Artificial Sequence: Synthetic oligonucleotide
  Antisense strand to SEQ ID NO: 2288602
cuuccacagacauuucagg

SEQ ID NO: 2288604 - RNA, 19 nt, Artificial Sequence
  Description of Artificial Sequence: Synthetic oligonucleotide
  Sense strand starting at position 3007 of SEQ ID NO: 1884742
cugaaaugucuguggaagu

SEQ ID NO: 2288605 - RNA, 19 nt, Artificial Sequence
  Description of Artificial Sequence: Synthetic oligonucleotide
  Antisense strand to SEQ ID NO: 2288604
acuuccacagacauuucag

SEQ ID NO: 2288606 - RNA, 19 nt, Artificial Sequence
  Description of Artificial Sequence: Synthetic oligonucleotide
  Sense strand starting at position 3043 of SEQ ID NO: 1884742
augucaauuuccuuggugu

SEQ ID NO: 2288607 - RNA, 19 nt, Artificial Sequence
  Description of Artificial Sequence: Synthetic oligonucleotide
  Antisense strand to SEQ ID NO: 2288606
acaccaaggaaauugacau

SEQ ID NO: 2288608 - RNA, 19 nt, Artificial Sequence
  Description of Artificial Sequence: Synthetic oligonucleotide
  Sense strand starting at position 3045 of SEQ ID NO: 1884742
gucaauuuccuugguguau

SEQ ID NO: 2288609 - RNA, 19 nt, Artificial Sequence
  Description of Artificial Sequence: Synthetic oligonucleotide
  Antisense strand to SEQ ID NO: 2288608
auacaccaaggaaauugac

SEQ ID NO: 2288610 - RNA, 19 nt, Artificial Sequence
  Description of Artificial Sequence: Synthetic oligonucleotide
  Sense strand starting at position 3046 of SEQ ID NO: 1884742
ucaauuuccuugguguauu

SEQ ID NO: 2288611 - RNA, 19 nt, Artificial Sequence
  Description of Artificial Sequence: Synthetic oligonucleotide
  Antisense strand to SEQ ID NO: 2288610
aauacaccaaggaaauuga

SEQ ID NO: 2288612 - RNA, 19 nt, Artificial Sequence
  Description of Artificial Sequence: Synthetic oligonucleotide
  Sense strand starting at position 3056 of SEQ ID NO: 1884742
ugguguauuuagcaguaca

SEQ ID NO: 2288613 - RNA, 19 nt, Artificial Sequence
  Description of Artificial Sequence: Synthetic oligonucleotide
  Antisense strand to SEQ ID NO: 2288612
uguacugcuaaauacacca

SEQ ID NO: 2288614 - RNA, 19 nt, Artificial Sequence
  Description of Artificial Sequence: Synthetic oligonucleotide
  Sense strand starting at position 3114 of SEQ ID NO: 1884742
cgcaguuauucugugcauu

SEQ ID NO: 2288615 - RNA, 19 nt, Artificial Sequence
  Description of Artificial Sequence: Synthetic oligonucleotide
  Antisense strand to SEQ ID NO: 2288614
aaugcacagaauaacugcg

SEQ ID NO: 2288616 - RNA, 19 nt, Artificial Sequence
  Description of Artificial Sequence: Synthetic oligonucleotide
  Sense strand starting at position 3115 of SEQ ID NO: 1884742
gcaguuauucugugcauuc

SEQ ID NO: 2288617 - RNA, 19 nt, Artificial Sequence
  Description of Artificial Sequence: Synthetic oligonucleotide
  Antisense strand to SEQ ID NO: 2288616
gaaugcacagaauaacugc

SEQ ID NO: 2288618 - RNA, 19 nt, Artificial Sequence
  Description of Artificial Sequence: Synthetic oligonucleotide
  Sense strand starting at position 3117 of SEQ ID NO: 1884742
aguuauucugugcauucua

SEQ ID NO: 2288619 - RNA, 19 nt, Artificial Sequence
  Description of Artificial Sequence: Synthetic oligonucleotide
  Antisense strand to SEQ ID NO: 2288618
uagaaugcacagaauaacu

SEQ ID NO: 2288620 - RNA, 19 nt, Artificial Sequence
  Description of Artificial Sequence: Synthetic oligonucleotide
  Sense strand starting at position 3122 of SEQ ID NO: 1884742
uucugugcauucuagauga

SEQ ID NO: 2288621 - RNA, 19 nt, Artificial Sequence
  Description of Artificial Sequence: Synthetic oligonucleotide
  Antisense strand to SEQ ID NO: 2288620
ucaucuagaaugcacagaa

SEQ ID NO: 2288622 - RNA, 19 nt, Artificial Sequence
  Description of Artificial Sequence: Synthetic oligonucleotide
  Sense strand starting at position 3124 of SEQ ID NO: 1884742
cugugcauucuagaugaag

SEQ ID NO: 2288623 - RNA, 19 nt, Artificial Sequence
  Description of Artificial Sequence: Synthetic oligonucleotide
  Antisense strand to SEQ ID NO: 2288622
cuucaucuagaaugcacag

SEQ ID NO: 2288624 - RNA, 19 nt, Artificial Sequence
  Description of Artificial Sequence: Synthetic oligonucleotide
  Sense strand starting at position 3126 of SEQ ID NO: 1884742
gugcauucuagaugaagaa

SEQ ID NO: 2288625 - RNA, 19 nt, Artificial Sequence
  Description of Artificial Sequence: Synthetic oligonucleotide
  Antisense strand to SEQ ID NO: 2288624
uucuucaucuagaaugcac

SEQ ID NO: 2288626 - RNA, 19 nt, Artificial Sequence
  Description of Artificial Sequence: Synthetic oligonucleotide
  Sense strand starting at position 3243 of SEQ ID NO: 1884742
auguaaugguagcauaaga

SEQ ID NO: 2288627 - RNA, 19 nt, Artificial Sequence
  Description of Artificial Sequence: Synthetic oligonucleotide
  Antisense strand to SEQ ID NO: 2288626
ucuuaugcuaccauuacau

SEQ ID NO: 2288628 - RNA, 19 nt, Artificial Sequence
  Description of Artificial Sequence: Synthetic oligonucleotide
  Sense strand starting at position 3253 of SEQ ID NO: 1884742
agcauaagaucuuagauaa

SEQ ID NO: 2288629 - RNA, 19 nt, Artificial Sequence
  Description of Artificial Sequence: Synthetic oligonucleotide
  Antisense strand to SEQ ID NO: 2288628
uuaucuaagaucuuaugcu

SEQ ID NO: 2288630 - RNA, 19 nt, Artificial Sequence
  Description of Artificial Sequence: Synthetic oligonucleotide
  Sense strand starting at position 3347 of SEQ ID NO: 1884742
auuagcaucuagcaagaaa

SEQ ID NO: 2288631 - RNA, 19 nt, Artificial Sequence
  Description of Artificial Sequence: Synthetic oligonucleotide
  Antisense strand to SEQ ID NO: 2288630
uuucuugcuagaugcuaau

SEQ ID NO: 2288632 - RNA, 19 nt, Artificial Sequence
  Description of Artificial Sequence: Synthetic oligonucleotide
  Sense strand starting at position 3412 of SEQ ID NO: 1884742
ugaaaugauuuccagcugu

SEQ ID NO: 2288633 - RNA, 19 nt, Artificial Sequence
  Description of Artificial Sequence: Synthetic oligonucleotide
  Antisense strand to SEQ ID NO: 2288632
acagcuggaaaucauuuca

SEQ ID NO: 2288634 - RNA, 19 nt, Artificial Sequence
  Description of Artificial Sequence: Synthetic oligonucleotide
  Sense strand starting at position 3425 of SEQ ID NO: 1884742
agcuguauuucuugugauu

SEQ ID NO: 2288635 - RNA, 19 nt, Artificial Sequence
  Description of Artificial Sequence: Synthetic oligonucleotide
  Antisense strand to SEQ ID NO: 2288634
aaucacaagaaauacagcu

SEQ ID NO: 2288636 - RNA, 19 nt, Artificial Sequence
  Description of Artificial Sequence: Synthetic oligonucleotide
  Sense strand starting at position 3427 of SEQ ID NO: 1884742
cuguauuucuugugauuua

SEQ ID NO: 2288637 - RNA, 19 nt, Artificial Sequence
  Description of Artificial Sequence: Synthetic oligonucleotide
  Antisense strand to SEQ ID NO: 2288636
uaaaucacaagaaauacag

SEQ ID NO: 2288638 - RNA, 19 nt, Artificial Sequence
  Description of Artificial Sequence: Synthetic oligonucleotide
  Sense strand starting at position 3439 of SEQ ID NO: 1884742
ugauuuauguaagcgcaaa

SEQ ID NO: 2288639 - RNA, 19 nt, Artificial Sequence
  Description of Artificial Sequence: Synthetic oligonucleotide
  Antisense strand to SEQ ID NO: 2288638
uuugcgcuuacauaaauca

SEQ ID NO: 2288640 - RNA, 19 nt, Artificial Sequence
  Description of Artificial Sequence: Synthetic oligonucleotide
  Sense strand starting at position 3500 of SEQ ID NO: 1884742
guguuucccuguuucuuaa

SEQ ID NO: 2288641 - RNA, 19 nt, Artificial Sequence
  Description of Artificial Sequence: Synthetic oligonucleotide
  Antisense strand to SEQ ID NO: 2288640
uuaagaaacagggaaacac

SEQ ID NO: 2288642 - RNA, 19 nt, Artificial Sequence
  Description of Artificial Sequence: Synthetic oligonucleotide
  Sense strand starting at position 3544 of SEQ ID NO: 1884742
uaagccauuuggugggaua

SEQ ID NO: 2288643 - RNA, 19 nt, Artificial Sequence
  Description of Artificial Sequence: Synthetic oligonucleotide
  Antisense strand to SEQ ID NO: 2288642
uaucccaccaaauggcuua

SEQ ID NO: 2288644 - RNA, 19 nt, Artificial Sequence
  Description of Artificial Sequence: Synthetic oligonucleotide
  Sense strand starting at position 3716 of SEQ ID NO: 1884742
ggcuucuuugaccaacaau

SEQ ID NO: 2288645 - RNA, 19 nt, Artificial Sequence
  Description of Artificial Sequence: Synthetic oligonucleotide
  Antisense strand to SEQ ID NO: 2288644
auuguuggucaaagaagcc

SEQ ID NO: 2288646 - RNA, 19 nt, Artificial Sequence
  Description of Artificial Sequence: Synthetic oligonucleotide
  Sense strand starting at position 3815 of SEQ ID NO: 1884742
agugguuugcuccuguagu

SEQ ID NO: 2288647 - RNA, 19 nt, Artificial Sequence
  Description of Artificial Sequence: Synthetic oligonucleotide
  Antisense strand to SEQ ID NO: 2288646
acuacaggagcaaaccacu

SEQ ID NO: 2288648 - RNA, 19 nt, Artificial Sequence
  Description of Artificial Sequence: Synthetic oligonucleotide
  Sense strand starting at position 3883 of SEQ ID NO: 1884742
uugagucuaacuugggcaa

SEQ ID NO: 2288649 - RNA, 19 nt, Artificial Sequence
  Description of Artificial Sequence: Synthetic oligonucleotide
  Antisense strand to SEQ ID NO: 2288648
uugcccaaguuagacucaa

SEQ ID NO: 2288650 - RNA, 19 nt, Artificial Sequence
  Description of Artificial Sequence: Synthetic oligonucleotide
  Sense strand starting at position 3885 of SEQ ID NO: 1884742
gagucuaacuugggcaaca

SEQ ID NO: 2288651 - RNA, 19 nt, Artificial Sequence
  Description of Artificial Sequence: Synthetic oligonucleotide
  Antisense strand to SEQ ID NO: 2288650
uguugcccaaguuagacuc

SEQ ID NO: 2288652 - RNA, 19 nt, Artificial Sequence
  Description of Artificial Sequence: Synthetic oligonucleotide
  Sense strand starting at position 3886 of SEQ ID NO: 1884742
agucuaacuugggcaacau

SEQ ID NO: 2288653 - RNA, 19 nt, Artificial Sequence
  Description of Artificial Sequence: Synthetic oligonucleotide
  Antisense strand to SEQ ID NO: 2288652
auguugcccaaguuagacu

SEQ ID NO: 2288654 - RNA, 19 nt, Artificial Sequence
  Description of Artificial Sequence: Synthetic oligonucleotide
  Sense strand starting at position 3887 of SEQ ID NO: 1884742
gucuaacuugggcaacaua

SEQ ID NO: 2288655 - RNA, 19 nt, Artificial Sequence
  Description of Artificial Sequence: Synthetic oligonucleotide
  Antisense strand to SEQ ID NO: 2288654
uauguugcccaaguuagac

SEQ ID NO: 2288656 - RNA, 19 nt, Artificial Sequence
  Description of Artificial Sequence: Synthetic oligonucleotide
  Sense strand starting at position 1430 of SEQ ID NO: 1884743
ccguuuccgcccucuagua

SEQ ID NO: 2288657 - RNA, 19 nt, Artificial Sequence
  Description of Artificial Sequence: Synthetic oligonucleotide
  Antisense strand to SEQ ID NO: 2288656
uacuagagggcggaaacgg

SEQ ID NO: 2288658 - RNA, 19 nt, Artificial Sequence
  Description of Artificial Sequence: Synthetic oligonucleotide
  Sense strand starting at position 2265 of SEQ ID NO: 1884743
cccaacccuuuccgugaaa

SEQ ID NO: 2288659 - RNA, 19 nt, Artificial Sequence
  Description of Artificial Sequence: Synthetic oligonucleotide
  Antisense strand to SEQ ID NO: 2288658
uuucacggaaaggguuggg

SEQ ID NO: 2288660 - RNA, 19 nt, Artificial Sequence
  Description of Artificial Sequence: Synthetic oligonucleotide
  Sense strand starting at position 2379 of SEQ ID NO: 1884743
acuacuaucuugggaggga

SEQ ID NO: 2288661 - RNA, 19 nt, Artificial Sequence
  Description of Artificial Sequence: Synthetic oligonucleotide
  Antisense strand to SEQ ID NO: 2288660
ucccucccaagauaguagu

SEQ ID NO: 2288662 - RNA, 19 nt, Artificial Sequence
  Description of Artificial Sequence: Synthetic oligonucleotide
  Sense strand starting at position 2561 of SEQ ID NO: 1884743
ggguugugucugugaccgu

SEQ ID NO: 2288663 - RNA, 19 nt, Artificial Sequence
  Description of Artificial Sequence: Synthetic oligonucleotide
  Antisense strand to SEQ ID NO: 2288662
acggucacagacacaaccc

SEQ ID NO: 2288664 - RNA, 19 nt, Artificial Sequence
  Description of Artificial Sequence: Synthetic oligonucleotide
  Sense strand starting at position 2799 of SEQ ID NO: 1884743
gggugauagggcggacuua

SEQ ID NO: 2288665 - RNA, 19 nt, Artificial Sequence
  Description of Artificial Sequence: Synthetic oligonucleotide
  Antisense strand to SEQ ID NO: 2288664
uaaguccgcccuaucaccc

SEQ ID NO: 2288666 - RNA, 19 nt, Artificial Sequence
  Description of Artificial Sequence: Synthetic oligonucleotide
  Sense strand starting at position 2859 of SEQ ID NO: 1884743
gcugucugugucagugguu

SEQ ID NO: 2288667 - RNA, 19 nt, Artificial Sequence
  Description of Artificial Sequence: Synthetic oligonucleotide
  Antisense strand to SEQ ID NO: 2288666
aaccacugacacagacagc

SEQ ID NO: 2288668 - RNA, 19 nt, Artificial Sequence
  Description of Artificial Sequence: Synthetic oligonucleotide
  Sense strand starting at position 2860 of SEQ ID NO: 1884743
cugucugugucagugguuu

SEQ ID NO: 2288669 - RNA, 19 nt, Artificial Sequence
  Description of Artificial Sequence: Synthetic oligonucleotide
  Antisense strand to SEQ ID NO: 2288668
aaaccacugacacagacag

SEQ ID NO: 2288670 - RNA, 19 nt, Artificial Sequence
  Description of Artificial Sequence: Synthetic oligonucleotide
  Sense strand starting at position 2919 of SEQ ID NO: 1884743
ugcaaaggaccagguaauu

SEQ ID NO: 2288671 - RNA, 19 nt, Artificial Sequence
  Description of Artificial Sequence: Synthetic oligonucleotide
  Antisense strand to SEQ ID NO: 2288670
aauuaccugguccuuugca

SEQ ID NO: 2288672 - RNA, 19 nt, Artificial Sequence
  Description of Artificial Sequence: Synthetic oligonucleotide
  Sense strand starting at position 2987 of SEQ ID NO: 1884743
uggaggcaguggugugaau

SEQ ID NO: 2288673 - RNA, 19 nt, Artificial Sequence
  Description of Artificial Sequence: Synthetic oligonucleotide
  Antisense strand to SEQ ID NO: 2288672
auucacaccacugccucca

SEQ ID NO: 2288674 - RNA, 19 nt, Artificial Sequence
  Description of Artificial Sequence: Synthetic oligonucleotide
  Sense strand starting at position 2989 of SEQ ID NO: 1884743
gaggcaguggugugaaucu

SEQ ID NO: 2288675 - RNA, 19 nt, Artificial Sequence
  Description of Artificial Sequence: Synthetic oligonucleotide
  Antisense strand to SEQ ID NO: 2288674
agauucacaccacugccuc

SEQ ID NO: 2288676 - RNA, 19 nt, Artificial Sequence
  Description of Artificial Sequence: Synthetic oligonucleotide
  Sense strand starting at position 3058 of SEQ ID NO: 1884743
uggucuguucuuggaggca

SEQ ID NO: 2288677 - RNA, 19 nt, Artificial Sequence
  Description of Artificial Sequence: Synthetic oligonucleotide
  Antisense strand to SEQ ID NO: 2288676
ugccuccaagaacagacca

SEQ ID NO: 2288678 - RNA, 19 nt, Artificial Sequence
  Description of Artificial Sequence: Synthetic oligonucleotide
  Sense strand starting at position 3081 of SEQ ID NO: 1884743
agggcauggccuuggucaa

SEQ ID NO: 2288679 - RNA, 19 nt, Artificial Sequence
  Description of Artificial Sequence: Synthetic oligonucleotide
  Antisense strand to SEQ ID NO: 2288678
uugaccaaggccaugcccu

SEQ ID NO: 2288680 - RNA, 19 nt, Artificial Sequence
  Description of Artificial Sequence: Synthetic oligonucleotide
  Sense strand starting at position 3183 of SEQ ID NO: 1884743
gugguuccaucauguacaa

SEQ ID NO: 2288681 - RNA, 19 nt, Artificial Sequence
  Description of Artificial Sequence: Synthetic oligonucleotide
  Antisense strand to SEQ ID NO: 2288680
uuguacaugauggaaccac

SEQ ID NO: 2288682 - RNA, 19 nt, Artificial Sequence
  Description of Artificial Sequence: Synthetic oligonucleotide
  Sense strand starting at position 3270 of SEQ ID NO: 1884743
ggcacugacucuuaagaug

SEQ ID NO: 2288683 - RNA, 19 nt, Artificial Sequence
  Description of Artificial Sequence: Synthetic oligonucleotide
  Antisense strand to SEQ ID NO: 2288682
caucuuaagagucagugcc

SEQ ID NO: 2288684 - RNA, 19 nt, Artificial Sequence
  Description of Artificial Sequence: Synthetic oligonucleotide
  Sense strand starting at position 3289 of SEQ ID NO: 1884743
augccaguccugggagagu

SEQ ID NO: 2288685 - RNA, 19 nt, Artificial Sequence
  Description of Artificial Sequence: Synthetic oligonucleotide
  Antisense strand to SEQ ID NO: 2288684
acucucccaggacuggcau

SEQ ID NO: 2288686 - RNA, 19 nt, Artificial Sequence
  Description of Artificial Sequence: Synthetic oligonucleotide
  Sense strand starting at position 3359 of SEQ ID NO: 1884743
augggacagcuuuguuuaa

SEQ ID NO: 2288687 - RNA, 19 nt, Artificial Sequence
  Description of Artificial Sequence: Synthetic oligonucleotide
  Antisense strand to SEQ ID NO: 2288686
uuaaacaaagcugucccau

SEQ ID NO: 2288688 - RNA, 19 nt, Artificial Sequence
  Description of Artificial Sequence: Synthetic oligonucleotide
  Sense strand starting at position 3361 of SEQ ID NO: 1884743
gggacagcuuuguuuaaga

SEQ ID NO: 2288689 - RNA, 19 nt, Artificial Sequence
  Description of Artificial Sequence: Synthetic oligonucleotide
  Antisense strand to SEQ ID NO: 2288688
ucuuaaacaaagcuguccc

SEQ ID NO: 2288690 - RNA, 19 nt, Artificial Sequence
  Description of Artificial Sequence: Synthetic oligonucleotide
  Sense strand starting at position 3372 of SEQ ID NO: 1884743
guuuaagagcaggaacuuu

SEQ ID NO: 2288691 - RNA, 19 nt, Artificial Sequence
  Description of Artificial Sequence: Synthetic oligonucleotide
  Antisense strand to SEQ ID NO: 2288690
aaaguuccugcucuuaaac

SEQ ID NO: 2288692 - RNA, 19 nt, Artificial Sequence
  Description of Artificial Sequence: Synthetic oligonucleotide
  Sense strand starting at position 3442 of SEQ ID NO: 1884743
cuugguggcaucuguuuau

SEQ ID NO: 2288693 - RNA, 19 nt, Artificial Sequence
  Description of Artificial Sequence: Synthetic oligonucleotide
  Antisense strand to SEQ ID NO: 2288692
auaaacagaugccaccaag

SEQ ID NO: 2288694 - RNA, 19 nt, Artificial Sequence
  Description of Artificial Sequence: Synthetic oligonucleotide
  Sense strand starting at position 3448 of SEQ ID NO: 1884743
ggcaucuguuuaucuguau

SEQ ID NO: 2288695 - RNA, 19 nt, Artificial Sequence
  Description of Artificial Sequence: Synthetic oligonucleotide
  Antisense strand to SEQ ID NO: 2288694
auacagauaaacagaugcc

SEQ ID NO: 2288696 - RNA, 19 nt, Artificial Sequence
  Description of Artificial Sequence: Synthetic oligonucleotide
  Sense strand starting at position 3455 of SEQ ID NO: 1884743
guuuaucuguauucugaac

SEQ ID NO: 2288697 - RNA, 19 nt, Artificial Sequence
  Description of Artificial Sequence: Synthetic oligonucleotide
  Antisense strand to SEQ ID NO: 2288696
guucagaauacagauaaac

SEQ ID NO: 2288698 - RNA, 19 nt, Artificial Sequence
  Description of Artificial Sequence: Synthetic oligonucleotide
  Sense strand starting at position 3461 of SEQ ID NO: 1884743
cuguauucugaacaguauc

SEQ ID NO: 2288699 - RNA, 19 nt, Artificial Sequence
  Description of Artificial Sequence: Synthetic oligonucleotide
  Antisense strand to SEQ ID NO: 2288698
gauacuguucagaauacag

SEQ ID NO: 2288700 - RNA, 19 nt, Artificial Sequence
  Description of Artificial Sequence: Synthetic oligonucleotide
  Sense strand starting at position 3630 of SEQ ID NO: 1884743
gagaccuccugggaaagau

SEQ ID NO: 2288701 - RNA, 19 nt, Artificial Sequence
  Description of Artificial Sequence: Synthetic oligonucleotide
  Antisense strand to SEQ ID NO: 2288700
aucuuucccaggaggucuc

SEQ ID NO: 2288702 - RNA, 19 nt, Artificial Sequence
  Description of Artificial Sequence: Synthetic oligonucleotide
  Sense strand starting at position 3833 of SEQ ID NO: 1884743
agcugaaaguguuuacuca

SEQ ID NO: 2288703 - RNA, 19 nt, Artificial Sequence
  Description of Artificial Sequence: Synthetic oligonucleotide
  Antisense strand to SEQ ID NO: 2288702
ugaguaaacacuuucagcu

SEQ ID NO: 2288704 - RNA, 19 nt, Artificial Sequence
  Description of Artificial Sequence: Synthetic oligonucleotide
  Sense strand starting at position 3834 of SEQ ID NO: 1884743
gcugaaaguguuuacucag

SEQ ID NO: 2288705 - RNA, 19 nt, Artificial Sequence
  Description of Artificial Sequence: Synthetic oligonucleotide
  Antisense strand to SEQ ID NO: 2288704
cugaguaaacacuuucagc

SEQ ID NO: 2288706 - RNA, 19 nt, Artificial Sequence
  Description of Artificial Sequence: Synthetic oligonucleotide
  Sense strand starting at position 3837 of SEQ ID NO: 1884743
gaaaguguuuacucaggua

SEQ ID NO: 2288707 - RNA, 19 nt, Artificial Sequence
  Description of Artificial Sequence: Synthetic oligonucleotide
  Antisense strand to SEQ ID NO: 2288706
uaccugaguaaacacuuuc

SEQ ID NO: 2288708 - RNA, 19 nt, Artificial Sequence
  Description of Artificial Sequence: Synthetic oligonucleotide
  Sense strand starting at position 3840 of SEQ ID NO: 1884743
aguguuuacucagguagag

SEQ ID NO: 2288709 - RNA, 19 nt, Artificial Sequence
  Description of Artificial Sequence: Synthetic oligonucleotide
  Antisense strand to SEQ ID NO: 2288708
cucuaccugaguaaacacu

SEQ ID NO: 2288710 - RNA, 19 nt, Artificial Sequence
  Description of Artificial Sequence: Synthetic oligonucleotide
  Sense strand starting at position 3907 of SEQ ID NO: 1884743
agccauauguuguuaucua

SEQ ID NO: 2288711 - RNA, 19 nt, Artificial Sequence
  Description of Artificial Sequence: Synthetic oligonucleotide
  Antisense strand to SEQ ID NO: 2288710
uagauaacaacauauggcu

SEQ ID NO: 2288712 - RNA, 19 nt, Artificial Sequence
  Description of Artificial Sequence: Synthetic oligonucleotide
  Sense strand starting at position 3908 of SEQ ID NO: 1884743
gccauauguuguuaucuac

SEQ ID NO: 2288713 - RNA, 19 nt, Artificial Sequence
  Description of Artificial Sequence: Synthetic oligonucleotide
  Antisense strand to SEQ ID NO: 2288712
guagauaacaacauauggc

SEQ ID NO: 2288714 - RNA, 19 nt, Artificial Sequence
  Description of Artificial Sequence: Synthetic oligonucleotide
  Sense strand starting at position 3911 of SEQ ID NO: 1884743
auauguuguuaucuaccuu

SEQ ID NO: 2288715 - RNA, 19 nt, Artificial Sequence
  Description of Artificial Sequence: Synthetic oligonucleotide
  Antisense strand to SEQ ID NO: 2288714
aagguagauaacaacauau

SEQ ID NO: 2288716 - RNA, 19 nt, Artificial Sequence
  Description of Artificial Sequence: Synthetic oligonucleotide
  Sense strand starting at position 3917 of SEQ ID NO: 1884743
uguuaucuaccuugaggag

SEQ ID NO: 2288717 - RNA, 19 nt, Artificial Sequence
  Description of Artificial Sequence: Synthetic oligonucleotide
  Antisense strand to SEQ ID NO: 2288716
cuccucaagguagauaaca

SEQ ID NO: 2288718 - RNA, 19 nt, Artificial Sequence
  Description of Artificial Sequence: Synthetic oligonucleotide
  Sense strand starting at position 3918 of SEQ ID NO: 1884743
guuaucuaccuugaggagu

SEQ ID NO: 2288719 - RNA, 19 nt, Artificial Sequence
  Description of Artificial Sequence: Synthetic oligonucleotide
  Antisense strand to SEQ ID NO: 2288718
acuccucaagguagauaac

SEQ ID NO: 2288720 - RNA, 19 nt, Artificial Sequence
  Description of Artificial Sequence: Synthetic oligonucleotide
  Sense strand starting at position 3920 of SEQ ID NO: 1884743
uaucuaccuugaggaguua

SEQ ID NO: 2288721 - RNA, 19 nt, Artificial Sequence
  Description of Artificial Sequence: Synthetic oligonucleotide
  Antisense strand to SEQ ID NO: 2288720
uaacuccucaagguagaua

SEQ ID NO: 2288722 - RNA, 19 nt, Artificial Sequence
  Description of Artificial Sequence: Synthetic oligonucleotide
  Sense strand starting at position 3949 of SEQ ID NO: 1884743
ccagcaucuuuggguagaa

SEQ ID NO: 2288723 - RNA, 19 nt, Artificial Sequence
  Description of Artificial Sequence: Synthetic oligonucleotide
  Antisense strand to SEQ ID NO: 2288722
uucuacccaaagaugcugg

SEQ ID NO: 2288724 - RNA, 19 nt, Artificial Sequence
  Description of Artificial Sequence: Synthetic oligonucleotide
  Sense strand starting at position 3950 of SEQ ID NO: 1884743
cagcaucuuuggguagaau

SEQ ID NO: 2288725 - RNA, 19 nt, Artificial Sequence
  Description of Artificial Sequence: Synthetic oligonucleotide
  Antisense strand to SEQ ID NO: 2288724
auucuacccaaagaugcug

SEQ ID NO: 2288726 - RNA, 19 nt, Artificial Sequence
  Description of Artificial Sequence: Synthetic oligonucleotide
  Sense strand starting at position 3951 of SEQ ID NO: 1884743
agcaucuuuggguagaauu

SEQ ID NO: 2288727 - RNA, 19 nt, Artificial Sequence
  Description of Artificial Sequence: Synthetic oligonucleotide
  Antisense strand to SEQ ID NO: 2288726
aauucuacccaaagaugcu

SEQ ID NO: 2288728 - RNA, 19 nt, Artificial Sequence
  Description of Artificial Sequence: Synthetic oligonucleotide
  Sense strand starting at position 3959 of SEQ ID NO: 1884743
uggguagaauugcuucuga

SEQ ID NO: 2288729 - RNA, 19 nt, Artificial Sequence
  Description of Artificial Sequence: Synthetic oligonucleotide
  Antisense strand to SEQ ID NO: 2288728
ucagaagcaauucuaccca

SEQ ID NO: 2288730 - RNA, 19 nt, Artificial Sequence
  Description of Artificial Sequence: Synthetic oligonucleotide
  Sense strand starting at position 110 of SEQ ID NO: 1884744
uuucuaugcgggcaaauaa

SEQ ID NO: 2288731 - RNA, 19 nt, Artificial Sequence
  Description of Artificial Sequence: Synthetic oligonucleotide
  Antisense strand to SEQ ID NO: 2288730
uuauuugcccgcauagaaa

SEQ ID NO: 2288732 - RNA, 19 nt, Artificial Sequence
  Description of Artificial Sequence: Synthetic oligonucleotide
  Sense strand starting at position 258 of SEQ ID NO: 1884744
ccauguaucuguuugauuu

SEQ ID NO: 2288733 - RNA, 19 nt, Artificial Sequence
  Description of Artificial Sequence: Synthetic oligonucleotide
  Antisense strand to SEQ ID NO: 2288732
aaaucaaacagauacaugg

SEQ ID NO: 2288734 - RNA, 19 nt, Artificial Sequence
  Description of Artificial Sequence: Synthetic oligonucleotide
  Sense strand starting at position 433 of SEQ ID NO: 1884744
acaguuagacccugaucac

SEQ ID NO: 2288735 - RNA, 19 nt, Artificial Sequence
  Description of Artificial Sequence: Synthetic oligonucleotide
  Antisense strand to SEQ ID NO: 2288734
gugaucagggucuaacugu

SEQ ID NO: 2288736 - RNA, 19 nt, Artificial Sequence
  Description of Artificial Sequence: Synthetic oligonucleotide
  Sense strand starting at position 496 of SEQ ID NO: 1884744
accugagauguuuaccuuu

SEQ ID NO: 2288737 - RNA, 19 nt, Artificial Sequence
  Description of Artificial Sequence: Synthetic oligonucleotide
  Antisense strand to SEQ ID NO: 2288736
aaagguaaacaucucaggu

SEQ ID NO: 2288738 - RNA, 19 nt, Artificial Sequence
  Description of Artificial Sequence: Synthetic oligonucleotide
  Sense strand starting at position 667 of SEQ ID NO: 1884744
gugcuauccaucugggauc

SEQ ID NO: 2288739 - RNA, 19 nt, Artificial Sequence
  Description of Artificial Sequence: Synthetic oligonucleotide
  Antisense strand to SEQ ID NO: 2288738
gaucccagauggauagcac

SEQ ID NO: 2288740 - RNA, 19 nt, Artificial Sequence
  Description of Artificial Sequence: Synthetic oligonucleotide
  Sense strand starting at position 789 of SEQ ID NO: 1884744
gugacuauaccucaaagua

SEQ ID NO: 2288741 - RNA, 19 nt, Artificial Sequence
  Description of Artificial Sequence: Synthetic oligonucleotide
  Antisense strand to SEQ ID NO: 2288740
uacuuugagguauagucac

SEQ ID NO: 2288742 - RNA, 19 nt, Artificial Sequence
  Description of Artificial Sequence: Synthetic oligonucleotide
  Sense strand starting at position 814 of SEQ ID NO: 1884744
acugguugcaaagaguaaa

SEQ ID NO: 2288743 - RNA, 19 nt, Artificial Sequence
  Description of Artificial Sequence: Synthetic oligonucleotide
  Antisense strand to SEQ ID NO: 2288742
uuuacucuuugcaaccagu

SEQ ID NO: 2288744 - RNA, 19 nt, Artificial Sequence
  Description of Artificial Sequence: Synthetic oligonucleotide
  Sense strand starting at position 1196 of SEQ ID NO: 1884744
gccagagcucgguucuugu

SEQ ID NO: 2288745 - RNA, 19 nt, Artificial Sequence
  Description of Artificial Sequence: Synthetic oligonucleotide
  Antisense strand to SEQ ID NO: 2288744
acaagaaccgagcucuggc

SEQ ID NO: 2288746 - RNA, 19 nt, Artificial Sequence
  Description of Artificial Sequence: Synthetic oligonucleotide
  Sense strand starting at position 1395 of SEQ ID NO: 1884744
ggacccuauugacuugaua

SEQ ID NO: 2288747 - RNA, 19 nt, Artificial Sequence
  Description of Artificial Sequence: Synthetic oligonucleotide
  Antisense strand to SEQ ID NO: 2288746
uaucaagucaauagggucc

SEQ ID NO: 2288748 - RNA, 19 nt, Artificial Sequence
  Description of Artificial Sequence: Synthetic oligonucleotide
  Sense strand starting at position 1428 of SEQ ID NO: 1884744
gagacagucucgguuccau

SEQ ID NO: 2288749 - RNA, 19 nt, Artificial Sequence
  Description of Artificial Sequence: Synthetic oligonucleotide
  Antisense strand to SEQ ID NO: 2288748
auggaaccgagacugucuc

SEQ ID NO: 2288750 - RNA, 19 nt, Artificial Sequence
  Description of Artificial Sequence: Synthetic oligonucleotide
  Sense strand starting at position 1467 of SEQ ID NO: 1884744
gggaucucaugauugaagu

SEQ ID NO: 2288751 - RNA, 19 nt, Artificial Sequence
  Description of Artificial Sequence: Synthetic oligonucleotide
  Antisense strand to SEQ ID NO: 2288750
acuucaaucaugagauccc

SEQ ID NO: 2288752 - RNA, 19 nt, Artificial Sequence
  Description of Artificial Sequence: Synthetic oligonucleotide
  Sense strand starting at position 1468 of SEQ ID NO: 1884744
ggaucucaugauugaagug

SEQ ID NO: 2288753 - RNA, 19 nt, Artificial Sequence
  Description of Artificial Sequence: Synthetic oligonucleotide
  Antisense strand to SEQ ID NO: 2288752
cacuucaaucaugagaucc

SEQ ID NO: 2288754 - RNA, 19 nt, Artificial Sequence
  Description of Artificial Sequence: Synthetic oligonucleotide
  Sense strand starting at position 1696 of SEQ ID NO: 1884744
gcugucuugguguuuagca

SEQ ID NO: 2288755 - RNA, 19 nt, Artificial Sequence
  Description of Artificial Sequence: Synthetic oligonucleotide
  Antisense strand to SEQ ID NO: 2288754
ugcuaaacaccaagacagc

SEQ ID NO: 2288756 - RNA, 19 nt, Artificial Sequence
  Description of Artificial Sequence: Synthetic oligonucleotide
  Sense strand starting at position 2342 of SEQ ID NO: 1884744
acggaucuaccuuauuagu

SEQ ID NO: 2288757 - RNA, 19 nt, Artificial Sequence
  Description of Artificial Sequence: Synthetic oligonucleotide
  Antisense strand to SEQ ID NO: 2288756
acuaauaagguagauccgu

SEQ ID NO: 2288758 - RNA, 19 nt, Artificial Sequence
  Description of Artificial Sequence: Synthetic oligonucleotide
  Sense strand starting at position 2378 of SEQ ID NO: 1884744
aagugcuguccauagcaca

SEQ ID NO: 2288759 - RNA, 19 nt, Artificial Sequence
  Description of Artificial Sequence: Synthetic oligonucleotide
  Antisense strand to SEQ ID NO: 2288758
ugugcuauggacagcacuu

SEQ ID NO: 2288760 - RNA, 19 nt, Artificial Sequence
  Description of Artificial Sequence: Synthetic oligonucleotide
  Sense strand starting at position 3025 of SEQ ID NO: 1884744
auguaauucugcuugacug

SEQ ID NO: 2288761 - RNA, 19 nt, Artificial Sequence
  Description of Artificial Sequence: Synthetic oligonucleotide
  Antisense strand to SEQ ID NO: 2288760
cagucaagcagaauuacau

SEQ ID NO: 2288762 - RNA, 19 nt, Artificial Sequence
  Description of Artificial Sequence: Synthetic oligonucleotide
  Sense strand starting at position 3027 of SEQ ID NO: 1884744
guaauucugcuugacugca

SEQ ID NO: 2288763 - RNA, 19 nt, Artificial Sequence
  Description of Artificial Sequence: Synthetic oligonucleotide
  Antisense strand to SEQ ID NO: 2288762
ugcagucaagcagaauuac

SEQ ID NO: 2288764 - RNA, 19 nt, Artificial Sequence
  Description of Artificial Sequence: Synthetic oligonucleotide
  Sense strand starting at position 3052 of SEQ ID NO: 1884744
gccuauuccuucuuggaca

SEQ ID NO: 2288765 - RNA, 19 nt, Artificial Sequence
  Description of Artificial Sequence: Synthetic oligonucleotide
  Antisense strand to SEQ ID NO: 2288764
uguccaagaaggaauaggc

SEQ ID NO: 2288766 - RNA, 19 nt, Artificial Sequence
  Description of Artificial Sequence: Synthetic oligonucleotide
  Sense strand starting at position 3065 of SEQ ID NO: 1884744
uggacaauguuucccagaa

SEQ ID NO: 2288767 - RNA, 19 nt, Artificial Sequence
  Description of Artificial Sequence: Synthetic oligonucleotide
  Antisense strand to SEQ ID NO: 2288766
uucugggaaacauugucca

SEQ ID NO: 2288768 - RNA, 19 nt, Artificial Sequence
  Description of Artificial Sequence: Synthetic oligonucleotide
  Sense strand starting at position 3066 of SEQ ID NO: 1884744
ggacaauguuucccagaaa

SEQ ID NO: 2288769 - RNA, 19 nt, Artificial Sequence
  Description of Artificial Sequence: Synthetic oligonucleotide
  Antisense strand to SEQ ID NO: 2288768
uuucugggaaacauugucc

SEQ ID NO: 2288770 - RNA, 19 nt, Artificial Sequence
  Description of Artificial Sequence: Synthetic oligonucleotide
  Sense strand starting at position 3100 of SEQ ID NO: 1884744
acuuguaauuaucuuggca

SEQ ID NO: 2288771 - RNA, 19 nt, Artificial Sequence
  Description of Artificial Sequence: Synthetic oligonucleotide
  Antisense strand to SEQ ID NO: 2288770
ugccaagauaauuacaagu

SEQ ID NO: 2288772 - RNA, 19 nt, Artificial Sequence
  Description of Artificial Sequence: Synthetic oligonucleotide
  Sense strand starting at position 3237 of SEQ ID NO: 1884744
aggaaauaaucuuugucua

SEQ ID NO: 2288773 - RNA, 19 nt, Artificial Sequence
  Description of Artificial Sequence: Synthetic oligonucleotide
  Antisense strand to SEQ ID NO: 2288772
uagacaaagauuauuuccu

SEQ ID NO: 2288774 - RNA, 19 nt, Artificial Sequence
  Description of Artificial Sequence: Synthetic oligonucleotide
  Sense strand starting at position 3238 of SEQ ID NO: 1884744
ggaaauaaucuuugucuau

SEQ ID NO: 2288775 - RNA, 19 nt, Artificial Sequence
  Description of Artificial Sequence: Synthetic oligonucleotide
  Antisense strand to SEQ ID NO: 2288774
auagacaaagauuauuucc

SEQ ID NO: 2288776 - RNA, 19 nt, Artificial Sequence
  Description of Artificial Sequence: Synthetic oligonucleotide
  Sense strand starting at position 3281 of SEQ ID NO: 1884744
ugcuacugguauuuguaua

SEQ ID NO: 2288777 - RNA, 19 nt, Artificial Sequence
  Description of Artificial Sequence: Synthetic oligonucleotide
  Antisense strand to SEQ ID NO: 2288776
uauacaaauaccaguagca

SEQ ID NO: 2288778 - RNA, 19 nt, Artificial Sequence
  Description of Artificial Sequence: Synthetic oligonucleotide
  Sense strand starting at position 3303 of SEQ ID NO: 1884744
auuaacgucucuguuggaa

SEQ ID NO: 2288779 - RNA, 19 nt, Artificial Sequence
  Description of Artificial Sequence: Synthetic oligonucleotide
  Antisense strand to SEQ ID NO: 2288778
uuccaacagagacguuaau

SEQ ID NO: 2288780 - RNA, 19 nt, Artificial Sequence
  Description of Artificial Sequence: Synthetic oligonucleotide
  Sense strand starting at position 3331 of SEQ ID NO: 1884744
aagcuaaguccaugucuga

SEQ ID NO: 2288781 - RNA, 19 nt, Artificial Sequence
  Description of Artificial Sequence: Synthetic oligonucleotide
  Antisense strand to SEQ ID NO: 2288780
ucagacauggacuuagcuu

SEQ ID NO: 2288782 - RNA, 19 nt, Artificial Sequence
  Description of Artificial Sequence: Synthetic oligonucleotide
  Sense strand starting at position 3334 of SEQ ID NO: 1884744
cuaaguccaugucugauua

SEQ ID NO: 2288783 - RNA, 19 nt, Artificial Sequence
  Description of Artificial Sequence: Synthetic oligonucleotide
  Antisense strand to SEQ ID NO: 2288782
uaaucagacauggacuuag

SEQ ID NO: 2288784 - RNA, 19 nt, Artificial Sequence
  Description of Artificial Sequence: Synthetic oligonucleotide
  Sense strand starting at position 3338 of SEQ ID NO: 1884744
guccaugucugauuaauca

SEQ ID NO: 2288785 - RNA, 19 nt, Artificial Sequence
  Description of Artificial Sequence: Synthetic oligonucleotide
  Antisense strand to SEQ ID NO: 2288784
ugauuaaucagacauggac

SEQ ID NO: 2288786 - RNA, 19 nt, Artificial Sequence
  Description of Artificial Sequence: Synthetic oligonucleotide
  Sense strand starting at position 3342 of SEQ ID NO: 1884744
augucugauuaaucaggau

SEQ ID NO: 2288787 - RNA, 19 nt, Artificial Sequence
  Description of Artificial Sequence: Synthetic oligonucleotide
  Antisense strand to SEQ ID NO: 2288786
auccugauuaaucagacau

SEQ ID NO: 2288788 - RNA, 19 nt, Artificial Sequence
  Description of Artificial Sequence: Synthetic oligonucleotide
  Sense strand starting at position 3345 of SEQ ID NO: 1884744
ucugauuaaucaggauuua

SEQ ID NO: 2288789 - RNA, 19 nt, Artificial Sequence
  Description of Artificial Sequence: Synthetic oligonucleotide
  Antisense strand to SEQ ID NO: 2288788
uaaauccugauuaaucaga

SEQ ID NO: 2288790 - RNA, 19 nt, Artificial Sequence
  Description of Artificial Sequence: Synthetic oligonucleotide
  Sense strand starting at position 3432 of SEQ ID NO: 1884744
acuuguugaaacggaugaa

SEQ ID NO: 2288791 - RNA, 19 nt, Artificial Sequence
  Description of Artificial Sequence: Synthetic oligonucleotide
  Antisense strand to SEQ ID NO: 2288790
uucauccguuucaacaagu

SEQ ID NO: 2288792 - RNA, 19 nt, Artificial Sequence
  Description of Artificial Sequence: Synthetic oligonucleotide
  Sense strand starting at position 3435 of SEQ ID NO: 1884744
uguugaaacggaugaaugu

SEQ ID NO: 2288793 - RNA, 19 nt, Artificial Sequence
  Description of Artificial Sequence: Synthetic oligonucleotide
  Antisense strand to SEQ ID NO: 2288792
acauucauccguuucaaca

SEQ ID NO: 2288794 - RNA, 19 nt, Artificial Sequence
  Description of Artificial Sequence: Synthetic oligonucleotide
  Sense strand starting at position 3444 of SEQ ID NO: 1884744
ggaugaauguguuuaagag

SEQ ID NO: 2288795 - RNA, 19 nt, Artificial Sequence
  Description of Artificial Sequence: Synthetic oligonucleotide
  Antisense strand to SEQ ID NO: 2288794
cucuuaaacacauucaucc

SEQ ID NO: 2288796 - RNA, 19 nt, Artificial Sequence
  Description of Artificial Sequence: Synthetic oligonucleotide
  Sense strand starting at position 3450 of SEQ ID NO: 1884744
auguguuuaagagaguaag

SEQ ID NO: 2288797 - RNA, 19 nt, Artificial Sequence
  Description of Artificial Sequence: Synthetic oligonucleotide
  Antisense strand to SEQ ID NO: 2288796
cuuacucucuuaaacacau

SEQ ID NO: 2288798 - RNA, 19 nt, Artificial Sequence
  Description of Artificial Sequence: Synthetic oligonucleotide
  Sense strand starting at position 3832 of SEQ ID NO: 1884744
ugcuuugagcccuacaucu

SEQ ID NO: 2288799 - RNA, 19 nt, Artificial Sequence
  Description of Artificial Sequence: Synthetic oligonucleotide
  Antisense strand to SEQ ID NO: 2288798
agauguagggcucaaagca

SEQ ID NO: 2288800 - RNA, 19 nt, Artificial Sequence
  Description of Artificial Sequence: Synthetic oligonucleotide
  Sense strand starting at position 3931 of SEQ ID NO: 1884744
uuauucugaucuguguaua

SEQ ID NO: 2288801 - RNA, 19 nt, Artificial Sequence
  Description of Artificial Sequence: Synthetic oligonucleotide
  Antisense strand to SEQ ID NO: 2288800
uauacacagaucagaauaa

SEQ ID NO: 2288802 - RNA, 19 nt, Artificial Sequence
  Description of Artificial Sequence: Synthetic oligonucleotide
  Sense strand starting at position 3934 of SEQ ID NO: 1884744
uucugaucuguguauacua

SEQ ID NO: 2288803 - RNA, 19 nt, Artificial Sequence
  Description of Artificial Sequence: Synthetic oligonucleotide
  Antisense strand to SEQ ID NO: 2288802
uaguauacacagaucagaa

SEQ ID NO: 2288804 - RNA, 19 nt, Artificial Sequence
  Description of Artificial Sequence: Synthetic oligonucleotide
  Sense strand starting at position 3936 of SEQ ID NO: 1884744
cugaucuguguauacuaga

SEQ ID NO: 2288805 - RNA, 19 nt, Artificial Sequence
  Description of Artificial Sequence: Synthetic oligonucleotide
  Antisense strand to SEQ ID NO: 2288804
ucuaguauacacagaucag

SEQ ID NO: 2288806 - RNA, 19 nt, Artificial Sequence
  Description of Artificial Sequence: Synthetic oligonucleotide
  Sense strand starting at position 3941 of SEQ ID NO: 1884744
cuguguauacuagaagggu

SEQ ID NO: 2288807 - RNA, 19 nt, Artificial Sequence
  Description of Artificial Sequence: Synthetic oligonucleotide
  Antisense strand to SEQ ID NO: 2288806
acccuucuaguauacacag

SEQ ID NO: 2288808 - RNA, 19 nt, Artificial Sequence
  Description of Artificial Sequence: Synthetic oligonucleotide
  Sense strand starting at position 3947 of SEQ ID NO: 1884744
auacuagaagggugcauaa

SEQ ID NO: 2288809 - RNA, 19 nt, Artificial Sequence
  Description of Artificial Sequence: Synthetic oligonucleotide
  Antisense strand to SEQ ID NO: 2288808
uuaugcacccuucuaguau

SEQ ID NO: 2288810 - RNA, 19 nt, Artificial Sequence
  Description of Artificial Sequence: Synthetic oligonucleotide
  Sense strand starting at position 239 of SEQ ID NO: 1884745
ucauccuggucccuaagau

SEQ ID NO: 2288811 - RNA, 19 nt, Artificial Sequence
  Description of Artificial Sequence: Synthetic oligonucleotide
  Antisense strand to SEQ ID NO: 2288810
aucuuagggaccaggauga

SEQ ID NO: 2288812 - RNA, 19 nt, Artificial Sequence
  Description of Artificial Sequence: Synthetic oligonucleotide
  Sense strand starting at position 263 of SEQ ID NO: 1884745
ucccaaugaccuggcuuua

SEQ ID NO: 2288813 - RNA, 19 nt, Artificial Sequence
  Description of Artificial Sequence: Synthetic oligonucleotide
  Antisense strand to SEQ ID NO: 2288812
uaaagccaggucauuggga

SEQ ID NO: 2288814 - RNA, 19 nt, Artificial Sequence
  Description of Artificial Sequence: Synthetic oligonucleotide
  Sense strand starting at position 515 of SEQ ID NO: 1884745
guuacucucccgcuuguga

SEQ ID NO: 2288815 - RNA, 19 nt, Artificial Sequence
  Description of Artificial Sequence: Synthetic oligonucleotide
  Antisense strand to SEQ ID NO: 2288814
ucacaagcgggagaguaac

SEQ ID NO: 2288816 - RNA, 19 nt, Artificial Sequence
  Description of Artificial Sequence: Synthetic oligonucleotide
  Sense strand starting at position 999 of SEQ ID NO: 1884745
uaaggagauuguucuccuu

SEQ ID NO: 2288817 - RNA, 19 nt, Artificial Sequence
  Description of Artificial Sequence: Synthetic oligonucleotide
  Antisense strand to SEQ ID NO: 2288816
aaggagaacaaucuccuua

SEQ ID NO: 2288818 - RNA, 19 nt, Artificial Sequence
  Description of Artificial Sequence: Synthetic oligonucleotide
  Sense strand starting at position 1001 of SEQ ID NO: 1884745
aggagauuguucuccuuau

SEQ ID NO: 2288819 - RNA, 19 nt, Artificial Sequence
  Description of Artificial Sequence: Synthetic oligonucleotide
  Antisense strand to SEQ ID NO: 2288818
auaaggagaacaaucuccu

SEQ ID NO: 2288820 - RNA, 19 nt, Artificial Sequence
  Description of Artificial Sequence: Synthetic oligonucleotide
  Sense strand starting at position 1002 of SEQ ID NO: 1884745
ggagauuguucuccuuauc

SEQ ID NO: 2288821 - RNA, 19 nt, Artificial Sequence
  Description of Artificial Sequence: Synthetic oligonucleotide
  Antisense strand to SEQ ID NO: 2288820
gauaaggagaacaaucucc

SEQ ID NO: 2288822 - RNA, 19 nt, Artificial Sequence
  Description of Artificial Sequence: Synthetic oligonucleotide
  Sense strand starting at position 1044 of SEQ ID NO: 1884745
ggcaauauuaacggacuga

SEQ ID NO: 2288823 - RNA, 19 nt, Artificial Sequence
  Description of Artificial Sequence: Synthetic oligonucleotide
  Antisense strand to SEQ ID NO: 2288822
ucaguccguuaauauugcc

SEQ ID NO: 2288824 - RNA, 19 nt, Artificial Sequence
  Description of Artificial Sequence: Synthetic oligonucleotide
  Sense strand starting at position 1107 of SEQ ID NO: 1884745
uacaauuucugguaggaaa

SEQ ID NO: 2288825 - RNA, 19 nt, Artificial Sequence
  Description of Artificial Sequence: Synthetic oligonucleotide
  Antisense strand to SEQ ID NO: 2288824
uuuccuaccagaaauugua

SEQ ID NO: 2288826 - RNA, 19 nt, Artificial Sequence
  Description of Artificial Sequence: Synthetic oligonucleotide
  Sense strand starting at position 1143 of SEQ ID NO: 1884745
cuuagugguguuuauuauu

SEQ ID NO: 2288827 - RNA, 19 nt, Artificial Sequence
  Description of Artificial Sequence: Synthetic oligonucleotide
  Antisense strand to SEQ ID NO: 2288826
aauaauaaacaccacuaag

SEQ ID NO: 2288828 - RNA, 19 nt, Artificial Sequence
  Description of Artificial Sequence: Synthetic oligonucleotide
  Sense strand starting at position 1209 of SEQ ID NO: 1884745
aggacaacuccaugugaug

SEQ ID NO: 2288829 - RNA, 19 nt, Artificial Sequence
  Description of Artificial Sequence: Synthetic oligonucleotide
  Antisense strand to SEQ ID NO: 2288828
caucacauggaguuguccu

SEQ ID NO: 2288830 - RNA, 19 nt, Artificial Sequence
  Description of Artificial Sequence: Synthetic oligonucleotide
  Sense strand starting at position 1339 of SEQ ID NO: 1884745
agcaaucucagccagggau

SEQ ID NO: 2288831 - RNA, 19 nt, Artificial Sequence
  Description of Artificial Sequence: Synthetic oligonucleotide
  Antisense strand to SEQ ID NO: 2288830
aucccuggcugagauugcu

SEQ ID NO: 2288832 - RNA, 19 nt, Artificial Sequence
  Description of Artificial Sequence: Synthetic oligonucleotide
  Sense strand starting at position 1352 of SEQ ID NO: 1884745
agggauccguggucuuaac

SEQ ID NO: 2288833 - RNA, 19 nt, Artificial Sequence
  Description of Artificial Sequence: Synthetic oligonucleotide
  Antisense strand to SEQ ID NO: 2288832
guuaagaccacggaucccu

SEQ ID NO: 2288834 - RNA, 19 nt, Artificial Sequence
  Description of Artificial Sequence: Synthetic oligonucleotide
  Sense strand starting at position 1391 of SEQ ID NO: 1884745
agggucugucaauguuuau

SEQ ID NO: 2288835 - RNA, 19 nt, Artificial Sequence
  Description of Artificial Sequence: Synthetic oligonucleotide
  Antisense strand to SEQ ID NO: 2288834
auaaacauugacagacccu

SEQ ID NO: 2288836 - RNA, 19 nt, Artificial Sequence
  Description of Artificial Sequence: Synthetic oligonucleotide
  Sense strand starting at position 1425 of SEQ ID NO: 1884745
ggaauucugcuagaagcuu

SEQ ID NO: 2288837 - RNA, 19 nt, Artificial Sequence
  Description of Artificial Sequence: Synthetic oligonucleotide
  Antisense strand to SEQ ID NO: 2288836
aagcuucuagcagaauucc

SEQ ID NO: 2288838 - RNA, 19 nt, Artificial Sequence
  Description of Artificial Sequence: Synthetic oligonucleotide
  Sense strand starting at position 1934 of SEQ ID NO: 1884745
ugugacgucacacggauuu

SEQ ID NO: 2288839 - RNA, 19 nt, Artificial Sequence
  Description of Artificial Sequence: Synthetic oligonucleotide
  Antisense strand to SEQ ID NO: 2288838
aaauccgugugacgucaca

SEQ ID NO: 2288840 - RNA, 19 nt, Artificial Sequence
  Description of Artificial Sequence: Synthetic oligonucleotide
  Sense strand starting at position 2042 of SEQ ID NO: 1884745
agaggcugggugugauaaa

SEQ ID NO: 2288841 - RNA, 19 nt, Artificial Sequence
  Description of Artificial Sequence: Synthetic oligonucleotide
  Antisense strand to SEQ ID NO: 2288840
uuuaucacacccagccucu

SEQ ID NO: 2288842 - RNA, 19 nt, Artificial Sequence
  Description of Artificial Sequence: Synthetic oligonucleotide
  Sense strand starting at position 2087 of SEQ ID NO: 1884745
caacgugacgggaguugua

SEQ ID NO: 2288843 - RNA, 19 nt, Artificial Sequence
  Description of Artificial Sequence: Synthetic oligonucleotide
  Antisense strand to SEQ ID NO: 2288842
uacaacucccgucacguug

SEQ ID NO: 2288844 - RNA, 19 nt, Artificial Sequence
  Description of Artificial Sequence: Synthetic oligonucleotide
  Sense strand starting at position 2228 of SEQ ID NO: 1884745
cugagaagucgcuacucuu

SEQ ID NO: 2288845 - RNA, 19 nt, Artificial Sequence
  Description of Artificial Sequence: Synthetic oligonucleotide
  Antisense strand to SEQ ID NO: 2288844
aagaguagcgacuucucag

SEQ ID NO: 2288846 - RNA, 19 nt, Artificial Sequence
  Description of Artificial Sequence: Synthetic oligonucleotide
  Sense strand starting at position 2394 of SEQ ID NO: 1884745
gugcuuucuaggccuuagu

SEQ ID NO: 2288847 - RNA, 19 nt, Artificial Sequence
  Description of Artificial Sequence: Synthetic oligonucleotide
  Antisense strand to SEQ ID NO: 2288846
acuaaggccuagaaagcac

SEQ ID NO: 2288848 - RNA, 19 nt, Artificial Sequence
  Description of Artificial Sequence: Synthetic oligonucleotide
  Sense strand starting at position 2432 of SEQ ID NO: 1884745
auuauaauccggugaaauc

SEQ ID NO: 2288849 - RNA, 19 nt, Artificial Sequence
  Description of Artificial Sequence: Synthetic oligonucleotide
  Antisense strand to SEQ ID NO: 2288848
gauuucaccggauuauaau

SEQ ID NO: 2288850 - RNA, 19 nt, Artificial Sequence
  Description of Artificial Sequence: Synthetic oligonucleotide
  Sense strand starting at position 2450 of SEQ ID NO: 1884745
cguaauuauuuagccuuau

SEQ ID NO: 2288851 - RNA, 19 nt, Artificial Sequence
  Description of Artificial Sequence: Synthetic oligonucleotide
  Antisense strand to SEQ ID NO: 2288850
auaaggcuaaauaauuacg

SEQ ID NO: 2288852 - RNA, 19 nt, Artificial Sequence
  Description of Artificial Sequence: Synthetic oligonucleotide
  Sense strand starting at position 2572 of SEQ ID NO: 1884745
ggcaccuuuagguggaauu

SEQ ID NO: 2288853 - RNA, 19 nt, Artificial Sequence
  Description of Artificial Sequence: Synthetic oligonucleotide
  Antisense strand to SEQ ID NO: 2288852
aauuccaccuaaaggugcc

SEQ ID NO: 2288854 - RNA, 19 nt, Artificial Sequence
  Description of Artificial Sequence: Synthetic oligonucleotide
  Sense strand starting at position 2646 of SEQ ID NO: 1884745
ccucauucuuccuuguaga

SEQ ID NO: 2288855 - RNA, 19 nt, Artificial Sequence
  Description of Artificial Sequence: Synthetic oligonucleotide
  Antisense strand to SEQ ID NO: 2288854
ucuacaaggaagaaugagg

SEQ ID NO: 2288856 - RNA, 19 nt, Artificial Sequence
  Description of Artificial Sequence: Synthetic oligonucleotide
  Sense strand starting at position 2647 of SEQ ID NO: 1884745
cucauucuuccuuguagau

SEQ ID NO: 2288857 - RNA, 19 nt, Artificial Sequence
  Description of Artificial Sequence: Synthetic oligonucleotide
  Antisense strand to SEQ ID NO: 2288856
aucuacaaggaagaaugag

SEQ ID NO: 2288858 - RNA, 19 nt, Artificial Sequence
  Description of Artificial Sequence: Synthetic oligonucleotide
  Sense strand starting at position 2672 of SEQ ID NO: 1884745
guuguuuguaugcugaguu

SEQ ID NO: 2288859 - RNA, 19 nt, Artificial Sequence
  Description of Artificial Sequence: Synthetic oligonucleotide
  Antisense strand to SEQ ID NO: 2288858
aacucagcauacaaacaac

SEQ ID NO: 2288860 - RNA, 19 nt, Artificial Sequence
  Description of Artificial Sequence: Synthetic oligonucleotide
  Sense strand starting at position 2763 of SEQ ID NO: 1884745
uggauuuauuaagcgcuga

SEQ ID NO: 2288861 - RNA, 19 nt, Artificial Sequence
  Description of Artificial Sequence: Synthetic oligonucleotide
  Antisense strand to SEQ ID NO: 2288860
ucagcgcuuaauaaaucca

SEQ ID NO: 2288862 - RNA, 19 nt, Artificial Sequence
  Description of Artificial Sequence: Synthetic oligonucleotide
  Sense strand starting at position 2863 of SEQ ID NO: 1884745
acuguuaaaugcuuagaug

SEQ ID NO: 2288863 - RNA, 19 nt, Artificial Sequence
  Description of Artificial Sequence: Synthetic oligonucleotide
  Antisense strand to SEQ ID NO: 2288862
caucuaagcauuuaacagu

SEQ ID NO: 2288864 - RNA, 19 nt, Artificial Sequence
  Description of Artificial Sequence: Synthetic oligonucleotide
  Sense strand starting at position 2882 of SEQ ID NO: 1884745
ggguuaguucuauggaagc

SEQ ID NO: 2288865 - RNA, 19 nt, Artificial Sequence
  Description of Artificial Sequence: Synthetic oligonucleotide
  Antisense strand to SEQ ID NO: 2288864
gcuuccauagaacuaaccc

SEQ ID NO: 2288866 - RNA, 19 nt, Artificial Sequence
  Description of Artificial Sequence: Synthetic oligonucleotide
  Sense strand starting at position 2884 of SEQ ID NO: 1884745
guuaguucuauggaagcac

SEQ ID NO: 2288867 - RNA, 19 nt, Artificial Sequence
  Description of Artificial Sequence: Synthetic oligonucleotide
  Antisense strand to SEQ ID NO: 2288866
gugcuuccauagaacuaac

SEQ ID NO: 2288868 - RNA, 19 nt, Artificial Sequence
  Description of Artificial Sequence: Synthetic oligonucleotide
  Sense strand starting at position 2914 of SEQ ID NO: 1884745
ggauacagaucagagagaa

SEQ ID NO: 2288869 - RNA, 19 nt, Artificial Sequence
  Description of Artificial Sequence: Synthetic oligonucleotide
  Antisense strand to SEQ ID NO: 2288868
uucucucugaucuguaucc

SEQ ID NO: 2288870 - RNA, 19 nt, Artificial Sequence
  Description of Artificial Sequence: Synthetic oligonucleotide
  Sense strand starting at position 2974 of SEQ ID NO: 1884745
gugaucaagagugagugua

SEQ ID NO: 2288871 - RNA, 19 nt, Artificial Sequence
  Description of Artificial Sequence: Synthetic oligonucleotide
  Antisense strand to SEQ ID NO: 2288870
uacacucacucuugaucac

SEQ ID NO: 2288872 - RNA, 19 nt, Artificial Sequence
  Description of Artificial Sequence: Synthetic oligonucleotide
  Sense strand starting at position 3015 of SEQ ID NO: 1884745
uccauaaagugcucugaaa

SEQ ID NO: 2288873 - RNA, 19 nt, Artificial Sequence
  Description of Artificial Sequence: Synthetic oligonucleotide
  Antisense strand to SEQ ID NO: 2288872
uuucagagcacuuuaugga

SEQ ID NO: 2288874 - RNA, 19 nt, Artificial Sequence
  Description of Artificial Sequence: Synthetic oligonucleotide
  Sense strand starting at position 3017 of SEQ ID NO: 1884745
cauaaagugcucugaaagu

SEQ ID NO: 2288875 - RNA, 19 nt, Artificial Sequence
  Description of Artificial Sequence: Synthetic oligonucleotide
  Antisense strand to SEQ ID NO: 2288874
acuuucagagcacuuuaug

SEQ ID NO: 2288876 - RNA, 19 nt, Artificial Sequence
  Description of Artificial Sequence: Synthetic oligonucleotide
  Sense strand starting at position 3546 of SEQ ID NO: 1884745
ugcaaauaugcgcacauuu

SEQ ID NO: 2288877 - RNA, 19 nt, Artificial Sequence
  Description of Artificial Sequence: Synthetic oligonucleotide
  Antisense strand to SEQ ID NO: 2288876
aaaugugcgcauauuugca

SEQ ID NO: 2288878 - RNA, 19 nt, Artificial Sequence
  Description of Artificial Sequence: Synthetic oligonucleotide
  Sense strand starting at position 3557 of SEQ ID NO: 1884745
gcacauuucuaugacaaga

SEQ ID NO: 2288879 - RNA, 19 nt, Artificial Sequence
  Description of Artificial Sequence: Synthetic oligonucleotide
  Antisense strand to SEQ ID NO: 2288878
ucuugucauagaaaugugc

SEQ ID NO: 2288880 - RNA, 19 nt, Artificial Sequence
  Description of Artificial Sequence: Synthetic oligonucleotide
  Sense strand starting at position 3708 of SEQ ID NO: 1884745
cuuaguuuccaagaguuua

SEQ ID NO: 2288881 - RNA, 19 nt, Artificial Sequence
  Description of Artificial Sequence: Synthetic oligonucleotide
  Antisense strand to SEQ ID NO: 2288880
uaaacucuuggaaacuaag

SEQ ID NO: 2288882 - RNA, 19 nt, Artificial Sequence
  Description of Artificial Sequence: Synthetic oligonucleotide
  Sense strand starting at position 3713 of SEQ ID NO: 1884745
uuuccaagaguuuauguga

SEQ ID NO: 2288883 - RNA, 19 nt, Artificial Sequence
  Description of Artificial Sequence: Synthetic oligonucleotide
  Antisense strand to SEQ ID NO: 2288882
ucacauaaacucuuggaaa

SEQ ID NO: 2288884 - RNA, 19 nt, Artificial Sequence
  Description of Artificial Sequence: Synthetic oligonucleotide
  Sense strand starting at position 3716 of SEQ ID NO: 1884745
ccaagaguuuaugugaacu

SEQ ID NO: 2288885 - RNA, 19 nt, Artificial Sequence
  Description of Artificial Sequence: Synthetic oligonucleotide
  Antisense strand to SEQ ID NO: 2288884
aguucacauaaacucuugg

SEQ ID NO: 2288886 - RNA, 19 nt, Artificial Sequence
  Description of Artificial Sequence: Synthetic oligonucleotide
  Sense strand starting at position 3799 of SEQ ID NO: 1884745
gcuguacaucuuggauuau

SEQ ID NO: 2288887 - RNA, 19 nt, Artificial Sequence
  Description of Artificial Sequence: Synthetic oligonucleotide
  Antisense strand to SEQ ID NO: 2288886
auaauccaagauguacagc

SEQ ID NO: 2288888 - RNA, 19 nt, Artificial Sequence
  Description of Artificial Sequence: Synthetic oligonucleotide
  Sense strand starting at position 3843 of SEQ ID NO: 1884745
aacucaguaucuuuggaga

SEQ ID NO: 2288889 - RNA, 19 nt, Artificial Sequence
  Description of Artificial Sequence: Synthetic oligonucleotide
  Antisense strand to SEQ ID NO: 2288888
ucuccaaagauacugaguu

SEQ ID NO: 2288890 - RNA, 19 nt, Artificial Sequence
  Description of Artificial Sequence: Synthetic oligonucleotide
  Sense strand starting at position 183 of SEQ ID NO: 1884746
gaaaucaagugucagaggu

SEQ ID NO: 2288891 - RNA, 19 nt, Artificial Sequence
  Description of Artificial Sequence: Synthetic oligonucleotide
  Antisense strand to SEQ ID NO: 2288890
accucugacacuugauuuc

SEQ ID NO: 2288892 - RNA, 19 nt, Artificial Sequence
  Description of Artificial Sequence: Synthetic oligonucleotide
  Sense strand starting at position 253 of SEQ ID NO: 1884746
auagaugucccacaugcuu

SEQ ID NO: 2288893 - RNA, 19 nt, Artificial Sequence
  Description of Artificial Sequence: Synthetic oligonucleotide
  Antisense strand to SEQ ID NO: 2288892
aagcaugugggacaucuau

SEQ ID NO: 2288894 - RNA, 19 nt, Artificial Sequence
  Description of Artificial Sequence: Synthetic oligonucleotide
  Sense strand starting at position 502 of SEQ ID NO: 1884746
ggauucuaaugggaggaaa

SEQ ID NO: 2288895 - RNA, 19 nt, Artificial Sequence
  Description of Artificial Sequence: Synthetic oligonucleotide
  Antisense strand to SEQ ID NO: 2288894
uuuccucccauuagaaucc

SEQ ID NO: 2288896 - RNA, 19 nt, Artificial Sequence
  Description of Artificial Sequence: Synthetic oligonucleotide
  Sense strand starting at position 760 of SEQ ID NO: 1884746
cugagcauagcauagauau

SEQ ID NO: 2288897 - RNA, 19 nt, Artificial Sequence
  Description of Artificial Sequence: Synthetic oligonucleotide
  Antisense strand to SEQ ID NO: 2288896
auaucuaugcuaugcucag

SEQ ID NO: 2288898 - RNA, 19 nt, Artificial Sequence
  Description of Artificial Sequence: Synthetic oligonucleotide
  Sense strand starting at position 790 of SEQ ID NO: 1884746
cagccaucugggcagacau

SEQ ID NO: 2288899 - RNA, 19 nt, Artificial Sequence
  Description of Artificial Sequence: Synthetic oligonucleotide
  Antisense strand to SEQ ID NO: 2288898
augucugcccagauggcug

SEQ ID NO: 2288900 - RNA, 19 nt, Artificial Sequence
  Description of Artificial Sequence: Synthetic oligonucleotide
  Sense strand starting at position 865 of SEQ ID NO: 1884746
agaccauucucugggaaga

SEQ ID NO: 2288901 - RNA, 19 nt, Artificial Sequence
  Description of Artificial Sequence: Synthetic oligonucleotide
  Antisense strand to SEQ ID NO: 2288900
ucuucccagagaauggucu

SEQ ID NO: 2288902 - RNA, 19 nt, Artificial Sequence
  Description of Artificial Sequence: Synthetic oligonucleotide
  Sense strand starting at position 1019 of SEQ ID NO: 1884746
gaggguccaucaggguuau

SEQ ID NO: 2288903 - RNA, 19 nt, Artificial Sequence
  Description of Artificial Sequence: Synthetic oligonucleotide
  Antisense strand to SEQ ID NO: 2288902
auaacccugauggacccuc

SEQ ID NO: 2288904 - RNA, 19 nt, Artificial Sequence
  Description of Artificial Sequence: Synthetic oligonucleotide
  Sense strand starting at position 1023 of SEQ ID NO: 1884746
guccaucaggguuaucguu

SEQ ID NO: 2288905 - RNA, 19 nt, Artificial Sequence
  Description of Artificial Sequence: Synthetic oligonucleotide
  Antisense strand to SEQ ID NO: 2288904
aacgauaacccugauggac

SEQ ID NO: 2288906 - RNA, 19 nt, Artificial Sequence
  Description of Artificial Sequence: Synthetic oligonucleotide
  Sense strand starting at position 1043 of SEQ ID NO: 1884746
gccugugcucagcgacaga

SEQ ID NO: 2288907 - RNA, 19 nt, Artificial Sequence
  Description of Artificial Sequence: Synthetic oligonucleotide
  Antisense strand to SEQ ID NO: 2288906
ucugucgcugagcacaggc

SEQ ID NO: 2288908 - RNA, 19 nt, Artificial Sequence
  Description of Artificial Sequence: Synthetic oligonucleotide
  Sense strand starting at position 1054 of SEQ ID NO: 1884746
gcgacagagagcugugauu

SEQ ID NO: 2288909 - RNA, 19 nt, Artificial Sequence
  Description of Artificial Sequence: Synthetic oligonucleotide
  Antisense strand to SEQ ID NO: 2288908
aaucacagcucucugucgc

SEQ ID NO: 2288910 - RNA, 19 nt, Artificial Sequence
  Description of Artificial Sequence: Synthetic oligonucleotide
  Sense strand starting at position 1134 of SEQ ID NO: 1884746
agaaguagauucuuagcaa

SEQ ID NO: 2288911 - RNA, 19 nt, Artificial Sequence
  Description of Artificial Sequence: Synthetic oligonucleotide
  Antisense strand to SEQ ID NO: 2288910
uugcuaagaaucuacuucu

SEQ ID NO: 2288912 - RNA, 19 nt, Artificial Sequence
  Description of Artificial Sequence: Synthetic oligonucleotide
  Sense strand starting at position 1135 of SEQ ID NO: 1884746
gaaguagauucuuagcaaa

SEQ ID NO: 2288913 - RNA, 19 nt, Artificial Sequence
  Description of Artificial Sequence: Synthetic oligonucleotide
  Antisense strand to SEQ ID NO: 2288912
uuugcuaagaaucuacuuc

SEQ ID NO: 2288914 - RNA, 19 nt, Artificial Sequence
  Description of Artificial Sequence: Synthetic oligonucleotide
  Sense strand starting at position 2315 of SEQ ID NO: 1884746
uggccugugcgaagauguu

SEQ ID NO: 2288915 - RNA, 19 nt, Artificial Sequence
  Description of Artificial Sequence: Synthetic oligonucleotide
  Antisense strand to SEQ ID NO: 2288914
aacaucuucgcacaggcca

SEQ ID NO: 2288916 - RNA, 19 nt, Artificial Sequence
  Description of Artificial Sequence: Synthetic oligonucleotide
  Sense strand starting at position 2321 of SEQ ID NO: 1884746
gugcgaagauguucugggu

SEQ ID NO: 2288917 - RNA, 19 nt, Artificial Sequence
  Description of Artificial Sequence: Synthetic oligonucleotide
  Antisense strand to SEQ ID NO: 2288916
acccagaacaucuucgcac

SEQ ID NO: 2288918 - RNA, 19 nt, Artificial Sequence
  Description of Artificial Sequence: Synthetic oligonucleotide
  Sense strand starting at position 2324 of SEQ ID NO: 1884746
cgaagauguucuggguuug

SEQ ID NO: 2288919 - RNA, 19 nt, Artificial Sequence
  Description of Artificial Sequence: Synthetic oligonucleotide
  Antisense strand to SEQ ID NO: 2288918
caaacccagaacaucuucg

SEQ ID NO: 2288920 - RNA, 19 nt, Artificial Sequence
  Description of Artificial Sequence: Synthetic oligonucleotide
  Sense strand starting at position 2474 of SEQ ID NO: 1884746
agcuaagacuaaucgccaa

SEQ ID NO: 2288921 - RNA, 19 nt, Artificial Sequence
  Description of Artificial Sequence: Synthetic oligonucleotide
  Antisense strand to SEQ ID NO: 2288920
uuggcgauuagucuuagcu

SEQ ID NO: 2288922 - RNA, 19 nt, Artificial Sequence
  Description of Artificial Sequence: Synthetic oligonucleotide
  Sense strand starting at position 2616 of SEQ ID NO: 1884746
aguggaggucucugcgauu

SEQ ID NO: 2288923 - RNA, 19 nt, Artificial Sequence
  Description of Artificial Sequence: Synthetic oligonucleotide
  Antisense strand to SEQ ID NO: 2288922
aaucgcagagaccuccacu

SEQ ID NO: 2288924 - RNA, 19 nt, Artificial Sequence
  Description of Artificial Sequence: Synthetic oligonucleotide
  Sense strand starting at position 2619 of SEQ ID NO: 1884746
ggaggucucugcgauuaaa

SEQ ID NO: 2288925 - RNA, 19 nt, Artificial Sequence
  Description of Artificial Sequence: Synthetic oligonucleotide
  Antisense strand to SEQ ID NO: 2288924
uuuaaucgcagagaccucc

SEQ ID NO: 2288926 - RNA, 19 nt, Artificial Sequence
  Description of Artificial Sequence: Synthetic oligonucleotide
  Sense strand starting at position 2628 of SEQ ID NO: 1884746
ugcgauuaaaugggucuca

SEQ ID NO: 2288927 - RNA, 19 nt, Artificial Sequence
  Description of Artificial Sequence: Synthetic oligonucleotide
  Antisense strand to SEQ ID NO: 2288926
ugagacccauuuaaucgca

SEQ ID NO: 2288928 - RNA, 19 nt, Artificial Sequence
  Description of Artificial Sequence: Synthetic oligonucleotide
  Sense strand starting at position 2629 of SEQ ID NO: 1884746
gcgauuaaaugggucucau

SEQ ID NO: 2288929 - RNA, 19 nt, Artificial Sequence
  Description of Artificial Sequence: Synthetic oligonucleotide
  Antisense strand to SEQ ID NO: 2288928
augagacccauuuaaucgc

SEQ ID NO: 2288930 - RNA, 19 nt, Artificial Sequence
  Description of Artificial Sequence: Synthetic oligonucleotide
  Sense strand starting at position 2633 of SEQ ID NO: 1884746
uuaaaugggucucaugcaa

SEQ ID NO: 2288931 - RNA, 19 nt, Artificial Sequence
  Description of Artificial Sequence: Synthetic oligonucleotide
  Antisense strand to SEQ ID NO: 2288930
uugcaugagacccauuuaa

SEQ ID NO: 2288932 - RNA, 19 nt, Artificial Sequence
  Description of Artificial Sequence: Synthetic oligonucleotide
  Sense strand starting at position 2655 of SEQ ID NO: 1884746
agaugcgaacuuuaugcua

SEQ ID NO: 2288933 - RNA, 19 nt, Artificial Sequence
  Description of Artificial Sequence: Synthetic oligonucleotide
  Antisense strand to SEQ ID NO: 2288932
uagcauaaaguucgcaucu

SEQ ID NO: 2288934 - RNA, 19 nt, Artificial Sequence
  Description of Artificial Sequence: Synthetic oligonucleotide
  Sense strand starting at position 2657 of SEQ ID NO: 1884746
augcgaacuuuaugcuaau

SEQ ID NO: 2288935 - RNA, 19 nt, Artificial Sequence
  Description of Artificial Sequence: Synthetic oligonucleotide
  Antisense strand to SEQ ID NO: 2288934
auuagcauaaaguucgcau

SEQ ID NO: 2288936 - RNA, 19 nt, Artificial Sequence
  Description of Artificial Sequence: Synthetic oligonucleotide
  Sense strand starting at position 2658 of SEQ ID NO: 1884746
ugcgaacuuuaugcuaaua

SEQ ID NO: 2288937 - RNA, 19 nt, Artificial Sequence
  Description of Artificial Sequence: Synthetic oligonucleotide
  Antisense strand to SEQ ID NO: 2288936
uauuagcauaaaguucgca

SEQ ID NO: 2288938 - RNA, 19 nt, Artificial Sequence
  Description of Artificial Sequence: Synthetic oligonucleotide
  Sense strand starting at position 2660 of SEQ ID NO: 1884746
cgaacuuuaugcuaauaag

SEQ ID NO: 2288939 - RNA, 19 nt, Artificial Sequence
  Description of Artificial Sequence: Synthetic oligonucleotide
  Antisense strand to SEQ ID NO: 2288938
cuuauuagcauaaaguucg

SEQ ID NO: 2288940 - RNA, 19 nt, Artificial Sequence
  Description of Artificial Sequence: Synthetic oligonucleotide
  Sense strand starting at position 2982 of SEQ ID NO: 1884746
ggcuauggcccucguaaua

SEQ ID NO: 2288941 - RNA, 19 nt, Artificial Sequence
  Description of Artificial Sequence: Synthetic oligonucleotide
  Antisense strand to SEQ ID NO: 2288940
uauuacgagggccauagcc

SEQ ID NO: 2288942 - RNA, 19 nt, Artificial Sequence
  Description of Artificial Sequence: Synthetic oligonucleotide
  Sense strand starting at position 2987 of SEQ ID NO: 1884746
uggcccucguaauagaauu

SEQ ID NO: 2288943 - RNA, 19 nt, Artificial Sequence
  Description of Artificial Sequence: Synthetic oligonucleotide
  Antisense strand to SEQ ID NO: 2288942
aauucuauuacgagggcca

SEQ ID NO: 2288944 - RNA, 19 nt, Artificial Sequence
  Description of Artificial Sequence: Synthetic oligonucleotide
  Sense strand starting at position 3299 of SEQ ID NO: 1884746
gggaguugcugcugcggaa

SEQ ID NO: 2288945 - RNA, 19 nt, Artificial Sequence
  Description of Artificial Sequence: Synthetic oligonucleotide
  Antisense strand to SEQ ID NO: 2288944
uuccgcagcagcaacuccc

SEQ ID NO: 2288946 - RNA, 19 nt, Artificial Sequence
  Description of Artificial Sequence: Synthetic oligonucleotide
  Sense strand starting at position 3300 of SEQ ID NO: 1884746
ggaguugcugcugcggaau

SEQ ID NO: 2288947 - RNA, 19 nt, Artificial Sequence
  Description of Artificial Sequence: Synthetic oligonucleotide
  Antisense strand to SEQ ID NO: 2288946
auuccgcagcagcaacucc

SEQ ID NO: 2288948 - RNA, 19 nt, Artificial Sequence
  Description of Artificial Sequence: Synthetic oligonucleotide
  Sense strand starting at position 3458 of SEQ ID NO: 1884746
guuucucaguguuacuaca

SEQ ID NO: 2288949 - RNA, 19 nt, Artificial Sequence
  Description of Artificial Sequence: Synthetic oligonucleotide
  Antisense strand to SEQ ID NO: 2288948
uguaguaacacugagaaac

SEQ ID NO: 2288950 - RNA, 19 nt, Artificial Sequence
  Description of Artificial Sequence: Synthetic oligonucleotide
  Sense strand starting at position 3460 of SEQ ID NO: 1884746
uucucaguguuacuacaga

SEQ ID NO: 2288951 - RNA, 19 nt, Artificial Sequence
  Description of Artificial Sequence: Synthetic oligonucleotide
  Antisense strand to SEQ ID NO: 2288950
ucuguaguaacacugagaa

SEQ ID NO: 2288952 - RNA, 19 nt, Artificial Sequence
  Description of Artificial Sequence: Synthetic oligonucleotide
  Sense strand starting at position 599 of SEQ ID NO: 1884747
gauggagcuucccagagga

SEQ ID NO: 2288953 - RNA, 19 nt, Artificial Sequence
  Description of Artificial Sequence: Synthetic oligonucleotide
  Antisense strand to SEQ ID NO: 2288952
uccucugggaagcuccauc

SEQ ID NO: 2288954 - RNA, 19 nt, Artificial Sequence
  Description of Artificial Sequence: Synthetic oligonucleotide
  Sense strand starting at position 3609 of SEQ ID NO: 1884747
gcgcuucuccucuguggaa

SEQ ID NO: 2288955 - RNA, 19 nt, Artificial Sequence
  Description of Artificial Sequence: Synthetic oligonucleotide
  Antisense strand to SEQ ID NO: 2288954
uuccacagaggagaagcgc

SEQ ID NO: 2288956 - RNA, 19 nt, Artificial Sequence
  Description of Artificial Sequence: Synthetic oligonucleotide
  Sense strand starting at position 3634 of SEQ ID NO: 1884747
auggucuguuggccugaau

SEQ ID NO: 2288957 - RNA, 19 nt, Artificial Sequence
  Description of Artificial Sequence: Synthetic oligonucleotide
  Antisense strand to SEQ ID NO: 2288956
auucaggccaacagaccau

SEQ ID NO: 2288958 - RNA, 19 nt, Artificial Sequence
  Description of Artificial Sequence: Synthetic oligonucleotide
  Sense strand starting at position 3698 of SEQ ID NO: 1884747
ucaccugugccauggagau

SEQ ID NO: 2288959 - RNA, 19 nt, Artificial Sequence
  Description of Artificial Sequence: Synthetic oligonucleotide
  Antisense strand to SEQ ID NO: 2288958
aucuccauggcacagguga

SEQ ID NO: 2288960 - RNA, 19 nt, Artificial Sequence
  Description of Artificial Sequence: Synthetic oligonucleotide
  Sense strand starting at position 3732 of SEQ ID NO: 1884747
cagggcuauugugaugacu

SEQ ID NO: 2288961 - RNA, 19 nt, Artificial Sequence
  Description of Artificial Sequence: Synthetic oligonucleotide
  Antisense strand to SEQ ID NO: 2288960
agucaucacaauagcccug

SEQ ID NO: 2288962 - RNA, 19 nt, Artificial Sequence
  Description of Artificial Sequence: Synthetic oligonucleotide
  Sense strand starting at position 3734 of SEQ ID NO: 1884747
gggcuauugugaugacuua

SEQ ID NO: 2288963 - RNA, 19 nt, Artificial Sequence
  Description of Artificial Sequence: Synthetic oligonucleotide
  Antisense strand to SEQ ID NO: 2288962
uaagucaucacaauagccc

SEQ ID NO: 2288964 - RNA, 19 nt, Artificial Sequence
  Description of Artificial Sequence: Synthetic oligonucleotide
  Sense strand starting at position 3735 of SEQ ID NO: 1884747
ggcuauugugaugacuuaa

SEQ ID NO: 2288965 - RNA, 19 nt, Artificial Sequence
  Description of Artificial Sequence: Synthetic oligonucleotide
  Antisense strand to SEQ ID NO: 2288964
uuaagucaucacaauagcc

SEQ ID NO: 2288966 - RNA, 19 nt, Artificial Sequence
  Description of Artificial Sequence: Synthetic oligonucleotide
  Sense strand starting at position 91 of SEQ ID NO: 1884748
uccacuauugcugggagua

SEQ ID NO: 2288967 - RNA, 19 nt, Artificial Sequence
  Description of Artificial Sequence: Synthetic oligonucleotide
  Antisense strand to SEQ ID NO: 2288966
uacucccagcaauagugga

SEQ ID NO: 2288968 - RNA, 19 nt, Artificial Sequence
  Description of Artificial Sequence: Synthetic oligonucleotide
  Sense strand starting at position 92 of SEQ ID NO: 1884748
ccacuauugcugggaguau

SEQ ID NO: 2288969 - RNA, 19 nt, Artificial Sequence
  Description of Artificial Sequence: Synthetic oligonucleotide
  Antisense strand to SEQ ID NO: 2288968
auacucccagcaauagugg

SEQ ID NO: 2288970 - RNA, 19 nt, Artificial Sequence
  Description of Artificial Sequence: Synthetic oligonucleotide
  Sense strand starting at position 96 of SEQ ID NO: 1884748
uauugcugggaguauaagu

SEQ ID NO: 2288971 - RNA, 19 nt, Artificial Sequence
  Description of Artificial Sequence: Synthetic oligonucleotide
  Antisense strand to SEQ ID NO: 2288970
acuuauacucccagcaaua

SEQ ID NO: 2288972 - RNA, 19 nt, Artificial Sequence
  Description of Artificial Sequence: Synthetic oligonucleotide
  Sense strand starting at position 189 of SEQ ID NO: 1884748
augccacuccuggguauau

SEQ ID NO: 2288973 - RNA, 19 nt, Artificial Sequence
  Description of Artificial Sequence: Synthetic oligonucleotide
  Antisense strand to SEQ ID NO: 2288972
auauacccaggaguggcau

SEQ ID NO: 2288974 - RNA, 19 nt, Artificial Sequence
  Description of Artificial Sequence: Synthetic oligonucleotide
  Sense strand starting at position 190 of SEQ ID NO: 1884748
ugccacuccuggguauaua

SEQ ID NO: 2288975 - RNA, 19 nt, Artificial Sequence
  Description of Artificial Sequence: Synthetic oligonucleotide
  Antisense strand to SEQ ID NO: 2288974
uauauacccaggaguggca

SEQ ID NO: 2288976 - RNA, 19 nt, Artificial Sequence
  Description of Artificial Sequence: Synthetic oligonucleotide
  Sense strand starting at position 191 of SEQ ID NO: 1884748
gccacuccuggguauauau

SEQ ID NO: 2288977 - RNA, 19 nt, Artificial Sequence
  Description of Artificial Sequence: Synthetic oligonucleotide
  Antisense strand to SEQ ID NO: 2288976
auauauacccaggaguggc

SEQ ID NO: 2288978 - RNA, 19 nt, Artificial Sequence
  Description of Artificial Sequence: Synthetic oligonucleotide
  Sense strand starting at position 355 of SEQ ID NO: 1884748
aguggaguauuauuaagcu

SEQ ID NO: 2288979 - RNA, 19 nt, Artificial Sequence
  Description of Artificial Sequence: Synthetic oligonucleotide
  Antisense strand to SEQ ID NO: 2288978
agcuuaauaauacuccacu

SEQ ID NO: 2288980 - RNA, 19 nt, Artificial Sequence
  Description of Artificial Sequence: Synthetic oligonucleotide
  Sense strand starting at position 427 of SEQ ID NO: 1884748
ccauuaugcugugugaaau

SEQ ID NO: 2288981 - RNA, 19 nt, Artificial Sequence
  Description of Artificial Sequence: Synthetic oligonucleotide
  Antisense strand to SEQ ID NO: 2288980
auuucacacagcauaaugg

SEQ ID NO: 2288982 - RNA, 19 nt, Artificial Sequence
  Description of Artificial Sequence: Synthetic oligonucleotide
  Sense strand starting at position 505 of SEQ ID NO: 1884748
agugaaucucgugaagaua

SEQ ID NO: 2288983 - RNA, 19 nt, Artificial Sequence
  Description of Artificial Sequence: Synthetic oligonucleotide
  Antisense strand to SEQ ID NO: 2288982
uaucuucacgagauucacu

SEQ ID NO: 2288984 - RNA, 19 nt, Artificial Sequence
  Description of Artificial Sequence: Synthetic oligonucleotide
  Sense strand starting at position 647 of SEQ ID NO: 1884748
uguauaguguaccucaaua

SEQ ID NO: 2288985 - RNA, 19 nt, Artificial Sequence
  Description of Artificial Sequence: Synthetic oligonucleotide
  Antisense strand to SEQ ID NO: 2288984
uauugagguacacuauaca

SEQ ID NO: 2288986 - RNA, 19 nt, Artificial Sequence
  Description of Artificial Sequence: Synthetic oligonucleotide
  Sense strand starting at position 868 of SEQ ID NO: 1884748
auaucacagccuuaguuua

SEQ ID NO: 2288987 - RNA, 19 nt, Artificial Sequence
  Description of Artificial Sequence: Synthetic oligonucleotide
  Antisense strand to SEQ ID NO: 2288986
uaaacuaaggcugugauau

SEQ ID NO: 2288988 - RNA, 19 nt, Artificial Sequence
  Description of Artificial Sequence: Synthetic oligonucleotide
  Sense strand starting at position 1215 of SEQ ID NO: 1884748
cucuuucuggcuuguagaa

SEQ ID NO: 2288989 - RNA, 19 nt, Artificial Sequence
  Description of Artificial Sequence: Synthetic oligonucleotide
  Antisense strand to SEQ ID NO: 2288988
uucuacaagccagaaagag

SEQ ID NO: 2288990 - RNA, 19 nt, Artificial Sequence
  Description of Artificial Sequence: Synthetic oligonucleotide
  Sense strand starting at position 1798 of SEQ ID NO: 1884748
ggcguaggucuucaacaua

SEQ ID NO: 2288991 - RNA, 19 nt, Artificial Sequence
  Description of Artificial Sequence: Synthetic oligonucleotide
  Antisense strand to SEQ ID NO: 2288990
uauguugaagaccuacgcc

SEQ ID NO: 2288992 - RNA, 19 nt, Artificial Sequence
  Description of Artificial Sequence: Synthetic oligonucleotide
  Sense strand starting at position 1984 of SEQ ID NO: 1884748
agaugauguugauccucga

SEQ ID NO: 2288993 - RNA, 19 nt, Artificial Sequence
  Description of Artificial Sequence: Synthetic oligonucleotide
  Antisense strand to SEQ ID NO: 2288992
ucgaggaucaacaucaucu

SEQ ID NO: 2288994 - RNA, 19 nt, Artificial Sequence
  Description of Artificial Sequence: Synthetic oligonucleotide
  Sense strand starting at position 1994 of SEQ ID NO: 1884748
gauccucgaguuuaauaag

SEQ ID NO: 2288995 - RNA, 19 nt, Artificial Sequence
  Description of Artificial Sequence: Synthetic oligonucleotide
  Antisense strand to SEQ ID NO: 2288994
cuuauuaaacucgaggauc

SEQ ID NO: 2288996 - RNA, 19 nt, Artificial Sequence
  Description of Artificial Sequence: Synthetic oligonucleotide
  Sense strand starting at position 2048 of SEQ ID NO: 1884748
gcuucugauuggucaagua

SEQ ID NO: 2288997 - RNA, 19 nt, Artificial Sequence
  Description of Artificial Sequence: Synthetic oligonucleotide
  Antisense strand to SEQ ID NO: 2288996
uacuugaccaaucagaagc

SEQ ID NO: 2288998 - RNA, 19 nt, Artificial Sequence
  Description of Artificial Sequence: Synthetic oligonucleotide
  Sense strand starting at position 2174 of SEQ ID NO: 1884748
cccggaguuccugauucag

SEQ ID NO: 2288999 - RNA, 19 nt, Artificial Sequence
  Description of Artificial Sequence: Synthetic oligonucleotide
  Antisense strand to SEQ ID NO: 2288998
cugaaucaggaacuccggg

SEQ ID NO: 2289000 - RNA, 19 nt, Artificial Sequence
  Description of Artificial Sequence: Synthetic oligonucleotide
  Sense strand starting at position 2176 of SEQ ID NO: 1884748
cggaguuccugauucagua

SEQ ID NO: 2289001 - RNA, 19 nt, Artificial Sequence
  Description of Artificial Sequence: Synthetic oligonucleotide
  Antisense strand to SEQ ID NO: 2289000
uacugaaucaggaacuccg

SEQ ID NO: 2289002 - RNA, 19 nt, Artificial Sequence
  Description of Artificial Sequence: Synthetic oligonucleotide
  Sense strand starting at position 2262 of SEQ ID NO: 1884748
cagggaccaugcuuuaaga

SEQ ID NO: 2289003 - RNA, 19 nt, Artificial Sequence
  Description of Artificial Sequence: Synthetic oligonucleotide
  Antisense strand to SEQ ID NO: 2289002
ucuuaaagcauggucccug

SEQ ID NO: 2289004 - RNA, 19 nt, Artificial Sequence
  Description of Artificial Sequence: Synthetic oligonucleotide
  Sense strand starting at position 2367 of SEQ ID NO: 1884748
gugauucugacauggagac

SEQ ID NO: 2289005 - RNA, 19 nt, Artificial Sequence
  Description of Artificial Sequence: Synthetic oligonucleotide
  Antisense strand to SEQ ID NO: 2289004
gucuccaugucagaaucac

SEQ ID NO: 2289006 - RNA, 19 nt, Artificial Sequence
  Description of Artificial Sequence: Synthetic oligonucleotide
  Sense strand starting at position 2420 of SEQ ID NO: 1884748
acuguagucagugugcuuu

SEQ ID NO: 2289007 - RNA, 19 nt, Artificial Sequence
  Description of Artificial Sequence: Synthetic oligonucleotide
  Antisense strand to SEQ ID NO: 2289006
aaagcacacugacuacagu

SEQ ID NO: 2289008 - RNA, 19 nt, Artificial Sequence
  Description of Artificial Sequence: Synthetic oligonucleotide
  Sense strand starting at position 2461 of SEQ ID NO: 1884748
aggaacucaucagcuuaaa

SEQ ID NO: 2289009 - RNA, 19 nt, Artificial Sequence
  Description of Artificial Sequence: Synthetic oligonucleotide
  Antisense strand to SEQ ID NO: 2289008
uuuaagcugaugaguuccu

SEQ ID NO: 2289010 - RNA, 19 nt, Artificial Sequence
  Description of Artificial Sequence: Synthetic oligonucleotide
  Sense strand starting at position 2640 of SEQ ID NO: 1884748
accacaguucccugaagau

SEQ ID NO: 2289011 - RNA, 19 nt, Artificial Sequence
  Description of Artificial Sequence: Synthetic oligonucleotide
  Antisense strand to SEQ ID NO: 2289010
aucuucagggaacuguggu

SEQ ID NO: 2289012 - RNA, 19 nt, Artificial Sequence
  Description of Artificial Sequence: Synthetic oligonucleotide
  Sense strand starting at position 2649 of SEQ ID NO: 1884748
cccugaagaugaucuugau

SEQ ID NO: 2289013 - RNA, 19 nt, Artificial Sequence
  Description of Artificial Sequence: Synthetic oligonucleotide
  Antisense strand to SEQ ID NO: 2289012
aucaagaucaucuucaggg

SEQ ID NO: 2289014 - RNA, 19 nt, Artificial Sequence
  Description of Artificial Sequence: Synthetic oligonucleotide
  Sense strand starting at position 2781 of SEQ ID NO: 1884748
cagggugauccauggacca

SEQ ID NO: 2289015 - RNA, 19 nt, Artificial Sequence
  Description of Artificial Sequence: Synthetic oligonucleotide
  Antisense strand to SEQ ID NO: 2289014
ugguccauggaucacccug

SEQ ID NO: 2289016 - RNA, 19 nt, Artificial Sequence
  Description of Artificial Sequence: Synthetic oligonucleotide
  Sense strand starting at position 3160 of SEQ ID NO: 1884748
uuaacaagauccuagaaug

SEQ ID NO: 2289017 - RNA, 19 nt, Artificial Sequence
  Description of Artificial Sequence: Synthetic oligonucleotide
  Antisense strand to SEQ ID NO: 2289016
cauucuaggaucuuguuaa

SEQ ID NO: 2289018 - RNA, 19 nt, Artificial Sequence
  Description of Artificial Sequence: Synthetic oligonucleotide
  Sense strand starting at position 3226 of SEQ ID NO: 1884748
gauguacuuucucuggacu

SEQ ID NO: 2289019 - RNA, 19 nt, Artificial Sequence
  Description of Artificial Sequence: Synthetic oligonucleotide
  Antisense strand to SEQ ID NO: 2289018
aguccagagaaaguacauc

SEQ ID NO: 2289020 - RNA, 19 nt, Artificial Sequence
  Description of Artificial Sequence: Synthetic oligonucleotide
  Sense strand starting at position 3269 of SEQ ID NO: 1884748
agccgagugccucuccuau

SEQ ID NO: 2289021 - RNA, 19 nt, Artificial Sequence
  Description of Artificial Sequence: Synthetic oligonucleotide
  Antisense strand to SEQ ID NO: 2289020
auaggagaggcacucggcu

SEQ ID NO: 2289022 - RNA, 19 nt, Artificial Sequence
  Description of Artificial Sequence: Synthetic oligonucleotide
  Sense strand starting at position 3369 of SEQ ID NO: 1884748
ggaacuguaucuuuacgca

SEQ ID NO: 2289023 - RNA, 19 nt, Artificial Sequence
  Description of Artificial Sequence: Synthetic oligonucleotide
  Antisense strand to SEQ ID NO: 2289022
ugcguaaagauacaguucc

SEQ ID NO: 2289024 - RNA, 19 nt, Artificial Sequence
  Description of Artificial Sequence: Synthetic oligonucleotide
  Sense strand starting at position 3578 of SEQ ID NO: 1884748
aguuguuacucauuguuaa

SEQ ID NO: 2289025 - RNA, 19 nt, Artificial Sequence
  Description of Artificial Sequence: Synthetic oligonucleotide
  Antisense strand to SEQ ID NO: 2289024
uuaacaaugaguaacaacu

SEQ ID NO: 2289026 - RNA, 19 nt, Artificial Sequence
  Description of Artificial Sequence: Synthetic oligonucleotide
  Sense strand starting at position 3579 of SEQ ID NO: 1884748
guuguuacucauuguuaaa

SEQ ID NO: 2289027 - RNA, 19 nt, Artificial Sequence
  Description of Artificial Sequence: Synthetic oligonucleotide
  Antisense strand to SEQ ID NO: 2289026
uuuaacaaugaguaacaac

SEQ ID NO: 2289028 - RNA, 19 nt, Artificial Sequence
  Description of Artificial Sequence: Synthetic oligonucleotide
  Sense strand starting at position 3625 of SEQ ID NO: 1884748
agguguugucaggauuagu

SEQ ID NO: 2289029 - RNA, 19 nt, Artificial Sequence
  Description of Artificial Sequence: Synthetic oligonucleotide
  Antisense strand to SEQ ID NO: 2289028
acuaauccugacaacaccu

SEQ ID NO: 2289030 - RNA, 19 nt, Artificial Sequence
  Description of Artificial Sequence: Synthetic oligonucleotide
  Sense strand starting at position 3630 of SEQ ID NO: 1884748
uugucaggauuagugacau

SEQ ID NO: 2289031 - RNA, 19 nt, Artificial Sequence
  Description of Artificial Sequence: Synthetic oligonucleotide
  Antisense strand to SEQ ID NO: 2289030
augucacuaauccugacaa

SEQ ID NO: 2289032 - RNA, 19 nt, Artificial Sequence
  Description of Artificial Sequence: Synthetic oligonucleotide
  Sense strand starting at position 3653 of SEQ ID NO: 1884748
gauguaaacccagaaugcu

SEQ ID NO: 2289033 - RNA, 19 nt, Artificial Sequence
  Description of Artificial Sequence: Synthetic oligonucleotide
  Antisense strand to SEQ ID NO: 2289032
agcauucuggguuuacauc

SEQ ID NO: 2289034 - RNA, 19 nt, Artificial Sequence
  Description of Artificial Sequence: Synthetic oligonucleotide
  Sense strand starting at position 3683 of SEQ ID NO: 1884748
gucagaauugcacgauaaa

SEQ ID NO: 2289035 - RNA, 19 nt, Artificial Sequence
  Description of Artificial Sequence: Synthetic oligonucleotide
  Antisense strand to SEQ ID NO: 2289034
uuuaucgugcaauucugac

SEQ ID NO: 2289036 - RNA, 19 nt, Artificial Sequence
  Description of Artificial Sequence: Synthetic oligonucleotide
  Sense strand starting at position 3738 of SEQ ID NO: 1884748
agucuuuacugaguuuagu

SEQ ID NO: 2289037 - RNA, 19 nt, Artificial Sequence
  Description of Artificial Sequence: Synthetic oligonucleotide
  Antisense strand to SEQ ID NO: 2289036
acuaaacucaguaaagacu

SEQ ID NO: 2289038 - RNA, 19 nt, Artificial Sequence
  Description of Artificial Sequence: Synthetic oligonucleotide
  Sense strand starting at position 3741 of SEQ ID NO: 1884748
cuuuacugaguuuaguaga

SEQ ID NO: 2289039 - RNA, 19 nt, Artificial Sequence
  Description of Artificial Sequence: Synthetic oligonucleotide
  Antisense strand to SEQ ID NO: 2289038
ucuacuaaacucaguaaag

SEQ ID NO: 2289040 - RNA, 19 nt, Artificial Sequence
  Description of Artificial Sequence: Synthetic oligonucleotide
  Sense strand starting at position 3746 of SEQ ID NO: 1884748
cugaguuuaguagaauacu

SEQ ID NO: 2289041 - RNA, 19 nt, Artificial Sequence
  Description of Artificial Sequence: Synthetic oligonucleotide
  Antisense strand to SEQ ID NO: 2289040
aguauucuacuaaacucag

SEQ ID NO: 2289042 - RNA, 19 nt, Artificial Sequence
  Description of Artificial Sequence: Synthetic oligonucleotide
  Sense strand starting at position 3749 of SEQ ID NO: 1884748
aguuuaguagaauacuacu

SEQ ID NO: 2289043 - RNA, 19 nt, Artificial Sequence
  Description of Artificial Sequence: Synthetic oligonucleotide
  Antisense strand to SEQ ID NO: 2289042
aguaguauucuacuaaacu

SEQ ID NO: 2289044 - RNA, 19 nt, Artificial Sequence
  Description of Artificial Sequence: Synthetic oligonucleotide
  Sense strand starting at position 3755 of SEQ ID NO: 1884748
guagaauacuacuuguuga

SEQ ID NO: 2289045 - RNA, 19 nt, Artificial Sequence
  Description of Artificial Sequence: Synthetic oligonucleotide
  Antisense strand to SEQ ID NO: 2289044
ucaacaaguaguauucuac

SEQ ID NO: 2289046 - RNA, 19 nt, Artificial Sequence
  Description of Artificial Sequence: Synthetic oligonucleotide
  Sense strand starting at position 22 of SEQ ID NO: 1884749
accacaugggucugaaaug

SEQ ID NO: 2289047 - RNA, 19 nt, Artificial Sequence
  Description of Artificial Sequence: Synthetic oligonucleotide
  Antisense strand to SEQ ID NO: 2289046
cauuucagacccauguggu

SEQ ID NO: 2289048 - RNA, 19 nt, Artificial Sequence
  Description of Artificial Sequence: Synthetic oligonucleotide
  Sense strand starting at position 23 of SEQ ID NO: 1884749
ccacaugggucugaaauga

SEQ ID NO: 2289049 - RNA, 19 nt, Artificial Sequence
  Description of Artificial Sequence: Synthetic oligonucleotide
  Antisense strand to SEQ ID NO: 2289048
ucauuucagacccaugugg

SEQ ID NO: 2289050 - RNA, 19 nt, Artificial Sequence
  Description of Artificial Sequence: Synthetic oligonucleotide
  Sense strand starting at position 156 of SEQ ID NO: 1884749
uguaguuucuacccuuuaa

SEQ ID NO: 2289051 - RNA, 19 nt, Artificial Sequence
  Description of Artificial Sequence: Synthetic oligonucleotide
  Antisense strand to SEQ ID NO: 2289050
uuaaaggguagaaacuaca

SEQ ID NO: 2289052 - RNA, 19 nt, Artificial Sequence
  Description of Artificial Sequence: Synthetic oligonucleotide
  Sense strand starting at position 234 of SEQ ID NO: 1884749
agguaaagcucacuccaga

SEQ ID NO: 2289053 - RNA, 19 nt, Artificial Sequence
  Description of Artificial Sequence: Synthetic oligonucleotide
  Antisense strand to SEQ ID NO: 2289052
ucuggagugagcuuuaccu

SEQ ID NO: 2289054 - RNA, 19 nt, Artificial Sequence
  Description of Artificial Sequence: Synthetic oligonucleotide
  Sense strand starting at position 303 of SEQ ID NO: 1884749
ggacuaugcugggaucgga

SEQ ID NO: 2289055 - RNA, 19 nt, Artificial Sequence
  Description of Artificial Sequence: Synthetic oligonucleotide
  Antisense strand to SEQ ID NO: 2289054
uccgaucccagcauagucc

SEQ ID NO: 2289056 - RNA, 19 nt, Artificial Sequence
  Description of Artificial Sequence: Synthetic oligonucleotide
  Sense strand starting at position 909 of SEQ ID NO: 1884749
gucuaucauuguccuggga

SEQ ID NO: 2289057 - RNA, 19 nt, Artificial Sequence
  Description of Artificial Sequence: Synthetic oligonucleotide
  Antisense strand to SEQ ID NO: 2289056
ucccaggacaaugauagac

SEQ ID NO: 2289058 - RNA, 19 nt, Artificial Sequence
  Description of Artificial Sequence: Synthetic oligonucleotide
  Sense strand starting at position 912 of SEQ ID NO: 1884749
uaucauuguccugggauga

SEQ ID NO: 2289059 - RNA, 19 nt, Artificial Sequence
  Description of Artificial Sequence: Synthetic oligonucleotide
  Antisense strand to SEQ ID NO: 2289058
ucaucccaggacaaugaua

SEQ ID NO: 2289060 - RNA, 19 nt, Artificial Sequence
  Description of Artificial Sequence: Synthetic oligonucleotide
  Sense strand starting at position 913 of SEQ ID NO: 1884749
aucauuguccugggaugaa

SEQ ID NO: 2289061 - RNA, 19 nt, Artificial Sequence
  Description of Artificial Sequence: Synthetic oligonucleotide
  Antisense strand to SEQ ID NO: 2289060
uucaucccaggacaaugau

SEQ ID NO: 2289062 - RNA, 19 nt, Artificial Sequence
  Description of Artificial Sequence: Synthetic oligonucleotide
  Sense strand starting at position 970 of SEQ ID NO: 1884749
uccucaucuccagagguca

SEQ ID NO: 2289063 - RNA, 19 nt, Artificial Sequence
  Description of Artificial Sequence: Synthetic oligonucleotide
  Antisense strand to SEQ ID NO: 2289062
ugaccucuggagaugagga

SEQ ID NO: 2289064 - RNA, 19 nt, Artificial Sequence
  Description of Artificial Sequence: Synthetic oligonucleotide
  Sense strand starting at position 1000 of SEQ ID NO: 1884749
gcagaagacuucccugcuu

SEQ ID NO: 2289065 - RNA, 19 nt, Artificial Sequence
  Description of Artificial Sequence: Synthetic oligonucleotide
  Antisense strand to SEQ ID NO: 2289064
aagcagggaagucuucugc

SEQ ID NO: 2289066 - RNA, 19 nt, Artificial Sequence
  Description of Artificial Sequence: Synthetic oligonucleotide
  Sense strand starting at position 1002 of SEQ ID NO: 1884749
agaagacuucccugcuuug

SEQ ID NO: 2289067 - RNA, 19 nt, Artificial Sequence
  Description of Artificial Sequence: Synthetic oligonucleotide
  Antisense strand to SEQ ID NO: 2289066
caaagcagggaagucuucu

SEQ ID NO: 2289068 - RNA, 19 nt, Artificial Sequence
  Description of Artificial Sequence: Synthetic oligonucleotide
  Sense strand starting at position 1005 of SEQ ID NO: 1884749
agacuucccugcuuugcaa

SEQ ID NO: 2289069 - RNA, 19 nt, Artificial Sequence
  Description of Artificial Sequence: Synthetic oligonucleotide
  Antisense strand to SEQ ID NO: 2289068
uugcaaagcagggaagucu

SEQ ID NO: 2289070 - RNA, 19 nt, Artificial Sequence
  Description of Artificial Sequence: Synthetic oligonucleotide
  Sense strand starting at position 1142 of SEQ ID NO: 1884749
cagauauagucauccgagg

SEQ ID NO: 2289071 - RNA, 19 nt, Artificial Sequence
  Description of Artificial Sequence: Synthetic oligonucleotide
  Antisense strand to SEQ ID NO: 2289070
ccucggaugacuauaucug

SEQ ID NO: 2289072 - RNA, 19 nt, Artificial Sequence
  Description of Artificial Sequence: Synthetic oligonucleotide
  Sense strand starting at position 1144 of SEQ ID NO: 1884749
gauauagucauccgagguu

SEQ ID NO: 2289073 - RNA, 19 nt, Artificial Sequence
  Description of Artificial Sequence: Synthetic oligonucleotide
  Antisense strand to SEQ ID NO: 2289072
aaccucggaugacuauauc

SEQ ID NO: 2289074 - RNA, 19 nt, Artificial Sequence
  Description of Artificial Sequence: Synthetic oligonucleotide
  Sense strand starting at position 1198 of SEQ ID NO: 1884749
aggaguucccuccagaugu

SEQ ID NO: 2289075 - RNA, 19 nt, Artificial Sequence
  Description of Artificial Sequence: Synthetic oligonucleotide
  Antisense strand to SEQ ID NO: 2289074
acaucuggagggaacuccu

SEQ ID NO: 2289076 - RNA, 19 nt, Artificial Sequence
  Description of Artificial Sequence: Synthetic oligonucleotide
  Sense strand starting at position 1218 of SEQ ID NO: 1884749
gggucacucugggacaaga

SEQ ID NO: 2289077 - RNA, 19 nt, Artificial Sequence
  Description of Artificial Sequence: Synthetic oligonucleotide
  Antisense strand to SEQ ID NO: 2289076
ucuugucccagagugaccc

SEQ ID NO: 2289078 - RNA, 19 nt, Artificial Sequence
  Description of Artificial Sequence: Synthetic oligonucleotide
  Sense strand starting at position 1423 of SEQ ID NO: 1884749
ugucuccaguucucacaua

SEQ ID NO: 2289079 - RNA, 19 nt, Artificial Sequence
  Description of Artificial Sequence: Synthetic oligonucleotide
  Antisense strand to SEQ ID NO: 2289078
uaugugagaacuggagaca

SEQ ID NO: 2289080 - RNA, 19 nt, Artificial Sequence
  Description of Artificial Sequence: Synthetic oligonucleotide
  Sense strand starting at position 2226 of SEQ ID NO: 1884749
gcccuauggcuugugugua

SEQ ID NO: 2289081 - RNA, 19 nt, Artificial Sequence
  Description of Artificial Sequence: Synthetic oligonucleotide
  Antisense strand to SEQ ID NO: 2289080
uacacacaagccauagggc

SEQ ID NO: 2289082 - RNA, 19 nt, Artificial Sequence
  Description of Artificial Sequence: Synthetic oligonucleotide
  Sense strand starting at position 2231 of SEQ ID NO: 1884749
auggcuuguguguaugacu

SEQ ID NO: 2289083 - RNA, 19 nt, Artificial Sequence
  Description of Artificial Sequence: Synthetic oligonucleotide
  Antisense strand to SEQ ID NO: 2289082
agucauacacacaagccau

SEQ ID NO: 2289084 - RNA, 19 nt, Artificial Sequence
  Description of Artificial Sequence: Synthetic oligonucleotide
  Sense strand starting at position 2420 of SEQ ID NO: 1884749
cgagucacacuugacuaau

SEQ ID NO: 2289085 - RNA, 19 nt, Artificial Sequence
  Description of Artificial Sequence: Synthetic oligonucleotide
  Antisense strand to SEQ ID NO: 2289084
auuagucaagugugacucg

SEQ ID NO: 2289086 - RNA, 19 nt, Artificial Sequence
  Description of Artificial Sequence: Synthetic oligonucleotide
  Sense strand starting at position 2517 of SEQ ID NO: 1884749
gcaacagauguccacguau

SEQ ID NO: 2289087 - RNA, 19 nt, Artificial Sequence
  Description of Artificial Sequence: Synthetic oligonucleotide
  Antisense strand to SEQ ID NO: 2289086
auacguggacaucuguugc

SEQ ID NO: 2289088 - RNA, 19 nt, Artificial Sequence
  Description of Artificial Sequence: Synthetic oligonucleotide
  Sense strand starting at position 2614 of SEQ ID NO: 1884749
gcacauaugugagccaaca

SEQ ID NO: 2289089 - RNA, 19 nt, Artificial Sequence
  Description of Artificial Sequence: Synthetic oligonucleotide
  Antisense strand to SEQ ID NO: 2289088
uguuggcucacauaugugc

SEQ ID NO: 2289090 - RNA, 19 nt, Artificial Sequence
  Description of Artificial Sequence: Synthetic oligonucleotide
  Sense strand starting at position 2748 of SEQ ID NO: 1884749
gccagaggucaagggaauu

SEQ ID NO: 2289091 - RNA, 19 nt, Artificial Sequence
  Description of Artificial Sequence: Synthetic oligonucleotide
  Antisense strand to SEQ ID NO: 2289090
aauucccuugaccucuggc

SEQ ID NO: 2289092 - RNA, 19 nt, Artificial Sequence
  Description of Artificial Sequence: Synthetic oligonucleotide
  Sense strand starting at position 2826 of SEQ ID NO: 1884749
gggagcuaugcucagggau

SEQ ID NO: 2289093 - RNA, 19 nt, Artificial Sequence
  Description of Artificial Sequence: Synthetic oligonucleotide
  Antisense strand to SEQ ID NO: 2289092
aucccugagcauagcuccc

SEQ ID NO: 2289094 - RNA, 19 nt, Artificial Sequence
  Description of Artificial Sequence: Synthetic oligonucleotide
  Sense strand starting at position 2829 of SEQ ID NO: 1884749
agcuaugcucagggaugga

SEQ ID NO: 2289095 - RNA, 19 nt, Artificial Sequence
  Description of Artificial Sequence: Synthetic oligonucleotide
  Antisense strand to SEQ ID NO: 2289094
uccaucccugagcauagcu

SEQ ID NO: 2289096 - RNA, 19 nt, Artificial Sequence
  Description of Artificial Sequence: Synthetic oligonucleotide
  Sense strand starting at position 2848 of SEQ ID NO: 1884749
gcagaagucucagcacaga

SEQ ID NO: 2289097 - RNA, 19 nt, Artificial Sequence
  Description of Artificial Sequence: Synthetic oligonucleotide
  Antisense strand to SEQ ID NO: 2289096
ucugugcugagacuucugc

SEQ ID NO: 2289098 - RNA, 19 nt, Artificial Sequence
  Description of Artificial Sequence: Synthetic oligonucleotide
  Sense strand starting at position 3052 of SEQ ID NO: 1884749
gauggugucagaugaugag

SEQ ID NO: 2289099 - RNA, 19 nt, Artificial Sequence
  Description of Artificial Sequence: Synthetic oligonucleotide
  Antisense strand to SEQ ID NO: 2289098
cucaucaucugacaccauc

SEQ ID NO: 2289100 - RNA, 19 nt, Artificial Sequence
  Description of Artificial Sequence: Synthetic oligonucleotide
  Sense strand starting at position 3161 of SEQ ID NO: 1884749
gguguauuccuaggacaug

SEQ ID NO: 2289101 - RNA, 19 nt, Artificial Sequence
  Description of Artificial Sequence: Synthetic oligonucleotide
  Antisense strand to SEQ ID NO: 2289100
cauguccuaggaauacacc

SEQ ID NO: 2289102 - RNA, 19 nt, Artificial Sequence
  Description of Artificial Sequence: Synthetic oligonucleotide
  Sense strand starting at position 3184 of SEQ ID NO: 1884749
cgggcuuuaaguuagaaga

SEQ ID NO: 2289103 - RNA, 19 nt, Artificial Sequence
  Description of Artificial Sequence: Synthetic oligonucleotide
  Antisense strand to SEQ ID NO: 2289102
ucuucuaacuuaaagcccg

SEQ ID NO: 2289104 - RNA, 19 nt, Artificial Sequence
  Description of Artificial Sequence: Synthetic oligonucleotide
  Sense strand starting at position 3186 of SEQ ID NO: 1884749
ggcuuuaaguuagaagaaa

SEQ ID NO: 2289105 - RNA, 19 nt, Artificial Sequence
  Description of Artificial Sequence: Synthetic oligonucleotide
  Antisense strand to SEQ ID NO: 2289104
uuucuucuaacuuaaagcc

SEQ ID NO: 2289106 - RNA, 19 nt, Artificial Sequence
  Description of Artificial Sequence: Synthetic oligonucleotide
  Sense strand starting at position 3246 of SEQ ID NO: 1884749
augagaaguugggaguagu

SEQ ID NO: 2289107 - RNA, 19 nt, Artificial Sequence
  Description of Artificial Sequence: Synthetic oligonucleotide
  Antisense strand to SEQ ID NO: 2289106
acuacucccaacuucucau

SEQ ID NO: 2289108 - RNA, 19 nt, Artificial Sequence
  Description of Artificial Sequence: Synthetic oligonucleotide
  Sense strand starting at position 3316 of SEQ ID NO: 1884749
gacuuaagauuguggagga

SEQ ID NO: 2289109 - RNA, 19 nt, Artificial Sequence
  Description of Artificial Sequence: Synthetic oligonucleotide
  Antisense strand to SEQ ID NO: 2289108
uccuccacaaucuuaaguc

SEQ ID NO: 2289110 - RNA, 19 nt, Artificial Sequence
  Description of Artificial Sequence: Synthetic oligonucleotide
  Sense strand starting at position 3572 of SEQ ID NO: 1884749
ggcagagucugauuccuga

SEQ ID NO: 2289111 - RNA, 19 nt, Artificial Sequence
  Description of Artificial Sequence: Synthetic oligonucleotide
  Antisense strand to SEQ ID NO: 2289110
ucaggaaucagacucugcc

SEQ ID NO: 2289112 - RNA, 19 nt, Artificial Sequence
  Description of Artificial Sequence: Synthetic oligonucleotide
  Sense strand starting at position 3575 of SEQ ID NO: 1884749
agagucugauuccugaauu

SEQ ID NO: 2289113 - RNA, 19 nt, Artificial Sequence
  Description of Artificial Sequence: Synthetic oligonucleotide
  Antisense strand to SEQ ID NO: 2289112
aauucaggaaucagacucu

SEQ ID NO: 2289114 - RNA, 19 nt, Artificial Sequence
  Description of Artificial Sequence: Synthetic oligonucleotide
  Sense strand starting at position 3678 of SEQ ID NO: 1884749
cguggagccucuucaaaug

SEQ ID NO: 2289115 - RNA, 19 nt, Artificial Sequence
  Description of Artificial Sequence: Synthetic oligonucleotide
  Antisense strand to SEQ ID NO: 2289114
cauuugaagaggcuccacg

SEQ ID NO: 2289116 - RNA, 19 nt, Artificial Sequence
  Description of Artificial Sequence: Synthetic oligonucleotide
  Sense strand starting at position 3709 of SEQ ID NO: 1884749
ucagucaccugggauguua

SEQ ID NO: 2289117 - RNA, 19 nt, Artificial Sequence
  Description of Artificial Sequence: Synthetic oligonucleotide
  Antisense strand to SEQ ID NO: 2289116
uaacaucccaggugacuga

SEQ ID NO: 2289118 - RNA, 19 nt, Artificial Sequence
  Description of Artificial Sequence: Synthetic oligonucleotide
  Sense strand starting at position 3717 of SEQ ID NO: 1884749
cugggauguuacugaggga

SEQ ID NO: 2289119 - RNA, 19 nt, Artificial Sequence
  Description of Artificial Sequence: Synthetic oligonucleotide
  Antisense strand to SEQ ID NO: 2289118
ucccucaguaacaucccag

SEQ ID NO: 2289120 - RNA, 19 nt, Artificial Sequence
  Description of Artificial Sequence: Synthetic oligonucleotide
  Sense strand starting at position 3835 of SEQ ID NO: 1884749
agguaugaaucaggagaau

SEQ ID NO: 2289121 - RNA, 19 nt, Artificial Sequence
  Description of Artificial Sequence: Synthetic oligonucleotide
  Antisense strand to SEQ ID NO: 2289120
auucuccugauucauaccu

SEQ ID NO: 2289122 - RNA, 19 nt, Artificial Sequence
  Description of Artificial Sequence: Synthetic oligonucleotide
  Sense strand starting at position 3925 of SEQ ID NO: 1884749
ucaucuguaaggcagagau

SEQ ID NO: 2289123 - RNA, 19 nt, Artificial Sequence
  Description of Artificial Sequence: Synthetic oligonucleotide
  Antisense strand to SEQ ID NO: 2289122
aucucugccuuacagauga

SEQ ID NO: 2289124 - RNA, 19 nt, Artificial Sequence
  Description of Artificial Sequence: Synthetic oligonucleotide
  Sense strand starting at position 3979 of SEQ ID NO: 1884749
gagcuaacgcauggaaagu

SEQ ID NO: 2289125 - RNA, 19 nt, Artificial Sequence
  Description of Artificial Sequence: Synthetic oligonucleotide
  Antisense strand to SEQ ID NO: 2289124
acuuuccaugcguuagcuc

SEQ ID NO: 2289126 - RNA, 19 nt, Artificial Sequence
  Description of Artificial Sequence: Synthetic oligonucleotide
  Sense strand starting at position 41 of SEQ ID NO: 1884750
agaaguuauuaauuggcua

SEQ ID NO: 2289127 - RNA, 19 nt, Artificial Sequence
  Description of Artificial Sequence: Synthetic oligonucleotide
  Antisense strand to SEQ ID NO: 2289126
uagccaauuaauaacuucu

SEQ ID NO: 2289128 - RNA, 19 nt, Artificial Sequence
  Description of Artificial Sequence: Synthetic oligonucleotide
  Sense strand starting at position 64 of SEQ ID NO: 1884750
aguccaauucguuauuaaa

SEQ ID NO: 2289129 - RNA, 19 nt, Artificial Sequence
  Description of Artificial Sequence: Synthetic oligonucleotide
  Antisense strand to SEQ ID NO: 2289128
uuuaauaacgaauuggacu

SEQ ID NO: 2289130 - RNA, 19 nt, Artificial Sequence
  Description of Artificial Sequence: Synthetic oligonucleotide
  Sense strand starting at position 66 of SEQ ID NO: 1884750
uccaauucguuauuaaaug

SEQ ID NO: 2289131 - RNA, 19 nt, Artificial Sequence
  Description of Artificial Sequence: Synthetic oligonucleotide
  Antisense strand to SEQ ID NO: 2289130
cauuuaauaacgaauugga

SEQ ID NO: 2289132 - RNA, 19 nt, Artificial Sequence
  Description of Artificial Sequence: Synthetic oligonucleotide
  Sense strand starting at position 232 of SEQ ID NO: 1884750
uuacaacuuccauguguaa

SEQ ID NO: 2289133 - RNA, 19 nt, Artificial Sequence
  Description of Artificial Sequence: Synthetic oligonucleotide
  Antisense strand to SEQ ID NO: 2289132
uuacacauggaaguuguaa

SEQ ID NO: 2289134 - RNA, 19 nt, Artificial Sequence
  Description of Artificial Sequence: Synthetic oligonucleotide
  Sense strand starting at position 239 of SEQ ID NO: 1884750
uuccauguguaaguacaaa

SEQ ID NO: 2289135 - RNA, 19 nt, Artificial Sequence
  Description of Artificial Sequence: Synthetic oligonucleotide
  Antisense strand to SEQ ID NO: 2289134
uuuguacuuacacauggaa

SEQ ID NO: 2289136 - RNA, 19 nt, Artificial Sequence
  Description of Artificial Sequence: Synthetic oligonucleotide
  Sense strand starting at position 436 of SEQ ID NO: 1884750
uucgacaacucuucgagaa

SEQ ID NO: 2289137 - RNA, 19 nt, Artificial Sequence
  Description of Artificial Sequence: Synthetic oligonucleotide
  Antisense strand to SEQ ID NO: 2289136
uucucgaagaguugucgaa

SEQ ID NO: 2289138 - RNA, 19 nt, Artificial Sequence
  Description of Artificial Sequence: Synthetic oligonucleotide
  Sense strand starting at position 437 of SEQ ID NO: 1884750
ucgacaacucuucgagaau

SEQ ID NO: 2289139 - RNA, 19 nt, Artificial Sequence
  Description of Artificial Sequence: Synthetic oligonucleotide
  Antisense strand to SEQ ID NO: 2289138
auucucgaagaguugucga

SEQ ID NO: 2289140 - RNA, 19 nt, Artificial Sequence
  Description of Artificial Sequence: Synthetic oligonucleotide
  Sense strand starting at position 505 of SEQ ID NO: 1884750
ugcuuagaaugcccauaaa

SEQ ID NO: 2289141 - RNA, 19 nt, Artificial Sequence
  Description of Artificial Sequence: Synthetic oligonucleotide
  Antisense strand to SEQ ID NO: 2289140
uuuaugggcauucuaagca

SEQ ID NO: 2289142 - RNA, 19 nt, Artificial Sequence
  Description of Artificial Sequence: Synthetic oligonucleotide
  Sense strand starting at position 515 of SEQ ID NO: 1884750
gcccauaaagacugauauc

SEQ ID NO: 2289143 - RNA, 19 nt, Artificial Sequence
  Description of Artificial Sequence: Synthetic oligonucleotide
  Antisense strand to SEQ ID NO: 2289142
gauaucagucuuuaugggc

SEQ ID NO: 2289144 - RNA, 19 nt, Artificial Sequence
  Description of Artificial Sequence: Synthetic oligonucleotide
  Sense strand starting at position 524 of SEQ ID NO: 1884750
gacugauaucgcuacaaga

SEQ ID NO: 2289145 - RNA, 19 nt, Artificial Sequence
  Description of Artificial Sequence: Synthetic oligonucleotide
  Antisense strand to SEQ ID NO: 2289144
ucuuguagcgauaucaguc

SEQ ID NO: 2289146 - RNA, 19 nt, Artificial Sequence
  Description of Artificial Sequence: Synthetic oligonucleotide
  Sense strand starting at position 526 of SEQ ID NO: 1884750
cugauaucgcuacaagaau

SEQ ID NO: 2289147 - RNA, 19 nt, Artificial Sequence
  Description of Artificial Sequence: Synthetic oligonucleotide
  Antisense strand to SEQ ID NO: 2289146
auucuuguagcgauaucag

SEQ ID NO: 2289148 - RNA, 19 nt, Artificial Sequence
  Description of Artificial Sequence: Synthetic oligonucleotide
  Sense strand starting at position 569 of SEQ ID NO: 1884750
acaggacucaugugagcuu

SEQ ID NO: 2289149 - RNA, 19 nt, Artificial Sequence
  Description of Artificial Sequence: Synthetic oligonucleotide
  Antisense strand to SEQ ID NO: 2289148
aagcucacaugaguccugu

SEQ ID NO: 2289150 - RNA, 19 nt, Artificial Sequence
  Description of Artificial Sequence: Synthetic oligonucleotide
  Sense strand starting at position 658 of SEQ ID NO: 1884750
acccucuguuaagcagaaa

SEQ ID NO: 2289151 - RNA, 19 nt, Artificial Sequence
  Description of Artificial Sequence: Synthetic oligonucleotide
  Antisense strand to SEQ ID NO: 2289150
uuucugcuuaacagagggu

SEQ ID NO: 2289152 - RNA, 19 nt, Artificial Sequence
  Description of Artificial Sequence: Synthetic oligonucleotide
  Sense strand starting at position 844 of SEQ ID NO: 1884750
cugggaagaguuuggguaa

SEQ ID NO: 2289153 - RNA, 19 nt, Artificial Sequence
  Description of Artificial Sequence: Synthetic oligonucleotide
  Antisense strand to SEQ ID NO: 2289152
uuacccaaacucuucccag

SEQ ID NO: 2289154 - RNA, 19 nt, Artificial Sequence
  Description of Artificial Sequence: Synthetic oligonucleotide
  Sense strand starting at position 1005 of SEQ ID NO: 1884750
accugauaccuaggcuaaa

SEQ ID NO: 2289155 - RNA, 19 nt, Artificial Sequence
  Description of Artificial Sequence: Synthetic oligonucleotide
  Antisense strand to SEQ ID NO: 2289154
uuuagccuagguaucaggu

SEQ ID NO: 2289156 - RNA, 19 nt, Artificial Sequence
  Description of Artificial Sequence: Synthetic oligonucleotide
  Sense strand starting at position 1016 of SEQ ID NO: 1884750
aggcuaaagacauguguau

SEQ ID NO: 2289157 - RNA, 19 nt, Artificial Sequence
  Description of Artificial Sequence: Synthetic oligonucleotide
  Antisense strand to SEQ ID NO: 2289156
auacacaugucuuuagccu

SEQ ID NO: 2289158 - RNA, 19 nt, Artificial Sequence
  Description of Artificial Sequence: Synthetic oligonucleotide
  Sense strand starting at position 1074 of SEQ ID NO: 1884750
aggcucauauccuuccaga

SEQ ID NO: 2289159 - RNA, 19 nt, Artificial Sequence
  Description of Artificial Sequence: Synthetic oligonucleotide
  Antisense strand to SEQ ID NO: 2289158
ucuggaaggauaugagccu

SEQ ID NO: 2289160 - RNA, 19 nt, Artificial Sequence
  Description of Artificial Sequence: Synthetic oligonucleotide
  Sense strand starting at position 1177 of SEQ ID NO: 1884750
cugauaucaugucccugau

SEQ ID NO: 2289161 - RNA, 19 nt, Artificial Sequence
  Description of Artificial Sequence: Synthetic oligonucleotide
  Antisense strand to SEQ ID NO: 2289160
aucagggacaugauaucag

SEQ ID NO: 2289162 - RNA, 19 nt, Artificial Sequence
  Description of Artificial Sequence: Synthetic oligonucleotide
  Sense strand starting at position 1294 of SEQ ID NO: 1884750
agaucaagaucuuuguucu

SEQ ID NO: 2289163 - RNA, 19 nt, Artificial Sequence
  Description of Artificial Sequence: Synthetic oligonucleotide
  Antisense strand to SEQ ID NO: 2289162
agaacaaagaucuugaucu

SEQ ID NO: 2289164 - RNA, 19 nt, Artificial Sequence
  Description of Artificial Sequence: Synthetic oligonucleotide
  Sense strand starting at position 1300 of SEQ ID NO: 1884750
agaucuuuguucucaucua

SEQ ID NO: 2289165 - RNA, 19 nt, Artificial Sequence
  Description of Artificial Sequence: Synthetic oligonucleotide
  Antisense strand to SEQ ID NO: 2289164
uagaugagaacaaagaucu

SEQ ID NO: 2289166 - RNA, 19 nt, Artificial Sequence
  Description of Artificial Sequence: Synthetic oligonucleotide
  Sense strand starting at position 1451 of SEQ ID NO: 1884750
uccauuaggcuccacuaga

SEQ ID NO: 2289167 - RNA, 19 nt, Artificial Sequence
  Description of Artificial Sequence: Synthetic oligonucleotide
  Antisense strand to SEQ ID NO: 2289166
ucuaguggagccuaaugga

SEQ ID NO: 2289168 - RNA, 19 nt, Artificial Sequence
  Description of Artificial Sequence: Synthetic oligonucleotide
  Sense strand starting at position 1817 of SEQ ID NO: 1884750
ggagacucccgucagauca

SEQ ID NO: 2289169 - RNA, 19 nt, Artificial Sequence
  Description of Artificial Sequence: Synthetic oligonucleotide
  Antisense strand to SEQ ID NO: 2289168
ugaucugacgggagucucc

SEQ ID NO: 2289170 - RNA, 19 nt, Artificial Sequence
  Description of Artificial Sequence: Synthetic oligonucleotide
  Sense strand starting at position 1977 of SEQ ID NO: 1884750
cgcucaacucucgcgagaa

SEQ ID NO: 2289171 - RNA, 19 nt, Artificial Sequence
  Description of Artificial Sequence: Synthetic oligonucleotide
  Antisense strand to SEQ ID NO: 2289170
uucucgcgagaguugagcg

SEQ ID NO: 2289172 - RNA, 19 nt, Artificial Sequence
  Description of Artificial Sequence: Synthetic oligonucleotide
  Sense strand starting at position 2122 of SEQ ID NO: 1884750
gaguacuguccacacaggu

SEQ ID NO: 2289173 - RNA, 19 nt, Artificial Sequence
  Description of Artificial Sequence: Synthetic oligonucleotide
  Antisense strand to SEQ ID NO: 2289172
accuguguggacaguacuc

SEQ ID NO: 2289174 - RNA, 19 nt, Artificial Sequence
  Description of Artificial Sequence: Synthetic oligonucleotide
  Sense strand starting at position 2142 of SEQ ID NO: 1884750
acacguguucggcugcaga

SEQ ID NO: 2289175 - RNA, 19 nt, Artificial Sequence
  Description of Artificial Sequence: Synthetic oligonucleotide
  Antisense strand to SEQ ID NO: 2289174
ucugcagccgaacacgugu

SEQ ID NO: 2289176 - RNA, 19 nt, Artificial Sequence
  Description of Artificial Sequence: Synthetic oligonucleotide
  Sense strand starting at position 2144 of SEQ ID NO: 1884750
acguguucggcugcagaau

SEQ ID NO: 2289177 - RNA, 19 nt, Artificial Sequence
  Description of Artificial Sequence: Synthetic oligonucleotide
  Antisense strand to SEQ ID NO: 2289176
auucugcagccgaacacgu

SEQ ID NO: 2289178 - RNA, 19 nt, Artificial Sequence
  Description of Artificial Sequence: Synthetic oligonucleotide
  Sense strand starting at position 2156 of SEQ ID NO: 1884750
gcagaaucuagcgggagaa

SEQ ID NO: 2289179 - RNA, 19 nt, Artificial Sequence
  Description of Artificial Sequence: Synthetic oligonucleotide
  Antisense strand to SEQ ID NO: 2289178
uucucccgcuagauucugc

SEQ ID NO: 2289180 - RNA, 19 nt, Artificial Sequence
  Description of Artificial Sequence: Synthetic oligonucleotide
  Sense strand starting at position 2157 of SEQ ID NO: 1884750
cagaaucuagcgggagaaa

SEQ ID NO: 2289181 - RNA, 19 nt, Artificial Sequence
  Description of Artificial Sequence: Synthetic oligonucleotide
  Antisense strand to SEQ ID NO: 2289180
uuucucccgcuagauucug

SEQ ID NO: 2289182 - RNA, 19 nt, Artificial Sequence
  Description of Artificial Sequence: Synthetic oligonucleotide
  Sense strand starting at position 2247 of SEQ ID NO: 1884750
cuuccuuaacggcaaagua

SEQ ID NO: 2289183 - RNA, 19 nt, Artificial Sequence
  Description of Artificial Sequence: Synthetic oligonucleotide
  Antisense strand to SEQ ID NO: 2289182
uacuuugccguuaaggaag

SEQ ID NO: 2289184 - RNA, 19 nt, Artificial Sequence
  Description of Artificial Sequence: Synthetic oligonucleotide
  Sense strand starting at position 2276 of SEQ ID NO: 1884750
cccuuagcgcuagaaauga

SEQ ID NO: 2289185 - RNA, 19 nt, Artificial Sequence
  Description of Artificial Sequence: Synthetic oligonucleotide
  Antisense strand to SEQ ID NO: 2289184
ucauuucuagcgcuaaggg

SEQ ID NO: 2289186 - RNA, 19 nt, Artificial Sequence
  Description of Artificial Sequence: Synthetic oligonucleotide
  Sense strand starting at position 2752 of SEQ ID NO: 1884750
acuccuaguguuugagaga

SEQ ID NO: 2289187 - RNA, 19 nt, Artificial Sequence
  Description of Artificial Sequence: Synthetic oligonucleotide
  Antisense strand to SEQ ID NO: 2289186
ucucucaaacacuaggagu

SEQ ID NO: 2289188 - RNA, 19 nt, Artificial Sequence
  Description of Artificial Sequence: Synthetic oligonucleotide
  Sense strand starting at position 2801 of SEQ ID NO: 1884750
guugaauuaugaccuggga

SEQ ID NO: 2289189 - RNA, 19 nt, Artificial Sequence
  Description of Artificial Sequence: Synthetic oligonucleotide
  Antisense strand to SEQ ID NO: 2289188
ucccaggucauaauucaac

SEQ ID NO: 2289190 - RNA, 19 nt, Artificial Sequence
  Description of Artificial Sequence: Synthetic oligonucleotide
  Sense strand starting at position 2841 of SEQ ID NO: 1884750
augcaaagucuauagucuu

SEQ ID NO: 2289191 - RNA, 19 nt, Artificial Sequence
  Description of Artificial Sequence: Synthetic oligonucleotide
  Antisense strand to SEQ ID NO: 2289190
aagacuauagacuuugcau

SEQ ID NO: 2289192 - RNA, 19 nt, Artificial Sequence
  Description of Artificial Sequence: Synthetic oligonucleotide
  Sense strand starting at position 3232 of SEQ ID NO: 1884750
cgaauuguaguugacuuaa

SEQ ID NO: 2289193 - RNA, 19 nt, Artificial Sequence
  Description of Artificial Sequence: Synthetic oligonucleotide
  Antisense strand to SEQ ID NO: 2289192
uuaagucaacuacaauucg

SEQ ID NO: 2289194 - RNA, 19 nt, Artificial Sequence
  Description of Artificial Sequence: Synthetic oligonucleotide
  Sense strand starting at position 3449 of SEQ ID NO: 1884750
agaggagucuuggcuucca

SEQ ID NO: 2289195 - RNA, 19 nt, Artificial Sequence
  Description of Artificial Sequence: Synthetic oligonucleotide
  Antisense strand to SEQ ID NO: 2289194
uggaagccaagacuccucu

SEQ ID NO: 2289196 - RNA, 19 nt, Artificial Sequence
  Description of Artificial Sequence: Synthetic oligonucleotide
  Sense strand starting at position 3765 of SEQ ID NO: 1884750
ucuacaaaucgugguggaa

SEQ ID NO: 2289197 - RNA, 19 nt, Artificial Sequence
  Description of Artificial Sequence: Synthetic oligonucleotide
  Antisense strand to SEQ ID NO: 2289196
uuccaccacgauuuguaga

SEQ ID NO: 2289198 - RNA, 19 nt, Artificial Sequence
  Description of Artificial Sequence: Synthetic oligonucleotide
  Sense strand starting at position 3768 of SEQ ID NO: 1884750
acaaaucgugguggaacaa

SEQ ID NO: 2289199 - RNA, 19 nt, Artificial Sequence
  Description of Artificial Sequence: Synthetic oligonucleotide
  Antisense strand to SEQ ID NO: 2289198
uuguuccaccacgauuugu

SEQ ID NO: 2289200 - RNA, 19 nt, Artificial Sequence
  Description of Artificial Sequence: Synthetic oligonucleotide
  Sense strand starting at position 3769 of SEQ ID NO: 1884750
caaaucgugguggaacaau

SEQ ID NO: 2289201 - RNA, 19 nt, Artificial Sequence
  Description of Artificial Sequence: Synthetic oligonucleotide
  Antisense strand to SEQ ID NO: 2289200
auuguuccaccacgauuug

SEQ ID NO: 2289202 - RNA, 19 nt, Artificial Sequence
  Description of Artificial Sequence: Synthetic oligonucleotide
  Sense strand starting at position 3780 of SEQ ID NO: 1884750
ggaacaauuggcuaucgcu

SEQ ID NO: 2289203 - RNA, 19 nt, Artificial Sequence
  Description of Artificial Sequence: Synthetic oligonucleotide
  Antisense strand to SEQ ID NO: 2289202
agcgauagccaauuguucc

SEQ ID NO: 2289204 - RNA, 19 nt, Artificial Sequence
  Description of Artificial Sequence: Synthetic oligonucleotide
  Sense strand starting at position 3799 of SEQ ID NO: 1884750
guauacaugcaauagcuaa

SEQ ID NO: 2289205 - RNA, 19 nt, Artificial Sequence
  Description of Artificial Sequence: Synthetic oligonucleotide
  Antisense strand to SEQ ID NO: 2289204
uuagcuauugcauguauac

SEQ ID NO: 2289206 - RNA, 19 nt, Artificial Sequence
  Description of Artificial Sequence: Synthetic oligonucleotide
  Sense strand starting at position 203 of SEQ ID NO: 1884751
uguaaagcuccauauaugu

SEQ ID NO: 2289207 - RNA, 19 nt, Artificial Sequence
  Description of Artificial Sequence: Synthetic oligonucleotide
  Antisense strand to SEQ ID NO: 2289206
acauauauggagcuuuaca

SEQ ID NO: 2289208 - RNA, 19 nt, Artificial Sequence
  Description of Artificial Sequence: Synthetic oligonucleotide
  Sense strand starting at position 208 of SEQ ID NO: 1884751
agcuccauauaugugaaau

SEQ ID NO: 2289209 - RNA, 19 nt, Artificial Sequence
  Description of Artificial Sequence: Synthetic oligonucleotide
  Antisense strand to SEQ ID NO: 2289208
auuucacauauauggagcu

SEQ ID NO: 2289210 - RNA, 19 nt, Artificial Sequence
  Description of Artificial Sequence: Synthetic oligonucleotide
  Sense strand starting at position 333 of SEQ ID NO: 1884751
gguggugguucaguaucuu

SEQ ID NO: 2289211 - RNA, 19 nt, Artificial Sequence
  Description of Artificial Sequence: Synthetic oligonucleotide
  Antisense strand to SEQ ID NO: 2289210
aagauacugaaccaccacc

SEQ ID NO: 2289212 - RNA, 19 nt, Artificial Sequence
  Description of Artificial Sequence: Synthetic oligonucleotide
  Sense strand starting at position 359 of SEQ ID NO: 1884751
guguuaauuacauaggugu

SEQ ID NO: 2289213 - RNA, 19 nt, Artificial Sequence
  Description of Artificial Sequence: Synthetic oligonucleotide
  Antisense strand to SEQ ID NO: 2289212
acaccuauguaauuaacac

SEQ ID NO: 2289214 - RNA, 19 nt, Artificial Sequence
  Description of Artificial Sequence: Synthetic oligonucleotide
  Sense strand starting at position 361 of SEQ ID NO: 1884751
guuaauuacauagguguau

SEQ ID NO: 2289215 - RNA, 19 nt, Artificial Sequence
  Description of Artificial Sequence: Synthetic oligonucleotide
  Antisense strand to SEQ ID NO: 2289214
auacaccuauguaauuaac

SEQ ID NO: 2289216 - RNA, 19 nt, Artificial Sequence
  Description of Artificial Sequence: Synthetic oligonucleotide
  Sense strand starting at position 403 of SEQ ID NO: 1884751
caccuaagaugugugcauu

SEQ ID NO: 2289217 - RNA, 19 nt, Artificial Sequence
  Description of Artificial Sequence: Synthetic oligonucleotide
  Antisense strand to SEQ ID NO: 2289216
aaugcacacaucuuaggug

SEQ ID NO: 2289218 - RNA, 19 nt, Artificial Sequence
  Description of Artificial Sequence: Synthetic oligonucleotide
  Sense strand starting at position 404 of SEQ ID NO: 1884751
accuaagaugugugcauuu

SEQ ID NO: 2289219 - RNA, 19 nt, Artificial Sequence
  Description of Artificial Sequence: Synthetic oligonucleotide
  Antisense strand to SEQ ID NO: 2289218
aaaugcacacaucuuaggu

SEQ ID NO: 2289220 - RNA, 19 nt, Artificial Sequence
  Description of Artificial Sequence: Synthetic oligonucleotide
  Sense strand starting at position 421 of SEQ ID NO: 1884751
uuuauugcacguuaagaau

SEQ ID NO: 2289221 - RNA, 19 nt, Artificial Sequence
  Description of Artificial Sequence: Synthetic oligonucleotide
  Antisense strand to SEQ ID NO: 2289220
auucuuaacgugcaauaaa

SEQ ID NO: 2289222 - RNA, 19 nt, Artificial Sequence
  Description of Artificial Sequence: Synthetic oligonucleotide
  Sense strand starting at position 553 of SEQ ID NO: 1884751
agccuccgucucuacuaaa

SEQ ID NO: 2289223 - RNA, 19 nt, Artificial Sequence
  Description of Artificial Sequence: Synthetic oligonucleotide
  Antisense strand to SEQ ID NO: 2289222
uuuaguagagacggaggcu

SEQ ID NO: 2289224 - RNA, 19 nt, Artificial Sequence
  Description of Artificial Sequence: Synthetic oligonucleotide
  Sense strand starting at position 890 of SEQ ID NO: 1884751
ucuuaugucuugucacauc

SEQ ID NO: 2289225 - RNA, 19 nt, Artificial Sequence
  Description of Artificial Sequence: Synthetic oligonucleotide
  Antisense strand to SEQ ID NO: 2289224
gaugugacaagacauaaga

SEQ ID NO: 2289226 - RNA, 19 nt, Artificial Sequence
  Description of Artificial Sequence: Synthetic oligonucleotide
  Sense strand starting at position 1000 of SEQ ID NO: 1884751
cgcagauaauuugcucuuu

SEQ ID NO: 2289227 - RNA, 19 nt, Artificial Sequence
  Description of Artificial Sequence: Synthetic oligonucleotide
  Antisense strand to SEQ ID NO: 2289226
aaagagcaaauuaucugcg

SEQ ID NO: 2289228 - RNA, 19 nt, Artificial Sequence
  Description of Artificial Sequence: Synthetic oligonucleotide
  Sense strand starting at position 1179 of SEQ ID NO: 1884751
ggacuaauaugauacucua

SEQ ID NO: 2289229 - RNA, 19 nt, Artificial Sequence
  Description of Artificial Sequence: Synthetic oligonucleotide
  Antisense strand to SEQ ID NO: 2289228
uagaguaucauauuagucc

SEQ ID NO: 2289230 - RNA, 19 nt, Artificial Sequence
  Description of Artificial Sequence: Synthetic oligonucleotide
  Sense strand starting at position 1269 of SEQ ID NO: 1884751
cuucguauuucccugcaga

SEQ ID NO: 2289231 - RNA, 19 nt, Artificial Sequence
  Description of Artificial Sequence: Synthetic oligonucleotide
  Antisense strand to SEQ ID NO: 2289230
ucugcagggaaauacgaag

SEQ ID NO: 2289232 - RNA, 19 nt, Artificial Sequence
  Description of Artificial Sequence: Synthetic oligonucleotide
  Sense strand starting at position 1270 of SEQ ID NO: 1884751
uucguauuucccugcagaa

SEQ ID NO: 2289233 - RNA, 19 nt, Artificial Sequence
  Description of Artificial Sequence: Synthetic oligonucleotide
  Antisense strand to SEQ ID NO: 2289232
uucugcagggaaauacgaa

SEQ ID NO: 2289234 - RNA, 19 nt, Artificial Sequence
  Description of Artificial Sequence: Synthetic oligonucleotide
  Sense strand starting at position 1329 of SEQ ID NO: 1884751
gcaggcugugaggguuaua

SEQ ID NO: 2289235 - RNA, 19 nt, Artificial Sequence
  Description of Artificial Sequence: Synthetic oligonucleotide
  Antisense strand to SEQ ID NO: 2289234
uauaacccucacagccugc

SEQ ID NO: 2289236 - RNA, 19 nt, Artificial Sequence
  Description of Artificial Sequence: Synthetic oligonucleotide
  Sense strand starting at position 1361 of SEQ ID NO: 1884751
agggcaaauagguguuuaa

SEQ ID NO: 2289237 - RNA, 19 nt, Artificial Sequence
  Description of Artificial Sequence: Synthetic oligonucleotide
  Antisense strand to SEQ ID NO: 2289236
uuaaacaccuauuugcccu

SEQ ID NO: 2289238 - RNA, 19 nt, Artificial Sequence
  Description of Artificial Sequence: Synthetic oligonucleotide
  Sense strand starting at position 1364 of SEQ ID NO: 1884751
gcaaauagguguuuaauua

SEQ ID NO: 2289239 - RNA, 19 nt, Artificial Sequence
  Description of Artificial Sequence: Synthetic oligonucleotide
  Antisense strand to SEQ ID NO: 2289238
uaauuaaacaccuauuugc

SEQ ID NO: 2289240 - RNA, 19 nt, Artificial Sequence
  Description of Artificial Sequence: Synthetic oligonucleotide
  Sense strand starting at position 1368 of SEQ ID NO: 1884751
auagguguuuaauuaagga

SEQ ID NO: 2289241 - RNA, 19 nt, Artificial Sequence
  Description of Artificial Sequence: Synthetic oligonucleotide
  Antisense strand to SEQ ID NO: 2289240
uccuuaauuaaacaccuau

SEQ ID NO: 2289242 - RNA, 19 nt, Artificial Sequence
  Description of Artificial Sequence: Synthetic oligonucleotide
  Sense strand starting at position 1382 of SEQ ID NO: 1884751
aaggacuaaugggaaugau

SEQ ID NO: 2289243 - RNA, 19 nt, Artificial Sequence
  Description of Artificial Sequence: Synthetic oligonucleotide
  Antisense strand to SEQ ID NO: 2289242
aucauucccauuaguccuu

SEQ ID NO: 2289244 - RNA, 19 nt, Artificial Sequence
  Description of Artificial Sequence: Synthetic oligonucleotide
  Sense strand starting at position 1448 of SEQ ID NO: 1884751
uccucauccucaccgagau

SEQ ID NO: 2289245 - RNA, 19 nt, Artificial Sequence
  Description of Artificial Sequence: Synthetic oligonucleotide
  Antisense strand to SEQ ID NO: 2289244
aucucggugaggaugagga

SEQ ID NO: 2289246 - RNA, 19 nt, Artificial Sequence
  Description of Artificial Sequence: Synthetic oligonucleotide
  Sense strand starting at position 1449 of SEQ ID NO: 1884751
ccucauccucaccgagaua

SEQ ID NO: 2289247 - RNA, 19 nt, Artificial Sequence
  Description of Artificial Sequence: Synthetic oligonucleotide
  Antisense strand to SEQ ID NO: 2289246
uaucucggugaggaugagg

SEQ ID NO: 2289248 - RNA, 19 nt, Artificial Sequence
  Description of Artificial Sequence: Synthetic oligonucleotide
  Sense strand starting at position 1631 of SEQ ID NO: 1884751
gggagcauuuaaggccaaa

SEQ ID NO: 2289249 - RNA, 19 nt, Artificial Sequence
  Description of Artificial Sequence: Synthetic oligonucleotide
  Antisense strand to SEQ ID NO: 2289248
uuuggccuuaaaugcuccc

SEQ ID NO: 2289250 - RNA, 19 nt, Artificial Sequence
  Description of Artificial Sequence: Synthetic oligonucleotide
  Sense strand starting at position 2212 of SEQ ID NO: 1884751
accugauuucggugaguuc

SEQ ID NO: 2289251 - RNA, 19 nt, Artificial Sequence
  Description of Artificial Sequence: Synthetic oligonucleotide
  Antisense strand to SEQ ID NO: 2289250
gaacucaccgaaaucaggu

SEQ ID NO: 2289252 - RNA, 19 nt, Artificial Sequence
  Description of Artificial Sequence: Synthetic oligonucleotide
  Sense strand starting at position 2766 of SEQ ID NO: 1884751
ccgggucuccuagagaaca

SEQ ID NO: 2289253 - RNA, 19 nt, Artificial Sequence
  Description of Artificial Sequence: Synthetic oligonucleotide
  Antisense strand to SEQ ID NO: 2289252
uguucucuaggagacccgg

SEQ ID NO: 2289254 - RNA, 19 nt, Artificial Sequence
  Description of Artificial Sequence: Synthetic oligonucleotide
  Sense strand starting at position 3217 of SEQ ID NO: 1884751
uaaggaguucucuggcugu

SEQ ID NO: 2289255 - RNA, 19 nt, Artificial Sequence
  Description of Artificial Sequence: Synthetic oligonucleotide
  Antisense strand to SEQ ID NO: 2289254
acagccagagaacuccuua

SEQ ID NO: 2289256 - RNA, 19 nt, Artificial Sequence
  Description of Artificial Sequence: Synthetic oligonucleotide
  Sense strand starting at position 3220 of SEQ ID NO: 1884751
ggaguucucuggcuguaga

SEQ ID NO: 2289257 - RNA, 19 nt, Artificial Sequence
  Description of Artificial Sequence: Synthetic oligonucleotide
  Antisense strand to SEQ ID NO: 2289256
ucuacagccagagaacucc

SEQ ID NO: 2289258 - RNA, 19 nt, Artificial Sequence
  Description of Artificial Sequence: Synthetic oligonucleotide
  Sense strand starting at position 3221 of SEQ ID NO: 1884751
gaguucucuggcuguagag

SEQ ID NO: 2289259 - RNA, 19 nt, Artificial Sequence
  Description of Artificial Sequence: Synthetic oligonucleotide
  Antisense strand to SEQ ID NO: 2289258
cucuacagccagagaacuc

SEQ ID NO: 2289260 - RNA, 19 nt, Artificial Sequence
  Description of Artificial Sequence: Synthetic oligonucleotide
  Sense strand starting at position 3275 of SEQ ID NO: 1884751
ggguccuccuucuuaagca

SEQ ID NO: 2289261 - RNA, 19 nt, Artificial Sequence
  Description of Artificial Sequence: Synthetic oligonucleotide
  Antisense strand to SEQ ID NO: 2289260
ugcuuaagaaggaggaccc

SEQ ID NO: 2289262 - RNA, 19 nt, Artificial Sequence
  Description of Artificial Sequence: Synthetic oligonucleotide
  Sense strand starting at position 3406 of SEQ ID NO: 1884751
ccauuugccuuguugcaga

SEQ ID NO: 2289263 - RNA, 19 nt, Artificial Sequence
  Description of Artificial Sequence: Synthetic oligonucleotide
  Antisense strand to SEQ ID NO: 2289262
ucugcaacaaggcaaaugg

SEQ ID NO: 2289264 - RNA, 19 nt, Artificial Sequence
  Description of Artificial Sequence: Synthetic oligonucleotide
  Sense strand starting at position 3535 of SEQ ID NO: 1884751
uggguuuccuaucccaaag

SEQ ID NO: 2289265 - RNA, 19 nt, Artificial Sequence
  Description of Artificial Sequence: Synthetic oligonucleotide
  Antisense strand to SEQ ID NO: 2289264
cuuugggauaggaaaccca

SEQ ID NO: 2289266 - RNA, 19 nt, Artificial Sequence
  Description of Artificial Sequence: Synthetic oligonucleotide
  Sense strand starting at position 3550 of SEQ ID NO: 1884751
aaagaaaccguguguauuc

SEQ ID NO: 2289267 - RNA, 19 nt, Artificial Sequence
  Description of Artificial Sequence: Synthetic oligonucleotide
  Antisense strand to SEQ ID NO: 2289266
gaauacacacgguuucuuu

SEQ ID NO: 2289268 - RNA, 19 nt, Artificial Sequence
  Description of Artificial Sequence: Synthetic oligonucleotide
  Sense strand starting at position 3730 of SEQ ID NO: 1884751
ucaugauaggccggugaag

SEQ ID NO: 2289269 - RNA, 19 nt, Artificial Sequence
  Description of Artificial Sequence: Synthetic oligonucleotide
  Antisense strand to SEQ ID NO: 2289268
cuucaccggccuaucauga

SEQ ID NO: 2289270 - RNA, 19 nt, Artificial Sequence
  Description of Artificial Sequence: Synthetic oligonucleotide
  Sense strand starting at position 3763 of SEQ ID NO: 1884751
ggagcaagcggguaucaau

SEQ ID NO: 2289271 - RNA, 19 nt, Artificial Sequence
  Description of Artificial Sequence: Synthetic oligonucleotide
  Antisense strand to SEQ ID NO: 2289270
auugauacccgcuugcucc

SEQ ID NO: 2289272 - RNA, 19 nt, Artificial Sequence
  Description of Artificial Sequence: Synthetic oligonucleotide
  Sense strand starting at position 3876 of SEQ ID NO: 1884751
cuuuaaaugucaguaguug

SEQ ID NO: 2289273 - RNA, 19 nt, Artificial Sequence
  Description of Artificial Sequence: Synthetic oligonucleotide
  Antisense strand to SEQ ID NO: 2289272
caacuacugacauuuaaag

SEQ ID NO: 2289274 - RNA, 19 nt, Artificial Sequence
  Description of Artificial Sequence: Synthetic oligonucleotide
  Sense strand starting at position 3893 of SEQ ID NO: 1884751
uggacuagauagcucuaau

SEQ ID NO: 2289275 - RNA, 19 nt, Artificial Sequence
  Description of Artificial Sequence: Synthetic oligonucleotide
  Antisense strand to SEQ ID NO: 2289274
auuagagcuaucuagucca

SEQ ID NO: 2289276 - RNA, 19 nt, Artificial Sequence
  Description of Artificial Sequence: Synthetic oligonucleotide
  Sense strand starting at position 3929 of SEQ ID NO: 1884751
gacauugaaugguuccacu

SEQ ID NO: 2289277 - RNA, 19 nt, Artificial Sequence
  Description of Artificial Sequence: Synthetic oligonucleotide
  Antisense strand to SEQ ID NO: 2289276
aguggaaccauucaauguc

SEQ ID NO: 2289278 - RNA, 19 nt, Artificial Sequence
  Description of Artificial Sequence: Synthetic oligonucleotide
  Sense strand starting at position 3940 of SEQ ID NO: 1884751
guuccacugaugggugaau

SEQ ID NO: 2289279 - RNA, 19 nt, Artificial Sequence
  Description of Artificial Sequence: Synthetic oligonucleotide
  Antisense strand to SEQ ID NO: 2289278
auucacccaucaguggaac

SEQ ID NO: 2289280 - RNA, 19 nt, Artificial Sequence
  Description of Artificial Sequence: Synthetic oligonucleotide
  Sense strand starting at position 3966 of SEQ ID NO: 1884751
ggagaaagguccucuggca

SEQ ID NO: 2289281 - RNA, 19 nt, Artificial Sequence
  Description of Artificial Sequence: Synthetic oligonucleotide
  Antisense strand to SEQ ID NO: 2289280
ugccagaggaccuuucucc

SEQ ID NO: 2289282 - RNA, 19 nt, Artificial Sequence
  Description of Artificial Sequence: Synthetic oligonucleotide
  Sense strand starting at position 3979 of SEQ ID NO: 1884751
cuggcagaaugguuccauu

SEQ ID NO: 2289283 - RNA, 19 nt, Artificial Sequence
  Description of Artificial Sequence: Synthetic oligonucleotide
  Antisense strand to SEQ ID NO: 2289282
aauggaaccauucugccag

SEQ ID NO: 2289284 - RNA, 19 nt, Artificial Sequence
  Description of Artificial Sequence: Synthetic oligonucleotide
  Sense strand starting at position 3982 of SEQ ID NO: 1884751
gcagaaugguuccauuuag

SEQ ID NO: 2289285 - RNA, 19 nt, Artificial Sequence
  Description of Artificial Sequence: Synthetic oligonucleotide
  Antisense strand to SEQ ID NO: 2289284
cuaaauggaaccauucugc

SEQ ID NO: 2289286 - RNA, 19 nt, Artificial Sequence
  Description of Artificial Sequence: Synthetic oligonucleotide
  Sense strand starting at position 313 of SEQ ID NO: 1884752
gaaguuugagguuacugua

SEQ ID NO: 2289287 - RNA, 19 nt, Artificial Sequence
  Description of Artificial Sequence: Synthetic oligonucleotide
  Antisense strand to SEQ ID NO: 2289286
uacaguaaccucaaacuuc

SEQ ID NO: 2289288 - RNA, 19 nt, Artificial Sequence
  Description of Artificial Sequence: Synthetic oligonucleotide
  Sense strand starting at position 446 of SEQ ID NO: 1884752
agagguuacugucuuauaa

SEQ ID NO: 2289289 - RNA, 19 nt, Artificial Sequence
  Description of Artificial Sequence: Synthetic oligonucleotide
  Antisense strand to SEQ ID NO: 2289288
uuauaagacaguaaccucu

SEQ ID NO: 2289290 - RNA, 19 nt, Artificial Sequence
  Description of Artificial Sequence: Synthetic oligonucleotide
  Sense strand starting at position 515 of SEQ ID NO: 1884752
agagaauugcaaugcagag

SEQ ID NO: 2289291 - RNA, 19 nt, Artificial Sequence
  Description of Artificial Sequence: Synthetic oligonucleotide
  Antisense strand to SEQ ID NO: 2289290
cucugcauugcaauucucu

SEQ ID NO: 2289292 - RNA, 19 nt, Artificial Sequence
  Description of Artificial Sequence: Synthetic oligonucleotide
  Sense strand starting at position 532 of SEQ ID NO: 1884752
agauguaaaguuuaacugu

SEQ ID NO: 2289293 - RNA, 19 nt, Artificial Sequence
  Description of Artificial Sequence: Synthetic oligonucleotide
  Antisense strand to SEQ ID NO: 2289292
acaguuaaacuuuacaucu

SEQ ID NO: 2289294 - RNA, 19 nt, Artificial Sequence
  Description of Artificial Sequence: Synthetic oligonucleotide
  Sense strand starting at position 610 of SEQ ID NO: 1884752
uuacuaauccuugaguaug

SEQ ID NO: 2289295 - RNA, 19 nt, Artificial Sequence
  Description of Artificial Sequence: Synthetic oligonucleotide
  Antisense strand to SEQ ID NO: 2289294
cauacucaaggauuaguaa

SEQ ID NO: 2289296 - RNA, 19 nt, Artificial Sequence
  Description of Artificial Sequence: Synthetic oligonucleotide
  Sense strand starting at position 718 of SEQ ID NO: 1884752
ugagcaaaggcguaauagu

SEQ ID NO: 2289297 - RNA, 19 nt, Artificial Sequence
  Description of Artificial Sequence: Synthetic oligonucleotide
  Antisense strand to SEQ ID NO: 2289296
acuauuacgccuuugcuca

SEQ ID NO: 2289298 - RNA, 19 nt, Artificial Sequence
  Description of Artificial Sequence: Synthetic oligonucleotide
  Sense strand starting at position 749 of SEQ ID NO: 1884752
uugguaauguuucuuuaag

SEQ ID NO: 2289299 - RNA, 19 nt, Artificial Sequence
  Description of Artificial Sequence: Synthetic oligonucleotide
  Antisense strand to SEQ ID NO: 2289298
cuuaaagaaacauuaccaa

SEQ ID NO: 2289300 - RNA, 19 nt, Artificial Sequence
  Description of Artificial Sequence: Synthetic oligonucleotide
  Sense strand starting at position 750 of SEQ ID NO: 1884752
ugguaauguuucuuuaaga

SEQ ID NO: 2289301 - RNA, 19 nt, Artificial Sequence
  Description of Artificial Sequence: Synthetic oligonucleotide
  Antisense strand to SEQ ID NO: 2289300
ucuuaaagaaacauuacca

SEQ ID NO: 2289302 - RNA, 19 nt, Artificial Sequence
  Description of Artificial Sequence: Synthetic oligonucleotide
  Sense strand starting at position 751 of SEQ ID NO: 1884752
gguaauguuucuuuaagag

SEQ ID NO: 2289303 - RNA, 19 nt, Artificial Sequence
  Description of Artificial Sequence: Synthetic oligonucleotide
  Antisense strand to SEQ ID NO: 2289302
cucuuaaagaaacauuacc

SEQ ID NO: 2289304 - RNA, 19 nt, Artificial Sequence
  Description of Artificial Sequence: Synthetic oligonucleotide
  Sense strand starting at position 757 of SEQ ID NO: 1884752
guuucuuuaagaggaaugu

SEQ ID NO: 2289305 - RNA, 19 nt, Artificial Sequence
  Description of Artificial Sequence: Synthetic oligonucleotide
  Antisense strand to SEQ ID NO: 2289304
acauuccucuuaaagaaac

SEQ ID NO: 2289306 - RNA, 19 nt, Artificial Sequence
  Description of Artificial Sequence: Synthetic oligonucleotide
  Sense strand starting at position 761 of SEQ ID NO: 1884752
cuuuaagaggaauguauau

SEQ ID NO: 2289307 - RNA, 19 nt, Artificial Sequence
  Description of Artificial Sequence: Synthetic oligonucleotide
  Antisense strand to SEQ ID NO: 2289306
auauacauuccucuuaaag

SEQ ID NO: 2289308 - RNA, 19 nt, Artificial Sequence
  Description of Artificial Sequence: Synthetic oligonucleotide
  Sense strand starting at position 802 of SEQ ID NO: 1884752
ugcuucugguaaguaauuu

SEQ ID NO: 2289309 - RNA, 19 nt, Artificial Sequence
  Description of Artificial Sequence: Synthetic oligonucleotide
  Antisense strand to SEQ ID NO: 2289308
aaauuacuuaccagaagca

SEQ ID NO: 2289310 - RNA, 19 nt, Artificial Sequence
  Description of Artificial Sequence: Synthetic oligonucleotide
  Sense strand starting at position 1268 of SEQ ID NO: 1884752
auguaacuugacuguccaa

SEQ ID NO: 2289311 - RNA, 19 nt, Artificial Sequence
  Description of Artificial Sequence: Synthetic oligonucleotide
  Antisense strand to SEQ ID NO: 2289310
uuggacagucaaguuacau

SEQ ID NO: 2289312 - RNA, 19 nt, Artificial Sequence
  Description of Artificial Sequence: Synthetic oligonucleotide
  Sense strand starting at position 1474 of SEQ ID NO: 1884752
ggaaacugauugccucaaa

SEQ ID NO: 2289313 - RNA, 19 nt, Artificial Sequence
  Description of Artificial Sequence: Synthetic oligonucleotide
  Antisense strand to SEQ ID NO: 2289312
uuugaggcaaucaguuucc

SEQ ID NO: 2289314 - RNA, 19 nt, Artificial Sequence
  Description of Artificial Sequence: Synthetic oligonucleotide
  Sense strand starting at position 1560 of SEQ ID NO: 1884752
cauugauuccuggagccca

SEQ ID NO: 2289315 - RNA, 19 nt, Artificial Sequence
  Description of Artificial Sequence: Synthetic oligonucleotide
  Antisense strand to SEQ ID NO: 2289314
ugggcuccaggaaucaaug

SEQ ID NO: 2289316 - RNA, 19 nt, Artificial Sequence
  Description of Artificial Sequence: Synthetic oligonucleotide
  Sense strand starting at position 1828 of SEQ ID NO: 1884752
cggcuuuggacucagggaa

SEQ ID NO: 2289317 - RNA, 19 nt, Artificial Sequence
  Description of Artificial Sequence: Synthetic oligonucleotide
  Antisense strand to SEQ ID NO: 2289316
uucccugaguccaaagccg

SEQ ID NO: 2289318 - RNA, 19 nt, Artificial Sequence
  Description of Artificial Sequence: Synthetic oligonucleotide
  Sense strand starting at position 2089 of SEQ ID NO: 1884752
gcgucucuccuggcuuaga

SEQ ID NO: 2289319 - RNA, 19 nt, Artificial Sequence
  Description of Artificial Sequence: Synthetic oligonucleotide
  Antisense strand to SEQ ID NO: 2289318
ucuaagccaggagagacgc

SEQ ID NO: 2289320 - RNA, 19 nt, Artificial Sequence
  Description of Artificial Sequence: Synthetic oligonucleotide
  Sense strand starting at position 2105 of SEQ ID NO: 1884752
agaggauaguggcuuggaa

SEQ ID NO: 2289321 - RNA, 19 nt, Artificial Sequence
  Description of Artificial Sequence: Synthetic oligonucleotide
  Antisense strand to SEQ ID NO: 2289320
uuccaagccacuauccucu

SEQ ID NO: 2289322 - RNA, 19 nt, Artificial Sequence
  Description of Artificial Sequence: Synthetic oligonucleotide
  Sense strand starting at position 2215 of SEQ ID NO: 1884752
agaagaaaguaguuaucuu

SEQ ID NO: 2289323 - RNA, 19 nt, Artificial Sequence
  Description of Artificial Sequence: Synthetic oligonucleotide
  Antisense strand to SEQ ID NO: 2289322
aagauaacuacuuucuucu

SEQ ID NO: 2289324 - RNA, 19 nt, Artificial Sequence
  Description of Artificial Sequence: Synthetic oligonucleotide
  Sense strand starting at position 2351 of SEQ ID NO: 1884752
cugagauaaucagugauug

SEQ ID NO: 2289325 - RNA, 19 nt, Artificial Sequence
  Description of Artificial Sequence: Synthetic oligonucleotide
  Antisense strand to SEQ ID NO: 2289324
caaucacugauuaucucag

SEQ ID NO: 2289326 - RNA, 19 nt, Artificial Sequence
  Description of Artificial Sequence: Synthetic oligonucleotide
  Sense strand starting at position 2356 of SEQ ID NO: 1884752
auaaucagugauuguguca

SEQ ID NO: 2289327 - RNA, 19 nt, Artificial Sequence
  Description of Artificial Sequence: Synthetic oligonucleotide
  Antisense strand to SEQ ID NO: 2289326
ugacacaaucacugauuau

SEQ ID NO: 2289328 - RNA, 19 nt, Artificial Sequence
  Description of Artificial Sequence: Synthetic oligonucleotide
  Sense strand starting at position 2578 of SEQ ID NO: 1884752
agcugaaaccucgaaucca

SEQ ID NO: 2289329 - RNA, 19 nt, Artificial Sequence
  Description of Artificial Sequence: Synthetic oligonucleotide
  Antisense strand to SEQ ID NO: 2289328
uggauucgagguuucagcu

SEQ ID NO: 2289330 - RNA, 19 nt, Artificial Sequence
  Description of Artificial Sequence: Synthetic oligonucleotide
  Sense strand starting at position 2617 of SEQ ID NO: 1884752
cuuuguuaucaguaaugag

SEQ ID NO: 2289331 - RNA, 19 nt, Artificial Sequence
  Description of Artificial Sequence: Synthetic oligonucleotide
  Antisense strand to SEQ ID NO: 2289330
cucauuacugauaacaaag

SEQ ID NO: 2289332 - RNA, 19 nt, Artificial Sequence
  Description of Artificial Sequence: Synthetic oligonucleotide
  Sense strand starting at position 2914 of SEQ ID NO: 1884752
ccuagagacuaguuuaaau

SEQ ID NO: 2289333 - RNA, 19 nt, Artificial Sequence
  Description of Artificial Sequence: Synthetic oligonucleotide
  Antisense strand to SEQ ID NO: 2289332
auuuaaacuagucucuagg

SEQ ID NO: 2289334 - RNA, 19 nt, Artificial Sequence
  Description of Artificial Sequence: Synthetic oligonucleotide
  Sense strand starting at position 2959 of SEQ ID NO: 1884752
uugagauucccuuggaaug

SEQ ID NO: 2289335 - RNA, 19 nt, Artificial Sequence
  Description of Artificial Sequence: Synthetic oligonucleotide
  Antisense strand to SEQ ID NO: 2289334
cauuccaagggaaucucaa

SEQ ID NO: 2289336 - RNA, 19 nt, Artificial Sequence
  Description of Artificial Sequence: Synthetic oligonucleotide
  Sense strand starting at position 2977 of SEQ ID NO: 1884752
ggcagaaacauugguagcu

SEQ ID NO: 2289337 - RNA, 19 nt, Artificial Sequence
  Description of Artificial Sequence: Synthetic oligonucleotide
  Antisense strand to SEQ ID NO: 2289336
agcuaccaauguuucugcc

SEQ ID NO: 2289338 - RNA, 19 nt, Artificial Sequence
  Description of Artificial Sequence: Synthetic oligonucleotide
  Sense strand starting at position 2986 of SEQ ID NO: 1884752
auugguagcugagcagaua

SEQ ID NO: 2289339 - RNA, 19 nt, Artificial Sequence
  Description of Artificial Sequence: Synthetic oligonucleotide
  Antisense strand to SEQ ID NO: 2289338
uaucugcucagcuaccaau

SEQ ID NO: 2289340 - RNA, 19 nt, Artificial Sequence
  Description of Artificial Sequence: Synthetic oligonucleotide
  Sense strand starting at position 3062 of SEQ ID NO: 1884752
ggcagacaucuguacaauu

SEQ ID NO: 2289341 - RNA, 19 nt, Artificial Sequence
  Description of Artificial Sequence: Synthetic oligonucleotide
  Antisense strand to SEQ ID NO: 2289340
aauuguacagaugucugcc

SEQ ID NO: 2289342 - RNA, 19 nt, Artificial Sequence
  Description of Artificial Sequence: Synthetic oligonucleotide
  Sense strand starting at position 3093 of SEQ ID NO: 1884752
gggccuuuguauucugaaa

SEQ ID NO: 2289343 - RNA, 19 nt, Artificial Sequence
  Description of Artificial Sequence: Synthetic oligonucleotide
  Antisense strand to SEQ ID NO: 2289342
uuucagaauacaaaggccc

SEQ ID NO: 2289344 - RNA, 19 nt, Artificial Sequence
  Description of Artificial Sequence: Synthetic oligonucleotide
  Sense strand starting at position 3302 of SEQ ID NO: 1884752
gagauuugcuuugaggauu

SEQ ID NO: 2289345 - RNA, 19 nt, Artificial Sequence
  Description of Artificial Sequence: Synthetic oligonucleotide
  Antisense strand to SEQ ID NO: 2289344
aauccucaaagcaaaucuc

SEQ ID NO: 2289346 - RNA, 19 nt, Artificial Sequence
  Description of Artificial Sequence: Synthetic oligonucleotide
  Sense strand starting at position 3369 of SEQ ID NO: 1884752
augcgucagaacuagagaa

SEQ ID NO: 2289347 - RNA, 19 nt, Artificial Sequence
  Description of Artificial Sequence: Synthetic oligonucleotide
  Antisense strand to SEQ ID NO: 2289346
uucucuaguucugacgcau

SEQ ID NO: 2289348 - RNA, 19 nt, Artificial Sequence
  Description of Artificial Sequence: Synthetic oligonucleotide
  Sense strand starting at position 3371 of SEQ ID NO: 1884752
gcgucagaacuagagaaau

SEQ ID NO: 2289349 - RNA, 19 nt, Artificial Sequence
  Description of Artificial Sequence: Synthetic oligonucleotide
  Antisense strand to SEQ ID NO: 2289348
auuucucuaguucugacgc

SEQ ID NO: 2289350 - RNA, 19 nt, Artificial Sequence
  Description of Artificial Sequence: Synthetic oligonucleotide
  Sense strand starting at position 3382 of SEQ ID NO: 1884752
agagaaauaucaccucugu

SEQ ID NO: 2289351 - RNA, 19 nt, Artificial Sequence
  Description of Artificial Sequence: Synthetic oligonucleotide
  Antisense strand to SEQ ID NO: 2289350
acagaggugauauuucucu

SEQ ID NO: 2289352 - RNA, 19 nt, Artificial Sequence
  Description of Artificial Sequence: Synthetic oligonucleotide
  Sense strand starting at position 3464 of SEQ ID NO: 1884752
gucuuucuuagagacggua

SEQ ID NO: 2289353 - RNA, 19 nt, Artificial Sequence
  Description of Artificial Sequence: Synthetic oligonucleotide
  Antisense strand to SEQ ID NO: 2289352
uaccgucucuaagaaagac

SEQ ID NO: 2289354 - RNA, 19 nt, Artificial Sequence
  Description of Artificial Sequence: Synthetic oligonucleotide
  Sense strand starting at position 3466 of SEQ ID NO: 1884752
cuuucuuagagacgguaau

SEQ ID NO: 2289355 - RNA, 19 nt, Artificial Sequence
  Description of Artificial Sequence: Synthetic oligonucleotide
  Antisense strand to SEQ ID NO: 2289354
auuaccgucucuaagaaag

SEQ ID NO: 2289356 - RNA, 19 nt, Artificial Sequence
  Description of Artificial Sequence: Synthetic oligonucleotide
  Sense strand starting at position 3467 of SEQ ID NO: 1884752
uuucuuagagacgguaauu

SEQ ID NO: 2289357 - RNA, 19 nt, Artificial Sequence
  Description of Artificial Sequence: Synthetic oligonucleotide
  Antisense strand to SEQ ID NO: 2289356
aauuaccgucucuaagaaa

SEQ ID NO: 2289358 - RNA, 19 nt, Artificial Sequence
  Description of Artificial Sequence: Synthetic oligonucleotide
  Sense strand starting at position 3472 of SEQ ID NO: 1884752
uagagacgguaauucuuaa

SEQ ID NO: 2289359 - RNA, 19 nt, Artificial Sequence
  Description of Artificial Sequence: Synthetic oligonucleotide
  Antisense strand to SEQ ID NO: 2289358
uuaagaauuaccgucucua

SEQ ID NO: 2289360 - RNA, 19 nt, Artificial Sequence
  Description of Artificial Sequence: Synthetic oligonucleotide
  Sense strand starting at position 3495 of SEQ ID NO: 1884752
uuuguuccuggagacauua

SEQ ID NO: 2289361 - RNA, 19 nt, Artificial Sequence
  Description of Artificial Sequence: Synthetic oligonucleotide
  Antisense strand to SEQ ID NO: 2289360
uaaugucuccaggaacaaa

SEQ ID NO: 2289362 - RNA, 19 nt, Artificial Sequence
  Description of Artificial Sequence: Synthetic oligonucleotide
  Sense strand starting at position 3548 of SEQ ID NO: 1884752
uuaacuaggucauucugaa

SEQ ID NO: 2289363 - RNA, 19 nt, Artificial Sequence
  Description of Artificial Sequence: Synthetic oligonucleotide
  Antisense strand to SEQ ID NO: 2289362
uucagaaugaccuaguuaa

SEQ ID NO: 2289364 - RNA, 19 nt, Artificial Sequence
  Description of Artificial Sequence: Synthetic oligonucleotide
  Sense strand starting at position 3641 of SEQ ID NO: 1884752
aucauauaccuguacaugu

SEQ ID NO: 2289365 - RNA, 19 nt, Artificial Sequence
  Description of Artificial Sequence: Synthetic oligonucleotide
  Antisense strand to SEQ ID NO: 2289364
acauguacagguauaugau

SEQ ID NO: 2289366 - RNA, 19 nt, Artificial Sequence
  Description of Artificial Sequence: Synthetic oligonucleotide
  Sense strand starting at position 140 of SEQ ID NO: 1884753
cccugagaauuccugaacu

SEQ ID NO: 2289367 - RNA, 19 nt, Artificial Sequence
  Description of Artificial Sequence: Synthetic oligonucleotide
  Antisense strand to SEQ ID NO: 2289366
aguucaggaauucucaggg

SEQ ID NO: 2289368 - RNA, 19 nt, Artificial Sequence
  Description of Artificial Sequence: Synthetic oligonucleotide
  Sense strand starting at position 321 of SEQ ID NO: 1884753
augacucagucucuggauu

SEQ ID NO: 2289369 - RNA, 19 nt, Artificial Sequence
  Description of Artificial Sequence: Synthetic oligonucleotide
  Antisense strand to SEQ ID NO: 2289368
aauccagagacugagucau

SEQ ID NO: 2289370 - RNA, 19 nt, Artificial Sequence
  Description of Artificial Sequence: Synthetic oligonucleotide
  Sense strand starting at position 452 of SEQ ID NO: 1884753
gagacaauguucuuugcuu

SEQ ID NO: 2289371 - RNA, 19 nt, Artificial Sequence
  Description of Artificial Sequence: Synthetic oligonucleotide
  Antisense strand to SEQ ID NO: 2289370
aagcaaagaacauugucuc

SEQ ID NO: 2289372 - RNA, 19 nt, Artificial Sequence
  Description of Artificial Sequence: Synthetic oligonucleotide
  Sense strand starting at position 453 of SEQ ID NO: 1884753
agacaauguucuuugcuuu

SEQ ID NO: 2289373 - RNA, 19 nt, Artificial Sequence
  Description of Artificial Sequence: Synthetic oligonucleotide
  Antisense strand to SEQ ID NO: 2289372
aaagcaaagaacauugucu

SEQ ID NO: 2289374 - RNA, 19 nt, Artificial Sequence
  Description of Artificial Sequence: Synthetic oligonucleotide
  Sense strand starting at position 520 of SEQ ID NO: 1884753
ggguguggucccuagagac

SEQ ID NO: 2289375 - RNA, 19 nt, Artificial Sequence
  Description of Artificial Sequence: Synthetic oligonucleotide
  Antisense strand to SEQ ID NO: 2289374
gucucuagggaccacaccc

SEQ ID NO: 2289376 - RNA, 19 nt, Artificial Sequence
  Description of Artificial Sequence: Synthetic oligonucleotide
  Sense strand starting at position 675 of SEQ ID NO: 1884753
ggugguaagcuguaaugaa

SEQ ID NO: 2289377 - RNA, 19 nt, Artificial Sequence
  Description of Artificial Sequence: Synthetic oligonucleotide
  Antisense strand to SEQ ID NO: 2289376
uucauuacagcuuaccacc

SEQ ID NO: 2289378 - RNA, 19 nt, Artificial Sequence
  Description of Artificial Sequence: Synthetic oligonucleotide
  Sense strand starting at position 715 of SEQ ID NO: 1884753
ugaagugacagcuggacuu

SEQ ID NO: 2289379 - RNA, 19 nt, Artificial Sequence
  Description of Artificial Sequence: Synthetic oligonucleotide
  Antisense strand to SEQ ID NO: 2289378
aaguccagcugucacuuca

SEQ ID NO: 2289380 - RNA, 19 nt, Artificial Sequence
  Description of Artificial Sequence: Synthetic oligonucleotide
  Sense strand starting at position 769 of SEQ ID NO: 1884753
uuguaaaugccagggaagu

SEQ ID NO: 2289381 - RNA, 19 nt, Artificial Sequence
  Description of Artificial Sequence: Synthetic oligonucleotide
  Antisense strand to SEQ ID NO: 2289380
acuucccuggcauuuacaa

SEQ ID NO: 2289382 - RNA, 19 nt, Artificial Sequence
  Description of Artificial Sequence: Synthetic oligonucleotide
  Sense strand starting at position 770 of SEQ ID NO: 1884753
uguaaaugccagggaaguu

SEQ ID NO: 2289383 - RNA, 19 nt, Artificial Sequence
  Description of Artificial Sequence: Synthetic oligonucleotide
  Antisense strand to SEQ ID NO: 2289382
aacuucccuggcauuuaca

SEQ ID NO: 2289384 - RNA, 19 nt, Artificial Sequence
  Description of Artificial Sequence: Synthetic oligonucleotide
  Sense strand starting at position 771 of SEQ ID NO: 1884753
guaaaugccagggaaguua

SEQ ID NO: 2289385 - RNA, 19 nt, Artificial Sequence
  Description of Artificial Sequence: Synthetic oligonucleotide
  Antisense strand to SEQ ID NO: 2289384
uaacuucccuggcauuuac

SEQ ID NO: 2289386 - RNA, 19 nt, Artificial Sequence
  Description of Artificial Sequence: Synthetic oligonucleotide
  Sense strand starting at position 850 of SEQ ID NO: 1884753
agugcuaggacucagaguu

SEQ ID NO: 2289387 - RNA, 19 nt, Artificial Sequence
  Description of Artificial Sequence: Synthetic oligonucleotide
  Antisense strand to SEQ ID NO: 2289386
aacucugaguccuagcacu

SEQ ID NO: 2289388 - RNA, 19 nt, Artificial Sequence
  Description of Artificial Sequence: Synthetic oligonucleotide
  Sense strand starting at position 1189 of SEQ ID NO: 1884753
cugcuaguugccgaaauuu

SEQ ID NO: 2289389 - RNA, 19 nt, Artificial Sequence
  Description of Artificial Sequence: Synthetic oligonucleotide
  Antisense strand to SEQ ID NO: 2289388
aaauuucggcaacuagcag

SEQ ID NO: 2289390 - RNA, 19 nt, Artificial Sequence
  Description of Artificial Sequence: Synthetic oligonucleotide
  Sense strand starting at position 1748 of SEQ ID NO: 1884753
ccuggauaugguuaguuac

SEQ ID NO: 2289391 - RNA, 19 nt, Artificial Sequence
  Description of Artificial Sequence: Synthetic oligonucleotide
  Antisense strand to SEQ ID NO: 2289390
guaacuaaccauauccagg

SEQ ID NO: 2289392 - RNA, 19 nt, Artificial Sequence
  Description of Artificial Sequence: Synthetic oligonucleotide
  Sense strand starting at position 1754 of SEQ ID NO: 1884753
uaugguuaguuacucgaga

SEQ ID NO: 2289393 - RNA, 19 nt, Artificial Sequence
  Description of Artificial Sequence: Synthetic oligonucleotide
  Antisense strand to SEQ ID NO: 2289392
ucucgaguaacuaaccaua

SEQ ID NO: 2289394 - RNA, 19 nt, Artificial Sequence
  Description of Artificial Sequence: Synthetic oligonucleotide
  Sense strand starting at position 1755 of SEQ ID NO: 1884753
augguuaguuacucgagau

SEQ ID NO: 2289395 - RNA, 19 nt, Artificial Sequence
  Description of Artificial Sequence: Synthetic oligonucleotide
  Antisense strand to SEQ ID NO: 2289394
aucucgaguaacuaaccau

SEQ ID NO: 2289396 - RNA, 19 nt, Artificial Sequence
  Description of Artificial Sequence: Synthetic oligonucleotide
  Sense strand starting at position 2024 of SEQ ID NO: 1884753
ucuugagaccuugggugaa

SEQ ID NO: 2289397 - RNA, 19 nt, Artificial Sequence
  Description of Artificial Sequence: Synthetic oligonucleotide
  Antisense strand to SEQ ID NO: 2289396
uucacccaaggucucaaga

SEQ ID NO: 2289398 - RNA, 19 nt, Artificial Sequence
  Description of Artificial Sequence: Synthetic oligonucleotide
  Sense strand starting at position 2027 of SEQ ID NO: 1884753
ugagaccuugggugaagau

SEQ ID NO: 2289399 - RNA, 19 nt, Artificial Sequence
  Description of Artificial Sequence: Synthetic oligonucleotide
  Antisense strand to SEQ ID NO: 2289398
aucuucacccaaggucuca

SEQ ID NO: 2289400 - RNA, 19 nt, Artificial Sequence
  Description of Artificial Sequence: Synthetic oligonucleotide
  Sense strand starting at position 2217 of SEQ ID NO: 1884753
ucuaucaccguuuaauuga

SEQ ID NO: 2289401 - RNA, 19 nt, Artificial Sequence
  Description of Artificial Sequence: Synthetic oligonucleotide
  Antisense strand to SEQ ID NO: 2289400
ucaauuaaacggugauaga

SEQ ID NO: 2289402 - RNA, 19 nt, Artificial Sequence
  Description of Artificial Sequence: Synthetic oligonucleotide
  Sense strand starting at position 2400 of SEQ ID NO: 1884753
cucagcucugggugaucau

SEQ ID NO: 2289403 - RNA, 19 nt, Artificial Sequence
  Description of Artificial Sequence: Synthetic oligonucleotide
  Antisense strand to SEQ ID NO: 2289402
augaucacccagagcugag

SEQ ID NO: 2289404 - RNA, 19 nt, Artificial Sequence
  Description of Artificial Sequence: Synthetic oligonucleotide
  Sense strand starting at position 2401 of SEQ ID NO: 1884753
ucagcucugggugaucauu

SEQ ID NO: 2289405 - RNA, 19 nt, Artificial Sequence
  Description of Artificial Sequence: Synthetic oligonucleotide
  Antisense strand to SEQ ID NO: 2289404
aaugaucacccagagcuga

SEQ ID NO: 2289406 - RNA, 19 nt, Artificial Sequence
  Description of Artificial Sequence: Synthetic oligonucleotide
  Sense strand starting at position 2407 of SEQ ID NO: 1884753
cugggugaucauuguagag

SEQ ID NO: 2289407 - RNA, 19 nt, Artificial Sequence
  Description of Artificial Sequence: Synthetic oligonucleotide
  Antisense strand to SEQ ID NO: 2289406
cucuacaaugaucacccag

SEQ ID NO: 2289408 - RNA, 19 nt, Artificial Sequence
  Description of Artificial Sequence: Synthetic oligonucleotide
  Sense strand starting at position 2476 of SEQ ID NO: 1884753
cgggcugugugaauguaga

SEQ ID NO: 2289409 - RNA, 19 nt, Artificial Sequence
  Description of Artificial Sequence: Synthetic oligonucleotide
  Antisense strand to SEQ ID NO: 2289408
ucuacauucacacagcccg

SEQ ID NO: 2289410 - RNA, 19 nt, Artificial Sequence
  Description of Artificial Sequence: Synthetic oligonucleotide
  Sense strand starting at position 2551 of SEQ ID NO: 1884753
agcguaagugcugugccaa

SEQ ID NO: 2289411 - RNA, 19 nt, Artificial Sequence
  Description of Artificial Sequence: Synthetic oligonucleotide
  Antisense strand to SEQ ID NO: 2289410
uuggcacagcacuuacgcu

SEQ ID NO: 2289412 - RNA, 19 nt, Artificial Sequence
  Description of Artificial Sequence: Synthetic oligonucleotide
  Sense strand starting at position 2554 of SEQ ID NO: 1884753
guaagugcugugccaaagu

SEQ ID NO: 2289413 - RNA, 19 nt, Artificial Sequence
  Description of Artificial Sequence: Synthetic oligonucleotide
  Antisense strand to SEQ ID NO: 2289412
acuuuggcacagcacuuac

SEQ ID NO: 2289414 - RNA, 19 nt, Artificial Sequence
  Description of Artificial Sequence: Synthetic oligonucleotide
  Sense strand starting at position 2585 of SEQ ID NO: 1884753
auauaaggccucugugaac

SEQ ID NO: 2289415 - RNA, 19 nt, Artificial Sequence
  Description of Artificial Sequence: Synthetic oligonucleotide
  Antisense strand to SEQ ID NO: 2289414
guucacagaggccuuauau

SEQ ID NO: 2289416 - RNA, 19 nt, Artificial Sequence
  Description of Artificial Sequence: Synthetic oligonucleotide
  Sense strand starting at position 2611 of SEQ ID NO: 1884753
aaaugcuuccgggauuaac

SEQ ID NO: 2289417 - RNA, 19 nt, Artificial Sequence
  Description of Artificial Sequence: Synthetic oligonucleotide
  Antisense strand to SEQ ID NO: 2289416
guuaaucccggaagcauuu

SEQ ID NO: 2289418 - RNA, 19 nt, Artificial Sequence
  Description of Artificial Sequence: Synthetic oligonucleotide
  Sense strand starting at position 2623 of SEQ ID NO: 1884753
gauuaacuccagcgagaac

SEQ ID NO: 2289419 - RNA, 19 nt, Artificial Sequence
  Description of Artificial Sequence: Synthetic oligonucleotide
  Antisense strand to SEQ ID NO: 2289418
guucucgcuggaguuaauc

SEQ ID NO: 2289420 - RNA, 19 nt, Artificial Sequence
  Description of Artificial Sequence: Synthetic oligonucleotide
  Sense strand starting at position 2704 of SEQ ID NO: 1884753
uaacauguugggugacuuu

SEQ ID NO: 2289421 - RNA, 19 nt, Artificial Sequence
  Description of Artificial Sequence: Synthetic oligonucleotide
  Antisense strand to SEQ ID NO: 2289420
aaagucacccaacauguua

SEQ ID NO: 2289422 - RNA, 19 nt, Artificial Sequence
  Description of Artificial Sequence: Synthetic oligonucleotide
  Sense strand starting at position 2723 of SEQ ID NO: 1884753
gggcaaguugcucaccauu

SEQ ID NO: 2289423 - RNA, 19 nt, Artificial Sequence
  Description of Artificial Sequence: Synthetic oligonucleotide
  Antisense strand to SEQ ID NO: 2289422
aauggugagcaacuugccc

SEQ ID NO: 2289424 - RNA, 19 nt, Artificial Sequence
  Description of Artificial Sequence: Synthetic oligonucleotide
  Sense strand starting at position 2733 of SEQ ID NO: 1884753
cucaccauucuagguuaua

SEQ ID NO: 2289425 - RNA, 19 nt, Artificial Sequence
  Description of Artificial Sequence: Synthetic oligonucleotide
  Antisense strand to SEQ ID NO: 2289424
uauaaccuagaauggugag

SEQ ID NO: 2289426 - RNA, 19 nt, Artificial Sequence
  Description of Artificial Sequence: Synthetic oligonucleotide
  Sense strand starting at position 2734 of SEQ ID NO: 1884753
ucaccauucuagguuauag

SEQ ID NO: 2289427 - RNA, 19 nt, Artificial Sequence
  Description of Artificial Sequence: Synthetic oligonucleotide
  Antisense strand to SEQ ID NO: 2289426
cuauaaccuagaaugguga

SEQ ID NO: 2289428 - RNA, 19 nt, Artificial Sequence
  Description of Artificial Sequence: Synthetic oligonucleotide
  Sense strand starting at position 2736 of SEQ ID NO: 1884753
accauucuagguuauaguu

SEQ ID NO: 2289429 - RNA, 19 nt, Artificial Sequence
  Description of Artificial Sequence: Synthetic oligonucleotide
  Antisense strand to SEQ ID NO: 2289428
aacuauaaccuagaauggu

SEQ ID NO: 2289430 - RNA, 19 nt, Artificial Sequence
  Description of Artificial Sequence: Synthetic oligonucleotide
  Sense strand starting at position 2785 of SEQ ID NO: 1884753
ggauuaaaucggugguucu

SEQ ID NO: 2289431 - RNA, 19 nt, Artificial Sequence
  Description of Artificial Sequence: Synthetic oligonucleotide
  Antisense strand to SEQ ID NO: 2289430
agaaccaccgauuuaaucc

SEQ ID NO: 2289432 - RNA, 19 nt, Artificial Sequence
  Description of Artificial Sequence: Synthetic oligonucleotide
  Sense strand starting at position 2786 of SEQ ID NO: 1884753
gauuaaaucggugguucuc

SEQ ID NO: 2289433 - RNA, 19 nt, Artificial Sequence
  Description of Artificial Sequence: Synthetic oligonucleotide
  Antisense strand to SEQ ID NO: 2289432
gagaaccaccgauuuaauc

SEQ ID NO: 2289434 - RNA, 19 nt, Artificial Sequence
  Description of Artificial Sequence: Synthetic oligonucleotide
  Sense strand starting at position 2798 of SEQ ID NO: 1884753
gguucucaacccuggcuaa

SEQ ID NO: 2289435 - RNA, 19 nt, Artificial Sequence
  Description of Artificial Sequence: Synthetic oligonucleotide
  Antisense strand to SEQ ID NO: 2289434
uuagccaggguugagaacc

SEQ ID NO: 2289436 - RNA, 19 nt, Artificial Sequence
  Description of Artificial Sequence: Synthetic oligonucleotide
  Sense strand starting at position 2809 of SEQ ID NO: 1884753
cuggcuaagcauuagaauc

SEQ ID NO: 2289437 - RNA, 19 nt, Artificial Sequence
  Description of Artificial Sequence: Synthetic oligonucleotide
  Antisense strand to SEQ ID NO: 2289436
gauucuaaugcuuagccag

SEQ ID NO: 2289438 - RNA, 19 nt, Artificial Sequence
  Description of Artificial Sequence: Synthetic oligonucleotide
  Sense strand starting at position 3935 of SEQ ID NO: 1884753
cuggccuuaucaguauauu

SEQ ID NO: 2289439 - RNA, 19 nt, Artificial Sequence
  Description of Artificial Sequence: Synthetic oligonucleotide
  Antisense strand to SEQ ID NO: 2289438
aauauacugauaaggccag

SEQ ID NO: 2289440 - RNA, 19 nt, Artificial Sequence
  Description of Artificial Sequence: Synthetic oligonucleotide
  Sense strand starting at position 3959 of SEQ ID NO: 1884753
agcuguucuggugauucua

SEQ ID NO: 2289441 - RNA, 19 nt, Artificial Sequence
  Description of Artificial Sequence: Synthetic oligonucleotide
  Antisense strand to SEQ ID NO: 2289440
uagaaucaccagaacagcu

SEQ ID NO: 2289442 - RNA, 19 nt, Artificial Sequence
  Description of Artificial Sequence: Synthetic oligonucleotide
  Sense strand starting at position 3961 of SEQ ID NO: 1884753
cuguucuggugauucuaau

SEQ ID NO: 2289443 - RNA, 19 nt, Artificial Sequence
  Description of Artificial Sequence: Synthetic oligonucleotide
  Antisense strand to SEQ ID NO: 2289442
auuagaaucaccagaacag

SEQ ID NO: 2289444 - RNA, 19 nt, Artificial Sequence
  Description of Artificial Sequence: Synthetic oligonucleotide
  Sense strand starting at position 3978 of SEQ ID NO: 1884753
auguguauccaggguugaa

SEQ ID NO: 2289445 - RNA, 19 nt, Artificial Sequence
  Description of Artificial Sequence: Synthetic oligonucleotide
  Antisense strand to SEQ ID NO: 2289444
uucaacccuggauacacau

SEQ ID NO: 2289446 - RNA, 19 nt, Artificial Sequence
  Description of Artificial Sequence: Synthetic oligonucleotide
  Sense strand starting at position 398 of SEQ ID NO: 1884754
cccugagaauuccugaacu

SEQ ID NO: 2289447 - RNA, 19 nt, Artificial Sequence
  Description of Artificial Sequence: Synthetic oligonucleotide
  Antisense strand to SEQ ID NO: 2289446
aguucaggaauucucaggg

SEQ ID NO: 2289448 - RNA, 19 nt, Artificial Sequence
  Description of Artificial Sequence: Synthetic oligonucleotide
  Sense strand starting at position 579 of SEQ ID NO: 1884754
augacucagucucuggauu

SEQ ID NO: 2289449 - RNA, 19 nt, Artificial Sequence
  Description of Artificial Sequence: Synthetic oligonucleotide
  Antisense strand to SEQ ID NO: 2289448
aauccagagacugagucau

SEQ ID NO: 2289450 - RNA, 19 nt, Artificial Sequence
  Description of Artificial Sequence: Synthetic oligonucleotide
  Sense strand starting at position 710 of SEQ ID NO: 1884754
gagacaauguucuuugcuu

SEQ ID NO: 2289451 - RNA, 19 nt, Artificial Sequence
  Description of Artificial Sequence: Synthetic oligonucleotide
  Antisense strand to SEQ ID NO: 2289450
aagcaaagaacauugucuc

SEQ ID NO: 2289452 - RNA, 19 nt, Artificial Sequence
  Description of Artificial Sequence: Synthetic oligonucleotide
  Sense strand starting at position 711 of SEQ ID NO: 1884754
agacaauguucuuugcuuu

SEQ ID NO: 2289453 - RNA, 19 nt, Artificial Sequence
  Description of Artificial Sequence: Synthetic oligonucleotide
  Antisense strand to SEQ ID NO: 2289452
aaagcaaagaacauugucu

SEQ ID NO: 2289454 - RNA, 19 nt, Artificial Sequence
  Description of Artificial Sequence: Synthetic oligonucleotide
  Sense strand starting at position 778 of SEQ ID NO: 1884754
ggguguggucccuagagac

SEQ ID NO: 2289455 - RNA, 19 nt, Artificial Sequence
  Description of Artificial Sequence: Synthetic oligonucleotide
  Antisense strand to SEQ ID NO: 2289454
gucucuagggaccacaccc

SEQ ID NO: 2289456 - RNA, 19 nt, Artificial Sequence
  Description of Artificial Sequence: Synthetic oligonucleotide
  Sense strand starting at position 933 of SEQ ID NO: 1884754
ggugguaagcuguaaugaa

SEQ ID NO: 2289457 - RNA, 19 nt, Artificial Sequence
  Description of Artificial Sequence: Synthetic oligonucleotide
  Antisense strand to SEQ ID NO: 2289456
uucauuacagcuuaccacc

SEQ ID NO: 2289458 - RNA, 19 nt, Artificial Sequence
  Description of Artificial Sequence: Synthetic oligonucleotide
  Sense strand starting at position 973 of SEQ ID NO: 1884754
ugaagugacagcuggacuu

SEQ ID NO: 2289459 - RNA, 19 nt, Artificial Sequence
  Description of Artificial Sequence: Synthetic oligonucleotide
  Antisense strand to SEQ ID NO: 2289458
aaguccagcugucacuuca

SEQ ID NO: 2289460 - RNA, 19 nt, Artificial Sequence
  Description of Artificial Sequence: Synthetic oligonucleotide
  Sense strand starting at position 1027 of SEQ ID NO: 1884754
uuguaaaugccagggaagu

SEQ ID NO: 2289461 - RNA, 19 nt, Artificial Sequence
  Description of Artificial Sequence: Synthetic oligonucleotide
  Antisense strand to SEQ ID NO: 2289460
acuucccuggcauuuacaa

SEQ ID NO: 2289462 - RNA, 19 nt, Artificial Sequence
  Description of Artificial Sequence: Synthetic oligonucleotide
  Sense strand starting at position 1028 of SEQ ID NO: 1884754
uguaaaugccagggaaguu

SEQ ID NO: 2289463 - RNA, 19 nt, Artificial Sequence
  Description of Artificial Sequence: Synthetic oligonucleotide
  Antisense strand to SEQ ID NO: 2289462
aacuucccuggcauuuaca

SEQ ID NO: 2289464 - RNA, 19 nt, Artificial Sequence
  Description of Artificial Sequence: Synthetic oligonucleotide
  Sense strand starting at position 1029 of SEQ ID NO: 1884754
guaaaugccagggaaguua

SEQ ID NO: 2289465 - RNA, 19 nt, Artificial Sequence
  Description of Artificial Sequence: Synthetic oligonucleotide
  Antisense strand to SEQ ID NO: 2289464
uaacuucccuggcauuuac

SEQ ID NO: 2289466 - RNA, 19 nt, Artificial Sequence
  Description of Artificial Sequence: Synthetic oligonucleotide
  Sense strand starting at position 1108 of SEQ ID NO: 1884754
agugcuaggacucagaguu

SEQ ID NO: 2289467 - RNA, 19 nt, Artificial Sequence
  Description of Artificial Sequence: Synthetic oligonucleotide
  Antisense strand to SEQ ID NO: 2289466
aacucugaguccuagcacu

SEQ ID NO: 2289468 - RNA, 19 nt, Artificial Sequence
  Description of Artificial Sequence: Synthetic oligonucleotide
  Sense strand starting at position 1447 of SEQ ID NO: 1884754
cugcuaguugccgaaauuu

SEQ ID NO: 2289469 - RNA, 19 nt, Artificial Sequence
  Description of Artificial Sequence: Synthetic oligonucleotide
  Antisense strand to SEQ ID NO: 2289468
aaauuucggcaacuagcag

SEQ ID NO: 2289470 - RNA, 19 nt, Artificial Sequence
  Description of Artificial Sequence: Synthetic oligonucleotide
  Sense strand starting at position 1456 of SEQ ID NO: 1884754
gccgaaauuucuuaacuaa

SEQ ID NO: 2289471 - RNA, 19 nt, Artificial Sequence
  Description of Artificial Sequence: Synthetic oligonucleotide
  Antisense strand to SEQ ID NO: 2289470
uuaguuaagaaauuucggc

SEQ ID NO: 2289472 - RNA, 19 nt, Artificial Sequence
  Description of Artificial Sequence: Synthetic oligonucleotide
  Sense strand starting at position 2006 of SEQ ID NO: 1884754
ccuggauaugguuaguuac

SEQ ID NO: 2289473 - RNA, 19 nt, Artificial Sequence
  Description of Artificial Sequence: Synthetic oligonucleotide
  Antisense strand to SEQ ID NO: 2289472
guaacuaaccauauccagg

SEQ ID NO: 2289474 - RNA, 19 nt, Artificial Sequence
  Description of Artificial Sequence: Synthetic oligonucleotide
  Sense strand starting at position 2012 of SEQ ID NO: 1884754
uaugguuaguuacucgaga

SEQ ID NO: 2289475 - RNA, 19 nt, Artificial Sequence
  Description of Artificial Sequence: Synthetic oligonucleotide
  Antisense strand to SEQ ID NO: 2289474
ucucgaguaacuaaccaua

SEQ ID NO: 2289476 - RNA, 19 nt, Artificial Sequence
  Description of Artificial Sequence: Synthetic oligonucleotide
  Sense strand starting at position 2013 of SEQ ID NO: 1884754
augguuaguuacucgagau

SEQ ID NO: 2289477 - RNA, 19 nt, Artificial Sequence
  Description of Artificial Sequence: Synthetic oligonucleotide
  Antisense strand to SEQ ID NO: 2289476
aucucgaguaacuaaccau

SEQ ID NO: 2289478 - RNA, 19 nt, Artificial Sequence
  Description of Artificial Sequence: Synthetic oligonucleotide
  Sense strand starting at position 2014 of SEQ ID NO: 1884754
ugguuaguuacucgagauc

SEQ ID NO: 2289479 - RNA, 19 nt, Artificial Sequence
  Description of Artificial Sequence: Synthetic oligonucleotide
  Antisense strand to SEQ ID NO: 2289478
gaucucgaguaacuaacca

SEQ ID NO: 2289480 - RNA, 19 nt, Artificial Sequence
  Description of Artificial Sequence: Synthetic oligonucleotide
  Sense strand starting at position 2282 of SEQ ID NO: 1884754
ucuugagaccuugggugaa

SEQ ID NO: 2289481 - RNA, 19 nt, Artificial Sequence
  Description of Artificial Sequence: Synthetic oligonucleotide
  Antisense strand to SEQ ID NO: 2289480
uucacccaaggucucaaga

SEQ ID NO: 2289482 - RNA, 19 nt, Artificial Sequence
  Description of Artificial Sequence: Synthetic oligonucleotide
  Sense strand starting at position 2285 of SEQ ID NO: 1884754
ugagaccuugggugaagau

SEQ ID NO: 2289483 - RNA, 19 nt, Artificial Sequence
  Description of Artificial Sequence: Synthetic oligonucleotide
  Antisense strand to SEQ ID NO: 2289482
aucuucacccaaggucuca

SEQ ID NO: 2289484 - RNA, 19 nt, Artificial Sequence
  Description of Artificial Sequence: Synthetic oligonucleotide
  Sense strand starting at position 2341 of SEQ ID NO: 1884754
ggugaaguguucuuuauug

SEQ ID NO: 2289485 - RNA, 19 nt, Artificial Sequence
  Description of Artificial Sequence: Synthetic oligonucleotide
  Antisense strand to SEQ ID NO: 2289484
caauaaagaacacuucacc

SEQ ID NO: 2289486 - RNA, 19 nt, Artificial Sequence
  Description of Artificial Sequence: Synthetic oligonucleotide
  Sense strand starting at position 2475 of SEQ ID NO: 1884754
ucuaucaccguuuaauuga

SEQ ID NO: 2289487 - RNA, 19 nt, Artificial Sequence
  Description of Artificial Sequence: Synthetic oligonucleotide
  Antisense strand to SEQ ID NO: 2289486
ucaauuaaacggugauaga

SEQ ID NO: 2289488 - RNA, 19 nt, Artificial Sequence
  Description of Artificial Sequence: Synthetic oligonucleotide
  Sense strand starting at position 2658 of SEQ ID NO: 1884754
cucagcucugggugaucau

SEQ ID NO: 2289489 - RNA, 19 nt, Artificial Sequence
  Description of Artificial Sequence: Synthetic oligonucleotide
  Antisense strand to SEQ ID NO: 2289488
augaucacccagagcugag

SEQ ID NO: 2289490 - RNA, 19 nt, Artificial Sequence
  Description of Artificial Sequence: Synthetic oligonucleotide
  Sense strand starting at position 2659 of SEQ ID NO: 1884754
ucagcucugggugaucauu

SEQ ID NO: 2289491 - RNA, 19 nt, Artificial Sequence
  Description of Artificial Sequence: Synthetic oligonucleotide
  Antisense strand to SEQ ID NO: 2289490
aaugaucacccagagcuga

SEQ ID NO: 2289492 - RNA, 19 nt, Artificial Sequence
  Description of Artificial Sequence: Synthetic oligonucleotide
  Sense strand starting at position 2665 of SEQ ID NO: 1884754
cugggugaucauuguagag

SEQ ID NO: 2289493 - RNA, 19 nt, Artificial Sequence
  Description of Artificial Sequence: Synthetic oligonucleotide
  Antisense strand to SEQ ID NO: 2289492
cucuacaaugaucacccag

SEQ ID NO: 2289494 - RNA, 19 nt, Artificial Sequence
  Description of Artificial Sequence: Synthetic oligonucleotide
  Sense strand starting at position 2734 of SEQ ID NO: 1884754
cgggcugugugaauguaga

SEQ ID NO: 2289495 - RNA, 19 nt, Artificial Sequence
  Description of Artificial Sequence: Synthetic oligonucleotide
  Antisense strand to SEQ ID NO: 2289494
ucuacauucacacagcccg

SEQ ID NO: 2289496 - RNA, 19 nt, Artificial Sequence
  Description of Artificial Sequence: Synthetic oligonucleotide
  Sense strand starting at position 2809 of SEQ ID NO: 1884754
agcguaagugcugugccaa

SEQ ID NO: 2289497 - RNA, 19 nt, Artificial Sequence
  Description of Artificial Sequence: Synthetic oligonucleotide
  Antisense strand to SEQ ID NO: 2289496
uuggcacagcacuuacgcu

SEQ ID NO: 2289498 - RNA, 19 nt, Artificial Sequence
  Description of Artificial Sequence: Synthetic oligonucleotide
  Sense strand starting at position 2812 of SEQ ID NO: 1884754
guaagugcugugccaaagu

SEQ ID NO: 2289499 - RNA, 19 nt, Artificial Sequence
  Description of Artificial Sequence: Synthetic oligonucleotide
  Antisense strand to SEQ ID NO: 2289498
acuuuggcacagcacuuac

SEQ ID NO: 2289500 - RNA, 19 nt, Artificial Sequence
  Description of Artificial Sequence: Synthetic oligonucleotide
  Sense strand starting at position 2843 of SEQ ID NO: 1884754
auauaaggccucugugaac

SEQ ID NO: 2289501 - RNA, 19 nt, Artificial Sequence
  Description of Artificial Sequence: Synthetic oligonucleotide
  Antisense strand to SEQ ID NO: 2289500
guucacagaggccuuauau

SEQ ID NO: 2289502 - RNA, 19 nt, Artificial Sequence
  Description of Artificial Sequence: Synthetic oligonucleotide
  Sense strand starting at position 2869 of SEQ ID NO: 1884754
aaaugcuuccgggauuaac

SEQ ID NO: 2289503 - RNA, 19 nt, Artificial Sequence
  Description of Artificial Sequence: Synthetic oligonucleotide
  Antisense strand to SEQ ID NO: 2289502
guuaaucccggaagcauuu

SEQ ID NO: 2289504 - RNA, 19 nt, Artificial Sequence
  Description of Artificial Sequence: Synthetic oligonucleotide
  Sense strand starting at position 2881 of SEQ ID NO: 1884754
gauuaacuccagcgagaac

SEQ ID NO: 2289505 - RNA, 19 nt, Artificial Sequence
  Description of Artificial Sequence: Synthetic oligonucleotide
  Antisense strand to SEQ ID NO: 2289504
guucucgcuggaguuaauc

SEQ ID NO: 2289506 - RNA, 19 nt, Artificial Sequence
  Description of Artificial Sequence: Synthetic oligonucleotide
  Sense strand starting at position 2893 of SEQ ID NO: 1884754
cgagaacaauuauaaacau

SEQ ID NO: 2289507 - RNA, 19 nt, Artificial Sequence
  Description of Artificial Sequence: Synthetic oligonucleotide
  Antisense strand to SEQ ID NO: 2289506
auguuuauaauuguucucg

SEQ ID NO: 2289508 - RNA, 19 nt, Artificial Sequence
  Description of Artificial Sequence: Synthetic oligonucleotide
  Sense strand starting at position 2962 of SEQ ID NO: 1884754
uaacauguugggugacuuu

SEQ ID NO: 2289509 - RNA, 19 nt, Artificial Sequence
  Description of Artificial Sequence: Synthetic oligonucleotide
  Antisense strand to SEQ ID NO: 2289508
aaagucacccaacauguua

SEQ ID NO: 2289510 - RNA, 19 nt, Artificial Sequence
  Description of Artificial Sequence: Synthetic oligonucleotide
  Sense strand starting at position 2981 of SEQ ID NO: 1884754
gggcaaguugcucaccauu

SEQ ID NO: 2289511 - RNA, 19 nt, Artificial Sequence
  Description of Artificial Sequence: Synthetic oligonucleotide
  Antisense strand to SEQ ID NO: 2289510
aauggugagcaacuugccc

SEQ ID NO: 2289512 - RNA, 19 nt, Artificial Sequence
  Description of Artificial Sequence: Synthetic oligonucleotide
  Sense strand starting at position 2991 of SEQ ID NO: 1884754
cucaccauucuagguuaua

SEQ ID NO: 2289513 - RNA, 19 nt, Artificial Sequence
  Description of Artificial Sequence: Synthetic oligonucleotide
  Antisense strand to SEQ ID NO: 2289512
uauaaccuagaauggugag

SEQ ID NO: 2289514 - RNA, 19 nt, Artificial Sequence
  Description of Artificial Sequence: Synthetic oligonucleotide
  Sense strand starting at position 2992 of SEQ ID NO: 1884754
ucaccauucuagguuauag

SEQ ID NO: 2289515 - RNA, 19 nt, Artificial Sequence
  Description of Artificial Sequence: Synthetic oligonucleotide
  Antisense strand to SEQ ID NO: 2289514
cuauaaccuagaaugguga

SEQ ID NO: 2289516 - RNA, 19 nt, Artificial Sequence
  Description of Artificial Sequence: Synthetic oligonucleotide
  Sense strand starting at position 2994 of SEQ ID NO: 1884754
accauucuagguuauaguu

SEQ ID NO: 2289517 - RNA, 19 nt, Artificial Sequence
  Description of Artificial Sequence: Synthetic oligonucleotide
  Antisense strand to SEQ ID NO: 2289516
aacuauaaccuagaauggu

SEQ ID NO: 2289518 - RNA, 19 nt, Artificial Sequence
  Description of Artificial Sequence: Synthetic oligonucleotide
  Sense strand starting at position 3043 of SEQ ID NO: 1884754
ggauuaaaucggugguucu

SEQ ID NO: 2289519 - RNA, 19 nt, Artificial Sequence
  Description of Artificial Sequence: Synthetic oligonucleotide
  Antisense strand to SEQ ID NO: 2289518
agaaccaccgauuuaaucc

SEQ ID NO: 2289520 - RNA, 19 nt, Artificial Sequence
  Description of Artificial Sequence: Synthetic oligonucleotide
  Sense strand starting at position 3044 of SEQ ID NO: 1884754
gauuaaaucggugguucuc

SEQ ID NO: 2289521 - RNA, 19 nt, Artificial Sequence
  Description of Artificial Sequence: Synthetic oligonucleotide
  Antisense strand to SEQ ID NO: 2289520
gagaaccaccgauuuaauc

SEQ ID NO: 2289522 - RNA, 19 nt, Artificial Sequence
  Description of Artificial Sequence: Synthetic oligonucleotide
  Sense strand starting at position 3056 of SEQ ID NO: 1884754
gguucucaacccuggcuaa

SEQ ID NO: 2289523 - RNA, 19 nt, Artificial Sequence
  Description of Artificial Sequence: Synthetic oligonucleotide
  Antisense strand to SEQ ID NO: 2289522
uuagccaggguugagaacc

SEQ ID NO: 2289524 - RNA, 19 nt, Artificial Sequence
  Description of Artificial Sequence: Synthetic oligonucleotide
  Sense strand starting at position 3067 of SEQ ID NO: 1884754
cuggcuaagcauuagaauc

SEQ ID NO: 2289525 - RNA, 19 nt, Artificial Sequence
  Description of Artificial Sequence: Synthetic oligonucleotide
  Antisense strand to SEQ ID NO: 2289524
gauucuaaugcuuagccag

SEQ ID NO: 2289526 - RNA, 19 nt, Artificial Sequence
  Description of Artificial Sequence: Synthetic oligonucleotide
  Sense strand starting at position 140 of SEQ ID NO: 1884755
cccugagaauuccugaacu

SEQ ID NO: 2289527 - RNA, 19 nt, Artificial Sequence
  Description of Artificial Sequence: Synthetic oligonucleotide
  Antisense strand to SEQ ID NO: 2289526
aguucaggaauucucaggg

SEQ ID NO: 2289528 - RNA, 19 nt, Artificial Sequence
  Description of Artificial Sequence: Synthetic oligonucleotide
  Sense strand starting at position 321 of SEQ ID NO: 1884755
augacucagucucuggauu

SEQ ID NO: 2289529 - RNA, 19 nt, Artificial Sequence
  Description of Artificial Sequence: Synthetic oligonucleotide
  Antisense strand to SEQ ID NO: 2289528
aauccagagacugagucau

SEQ ID NO: 2289530 - RNA, 19 nt, Artificial Sequence
  Description of Artificial Sequence: Synthetic oligonucleotide
  Sense strand starting at position 452 of SEQ ID NO: 1884755
gagacaauguucuuugcuu

SEQ ID NO: 2289531 - RNA, 19 nt, Artificial Sequence
  Description of Artificial Sequence: Synthetic oligonucleotide
  Antisense strand to SEQ ID NO: 2289530
aagcaaagaacauugucuc

SEQ ID NO: 2289532 - RNA, 19 nt, Artificial Sequence
  Description of Artificial Sequence: Synthetic oligonucleotide
  Sense strand starting at position 453 of SEQ ID NO: 1884755
agacaauguucuuugcuuu

SEQ ID NO: 2289533 - RNA, 19 nt, Artificial Sequence
  Description of Artificial Sequence: Synthetic oligonucleotide
  Antisense strand to SEQ ID NO: 2289532
aaagcaaagaacauugucu

SEQ ID NO: 2289534 - RNA, 19 nt, Artificial Sequence
  Description of Artificial Sequence: Synthetic oligonucleotide
  Sense strand starting at position 520 of SEQ ID NO: 1884755
ggguguggucccuagagac

SEQ ID NO: 2289535 - RNA, 19 nt, Artificial Sequence
  Description of Artificial Sequence: Synthetic oligonucleotide
  Antisense strand to SEQ ID NO: 2289534
gucucuagggaccacaccc

SEQ ID NO: 2289536 - RNA, 19 nt, Artificial Sequence
  Description of Artificial Sequence: Synthetic oligonucleotide
  Sense strand starting at position 675 of SEQ ID NO: 1884755
ggugguaagcuguaaugaa

SEQ ID NO: 2289537 - RNA, 19 nt, Artificial Sequence
  Description of Artificial Sequence: Synthetic oligonucleotide
  Antisense strand to SEQ ID NO: 2289536
uucauuacagcuuaccacc

SEQ ID NO: 2289538 - RNA, 19 nt, Artificial Sequence
  Description of Artificial Sequence: Synthetic oligonucleotide
  Sense strand starting at position 715 of SEQ ID NO: 1884755
ugaagugacagcuggacuu

SEQ ID NO: 2289539 - RNA, 19 nt, Artificial Sequence
  Description of Artificial Sequence: Synthetic oligonucleotide
  Antisense strand to SEQ ID NO: 2289538
aaguccagcugucacuuca

SEQ ID NO: 2289540 - RNA, 19 nt, Artificial Sequence
  Description of Artificial Sequence: Synthetic oligonucleotide
  Sense strand starting at position 769 of SEQ ID NO: 1884755
uuguaaaugccagggaagu

SEQ ID NO: 2289541 - RNA, 19 nt, Artificial Sequence
  Description of Artificial Sequence: Synthetic oligonucleotide
  Antisense strand to SEQ ID NO: 2289540
acuucccuggcauuuacaa

SEQ ID NO: 2289542 - RNA, 19 nt, Artificial Sequence
  Description of Artificial Sequence: Synthetic oligonucleotide
  Sense strand starting at position 770 of SEQ ID NO: 1884755
uguaaaugccagggaaguu

SEQ ID NO: 2289543 - RNA, 19 nt, Artificial Sequence
  Description of Artificial Sequence: Synthetic oligonucleotide
  Antisense strand to SEQ ID NO: 2289542
aacuucccuggcauuuaca

SEQ ID NO: 2289544 - RNA, 19 nt, Artificial Sequence
  Description of Artificial Sequence: Synthetic oligonucleotide
  Sense strand starting at position 771 of SEQ ID NO: 1884755
guaaaugccagggaaguua

SEQ ID NO: 2289545 - RNA, 19 nt, Artificial Sequence
  Description of Artificial Sequence: Synthetic oligonucleotide
  Antisense strand to SEQ ID NO: 2289544
uaacuucccuggcauuuac

SEQ ID NO: 2289546 - RNA, 19 nt, Artificial Sequence
  Description of Artificial Sequence: Synthetic oligonucleotide
  Sense strand starting at position 850 of SEQ ID NO: 1884755
agugcuaggacucagaguu

SEQ ID NO: 2289547 - RNA, 19 nt, Artificial Sequence
  Description of Artificial Sequence: Synthetic oligonucleotide
  Antisense strand to SEQ ID NO: 2289546
aacucugaguccuagcacu

SEQ ID NO: 2289548 - RNA, 19 nt, Artificial Sequence
  Description of Artificial Sequence: Synthetic oligonucleotide
  Sense strand starting at position 1189 of SEQ ID NO: 1884755
cugcuaguugccgaaauuu

SEQ ID NO: 2289549 - RNA, 19 nt, Artificial Sequence
  Description of Artificial Sequence: Synthetic oligonucleotide
  Antisense strand to SEQ ID NO: 2289548
aaauuucggcaacuagcag

SEQ ID NO: 2289550 - RNA, 19 nt, Artificial Sequence
  Description of Artificial Sequence: Synthetic oligonucleotide
  Sense strand starting at position 1748 of SEQ ID NO: 1884755
ccuggauaugguuaguuac

SEQ ID NO: 2289551 - RNA, 19 nt, Artificial Sequence
  Description of Artificial Sequence: Synthetic oligonucleotide
  Antisense strand to SEQ ID NO: 2289550
guaacuaaccauauccagg

SEQ ID NO: 2289552 - RNA, 19 nt, Artificial Sequence
  Description of Artificial Sequence: Synthetic oligonucleotide
  Sense strand starting at position 1754 of SEQ ID NO: 1884755
uaugguuaguuacucgaga

SEQ ID NO: 2289553 - RNA, 19 nt, Artificial Sequence
  Description of Artificial Sequence: Synthetic oligonucleotide
  Antisense strand to SEQ ID NO: 2289552
ucucgaguaacuaaccaua

SEQ ID NO: 2289554 - RNA, 19 nt, Artificial Sequence
  Description of Artificial Sequence: Synthetic oligonucleotide
  Sense strand starting at position 1755 of SEQ ID NO: 1884755
augguuaguuacucgagau

SEQ ID NO: 2289555 - RNA, 19 nt, Artificial Sequence
  Description of Artificial Sequence: Synthetic oligonucleotide
  Antisense strand to SEQ ID NO: 2289554
aucucgaguaacuaaccau

SEQ ID NO: 2289556 - RNA, 19 nt, Artificial Sequence
  Description of Artificial Sequence: Synthetic oligonucleotide
  Sense strand starting at position 2024 of SEQ ID NO: 1884755
ucuugagaccuugggugaa

SEQ ID NO: 2289557 - RNA, 19 nt, Artificial Sequence
  Description of Artificial Sequence: Synthetic oligonucleotide
  Antisense strand to SEQ ID NO: 2289556
uucacccaaggucucaaga

SEQ ID NO: 2289558 - RNA, 19 nt, Artificial Sequence
  Description of Artificial Sequence: Synthetic oligonucleotide
  Sense strand starting at position 2027 of SEQ ID NO: 1884755
ugagaccuugggugaagau

SEQ ID NO: 2289559 - RNA, 19 nt, Artificial Sequence
  Description of Artificial Sequence: Synthetic oligonucleotide
  Antisense strand to SEQ ID NO: 2289558
aucuucacccaaggucuca

SEQ ID NO: 2289560 - RNA, 19 nt, Artificial Sequence
  Description of Artificial Sequence: Synthetic oligonucleotide
  Sense strand starting at position 2217 of SEQ ID NO: 1884755
ucuaucaccguuuaauuga

SEQ ID NO: 2289561 - RNA, 19 nt, Artificial Sequence
  Description of Artificial Sequence: Synthetic oligonucleotide
  Antisense strand to SEQ ID NO: 2289560
ucaauuaaacggugauaga

SEQ ID NO: 2289562 - RNA, 19 nt, Artificial Sequence
  Description of Artificial Sequence: Synthetic oligonucleotide
  Sense strand starting at position 2400 of SEQ ID NO: 1884755
cucagcucugggugaucau

SEQ ID NO: 2289563 - RNA, 19 nt, Artificial Sequence
  Description of Artificial Sequence: Synthetic oligonucleotide
  Antisense strand to SEQ ID NO: 2289562
augaucacccagagcugag

SEQ ID NO: 2289564 - RNA, 19 nt, Artificial Sequence
  Description of Artificial Sequence: Synthetic oligonucleotide
  Sense strand starting at position 2401 of SEQ ID NO: 1884755
ucagcucugggugaucauu

SEQ ID NO: 2289565 - RNA, 19 nt, Artificial Sequence
  Description of Artificial Sequence: Synthetic oligonucleotide
  Antisense strand to SEQ ID NO: 2289564
aaugaucacccagagcuga

SEQ ID NO: 2289566 - RNA, 19 nt, Artificial Sequence
  Description of Artificial Sequence: Synthetic oligonucleotide
  Sense strand starting at position 2407 of SEQ ID NO: 1884755
cugggugaucauuguagag

SEQ ID NO: 2289567 - RNA, 19 nt, Artificial Sequence
  Description of Artificial Sequence: Synthetic oligonucleotide
  Antisense strand to SEQ ID NO: 2289566
cucuacaaugaucacccag

SEQ ID NO: 2289568 - RNA, 19 nt, Artificial Sequence
  Description of Artificial Sequence: Synthetic oligonucleotide
  Sense strand starting at position 2476 of SEQ ID NO: 1884755
cgggcugugugaauguaga

SEQ ID NO: 2289569 - RNA, 19 nt, Artificial Sequence
  Description of Artificial Sequence: Synthetic oligonucleotide
  Antisense strand to SEQ ID NO: 2289568
ucuacauucacacagcccg

SEQ ID NO: 2289570 - RNA, 19 nt, Artificial Sequence
  Description of Artificial Sequence: Synthetic oligonucleotide
  Sense strand starting at position 2551 of SEQ ID NO: 1884755
agcguaagugcugugccaa

SEQ ID NO: 2289571 - RNA, 19 nt, Artificial Sequence
  Description of Artificial Sequence: Synthetic oligonucleotide
  Antisense strand to SEQ ID NO: 2289570
uuggcacagcacuuacgcu

SEQ ID NO: 2289572 - RNA, 19 nt, Artificial Sequence
  Description of Artificial Sequence: Synthetic oligonucleotide
  Sense strand starting at position 2554 of SEQ ID NO: 1884755
guaagugcugugccaaagu

SEQ ID NO: 2289573 - RNA, 19 nt, Artificial Sequence
  Description of Artificial Sequence: Synthetic oligonucleotide
  Antisense strand to SEQ ID NO: 2289572
acuuuggcacagcacuuac

SEQ ID NO: 2289574 - RNA, 19 nt, Artificial Sequence
  Description of Artificial Sequence: Synthetic oligonucleotide
  Sense strand starting at position 2585 of SEQ ID NO: 1884755
auauaaggccucugugaac

SEQ ID NO: 2289575 - RNA, 19 nt, Artificial Sequence
  Description of Artificial Sequence: Synthetic oligonucleotide
  Antisense strand to SEQ ID NO: 2289574
guucacagaggccuuauau

SEQ ID NO: 2289576 - RNA, 19 nt, Artificial Sequence
  Description of Artificial Sequence: Synthetic oligonucleotide
  Sense strand starting at position 2611 of SEQ ID NO: 1884755
aaaugcuuccgggauuaac

SEQ ID NO: 2289577 - RNA, 19 nt, Artificial Sequence
  Description of Artificial Sequence: Synthetic oligonucleotide
  Antisense strand to SEQ ID NO: 2289576
guuaaucccggaagcauuu

SEQ ID NO: 2289578 - RNA, 19 nt, Artificial Sequence
  Description of Artificial Sequence: Synthetic oligonucleotide
  Sense strand starting at position 2623 of SEQ ID NO: 1884755
gauuaacuccagcgagaac

SEQ ID NO: 2289579 - RNA, 19 nt, Artificial Sequence
  Description of Artificial Sequence: Synthetic oligonucleotide
  Antisense strand to SEQ ID NO: 2289578
guucucgcuggaguuaauc

SEQ ID NO: 2289580 - RNA, 19 nt, Artificial Sequence
  Description of Artificial Sequence: Synthetic oligonucleotide
  Sense strand starting at position 2704 of SEQ ID NO: 1884755
uaacauguugggugacuuu

SEQ ID NO: 2289581 - RNA, 19 nt, Artificial Sequence
  Description of Artificial Sequence: Synthetic oligonucleotide
  Antisense strand to SEQ ID NO: 2289580
aaagucacccaacauguua

SEQ ID NO: 2289582 - RNA, 19 nt, Artificial Sequence
  Description of Artificial Sequence: Synthetic oligonucleotide
  Sense strand starting at position 2723 of SEQ ID NO: 1884755
gggcaaguugcucaccauu

SEQ ID NO: 2289583 - RNA, 19 nt, Artificial Sequence
  Description of Artificial Sequence: Synthetic oligonucleotide
  Antisense strand to SEQ ID NO: 2289582
aauggugagcaacuugccc

SEQ ID NO: 2289584 - RNA, 19 nt, Artificial Sequence
  Description of Artificial Sequence: Synthetic oligonucleotide
  Sense strand starting at position 2733 of SEQ ID NO: 1884755
cucaccauucuagguuaua

SEQ ID NO: 2289585 - RNA, 19 nt, Artificial Sequence
  Description of Artificial Sequence: Synthetic oligonucleotide
  Antisense strand to SEQ ID NO: 2289584
uauaaccuagaauggugag

SEQ ID NO: 2289586 - RNA, 19 nt, Artificial Sequence
  Description of Artificial Sequence: Synthetic oligonucleotide
  Sense strand starting at position 2734 of SEQ ID NO: 1884755
ucaccauucuagguuauag

SEQ ID NO: 2289587 - RNA, 19 nt, Artificial Sequence
  Description of Artificial Sequence: Synthetic oligonucleotide
  Antisense strand to SEQ ID NO: 2289586
cuauaaccuagaaugguga

SEQ ID NO: 2289588 - RNA, 19 nt, Artificial Sequence
  Description of Artificial Sequence: Synthetic oligonucleotide
  Sense strand starting at position 2736 of SEQ ID NO: 1884755
accauucuagguuauaguu

SEQ ID NO: 2289589 - RNA, 19 nt, Artificial Sequence
  Description of Artificial Sequence: Synthetic oligonucleotide
  Antisense strand to SEQ ID NO: 2289588
aacuauaaccuagaauggu

SEQ ID NO: 2289590 - RNA, 19 nt, Artificial Sequence
  Description of Artificial Sequence: Synthetic oligonucleotide
  Sense strand starting at position 2785 of SEQ ID NO: 1884755
ggauuaaaucggugguucu

SEQ ID NO: 2289591 - RNA, 19 nt, Artificial Sequence
  Description of Artificial Sequence: Synthetic oligonucleotide
  Antisense strand to SEQ ID NO: 2289590
agaaccaccgauuuaaucc

SEQ ID NO: 2289592 - RNA, 19 nt, Artificial Sequence
  Description of Artificial Sequence: Synthetic oligonucleotide
  Sense strand starting at position 2786 of SEQ ID NO: 1884755
gauuaaaucggugguucuc

SEQ ID NO: 2289593 - RNA, 19 nt, Artificial Sequence
  Description of Artificial Sequence: Synthetic oligonucleotide
  Antisense strand to SEQ ID NO: 2289592
gagaaccaccgauuuaauc

SEQ ID NO: 2289594 - RNA, 19 nt, Artificial Sequence
  Description of Artificial Sequence: Synthetic oligonucleotide
  Sense strand starting at position 2798 of SEQ ID NO: 1884755
gguucucaacccuggcuaa

SEQ ID NO: 2289595 - RNA, 19 nt, Artificial Sequence
  Description of Artificial Sequence: Synthetic oligonucleotide
  Antisense strand to SEQ ID NO: 2289594
uuagccaggguugagaacc

SEQ ID NO: 2289596 - RNA, 19 nt, Artificial Sequence
  Description of Artificial Sequence: Synthetic oligonucleotide
  Sense strand starting at position 2809 of SEQ ID NO: 1884755
cuggcuaagcauuagaauc

SEQ ID NO: 2289597 - RNA, 19 nt, Artificial Sequence
  Description of Artificial Sequence: Synthetic oligonucleotide
  Antisense strand to SEQ ID NO: 2289596
gauucuaaugcuuagccag

SEQ ID NO: 2289598 - RNA, 19 nt, Artificial Sequence
  Description of Artificial Sequence: Synthetic oligonucleotide
  Sense strand starting at position 3935 of SEQ ID NO: 1884755
cuggccuuaucaguauauu

SEQ ID NO: 2289599 - RNA, 19 nt, Artificial Sequence
  Description of Artificial Sequence: Synthetic oligonucleotide
  Antisense strand to SEQ ID NO: 2289598
aauauacugauaaggccag

SEQ ID NO: 2289600 - RNA, 19 nt, Artificial Sequence
  Description of Artificial Sequence: Synthetic oligonucleotide
  Sense strand starting at position 3959 of SEQ ID NO: 1884755
agcuguucuggugauucua

SEQ ID NO: 2289601 - RNA, 19 nt, Artificial Sequence
  Description of Artificial Sequence: Synthetic oligonucleotide
  Antisense strand to SEQ ID NO: 2289600
uagaaucaccagaacagcu

SEQ ID NO: 2289602 - RNA, 19 nt, Artificial Sequence
  Description of Artificial Sequence: Synthetic oligonucleotide
  Sense strand starting at position 3961 of SEQ ID NO: 1884755
cuguucuggugauucuaau

SEQ ID NO: 2289603 - RNA, 19 nt, Artificial Sequence
  Description of Artificial Sequence: Synthetic oligonucleotide
  Antisense strand to SEQ ID NO: 2289602
auuagaaucaccagaacag

SEQ ID NO: 2289604 - RNA, 19 nt, Artificial Sequence
  Description of Artificial Sequence: Synthetic oligonucleotide
  Sense strand starting at position 3978 of SEQ ID NO: 1884755
auguguauccaggguugaa

SEQ ID NO: 2289605 - RNA, 19 nt, Artificial Sequence
  Description of Artificial Sequence: Synthetic oligonucleotide
  Antisense strand to SEQ ID NO: 2289604
uucaacccuggauacacau

SEQ ID NO: 2289606 - RNA, 19 nt, Artificial Sequence
  Description of Artificial Sequence: Synthetic oligonucleotide
  Sense strand starting at position 28 of SEQ ID NO: 1884756
ccuagaagagucuaaugcu

SEQ ID NO: 2289607 - RNA, 19 nt, Artificial Sequence
  Description of Artificial Sequence: Synthetic oligonucleotide
  Antisense strand to SEQ ID NO: 2289606
agcauuagacucuucuagg

SEQ ID NO: 2289608 - RNA, 19 nt, Artificial Sequence
  Description of Artificial Sequence: Synthetic oligonucleotide
  Sense strand starting at position 123 of SEQ ID NO: 1884756
ggguacaugaggcaucauu

SEQ ID NO: 2289609 - RNA, 19 nt, Artificial Sequence
  Description of Artificial Sequence: Synthetic oligonucleotide
  Antisense strand to SEQ ID NO: 2289608
aaugaugccucauguaccc

SEQ ID NO: 2289610 - RNA, 19 nt, Artificial Sequence
  Description of Artificial Sequence: Synthetic oligonucleotide
  Sense strand starting at position 205 of SEQ ID NO: 1884756
agguguuugugggcauaaa

SEQ ID NO: 2289611 - RNA, 19 nt, Artificial Sequence
  Description of Artificial Sequence: Synthetic oligonucleotide
  Antisense strand to SEQ ID NO: 2289610
uuuaugcccacaaacaccu

SEQ ID NO: 2289612 - RNA, 19 nt, Artificial Sequence
  Description of Artificial Sequence: Synthetic oligonucleotide
  Sense strand starting at position 206 of SEQ ID NO: 1884756
gguguuugugggcauaaag

SEQ ID NO: 2289613 - RNA, 19 nt, Artificial Sequence
  Description of Artificial Sequence: Synthetic oligonucleotide
  Antisense strand to SEQ ID NO: 2289612
cuuuaugcccacaaacacc

SEQ ID NO: 2289614 - RNA, 19 nt, Artificial Sequence
  Description of Artificial Sequence: Synthetic oligonucleotide
  Sense strand starting at position 239 of SEQ ID NO: 1884756
guuuauugugaagaguucu

SEQ ID NO: 2289615 - RNA, 19 nt, Artificial Sequence
  Description of Artificial Sequence: Synthetic oligonucleotide
  Antisense strand to SEQ ID NO: 2289614
agaacucuucacaauaaac

SEQ ID NO: 2289616 - RNA, 19 nt, Artificial Sequence
  Description of Artificial Sequence: Synthetic oligonucleotide
  Sense strand starting at position 245 of SEQ ID NO: 1884756
ugugaagaguucuuucuuu

SEQ ID NO: 2289617 - RNA, 19 nt, Artificial Sequence
  Description of Artificial Sequence: Synthetic oligonucleotide
  Antisense strand to SEQ ID NO: 2289616
aaagaaagaacucuucaca

SEQ ID NO: 2289618 - RNA, 19 nt, Artificial Sequence
  Description of Artificial Sequence: Synthetic oligonucleotide
  Sense strand starting at position 698 of SEQ ID NO: 1884756
gaauuuaugugacagcuau

SEQ ID NO: 2289619 - RNA, 19 nt, Artificial Sequence
  Description of Artificial Sequence: Synthetic oligonucleotide
  Antisense strand to SEQ ID NO: 2289618
auagcugucacauaaauuc

SEQ ID NO: 2289620 - RNA, 19 nt, Artificial Sequence
  Description of Artificial Sequence: Synthetic oligonucleotide
  Sense strand starting at position 702 of SEQ ID NO: 1884756
uuaugugacagcuaugaag

SEQ ID NO: 2289621 - RNA, 19 nt, Artificial Sequence
  Description of Artificial Sequence: Synthetic oligonucleotide
  Antisense strand to SEQ ID NO: 2289620
cuucauagcugucacauaa

SEQ ID NO: 2289622 - RNA, 19 nt, Artificial Sequence
  Description of Artificial Sequence: Synthetic oligonucleotide
  Sense strand starting at position 704 of SEQ ID NO: 1884756
augugacagcuaugaaguu

SEQ ID NO: 2289623 - RNA, 19 nt, Artificial Sequence
  Description of Artificial Sequence: Synthetic oligonucleotide
  Antisense strand to SEQ ID NO: 2289622
aacuucauagcugucacau

SEQ ID NO: 2289624 - RNA, 19 nt, Artificial Sequence
  Description of Artificial Sequence: Synthetic oligonucleotide
  Sense strand starting at position 766 of SEQ ID NO: 1884756
aguauaagaucgccucaau

SEQ ID NO: 2289625 - RNA, 19 nt, Artificial Sequence
  Description of Artificial Sequence: Synthetic oligonucleotide
  Antisense strand to SEQ ID NO: 2289624
auugaggcgaucuuauacu

SEQ ID NO: 2289626 - RNA, 19 nt, Artificial Sequence
  Description of Artificial Sequence: Synthetic oligonucleotide
  Sense strand starting at position 884 of SEQ ID NO: 1884756
acaguugucacagggagaa

SEQ ID NO: 2289627 - RNA, 19 nt, Artificial Sequence
  Description of Artificial Sequence: Synthetic oligonucleotide
  Antisense strand to SEQ ID NO: 2289626
uucucccugugacaacugu

SEQ ID NO: 2289628 - RNA, 19 nt, Artificial Sequence
  Description of Artificial Sequence: Synthetic oligonucleotide
  Sense strand starting at position 1075 of SEQ ID NO: 1884756
uuccucuggucuuccaaga

SEQ ID NO: 2289629 - RNA, 19 nt, Artificial Sequence
  Description of Artificial Sequence: Synthetic oligonucleotide
  Antisense strand to SEQ ID NO: 2289628
ucuuggaagaccagaggaa

SEQ ID NO: 2289630 - RNA, 19 nt, Artificial Sequence
  Description of Artificial Sequence: Synthetic oligonucleotide
  Sense strand starting at position 1167 of SEQ ID NO: 1884756
ggguuaagcguuuaucuca

SEQ ID NO: 2289631 - RNA, 19 nt, Artificial Sequence
  Description of Artificial Sequence: Synthetic oligonucleotide
  Antisense strand to SEQ ID NO: 2289630
ugagauaaacgcuuaaccc

SEQ ID NO: 2289632 - RNA, 19 nt, Artificial Sequence
  Description of Artificial Sequence: Synthetic oligonucleotide
  Sense strand starting at position 1175 of SEQ ID NO: 1884756
cguuuaucucaauggaaau

SEQ ID NO: 2289633 - RNA, 19 nt, Artificial Sequence
  Description of Artificial Sequence: Synthetic oligonucleotide
  Antisense strand to SEQ ID NO: 2289632
auuuccauugagauaaacg

SEQ ID NO: 2289634 - RNA, 19 nt, Artificial Sequence
  Description of Artificial Sequence: Synthetic oligonucleotide
  Sense strand starting at position 1261 of SEQ ID NO: 1884756
gggagagugucucuacaug

SEQ ID NO: 2289635 - RNA, 19 nt, Artificial Sequence
  Description of Artificial Sequence: Synthetic oligonucleotide
  Antisense strand to SEQ ID NO: 2289634
cauguagagacacucuccc

SEQ ID NO: 2289636 - RNA, 19 nt, Artificial Sequence
  Description of Artificial Sequence: Synthetic oligonucleotide
  Sense strand starting at position 1266 of SEQ ID NO: 1884756
agugucucuacauguaaag

SEQ ID NO: 2289637 - RNA, 19 nt, Artificial Sequence
  Description of Artificial Sequence: Synthetic oligonucleotide
  Antisense strand to SEQ ID NO: 2289636
cuuuacauguagagacacu

SEQ ID NO: 2289638 - RNA, 19 nt, Artificial Sequence
  Description of Artificial Sequence: Synthetic oligonucleotide
  Sense strand starting at position 2131 of SEQ ID NO: 1884756
ggaagccuucgacaucaga

SEQ ID NO: 2289639 - RNA, 19 nt, Artificial Sequence
  Description of Artificial Sequence: Synthetic oligonucleotide
  Antisense strand to SEQ ID NO: 2289638
ucugaugucgaaggcuucc

SEQ ID NO: 2289640 - RNA, 19 nt, Artificial Sequence
  Description of Artificial Sequence: Synthetic oligonucleotide
  Sense strand starting at position 2134 of SEQ ID NO: 1884756
agccuucgacaucagaaua

SEQ ID NO: 2289641 - RNA, 19 nt, Artificial Sequence
  Description of Artificial Sequence: Synthetic oligonucleotide
  Antisense strand to SEQ ID NO: 2289640
uauucugaugucgaaggcu

SEQ ID NO: 2289642 - RNA, 19 nt, Artificial Sequence
  Description of Artificial Sequence: Synthetic oligonucleotide
  Sense strand starting at position 2187 of SEQ ID NO: 1884756
ggaucccgauguuuaucaa

SEQ ID NO: 2289643 - RNA, 19 nt, Artificial Sequence
  Description of Artificial Sequence: Synthetic oligonucleotide
  Antisense strand to SEQ ID NO: 2289642
uugauaaacaucgggaucc

SEQ ID NO: 2289644 - RNA, 19 nt, Artificial Sequence
  Description of Artificial Sequence: Synthetic oligonucleotide
  Sense strand starting at position 2188 of SEQ ID NO: 1884756
gaucccgauguuuaucaaa

SEQ ID NO: 2289645 - RNA, 19 nt, Artificial Sequence
  Description of Artificial Sequence: Synthetic oligonucleotide
  Antisense strand to SEQ ID NO: 2289644
uuugauaaacaucgggauc

SEQ ID NO: 2289646 - RNA, 19 nt, Artificial Sequence
  Description of Artificial Sequence: Synthetic oligonucleotide
  Sense strand starting at position 2230 of SEQ ID NO: 1884756
gguacuucuggagguagua

SEQ ID NO: 2289647 - RNA, 19 nt, Artificial Sequence
  Description of Artificial Sequence: Synthetic oligonucleotide
  Antisense strand to SEQ ID NO: 2289646
uacuaccuccagaaguacc

SEQ ID NO: 2289648 - RNA, 19 nt, Artificial Sequence
  Description of Artificial Sequence: Synthetic oligonucleotide
  Sense strand starting at position 2281 of SEQ ID NO: 1884756
cuacucaucugccucgaau

SEQ ID NO: 2289649 - RNA, 19 nt, Artificial Sequence
  Description of Artificial Sequence: Synthetic oligonucleotide
  Antisense strand to SEQ ID NO: 2289648
auucgaggcagaugaguag

SEQ ID NO: 2289650 - RNA, 19 nt, Artificial Sequence
  Description of Artificial Sequence: Synthetic oligonucleotide
  Sense strand starting at position 2284 of SEQ ID NO: 1884756
cucaucugccucgaauugu

SEQ ID NO: 2289651 - RNA, 19 nt, Artificial Sequence
  Description of Artificial Sequence: Synthetic oligonucleotide
  Antisense strand to SEQ ID NO: 2289650
acaauucgaggcagaugag

SEQ ID NO: 2289652 - RNA, 19 nt, Artificial Sequence
  Description of Artificial Sequence: Synthetic oligonucleotide
  Sense strand starting at position 2324 of SEQ ID NO: 1884756
uagugcauccaggaauaau

SEQ ID NO: 2289653 - RNA, 19 nt, Artificial Sequence
  Description of Artificial Sequence: Synthetic oligonucleotide
  Antisense strand to SEQ ID NO: 2289652
auuauuccuggaugcacua

SEQ ID NO: 2289654 - RNA, 19 nt, Artificial Sequence
  Description of Artificial Sequence: Synthetic oligonucleotide
  Sense strand starting at position 2417 of SEQ ID NO: 1884756
ucaugcuaguugguuuaga

SEQ ID NO: 2289655 - RNA, 19 nt, Artificial Sequence
  Description of Artificial Sequence: Synthetic oligonucleotide
  Antisense strand to SEQ ID NO: 2289654
ucuaaaccaacuagcauga

SEQ ID NO: 2289656 - RNA, 19 nt, Artificial Sequence
  Description of Artificial Sequence: Synthetic oligonucleotide
  Sense strand starting at position 2418 of SEQ ID NO: 1884756
caugcuaguugguuuagaa

SEQ ID NO: 2289657 - RNA, 19 nt, Artificial Sequence
  Description of Artificial Sequence: Synthetic oligonucleotide
  Antisense strand to SEQ ID NO: 2289656
uucuaaaccaacuagcaug

SEQ ID NO: 2289658 - RNA, 19 nt, Artificial Sequence
  Description of Artificial Sequence: Synthetic oligonucleotide
  Sense strand starting at position 2433 of SEQ ID NO: 1884756
agaaacuucugaggaauuu

SEQ ID NO: 2289659 - RNA, 19 nt, Artificial Sequence
  Description of Artificial Sequence: Synthetic oligonucleotide
  Antisense strand to SEQ ID NO: 2289658
aaauuccucagaaguuucu

SEQ ID NO: 2289660 - RNA, 19 nt, Artificial Sequence
  Description of Artificial Sequence: Synthetic oligonucleotide
  Sense strand starting at position 2485 of SEQ ID NO: 1884756
ccgacuggucaaggacauu

SEQ ID NO: 2289661 - RNA, 19 nt, Artificial Sequence
  Description of Artificial Sequence: Synthetic oligonucleotide
  Antisense strand to SEQ ID NO: 2289660
aauguccuugaccagucgg

SEQ ID NO: 2289662 - RNA, 19 nt, Artificial Sequence
  Description of Artificial Sequence: Synthetic oligonucleotide
  Sense strand starting at position 2496 of SEQ ID NO: 1884756
aggacauuuagcugugcca

SEQ ID NO: 2289663 - RNA, 19 nt, Artificial Sequence
  Description of Artificial Sequence: Synthetic oligonucleotide
  Antisense strand to SEQ ID NO: 2289662
uggcacagcuaaauguccu

SEQ ID NO: 2289664 - RNA, 19 nt, Artificial Sequence
  Description of Artificial Sequence: Synthetic oligonucleotide
  Sense strand starting at position 2498 of SEQ ID NO: 1884756
gacauuuagcugugccaac

SEQ ID NO: 2289665 - RNA, 19 nt, Artificial Sequence
  Description of Artificial Sequence: Synthetic oligonucleotide
  Antisense strand to SEQ ID NO: 2289664
guuggcacagcuaaauguc

SEQ ID NO: 2289666 - RNA, 19 nt, Artificial Sequence
  Description of Artificial Sequence: Synthetic oligonucleotide
  Sense strand starting at position 2499 of SEQ ID NO: 1884756
acauuuagcugugccaaca

SEQ ID NO: 2289667 - RNA, 19 nt, Artificial Sequence
  Description of Artificial Sequence: Synthetic oligonucleotide
  Antisense strand to SEQ ID NO: 2289666
uguuggcacagcuaaaugu

SEQ ID NO: 2289668 - RNA, 19 nt, Artificial Sequence
  Description of Artificial Sequence: Synthetic oligonucleotide
  Sense strand starting at position 2513 of SEQ ID NO: 1884756
caacaaaggucguucucau

SEQ ID NO: 2289669 - RNA, 19 nt, Artificial Sequence
  Description of Artificial Sequence: Synthetic oligonucleotide
  Antisense strand to SEQ ID NO: 2289668
augagaacgaccuuuguug

SEQ ID NO: 2289670 - RNA, 19 nt, Artificial Sequence
  Description of Artificial Sequence: Synthetic oligonucleotide
  Sense strand starting at position 2524 of SEQ ID NO: 1884756
guucucaucugccugagga

SEQ ID NO: 2289671 - RNA, 19 nt, Artificial Sequence
  Description of Artificial Sequence: Synthetic oligonucleotide
  Antisense strand to SEQ ID NO: 2289670
uccucaggcagaugagaac

SEQ ID NO: 2289672 - RNA, 19 nt, Artificial Sequence
  Description of Artificial Sequence: Synthetic oligonucleotide
  Sense strand starting at position 2526 of SEQ ID NO: 1884756
ucucaucugccugaggagu

SEQ ID NO: 2289673 - RNA, 19 nt, Artificial Sequence
  Description of Artificial Sequence: Synthetic oligonucleotide
  Antisense strand to SEQ ID NO: 2289672
acuccucaggcagaugaga

SEQ ID NO: 2289674 - RNA, 19 nt, Artificial Sequence
  Description of Artificial Sequence: Synthetic oligonucleotide
  Sense strand starting at position 2617 of SEQ ID NO: 1884756
accaaagaguuguuaaguc

SEQ ID NO: 2289675 - RNA, 19 nt, Artificial Sequence
  Description of Artificial Sequence: Synthetic oligonucleotide
  Antisense strand to SEQ ID NO: 2289674
gacuuaacaacucuuuggu

SEQ ID NO: 2289676 - RNA, 19 nt, Artificial Sequence
  Description of Artificial Sequence: Synthetic oligonucleotide
  Sense strand starting at position 2838 of SEQ ID NO: 1884756
ucuugagucuuguuagauc

SEQ ID NO: 2289677 - RNA, 19 nt, Artificial Sequence
  Description of Artificial Sequence: Synthetic oligonucleotide
  Antisense strand to SEQ ID NO: 2289676
gaucuaacaagacucaaga

SEQ ID NO: 2289678 - RNA, 19 nt, Artificial Sequence
  Description of Artificial Sequence: Synthetic oligonucleotide
  Sense strand starting at position 2994 of SEQ ID NO: 1884756
aaagucucgugaucaucga

SEQ ID NO: 2289679 - RNA, 19 nt, Artificial Sequence
  Description of Artificial Sequence: Synthetic oligonucleotide
  Antisense strand to SEQ ID NO: 2289678
ucgaugaucacgagacuuu

SEQ ID NO: 2289680 - RNA, 19 nt, Artificial Sequence
  Description of Artificial Sequence: Synthetic oligonucleotide
  Sense strand starting at position 3631 of SEQ ID NO: 1884756
agcaaauaauccuugagua

SEQ ID NO: 2289681 - RNA, 19 nt, Artificial Sequence
  Description of Artificial Sequence: Synthetic oligonucleotide
  Antisense strand to SEQ ID NO: 2289680
uacucaaggauuauuugcu

SEQ ID NO: 2289682 - RNA, 19 nt, Artificial Sequence
  Description of Artificial Sequence: Synthetic oligonucleotide
  Sense strand starting at position 3632 of SEQ ID NO: 1884756
gcaaauaauccuugaguac

SEQ ID NO: 2289683 - RNA, 19 nt, Artificial Sequence
  Description of Artificial Sequence: Synthetic oligonucleotide
  Antisense strand to SEQ ID NO: 2289682
guacucaaggauuauuugc

SEQ ID NO: 2289684 - RNA, 19 nt, Artificial Sequence
  Description of Artificial Sequence: Synthetic oligonucleotide
  Sense strand starting at position 3688 of SEQ ID NO: 1884756
cccuguagagcucauucuu

SEQ ID NO: 2289685 - RNA, 19 nt, Artificial Sequence
  Description of Artificial Sequence: Synthetic oligonucleotide
  Antisense strand to SEQ ID NO: 2289684
aagaaugagcucuacaggg

SEQ ID NO: 2289686 - RNA, 19 nt, Artificial Sequence
  Description of Artificial Sequence: Synthetic oligonucleotide
  Sense strand starting at position 496 of SEQ ID NO: 1884757
gaaagcaguccauguggaa

SEQ ID NO: 2289687 - RNA, 19 nt, Artificial Sequence
  Description of Artificial Sequence: Synthetic oligonucleotide
  Antisense strand to SEQ ID NO: 2289686
uuccacauggacugcuuuc

SEQ ID NO: 2289688 - RNA, 19 nt, Artificial Sequence
  Description of Artificial Sequence: Synthetic oligonucleotide
  Sense strand starting at position 569 of SEQ ID NO: 1884757
uguagauugcauuaucuca

SEQ ID NO: 2289689 - RNA, 19 nt, Artificial Sequence
  Description of Artificial Sequence: Synthetic oligonucleotide
  Antisense strand to SEQ ID NO: 2289688
ugagauaaugcaaucuaca

SEQ ID NO: 2289690 - RNA, 19 nt, Artificial Sequence
  Description of Artificial Sequence: Synthetic oligonucleotide
  Sense strand starting at position 650 of SEQ ID NO: 1884757
uagguacagugagauuuaa

SEQ ID NO: 2289691 - RNA, 19 nt, Artificial Sequence
  Description of Artificial Sequence: Synthetic oligonucleotide
  Antisense strand to SEQ ID NO: 2289690
uuaaaucucacuguaccua

SEQ ID NO: 2289692 - RNA, 19 nt, Artificial Sequence
  Description of Artificial Sequence: Synthetic oligonucleotide
  Sense strand starting at position 689 of SEQ ID NO: 1884757
ccgcuaaugagauggaaag

SEQ ID NO: 2289693 - RNA, 19 nt, Artificial Sequence
  Description of Artificial Sequence: Synthetic oligonucleotide
  Antisense strand to SEQ ID NO: 2289692
cuuuccaucucauuagcgg

SEQ ID NO: 2289694 - RNA, 19 nt, Artificial Sequence
  Description of Artificial Sequence: Synthetic oligonucleotide
  Sense strand starting at position 704 of SEQ ID NO: 1884757
aaaggcagaucuguaaaua

SEQ ID NO: 2289695 - RNA, 19 nt, Artificial Sequence
  Description of Artificial Sequence: Synthetic oligonucleotide
  Antisense strand to SEQ ID NO: 2289694
uauuuacagaucugccuuu

SEQ ID NO: 2289696 - RNA, 19 nt, Artificial Sequence
  Description of Artificial Sequence: Synthetic oligonucleotide
  Sense strand starting at position 768 of SEQ ID NO: 1884757
ggcagacuauggucuggaa

SEQ ID NO: 2289697 - RNA, 19 nt, Artificial Sequence
  Description of Artificial Sequence: Synthetic oligonucleotide
  Antisense strand to SEQ ID NO: 2289696
uuccagaccauagucugcc

SEQ ID NO: 2289698 - RNA, 19 nt, Artificial Sequence
  Description of Artificial Sequence: Synthetic oligonucleotide
  Sense strand starting at position 772 of SEQ ID NO: 1884757
gacuauggucuggaagcua

SEQ ID NO: 2289699 - RNA, 19 nt, Artificial Sequence
  Description of Artificial Sequence: Synthetic oligonucleotide
  Antisense strand to SEQ ID NO: 2289698
uagcuuccagaccauaguc

SEQ ID NO: 2289700 - RNA, 19 nt, Artificial Sequence
  Description of Artificial Sequence: Synthetic oligonucleotide
  Sense strand starting at position 939 of SEQ ID NO: 1884757
cucuucucagagcaauguu

SEQ ID NO: 2289701 - RNA, 19 nt, Artificial Sequence
  Description of Artificial Sequence: Synthetic oligonucleotide
  Antisense strand to SEQ ID NO: 2289700
aacauugcucugagaagag

SEQ ID NO: 2289702 - RNA, 19 nt, Artificial Sequence
  Description of Artificial Sequence: Synthetic oligonucleotide
  Sense strand starting at position 1173 of SEQ ID NO: 1884757
ugauaucuguaucugcaaa

SEQ ID NO: 2289703 - RNA, 19 nt, Artificial Sequence
  Description of Artificial Sequence: Synthetic oligonucleotide
  Antisense strand to SEQ ID NO: 2289702
uuugcagauacagauauca

SEQ ID NO: 2289704 - RNA, 19 nt, Artificial Sequence
  Description of Artificial Sequence: Synthetic oligonucleotide
  Sense strand starting at position 1216 of SEQ ID NO: 1884757
gugacuucuguugggauaa

SEQ ID NO: 2289705 - RNA, 19 nt, Artificial Sequence
  Description of Artificial Sequence: Synthetic oligonucleotide
  Antisense strand to SEQ ID NO: 2289704
uuaucccaacagaagucac

SEQ ID NO: 2289706 - RNA, 19 nt, Artificial Sequence
  Description of Artificial Sequence: Synthetic oligonucleotide
  Sense strand starting at position 1248 of SEQ ID NO: 1884757
ccagaacuacuguggcuua

SEQ ID NO: 2289707 - RNA, 19 nt, Artificial Sequence
  Description of Artificial Sequence: Synthetic oligonucleotide
  Antisense strand to SEQ ID NO: 2289706
uaagccacaguaguucugg

SEQ ID NO: 2289708 - RNA, 19 nt, Artificial Sequence
  Description of Artificial Sequence: Synthetic oligonucleotide
  Sense strand starting at position 1361 of SEQ ID NO: 1884757
ggguucuauccaugauuag

SEQ ID NO: 2289709 - RNA, 19 nt, Artificial Sequence
  Description of Artificial Sequence: Synthetic oligonucleotide
  Antisense strand to SEQ ID NO: 2289708
cuaaucauggauagaaccc

SEQ ID NO: 2289710 - RNA, 19 nt, Artificial Sequence
  Description of Artificial Sequence: Synthetic oligonucleotide
  Sense strand starting at position 1539 of SEQ ID NO: 1884757
ugcaguuaucucgaagaga

SEQ ID NO: 2289711 - RNA, 19 nt, Artificial Sequence
  Description of Artificial Sequence: Synthetic oligonucleotide
  Antisense strand to SEQ ID NO: 2289710
ucucuucgagauaacugca

SEQ ID NO: 2289712 - RNA, 19 nt, Artificial Sequence
  Description of Artificial Sequence: Synthetic oligonucleotide
  Sense strand starting at position 2195 of SEQ ID NO: 1884757
aucauuucuugaugacaga

SEQ ID NO: 2289713 - RNA, 19 nt, Artificial Sequence
  Description of Artificial Sequence: Synthetic oligonucleotide
  Antisense strand to SEQ ID NO: 2289712
ucugucaucaagaaaugau

SEQ ID NO: 2289714 - RNA, 19 nt, Artificial Sequence
  Description of Artificial Sequence: Synthetic oligonucleotide
  Sense strand starting at position 2198 of SEQ ID NO: 1884757
auuucuugaugacagaucu

SEQ ID NO: 2289715 - RNA, 19 nt, Artificial Sequence
  Description of Artificial Sequence: Synthetic oligonucleotide
  Antisense strand to SEQ ID NO: 2289714
agaucugucaucaagaaau

SEQ ID NO: 2289716 - RNA, 19 nt, Artificial Sequence
  Description of Artificial Sequence: Synthetic oligonucleotide
  Sense strand starting at position 2258 of SEQ ID NO: 1884757
caggauuaguucccagguu

SEQ ID NO: 2289717 - RNA, 19 nt, Artificial Sequence
  Description of Artificial Sequence: Synthetic oligonucleotide
  Antisense strand to SEQ ID NO: 2289716
aaccugggaacuaauccug

SEQ ID NO: 2289718 - RNA, 19 nt, Artificial Sequence
  Description of Artificial Sequence: Synthetic oligonucleotide
  Sense strand starting at position 2312 of SEQ ID NO: 1884757
uccagcugggccuaagaaa

SEQ ID NO: 2289719 - RNA, 19 nt, Artificial Sequence
  Description of Artificial Sequence: Synthetic oligonucleotide
  Antisense strand to SEQ ID NO: 2289718
uuucuuaggcccagcugga

SEQ ID NO: 2289720 - RNA, 19 nt, Artificial Sequence
  Description of Artificial Sequence: Synthetic oligonucleotide
  Sense strand starting at position 2332 of SEQ ID NO: 1884757
accuuagagagcugguuaa

SEQ ID NO: 2289721 - RNA, 19 nt, Artificial Sequence
  Description of Artificial Sequence: Synthetic oligonucleotide
  Antisense strand to SEQ ID NO: 2289720
uuaaccagcucucuaaggu

SEQ ID NO: 2289722 - RNA, 19 nt, Artificial Sequence
  Description of Artificial Sequence: Synthetic oligonucleotide
  Sense strand starting at position 2394 of SEQ ID NO: 1884757
aaucucugauagguggaau

SEQ ID NO: 2289723 - RNA, 19 nt, Artificial Sequence
  Description of Artificial Sequence: Synthetic oligonucleotide
  Antisense strand to SEQ ID NO: 2289722
auuccaccuaucagagauu

SEQ ID NO: 2289724 - RNA, 19 nt, Artificial Sequence
  Description of Artificial Sequence: Synthetic oligonucleotide
  Sense strand starting at position 2395 of SEQ ID NO: 1884757
aucucugauagguggaauc

SEQ ID NO: 2289725 - RNA, 19 nt, Artificial Sequence
  Description of Artificial Sequence: Synthetic oligonucleotide
  Antisense strand to SEQ ID NO: 2289724
gauuccaccuaucagagau

SEQ ID NO: 2289726 - RNA, 19 nt, Artificial Sequence
  Description of Artificial Sequence: Synthetic oligonucleotide
  Sense strand starting at position 2443 of SEQ ID NO: 1884757
gggccuuacuacuuaagag

SEQ ID NO: 2289727 - RNA, 19 nt, Artificial Sequence
  Description of Artificial Sequence: Synthetic oligonucleotide
  Antisense strand to SEQ ID NO: 2289726
cucuuaaguaguaaggccc

SEQ ID NO: 2289728 - RNA, 19 nt, Artificial Sequence
  Description of Artificial Sequence: Synthetic oligonucleotide
  Sense strand starting at position 2455 of SEQ ID NO: 1884757
uuaagaguguaguccauga

SEQ ID NO: 2289729 - RNA, 19 nt, Artificial Sequence
  Description of Artificial Sequence: Synthetic oligonucleotide
  Antisense strand to SEQ ID NO: 2289728
ucauggacuacacucuuaa

SEQ ID NO: 2289730 - RNA, 19 nt, Artificial Sequence
  Description of Artificial Sequence: Synthetic oligonucleotide
  Sense strand starting at position 3007 of SEQ ID NO: 1884757
aaauuagaaucucuguggu

SEQ ID NO: 2289731 - RNA, 19 nt, Artificial Sequence
  Description of Artificial Sequence: Synthetic oligonucleotide
  Antisense strand to SEQ ID NO: 2289730
accacagagauucuaauuu

SEQ ID NO: 2289732 - RNA, 19 nt, Artificial Sequence
  Description of Artificial Sequence: Synthetic oligonucleotide
  Sense strand starting at position 3009 of SEQ ID NO: 1884757
auuagaaucucugugguua

SEQ ID NO: 2289733 - RNA, 19 nt, Artificial Sequence
  Description of Artificial Sequence: Synthetic oligonucleotide
  Antisense strand to SEQ ID NO: 2289732
uaaccacagagauucuaau

SEQ ID NO: 2289734 - RNA, 19 nt, Artificial Sequence
  Description of Artificial Sequence: Synthetic oligonucleotide
  Sense strand starting at position 3010 of SEQ ID NO: 1884757
uuagaaucucugugguuaa

SEQ ID NO: 2289735 - RNA, 19 nt, Artificial Sequence
  Description of Artificial Sequence: Synthetic oligonucleotide
  Antisense strand to SEQ ID NO: 2289734
uuaaccacagagauucuaa

SEQ ID NO: 2289736 - RNA, 19 nt, Artificial Sequence
  Description of Artificial Sequence: Synthetic oligonucleotide
  Sense strand starting at position 3180 of SEQ ID NO: 1884757
acugauauggucugaaugu

SEQ ID NO: 2289737 - RNA, 19 nt, Artificial Sequence
  Description of Artificial Sequence: Synthetic oligonucleotide
  Antisense strand to SEQ ID NO: 2289736
acauucagaccauaucagu

SEQ ID NO: 2289738 - RNA, 19 nt, Artificial Sequence
  Description of Artificial Sequence: Synthetic oligonucleotide
  Sense strand starting at position 3281 of SEQ ID NO: 1884757
ccagaauugcaaggaauug

SEQ ID NO: 2289739 - RNA, 19 nt, Artificial Sequence
  Description of Artificial Sequence: Synthetic oligonucleotide
  Antisense strand to SEQ ID NO: 2289738
caauuccuugcaauucugg

SEQ ID NO: 2289740 - RNA, 19 nt, Artificial Sequence
  Description of Artificial Sequence: Synthetic oligonucleotide
  Sense strand starting at position 3304 of SEQ ID NO: 1884757
uugagauaugcaugcuaua

SEQ ID NO: 2289741 - RNA, 19 nt, Artificial Sequence
  Description of Artificial Sequence: Synthetic oligonucleotide
  Antisense strand to SEQ ID NO: 2289740
uauagcaugcauaucucaa

SEQ ID NO: 2289742 - RNA, 19 nt, Artificial Sequence
  Description of Artificial Sequence: Synthetic oligonucleotide
  Sense strand starting at position 3314 of SEQ ID NO: 1884757
caugcuauaguggacuaua

SEQ ID NO: 2289743 - RNA, 19 nt, Artificial Sequence
  Description of Artificial Sequence: Synthetic oligonucleotide
  Antisense strand to SEQ ID NO: 2289742
uauaguccacuauagcaug

SEQ ID NO: 2289744 - RNA, 19 nt, Artificial Sequence
  Description of Artificial Sequence: Synthetic oligonucleotide
  Sense strand starting at position 3393 of SEQ ID NO: 1884757
acaaguaccguugaucaca

SEQ ID NO: 2289745 - RNA, 19 nt, Artificial Sequence
  Description of Artificial Sequence: Synthetic oligonucleotide
  Antisense strand to SEQ ID NO: 2289744
ugugaucaacgguacuugu

SEQ ID NO: 2289746 - RNA, 19 nt, Artificial Sequence
  Description of Artificial Sequence: Synthetic oligonucleotide
  Sense strand starting at position 3424 of SEQ ID NO: 1884757
aggaguuggcuuuagcuua

SEQ ID NO: 2289747 - RNA, 19 nt, Artificial Sequence
  Description of Artificial Sequence: Synthetic oligonucleotide
  Antisense strand to SEQ ID NO: 2289746
uaagcuaaagccaacuccu

SEQ ID NO: 2289748 - RNA, 19 nt, Artificial Sequence
  Description of Artificial Sequence: Synthetic oligonucleotide
  Sense strand starting at position 3453 of SEQ ID NO: 1884757
acccacuguuaggcaaaua

SEQ ID NO: 2289749 - RNA, 19 nt, Artificial Sequence
  Description of Artificial Sequence: Synthetic oligonucleotide
  Antisense strand to SEQ ID NO: 2289748
uauuugccuaacagugggu

SEQ ID NO: 2289750 - RNA, 19 nt, Artificial Sequence
  Description of Artificial Sequence: Synthetic oligonucleotide
  Sense strand starting at position 3463 of SEQ ID NO: 1884757
aggcaaauauucuuaugca

SEQ ID NO: 2289751 - RNA, 19 nt, Artificial Sequence
  Description of Artificial Sequence: Synthetic oligonucleotide
  Antisense strand to SEQ ID NO: 2289750
ugcauaagaauauuugccu

SEQ ID NO: 2289752 - RNA, 19 nt, Artificial Sequence
  Description of Artificial Sequence: Synthetic oligonucleotide
  Sense strand starting at position 3483 of SEQ ID NO: 1884757
gugguuuaucuauaauacu

SEQ ID NO: 2289753 - RNA, 19 nt, Artificial Sequence
  Description of Artificial Sequence: Synthetic oligonucleotide
  Antisense strand to SEQ ID NO: 2289752
aguauuauagauaaaccac

SEQ ID NO: 2289754 - RNA, 19 nt, Artificial Sequence
  Description of Artificial Sequence: Synthetic oligonucleotide
  Sense strand starting at position 3629 of SEQ ID NO: 1884757
gugggaccucugggaagua

SEQ ID NO: 2289755 - RNA, 19 nt, Artificial Sequence
  Description of Artificial Sequence: Synthetic oligonucleotide
  Antisense strand to SEQ ID NO: 2289754
uacuucccagaggucccac

SEQ ID NO: 2289756 - RNA, 19 nt, Artificial Sequence
  Description of Artificial Sequence: Synthetic oligonucleotide
  Sense strand starting at position 3778 of SEQ ID NO: 1884757
uguagucuccuguaaacag

SEQ ID NO: 2289757 - RNA, 19 nt, Artificial Sequence
  Description of Artificial Sequence: Synthetic oligonucleotide
  Antisense strand to SEQ ID NO: 2289756
cuguuuacaggagacuaca

SEQ ID NO: 2289758 - RNA, 19 nt, Artificial Sequence
  Description of Artificial Sequence: Synthetic oligonucleotide
  Sense strand starting at position 3785 of SEQ ID NO: 1884757
uccuguaaacaggaaguuu

SEQ ID NO: 2289759 - RNA, 19 nt, Artificial Sequence
  Description of Artificial Sequence: Synthetic oligonucleotide
  Antisense strand to SEQ ID NO: 2289758
aaacuuccuguuuacagga

SEQ ID NO: 2289760 - RNA, 19 nt, Artificial Sequence
  Description of Artificial Sequence: Synthetic oligonucleotide
  Sense strand starting at position 3793 of SEQ ID NO: 1884757
acaggaaguuucucagucu

SEQ ID NO: 2289761 - RNA, 19 nt, Artificial Sequence
  Description of Artificial Sequence: Synthetic oligonucleotide
  Antisense strand to SEQ ID NO: 2289760
agacugagaaacuuccugu

SEQ ID NO: 2289762 - RNA, 19 nt, Artificial Sequence
  Description of Artificial Sequence: Synthetic oligonucleotide
  Sense strand starting at position 3822 of SEQ ID NO: 1884757
cuacauuguacccggauga

SEQ ID NO: 2289763 - RNA, 19 nt, Artificial Sequence
  Description of Artificial Sequence: Synthetic oligonucleotide
  Antisense strand to SEQ ID NO: 2289762
ucauccggguacaauguag

SEQ ID NO: 2289764 - RNA, 19 nt, Artificial Sequence
  Description of Artificial Sequence: Synthetic oligonucleotide
  Sense strand starting at position 3897 of SEQ ID NO: 1884757
ugcuaucuugcugacacau

SEQ ID NO: 2289765 - RNA, 19 nt, Artificial Sequence
  Description of Artificial Sequence: Synthetic oligonucleotide
  Antisense strand to SEQ ID NO: 2289764
augugucagcaagauagca

SEQ ID NO: 2289766 - RNA, 19 nt, Artificial Sequence
  Description of Artificial Sequence: Synthetic oligonucleotide
  Sense strand starting at position 114 of SEQ ID NO: 1884758
gugguagucuaagcaugaa

SEQ ID NO: 2289767 - RNA, 19 nt, Artificial Sequence
  Description of Artificial Sequence: Synthetic oligonucleotide
  Antisense strand to SEQ ID NO: 2289766
uucaugcuuagacuaccac

SEQ ID NO: 2289768 - RNA, 19 nt, Artificial Sequence
  Description of Artificial Sequence: Synthetic oligonucleotide
  Sense strand starting at position 151 of SEQ ID NO: 1884758
ggcagcuguuugccaaaca

SEQ ID NO: 2289769 - RNA, 19 nt, Artificial Sequence
  Description of Artificial Sequence: Synthetic oligonucleotide
  Antisense strand to SEQ ID NO: 2289768
uguuuggcaaacagcugcc

SEQ ID NO: 2289770 - RNA, 19 nt, Artificial Sequence
  Description of Artificial Sequence: Synthetic oligonucleotide
  Sense strand starting at position 189 of SEQ ID NO: 1884758
ucccgugugguuuggauga

SEQ ID NO: 2289771 - RNA, 19 nt, Artificial Sequence
  Description of Artificial Sequence: Synthetic oligonucleotide
  Antisense strand to SEQ ID NO: 2289770
ucauccaaaccacacggga

SEQ ID NO: 2289772 - RNA, 19 nt, Artificial Sequence
  Description of Artificial Sequence: Synthetic oligonucleotide
  Sense strand starting at position 194 of SEQ ID NO: 1884758
ugugguuuggaugaugaca

SEQ ID NO: 2289773 - RNA, 19 nt, Artificial Sequence
  Description of Artificial Sequence: Synthetic oligonucleotide
  Antisense strand to SEQ ID NO: 2289772
ugucaucauccaaaccaca

SEQ ID NO: 2289774 - RNA, 19 nt, Artificial Sequence
  Description of Artificial Sequence: Synthetic oligonucleotide
  Sense strand starting at position 303 of SEQ ID NO: 1884758
gcaguuuagucacuggaac

SEQ ID NO: 2289775 - RNA, 19 nt, Artificial Sequence
  Description of Artificial Sequence: Synthetic oligonucleotide
  Antisense strand to SEQ ID NO: 2289774
guuccagugacuaaacugc

SEQ ID NO: 2289776 - RNA, 19 nt, Artificial Sequence
  Description of Artificial Sequence: Synthetic oligonucleotide
  Sense strand starting at position 383 of SEQ ID NO: 1884758
agagcugaaucagucaaca

SEQ ID NO: 2289777 - RNA, 19 nt, Artificial Sequence
  Description of Artificial Sequence: Synthetic oligonucleotide
  Antisense strand to SEQ ID NO: 2289776
uguugacugauucagcucu

SEQ ID NO: 2289778 - RNA, 19 nt, Artificial Sequence
  Description of Artificial Sequence: Synthetic oligonucleotide
  Sense strand starting at position 559 of SEQ ID NO: 1884758
gagagucugcaccauuaga

SEQ ID NO: 2289779 - RNA, 19 nt, Artificial Sequence
  Description of Artificial Sequence: Synthetic oligonucleotide
  Antisense strand to SEQ ID NO: 2289778
ucuaauggugcagacucuc

SEQ ID NO: 2289780 - RNA, 19 nt, Artificial Sequence
  Description of Artificial Sequence: Synthetic oligonucleotide
  Sense strand starting at position 572 of SEQ ID NO: 1884758
auuagaguuugcuuccuca

SEQ ID NO: 2289781 - RNA, 19 nt, Artificial Sequence
  Description of Artificial Sequence: Synthetic oligonucleotide
  Antisense strand to SEQ ID NO: 2289780
ugaggaagcaaacucuaau

SEQ ID NO: 2289782 - RNA, 19 nt, Artificial Sequence
  Description of Artificial Sequence: Synthetic oligonucleotide
  Sense strand starting at position 575 of SEQ ID NO: 1884758
agaguuugcuuccucauca

SEQ ID NO: 2289783 - RNA, 19 nt, Artificial Sequence
  Description of Artificial Sequence: Synthetic oligonucleotide
  Antisense strand to SEQ ID NO: 2289782
ugaugaggaagcaaacucu

SEQ ID NO: 2289784 - RNA, 19 nt, Artificial Sequence
  Description of Artificial Sequence: Synthetic oligonucleotide
  Sense strand starting at position 610 of SEQ ID NO: 1884758
ugugauuaacaguacaggu

SEQ ID NO: 2289785 - RNA, 19 nt, Artificial Sequence
  Description of Artificial Sequence: Synthetic oligonucleotide
  Antisense strand to SEQ ID NO: 2289784
accuguacuguuaaucaca

SEQ ID NO: 2289786 - RNA, 19 nt, Artificial Sequence
  Description of Artificial Sequence: Synthetic oligonucleotide
  Sense strand starting at position 659 of SEQ ID NO: 1884758
ugaaauuaugagugccagu

SEQ ID NO: 2289787 - RNA, 19 nt, Artificial Sequence
  Description of Artificial Sequence: Synthetic oligonucleotide
  Antisense strand to SEQ ID NO: 2289786
acuggcacucauaauuuca

SEQ ID NO: 2289788 - RNA, 19 nt, Artificial Sequence
  Description of Artificial Sequence: Synthetic oligonucleotide
  Sense strand starting at position 1026 of SEQ ID NO: 1884758
ccaagaauguuagucagau

SEQ ID NO: 2289789 - RNA, 19 nt, Artificial Sequence
  Description of Artificial Sequence: Synthetic oligonucleotide
  Antisense strand to SEQ ID NO: 2289788
aucugacuaacauucuugg

SEQ ID NO: 2289790 - RNA, 19 nt, Artificial Sequence
  Description of Artificial Sequence: Synthetic oligonucleotide
  Sense strand starting at position 1027 of SEQ ID NO: 1884758
caagaauguuagucagauu

SEQ ID NO: 2289791 - RNA, 19 nt, Artificial Sequence
  Description of Artificial Sequence: Synthetic oligonucleotide
  Antisense strand to SEQ ID NO: 2289790
aaucugacuaacauucuug

SEQ ID NO: 2289792 - RNA, 19 nt, Artificial Sequence
  Description of Artificial Sequence: Synthetic oligonucleotide
  Sense strand starting at position 1409 of SEQ ID NO: 1884758
cggagagcgcaaggaauua

SEQ ID NO: 2289793 - RNA, 19 nt, Artificial Sequence
  Description of Artificial Sequence: Synthetic oligonucleotide
  Antisense strand to SEQ ID NO: 2289792
uaauuccuugcgcucuccg

SEQ ID NO: 2289794 - RNA, 19 nt, Artificial Sequence
  Description of Artificial Sequence: Synthetic oligonucleotide
  Sense strand starting at position 2007 of SEQ ID NO: 1884758
guauguguuuggagagaag

SEQ ID NO: 2289795 - RNA, 19 nt, Artificial Sequence
  Description of Artificial Sequence: Synthetic oligonucleotide
  Antisense strand to SEQ ID NO: 2289794
cuucucuccaaacacauac

SEQ ID NO: 2289796 - RNA, 19 nt, Artificial Sequence
  Description of Artificial Sequence: Synthetic oligonucleotide
  Sense strand starting at position 2018 of SEQ ID NO: 1884758
gagagaagaugggauauaa

SEQ ID NO: 2289797 - RNA, 19 nt, Artificial Sequence
  Description of Artificial Sequence: Synthetic oligonucleotide
  Antisense strand to SEQ ID NO: 2289796
uuauaucccaucuucucuc

SEQ ID NO: 2289798 - RNA, 19 nt, Artificial Sequence
  Description of Artificial Sequence: Synthetic oligonucleotide
  Sense strand starting at position 2048 of SEQ ID NO: 1884758
aauugaugagggugagcuu

SEQ ID NO: 2289799 - RNA, 19 nt, Artificial Sequence
  Description of Artificial Sequence: Synthetic oligonucleotide
  Antisense strand to SEQ ID NO: 2289798
aagcucacccucaucaauu

SEQ ID NO: 2289800 - RNA, 19 nt, Artificial Sequence
  Description of Artificial Sequence: Synthetic oligonucleotide
  Sense strand starting at position 2081 of SEQ ID NO: 1884758
uuguuccuauuacuguaua

SEQ ID NO: 2289801 - RNA, 19 nt, Artificial Sequence
  Description of Artificial Sequence: Synthetic oligonucleotide
  Antisense strand to SEQ ID NO: 2289800
uauacaguaauaggaacaa

SEQ ID NO: 2289802 - RNA, 19 nt, Artificial Sequence
  Description of Artificial Sequence: Synthetic oligonucleotide
  Sense strand starting at position 2168 of SEQ ID NO: 1884758
uuucuagaguucgcgaaca

SEQ ID NO: 2289803 - RNA, 19 nt, Artificial Sequence
  Description of Artificial Sequence: Synthetic oligonucleotide
  Antisense strand to SEQ ID NO: 2289802
uguucgcgaacucuagaaa

SEQ ID NO: 2289804 - RNA, 19 nt, Artificial Sequence
  Description of Artificial Sequence: Synthetic oligonucleotide
  Sense strand starting at position 2170 of SEQ ID NO: 1884758
ucuagaguucgcgaacauu

SEQ ID NO: 2289805 - RNA, 19 nt, Artificial Sequence
  Description of Artificial Sequence: Synthetic oligonucleotide
  Antisense strand to SEQ ID NO: 2289804
aauguucgcgaacucuaga

SEQ ID NO: 2289806 - RNA, 19 nt, Artificial Sequence
  Description of Artificial Sequence: Synthetic oligonucleotide
  Sense strand starting at position 2173 of SEQ ID NO: 1884758
agaguucgcgaacauuugu

SEQ ID NO: 2289807 - RNA, 19 nt, Artificial Sequence
  Description of Artificial Sequence: Synthetic oligonucleotide
  Antisense strand to SEQ ID NO: 2289806
acaaauguucgcgaacucu

SEQ ID NO: 2289808 - RNA, 19 nt, Artificial Sequence
  Description of Artificial Sequence: Synthetic oligonucleotide
  Sense strand starting at position 2178 of SEQ ID NO: 1884758
ucgcgaacauuuguucuca

SEQ ID NO: 2289809 - RNA, 19 nt, Artificial Sequence
  Description of Artificial Sequence: Synthetic oligonucleotide
  Antisense strand to SEQ ID NO: 2289808
ugagaacaaauguucgcga

SEQ ID NO: 2289810 - RNA, 19 nt, Artificial Sequence
  Description of Artificial Sequence: Synthetic oligonucleotide
  Sense strand starting at position 2190 of SEQ ID NO: 1884758
guucucagcccaugcaaau

SEQ ID NO: 2289811 - RNA, 19 nt, Artificial Sequence
  Description of Artificial Sequence: Synthetic oligonucleotide
  Antisense strand to SEQ ID NO: 2289810
auuugcaugggcugagaac

SEQ ID NO: 2289812 - RNA, 19 nt, Artificial Sequence
  Description of Artificial Sequence: Synthetic oligonucleotide
  Sense strand starting at position 2205 of SEQ ID NO: 1884758
aaaugaguucggugcugau

SEQ ID NO: 2289813 - RNA, 19 nt, Artificial Sequence
  Description of Artificial Sequence: Synthetic oligonucleotide
  Antisense strand to SEQ ID NO: 2289812
aucagcaccgaacucauuu

SEQ ID NO: 2289814 - RNA, 19 nt, Artificial Sequence
  Description of Artificial Sequence: Synthetic oligonucleotide
  Sense strand starting at position 2214 of SEQ ID NO: 1884758
cggugcugauugguugaga

SEQ ID NO: 2289815 - RNA, 19 nt, Artificial Sequence
  Description of Artificial Sequence: Synthetic oligonucleotide
  Antisense strand to SEQ ID NO: 2289814
ucucaaccaaucagcaccg

SEQ ID NO: 2289816 - RNA, 19 nt, Artificial Sequence
  Description of Artificial Sequence: Synthetic oligonucleotide
  Sense strand starting at position 2215 of SEQ ID NO: 1884758
ggugcugauugguugagaa

SEQ ID NO: 2289817 - RNA, 19 nt, Artificial Sequence
  Description of Artificial Sequence: Synthetic oligonucleotide
  Antisense strand to SEQ ID NO: 2289816
uucucaaccaaucagcacc

SEQ ID NO: 2289818 - RNA, 19 nt, Artificial Sequence
  Description of Artificial Sequence: Synthetic oligonucleotide
  Sense strand starting at position 2323 of SEQ ID NO: 1884758
uccuaaaggccuugucuau

SEQ ID NO: 2289819 - RNA, 19 nt, Artificial Sequence
  Description of Artificial Sequence: Synthetic oligonucleotide
  Antisense strand to SEQ ID NO: 2289818
auagacaaggccuuuagga

SEQ ID NO: 2289820 - RNA, 19 nt, Artificial Sequence
  Description of Artificial Sequence: Synthetic oligonucleotide
  Sense strand starting at position 2327 of SEQ ID NO: 1884758
aaaggccuugucuauugau

SEQ ID NO: 2289821 - RNA, 19 nt, Artificial Sequence
  Description of Artificial Sequence: Synthetic oligonucleotide
  Antisense strand to SEQ ID NO: 2289820
aucaauagacaaggccuuu

SEQ ID NO: 2289822 - RNA, 19 nt, Artificial Sequence
  Description of Artificial Sequence: Synthetic oligonucleotide
  Sense strand starting at position 2334 of SEQ ID NO: 1884758
uugucuauugaugagcgau

SEQ ID NO: 2289823 - RNA, 19 nt, Artificial Sequence
  Description of Artificial Sequence: Synthetic oligonucleotide
  Antisense strand to SEQ ID NO: 2289822
aucgcucaucaauagacaa

SEQ ID NO: 2289824 - RNA, 19 nt, Artificial Sequence
  Description of Artificial Sequence: Synthetic oligonucleotide
  Sense strand starting at position 2337 of SEQ ID NO: 1884758
ucuauugaugagcgaugga

SEQ ID NO: 2289825 - RNA, 19 nt, Artificial Sequence
  Description of Artificial Sequence: Synthetic oligonucleotide
  Antisense strand to SEQ ID NO: 2289824
uccaucgcucaucaauaga

SEQ ID NO: 2289826 - RNA, 19 nt, Artificial Sequence
  Description of Artificial Sequence: Synthetic oligonucleotide
  Sense strand starting at position 2417 of SEQ ID NO: 1884758
acuguaggugguuaaggau

SEQ ID NO: 2289827 - RNA, 19 nt, Artificial Sequence
  Description of Artificial Sequence: Synthetic oligonucleotide
  Antisense strand to SEQ ID NO: 2289826
auccuuaaccaccuacagu

SEQ ID NO: 2289828 - RNA, 19 nt, Artificial Sequence
  Description of Artificial Sequence: Synthetic oligonucleotide
  Sense strand starting at position 2441 of SEQ ID NO: 1884758
guacuaaucgccuggaccu

SEQ ID NO: 2289829 - RNA, 19 nt, Artificial Sequence
  Description of Artificial Sequence: Synthetic oligonucleotide
  Antisense strand to SEQ ID NO: 2289828
agguccaggcgauuaguac

SEQ ID NO: 2289830 - RNA, 19 nt, Artificial Sequence
  Description of Artificial Sequence: Synthetic oligonucleotide
  Sense strand starting at position 2559 of SEQ ID NO: 1884758
gggaucuuggcucaccaua

SEQ ID NO: 2289831 - RNA, 19 nt, Artificial Sequence
  Description of Artificial Sequence: Synthetic oligonucleotide
  Antisense strand to SEQ ID NO: 2289830
uauggugagccaagauccc

SEQ ID NO: 2289832 - RNA, 19 nt, Artificial Sequence
  Description of Artificial Sequence: Synthetic oligonucleotide
  Sense strand starting at position 2795 of SEQ ID NO: 1884758
ucauaaccguuucuuaaag

SEQ ID NO: 2289833 - RNA, 19 nt, Artificial Sequence
  Description of Artificial Sequence: Synthetic oligonucleotide
  Antisense strand to SEQ ID NO: 2289832
cuuuaagaaacgguuauga

SEQ ID NO: 2289834 - RNA, 19 nt, Artificial Sequence
  Description of Artificial Sequence: Synthetic oligonucleotide
  Sense strand starting at position 2809 of SEQ ID NO: 1884758
uaaaguauuccacggaaag

SEQ ID NO: 2289835 - RNA, 19 nt, Artificial Sequence
  Description of Artificial Sequence: Synthetic oligonucleotide
  Antisense strand to SEQ ID NO: 2289834
cuuuccguggaauacuuua

SEQ ID NO: 2289836 - RNA, 19 nt, Artificial Sequence
  Description of Artificial Sequence: Synthetic oligonucleotide
  Sense strand starting at position 2810 of SEQ ID NO: 1884758
aaaguauuccacggaaagg

SEQ ID NO: 2289837 - RNA, 19 nt, Artificial Sequence
  Description of Artificial Sequence: Synthetic oligonucleotide
  Antisense strand to SEQ ID NO: 2289836
ccuuuccguggaauacuuu

SEQ ID NO: 2289838 - RNA, 19 nt, Artificial Sequence
  Description of Artificial Sequence: Synthetic oligonucleotide
  Sense strand starting at position 2844 of SEQ ID NO: 1884758
gcccuuguuccggaggacu

SEQ ID NO: 2289839 - RNA, 19 nt, Artificial Sequence
  Description of Artificial Sequence: Synthetic oligonucleotide
  Antisense strand to SEQ ID NO: 2289838
aguccuccggaacaagggc

SEQ ID NO: 2289840 - RNA, 19 nt, Artificial Sequence
  Description of Artificial Sequence: Synthetic oligonucleotide
  Sense strand starting at position 2879 of SEQ ID NO: 1884758
gugagacccgucugaauag

SEQ ID NO: 2289841 - RNA, 19 nt, Artificial Sequence
  Description of Artificial Sequence: Synthetic oligonucleotide
  Antisense strand to SEQ ID NO: 2289840
cuauucagacgggucucac

SEQ ID NO: 2289842 - RNA, 19 nt, Artificial Sequence
  Description of Artificial Sequence: Synthetic oligonucleotide
  Sense strand starting at position 2891 of SEQ ID NO: 1884758
ugaauagauuccuagaacu

SEQ ID NO: 2289843 - RNA, 19 nt, Artificial Sequence
  Description of Artificial Sequence: Synthetic oligonucleotide
  Antisense strand to SEQ ID NO: 2289842
aguucuaggaaucuauuca

SEQ ID NO: 2289844 - RNA, 19 nt, Artificial Sequence
  Description of Artificial Sequence: Synthetic oligonucleotide
  Sense strand starting at position 2903 of SEQ ID NO: 1884758
uagaacugaccacgucaga

SEQ ID NO: 2289845 - RNA, 19 nt, Artificial Sequence
  Description of Artificial Sequence: Synthetic oligonucleotide
  Antisense strand to SEQ ID NO: 2289844
ucugacguggucaguucua

SEQ ID NO: 2289846 - RNA, 19 nt, Artificial Sequence
  Description of Artificial Sequence: Synthetic oligonucleotide
  Sense strand starting at position 71 of SEQ ID NO: 1884759
auaaucaagugguuuguaa

SEQ ID NO: 2289847 - RNA, 19 nt, Artificial Sequence
  Description of Artificial Sequence: Synthetic oligonucleotide
  Antisense strand to SEQ ID NO: 2289846
uuacaaaccacuugauuau

SEQ ID NO: 2289848 - RNA, 19 nt, Artificial Sequence
  Description of Artificial Sequence: Synthetic oligonucleotide
  Sense strand starting at position 73 of SEQ ID NO: 1884759
aaucaagugguuuguaaca

SEQ ID NO: 2289849 - RNA, 19 nt, Artificial Sequence
  Description of Artificial Sequence: Synthetic oligonucleotide
  Antisense strand to SEQ ID NO: 2289848
uguuacaaaccacuugauu

SEQ ID NO: 2289850 - RNA, 19 nt, Artificial Sequence
  Description of Artificial Sequence: Synthetic oligonucleotide
  Sense strand starting at position 130 of SEQ ID NO: 1884759
agacauuugugcuuuccau

SEQ ID NO: 2289851 - RNA, 19 nt, Artificial Sequence
  Description of Artificial Sequence: Synthetic oligonucleotide
  Antisense strand to SEQ ID NO: 2289850
auggaaagcacaaaugucu

SEQ ID NO: 2289852 - RNA, 19 nt, Artificial Sequence
  Description of Artificial Sequence: Synthetic oligonucleotide
  Sense strand starting at position 233 of SEQ ID NO: 1884759
cagagucucccugacgauu

SEQ ID NO: 2289853 - RNA, 19 nt, Artificial Sequence
  Description of Artificial Sequence: Synthetic oligonucleotide
  Antisense strand to SEQ ID NO: 2289852
aaucgucagggagacucug

SEQ ID NO: 2289854 - RNA, 19 nt, Artificial Sequence
  Description of Artificial Sequence: Synthetic oligonucleotide
  Sense strand starting at position 688 of SEQ ID NO: 1884759
ugguaucaauccucaggau

SEQ ID NO: 2289855 - RNA, 19 nt, Artificial Sequence
  Description of Artificial Sequence: Synthetic oligonucleotide
  Antisense strand to SEQ ID NO: 2289854
auccugaggauugauacca

SEQ ID NO: 2289856 - RNA, 19 nt, Artificial Sequence
  Description of Artificial Sequence: Synthetic oligonucleotide
  Sense strand starting at position 718 of SEQ ID NO: 1884759
aaggcuuacuuguuuagga

SEQ ID NO: 2289857 - RNA, 19 nt, Artificial Sequence
  Description of Artificial Sequence: Synthetic oligonucleotide
  Antisense strand to SEQ ID NO: 2289856
uccuaaacaaguaagccuu

SEQ ID NO: 2289858 - RNA, 19 nt, Artificial Sequence
  Description of Artificial Sequence: Synthetic oligonucleotide
  Sense strand starting at position 946 of SEQ ID NO: 1884759
cuguuauauuaguuccaaa

SEQ ID NO: 2289859 - RNA, 19 nt, Artificial Sequence
  Description of Artificial Sequence: Synthetic oligonucleotide
  Antisense strand to SEQ ID NO: 2289858
uuuggaacuaauauaacag

SEQ ID NO: 2289860 - RNA, 19 nt, Artificial Sequence
  Description of Artificial Sequence: Synthetic oligonucleotide
  Sense strand starting at position 1115 of SEQ ID NO: 1884759
ugaagacuuccaugcauag

SEQ ID NO: 2289861 - RNA, 19 nt, Artificial Sequence
  Description of Artificial Sequence: Synthetic oligonucleotide
  Antisense strand to SEQ ID NO: 2289860
cuaugcauggaagucuuca

SEQ ID NO: 2289862 - RNA, 19 nt, Artificial Sequence
  Description of Artificial Sequence: Synthetic oligonucleotide
  Sense strand starting at position 1215 of SEQ ID NO: 1884759
gaggaaguaucuuuaaacu

SEQ ID NO: 2289863 - RNA, 19 nt, Artificial Sequence
  Description of Artificial Sequence: Synthetic oligonucleotide
  Antisense strand to SEQ ID NO: 2289862
aguuuaaagauacuuccuc

SEQ ID NO: 2289864 - RNA, 19 nt, Artificial Sequence
  Description of Artificial Sequence: Synthetic oligonucleotide
  Sense strand starting at position 1369 of SEQ ID NO: 1884759
ccuggaaaccuguagucau

SEQ ID NO: 2289865 - RNA, 19 nt, Artificial Sequence
  Description of Artificial Sequence: Synthetic oligonucleotide
  Antisense strand to SEQ ID NO: 2289864
augacuacagguuuccagg

SEQ ID NO: 2289866 - RNA, 19 nt, Artificial Sequence
  Description of Artificial Sequence: Synthetic oligonucleotide
  Sense strand starting at position 1372 of SEQ ID NO: 1884759
ggaaaccuguagucauuaa

SEQ ID NO: 2289867 - RNA, 19 nt, Artificial Sequence
  Description of Artificial Sequence: Synthetic oligonucleotide
  Antisense strand to SEQ ID NO: 2289866
uuaaugacuacagguuucc

SEQ ID NO: 2289868 - RNA, 19 nt, Artificial Sequence
  Description of Artificial Sequence: Synthetic oligonucleotide
  Sense strand starting at position 1376 of SEQ ID NO: 1884759
accuguagucauuaaacac

SEQ ID NO: 2289869 - RNA, 19 nt, Artificial Sequence
  Description of Artificial Sequence: Synthetic oligonucleotide
  Antisense strand to SEQ ID NO: 2289868
guguuuaaugacuacaggu

SEQ ID NO: 2289870 - RNA, 19 nt, Artificial Sequence
  Description of Artificial Sequence: Synthetic oligonucleotide
  Sense strand starting at position 1390 of SEQ ID NO: 1884759
aacacuagccaucgggaau

SEQ ID NO: 2289871 - RNA, 19 nt, Artificial Sequence
  Description of Artificial Sequence: Synthetic oligonucleotide
  Antisense strand to SEQ ID NO: 2289870
auucccgauggcuaguguu

SEQ ID NO: 2289872 - RNA, 19 nt, Artificial Sequence
  Description of Artificial Sequence: Synthetic oligonucleotide
  Sense strand starting at position 1391 of SEQ ID NO: 1884759
acacuagccaucgggaaua

SEQ ID NO: 2289873 - RNA, 19 nt, Artificial Sequence
  Description of Artificial Sequence: Synthetic oligonucleotide
  Antisense strand to SEQ ID NO: 2289872
uauucccgauggcuagugu

SEQ ID NO: 2289874 - RNA, 19 nt, Artificial Sequence
  Description of Artificial Sequence: Synthetic oligonucleotide
  Sense strand starting at position 1556 of SEQ ID NO: 1884759
uccagucuauuauuauaga

SEQ ID NO: 2289875 - RNA, 19 nt, Artificial Sequence
  Description of Artificial Sequence: Synthetic oligonucleotide
  Antisense strand to SEQ ID NO: 2289874
ucuauaauaauagacugga

SEQ ID NO: 2289876 - RNA, 19 nt, Artificial Sequence
  Description of Artificial Sequence: Synthetic oligonucleotide
  Sense strand starting at position 2132 of SEQ ID NO: 1884759
gucugaugucaagaucuuc

SEQ ID NO: 2289877 - RNA, 19 nt, Artificial Sequence
  Description of Artificial Sequence: Synthetic oligonucleotide
  Antisense strand to SEQ ID NO: 2289876
gaagaucuugacaucagac

SEQ ID NO: 2289878 - RNA, 19 nt, Artificial Sequence
  Description of Artificial Sequence: Synthetic oligonucleotide
  Sense strand starting at position 2232 of SEQ ID NO: 1884759
gaugaaauguaguugguaa

SEQ ID NO: 2289879 - RNA, 19 nt, Artificial Sequence
  Description of Artificial Sequence: Synthetic oligonucleotide
  Antisense strand to SEQ ID NO: 2289878
uuaccaacuacauuucauc

SEQ ID NO: 2289880 - RNA, 19 nt, Artificial Sequence
  Description of Artificial Sequence: Synthetic oligonucleotide
  Sense strand starting at position 2233 of SEQ ID NO: 1884759
augaaauguaguugguaaa

SEQ ID NO: 2289881 - RNA, 19 nt, Artificial Sequence
  Description of Artificial Sequence: Synthetic oligonucleotide
  Antisense strand to SEQ ID NO: 2289880
uuuaccaacuacauuucau

SEQ ID NO: 2289882 - RNA, 19 nt, Artificial Sequence
  Description of Artificial Sequence: Synthetic oligonucleotide
  Sense strand starting at position 2234 of SEQ ID NO: 1884759
ugaaauguaguugguaaac

SEQ ID NO: 2289883 - RNA, 19 nt, Artificial Sequence
  Description of Artificial Sequence: Synthetic oligonucleotide
  Antisense strand to SEQ ID NO: 2289882
guuuaccaacuacauuuca

SEQ ID NO: 2289884 - RNA, 19 nt, Artificial Sequence
  Description of Artificial Sequence: Synthetic oligonucleotide
  Sense strand starting at position 2324 of SEQ ID NO: 1884759
uugaaauaccgaggagcuu

SEQ ID NO: 2289885 - RNA, 19 nt, Artificial Sequence
  Description of Artificial Sequence: Synthetic oligonucleotide
  Antisense strand to SEQ ID NO: 2289884
aagcuccucgguauuucaa

SEQ ID NO: 2289886 - RNA, 19 nt, Artificial Sequence
  Description of Artificial Sequence: Synthetic oligonucleotide
  Sense strand starting at position 2325 of SEQ ID NO: 1884759
ugaaauaccgaggagcuuu

SEQ ID NO: 2289887 - RNA, 19 nt, Artificial Sequence
  Description of Artificial Sequence: Synthetic oligonucleotide
  Antisense strand to SEQ ID NO: 2289886
aaagcuccucgguauuuca

SEQ ID NO: 2289888 - RNA, 19 nt, Artificial Sequence
  Description of Artificial Sequence: Synthetic oligonucleotide
  Sense strand starting at position 2395 of SEQ ID NO: 1884759
auguguugcgggucuacga

SEQ ID NO: 2289889 - RNA, 19 nt, Artificial Sequence
  Description of Artificial Sequence: Synthetic oligonucleotide
  Antisense strand to SEQ ID NO: 2289888
ucguagacccgcaacacau

SEQ ID NO: 2289890 - RNA, 19 nt, Artificial Sequence
  Description of Artificial Sequence: Synthetic oligonucleotide
  Sense strand starting at position 2398 of SEQ ID NO: 1884759
uguugcgggucuacgaauu

SEQ ID NO: 2289891 - RNA, 19 nt, Artificial Sequence
  Description of Artificial Sequence: Synthetic oligonucleotide
  Antisense strand to SEQ ID NO: 2289890
aauucguagacccgcaaca

SEQ ID NO: 2289892 - RNA, 19 nt, Artificial Sequence
  Description of Artificial Sequence: Synthetic oligonucleotide
  Sense strand starting at position 2416 of SEQ ID NO: 1884759
ucuaacucucgagaauggu

SEQ ID NO: 2289893 - RNA, 19 nt, Artificial Sequence
  Description of Artificial Sequence: Synthetic oligonucleotide
  Antisense strand to SEQ ID NO: 2289892
accauucucgagaguuaga

SEQ ID NO: 2289894 - RNA, 19 nt, Artificial Sequence
  Description of Artificial Sequence: Synthetic oligonucleotide
  Sense strand starting at position 2485 of SEQ ID NO: 1884759
uggccuauuccuguguugu

SEQ ID NO: 2289895 - RNA, 19 nt, Artificial Sequence
  Description of Artificial Sequence: Synthetic oligonucleotide
  Antisense strand to SEQ ID NO: 2289894
acaacacaggaauaggcca

SEQ ID NO: 2289896 - RNA, 19 nt, Artificial Sequence
  Description of Artificial Sequence: Synthetic oligonucleotide
  Sense strand starting at position 2523 of SEQ ID NO: 1884759
uauuccuggguguagaaau

SEQ ID NO: 2289897 - RNA, 19 nt, Artificial Sequence
  Description of Artificial Sequence: Synthetic oligonucleotide
  Antisense strand to SEQ ID NO: 2289896
auuucuacacccaggaaua

SEQ ID NO: 2289898 - RNA, 19 nt, Artificial Sequence
  Description of Artificial Sequence: Synthetic oligonucleotide
  Sense strand starting at position 2615 of SEQ ID NO: 1884759
ugucaacauguuuacauau

SEQ ID NO: 2289899 - RNA, 19 nt, Artificial Sequence
  Description of Artificial Sequence: Synthetic oligonucleotide
  Antisense strand to SEQ ID NO: 2289898
auauguaaacauguugaca

SEQ ID NO: 2289900 - RNA, 19 nt, Artificial Sequence
  Description of Artificial Sequence: Synthetic oligonucleotide
  Sense strand starting at position 2657 of SEQ ID NO: 1884759
guuaacuguguagagcaaa

SEQ ID NO: 2289901 - RNA, 19 nt, Artificial Sequence
  Description of Artificial Sequence: Synthetic oligonucleotide
  Antisense strand to SEQ ID NO: 2289900
uuugcucuacacaguuaac

SEQ ID NO: 2289902 - RNA, 19 nt, Artificial Sequence
  Description of Artificial Sequence: Synthetic oligonucleotide
  Sense strand starting at position 2901 of SEQ ID NO: 1884759
ugaauuccagcuuauguga

SEQ ID NO: 2289903 - RNA, 19 nt, Artificial Sequence
  Description of Artificial Sequence: Synthetic oligonucleotide
  Antisense strand to SEQ ID NO: 2289902
ucacauaagcuggaauuca

SEQ ID NO: 2289904 - RNA, 19 nt, Artificial Sequence
  Description of Artificial Sequence: Synthetic oligonucleotide
  Sense strand starting at position 2929 of SEQ ID NO: 1884759
acaucuugcaggugaugaa

SEQ ID NO: 2289905 - RNA, 19 nt, Artificial Sequence
  Description of Artificial Sequence: Synthetic oligonucleotide
  Antisense strand to SEQ ID NO: 2289904
uucaucaccugcaagaugu

SEQ ID NO: 2289906 - RNA, 19 nt, Artificial Sequence
  Description of Artificial Sequence: Synthetic oligonucleotide
  Sense strand starting at position 2930 of SEQ ID NO: 1884759
caucuugcaggugaugaaa

SEQ ID NO: 2289907 - RNA, 19 nt, Artificial Sequence
  Description of Artificial Sequence: Synthetic oligonucleotide
  Antisense strand to SEQ ID NO: 2289906
uuucaucaccugcaagaug

SEQ ID NO: 2289908 - RNA, 19 nt, Artificial Sequence
  Description of Artificial Sequence: Synthetic oligonucleotide
  Sense strand starting at position 2974 of SEQ ID NO: 1884759
gguguuuagccuguucuuu

SEQ ID NO: 2289909 - RNA, 19 nt, Artificial Sequence
  Description of Artificial Sequence: Synthetic oligonucleotide
  Antisense strand to SEQ ID NO: 2289908
aaagaacaggcuaaacacc

SEQ ID NO: 2289910 - RNA, 19 nt, Artificial Sequence
  Description of Artificial Sequence: Synthetic oligonucleotide
  Sense strand starting at position 2975 of SEQ ID NO: 1884759
guguuuagccuguucuuua

SEQ ID NO: 2289911 - RNA, 19 nt, Artificial Sequence
  Description of Artificial Sequence: Synthetic oligonucleotide
  Antisense strand to SEQ ID NO: 2289910
uaaagaacaggcuaaacac

SEQ ID NO: 2289912 - RNA, 19 nt, Artificial Sequence
  Description of Artificial Sequence: Synthetic oligonucleotide
  Sense strand starting at position 2986 of SEQ ID NO: 1884759
guucuuuaagacuaugggu

SEQ ID NO: 2289913 - RNA, 19 nt, Artificial Sequence
  Description of Artificial Sequence: Synthetic oligonucleotide
  Antisense strand to SEQ ID NO: 2289912
acccauagucuuaaagaac

SEQ ID NO: 2289914 - RNA, 19 nt, Artificial Sequence
  Description of Artificial Sequence: Synthetic oligonucleotide
  Sense strand starting at position 2988 of SEQ ID NO: 1884759
ucuuuaagacuauggguca

SEQ ID NO: 2289915 - RNA, 19 nt, Artificial Sequence
  Description of Artificial Sequence: Synthetic oligonucleotide
  Antisense strand to SEQ ID NO: 2289914
ugacccauagucuuaaaga

SEQ ID NO: 2289916 - RNA, 19 nt, Artificial Sequence
  Description of Artificial Sequence: Synthetic oligonucleotide
  Sense strand starting at position 3184 of SEQ ID NO: 1884759
ugagaucauuagccuguga

SEQ ID NO: 2289917 - RNA, 19 nt, Artificial Sequence
  Description of Artificial Sequence: Synthetic oligonucleotide
  Antisense strand to SEQ ID NO: 2289916
ucacaggcuaaugaucuca

SEQ ID NO: 2289918 - RNA, 19 nt, Artificial Sequence
  Description of Artificial Sequence: Synthetic oligonucleotide
  Sense strand starting at position 3186 of SEQ ID NO: 1884759
agaucauuagccugugaau

SEQ ID NO: 2289919 - RNA, 19 nt, Artificial Sequence
  Description of Artificial Sequence: Synthetic oligonucleotide
  Antisense strand to SEQ ID NO: 2289918
auucacaggcuaaugaucu

SEQ ID NO: 2289920 - RNA, 19 nt, Artificial Sequence
  Description of Artificial Sequence: Synthetic oligonucleotide
  Sense strand starting at position 3321 of SEQ ID NO: 1884759
accagugugcaacagagau

SEQ ID NO: 2289921 - RNA, 19 nt, Artificial Sequence
  Description of Artificial Sequence: Synthetic oligonucleotide
  Antisense strand to SEQ ID NO: 2289920
aucucuguugcacacuggu

SEQ ID NO: 2289922 - RNA, 19 nt, Artificial Sequence
  Description of Artificial Sequence: Synthetic oligonucleotide
  Sense strand starting at position 3431 of SEQ ID NO: 1884759
aacgauuuauuauagagag

SEQ ID NO: 2289923 - RNA, 19 nt, Artificial Sequence
  Description of Artificial Sequence: Synthetic oligonucleotide
  Antisense strand to SEQ ID NO: 2289922
cucucuauaauaaaucguu

SEQ ID NO: 2289924 - RNA, 19 nt, Artificial Sequence
  Description of Artificial Sequence: Synthetic oligonucleotide
  Sense strand starting at position 3659 of SEQ ID NO: 1884759
gaaguuuacucagucuuag

SEQ ID NO: 2289925 - RNA, 19 nt, Artificial Sequence
  Description of Artificial Sequence: Synthetic oligonucleotide
  Antisense strand to SEQ ID NO: 2289924
cuaagacugaguaaacuuc

SEQ ID NO: 2289926 - RNA, 19 nt, Artificial Sequence
  Description of Artificial Sequence: Synthetic oligonucleotide
  Sense strand starting at position 157 of SEQ ID NO: 1884760
ugaagacuuccaugcauag

SEQ ID NO: 2289927 - RNA, 19 nt, Artificial Sequence
  Description of Artificial Sequence: Synthetic oligonucleotide
  Antisense strand to SEQ ID NO: 2289926
cuaugcauggaagucuuca

SEQ ID NO: 2289928 - RNA, 19 nt, Artificial Sequence
  Description of Artificial Sequence: Synthetic oligonucleotide
  Sense strand starting at position 257 of SEQ ID NO: 1884760
gaggaaguaucuuuaaacu

SEQ ID NO: 2289929 - RNA, 19 nt, Artificial Sequence
  Description of Artificial Sequence: Synthetic oligonucleotide
  Antisense strand to SEQ ID NO: 2289928
aguuuaaagauacuuccuc

SEQ ID NO: 2289930 - RNA, 19 nt, Artificial Sequence
  Description of Artificial Sequence: Synthetic oligonucleotide
  Sense strand starting at position 411 of SEQ ID NO: 1884760
ccuggaaaccuguagucau

SEQ ID NO: 2289931 - RNA, 19 nt, Artificial Sequence
  Description of Artificial Sequence: Synthetic oligonucleotide
  Antisense strand to SEQ ID NO: 2289930
augacuacagguuuccagg

SEQ ID NO: 2289932 - RNA, 19 nt, Artificial Sequence
  Description of Artificial Sequence: Synthetic oligonucleotide
  Sense strand starting at position 414 of SEQ ID NO: 1884760
ggaaaccuguagucauuaa

SEQ ID NO: 2289933 - RNA, 19 nt, Artificial Sequence
  Description of Artificial Sequence: Synthetic oligonucleotide
  Antisense strand to SEQ ID NO: 2289932
uuaaugacuacagguuucc

SEQ ID NO: 2289934 - RNA, 19 nt, Artificial Sequence
  Description of Artificial Sequence: Synthetic oligonucleotide
  Sense strand starting at position 418 of SEQ ID NO: 1884760
accuguagucauuaaacac

SEQ ID NO: 2289935 - RNA, 19 nt, Artificial Sequence
  Description of Artificial Sequence: Synthetic oligonucleotide
  Antisense strand to SEQ ID NO: 2289934
guguuuaaugacuacaggu

SEQ ID NO: 2289936 - RNA, 19 nt, Artificial Sequence
  Description of Artificial Sequence: Synthetic oligonucleotide
  Sense strand starting at position 432 of SEQ ID NO: 1884760
aacacuagccaucgggaau

SEQ ID NO: 2289937 - RNA, 19 nt, Artificial Sequence
  Description of Artificial Sequence: Synthetic oligonucleotide
  Antisense strand to SEQ ID NO: 2289936
auucccgauggcuaguguu

SEQ ID NO: 2289938 - RNA, 19 nt, Artificial Sequence
  Description of Artificial Sequence: Synthetic oligonucleotide
  Sense strand starting at position 433 of SEQ ID NO: 1884760
acacuagccaucgggaaua

SEQ ID NO: 2289939 - RNA, 19 nt, Artificial Sequence
  Description of Artificial Sequence: Synthetic oligonucleotide
  Antisense strand to SEQ ID NO: 2289938
uauucccgauggcuagugu

SEQ ID NO: 2289940 - RNA, 19 nt, Artificial Sequence
  Description of Artificial Sequence: Synthetic oligonucleotide
  Sense strand starting at position 598 of SEQ ID NO: 1884760
uccagucuauuauuauaga

SEQ ID NO: 2289941 - RNA, 19 nt, Artificial Sequence
  Description of Artificial Sequence: Synthetic oligonucleotide
  Antisense strand to SEQ ID NO: 2289940
ucuauaauaauagacugga

SEQ ID NO: 2289942 - RNA, 19 nt, Artificial Sequence
  Description of Artificial Sequence: Synthetic oligonucleotide
  Sense strand starting at position 1174 of SEQ ID NO: 1884760
gucugaugucaagaucuuc

SEQ ID NO: 2289943 - RNA, 19 nt, Artificial Sequence
  Description of Artificial Sequence: Synthetic oligonucleotide
  Antisense strand to SEQ ID NO: 2289942
gaagaucuugacaucagac

SEQ ID NO: 2289944 - RNA, 19 nt, Artificial Sequence
  Description of Artificial Sequence: Synthetic oligonucleotide
  Sense strand starting at position 1274 of SEQ ID NO: 1884760
gaugaaauguaguugguaa

SEQ ID NO: 2289945 - RNA, 19 nt, Artificial Sequence
  Description of Artificial Sequence: Synthetic oligonucleotide
  Antisense strand to SEQ ID NO: 2289944
uuaccaacuacauuucauc

SEQ ID NO: 2289946 - RNA, 19 nt, Artificial Sequence
  Description of Artificial Sequence: Synthetic oligonucleotide
  Sense strand starting at position 1275 of SEQ ID NO: 1884760
augaaauguaguugguaaa

SEQ ID NO: 2289947 - RNA, 19 nt, Artificial Sequence
  Description of Artificial Sequence: Synthetic oligonucleotide
  Antisense strand to SEQ ID NO: 2289946
uuuaccaacuacauuucau

SEQ ID NO: 2289948 - RNA, 19 nt, Artificial Sequence
  Description of Artificial Sequence: Synthetic oligonucleotide
  Sense strand starting at position 1276 of SEQ ID NO: 1884760
ugaaauguaguugguaaac

SEQ ID NO: 2289949 - RNA, 19 nt, Artificial Sequence
  Description of Artificial Sequence: Synthetic oligonucleotide
  Antisense strand to SEQ ID NO: 2289948
guuuaccaacuacauuuca

SEQ ID NO: 2289950 - RNA, 19 nt, Artificial Sequence
  Description of Artificial Sequence: Synthetic oligonucleotide
  Sense strand starting at position 1366 of SEQ ID NO: 1884760
uugaaauaccgaggagcuu

SEQ ID NO: 2289951 - RNA, 19 nt, Artificial Sequence
  Description of Artificial Sequence: Synthetic oligonucleotide
  Antisense strand to SEQ ID NO: 2289950
aagcuccucgguauuucaa

SEQ ID NO: 2289952 - RNA, 19 nt, Artificial Sequence
  Description of Artificial Sequence: Synthetic oligonucleotide
  Sense strand starting at position 1367 of SEQ ID NO: 1884760
ugaaauaccgaggagcuuu

SEQ ID NO: 2289953 - RNA, 19 nt, Artificial Sequence
  Description of Artificial Sequence: Synthetic oligonucleotide
  Antisense strand to SEQ ID NO: 2289952
aaagcuccucgguauuuca

SEQ ID NO: 2289954 - RNA, 19 nt, Artificial Sequence
  Description of Artificial Sequence: Synthetic oligonucleotide
  Sense strand starting at position 1437 of SEQ ID NO: 1884760
auguguugcgggucuacga

SEQ ID NO: 2289955 - RNA, 19 nt, Artificial Sequence
  Description of Artificial Sequence: Synthetic oligonucleotide
  Antisense strand to SEQ ID NO: 2289954
ucguagacccgcaacacau

SEQ ID NO: 2289956 - RNA, 19 nt, Artificial Sequence
  Description of Artificial Sequence: Synthetic oligonucleotide
  Sense strand starting at position 1440 of SEQ ID NO: 1884760
uguugcgggucuacgaauu

SEQ ID NO: 2289957 - RNA, 19 nt, Artificial Sequence
  Description of Artificial Sequence: Synthetic oligonucleotide
  Antisense strand to SEQ ID NO: 2289956
aauucguagacccgcaaca

SEQ ID NO: 2289958 - RNA, 19 nt, Artificial Sequence
  Description of Artificial Sequence: Synthetic oligonucleotide
  Sense strand starting at position 1458 of SEQ ID NO: 1884760
ucuaacucucgagaauggu

SEQ ID NO: 2289959 - RNA, 19 nt, Artificial Sequence
  Description of Artificial Sequence: Synthetic oligonucleotide
  Antisense strand to SEQ ID NO: 2289958
accauucucgagaguuaga

SEQ ID NO: 2289960 - RNA, 19 nt, Artificial Sequence
  Description of Artificial Sequence: Synthetic oligonucleotide
  Sense strand starting at position 1527 of SEQ ID NO: 1884760
uggccuauuccuguguugu

SEQ ID NO: 2289961 - RNA, 19 nt, Artificial Sequence
  Description of Artificial Sequence: Synthetic oligonucleotide
  Antisense strand to SEQ ID NO: 2289960
acaacacaggaauaggcca

SEQ ID NO: 2289962 - RNA, 19 nt, Artificial Sequence
  Description of Artificial Sequence: Synthetic oligonucleotide
  Sense strand starting at position 1565 of SEQ ID NO: 1884760
uauuccuggguguagaaau

SEQ ID NO: 2289963 - RNA, 19 nt, Artificial Sequence
  Description of Artificial Sequence: Synthetic oligonucleotide
  Antisense strand to SEQ ID NO: 2289962
auuucuacacccaggaaua

SEQ ID NO: 2289964 - RNA, 19 nt, Artificial Sequence
  Description of Artificial Sequence: Synthetic oligonucleotide
  Sense strand starting at position 1657 of SEQ ID NO: 1884760
ugucaacauguuuacauau

SEQ ID NO: 2289965 - RNA, 19 nt, Artificial Sequence
  Description of Artificial Sequence: Synthetic oligonucleotide
  Antisense strand to SEQ ID NO: 2289964
auauguaaacauguugaca

SEQ ID NO: 2289966 - RNA, 19 nt, Artificial Sequence
  Description of Artificial Sequence: Synthetic oligonucleotide
  Sense strand starting at position 1699 of SEQ ID NO: 1884760
guuaacuguguagagcaaa

SEQ ID NO: 2289967 - RNA, 19 nt, Artificial Sequence
  Description of Artificial Sequence: Synthetic oligonucleotide
  Antisense strand to SEQ ID NO: 2289966
uuugcucuacacaguuaac

SEQ ID NO: 2289968 - RNA, 19 nt, Artificial Sequence
  Description of Artificial Sequence: Synthetic oligonucleotide
  Sense strand starting at position 1943 of SEQ ID NO: 1884760
ugaauuccagcuuauguga

SEQ ID NO: 2289969 - RNA, 19 nt, Artificial Sequence
  Description of Artificial Sequence: Synthetic oligonucleotide
  Antisense strand to SEQ ID NO: 2289968
ucacauaagcuggaauuca

SEQ ID NO: 2289970 - RNA, 19 nt, Artificial Sequence
  Description of Artificial Sequence: Synthetic oligonucleotide
  Sense strand starting at position 1971 of SEQ ID NO: 1884760
acaucuugcaggugaugaa

SEQ ID NO: 2289971 - RNA, 19 nt, Artificial Sequence
  Description of Artificial Sequence: Synthetic oligonucleotide
  Antisense strand to SEQ ID NO: 2289970
uucaucaccugcaagaugu

SEQ ID NO: 2289972 - RNA, 19 nt, Artificial Sequence
  Description of Artificial Sequence: Synthetic oligonucleotide
  Sense strand starting at position 1972 of SEQ ID NO: 1884760
caucuugcaggugaugaaa

SEQ ID NO: 2289973 - RNA, 19 nt, Artificial Sequence
  Description of Artificial Sequence: Synthetic oligonucleotide
  Antisense strand to SEQ ID NO: 2289972
uuucaucaccugcaagaug

SEQ ID NO: 2289974 - RNA, 19 nt, Artificial Sequence
  Description of Artificial Sequence: Synthetic oligonucleotide
  Sense strand starting at position 2016 of SEQ ID NO: 1884760
gguguuuagccuguucuuu

SEQ ID NO: 2289975 - RNA, 19 nt, Artificial Sequence
  Description of Artificial Sequence: Synthetic oligonucleotide
  Antisense strand to SEQ ID NO: 2289974
aaagaacaggcuaaacacc

SEQ ID NO: 2289976 - RNA, 19 nt, Artificial Sequence
  Description of Artificial Sequence: Synthetic oligonucleotide
  Sense strand starting at position 2017 of SEQ ID NO: 1884760
guguuuagccuguucuuua

SEQ ID NO: 2289977 - RNA, 19 nt, Artificial Sequence
  Description of Artificial Sequence: Synthetic oligonucleotide
  Antisense strand to SEQ ID NO: 2289976
uaaagaacaggcuaaacac

SEQ ID NO: 2289978 - RNA, 19 nt, Artificial Sequence
  Description of Artificial Sequence: Synthetic oligonucleotide
  Sense strand starting at position 2028 of SEQ ID NO: 1884760
guucuuuaagacuaugggu

SEQ ID NO: 2289979 - RNA, 19 nt, Artificial Sequence
  Description of Artificial Sequence: Synthetic oligonucleotide
  Antisense strand to SEQ ID NO: 2289978
acccauagucuuaaagaac

SEQ ID NO: 2289980 - RNA, 19 nt, Artificial Sequence
  Description of Artificial Sequence: Synthetic oligonucleotide
  Sense strand starting at position 2030 of SEQ ID NO: 1884760
ucuuuaagacuauggguca

SEQ ID NO: 2289981 - RNA, 19 nt, Artificial Sequence
  Description of Artificial Sequence: Synthetic oligonucleotide
  Antisense strand to SEQ ID NO: 2289980
ugacccauagucuuaaaga

SEQ ID NO: 2289982 - RNA, 19 nt, Artificial Sequence
  Description of Artificial Sequence: Synthetic oligonucleotide
  Sense strand starting at position 2226 of SEQ ID NO: 1884760
ugagaucauuagccuguga

SEQ ID NO: 2289983 - RNA, 19 nt, Artificial Sequence
  Description of Artificial Sequence: Synthetic oligonucleotide
  Antisense strand to SEQ ID NO: 2289982
ucacaggcuaaugaucuca

SEQ ID NO: 2289984 - RNA, 19 nt, Artificial Sequence
  Description of Artificial Sequence: Synthetic oligonucleotide
  Sense strand starting at position 2228 of SEQ ID NO: 1884760
agaucauuagccugugaau

SEQ ID NO: 2289985 - RNA, 19 nt, Artificial Sequence
  Description of Artificial Sequence: Synthetic oligonucleotide
  Antisense strand to SEQ ID NO: 2289984
auucacaggcuaaugaucu

SEQ ID NO: 2289986 - RNA, 19 nt, Artificial Sequence
  Description of Artificial Sequence: Synthetic oligonucleotide
  Sense strand starting at position 2363 of SEQ ID NO: 1884760
accagugugcaacagagau

SEQ ID NO: 2289987 - RNA, 19 nt, Artificial Sequence
  Description of Artificial Sequence: Synthetic oligonucleotide
  Antisense strand to SEQ ID NO: 2289986
aucucuguugcacacuggu

SEQ ID NO: 2289988 - RNA, 19 nt, Artificial Sequence
  Description of Artificial Sequence: Synthetic oligonucleotide
  Sense strand starting at position 2473 of SEQ ID NO: 1884760
aacgauuuauuauagagag

SEQ ID NO: 2289989 - RNA, 19 nt, Artificial Sequence
  Description of Artificial Sequence: Synthetic oligonucleotide
  Antisense strand to SEQ ID NO: 2289988
cucucuauaauaaaucguu

SEQ ID NO: 2289990 - RNA, 19 nt, Artificial Sequence
  Description of Artificial Sequence: Synthetic oligonucleotide
  Sense strand starting at position 2701 of SEQ ID NO: 1884760
gaaguuuacucagucuuag

SEQ ID NO: 2289991 - RNA, 19 nt, Artificial Sequence
  Description of Artificial Sequence: Synthetic oligonucleotide
  Antisense strand to SEQ ID NO: 2289990
cuaagacugaguaaacuuc

SEQ ID NO: 2289992 - RNA, 19 nt, Artificial Sequence
  Description of Artificial Sequence: Synthetic oligonucleotide
  Sense strand starting at position 3031 of SEQ ID NO: 1884760
aguguaauagugcaaauuc

SEQ ID NO: 2289993 - RNA, 19 nt, Artificial Sequence
  Description of Artificial Sequence: Synthetic oligonucleotide
  Antisense strand to SEQ ID NO: 2289992
gaauuugcacuauuacacu

SEQ ID NO: 2289994 - RNA, 19 nt, Artificial Sequence
  Description of Artificial Sequence: Synthetic oligonucleotide
  Sense strand starting at position 3052 of SEQ ID NO: 1884760
cugcgagauuuacugcaga

SEQ ID NO: 2289995 - RNA, 19 nt, Artificial Sequence
  Description of Artificial Sequence: Synthetic oligonucleotide
  Antisense strand to SEQ ID NO: 2289994
ucugcaguaaaucucgcag

SEQ ID NO: 2289996 - RNA, 19 nt, Artificial Sequence
  Description of Artificial Sequence: Synthetic oligonucleotide
  Sense strand starting at position 3122 of SEQ ID NO: 1884760
uagguaugucugggagaaa

SEQ ID NO: 2289997 - RNA, 19 nt, Artificial Sequence
  Description of Artificial Sequence: Synthetic oligonucleotide
  Antisense strand to SEQ ID NO: 2289996
uuucucccagacauaccua

SEQ ID NO: 2289998 - RNA, 19 nt, Artificial Sequence
  Description of Artificial Sequence: Synthetic oligonucleotide
  Sense strand starting at position 3414 of SEQ ID NO: 1884760
cugauacagucaucauauu

SEQ ID NO: 2289999 - RNA, 19 nt, Artificial Sequence
  Description of Artificial Sequence: Synthetic oligonucleotide
  Antisense strand to SEQ ID NO: 2289998
aauaugaugacuguaucag

SEQ ID NO: 2290000 - RNA, 19 nt, Artificial Sequence
  Description of Artificial Sequence: Synthetic oligonucleotide
  Sense strand starting at position 3617 of SEQ ID NO: 1884760
gugaguucacuugggagaa

SEQ ID NO: 2290001 - RNA, 19 nt, Artificial Sequence
  Description of Artificial Sequence: Synthetic oligonucleotide
  Antisense strand to SEQ ID NO: 2290000
uucucccaagugaacucac

SEQ ID NO: 2290002 - RNA, 19 nt, Artificial Sequence
  Description of Artificial Sequence: Synthetic oligonucleotide
  Sense strand starting at position 3750 of SEQ ID NO: 1884760
cugggaaccagugauguuu

SEQ ID NO: 2290003 - RNA, 19 nt, Artificial Sequence
  Description of Artificial Sequence: Synthetic oligonucleotide
  Antisense strand to SEQ ID NO: 2290002
aaacaucacugguucccag

SEQ ID NO: 2290004 - RNA, 19 nt, Artificial Sequence
  Description of Artificial Sequence: Synthetic oligonucleotide
  Sense strand starting at position 3756 of SEQ ID NO: 1884760
accagugauguuuauaaug

SEQ ID NO: 2290005 - RNA, 19 nt, Artificial Sequence
  Description of Artificial Sequence: Synthetic oligonucleotide
  Antisense strand to SEQ ID NO: 2290004
cauuauaaacaucacuggu

SEQ ID NO: 2290006 - RNA, 19 nt, Artificial Sequence
  Description of Artificial Sequence: Synthetic oligonucleotide
  Sense strand starting at position 67 of SEQ ID NO: 1884761
aggcccacuccucgaagau

SEQ ID NO: 2290007 - RNA, 19 nt, Artificial Sequence
  Description of Artificial Sequence: Synthetic oligonucleotide
  Antisense strand to SEQ ID NO: 2290006
aucuucgaggagugggccu

SEQ ID NO: 2290008 - RNA, 19 nt, Artificial Sequence
  Description of Artificial Sequence: Synthetic oligonucleotide
  Sense strand starting at position 68 of SEQ ID NO: 1884761
ggcccacuccucgaagaug

SEQ ID NO: 2290009 - RNA, 19 nt, Artificial Sequence
  Description of Artificial Sequence: Synthetic oligonucleotide
  Antisense strand to SEQ ID NO: 2290008
caucuucgaggagugggcc

SEQ ID NO: 2290010 - RNA, 19 nt, Artificial Sequence
  Description of Artificial Sequence: Synthetic oligonucleotide
  Sense strand starting at position 134 of SEQ ID NO: 1884761
acagguaggcuugaucuca

SEQ ID NO: 2290011 - RNA, 19 nt, Artificial Sequence
  Description of Artificial Sequence: Synthetic oligonucleotide
  Antisense strand to SEQ ID NO: 2290010
ugagaucaagccuaccugu

SEQ ID NO: 2290012 - RNA, 19 nt, Artificial Sequence
  Description of Artificial Sequence: Synthetic oligonucleotide
  Sense strand starting at position 142 of SEQ ID NO: 1884761
gcuugaucucaagacugua

SEQ ID NO: 2290013 - RNA, 19 nt, Artificial Sequence
  Description of Artificial Sequence: Synthetic oligonucleotide
  Antisense strand to SEQ ID NO: 2290012
uacagucuugagaucaagc

SEQ ID NO: 2290014 - RNA, 19 nt, Artificial Sequence
  Description of Artificial Sequence: Synthetic oligonucleotide
  Sense strand starting at position 329 of SEQ ID NO: 1884761
auagauucuucucugagag

SEQ ID NO: 2290015 - RNA, 19 nt, Artificial Sequence
  Description of Artificial Sequence: Synthetic oligonucleotide
  Antisense strand to SEQ ID NO: 2290014
cucucagagaagaaucuau

SEQ ID NO: 2290016 - RNA, 19 nt, Artificial Sequence
  Description of Artificial Sequence: Synthetic oligonucleotide
  Sense strand starting at position 330 of SEQ ID NO: 1884761
uagauucuucucugagagg

SEQ ID NO: 2290017 - RNA, 19 nt, Artificial Sequence
  Description of Artificial Sequence: Synthetic oligonucleotide
  Antisense strand to SEQ ID NO: 2290016
ccucucagagaagaaucua

SEQ ID NO: 2290018 - RNA, 19 nt, Artificial Sequence
  Description of Artificial Sequence: Synthetic oligonucleotide
  Sense strand starting at position 405 of SEQ ID NO: 1884761
accugccuucucugaggau

SEQ ID NO: 2290019 - RNA, 19 nt, Artificial Sequence
  Description of Artificial Sequence: Synthetic oligonucleotide
  Antisense strand to SEQ ID NO: 2290018
auccucagagaaggcaggu

SEQ ID NO: 2290020 - RNA, 19 nt, Artificial Sequence
  Description of Artificial Sequence: Synthetic oligonucleotide
  Sense strand starting at position 515 of SEQ ID NO: 1884761
ucuaguaucugccuaaaga

SEQ ID NO: 2290021 - RNA, 19 nt, Artificial Sequence
  Description of Artificial Sequence: Synthetic oligonucleotide
  Antisense strand to SEQ ID NO: 2290020
ucuuuaggcagauacuaga

SEQ ID NO: 2290022 - RNA, 19 nt, Artificial Sequence
  Description of Artificial Sequence: Synthetic oligonucleotide
  Sense strand starting at position 526 of SEQ ID NO: 1884761
ccuaaagaagcuugaguga

SEQ ID NO: 2290023 - RNA, 19 nt, Artificial Sequence
  Description of Artificial Sequence: Synthetic oligonucleotide
  Antisense strand to SEQ ID NO: 2290022
ucacucaagcuucuuuagg

SEQ ID NO: 2290024 - RNA, 19 nt, Artificial Sequence
  Description of Artificial Sequence: Synthetic oligonucleotide
  Sense strand starting at position 538 of SEQ ID NO: 1884761
ugagugacggcuugaguga

SEQ ID NO: 2290025 - RNA, 19 nt, Artificial Sequence
  Description of Artificial Sequence: Synthetic oligonucleotide
  Antisense strand to SEQ ID NO: 2290024
ucacucaagccgucacuca

SEQ ID NO: 2290026 - RNA, 19 nt, Artificial Sequence
  Description of Artificial Sequence: Synthetic oligonucleotide
  Sense strand starting at position 539 of SEQ ID NO: 1884761
gagugacggcuugagugau

SEQ ID NO: 2290027 - RNA, 19 nt, Artificial Sequence
  Description of Artificial Sequence: Synthetic oligonucleotide
  Antisense strand to SEQ ID NO: 2290026
aucacucaagccgucacuc

SEQ ID NO: 2290028 - RNA, 19 nt, Artificial Sequence
  Description of Artificial Sequence: Synthetic oligonucleotide
  Sense strand starting at position 543 of SEQ ID NO: 1884761
gacggcuugagugaugacu

SEQ ID NO: 2290029 - RNA, 19 nt, Artificial Sequence
  Description of Artificial Sequence: Synthetic oligonucleotide
  Antisense strand to SEQ ID NO: 2290028
agucaucacucaagccguc

SEQ ID NO: 2290030 - RNA, 19 nt, Artificial Sequence
  Description of Artificial Sequence: Synthetic oligonucleotide
  Sense strand starting at position 549 of SEQ ID NO: 1884761
uugagugaugacugggacu

SEQ ID NO: 2290031 - RNA, 19 nt, Artificial Sequence
  Description of Artificial Sequence: Synthetic oligonucleotide
  Antisense strand to SEQ ID NO: 2290030
agucccagucaucacucaa

SEQ ID NO: 2290032 - RNA, 19 nt, Artificial Sequence
  Description of Artificial Sequence: Synthetic oligonucleotide
  Sense strand starting at position 622 of SEQ ID NO: 1884761
gccuccagagguugugaau

SEQ ID NO: 2290033 - RNA, 19 nt, Artificial Sequence
  Description of Artificial Sequence: Synthetic oligonucleotide
  Antisense strand to SEQ ID NO: 2290032
auucacaaccucuggaggc

SEQ ID NO: 2290034 - RNA, 19 nt, Artificial Sequence
  Description of Artificial Sequence: Synthetic oligonucleotide
  Sense strand starting at position 831 of SEQ ID NO: 1884761
ggagccauccuacacacau

SEQ ID NO: 2290035 - RNA, 19 nt, Artificial Sequence
  Description of Artificial Sequence: Synthetic oligonucleotide
  Antisense strand to SEQ ID NO: 2290034
auguguguaggauggcucc

SEQ ID NO: 2290036 - RNA, 19 nt, Artificial Sequence
  Description of Artificial Sequence: Synthetic oligonucleotide
  Sense strand starting at position 1020 of SEQ ID NO: 1884761
uguggaguugcuuaacauu

SEQ ID NO: 2290037 - RNA, 19 nt, Artificial Sequence
  Description of Artificial Sequence: Synthetic oligonucleotide
  Antisense strand to SEQ ID NO: 2290036
aauguuaagcaacuccaca

SEQ ID NO: 2290038 - RNA, 19 nt, Artificial Sequence
  Description of Artificial Sequence: Synthetic oligonucleotide
  Sense strand starting at position 1029 of SEQ ID NO: 1884761
gcuuaacauuuccaggaac

SEQ ID NO: 2290039 - RNA, 19 nt, Artificial Sequence
  Description of Artificial Sequence: Synthetic oligonucleotide
  Antisense strand to SEQ ID NO: 2290038
guuccuggaaauguuaagc

SEQ ID NO: 2290040 - RNA, 19 nt, Artificial Sequence
  Description of Artificial Sequence: Synthetic oligonucleotide
  Sense strand starting at position 2089 of SEQ ID NO: 1884761
gacuguggccagggagauu

SEQ ID NO: 2290041 - RNA, 19 nt, Artificial Sequence
  Description of Artificial Sequence: Synthetic oligonucleotide
  Antisense strand to SEQ ID NO: 2290040
aaucucccuggccacaguc

SEQ ID NO: 2290042 - RNA, 19 nt, Artificial Sequence
  Description of Artificial Sequence: Synthetic oligonucleotide
  Sense strand starting at position 2304 of SEQ ID NO: 1884761
aggcuuaugaauggacaca

SEQ ID NO: 2290043 - RNA, 19 nt, Artificial Sequence
  Description of Artificial Sequence: Synthetic oligonucleotide
  Antisense strand to SEQ ID NO: 2290042
uguguccauucauaagccu

SEQ ID NO: 2290044 - RNA, 19 nt, Artificial Sequence
  Description of Artificial Sequence: Synthetic oligonucleotide
  Sense strand starting at position 2359 of SEQ ID NO: 1884761
gcacauauugguuguuaaa

SEQ ID NO: 2290045 - RNA, 19 nt, Artificial Sequence
  Description of Artificial Sequence: Synthetic oligonucleotide
  Antisense strand to SEQ ID NO: 2290044
uuuaacaaccaauaugugc

SEQ ID NO: 2290046 - RNA, 19 nt, Artificial Sequence
  Description of Artificial Sequence: Synthetic oligonucleotide
  Sense strand starting at position 2383 of SEQ ID NO: 1884761
gucaucauguauuuguuga

SEQ ID NO: 2290047 - RNA, 19 nt, Artificial Sequence
  Description of Artificial Sequence: Synthetic oligonucleotide
  Antisense strand to SEQ ID NO: 2290046
ucaacaaauacaugaugac

SEQ ID NO: 2290048 - RNA, 19 nt, Artificial Sequence
  Description of Artificial Sequence: Synthetic oligonucleotide
  Sense strand starting at position 2407 of SEQ ID NO: 1884761
ugcucuaucaggugaggaa

SEQ ID NO: 2290049 - RNA, 19 nt, Artificial Sequence
  Description of Artificial Sequence: Synthetic oligonucleotide
  Antisense strand to SEQ ID NO: 2290048
uuccucaccugauagagca

SEQ ID NO: 2290050 - RNA, 19 nt, Artificial Sequence
  Description of Artificial Sequence: Synthetic oligonucleotide
  Sense strand starting at position 2463 of SEQ ID NO: 1884761
ucacacuuaccuuggaaga

SEQ ID NO: 2290051 - RNA, 19 nt, Artificial Sequence
  Description of Artificial Sequence: Synthetic oligonucleotide
  Antisense strand to SEQ ID NO: 2290050
ucuuccaagguaaguguga

SEQ ID NO: 2290052 - RNA, 19 nt, Artificial Sequence
  Description of Artificial Sequence: Synthetic oligonucleotide
  Sense strand starting at position 2538 of SEQ ID NO: 1884761
caguacuugauggagugau

SEQ ID NO: 2290053 - RNA, 19 nt, Artificial Sequence
  Description of Artificial Sequence: Synthetic oligonucleotide
  Antisense strand to SEQ ID NO: 2290052
aucacuccaucaaguacug

SEQ ID NO: 2290054 - RNA, 19 nt, Artificial Sequence
  Description of Artificial Sequence: Synthetic oligonucleotide
  Sense strand starting at position 2791 of SEQ ID NO: 1884761
gauacauaauaguuguaag

SEQ ID NO: 2290055 - RNA, 19 nt, Artificial Sequence
  Description of Artificial Sequence: Synthetic oligonucleotide
  Antisense strand to SEQ ID NO: 2290054
cuuacaacuauuauguauc

SEQ ID NO: 2290056 - RNA, 19 nt, Artificial Sequence
  Description of Artificial Sequence: Synthetic oligonucleotide
  Sense strand starting at position 3209 of SEQ ID NO: 1884761
ggagcagucauuugccaau

SEQ ID NO: 2290057 - RNA, 19 nt, Artificial Sequence
  Description of Artificial Sequence: Synthetic oligonucleotide
  Antisense strand to SEQ ID NO: 2290056
auuggcaaaugacugcucc

SEQ ID NO: 2290058 - RNA, 19 nt, Artificial Sequence
  Description of Artificial Sequence: Synthetic oligonucleotide
  Sense strand starting at position 3315 of SEQ ID NO: 1884761
gcucaacuacaguauagaa

SEQ ID NO: 2290059 - RNA, 19 nt, Artificial Sequence
  Description of Artificial Sequence: Synthetic oligonucleotide
  Antisense strand to SEQ ID NO: 2290058
uucuauacuguaguugagc

SEQ ID NO: 2290060 - RNA, 19 nt, Artificial Sequence
  Description of Artificial Sequence: Synthetic oligonucleotide
  Sense strand starting at position 3392 of SEQ ID NO: 1884761
cugccaguuuaccuauauu

SEQ ID NO: 2290061 - RNA, 19 nt, Artificial Sequence
  Description of Artificial Sequence: Synthetic oligonucleotide
  Antisense strand to SEQ ID NO: 2290060
aauauagguaaacuggcag

SEQ ID NO: 2290062 - RNA, 19 nt, Artificial Sequence
  Description of Artificial Sequence: Synthetic oligonucleotide
  Sense strand starting at position 3519 of SEQ ID NO: 1884761
uuggguuuccuaggaguca

SEQ ID NO: 2290063 - RNA, 19 nt, Artificial Sequence
  Description of Artificial Sequence: Synthetic oligonucleotide
  Antisense strand to SEQ ID NO: 2290062
ugacuccuaggaaacccaa

SEQ ID NO: 2290064 - RNA, 19 nt, Artificial Sequence
  Description of Artificial Sequence: Synthetic oligonucleotide
  Sense strand starting at position 3620 of SEQ ID NO: 1884761
uuaguugucucuguaacua

SEQ ID NO: 2290065 - RNA, 19 nt, Artificial Sequence
  Description of Artificial Sequence: Synthetic oligonucleotide
  Antisense strand to SEQ ID NO: 2290064
uaguuacagagacaacuaa

SEQ ID NO: 2290066 - RNA, 19 nt, Artificial Sequence
  Description of Artificial Sequence: Synthetic oligonucleotide
  Sense strand starting at position 3648 of SEQ ID NO: 1884761
gacucuuaaccaggagugu

SEQ ID NO: 2290067 - RNA, 19 nt, Artificial Sequence
  Description of Artificial Sequence: Synthetic oligonucleotide
  Antisense strand to SEQ ID NO: 2290066
acacuccugguuaagaguc

SEQ ID NO: 2290068 - RNA, 19 nt, Artificial Sequence
  Description of Artificial Sequence: Synthetic oligonucleotide
  Sense strand starting at position 3649 of SEQ ID NO: 1884761
acucuuaaccaggagugua

SEQ ID NO: 2290069 - RNA, 19 nt, Artificial Sequence
  Description of Artificial Sequence: Synthetic oligonucleotide
  Antisense strand to SEQ ID NO: 2290068
uacacuccugguuaagagu

SEQ ID NO: 2290070 - RNA, 19 nt, Artificial Sequence
  Description of Artificial Sequence: Synthetic oligonucleotide
  Sense strand starting at position 3652 of SEQ ID NO: 1884761
cuuaaccaggaguguaaau

SEQ ID NO: 2290071 - RNA, 19 nt, Artificial Sequence
  Description of Artificial Sequence: Synthetic oligonucleotide
  Antisense strand to SEQ ID NO: 2290070
auuuacacuccugguuaag

SEQ ID NO: 2290072 - RNA, 19 nt, Artificial Sequence
  Description of Artificial Sequence: Synthetic oligonucleotide
  Sense strand starting at position 3661 of SEQ ID NO: 1884761
gaguguaaaucuucuucug

SEQ ID NO: 2290073 - RNA, 19 nt, Artificial Sequence
  Description of Artificial Sequence: Synthetic oligonucleotide
  Antisense strand to SEQ ID NO: 2290072
cagaagaagauuuacacuc

SEQ ID NO: 2290074 - RNA, 19 nt, Artificial Sequence
  Description of Artificial Sequence: Synthetic oligonucleotide
  Sense strand starting at position 3663 of SEQ ID NO: 1884761
guguaaaucuucuucugaa

SEQ ID NO: 2290075 - RNA, 19 nt, Artificial Sequence
  Description of Artificial Sequence: Synthetic oligonucleotide
  Antisense strand to SEQ ID NO: 2290074
uucagaagaagauuuacac

SEQ ID NO: 2290076 - RNA, 19 nt, Artificial Sequence
  Description of Artificial Sequence: Synthetic oligonucleotide
  Sense strand starting at position 3736 of SEQ ID NO: 1884761
uccugaagaucucucgauu

SEQ ID NO: 2290077 - RNA, 19 nt, Artificial Sequence
  Description of Artificial Sequence: Synthetic oligonucleotide
  Antisense strand to SEQ ID NO: 2290076
aaucgagagaucuucagga

SEQ ID NO: 2290078 - RNA, 19 nt, Artificial Sequence
  Description of Artificial Sequence: Synthetic oligonucleotide
  Sense strand starting at position 3768 of SEQ ID NO: 1884761
ugaguucuuugcucucuaa

SEQ ID NO: 2290079 - RNA, 19 nt, Artificial Sequence
  Description of Artificial Sequence: Synthetic oligonucleotide
  Antisense strand to SEQ ID NO: 2290078
uuagagagcaaagaacuca

SEQ ID NO: 2290080 - RNA, 19 nt, Artificial Sequence
  Description of Artificial Sequence: Synthetic oligonucleotide
  Sense strand starting at position 3780 of SEQ ID NO: 1884761
ucucuaagccgucacacau

SEQ ID NO: 2290081 - RNA, 19 nt, Artificial Sequence
  Description of Artificial Sequence: Synthetic oligonucleotide
  Antisense strand to SEQ ID NO: 2290080
augugugacggcuuagaga

SEQ ID NO: 2290082 - RNA, 19 nt, Artificial Sequence
  Description of Artificial Sequence: Synthetic oligonucleotide
  Sense strand starting at position 3910 of SEQ ID NO: 1884761
accaguggcuuccuuagaa

SEQ ID NO: 2290083 - RNA, 19 nt, Artificial Sequence
  Description of Artificial Sequence: Synthetic oligonucleotide
  Antisense strand to SEQ ID NO: 2290082
uucuaaggaagccacuggu

SEQ ID NO: 2290084 - RNA, 19 nt, Artificial Sequence
  Description of Artificial Sequence: Synthetic oligonucleotide
  Sense strand starting at position 3965 of SEQ ID NO: 1884761
augucuaaaugucucaguu

SEQ ID NO: 2290085 - RNA, 19 nt, Artificial Sequence
  Description of Artificial Sequence: Synthetic oligonucleotide
  Antisense strand to SEQ ID NO: 2290084
aacugagacauuuagacau

SEQ ID NO: 2290086 - RNA, 19 nt, Artificial Sequence
  Description of Artificial Sequence: Synthetic oligonucleotide
  Sense strand starting at position 5 of SEQ ID NO: 1884762
acugaugauuguuaaagcu

SEQ ID NO: 2290087 - RNA, 19 nt, Artificial Sequence
  Description of Artificial Sequence: Synthetic oligonucleotide
  Antisense strand to SEQ ID NO: 2290086
agcuuuaacaaucaucagu

SEQ ID NO: 2290088 - RNA, 19 nt, Artificial Sequence
  Description of Artificial Sequence: Synthetic oligonucleotide
  Sense strand starting at position 14 of SEQ ID NO: 1884762
uguuaaagcucuucgauga

SEQ ID NO: 2290089 - RNA, 19 nt, Artificial Sequence
  Description of Artificial Sequence: Synthetic oligonucleotide
  Antisense strand to SEQ ID NO: 2290088
ucaucgaagagcuuuaaca

SEQ ID NO: 2290090 - RNA, 19 nt, Artificial Sequence
  Description of Artificial Sequence: Synthetic oligonucleotide
  Sense strand starting at position 15 of SEQ ID NO: 1884762
guuaaagcucuucgaugau

SEQ ID NO: 2290091 - RNA, 19 nt, Artificial Sequence
  Description of Artificial Sequence: Synthetic oligonucleotide
  Antisense strand to SEQ ID NO: 2290090
aucaucgaagagcuuuaac

SEQ ID NO: 2290092 - RNA, 19 nt, Artificial Sequence
  Description of Artificial Sequence: Synthetic oligonucleotide
  Sense strand starting at position 93 of SEQ ID NO: 1884762
ugugcucugccuggucaga

SEQ ID NO: 2290093 - RNA, 19 nt, Artificial Sequence
  Description of Artificial Sequence: Synthetic oligonucleotide
  Antisense strand to SEQ ID NO: 2290092
ucugaccaggcagagcaca

SEQ ID NO: 2290094 - RNA, 19 nt, Artificial Sequence
  Description of Artificial Sequence: Synthetic oligonucleotide
  Sense strand starting at position 189 of SEQ ID NO: 1884762
auggcaagguuccuagaaa

SEQ ID NO: 2290095 - RNA, 19 nt, Artificial Sequence
  Description of Artificial Sequence: Synthetic oligonucleotide
  Antisense strand to SEQ ID NO: 2290094
uuucuaggaaccuugccau

SEQ ID NO: 2290096 - RNA, 19 nt, Artificial Sequence
  Description of Artificial Sequence: Synthetic oligonucleotide
  Sense strand starting at position 190 of SEQ ID NO: 1884762
uggcaagguuccuagaaac

SEQ ID NO: 2290097 - RNA, 19 nt, Artificial Sequence
  Description of Artificial Sequence: Synthetic oligonucleotide
  Antisense strand to SEQ ID NO: 2290096
guuucuaggaaccuugcca

SEQ ID NO: 2290098 - RNA, 19 nt, Artificial Sequence
  Description of Artificial Sequence: Synthetic oligonucleotide
  Sense strand starting at position 218 of SEQ ID NO: 1884762
ggagaaccguuucagggaa

SEQ ID NO: 2290099 - RNA, 19 nt, Artificial Sequence
  Description of Artificial Sequence: Synthetic oligonucleotide
  Antisense strand to SEQ ID NO: 2290098
uucccugaaacgguucucc

SEQ ID NO: 2290100 - RNA, 19 nt, Artificial Sequence
  Description of Artificial Sequence: Synthetic oligonucleotide
  Sense strand starting at position 264 of SEQ ID NO: 1884762
gacuuuggagggugcgaua

SEQ ID NO: 2290101 - RNA, 19 nt, Artificial Sequence
  Description of Artificial Sequence: Synthetic oligonucleotide
  Antisense strand to SEQ ID NO: 2290100
uaucgcacccuccaaaguc

SEQ ID NO: 2290102 - RNA, 19 nt, Artificial Sequence
  Description of Artificial Sequence: Synthetic oligonucleotide
  Sense strand starting at position 364 of SEQ ID NO: 1884762
ggaagaccuucccaaauga

SEQ ID NO: 2290103 - RNA, 19 nt, Artificial Sequence
  Description of Artificial Sequence: Synthetic oligonucleotide
  Antisense strand to SEQ ID NO: 2290102
ucauuugggaaggucuucc

SEQ ID NO: 2290104 - RNA, 19 nt, Artificial Sequence
  Description of Artificial Sequence: Synthetic oligonucleotide
  Sense strand starting at position 401 of SEQ ID NO: 1884762
gggcuugccugaaagguag

SEQ ID NO: 2290105 - RNA, 19 nt, Artificial Sequence
  Description of Artificial Sequence: Synthetic oligonucleotide
  Antisense strand to SEQ ID NO: 2290104
cuaccuuucaggcaagccc

SEQ ID NO: 2290106 - RNA, 19 nt, Artificial Sequence
  Description of Artificial Sequence: Synthetic oligonucleotide
  Sense strand starting at position 518 of SEQ ID NO: 1884762
agguuuaccucucaaaguc

SEQ ID NO: 2290107 - RNA, 19 nt, Artificial Sequence
  Description of Artificial Sequence: Synthetic oligonucleotide
  Antisense strand to SEQ ID NO: 2290106
gacuuugagagguaaaccu

SEQ ID NO: 2290108 - RNA, 19 nt, Artificial Sequence
  Description of Artificial Sequence: Synthetic oligonucleotide
  Sense strand starting at position 525 of SEQ ID NO: 1884762
ccucucaaagucugguauu

SEQ ID NO: 2290109 - RNA, 19 nt, Artificial Sequence
  Description of Artificial Sequence: Synthetic oligonucleotide
  Antisense strand to SEQ ID NO: 2290108
aauaccagacuuugagagg

SEQ ID NO: 2290110 - RNA, 19 nt, Artificial Sequence
  Description of Artificial Sequence: Synthetic oligonucleotide
  Sense strand starting at position 761 of SEQ ID NO: 1884762
gaaugaguggcgugggcaa

SEQ ID NO: 2290111 - RNA, 19 nt, Artificial Sequence
  Description of Artificial Sequence: Synthetic oligonucleotide
  Antisense strand to SEQ ID NO: 2290110
uugcccacgccacucauuc

SEQ ID NO: 2290112 - RNA, 19 nt, Artificial Sequence
  Description of Artificial Sequence: Synthetic oligonucleotide
  Sense strand starting at position 961 of SEQ ID NO: 1884762
cguguuugcacagauaccu

SEQ ID NO: 2290113 - RNA, 19 nt, Artificial Sequence
  Description of Artificial Sequence: Synthetic oligonucleotide
  Antisense strand to SEQ ID NO: 2290112
agguaucugugcaaacacg

SEQ ID NO: 2290114 - RNA, 19 nt, Artificial Sequence
  Description of Artificial Sequence: Synthetic oligonucleotide
  Sense strand starting at position 1015 of SEQ ID NO: 1884762
gggccugucucagcaguuu

SEQ ID NO: 2290115 - RNA, 19 nt, Artificial Sequence
  Description of Artificial Sequence: Synthetic oligonucleotide
  Antisense strand to SEQ ID NO: 2290114
aaacugcugagacaggccc

SEQ ID NO: 2290116 - RNA, 19 nt, Artificial Sequence
  Description of Artificial Sequence: Synthetic oligonucleotide
  Sense strand starting at position 1027 of SEQ ID NO: 1884762
gcaguuucaccagggagaa

SEQ ID NO: 2290117 - RNA, 19 nt, Artificial Sequence
  Description of Artificial Sequence: Synthetic oligonucleotide
  Antisense strand to SEQ ID NO: 2290116
uucucccuggugaaacugc

SEQ ID NO: 2290118 - RNA, 19 nt, Artificial Sequence
  Description of Artificial Sequence: Synthetic oligonucleotide
  Sense strand starting at position 1040 of SEQ ID NO: 1884762
ggagaaugguuucucugaa

SEQ ID NO: 2290119 - RNA, 19 nt, Artificial Sequence
  Description of Artificial Sequence: Synthetic oligonucleotide
  Antisense strand to SEQ ID NO: 2290118
uucagagaaaccauucucc

SEQ ID NO: 2290120 - RNA, 19 nt, Artificial Sequence
  Description of Artificial Sequence: Synthetic oligonucleotide
  Sense strand starting at position 1041 of SEQ ID NO: 1884762
gagaaugguuucucugaaa

SEQ ID NO: 2290121 - RNA, 19 nt, Artificial Sequence
  Description of Artificial Sequence: Synthetic oligonucleotide
  Antisense strand to SEQ ID NO: 2290120
uuucagagaaaccauucuc

SEQ ID NO: 2290122 - RNA, 19 nt, Artificial Sequence
  Description of Artificial Sequence: Synthetic oligonucleotide
  Sense strand starting at position 1054 of SEQ ID NO: 1884762
cugaaagaauaguauaaag

SEQ ID NO: 2290123 - RNA, 19 nt, Artificial Sequence
  Description of Artificial Sequence: Synthetic oligonucleotide
  Antisense strand to SEQ ID NO: 2290122
cuuuauacuauucuuucag

SEQ ID NO: 2290124 - RNA, 19 nt, Artificial Sequence
  Description of Artificial Sequence: Synthetic oligonucleotide
  Sense strand starting at position 1071 of SEQ ID NO: 1884762
agguucagugggugucaga

SEQ ID NO: 2290125 - RNA, 19 nt, Artificial Sequence
  Description of Artificial Sequence: Synthetic oligonucleotide
  Antisense strand to SEQ ID NO: 2290124
ucugacacccacugaaccu

SEQ ID NO: 2290126 - RNA, 19 nt, Artificial Sequence
  Description of Artificial Sequence: Synthetic oligonucleotide
  Sense strand starting at position 1154 of SEQ ID NO: 1884762
gccaaaccuucucugguuu

SEQ ID NO: 2290127 - RNA, 19 nt, Artificial Sequence
  Description of Artificial Sequence: Synthetic oligonucleotide
  Antisense strand to SEQ ID NO: 2290126
aaaccagagaagguuuggc

SEQ ID NO: 2290128 - RNA, 19 nt, Artificial Sequence
  Description of Artificial Sequence: Synthetic oligonucleotide
  Sense strand starting at position 1296 of SEQ ID NO: 1884762
uggccuugcuaagaucaca

SEQ ID NO: 2290129 - RNA, 19 nt, Artificial Sequence
  Description of Artificial Sequence: Synthetic oligonucleotide
  Antisense strand to SEQ ID NO: 2290128
ugugaucuuagcaaggcca

SEQ ID NO: 2290130 - RNA, 19 nt, Artificial Sequence
  Description of Artificial Sequence: Synthetic oligonucleotide
  Sense strand starting at position 1362 of SEQ ID NO: 1884762
gacgaaguuucccuguguu

SEQ ID NO: 2290131 - RNA, 19 nt, Artificial Sequence
  Description of Artificial Sequence: Synthetic oligonucleotide
  Antisense strand to SEQ ID NO: 2290130
aacacagggaaacuucguc

SEQ ID NO: 2290132 - RNA, 19 nt, Artificial Sequence
  Description of Artificial Sequence: Synthetic oligonucleotide
  Sense strand starting at position 1488 of SEQ ID NO: 1884762
ucauauauuugaugacagu

SEQ ID NO: 2290133 - RNA, 19 nt, Artificial Sequence
  Description of Artificial Sequence: Synthetic oligonucleotide
  Antisense strand to SEQ ID NO: 2290132
acugucaucaaauauauga

SEQ ID NO: 2290134 - RNA, 19 nt, Artificial Sequence
  Description of Artificial Sequence: Synthetic oligonucleotide
  Sense strand starting at position 1491 of SEQ ID NO: 1884762
uauauuugaugacaguguu

SEQ ID NO: 2290135 - RNA, 19 nt, Artificial Sequence
  Description of Artificial Sequence: Synthetic oligonucleotide
  Antisense strand to SEQ ID NO: 2290134
aacacugucaucaaauaua

SEQ ID NO: 2290136 - RNA, 19 nt, Artificial Sequence
  Description of Artificial Sequence: Synthetic oligonucleotide
  Sense strand starting at position 1497 of SEQ ID NO: 1884762
ugaugacaguguuugacca

SEQ ID NO: 2290137 - RNA, 19 nt, Artificial Sequence
  Description of Artificial Sequence: Synthetic oligonucleotide
  Antisense strand to SEQ ID NO: 2290136
uggucaaacacugucauca

SEQ ID NO: 2290138 - RNA, 19 nt, Artificial Sequence
  Description of Artificial Sequence: Synthetic oligonucleotide
  Sense strand starting at position 1544 of SEQ ID NO: 1884762
aucccuaauucuggcagau

SEQ ID NO: 2290139 - RNA, 19 nt, Artificial Sequence
  Description of Artificial Sequence: Synthetic oligonucleotide
  Antisense strand to SEQ ID NO: 2290138
aucugccagaauuagggau

SEQ ID NO: 2290140 - RNA, 19 nt, Artificial Sequence
  Description of Artificial Sequence: Synthetic oligonucleotide
  Sense strand starting at position 1687 of SEQ ID NO: 1884762
gggcuccaggaguaauguu

SEQ ID NO: 2290141 - RNA, 19 nt, Artificial Sequence
  Description of Artificial Sequence: Synthetic oligonucleotide
  Antisense strand to SEQ ID NO: 2290140
aacauuacuccuggagccc

SEQ ID NO: 2290142 - RNA, 19 nt, Artificial Sequence
  Description of Artificial Sequence: Synthetic oligonucleotide
  Sense strand starting at position 1695 of SEQ ID NO: 1884762
ggaguaauguuccuuuggu

SEQ ID NO: 2290143 - RNA, 19 nt, Artificial Sequence
  Description of Artificial Sequence: Synthetic oligonucleotide
  Antisense strand to SEQ ID NO: 2290142
accaaaggaacauuacucc

SEQ ID NO: 2290144 - RNA, 19 nt, Artificial Sequence
  Description of Artificial Sequence: Synthetic oligonucleotide
  Sense strand starting at position 1696 of SEQ ID NO: 1884762
gaguaauguuccuuugguu

SEQ ID NO: 2290145 - RNA, 19 nt, Artificial Sequence
  Description of Artificial Sequence: Synthetic oligonucleotide
  Antisense strand to SEQ ID NO: 2290144
aaccaaaggaacauuacuc

SEQ ID NO: 2290146 - RNA, 19 nt, Artificial Sequence
  Description of Artificial Sequence: Synthetic oligonucleotide
  Sense strand starting at position 167 of SEQ ID NO: 1884763
gcuccauugguagacuaga

SEQ ID NO: 2290147 - RNA, 19 nt, Artificial Sequence
  Description of Artificial Sequence: Synthetic oligonucleotide
  Antisense strand to SEQ ID NO: 2290146
ucuagucuaccaauggagc

SEQ ID NO: 2290148 - RNA, 19 nt, Artificial Sequence
  Description of Artificial Sequence: Synthetic oligonucleotide
  Sense strand starting at position 190 of SEQ ID NO: 1884763
ggugaugacaucugggaau

SEQ ID NO: 2290149 - RNA, 19 nt, Artificial Sequence
  Description of Artificial Sequence: Synthetic oligonucleotide
  Antisense strand to SEQ ID NO: 2290148
auucccagaugucaucacc

SEQ ID NO: 2290150 - RNA, 19 nt, Artificial Sequence
  Description of Artificial Sequence: Synthetic oligonucleotide
  Sense strand starting at position 193 of SEQ ID NO: 1884763
gaugacaucugggaauuua

SEQ ID NO: 2290151 - RNA, 19 nt, Artificial Sequence
  Description of Artificial Sequence: Synthetic oligonucleotide
  Antisense strand to SEQ ID NO: 2290150
uaaauucccagaugucauc

SEQ ID NO: 2290152 - RNA, 19 nt, Artificial Sequence
  Description of Artificial Sequence: Synthetic oligonucleotide
  Sense strand starting at position 660 of SEQ ID NO: 1884763
aggacaaguucugcuacua

SEQ ID NO: 2290153 - RNA, 19 nt, Artificial Sequence
  Description of Artificial Sequence: Synthetic oligonucleotide
  Antisense strand to SEQ ID NO: 2290152
uaguagcagaacuuguccu

SEQ ID NO: 2290154 - RNA, 19 nt, Artificial Sequence
  Description of Artificial Sequence: Synthetic oligonucleotide
  Sense strand starting at position 745 of SEQ ID NO: 1884763
aucugaaauggguguaaau

SEQ ID NO: 2290155 - RNA, 19 nt, Artificial Sequence
  Description of Artificial Sequence: Synthetic oligonucleotide
  Antisense strand to SEQ ID NO: 2290154
auuuacacccauuucagau

SEQ ID NO: 2290156 - RNA, 19 nt, Artificial Sequence
  Description of Artificial Sequence: Synthetic oligonucleotide
  Sense strand starting at position 1111 of SEQ ID NO: 1884763
acacauauguguguauaac

SEQ ID NO: 2290157 - RNA, 19 nt, Artificial Sequence
  Description of Artificial Sequence: Synthetic oligonucleotide
  Antisense strand to SEQ ID NO: 2290156
guuauacacacauaugugu

SEQ ID NO: 2290158 - RNA, 19 nt, Artificial Sequence
  Description of Artificial Sequence: Synthetic oligonucleotide
  Sense strand starting at position 1160 of SEQ ID NO: 1884763
guaugcuaacacugauuau

SEQ ID NO: 2290159 - RNA, 19 nt, Artificial Sequence
  Description of Artificial Sequence: Synthetic oligonucleotide
  Antisense strand to SEQ ID NO: 2290158
auaaucaguguuagcauac

SEQ ID NO: 2290160 - RNA, 19 nt, Artificial Sequence
  Description of Artificial Sequence: Synthetic oligonucleotide
  Sense strand starting at position 1184 of SEQ ID NO: 1884763
guagaaagaucagcaguga

SEQ ID NO: 2290161 - RNA, 19 nt, Artificial Sequence
  Description of Artificial Sequence: Synthetic oligonucleotide
  Antisense strand to SEQ ID NO: 2290160
ucacugcugaucuuucuac

SEQ ID NO: 2290162 - RNA, 19 nt, Artificial Sequence
  Description of Artificial Sequence: Synthetic oligonucleotide
  Sense strand starting at position 1234 of SEQ ID NO: 1884763
uccaaauguucugcaagga

SEQ ID NO: 2290163 - RNA, 19 nt, Artificial Sequence
  Description of Artificial Sequence: Synthetic oligonucleotide
  Antisense strand to SEQ ID NO: 2290162
uccuugcagaacauuugga

SEQ ID NO: 2290164 - RNA, 19 nt, Artificial Sequence
  Description of Artificial Sequence: Synthetic oligonucleotide
  Sense strand starting at position 1235 of SEQ ID NO: 1884763
ccaaauguucugcaaggaa

SEQ ID NO: 2290165 - RNA, 19 nt, Artificial Sequence
  Description of Artificial Sequence: Synthetic oligonucleotide
  Antisense strand to SEQ ID NO: 2290164
uuccuugcagaacauuugg

SEQ ID NO: 2290166 - RNA, 19 nt, Artificial Sequence
  Description of Artificial Sequence: Synthetic oligonucleotide
  Sense strand starting at position 1307 of SEQ ID NO: 1884763
aggaauaugcuguaauacu

SEQ ID NO: 2290167 - RNA, 19 nt, Artificial Sequence
  Description of Artificial Sequence: Synthetic oligonucleotide
  Antisense strand to SEQ ID NO: 2290166
aguauuacagcauauuccu

SEQ ID NO: 2290168 - RNA, 19 nt, Artificial Sequence
  Description of Artificial Sequence: Synthetic oligonucleotide
  Sense strand starting at position 1340 of SEQ ID NO: 1884763
aauuaaggaugugagauuu

SEQ ID NO: 2290169 - RNA, 19 nt, Artificial Sequence
  Description of Artificial Sequence: Synthetic oligonucleotide
  Antisense strand to SEQ ID NO: 2290168
aaaucucacauccuuaauu

SEQ ID NO: 2290170 - RNA, 19 nt, Artificial Sequence
  Description of Artificial Sequence: Synthetic oligonucleotide
  Sense strand starting at position 1399 of SEQ ID NO: 1884763
agaauucagcagggucgaa

SEQ ID NO: 2290171 - RNA, 19 nt, Artificial Sequence
  Description of Artificial Sequence: Synthetic oligonucleotide
  Antisense strand to SEQ ID NO: 2290170
uucgacccugcugaauucu

SEQ ID NO: 2290172 - RNA, 19 nt, Artificial Sequence
  Description of Artificial Sequence: Synthetic oligonucleotide
  Sense strand starting at position 1465 of SEQ ID NO: 1884763
cuaguaacaaugcgaaaga

SEQ ID NO: 2290173 - RNA, 19 nt, Artificial Sequence
  Description of Artificial Sequence: Synthetic oligonucleotide
  Antisense strand to SEQ ID NO: 2290172
ucuuucgcauuguuacuag

SEQ ID NO: 2290174 - RNA, 19 nt, Artificial Sequence
  Description of Artificial Sequence: Synthetic oligonucleotide
  Sense strand starting at position 1803 of SEQ ID NO: 1884763
aaagaaaugugagaagaca

SEQ ID NO: 2290175 - RNA, 19 nt, Artificial Sequence
  Description of Artificial Sequence: Synthetic oligonucleotide
  Antisense strand to SEQ ID NO: 2290174
ugucuucucacauuucuuu

SEQ ID NO: 2290176 - RNA, 19 nt, Artificial Sequence
  Description of Artificial Sequence: Synthetic oligonucleotide
  Sense strand starting at position 1821 of SEQ ID NO: 1884763
aucuacauuugugaagaug

SEQ ID NO: 2290177 - RNA, 19 nt, Artificial Sequence
  Description of Artificial Sequence: Synthetic oligonucleotide
  Antisense strand to SEQ ID NO: 2290176
caucuucacaaauguagau

SEQ ID NO: 2290178 - RNA, 19 nt, Artificial Sequence
  Description of Artificial Sequence: Synthetic oligonucleotide
  Sense strand starting at position 1833 of SEQ ID NO: 1884763
gaagaugaggcuugcauca

SEQ ID NO: 2290179 - RNA, 19 nt, Artificial Sequence
  Description of Artificial Sequence: Synthetic oligonucleotide
  Antisense strand to SEQ ID NO: 2290178
ugaugcaagccucaucuuc

SEQ ID NO: 2290180 - RNA, 19 nt, Artificial Sequence
  Description of Artificial Sequence: Synthetic oligonucleotide
  Sense strand starting at position 1953 of SEQ ID NO: 1884763
agaagcuucucucuuggaa

SEQ ID NO: 2290181 - RNA, 19 nt, Artificial Sequence
  Description of Artificial Sequence: Synthetic oligonucleotide
  Antisense strand to SEQ ID NO: 2290180
uuccaagagagaagcuucu

SEQ ID NO: 2290182 - RNA, 19 nt, Artificial Sequence
  Description of Artificial Sequence: Synthetic oligonucleotide
  Sense strand starting at position 1960 of SEQ ID NO: 1884763
ucucucuuggaacguagaa

SEQ ID NO: 2290183 - RNA, 19 nt, Artificial Sequence
  Description of Artificial Sequence: Synthetic oligonucleotide
  Antisense strand to SEQ ID NO: 2290182
uucuacguuccaagagaga

SEQ ID NO: 2290184 - RNA, 19 nt, Artificial Sequence
  Description of Artificial Sequence: Synthetic oligonucleotide
  Sense strand starting at position 2015 of SEQ ID NO: 1884763
acaagcuucucucuuggaa

SEQ ID NO: 2290185 - RNA, 19 nt, Artificial Sequence
  Description of Artificial Sequence: Synthetic oligonucleotide
  Antisense strand to SEQ ID NO: 2290184
uuccaagagagaagcuugu

SEQ ID NO: 2290186 - RNA, 19 nt, Artificial Sequence
  Description of Artificial Sequence: Synthetic oligonucleotide
  Sense strand starting at position 2018 of SEQ ID NO: 1884763
agcuucucucuuggaacau

SEQ ID NO: 2290187 - RNA, 19 nt, Artificial Sequence
  Description of Artificial Sequence: Synthetic oligonucleotide
  Antisense strand to SEQ ID NO: 2290186
auguuccaagagagaagcu

SEQ ID NO: 2290188 - RNA, 19 nt, Artificial Sequence
  Description of Artificial Sequence: Synthetic oligonucleotide
  Sense strand starting at position 2067 of SEQ ID NO: 1884763
acaugaaacaauugucggu

SEQ ID NO: 2290189 - RNA, 19 nt, Artificial Sequence
  Description of Artificial Sequence: Synthetic oligonucleotide
  Antisense strand to SEQ ID NO: 2290188
accgacaauuguuucaugu

SEQ ID NO: 2290190 - RNA, 19 nt, Artificial Sequence
  Description of Artificial Sequence: Synthetic oligonucleotide
  Sense strand starting at position 2071 of SEQ ID NO: 1884763
gaaacaauugucggugaac

SEQ ID NO: 2290191 - RNA, 19 nt, Artificial Sequence
  Description of Artificial Sequence: Synthetic oligonucleotide
  Antisense strand to SEQ ID NO: 2290190
guucaccgacaauuguuuc

SEQ ID NO: 2290192 - RNA, 19 nt, Artificial Sequence
  Description of Artificial Sequence: Synthetic oligonucleotide
  Sense strand starting at position 2072 of SEQ ID NO: 1884763
aaacaauugucggugaacu

SEQ ID NO: 2290193 - RNA, 19 nt, Artificial Sequence
  Description of Artificial Sequence: Synthetic oligonucleotide
  Antisense strand to SEQ ID NO: 2290192
aguucaccgacaauuguuu

SEQ ID NO: 2290194 - RNA, 19 nt, Artificial Sequence
  Description of Artificial Sequence: Synthetic oligonucleotide
  Sense strand starting at position 2073 of SEQ ID NO: 1884763
aacaauugucggugaacuu

SEQ ID NO: 2290195 - RNA, 19 nt, Artificial Sequence
  Description of Artificial Sequence: Synthetic oligonucleotide
  Antisense strand to SEQ ID NO: 2290194
aaguucaccgacaauuguu

SEQ ID NO: 2290196 - RNA, 19 nt, Artificial Sequence
  Description of Artificial Sequence: Synthetic oligonucleotide
  Sense strand starting at position 2104 of SEQ ID NO: 1884763
agaccaucaugagaauaaa

SEQ ID NO: 2290197 - RNA, 19 nt, Artificial Sequence
  Description of Artificial Sequence: Synthetic oligonucleotide
  Antisense strand to SEQ ID NO: 2290196
uuuauucucaugauggucu

SEQ ID NO: 2290198 - RNA, 19 nt, Artificial Sequence
  Description of Artificial Sequence: Synthetic oligonucleotide
  Sense strand starting at position 2170 of SEQ ID NO: 1884763
auuucuuaggucugcugua

SEQ ID NO: 2290199 - RNA, 19 nt, Artificial Sequence
  Description of Artificial Sequence: Synthetic oligonucleotide
  Antisense strand to SEQ ID NO: 2290198
uacagcagaccuaagaaau

SEQ ID NO: 2290200 - RNA, 19 nt, Artificial Sequence
  Description of Artificial Sequence: Synthetic oligonucleotide
  Sense strand starting at position 2175 of SEQ ID NO: 1884763
uuaggucugcuguaacaaa

SEQ ID NO: 2290201 - RNA, 19 nt, Artificial Sequence
  Description of Artificial Sequence: Synthetic oligonucleotide
  Antisense strand to SEQ ID NO: 2290200
uuuguuacagcagaccuaa

SEQ ID NO: 2290202 - RNA, 19 nt, Artificial Sequence
  Description of Artificial Sequence: Synthetic oligonucleotide
  Sense strand starting at position 2220 of SEQ ID NO: 1884763
aagagaaaguucucucagu

SEQ ID NO: 2290203 - RNA, 19 nt, Artificial Sequence
  Description of Artificial Sequence: Synthetic oligonucleotide
  Antisense strand to SEQ ID NO: 2290202
acugagagaacuuucucuu

SEQ ID NO: 2290204 - RNA, 19 nt, Artificial Sequence
  Description of Artificial Sequence: Synthetic oligonucleotide
  Sense strand starting at position 2221 of SEQ ID NO: 1884763
agagaaaguucucucaguu

SEQ ID NO: 2290205 - RNA, 19 nt, Artificial Sequence
  Description of Artificial Sequence: Synthetic oligonucleotide
  Antisense strand to SEQ ID NO: 2290204
aacugagagaacuuucucu

SEQ ID NO: 2290206 - RNA, 19 nt, Artificial Sequence
  Description of Artificial Sequence: Synthetic oligonucleotide
  Sense strand starting at position 2228 of SEQ ID NO: 1884763
guucucucaguuuaggaga

SEQ ID NO: 2290207 - RNA, 19 nt, Artificial Sequence
  Description of Artificial Sequence: Synthetic oligonucleotide
  Antisense strand to SEQ ID NO: 2290206
ucuccuaaacugagagaac

SEQ ID NO: 2290208 - RNA, 19 nt, Artificial Sequence
  Description of Artificial Sequence: Synthetic oligonucleotide
  Sense strand starting at position 2328 of SEQ ID NO: 1884763
gauucugagggcuguggau

SEQ ID NO: 2290209 - RNA, 19 nt, Artificial Sequence
  Description of Artificial Sequence: Synthetic oligonucleotide
  Antisense strand to SEQ ID NO: 2290208
auccacagcccucagaauc

SEQ ID NO: 2290210 - RNA, 19 nt, Artificial Sequence
  Description of Artificial Sequence: Synthetic oligonucleotide
  Sense strand starting at position 2545 of SEQ ID NO: 1884763
ugagguucuaggcagacau

SEQ ID NO: 2290211 - RNA, 19 nt, Artificial Sequence
  Description of Artificial Sequence: Synthetic oligonucleotide
  Antisense strand to SEQ ID NO: 2290210
augucugccuagaaccuca

SEQ ID NO: 2290212 - RNA, 19 nt, Artificial Sequence
  Description of Artificial Sequence: Synthetic oligonucleotide
  Sense strand starting at position 2549 of SEQ ID NO: 1884763
guucuaggcagacaugaau

SEQ ID NO: 2290213 - RNA, 19 nt, Artificial Sequence
  Description of Artificial Sequence: Synthetic oligonucleotide
  Antisense strand to SEQ ID NO: 2290212
auucaugucugccuagaac

SEQ ID NO: 2290214 - RNA, 19 nt, Artificial Sequence
  Description of Artificial Sequence: Synthetic oligonucleotide
  Sense strand starting at position 2886 of SEQ ID NO: 1884763
augcgagagcaguaaacau

SEQ ID NO: 2290215 - RNA, 19 nt, Artificial Sequence
  Description of Artificial Sequence: Synthetic oligonucleotide
  Antisense strand to SEQ ID NO: 2290214
auguuuacugcucucgcau

SEQ ID NO: 2290216 - RNA, 19 nt, Artificial Sequence
  Description of Artificial Sequence: Synthetic oligonucleotide
  Sense strand starting at position 3387 of SEQ ID NO: 1884763
gaucauguuguugguggaa

SEQ ID NO: 2290217 - RNA, 19 nt, Artificial Sequence
  Description of Artificial Sequence: Synthetic oligonucleotide
  Antisense strand to SEQ ID NO: 2290216
uuccaccaacaacaugauc

SEQ ID NO: 2290218 - RNA, 19 nt, Artificial Sequence
  Description of Artificial Sequence: Synthetic oligonucleotide
  Sense strand starting at position 3426 of SEQ ID NO: 1884763
gccugagauccucacuuuc

SEQ ID NO: 2290219 - RNA, 19 nt, Artificial Sequence
  Description of Artificial Sequence: Synthetic oligonucleotide
  Antisense strand to SEQ ID NO: 2290218
gaaagugaggaucucaggc

SEQ ID NO: 2290220 - RNA, 19 nt, Artificial Sequence
  Description of Artificial Sequence: Synthetic oligonucleotide
  Sense strand starting at position 3536 of SEQ ID NO: 1884763
uggagagaacucugccuuu

SEQ ID NO: 2290221 - RNA, 19 nt, Artificial Sequence
  Description of Artificial Sequence: Synthetic oligonucleotide
  Antisense strand to SEQ ID NO: 2290220
aaaggcagaguucucucca

SEQ ID NO: 2290222 - RNA, 19 nt, Artificial Sequence
  Description of Artificial Sequence: Synthetic oligonucleotide
  Sense strand starting at position 3539 of SEQ ID NO: 1884763
agagaacucugccuuuaaa

SEQ ID NO: 2290223 - RNA, 19 nt, Artificial Sequence
  Description of Artificial Sequence: Synthetic oligonucleotide
  Antisense strand to SEQ ID NO: 2290222
uuuaaaggcagaguucucu

SEQ ID NO: 2290224 - RNA, 19 nt, Artificial Sequence
  Description of Artificial Sequence: Synthetic oligonucleotide
  Sense strand starting at position 3559 of SEQ ID NO: 1884763
ggcucaugugacuagguca

SEQ ID NO: 2290225 - RNA, 19 nt, Artificial Sequence
  Description of Artificial Sequence: Synthetic oligonucleotide
  Antisense strand to SEQ ID NO: 2290224
ugaccuagucacaugagcc

SEQ ID NO: 2290226 - RNA, 19 nt, Artificial Sequence
  Description of Artificial Sequence: Synthetic oligonucleotide
  Sense strand starting at position 57 of SEQ ID NO: 1884764
gugaaagucuugucaagag

SEQ ID NO: 2290227 - RNA, 19 nt, Artificial Sequence
  Description of Artificial Sequence: Synthetic oligonucleotide
  Antisense strand to SEQ ID NO: 2290226
cucuugacaagacuuucac

SEQ ID NO: 2290228 - RNA, 19 nt, Artificial Sequence
  Description of Artificial Sequence: Synthetic oligonucleotide
  Sense strand starting at position 191 of SEQ ID NO: 1884764
ucagcaaguccauaggauu

SEQ ID NO: 2290229 - RNA, 19 nt, Artificial Sequence
  Description of Artificial Sequence: Synthetic oligonucleotide
  Antisense strand to SEQ ID NO: 2290228
aauccuauggacuugcuga

SEQ ID NO: 2290230 - RNA, 19 nt, Artificial Sequence
  Description of Artificial Sequence: Synthetic oligonucleotide
  Sense strand starting at position 264 of SEQ ID NO: 1884764
uguagucuuauuuguaaug

SEQ ID NO: 2290231 - RNA, 19 nt, Artificial Sequence
  Description of Artificial Sequence: Synthetic oligonucleotide
  Antisense strand to SEQ ID NO: 2290230
cauuacaaauaagacuaca

SEQ ID NO: 2290232 - RNA, 19 nt, Artificial Sequence
  Description of Artificial Sequence: Synthetic oligonucleotide
  Sense strand starting at position 281 of SEQ ID NO: 1884764
uggagcuaaaccugggaua

SEQ ID NO: 2290233 - RNA, 19 nt, Artificial Sequence
  Description of Artificial Sequence: Synthetic oligonucleotide
  Antisense strand to SEQ ID NO: 2290232
uaucccagguuuagcucca

SEQ ID NO: 2290234 - RNA, 19 nt, Artificial Sequence
  Description of Artificial Sequence: Synthetic oligonucleotide
  Sense strand starting at position 283 of SEQ ID NO: 1884764
gagcuaaaccugggauaau

SEQ ID NO: 2290235 - RNA, 19 nt, Artificial Sequence
  Description of Artificial Sequence: Synthetic oligonucleotide
  Antisense strand to SEQ ID NO: 2290234
auuaucccagguuuagcuc

SEQ ID NO: 2290236 - RNA, 19 nt, Artificial Sequence
  Description of Artificial Sequence: Synthetic oligonucleotide
  Sense strand starting at position 342 of SEQ ID NO: 1884764
uuaggaugcguccauauga

SEQ ID NO: 2290237 - RNA, 19 nt, Artificial Sequence
  Description of Artificial Sequence: Synthetic oligonucleotide
  Antisense strand to SEQ ID NO: 2290236
ucauauggacgcauccuaa

SEQ ID NO: 2290238 - RNA, 19 nt, Artificial Sequence
  Description of Artificial Sequence: Synthetic oligonucleotide
  Sense strand starting at position 507 of SEQ ID NO: 1884764
caucucauaugaguguaga

SEQ ID NO: 2290239 - RNA, 19 nt, Artificial Sequence
  Description of Artificial Sequence: Synthetic oligonucleotide
  Antisense strand to SEQ ID NO: 2290238
ucuacacucauaugagaug

SEQ ID NO: 2290240 - RNA, 19 nt, Artificial Sequence
  Description of Artificial Sequence: Synthetic oligonucleotide
  Sense strand starting at position 508 of SEQ ID NO: 1884764
aucucauaugaguguagac

SEQ ID NO: 2290241 - RNA, 19 nt, Artificial Sequence
  Description of Artificial Sequence: Synthetic oligonucleotide
  Antisense strand to SEQ ID NO: 2290240
gucuacacucauaugagau

SEQ ID NO: 2290242 - RNA, 19 nt, Artificial Sequence
  Description of Artificial Sequence: Synthetic oligonucleotide
  Sense strand starting at position 532 of SEQ ID NO: 1884764
auacuauacccuggaaggu

SEQ ID NO: 2290243 - RNA, 19 nt, Artificial Sequence
  Description of Artificial Sequence: Synthetic oligonucleotide
  Antisense strand to SEQ ID NO: 2290242
accuuccaggguauaguau

SEQ ID NO: 2290244 - RNA, 19 nt, Artificial Sequence
  Description of Artificial Sequence: Synthetic oligonucleotide
  Sense strand starting at position 571 of SEQ ID NO: 1884764
uguuaaugauaagccaauu

SEQ ID NO: 2290245 - RNA, 19 nt, Artificial Sequence
  Description of Artificial Sequence: Synthetic oligonucleotide
  Antisense strand to SEQ ID NO: 2290244
aauuggcuuaucauuaaca

SEQ ID NO: 2290246 - RNA, 19 nt, Artificial Sequence
  Description of Artificial Sequence: Synthetic oligonucleotide
  Sense strand starting at position 812 of SEQ ID NO: 1884764
aaaguuuguguugaguaag

SEQ ID NO: 2290247 - RNA, 19 nt, Artificial Sequence
  Description of Artificial Sequence: Synthetic oligonucleotide
  Antisense strand to SEQ ID NO: 2290246
cuuacucaacacaaacuuu

SEQ ID NO: 2290248 - RNA, 19 nt, Artificial Sequence
  Description of Artificial Sequence: Synthetic oligonucleotide
  Sense strand starting at position 822 of SEQ ID NO: 1884764
uugaguaagucacuggauu

SEQ ID NO: 2290249 - RNA, 19 nt, Artificial Sequence
  Description of Artificial Sequence: Synthetic oligonucleotide
  Antisense strand to SEQ ID NO: 2290248
aauccagugacuuacucaa

SEQ ID NO: 2290250 - RNA, 19 nt, Artificial Sequence
  Description of Artificial Sequence: Synthetic oligonucleotide
  Sense strand starting at position 836 of SEQ ID NO: 1884764
ggauuugagucagaagacu

SEQ ID NO: 2290251 - RNA, 19 nt, Artificial Sequence
  Description of Artificial Sequence: Synthetic oligonucleotide
  Antisense strand to SEQ ID NO: 2290250
agucuucugacucaaaucc

SEQ ID NO: 2290252 - RNA, 19 nt, Artificial Sequence
  Description of Artificial Sequence: Synthetic oligonucleotide
  Sense strand starting at position 952 of SEQ ID NO: 1884764
gugggaaugaauggugaua

SEQ ID NO: 2290253 - RNA, 19 nt, Artificial Sequence
  Description of Artificial Sequence: Synthetic oligonucleotide
  Antisense strand to SEQ ID NO: 2290252
uaucaccauucauucccac

SEQ ID NO: 2290254 - RNA, 19 nt, Artificial Sequence
  Description of Artificial Sequence: Synthetic oligonucleotide
  Sense strand starting at position 995 of SEQ ID NO: 1884764
cggaguugugaggauucag

SEQ ID NO: 2290255 - RNA, 19 nt, Artificial Sequence
  Description of Artificial Sequence: Synthetic oligonucleotide
  Antisense strand to SEQ ID NO: 2290254
cugaauccucacaacuccg

SEQ ID NO: 2290256 - RNA, 19 nt, Artificial Sequence
  Description of Artificial Sequence: Synthetic oligonucleotide
  Sense strand starting at position 1087 of SEQ ID NO: 1884764
uugacauggacgugacuau

SEQ ID NO: 2290257 - RNA, 19 nt, Artificial Sequence
  Description of Artificial Sequence: Synthetic oligonucleotide
  Antisense strand to SEQ ID NO: 2290256
auagucacguccaugucaa

SEQ ID NO: 2290258 - RNA, 19 nt, Artificial Sequence
  Description of Artificial Sequence: Synthetic oligonucleotide
  Sense strand starting at position 1144 of SEQ ID NO: 1884764
ccugucgugcccuuuagua

SEQ ID NO: 2290259 - RNA, 19 nt, Artificial Sequence
  Description of Artificial Sequence: Synthetic oligonucleotide
  Antisense strand to SEQ ID NO: 2290258
uacuaaagggcacgacagg

SEQ ID NO: 2290260 - RNA, 19 nt, Artificial Sequence
  Description of Artificial Sequence: Synthetic oligonucleotide
  Sense strand starting at position 1225 of SEQ ID NO: 1884764
ugaauuaagugagcaaucu

SEQ ID NO: 2290261 - RNA, 19 nt, Artificial Sequence
  Description of Artificial Sequence: Synthetic oligonucleotide
  Antisense strand to SEQ ID NO: 2290260
agauugcucacuuaauuca

SEQ ID NO: 2290262 - RNA, 19 nt, Artificial Sequence
  Description of Artificial Sequence: Synthetic oligonucleotide
  Sense strand starting at position 1254 of SEQ ID NO: 1884764
gacaaugaguuguccugag

SEQ ID NO: 2290263 - RNA, 19 nt, Artificial Sequence
  Description of Artificial Sequence: Synthetic oligonucleotide
  Antisense strand to SEQ ID NO: 2290262
cucaggacaacucauuguc

SEQ ID NO: 2290264 - RNA, 19 nt, Artificial Sequence
  Description of Artificial Sequence: Synthetic oligonucleotide
  Sense strand starting at position 1521 of SEQ ID NO: 1884764
ugggaucugaaaugucaca

SEQ ID NO: 2290265 - RNA, 19 nt, Artificial Sequence
  Description of Artificial Sequence: Synthetic oligonucleotide
  Antisense strand to SEQ ID NO: 2290264
ugugacauuucagauccca

SEQ ID NO: 2290266 - RNA, 19 nt, Artificial Sequence
  Description of Artificial Sequence: Synthetic oligonucleotide
  Sense strand starting at position 1729 of SEQ ID NO: 1884764
uguggugaauggguccaaa

SEQ ID NO: 2290267 - RNA, 19 nt, Artificial Sequence
  Description of Artificial Sequence: Synthetic oligonucleotide
  Antisense strand to SEQ ID NO: 2290266
uuuggacccauucaccaca

SEQ ID NO: 2290268 - RNA, 19 nt, Artificial Sequence
  Description of Artificial Sequence: Synthetic oligonucleotide
  Sense strand starting at position 1895 of SEQ ID NO: 1884764
aaggauaccuguuccugga

SEQ ID NO: 2290269 - RNA, 19 nt, Artificial Sequence
  Description of Artificial Sequence: Synthetic oligonucleotide
  Antisense strand to SEQ ID NO: 2290268
uccaggaacagguauccuu

SEQ ID NO: 2290270 - RNA, 19 nt, Artificial Sequence
  Description of Artificial Sequence: Synthetic oligonucleotide
  Sense strand starting at position 1899 of SEQ ID NO: 1884764
auaccuguuccuggaugga

SEQ ID NO: 2290271 - RNA, 19 nt, Artificial Sequence
  Description of Artificial Sequence: Synthetic oligonucleotide
  Antisense strand to SEQ ID NO: 2290270
uccauccaggaacagguau

SEQ ID NO: 2290272 - RNA, 19 nt, Artificial Sequence
  Description of Artificial Sequence: Synthetic oligonucleotide
  Sense strand starting at position 1915 of SEQ ID NO: 1884764
ggaacugccugguuggaaa

SEQ ID NO: 2290273 - RNA, 19 nt, Artificial Sequence
  Description of Artificial Sequence: Synthetic oligonucleotide
  Antisense strand to SEQ ID NO: 2290272
uuuccaaccaggcaguucc

SEQ ID NO: 2290274 - RNA, 19 nt, Artificial Sequence
  Description of Artificial Sequence: Synthetic oligonucleotide
  Sense strand starting at position 2141 of SEQ ID NO: 1884764
gguauuaaucuagaguuug

SEQ ID NO: 2290275 - RNA, 19 nt, Artificial Sequence
  Description of Artificial Sequence: Synthetic oligonucleotide
  Antisense strand to SEQ ID NO: 2290274
caaacucuagauuaauacc

SEQ ID NO: 2290276 - RNA, 19 nt, Artificial Sequence
  Description of Artificial Sequence: Synthetic oligonucleotide
  Sense strand starting at position 2284 of SEQ ID NO: 1884764
aauguuauacaucguagaa

SEQ ID NO: 2290277 - RNA, 19 nt, Artificial Sequence
  Description of Artificial Sequence: Synthetic oligonucleotide
  Antisense strand to SEQ ID NO: 2290276
uucuacgauguauaacauu

SEQ ID NO: 2290278 - RNA, 19 nt, Artificial Sequence
  Description of Artificial Sequence: Synthetic oligonucleotide
  Sense strand starting at position 2305 of SEQ ID NO: 1884764
ugaauaaaucaugguucca

SEQ ID NO: 2290279 - RNA, 19 nt, Artificial Sequence
  Description of Artificial Sequence: Synthetic oligonucleotide
  Antisense strand to SEQ ID NO: 2290278
uggaaccaugauuuauuca

SEQ ID NO: 2290280 - RNA, 19 nt, Artificial Sequence
  Description of Artificial Sequence: Synthetic oligonucleotide
  Sense strand starting at position 2315 of SEQ ID NO: 1884764
augguuccaucccucaaga

SEQ ID NO: 2290281 - RNA, 19 nt, Artificial Sequence
  Description of Artificial Sequence: Synthetic oligonucleotide
  Antisense strand to SEQ ID NO: 2290280
ucuugagggauggaaccau

SEQ ID NO: 2290282 - RNA, 19 nt, Artificial Sequence
  Description of Artificial Sequence: Synthetic oligonucleotide
  Sense strand starting at position 2787 of SEQ ID NO: 1884764
aagagaaaguaugauuucu

SEQ ID NO: 2290283 - RNA, 19 nt, Artificial Sequence
  Description of Artificial Sequence: Synthetic oligonucleotide
  Antisense strand to SEQ ID NO: 2290282
agaaaucauacuuucucuu

SEQ ID NO: 2290284 - RNA, 19 nt, Artificial Sequence
  Description of Artificial Sequence: Synthetic oligonucleotide
  Sense strand starting at position 3058 of SEQ ID NO: 1884764
gcugcauugcauguuagua

SEQ ID NO: 2290285 - RNA, 19 nt, Artificial Sequence
  Description of Artificial Sequence: Synthetic oligonucleotide
  Antisense strand to SEQ ID NO: 2290284
uacuaacaugcaaugcagc

SEQ ID NO: 2290286 - RNA, 19 nt, Artificial Sequence
  Description of Artificial Sequence: Synthetic oligonucleotide
  Sense strand starting at position 3070 of SEQ ID NO: 1884764
guuaguaguaagggaagaa

SEQ ID NO: 2290287 - RNA, 19 nt, Artificial Sequence
  Description of Artificial Sequence: Synthetic oligonucleotide
  Antisense strand to SEQ ID NO: 2290286
uucuucccuuacuacuaac

SEQ ID NO: 2290288 - RNA, 19 nt, Artificial Sequence
  Description of Artificial Sequence: Synthetic oligonucleotide
  Sense strand starting at position 3114 of SEQ ID NO: 1884764
guuauaagaugacuuugga

SEQ ID NO: 2290289 - RNA, 19 nt, Artificial Sequence
  Description of Artificial Sequence: Synthetic oligonucleotide
  Antisense strand to SEQ ID NO: 2290288
uccaaagucaucuuauaac

SEQ ID NO: 2290290 - RNA, 19 nt, Artificial Sequence
  Description of Artificial Sequence: Synthetic oligonucleotide
  Sense strand starting at position 3189 of SEQ ID NO: 1884764
ucaauuuccugaugaagaa

SEQ ID NO: 2290291 - RNA, 19 nt, Artificial Sequence
  Description of Artificial Sequence: Synthetic oligonucleotide
  Antisense strand to SEQ ID NO: 2290290
uucuucaucaggaaauuga

SEQ ID NO: 2290292 - RNA, 19 nt, Artificial Sequence
  Description of Artificial Sequence: Synthetic oligonucleotide
  Sense strand starting at position 3242 of SEQ ID NO: 1884764
gucaguguuggagauaauu

SEQ ID NO: 2290293 - RNA, 19 nt, Artificial Sequence
  Description of Artificial Sequence: Synthetic oligonucleotide
  Antisense strand to SEQ ID NO: 2290292
aauuaucuccaacacugac

SEQ ID NO: 2290294 - RNA, 19 nt, Artificial Sequence
  Description of Artificial Sequence: Synthetic oligonucleotide
  Sense strand starting at position 3315 of SEQ ID NO: 1884764
gugcuauugccaucauugu

SEQ ID NO: 2290295 - RNA, 19 nt, Artificial Sequence
  Description of Artificial Sequence: Synthetic oligonucleotide
  Antisense strand to SEQ ID NO: 2290294
acaaugauggcaauagcac

SEQ ID NO: 2290296 - RNA, 19 nt, Artificial Sequence
  Description of Artificial Sequence: Synthetic oligonucleotide
  Sense strand starting at position 3375 of SEQ ID NO: 1884764
uucugauguuggguugaaa

SEQ ID NO: 2290297 - RNA, 19 nt, Artificial Sequence
  Description of Artificial Sequence: Synthetic oligonucleotide
  Antisense strand to SEQ ID NO: 2290296
uuucaacccaacaucagaa

SEQ ID NO: 2290298 - RNA, 19 nt, Artificial Sequence
  Description of Artificial Sequence: Synthetic oligonucleotide
  Sense strand starting at position 3386 of SEQ ID NO: 1884764
gguugaaagagacgguuau

SEQ ID NO: 2290299 - RNA, 19 nt, Artificial Sequence
  Description of Artificial Sequence: Synthetic oligonucleotide
  Antisense strand to SEQ ID NO: 2290298
auaaccgucucuuucaacc

SEQ ID NO: 2290300 - RNA, 19 nt, Artificial Sequence
  Description of Artificial Sequence: Synthetic oligonucleotide
  Sense strand starting at position 3390 of SEQ ID NO: 1884764
gaaagagacgguuauguac

SEQ ID NO: 2290301 - RNA, 19 nt, Artificial Sequence
  Description of Artificial Sequence: Synthetic oligonucleotide
  Antisense strand to SEQ ID NO: 2290300
guacauaaccgucucuuuc

SEQ ID NO: 2290302 - RNA, 19 nt, Artificial Sequence
  Description of Artificial Sequence: Synthetic oligonucleotide
  Sense strand starting at position 3549 of SEQ ID NO: 1884764
uaaacuuaagagugugaag

SEQ ID NO: 2290303 - RNA, 19 nt, Artificial Sequence
  Description of Artificial Sequence: Synthetic oligonucleotide
  Antisense strand to SEQ ID NO: 2290302
cuucacacucuuaaguuua

SEQ ID NO: 2290304 - RNA, 19 nt, Artificial Sequence
  Description of Artificial Sequence: Synthetic oligonucleotide
  Sense strand starting at position 3660 of SEQ ID NO: 1884764
ucacuuugccaggauaucu

SEQ ID NO: 2290305 - RNA, 19 nt, Artificial Sequence
  Description of Artificial Sequence: Synthetic oligonucleotide
  Antisense strand to SEQ ID NO: 2290304
agauauccuggcaaaguga

SEQ ID NO: 2290306 - RNA, 19 nt, Artificial Sequence
  Description of Artificial Sequence: Synthetic oligonucleotide
  Sense strand starting at position 79 of SEQ ID NO: 1884765
ggacuuagcccaggcauau

SEQ ID NO: 2290307 - RNA, 19 nt, Artificial Sequence
  Description of Artificial Sequence: Synthetic oligonucleotide
  Antisense strand to SEQ ID NO: 2290306
auaugccugggcuaagucc

SEQ ID NO: 2290308 - RNA, 19 nt, Artificial Sequence
  Description of Artificial Sequence: Synthetic oligonucleotide
  Sense strand starting at position 274 of SEQ ID NO: 1884765
gggucacgugcaggauuua

SEQ ID NO: 2290309 - RNA, 19 nt, Artificial Sequence
  Description of Artificial Sequence: Synthetic oligonucleotide
  Antisense strand to SEQ ID NO: 2290308
uaaauccugcacgugaccc

SEQ ID NO: 2290310 - RNA, 19 nt, Artificial Sequence
  Description of Artificial Sequence: Synthetic oligonucleotide
  Sense strand starting at position 308 of SEQ ID NO: 1884765
aaagguaggcacuguauaa

SEQ ID NO: 2290311 - RNA, 19 nt, Artificial Sequence
  Description of Artificial Sequence: Synthetic oligonucleotide
  Antisense strand to SEQ ID NO: 2290310
uuauacagugccuaccuuu

SEQ ID NO: 2290312 - RNA, 19 nt, Artificial Sequence
  Description of Artificial Sequence: Synthetic oligonucleotide
  Sense strand starting at position 490 of SEQ ID NO: 1884765
gggugugcucuuucgaggu

SEQ ID NO: 2290313 - RNA, 19 nt, Artificial Sequence
  Description of Artificial Sequence: Synthetic oligonucleotide
  Antisense strand to SEQ ID NO: 2290312
accucgaaagagcacaccc

SEQ ID NO: 2290314 - RNA, 19 nt, Artificial Sequence
  Description of Artificial Sequence: Synthetic oligonucleotide
  Sense strand starting at position 496 of SEQ ID NO: 1884765
gcucuuucgagguaacaaa

SEQ ID NO: 2290315 - RNA, 19 nt, Artificial Sequence
  Description of Artificial Sequence: Synthetic oligonucleotide
  Antisense strand to SEQ ID NO: 2290314
uuuguuaccucgaaagagc

SEQ ID NO: 2290316 - RNA, 19 nt, Artificial Sequence
  Description of Artificial Sequence: Synthetic oligonucleotide
  Sense strand starting at position 590 of SEQ ID NO: 1884765
gucugcauuucucugucau

SEQ ID NO: 2290317 - RNA, 19 nt, Artificial Sequence
  Description of Artificial Sequence: Synthetic oligonucleotide
  Antisense strand to SEQ ID NO: 2290316
augacagagaaaugcagac

SEQ ID NO: 2290318 - RNA, 19 nt, Artificial Sequence
  Description of Artificial Sequence: Synthetic oligonucleotide
  Sense strand starting at position 591 of SEQ ID NO: 1884765
ucugcauuucucugucauu

SEQ ID NO: 2290319 - RNA, 19 nt, Artificial Sequence
  Description of Artificial Sequence: Synthetic oligonucleotide
  Antisense strand to SEQ ID NO: 2290318
aaugacagagaaaugcaga

SEQ ID NO: 2290320 - RNA, 19 nt, Artificial Sequence
  Description of Artificial Sequence: Synthetic oligonucleotide
  Sense strand starting at position 592 of SEQ ID NO: 1884765
cugcauuucucugucauug

SEQ ID NO: 2290321 - RNA, 19 nt, Artificial Sequence
  Description of Artificial Sequence: Synthetic oligonucleotide
  Antisense strand to SEQ ID NO: 2290320
caaugacagagaaaugcag

SEQ ID NO: 2290322 - RNA, 19 nt, Artificial Sequence
  Description of Artificial Sequence: Synthetic oligonucleotide
  Sense strand starting at position 628 of SEQ ID NO: 1884765
gcuaaagaaucucccauag

SEQ ID NO: 2290323 - RNA, 19 nt, Artificial Sequence
  Description of Artificial Sequence: Synthetic oligonucleotide
  Antisense strand to SEQ ID NO: 2290322
cuaugggagauucuuuagc

SEQ ID NO: 2290324 - RNA, 19 nt, Artificial Sequence
  Description of Artificial Sequence: Synthetic oligonucleotide
  Sense strand starting at position 683 of SEQ ID NO: 1884765
cuuauauuugcaugagccu

SEQ ID NO: 2290325 - RNA, 19 nt, Artificial Sequence
  Description of Artificial Sequence: Synthetic oligonucleotide
  Antisense strand to SEQ ID NO: 2290324
aggcucaugcaaauauaag

SEQ ID NO: 2290326 - RNA, 19 nt, Artificial Sequence
  Description of Artificial Sequence: Synthetic oligonucleotide
  Sense strand starting at position 741 of SEQ ID NO: 1884765
agaagagaacuguguuuau

SEQ ID NO: 2290327 - RNA, 19 nt, Artificial Sequence
  Description of Artificial Sequence: Synthetic oligonucleotide
  Antisense strand to SEQ ID NO: 2290326
auaaacacaguucucuucu

SEQ ID NO: 2290328 - RNA, 19 nt, Artificial Sequence
  Description of Artificial Sequence: Synthetic oligonucleotide
  Sense strand starting at position 744 of SEQ ID NO: 1884765
agagaacuguguuuauucu

SEQ ID NO: 2290329 - RNA, 19 nt, Artificial Sequence
  Description of Artificial Sequence: Synthetic oligonucleotide
  Antisense strand to SEQ ID NO: 2290328
agaauaaacacaguucucu

SEQ ID NO: 2290330 - RNA, 19 nt, Artificial Sequence
  Description of Artificial Sequence: Synthetic oligonucleotide
  Sense strand starting at position 745 of SEQ ID NO: 1884765
gagaacuguguuuauucuu

SEQ ID NO: 2290331 - RNA, 19 nt, Artificial Sequence
  Description of Artificial Sequence: Synthetic oligonucleotide
  Antisense strand to SEQ ID NO: 2290330
aagaauaaacacaguucuc

SEQ ID NO: 2290332 - RNA, 19 nt, Artificial Sequence
  Description of Artificial Sequence: Synthetic oligonucleotide
  Sense strand starting at position 795 of SEQ ID NO: 1884765
cacucaauuuguguugagu

SEQ ID NO: 2290333 - RNA, 19 nt, Artificial Sequence
  Description of Artificial Sequence: Synthetic oligonucleotide
  Antisense strand to SEQ ID NO: 2290332
acucaacacaaauugagug

SEQ ID NO: 2290334 - RNA, 19 nt, Artificial Sequence
  Description of Artificial Sequence: Synthetic oligonucleotide
  Sense strand starting at position 798 of SEQ ID NO: 1884765
ucaauuuguguugagugca

SEQ ID NO: 2290335 - RNA, 19 nt, Artificial Sequence
  Description of Artificial Sequence: Synthetic oligonucleotide
  Antisense strand to SEQ ID NO: 2290334
ugcacucaacacaaauuga

SEQ ID NO: 2290336 - RNA, 19 nt, Artificial Sequence
  Description of Artificial Sequence: Synthetic oligonucleotide
  Sense strand starting at position 801 of SEQ ID NO: 1884765
auuuguguugagugcauga

SEQ ID NO: 2290337 - RNA, 19 nt, Artificial Sequence
  Description of Artificial Sequence: Synthetic oligonucleotide
  Antisense strand to SEQ ID NO: 2290336
ucaugcacucaacacaaau

SEQ ID NO: 2290338 - RNA, 19 nt, Artificial Sequence
  Description of Artificial Sequence: Synthetic oligonucleotide
  Sense strand starting at position 1244 of SEQ ID NO: 1884765
ggaagaauauuaguaacgu

SEQ ID NO: 2290339 - RNA, 19 nt, Artificial Sequence
  Description of Artificial Sequence: Synthetic oligonucleotide
  Antisense strand to SEQ ID NO: 2290338
acguuacuaauauucuucc

SEQ ID NO: 2290340 - RNA, 19 nt, Artificial Sequence
  Description of Artificial Sequence: Synthetic oligonucleotide
  Sense strand starting at position 1393 of SEQ ID NO: 1884765
uguugacaguauccucaau

SEQ ID NO: 2290341 - RNA, 19 nt, Artificial Sequence
  Description of Artificial Sequence: Synthetic oligonucleotide
  Antisense strand to SEQ ID NO: 2290340
auugaggauacugucaaca

SEQ ID NO: 2290342 - RNA, 19 nt, Artificial Sequence
  Description of Artificial Sequence: Synthetic oligonucleotide
  Sense strand starting at position 1461 of SEQ ID NO: 1884765
ugggauuacacguaaaugu

SEQ ID NO: 2290343 - RNA, 19 nt, Artificial Sequence
  Description of Artificial Sequence: Synthetic oligonucleotide
  Antisense strand to SEQ ID NO: 2290342
acauuuacguguaauccca

SEQ ID NO: 2290344 - RNA, 19 nt, Artificial Sequence
  Description of Artificial Sequence: Synthetic oligonucleotide
  Sense strand starting at position 2165 of SEQ ID NO: 1884765
ugugguucugcguuaaggu

SEQ ID NO: 2290345 - RNA, 19 nt, Artificial Sequence
  Description of Artificial Sequence: Synthetic oligonucleotide
  Antisense strand to SEQ ID NO: 2290344
accuuaacgcagaaccaca

SEQ ID NO: 2290346 - RNA, 19 nt, Artificial Sequence
  Description of Artificial Sequence: Synthetic oligonucleotide
  Sense strand starting at position 2343 of SEQ ID NO: 1884765
guacguguccagcucugua

SEQ ID NO: 2290347 - RNA, 19 nt, Artificial Sequence
  Description of Artificial Sequence: Synthetic oligonucleotide
  Antisense strand to SEQ ID NO: 2290346
uacagagcuggacacguac

SEQ ID NO: 2290348 - RNA, 19 nt, Artificial Sequence
  Description of Artificial Sequence: Synthetic oligonucleotide
  Sense strand starting at position 2355 of SEQ ID NO: 1884765
cucuguagucaagauucca

SEQ ID NO: 2290349 - RNA, 19 nt, Artificial Sequence
  Description of Artificial Sequence: Synthetic oligonucleotide
  Antisense strand to SEQ ID NO: 2290348
uggaaucuugacuacagag

SEQ ID NO: 2290350 - RNA, 19 nt, Artificial Sequence
  Description of Artificial Sequence: Synthetic oligonucleotide
  Sense strand starting at position 2366 of SEQ ID NO: 1884765
agauuccagcuuuauguuu

SEQ ID NO: 2290351 - RNA, 19 nt, Artificial Sequence
  Description of Artificial Sequence: Synthetic oligonucleotide
  Antisense strand to SEQ ID NO: 2290350
aaacauaaagcuggaaucu

SEQ ID NO: 2290352 - RNA, 19 nt, Artificial Sequence
  Description of Artificial Sequence: Synthetic oligonucleotide
  Sense strand starting at position 2382 of SEQ ID NO: 1884765
uuucauggucgagaucgga

SEQ ID NO: 2290353 - RNA, 19 nt, Artificial Sequence
  Description of Artificial Sequence: Synthetic oligonucleotide
  Antisense strand to SEQ ID NO: 2290352
uccgaucucgaccaugaaa

SEQ ID NO: 2290354 - RNA, 19 nt, Artificial Sequence
  Description of Artificial Sequence: Synthetic oligonucleotide
  Sense strand starting at position 2682 of SEQ ID NO: 1884765
ugaccagguuacuuguuua

SEQ ID NO: 2290355 - RNA, 19 nt, Artificial Sequence
  Description of Artificial Sequence: Synthetic oligonucleotide
  Antisense strand to SEQ ID NO: 2290354
uaaacaaguaaccugguca

SEQ ID NO: 2290356 - RNA, 19 nt, Artificial Sequence
  Description of Artificial Sequence: Synthetic oligonucleotide
  Sense strand starting at position 2685 of SEQ ID NO: 1884765
ccagguuacuuguuuagau

SEQ ID NO: 2290357 - RNA, 19 nt, Artificial Sequence
  Description of Artificial Sequence: Synthetic oligonucleotide
  Antisense strand to SEQ ID NO: 2290356
aucuaaacaaguaaccugg

SEQ ID NO: 2290358 - RNA, 19 nt, Artificial Sequence
  Description of Artificial Sequence: Synthetic oligonucleotide
  Sense strand starting at position 2686 of SEQ ID NO: 1884765
cagguuacuuguuuagaua

SEQ ID NO: 2290359 - RNA, 19 nt, Artificial Sequence
  Description of Artificial Sequence: Synthetic oligonucleotide
  Antisense strand to SEQ ID NO: 2290358
uaucuaaacaaguaaccug

SEQ ID NO: 2290360 - RNA, 19 nt, Artificial Sequence
  Description of Artificial Sequence: Synthetic oligonucleotide
  Sense strand starting at position 2687 of SEQ ID NO: 1884765
agguuacuuguuuagauau

SEQ ID NO: 2290361 - RNA, 19 nt, Artificial Sequence
  Description of Artificial Sequence: Synthetic oligonucleotide
  Antisense strand to SEQ ID NO: 2290360
auaucuaaacaaguaaccu

SEQ ID NO: 2290362 - RNA, 19 nt, Artificial Sequence
  Description of Artificial Sequence: Synthetic oligonucleotide
  Sense strand starting at position 2836 of SEQ ID NO: 1884765
agagccuggucuuuggaga

SEQ ID NO: 2290363 - RNA, 19 nt, Artificial Sequence
  Description of Artificial Sequence: Synthetic oligonucleotide
  Antisense strand to SEQ ID NO: 2290362
ucuccaaagaccaggcucu

SEQ ID NO: 2290364 - RNA, 19 nt, Artificial Sequence
  Description of Artificial Sequence: Synthetic oligonucleotide
  Sense strand starting at position 3022 of SEQ ID NO: 1884765
ugcacagugugcucauuua

SEQ ID NO: 2290365 - RNA, 19 nt, Artificial Sequence
  Description of Artificial Sequence: Synthetic oligonucleotide
  Antisense strand to SEQ ID NO: 2290364
uaaaugagcacacugugca

SEQ ID NO: 2290366 - RNA, 19 nt, Artificial Sequence
  Description of Artificial Sequence: Synthetic oligonucleotide
  Sense strand starting at position 3161 of SEQ ID NO: 1884765
uagcuaagagguuaacuuu

SEQ ID NO: 2290367 - RNA, 19 nt, Artificial Sequence
  Description of Artificial Sequence: Synthetic oligonucleotide
  Antisense strand to SEQ ID NO: 2290366
aaaguuaaccucuuagcua

SEQ ID NO: 2290368 - RNA, 19 nt, Artificial Sequence
  Description of Artificial Sequence: Synthetic oligonucleotide
  Sense strand starting at position 3174 of SEQ ID NO: 1884765
aacuuucuugcggaagauu

SEQ ID NO: 2290369 - RNA, 19 nt, Artificial Sequence
  Description of Artificial Sequence: Synthetic oligonucleotide
  Antisense strand to SEQ ID NO: 2290368
aaucuuccgcaagaaaguu

SEQ ID NO: 2290370 - RNA, 19 nt, Artificial Sequence
  Description of Artificial Sequence: Synthetic oligonucleotide
  Sense strand starting at position 3495 of SEQ ID NO: 1884765
cugucuguuuaucuagaag

SEQ ID NO: 2290371 - RNA, 19 nt, Artificial Sequence
  Description of Artificial Sequence: Synthetic oligonucleotide
  Antisense strand to SEQ ID NO: 2290370
cuucuagauaaacagacag

SEQ ID NO: 2290372 - RNA, 19 nt, Artificial Sequence
  Description of Artificial Sequence: Synthetic oligonucleotide
  Sense strand starting at position 3498 of SEQ ID NO: 1884765
ucuguuuaucuagaagcca

SEQ ID NO: 2290373 - RNA, 19 nt, Artificial Sequence
  Description of Artificial Sequence: Synthetic oligonucleotide
  Antisense strand to SEQ ID NO: 2290372
uggcuucuagauaaacaga

SEQ ID NO: 2290374 - RNA, 19 nt, Artificial Sequence
  Description of Artificial Sequence: Synthetic oligonucleotide
  Sense strand starting at position 3539 of SEQ ID NO: 1884765
aacccacugggcuguuaua

SEQ ID NO: 2290375 - RNA, 19 nt, Artificial Sequence
  Description of Artificial Sequence: Synthetic oligonucleotide
  Antisense strand to SEQ ID NO: 2290374
uauaacagcccaguggguu

SEQ ID NO: 2290376 - RNA, 19 nt, Artificial Sequence
  Description of Artificial Sequence: Synthetic oligonucleotide
  Sense strand starting at position 3549 of SEQ ID NO: 1884765
gcuguuauacacuacacuu

SEQ ID NO: 2290377 - RNA, 19 nt, Artificial Sequence
  Description of Artificial Sequence: Synthetic oligonucleotide
  Antisense strand to SEQ ID NO: 2290376
aaguguaguguauaacagc

SEQ ID NO: 2290378 - RNA, 19 nt, Artificial Sequence
  Description of Artificial Sequence: Synthetic oligonucleotide
  Sense strand starting at position 3627 of SEQ ID NO: 1884765
ucggagugugaggagaauu

SEQ ID NO: 2290379 - RNA, 19 nt, Artificial Sequence
  Description of Artificial Sequence: Synthetic oligonucleotide
  Antisense strand to SEQ ID NO: 2290378
aauucuccucacacuccga

SEQ ID NO: 2290380 - RNA, 19 nt, Artificial Sequence
  Description of Artificial Sequence: Synthetic oligonucleotide
  Sense strand starting at position 3676 of SEQ ID NO: 1884765
aggauaacaagguguggua

SEQ ID NO: 2290381 - RNA, 19 nt, Artificial Sequence
  Description of Artificial Sequence: Synthetic oligonucleotide
  Antisense strand to SEQ ID NO: 2290380
uaccacaccuuguuauccu

SEQ ID NO: 2290382 - RNA, 19 nt, Artificial Sequence
  Description of Artificial Sequence: Synthetic oligonucleotide
  Sense strand starting at position 3689 of SEQ ID NO: 1884765
gugguaacaugacuaacau

SEQ ID NO: 2290383 - RNA, 19 nt, Artificial Sequence
  Description of Artificial Sequence: Synthetic oligonucleotide
  Antisense strand to SEQ ID NO: 2290382
auguuagucauguuaccac

SEQ ID NO: 2290384 - RNA, 19 nt, Artificial Sequence
  Description of Artificial Sequence: Synthetic oligonucleotide
  Sense strand starting at position 3935 of SEQ ID NO: 1884765
uccugaggcucuuuggaaa

SEQ ID NO: 2290385 - RNA, 19 nt, Artificial Sequence
  Description of Artificial Sequence: Synthetic oligonucleotide
  Antisense strand to SEQ ID NO: 2290384
uuuccaaagagccucagga

SEQ ID NO: 2290386 - RNA, 19 nt, Artificial Sequence
  Description of Artificial Sequence: Synthetic oligonucleotide
  Sense strand starting at position 394 of SEQ ID NO: 1884766
gggagauucucucugagua

SEQ ID NO: 2290387 - RNA, 19 nt, Artificial Sequence
  Description of Artificial Sequence: Synthetic oligonucleotide
  Antisense strand to SEQ ID NO: 2290386
uacucagagagaaucuccc

SEQ ID NO: 2290388 - RNA, 19 nt, Artificial Sequence
  Description of Artificial Sequence: Synthetic oligonucleotide
  Sense strand starting at position 395 of SEQ ID NO: 1884766
ggagauucucucugaguac

SEQ ID NO: 2290389 - RNA, 19 nt, Artificial Sequence
  Description of Artificial Sequence: Synthetic oligonucleotide
  Antisense strand to SEQ ID NO: 2290388
guacucagagagaaucucc

SEQ ID NO: 2290390 - RNA, 19 nt, Artificial Sequence
  Description of Artificial Sequence: Synthetic oligonucleotide
  Sense strand starting at position 769 of SEQ ID NO: 1884766
cacguuguccuagagagca

SEQ ID NO: 2290391 - RNA, 19 nt, Artificial Sequence
  Description of Artificial Sequence: Synthetic oligonucleotide
  Antisense strand to SEQ ID NO: 2290390
ugcucucuaggacaacgug

SEQ ID NO: 2290392 - RNA, 19 nt, Artificial Sequence
  Description of Artificial Sequence: Synthetic oligonucleotide
  Sense strand starting at position 981 of SEQ ID NO: 1884766
aaagaagaauuggaauagu

SEQ ID NO: 2290393 - RNA, 19 nt, Artificial Sequence
  Description of Artificial Sequence: Synthetic oligonucleotide
  Antisense strand to SEQ ID NO: 2290392
acuauuccaauucuucuuu

SEQ ID NO: 2290394 - RNA, 19 nt, Artificial Sequence
  Description of Artificial Sequence: Synthetic oligonucleotide
  Sense strand starting at position 1091 of SEQ ID NO: 1884766
aagggaguccaaugaccuu

SEQ ID NO: 2290395 - RNA, 19 nt, Artificial Sequence
  Description of Artificial Sequence: Synthetic oligonucleotide
  Antisense strand to SEQ ID NO: 2290394
aaggucauuggacucccuu

SEQ ID NO: 2290396 - RNA, 19 nt, Artificial Sequence
  Description of Artificial Sequence: Synthetic oligonucleotide
  Sense strand starting at position 1229 of SEQ ID NO: 1884766
caaagagacuacucguguu

SEQ ID NO: 2290397 - RNA, 19 nt, Artificial Sequence
  Description of Artificial Sequence: Synthetic oligonucleotide
  Antisense strand to SEQ ID NO: 2290396
aacacgaguagucucuuug

SEQ ID NO: 2290398 - RNA, 19 nt, Artificial Sequence
  Description of Artificial Sequence: Synthetic oligonucleotide
  Sense strand starting at position 1243 of SEQ ID NO: 1884766
guguucucucacuggagaa

SEQ ID NO: 2290399 - RNA, 19 nt, Artificial Sequence
  Description of Artificial Sequence: Synthetic oligonucleotide
  Antisense strand to SEQ ID NO: 2290398
uucuccagugagagaacac

SEQ ID NO: 2290400 - RNA, 19 nt, Artificial Sequence
  Description of Artificial Sequence: Synthetic oligonucleotide
  Sense strand starting at position 1245 of SEQ ID NO: 1884766
guucucucacuggagaacu

SEQ ID NO: 2290401 - RNA, 19 nt, Artificial Sequence
  Description of Artificial Sequence: Synthetic oligonucleotide
  Antisense strand to SEQ ID NO: 2290400
aguucuccagugagagaac

SEQ ID NO: 2290402 - RNA, 19 nt, Artificial Sequence
  Description of Artificial Sequence: Synthetic oligonucleotide
  Sense strand starting at position 1279 of SEQ ID NO: 1884766
gacgguugccuugaccaau

SEQ ID NO: 2290403 - RNA, 19 nt, Artificial Sequence
  Description of Artificial Sequence: Synthetic oligonucleotide
  Antisense strand to SEQ ID NO: 2290402
auuggucaaggcaaccguc

SEQ ID NO: 2290404 - RNA, 19 nt, Artificial Sequence
  Description of Artificial Sequence: Synthetic oligonucleotide
  Sense strand starting at position 1369 of SEQ ID NO: 1884766
uguggaggguugaagugau

SEQ ID NO: 2290405 - RNA, 19 nt, Artificial Sequence
  Description of Artificial Sequence: Synthetic oligonucleotide
  Antisense strand to SEQ ID NO: 2290404
aucacuucaacccuccaca

SEQ ID NO: 2290406 - RNA, 19 nt, Artificial Sequence
  Description of Artificial Sequence: Synthetic oligonucleotide
  Sense strand starting at position 1521 of SEQ ID NO: 1884766
uagucuugacgauggaaua

SEQ ID NO: 2290407 - RNA, 19 nt, Artificial Sequence
  Description of Artificial Sequence: Synthetic oligonucleotide
  Antisense strand to SEQ ID NO: 2290406
uauuccaucgucaagacua

SEQ ID NO: 2290408 - RNA, 19 nt, Artificial Sequence
  Description of Artificial Sequence: Synthetic oligonucleotide
  Sense strand starting at position 1540 of SEQ ID NO: 1884766
cuuuaagagucaguaauag

SEQ ID NO: 2290409 - RNA, 19 nt, Artificial Sequence
  Description of Artificial Sequence: Synthetic oligonucleotide
  Antisense strand to SEQ ID NO: 2290408
cuauuacugacucuuaaag

SEQ ID NO: 2290410 - RNA, 19 nt, Artificial Sequence
  Description of Artificial Sequence: Synthetic oligonucleotide
  Sense strand starting at position 1587 of SEQ ID NO: 1884766
ccuucuagaguuggcuaaa

SEQ ID NO: 2290411 - RNA, 19 nt, Artificial Sequence
  Description of Artificial Sequence: Synthetic oligonucleotide
  Antisense strand to SEQ ID NO: 2290410
uuuagccaacucuagaagg

SEQ ID NO: 2290412 - RNA, 19 nt, Artificial Sequence
  Description of Artificial Sequence: Synthetic oligonucleotide
  Sense strand starting at position 1588 of SEQ ID NO: 1884766
cuucuagaguuggcuaaac

SEQ ID NO: 2290413 - RNA, 19 nt, Artificial Sequence
  Description of Artificial Sequence: Synthetic oligonucleotide
  Antisense strand to SEQ ID NO: 2290412
guuuagccaacucuagaag

SEQ ID NO: 2290414 - RNA, 19 nt, Artificial Sequence
  Description of Artificial Sequence: Synthetic oligonucleotide
  Sense strand starting at position 1590 of SEQ ID NO: 1884766
ucuagaguuggcuaaacaa

SEQ ID NO: 2290415 - RNA, 19 nt, Artificial Sequence
  Description of Artificial Sequence: Synthetic oligonucleotide
  Antisense strand to SEQ ID NO: 2290414
uuguuuagccaacucuaga

SEQ ID NO: 2290416 - RNA, 19 nt, Artificial Sequence
  Description of Artificial Sequence: Synthetic oligonucleotide
  Sense strand starting at position 2069 of SEQ ID NO: 1884766
guugaaccaucuguguaga

SEQ ID NO: 2290417 - RNA, 19 nt, Artificial Sequence
  Description of Artificial Sequence: Synthetic oligonucleotide
  Antisense strand to SEQ ID NO: 2290416
ucuacacagaugguucaac

SEQ ID NO: 2290418 - RNA, 19 nt, Artificial Sequence
  Description of Artificial Sequence: Synthetic oligonucleotide
  Sense strand starting at position 2070 of SEQ ID NO: 1884766
uugaaccaucuguguagaa

SEQ ID NO: 2290419 - RNA, 19 nt, Artificial Sequence
  Description of Artificial Sequence: Synthetic oligonucleotide
  Antisense strand to SEQ ID NO: 2290418
uucuacacagaugguucaa

SEQ ID NO: 2290420 - RNA, 19 nt, Artificial Sequence
  Description of Artificial Sequence: Synthetic oligonucleotide
  Sense strand starting at position 2071 of SEQ ID NO: 1884766
ugaaccaucuguguagaau

SEQ ID NO: 2290421 - RNA, 19 nt, Artificial Sequence
  Description of Artificial Sequence: Synthetic oligonucleotide
  Antisense strand to SEQ ID NO: 2290420
auucuacacagaugguuca

SEQ ID NO: 2290422 - RNA, 19 nt, Artificial Sequence
  Description of Artificial Sequence: Synthetic oligonucleotide
  Sense strand starting at position 2072 of SEQ ID NO: 1884766
gaaccaucuguguagaauu

SEQ ID NO: 2290423 - RNA, 19 nt, Artificial Sequence
  Description of Artificial Sequence: Synthetic oligonucleotide
  Antisense strand to SEQ ID NO: 2290422
aauucuacacagaugguuc

SEQ ID NO: 2290424 - RNA, 19 nt, Artificial Sequence
  Description of Artificial Sequence: Synthetic oligonucleotide
  Sense strand starting at position 2170 of SEQ ID NO: 1884766
caaagcuuccaugguuaga

SEQ ID NO: 2290425 - RNA, 19 nt, Artificial Sequence
  Description of Artificial Sequence: Synthetic oligonucleotide
  Antisense strand to SEQ ID NO: 2290424
ucuaaccauggaagcuuug

SEQ ID NO: 2290426 - RNA, 19 nt, Artificial Sequence
  Description of Artificial Sequence: Synthetic oligonucleotide
  Sense strand starting at position 2219 of SEQ ID NO: 1884766
acccaaaccuguccuaagu

SEQ ID NO: 2290427 - RNA, 19 nt, Artificial Sequence
  Description of Artificial Sequence: Synthetic oligonucleotide
  Antisense strand to SEQ ID NO: 2290426
acuuaggacagguuugggu

SEQ ID NO: 2290428 - RNA, 19 nt, Artificial Sequence
  Description of Artificial Sequence: Synthetic oligonucleotide
  Sense strand starting at position 2290 of SEQ ID NO: 1884766
acaucuauguuaucuagag

SEQ ID NO: 2290429 - RNA, 19 nt, Artificial Sequence
  Description of Artificial Sequence: Synthetic oligonucleotide
  Antisense strand to SEQ ID NO: 2290428
cucuagauaacauagaugu

SEQ ID NO: 2290430 - RNA, 19 nt, Artificial Sequence
  Description of Artificial Sequence: Synthetic oligonucleotide
  Sense strand starting at position 2294 of SEQ ID NO: 1884766
cuauguuaucuagagggcu

SEQ ID NO: 2290431 - RNA, 19 nt, Artificial Sequence
  Description of Artificial Sequence: Synthetic oligonucleotide
  Antisense strand to SEQ ID NO: 2290430
agcccucuagauaacauag

SEQ ID NO: 2290432 - RNA, 19 nt, Artificial Sequence
  Description of Artificial Sequence: Synthetic oligonucleotide
  Sense strand starting at position 2473 of SEQ ID NO: 1884766
gcagguuuaaccuagguga

SEQ ID NO: 2290433 - RNA, 19 nt, Artificial Sequence
  Description of Artificial Sequence: Synthetic oligonucleotide
  Antisense strand to SEQ ID NO: 2290432
ucaccuagguuaaaccugc

SEQ ID NO: 2290434 - RNA, 19 nt, Artificial Sequence
  Description of Artificial Sequence: Synthetic oligonucleotide
  Sense strand starting at position 2475 of SEQ ID NO: 1884766
agguuuaaccuaggugauu

SEQ ID NO: 2290435 - RNA, 19 nt, Artificial Sequence
  Description of Artificial Sequence: Synthetic oligonucleotide
  Antisense strand to SEQ ID NO: 2290434
aaucaccuagguuaaaccu

SEQ ID NO: 2290436 - RNA, 19 nt, Artificial Sequence
  Description of Artificial Sequence: Synthetic oligonucleotide
  Sense strand starting at position 2565 of SEQ ID NO: 1884766
cccggacuccuuggaaugu

SEQ ID NO: 2290437 - RNA, 19 nt, Artificial Sequence
  Description of Artificial Sequence: Synthetic oligonucleotide
  Antisense strand to SEQ ID NO: 2290436
acauuccaaggaguccggg

SEQ ID NO: 2290438 - RNA, 19 nt, Artificial Sequence
  Description of Artificial Sequence: Synthetic oligonucleotide
  Sense strand starting at position 2616 of SEQ ID NO: 1884766
ucacccuucccugaguaga

SEQ ID NO: 2290439 - RNA, 19 nt, Artificial Sequence
  Description of Artificial Sequence: Synthetic oligonucleotide
  Antisense strand to SEQ ID NO: 2290438
ucuacucagggaaggguga

SEQ ID NO: 2290440 - RNA, 19 nt, Artificial Sequence
  Description of Artificial Sequence: Synthetic oligonucleotide
  Sense strand starting at position 2663 of SEQ ID NO: 1884766
uuugacaaagcaugaguau

SEQ ID NO: 2290441 - RNA, 19 nt, Artificial Sequence
  Description of Artificial Sequence: Synthetic oligonucleotide
  Antisense strand to SEQ ID NO: 2290440
auacucaugcuuugucaaa

SEQ ID NO: 2290442 - RNA, 19 nt, Artificial Sequence
  Description of Artificial Sequence: Synthetic oligonucleotide
  Sense strand starting at position 2664 of SEQ ID NO: 1884766
uugacaaagcaugaguauu

SEQ ID NO: 2290443 - RNA, 19 nt, Artificial Sequence
  Description of Artificial Sequence: Synthetic oligonucleotide
  Antisense strand to SEQ ID NO: 2290442
aauacucaugcuuugucaa

SEQ ID NO: 2290444 - RNA, 19 nt, Artificial Sequence
  Description of Artificial Sequence: Synthetic oligonucleotide
  Sense strand starting at position 2929 of SEQ ID NO: 1884766
aagauuaacugggacagaa

SEQ ID NO: 2290445 - RNA, 19 nt, Artificial Sequence
  Description of Artificial Sequence: Synthetic oligonucleotide
  Antisense strand to SEQ ID NO: 2290444
uucugucccaguuaaucuu

SEQ ID NO: 2290446 - RNA, 19 nt, Artificial Sequence
  Description of Artificial Sequence: Synthetic oligonucleotide
  Sense strand starting at position 2969 of SEQ ID NO: 1884766
uugccucuuccggaacuaa

SEQ ID NO: 2290447 - RNA, 19 nt, Artificial Sequence
  Description of Artificial Sequence: Synthetic oligonucleotide
  Antisense strand to SEQ ID NO: 2290446
uuaguuccggaagaggcaa

SEQ ID NO: 2290448 - RNA, 19 nt, Artificial Sequence
  Description of Artificial Sequence: Synthetic oligonucleotide
  Sense strand starting at position 2984 of SEQ ID NO: 1884766
cuaaaucaucuuuggcaga

SEQ ID NO: 2290449 - RNA, 19 nt, Artificial Sequence
  Description of Artificial Sequence: Synthetic oligonucleotide
  Antisense strand to SEQ ID NO: 2290448
ucugccaaagaugauuuag

SEQ ID NO: 2290450 - RNA, 19 nt, Artificial Sequence
  Description of Artificial Sequence: Synthetic oligonucleotide
  Sense strand starting at position 3338 of SEQ ID NO: 1884766
ggaguuaauccaugaaauc

SEQ ID NO: 2290451 - RNA, 19 nt, Artificial Sequence
  Description of Artificial Sequence: Synthetic oligonucleotide
  Antisense strand to SEQ ID NO: 2290450
gauuucauggauuaacucc

SEQ ID NO: 2290452 - RNA, 19 nt, Artificial Sequence
  Description of Artificial Sequence: Synthetic oligonucleotide
  Sense strand starting at position 3385 of SEQ ID NO: 1884766
cuuggauaagucgaucaac

SEQ ID NO: 2290453 - RNA, 19 nt, Artificial Sequence
  Description of Artificial Sequence: Synthetic oligonucleotide
  Antisense strand to SEQ ID NO: 2290452
guugaucgacuuauccaag

SEQ ID NO: 2290454 - RNA, 19 nt, Artificial Sequence
  Description of Artificial Sequence: Synthetic oligonucleotide
  Sense strand starting at position 3636 of SEQ ID NO: 1884766
agucaagguuugcugacaa

SEQ ID NO: 2290455 - RNA, 19 nt, Artificial Sequence
  Description of Artificial Sequence: Synthetic oligonucleotide
  Antisense strand to SEQ ID NO: 2290454
uugucagcaaaccuugacu

SEQ ID NO: 2290456 - RNA, 19 nt, Artificial Sequence
  Description of Artificial Sequence: Synthetic oligonucleotide
  Sense strand starting at position 3714 of SEQ ID NO: 1884766
uaugguuguuauucuggga

SEQ ID NO: 2290457 - RNA, 19 nt, Artificial Sequence
  Description of Artificial Sequence: Synthetic oligonucleotide
  Antisense strand to SEQ ID NO: 2290456
ucccagaauaacaaccaua

SEQ ID NO: 2290458 - RNA, 19 nt, Artificial Sequence
  Description of Artificial Sequence: Synthetic oligonucleotide
  Sense strand starting at position 3718 of SEQ ID NO: 1884766
guuguuauucugggagaga

SEQ ID NO: 2290459 - RNA, 19 nt, Artificial Sequence
  Description of Artificial Sequence: Synthetic oligonucleotide
  Antisense strand to SEQ ID NO: 2290458
ucucucccagaauaacaac

SEQ ID NO: 2290460 - RNA, 19 nt, Artificial Sequence
  Description of Artificial Sequence: Synthetic oligonucleotide
  Sense strand starting at position 3831 of SEQ ID NO: 1884766
gcaaucgauccugaacagu

SEQ ID NO: 2290461 - RNA, 19 nt, Artificial Sequence
  Description of Artificial Sequence: Synthetic oligonucleotide
  Antisense strand to SEQ ID NO: 2290460
acuguucaggaucgauugc

SEQ ID NO: 2290462 - RNA, 19 nt, Artificial Sequence
  Description of Artificial Sequence: Synthetic oligonucleotide
  Sense strand starting at position 3837 of SEQ ID NO: 1884766
gauccugaacagugucaga

SEQ ID NO: 2290463 - RNA, 19 nt, Artificial Sequence
  Description of Artificial Sequence: Synthetic oligonucleotide
  Antisense strand to SEQ ID NO: 2290462
ucugacacuguucaggauc

SEQ ID NO: 2290464 - RNA, 19 nt, Artificial Sequence
  Description of Artificial Sequence: Synthetic oligonucleotide
  Sense strand starting at position 3862 of SEQ ID NO: 1884766
gcgggugcuccgagaccaa

SEQ ID NO: 2290465 - RNA, 19 nt, Artificial Sequence
  Description of Artificial Sequence: Synthetic oligonucleotide
  Antisense strand to SEQ ID NO: 2290464
uuggucucggagcacccgc

SEQ ID NO: 2290466 - RNA, 19 nt, Artificial Sequence
  Description of Artificial Sequence: Synthetic oligonucleotide
  Sense strand starting at position 137 of SEQ ID NO: 1884767
gggcccucucauugagaga

SEQ ID NO: 2290467 - RNA, 19 nt, Artificial Sequence
  Description of Artificial Sequence: Synthetic oligonucleotide
  Antisense strand to SEQ ID NO: 2290466
ucucucaaugagagggccc

SEQ ID NO: 2290468 - RNA, 19 nt, Artificial Sequence
  Description of Artificial Sequence: Synthetic oligonucleotide
  Sense strand starting at position 142 of SEQ ID NO: 1884767
cucucauugagagaggugu

SEQ ID NO: 2290469 - RNA, 19 nt, Artificial Sequence
  Description of Artificial Sequence: Synthetic oligonucleotide
  Antisense strand to SEQ ID NO: 2290468
acaccucucucaaugagag

SEQ ID NO: 2290470 - RNA, 19 nt, Artificial Sequence
  Description of Artificial Sequence: Synthetic oligonucleotide
  Sense strand starting at position 146 of SEQ ID NO: 1884767
cauugagagagguguccuu

SEQ ID NO: 2290471 - RNA, 19 nt, Artificial Sequence
  Description of Artificial Sequence: Synthetic oligonucleotide
  Antisense strand to SEQ ID NO: 2290470
aaggacaccucucucaaug

SEQ ID NO: 2290472 - RNA, 19 nt, Artificial Sequence
  Description of Artificial Sequence: Synthetic oligonucleotide
  Sense strand starting at position 192 of SEQ ID NO: 1884767
uguauccaggaaugaguua

SEQ ID NO: 2290473 - RNA, 19 nt, Artificial Sequence
  Description of Artificial Sequence: Synthetic oligonucleotide
  Antisense strand to SEQ ID NO: 2290472
uaacucauuccuggauaca

SEQ ID NO: 2290474 - RNA, 19 nt, Artificial Sequence
  Description of Artificial Sequence: Synthetic oligonucleotide
  Sense strand starting at position 226 of SEQ ID NO: 1884767
gcaacuaaucucugaaagg

SEQ ID NO: 2290475 - RNA, 19 nt, Artificial Sequence
  Description of Artificial Sequence: Synthetic oligonucleotide
  Antisense strand to SEQ ID NO: 2290474
ccuuucagagauuaguugc

SEQ ID NO: 2290476 - RNA, 19 nt, Artificial Sequence
  Description of Artificial Sequence: Synthetic oligonucleotide
  Sense strand starting at position 355 of SEQ ID NO: 1884767
ccaugaauucuagggaagc

SEQ ID NO: 2290477 - RNA, 19 nt, Artificial Sequence
  Description of Artificial Sequence: Synthetic oligonucleotide
  Antisense strand to SEQ ID NO: 2290476
gcuucccuagaauucaugg

SEQ ID NO: 2290478 - RNA, 19 nt, Artificial Sequence
  Description of Artificial Sequence: Synthetic oligonucleotide
  Sense strand starting at position 385 of SEQ ID NO: 1884767
gcuggcauccaagagacaa

SEQ ID NO: 2290479 - RNA, 19 nt, Artificial Sequence
  Description of Artificial Sequence: Synthetic oligonucleotide
  Antisense strand to SEQ ID NO: 2290478
uugucucuuggaugccagc

SEQ ID NO: 2290480 - RNA, 19 nt, Artificial Sequence
  Description of Artificial Sequence: Synthetic oligonucleotide
  Sense strand starting at position 443 of SEQ ID NO: 1884767
uugacuuauuauuccagga

SEQ ID NO: 2290481 - RNA, 19 nt, Artificial Sequence
  Description of Artificial Sequence: Synthetic oligonucleotide
  Antisense strand to SEQ ID NO: 2290480
uccuggaauaauaagucaa

SEQ ID NO: 2290482 - RNA, 19 nt, Artificial Sequence
  Description of Artificial Sequence: Synthetic oligonucleotide
  Sense strand starting at position 447 of SEQ ID NO: 1884767
cuuauuauuccaggaaguc

SEQ ID NO: 2290483 - RNA, 19 nt, Artificial Sequence
  Description of Artificial Sequence: Synthetic oligonucleotide
  Antisense strand to SEQ ID NO: 2290482
gacuuccuggaauaauaag

SEQ ID NO: 2290484 - RNA, 19 nt, Artificial Sequence
  Description of Artificial Sequence: Synthetic oligonucleotide
  Sense strand starting at position 980 of SEQ ID NO: 1884767
aucuauuuccugugucacu

SEQ ID NO: 2290485 - RNA, 19 nt, Artificial Sequence
  Description of Artificial Sequence: Synthetic oligonucleotide
  Antisense strand to SEQ ID NO: 2290484
agugacacaggaaauagau

SEQ ID NO: 2290486 - RNA, 19 nt, Artificial Sequence
  Description of Artificial Sequence: Synthetic oligonucleotide
  Sense strand starting at position 1219 of SEQ ID NO: 1884767
gguugaaacuaauccaugu

SEQ ID NO: 2290487 - RNA, 19 nt, Artificial Sequence
  Description of Artificial Sequence: Synthetic oligonucleotide
  Antisense strand to SEQ ID NO: 2290486
acauggauuaguuucaacc

SEQ ID NO: 2290488 - RNA, 19 nt, Artificial Sequence
  Description of Artificial Sequence: Synthetic oligonucleotide
  Sense strand starting at position 1358 of SEQ ID NO: 1884767
ucauguccgaaagaaaguu

SEQ ID NO: 2290489 - RNA, 19 nt, Artificial Sequence
  Description of Artificial Sequence: Synthetic oligonucleotide
  Antisense strand to SEQ ID NO: 2290488
aacuuucuuucggacauga

SEQ ID NO: 2290490 - RNA, 19 nt, Artificial Sequence
  Description of Artificial Sequence: Synthetic oligonucleotide
  Sense strand starting at position 1467 of SEQ ID NO: 1884767
ucuagaguuccuugacauu

SEQ ID NO: 2290491 - RNA, 19 nt, Artificial Sequence
  Description of Artificial Sequence: Synthetic oligonucleotide
  Antisense strand to SEQ ID NO: 2290490
aaugucaaggaacucuaga

SEQ ID NO: 2290492 - RNA, 19 nt, Artificial Sequence
  Description of Artificial Sequence: Synthetic oligonucleotide
  Sense strand starting at position 1529 of SEQ ID NO: 1884767
cguaaaggccuuuggauuu

SEQ ID NO: 2290493 - RNA, 19 nt, Artificial Sequence
  Description of Artificial Sequence: Synthetic oligonucleotide
  Antisense strand to SEQ ID NO: 2290492
aaauccaaaggccuuuacg

SEQ ID NO: 2290494 - RNA, 19 nt, Artificial Sequence
  Description of Artificial Sequence: Synthetic oligonucleotide
  Sense strand starting at position 1618 of SEQ ID NO: 1884767
ccuugaagggaucagcuuu

SEQ ID NO: 2290495 - RNA, 19 nt, Artificial Sequence
  Description of Artificial Sequence: Synthetic oligonucleotide
  Antisense strand to SEQ ID NO: 2290494
aaagcugaucccuucaagg

SEQ ID NO: 2290496 - RNA, 19 nt, Artificial Sequence
  Description of Artificial Sequence: Synthetic oligonucleotide
  Sense strand starting at position 2170 of SEQ ID NO: 1884767
ggcccaugaucccuuagga

SEQ ID NO: 2290497 - RNA, 19 nt, Artificial Sequence
  Description of Artificial Sequence: Synthetic oligonucleotide
  Antisense strand to SEQ ID NO: 2290496
uccuaagggaucaugggcc

SEQ ID NO: 2290498 - RNA, 19 nt, Artificial Sequence
  Description of Artificial Sequence: Synthetic oligonucleotide
  Sense strand starting at position 2349 of SEQ ID NO: 1884767
aggcguuaagcguuaugca

SEQ ID NO: 2290499 - RNA, 19 nt, Artificial Sequence
  Description of Artificial Sequence: Synthetic oligonucleotide
  Antisense strand to SEQ ID NO: 2290498
ugcauaacgcuuaacgccu

SEQ ID NO: 2290500 - RNA, 19 nt, Artificial Sequence
  Description of Artificial Sequence: Synthetic oligonucleotide
  Sense strand starting at position 2357 of SEQ ID NO: 1884767
agcguuaugcacgcuuuau

SEQ ID NO: 2290501 - RNA, 19 nt, Artificial Sequence
  Description of Artificial Sequence: Synthetic oligonucleotide
  Antisense strand to SEQ ID NO: 2290500
auaaagcgugcauaacgcu

SEQ ID NO: 2290502 - RNA, 19 nt, Artificial Sequence
  Description of Artificial Sequence: Synthetic oligonucleotide
  Sense strand starting at position 2358 of SEQ ID NO: 1884767
gcguuaugcacgcuuuaua

SEQ ID NO: 2290503 - RNA, 19 nt, Artificial Sequence
  Description of Artificial Sequence: Synthetic oligonucleotide
  Antisense strand to SEQ ID NO: 2290502
uauaaagcgugcauaacgc

SEQ ID NO: 2290504 - RNA, 19 nt, Artificial Sequence
  Description of Artificial Sequence: Synthetic oligonucleotide
  Sense strand starting at position 2376 of SEQ ID NO: 1884767
agauguagaaagugaagua

SEQ ID NO: 2290505 - RNA, 19 nt, Artificial Sequence
  Description of Artificial Sequence: Synthetic oligonucleotide
  Antisense strand to SEQ ID NO: 2290504
uacuucacuuucuacaucu

SEQ ID NO: 2290506 - RNA, 19 nt, Artificial Sequence
  Description of Artificial Sequence: Synthetic oligonucleotide
  Sense strand starting at position 2383 of SEQ ID NO: 1884767
gaaagugaaguacgguuaa

SEQ ID NO: 2290507 - RNA, 19 nt, Artificial Sequence
  Description of Artificial Sequence: Synthetic oligonucleotide
  Antisense strand to SEQ ID NO: 2290506
uuaaccguacuucacuuuc

SEQ ID NO: 2290508 - RNA, 19 nt, Artificial Sequence
  Description of Artificial Sequence: Synthetic oligonucleotide
  Sense strand starting at position 2416 of SEQ ID NO: 1884767
gugucaaagcuaugaaaug

SEQ ID NO: 2290509 - RNA, 19 nt, Artificial Sequence
  Description of Artificial Sequence: Synthetic oligonucleotide
  Antisense strand to SEQ ID NO: 2290508
cauuucauagcuuugacac

SEQ ID NO: 2290510 - RNA, 19 nt, Artificial Sequence
  Description of Artificial Sequence: Synthetic oligonucleotide
  Sense strand starting at position 2838 of SEQ ID NO: 1884767
ggcuuaaauuaauuaggau

SEQ ID NO: 2290511 - RNA, 19 nt, Artificial Sequence
  Description of Artificial Sequence: Synthetic oligonucleotide
  Antisense strand to SEQ ID NO: 2290510
auccuaauuaauuuaagcc

SEQ ID NO: 2290512 - RNA, 19 nt, Artificial Sequence
  Description of Artificial Sequence: Synthetic oligonucleotide
  Sense strand starting at position 3012 of SEQ ID NO: 1884767
cuggcucugcauuaaagga

SEQ ID NO: 2290513 - RNA, 19 nt, Artificial Sequence
  Description of Artificial Sequence: Synthetic oligonucleotide
  Antisense strand to SEQ ID NO: 2290512
uccuuuaaugcagagccag

SEQ ID NO: 2290514 - RNA, 19 nt, Artificial Sequence
  Description of Artificial Sequence: Synthetic oligonucleotide
  Sense strand starting at position 3020 of SEQ ID NO: 1884767
gcauuaaaggauuacaguc

SEQ ID NO: 2290515 - RNA, 19 nt, Artificial Sequence
  Description of Artificial Sequence: Synthetic oligonucleotide
  Antisense strand to SEQ ID NO: 2290514
gacuguaauccuuuaaugc

SEQ ID NO: 2290516 - RNA, 19 nt, Artificial Sequence
  Description of Artificial Sequence: Synthetic oligonucleotide
  Sense strand starting at position 3242 of SEQ ID NO: 1884767
ugugucauuagucaggauu

SEQ ID NO: 2290517 - RNA, 19 nt, Artificial Sequence
  Description of Artificial Sequence: Synthetic oligonucleotide
  Antisense strand to SEQ ID NO: 2290516
aauccugacuaaugacaca

SEQ ID NO: 2290518 - RNA, 19 nt, Artificial Sequence
  Description of Artificial Sequence: Synthetic oligonucleotide
  Sense strand starting at position 3305 of SEQ ID NO: 1884767
ucuggaguggguuaagagu

SEQ ID NO: 2290519 - RNA, 19 nt, Artificial Sequence
  Description of Artificial Sequence: Synthetic oligonucleotide
  Antisense strand to SEQ ID NO: 2290518
acucuuaacccacuccaga

SEQ ID NO: 2290520 - RNA, 19 nt, Artificial Sequence
  Description of Artificial Sequence: Synthetic oligonucleotide
  Sense strand starting at position 3429 of SEQ ID NO: 1884767
uccauuucuugggugcuua

SEQ ID NO: 2290521 - RNA, 19 nt, Artificial Sequence
  Description of Artificial Sequence: Synthetic oligonucleotide
  Antisense strand to SEQ ID NO: 2290520
uaagcacccaagaaaugga

SEQ ID NO: 2290522 - RNA, 19 nt, Artificial Sequence
  Description of Artificial Sequence: Synthetic oligonucleotide
  Sense strand starting at position 3430 of SEQ ID NO: 1884767
ccauuucuugggugcuuau

SEQ ID NO: 2290523 - RNA, 19 nt, Artificial Sequence
  Description of Artificial Sequence: Synthetic oligonucleotide
  Antisense strand to SEQ ID NO: 2290522
auaagcacccaagaaaugg

SEQ ID NO: 2290524 - RNA, 19 nt, Artificial Sequence
  Description of Artificial Sequence: Synthetic oligonucleotide
  Sense strand starting at position 3485 of SEQ ID NO: 1884767
auacaacaggcuuauguaa

SEQ ID NO: 2290525 - RNA, 19 nt, Artificial Sequence
  Description of Artificial Sequence: Synthetic oligonucleotide
  Antisense strand to SEQ ID NO: 2290524
uuacauaagccuguuguau

SEQ ID NO: 2290526 - RNA, 19 nt, Artificial Sequence
  Description of Artificial Sequence: Synthetic oligonucleotide
  Sense strand starting at position 3555 of SEQ ID NO: 1884767
aaugacuugccuggaguca

SEQ ID NO: 2290527 - RNA, 19 nt, Artificial Sequence
  Description of Artificial Sequence: Synthetic oligonucleotide
  Antisense strand to SEQ ID NO: 2290526
ugacuccaggcaagucauu

SEQ ID NO: 2290528 - RNA, 19 nt, Artificial Sequence
  Description of Artificial Sequence: Synthetic oligonucleotide
  Sense strand starting at position 3556 of SEQ ID NO: 1884767
augacuugccuggagucau

SEQ ID NO: 2290529 - RNA, 19 nt, Artificial Sequence
  Description of Artificial Sequence: Synthetic oligonucleotide
  Antisense strand to SEQ ID NO: 2290528
augacuccaggcaagucau

SEQ ID NO: 2290530 - RNA, 19 nt, Artificial Sequence
  Description of Artificial Sequence: Synthetic oligonucleotide
  Sense strand starting at position 3568 of SEQ ID NO: 1884767
gagucauccagcuagugag

SEQ ID NO: 2290531 - RNA, 19 nt, Artificial Sequence
  Description of Artificial Sequence: Synthetic oligonucleotide
  Antisense strand to SEQ ID NO: 2290530
cucacuagcuggaugacuc

SEQ ID NO: 2290532 - RNA, 19 nt, Artificial Sequence
  Description of Artificial Sequence: Synthetic oligonucleotide
  Sense strand starting at position 3580 of SEQ ID NO: 1884767
uagugaguggcagaaucaa

SEQ ID NO: 2290533 - RNA, 19 nt, Artificial Sequence
  Description of Artificial Sequence: Synthetic oligonucleotide
  Antisense strand to SEQ ID NO: 2290532
uugauucugccacucacua

SEQ ID NO: 2290534 - RNA, 19 nt, Artificial Sequence
  Description of Artificial Sequence: Synthetic oligonucleotide
  Sense strand starting at position 3635 of SEQ ID NO: 1884767
gaaacucuggcaugugaua

SEQ ID NO: 2290535 - RNA, 19 nt, Artificial Sequence
  Description of Artificial Sequence: Synthetic oligonucleotide
  Antisense strand to SEQ ID NO: 2290534
uaucacaugccagaguuuc

SEQ ID NO: 2290536 - RNA, 19 nt, Artificial Sequence
  Description of Artificial Sequence: Synthetic oligonucleotide
  Sense strand starting at position 3712 of SEQ ID NO: 1884767
ugagcauuuaugugcucag

SEQ ID NO: 2290537 - RNA, 19 nt, Artificial Sequence
  Description of Artificial Sequence: Synthetic oligonucleotide
  Antisense strand to SEQ ID NO: 2290536
cugagcacauaaaugcuca

SEQ ID NO: 2290538 - RNA, 19 nt, Artificial Sequence
  Description of Artificial Sequence: Synthetic oligonucleotide
  Sense strand starting at position 3713 of SEQ ID NO: 1884767
gagcauuuaugugcucagu

SEQ ID NO: 2290539 - RNA, 19 nt, Artificial Sequence
  Description of Artificial Sequence: Synthetic oligonucleotide
  Antisense strand to SEQ ID NO: 2290538
acugagcacauaaaugcuc

SEQ ID NO: 2290540 - RNA, 19 nt, Artificial Sequence
  Description of Artificial Sequence: Synthetic oligonucleotide
  Sense strand starting at position 3716 of SEQ ID NO: 1884767
cauuuaugugcucagugca

SEQ ID NO: 2290541 - RNA, 19 nt, Artificial Sequence
  Description of Artificial Sequence: Synthetic oligonucleotide
  Antisense strand to SEQ ID NO: 2290540
ugcacugagcacauaaaug

SEQ ID NO: 2290542 - RNA, 19 nt, Artificial Sequence
  Description of Artificial Sequence: Synthetic oligonucleotide
  Sense strand starting at position 3769 of SEQ ID NO: 1884767
aaauauguggcagguacua

SEQ ID NO: 2290543 - RNA, 19 nt, Artificial Sequence
  Description of Artificial Sequence: Synthetic oligonucleotide
  Antisense strand to SEQ ID NO: 2290542
uaguaccugccacauauuu

SEQ ID NO: 2290544 - RNA, 19 nt, Artificial Sequence
  Description of Artificial Sequence: Synthetic oligonucleotide
  Sense strand starting at position 3949 of SEQ ID NO: 1884767
uuggauaguuuggcaagau

SEQ ID NO: 2290545 - RNA, 19 nt, Artificial Sequence
  Description of Artificial Sequence: Synthetic oligonucleotide
  Antisense strand to SEQ ID NO: 2290544
aucuugccaaacuauccaa

SEQ ID NO: 2290546 - RNA, 19 nt, Artificial Sequence
  Description of Artificial Sequence: Synthetic oligonucleotide
  Sense strand starting at position 137 of SEQ ID NO: 1884768
uaacuaggucuuggcacaa

SEQ ID NO: 2290547 - RNA, 19 nt, Artificial Sequence
  Description of Artificial Sequence: Synthetic oligonucleotide
  Antisense strand to SEQ ID NO: 2290546
uugugccaagaccuaguua

SEQ ID NO: 2290548 - RNA, 19 nt, Artificial Sequence
  Description of Artificial Sequence: Synthetic oligonucleotide
  Sense strand starting at position 210 of SEQ ID NO: 1884768
gcagaagagaaacguaaua

SEQ ID NO: 2290549 - RNA, 19 nt, Artificial Sequence
  Description of Artificial Sequence: Synthetic oligonucleotide
  Antisense strand to SEQ ID NO: 2290548
uauuacguuucucuucugc

SEQ ID NO: 2290550 - RNA, 19 nt, Artificial Sequence
  Description of Artificial Sequence: Synthetic oligonucleotide
  Sense strand starting at position 239 of SEQ ID NO: 1884768
acgugcagucuguuucaca

SEQ ID NO: 2290551 - RNA, 19 nt, Artificial Sequence
  Description of Artificial Sequence: Synthetic oligonucleotide
  Antisense strand to SEQ ID NO: 2290550
ugugaaacagacugcacgu

SEQ ID NO: 2290552 - RNA, 19 nt, Artificial Sequence
  Description of Artificial Sequence: Synthetic oligonucleotide
  Sense strand starting at position 421 of SEQ ID NO: 1884768
cuaguucuacuacgguuaa

SEQ ID NO: 2290553 - RNA, 19 nt, Artificial Sequence
  Description of Artificial Sequence: Synthetic oligonucleotide
  Antisense strand to SEQ ID NO: 2290552
uuaaccguaguagaacuag

SEQ ID NO: 2290554 - RNA, 19 nt, Artificial Sequence
  Description of Artificial Sequence: Synthetic oligonucleotide
  Sense strand starting at position 457 of SEQ ID NO: 1884768
gcaguuauacugcaauauc

SEQ ID NO: 2290555 - RNA, 19 nt, Artificial Sequence
  Description of Artificial Sequence: Synthetic oligonucleotide
  Antisense strand to SEQ ID NO: 2290554
gauauugcaguauaacugc

SEQ ID NO: 2290556 - RNA, 19 nt, Artificial Sequence
  Description of Artificial Sequence: Synthetic oligonucleotide
  Sense strand starting at position 612 of SEQ ID NO: 1884768
ugcauaauguaacuaugaa

SEQ ID NO: 2290557 - RNA, 19 nt, Artificial Sequence
  Description of Artificial Sequence: Synthetic oligonucleotide
  Antisense strand to SEQ ID NO: 2290556
uucauaguuacauuaugca

SEQ ID NO: 2290558 - RNA, 19 nt, Artificial Sequence
  Description of Artificial Sequence: Synthetic oligonucleotide
  Sense strand starting at position 691 of SEQ ID NO: 1884768
guaaccugcuuguuuaaag

SEQ ID NO: 2290559 - RNA, 19 nt, Artificial Sequence
  Description of Artificial Sequence: Synthetic oligonucleotide
  Antisense strand to SEQ ID NO: 2290558
cuuuaaacaagcagguuac

SEQ ID NO: 2290560 - RNA, 19 nt, Artificial Sequence
  Description of Artificial Sequence: Synthetic oligonucleotide
  Sense strand starting at position 717 of SEQ ID NO: 1884768
accuaagguuaguuaaauu

SEQ ID NO: 2290561 - RNA, 19 nt, Artificial Sequence
  Description of Artificial Sequence: Synthetic oligonucleotide
  Antisense strand to SEQ ID NO: 2290560
aauuuaacuaaccuuaggu

SEQ ID NO: 2290562 - RNA, 19 nt, Artificial Sequence
  Description of Artificial Sequence: Synthetic oligonucleotide
  Sense strand starting at position 749 of SEQ ID NO: 1884768
accuaugagcucugaaaga

SEQ ID NO: 2290563 - RNA, 19 nt, Artificial Sequence
  Description of Artificial Sequence: Synthetic oligonucleotide
  Antisense strand to SEQ ID NO: 2290562
ucuuucagagcucauaggu

SEQ ID NO: 2290564 - RNA, 19 nt, Artificial Sequence
  Description of Artificial Sequence: Synthetic oligonucleotide
  Sense strand starting at position 855 of SEQ ID NO: 1884768
uuguguuuaaggcauauga

SEQ ID NO: 2290565 - RNA, 19 nt, Artificial Sequence
  Description of Artificial Sequence: Synthetic oligonucleotide
  Antisense strand to SEQ ID NO: 2290564
ucauaugccuuaaacacaa

SEQ ID NO: 2290566 - RNA, 19 nt, Artificial Sequence
  Description of Artificial Sequence: Synthetic oligonucleotide
  Sense strand starting at position 857 of SEQ ID NO: 1884768
guguuuaaggcauaugagu

SEQ ID NO: 2290567 - RNA, 19 nt, Artificial Sequence
  Description of Artificial Sequence: Synthetic oligonucleotide
  Antisense strand to SEQ ID NO: 2290566
acucauaugccuuaaacac

SEQ ID NO: 2290568 - RNA, 19 nt, Artificial Sequence
  Description of Artificial Sequence: Synthetic oligonucleotide
  Sense strand starting at position 891 of SEQ ID NO: 1884768
gucucauacgcuugggaag

SEQ ID NO: 2290569 - RNA, 19 nt, Artificial Sequence
  Description of Artificial Sequence: Synthetic oligonucleotide
  Antisense strand to SEQ ID NO: 2290568
cuucccaagcguaugagac

SEQ ID NO: 2290570 - RNA, 19 nt, Artificial Sequence
  Description of Artificial Sequence: Synthetic oligonucleotide
  Sense strand starting at position 1025 of SEQ ID NO: 1884768
cucugaauggccugaaggu

SEQ ID NO: 2290571 - RNA, 19 nt, Artificial Sequence
  Description of Artificial Sequence: Synthetic oligonucleotide
  Antisense strand to SEQ ID NO: 2290570
accuucaggccauucagag

SEQ ID NO: 2290572 - RNA, 19 nt, Artificial Sequence
  Description of Artificial Sequence: Synthetic oligonucleotide
  Sense strand starting at position 1034 of SEQ ID NO: 1884768
gccugaaggugacugguaa

SEQ ID NO: 2290573 - RNA, 19 nt, Artificial Sequence
  Description of Artificial Sequence: Synthetic oligonucleotide
  Antisense strand to SEQ ID NO: 2290572
uuaccagucaccuucaggc

SEQ ID NO: 2290574 - RNA, 19 nt, Artificial Sequence
  Description of Artificial Sequence: Synthetic oligonucleotide
  Sense strand starting at position 1151 of SEQ ID NO: 1884768
ggcaauaacuucccuggaa

SEQ ID NO: 2290575 - RNA, 19 nt, Artificial Sequence
  Description of Artificial Sequence: Synthetic oligonucleotide
  Antisense strand to SEQ ID NO: 2290574
uuccagggaaguuauugcc

SEQ ID NO: 2290576 - RNA, 19 nt, Artificial Sequence
  Description of Artificial Sequence: Synthetic oligonucleotide
  Sense strand starting at position 1152 of SEQ ID NO: 1884768
gcaauaacuucccuggaaa

SEQ ID NO: 2290577 - RNA, 19 nt, Artificial Sequence
  Description of Artificial Sequence: Synthetic oligonucleotide
  Antisense strand to SEQ ID NO: 2290576
uuuccagggaaguuauugc

SEQ ID NO: 2290578 - RNA, 19 nt, Artificial Sequence
  Description of Artificial Sequence: Synthetic oligonucleotide
  Sense strand starting at position 1217 of SEQ ID NO: 1884768
acccaaugaugcuugagau

SEQ ID NO: 2290579 - RNA, 19 nt, Artificial Sequence
  Description of Artificial Sequence: Synthetic oligonucleotide
  Antisense strand to SEQ ID NO: 2290578
aucucaagcaucauugggu

SEQ ID NO: 2290580 - RNA, 19 nt, Artificial Sequence
  Description of Artificial Sequence: Synthetic oligonucleotide
  Sense strand starting at position 1218 of SEQ ID NO: 1884768
cccaaugaugcuugagaua

SEQ ID NO: 2290581 - RNA, 19 nt, Artificial Sequence
  Description of Artificial Sequence: Synthetic oligonucleotide
  Antisense strand to SEQ ID NO: 2290580
uaucucaagcaucauuggg

SEQ ID NO: 2290582 - RNA, 19 nt, Artificial Sequence
  Description of Artificial Sequence: Synthetic oligonucleotide
  Sense strand starting at position 1223 of SEQ ID NO: 1884768
ugaugcuugagauacuugu

SEQ ID NO: 2290583 - RNA, 19 nt, Artificial Sequence
  Description of Artificial Sequence: Synthetic oligonucleotide
  Antisense strand to SEQ ID NO: 2290582
acaaguaucucaagcauca

SEQ ID NO: 2290584 - RNA, 19 nt, Artificial Sequence
  Description of Artificial Sequence: Synthetic oligonucleotide
  Sense strand starting at position 1271 of SEQ ID NO: 1884768
gccgcuagccaauaaggau

SEQ ID NO: 2290585 - RNA, 19 nt, Artificial Sequence
  Description of Artificial Sequence: Synthetic oligonucleotide
  Antisense strand to SEQ ID NO: 2290584
auccuuauuggcuagcggc

SEQ ID NO: 2290586 - RNA, 19 nt, Artificial Sequence
  Description of Artificial Sequence: Synthetic oligonucleotide
  Sense strand starting at position 1320 of SEQ ID NO: 1884768
ggaggauguuuccagaaau

SEQ ID NO: 2290587 - RNA, 19 nt, Artificial Sequence
  Description of Artificial Sequence: Synthetic oligonucleotide
  Antisense strand to SEQ ID NO: 2290586
auuucuggaaacauccucc

SEQ ID NO: 2290588 - RNA, 19 nt, Artificial Sequence
  Description of Artificial Sequence: Synthetic oligonucleotide
  Sense strand starting at position 1712 of SEQ ID NO: 1884768
cucaguuguuugguuuaga

SEQ ID NO: 2290589 - RNA, 19 nt, Artificial Sequence
  Description of Artificial Sequence: Synthetic oligonucleotide
  Antisense strand to SEQ ID NO: 2290588
ucuaaaccaaacaacugag

SEQ ID NO: 2290590 - RNA, 19 nt, Artificial Sequence
  Description of Artificial Sequence: Synthetic oligonucleotide
  Sense strand starting at position 1713 of SEQ ID NO: 1884768
ucaguuguuugguuuagac

SEQ ID NO: 2290591 - RNA, 19 nt, Artificial Sequence
  Description of Artificial Sequence: Synthetic oligonucleotide
  Antisense strand to SEQ ID NO: 2290590
gucuaaaccaaacaacuga

SEQ ID NO: 2290592 - RNA, 19 nt, Artificial Sequence
  Description of Artificial Sequence: Synthetic oligonucleotide
  Sense strand starting at position 1715 of SEQ ID NO: 1884768
aguuguuugguuuagacua

SEQ ID NO: 2290593 - RNA, 19 nt, Artificial Sequence
  Description of Artificial Sequence: Synthetic oligonucleotide
  Antisense strand to SEQ ID NO: 2290592
uagucuaaaccaaacaacu

SEQ ID NO: 2290594 - RNA, 19 nt, Artificial Sequence
  Description of Artificial Sequence: Synthetic oligonucleotide
  Sense strand starting at position 1758 of SEQ ID NO: 1884768
aguuuaagagcucauucua

SEQ ID NO: 2290595 - RNA, 19 nt, Artificial Sequence
  Description of Artificial Sequence: Synthetic oligonucleotide
  Antisense strand to SEQ ID NO: 2290594
uagaaugagcucuuaaacu

SEQ ID NO: 2290596 - RNA, 19 nt, Artificial Sequence
  Description of Artificial Sequence: Synthetic oligonucleotide
  Sense strand starting at position 2804 of SEQ ID NO: 1884768
ccagauaagccaugcuuga

SEQ ID NO: 2290597 - RNA, 19 nt, Artificial Sequence
  Description of Artificial Sequence: Synthetic oligonucleotide
  Antisense strand to SEQ ID NO: 2290596
ucaagcauggcuuaucugg

SEQ ID NO: 2290598 - RNA, 19 nt, Artificial Sequence
  Description of Artificial Sequence: Synthetic oligonucleotide
  Sense strand starting at position 2842 of SEQ ID NO: 1884768
guagucgugaaaugcagau

SEQ ID NO: 2290599 - RNA, 19 nt, Artificial Sequence
  Description of Artificial Sequence: Synthetic oligonucleotide
  Antisense strand to SEQ ID NO: 2290598
aucugcauuucacgacuac

SEQ ID NO: 2290600 - RNA, 19 nt, Artificial Sequence
  Description of Artificial Sequence: Synthetic oligonucleotide
  Sense strand starting at position 2954 of SEQ ID NO: 1884768
ccaaaucagcaucgccaua

SEQ ID NO: 2290601 - RNA, 19 nt, Artificial Sequence
  Description of Artificial Sequence: Synthetic oligonucleotide
  Antisense strand to SEQ ID NO: 2290600
uauggcgaugcugauuugg

SEQ ID NO: 2290602 - RNA, 19 nt, Artificial Sequence
  Description of Artificial Sequence: Synthetic oligonucleotide
  Sense strand starting at position 2989 of SEQ ID NO: 1884768
cuucgcaaccugcaauaau

SEQ ID NO: 2290603 - RNA, 19 nt, Artificial Sequence
  Description of Artificial Sequence: Synthetic oligonucleotide
  Antisense strand to SEQ ID NO: 2290602
auuauugcagguugcgaag

SEQ ID NO: 2290604 - RNA, 19 nt, Artificial Sequence
  Description of Artificial Sequence: Synthetic oligonucleotide
  Sense strand starting at position 3001 of SEQ ID NO: 1884768
caauaauaggauugaguuu

SEQ ID NO: 2290605 - RNA, 19 nt, Artificial Sequence
  Description of Artificial Sequence: Synthetic oligonucleotide
  Antisense strand to SEQ ID NO: 2290604
aaacucaauccuauuauug

SEQ ID NO: 2290606 - RNA, 19 nt, Artificial Sequence
  Description of Artificial Sequence: Synthetic oligonucleotide
  Sense strand starting at position 3028 of SEQ ID NO: 1884768
cguauuauuuguucaugug

SEQ ID NO: 2290607 - RNA, 19 nt, Artificial Sequence
  Description of Artificial Sequence: Synthetic oligonucleotide
  Antisense strand to SEQ ID NO: 2290606
cacaugaacaaauaauacg

SEQ ID NO: 2290608 - RNA, 19 nt, Artificial Sequence
  Description of Artificial Sequence: Synthetic oligonucleotide
  Sense strand starting at position 3210 of SEQ ID NO: 1884768
cccaacauguguuuacuua

SEQ ID NO: 2290609 - RNA, 19 nt, Artificial Sequence
  Description of Artificial Sequence: Synthetic oligonucleotide
  Antisense strand to SEQ ID NO: 2290608
uaaguaaacacauguuggg

SEQ ID NO: 2290610 - RNA, 19 nt, Artificial Sequence
  Description of Artificial Sequence: Synthetic oligonucleotide
  Sense strand starting at position 3211 of SEQ ID NO: 1884768
ccaacauguguuuacuuau

SEQ ID NO: 2290611 - RNA, 19 nt, Artificial Sequence
  Description of Artificial Sequence: Synthetic oligonucleotide
  Antisense strand to SEQ ID NO: 2290610
auaaguaaacacauguugg

SEQ ID NO: 2290612 - RNA, 19 nt, Artificial Sequence
  Description of Artificial Sequence: Synthetic oligonucleotide
  Sense strand starting at position 3214 of SEQ ID NO: 1884768
acauguguuuacuuauuac

SEQ ID NO: 2290613 - RNA, 19 nt, Artificial Sequence
  Description of Artificial Sequence: Synthetic oligonucleotide
  Antisense strand to SEQ ID NO: 2290612
guaauaaguaaacacaugu

SEQ ID NO: 2290614 - RNA, 19 nt, Artificial Sequence
  Description of Artificial Sequence: Synthetic oligonucleotide
  Sense strand starting at position 3478 of SEQ ID NO: 1884768
cucugaaucccauaugugu

SEQ ID NO: 2290615 - RNA, 19 nt, Artificial Sequence
  Description of Artificial Sequence: Synthetic oligonucleotide
  Antisense strand to SEQ ID NO: 2290614
acacauaugggauucagag

SEQ ID NO: 2290616 - RNA, 19 nt, Artificial Sequence
  Description of Artificial Sequence: Synthetic oligonucleotide
  Sense strand starting at position 3492 of SEQ ID NO: 1884768
uguguucuucagggucaga

SEQ ID NO: 2290617 - RNA, 19 nt, Artificial Sequence
  Description of Artificial Sequence: Synthetic oligonucleotide
  Antisense strand to SEQ ID NO: 2290616
ucugacccugaagaacaca

SEQ ID NO: 2290618 - RNA, 19 nt, Artificial Sequence
  Description of Artificial Sequence: Synthetic oligonucleotide
  Sense strand starting at position 3495 of SEQ ID NO: 1884768
guucuucagggucagagaa

SEQ ID NO: 2290619 - RNA, 19 nt, Artificial Sequence
  Description of Artificial Sequence: Synthetic oligonucleotide
  Antisense strand to SEQ ID NO: 2290618
uucucugacccugaagaac

SEQ ID NO: 2290620 - RNA, 19 nt, Artificial Sequence
  Description of Artificial Sequence: Synthetic oligonucleotide
  Sense strand starting at position 3654 of SEQ ID NO: 1884768
uuggaucaaugaguugaca

SEQ ID NO: 2290621 - RNA, 19 nt, Artificial Sequence
  Description of Artificial Sequence: Synthetic oligonucleotide
  Antisense strand to SEQ ID NO: 2290620
ugucaacucauugauccaa

SEQ ID NO: 2290622 - RNA, 19 nt, Artificial Sequence
  Description of Artificial Sequence: Synthetic oligonucleotide
  Sense strand starting at position 3696 of SEQ ID NO: 1884768
uguaguccgagcuaaugau

SEQ ID NO: 2290623 - RNA, 19 nt, Artificial Sequence
  Description of Artificial Sequence: Synthetic oligonucleotide
  Antisense strand to SEQ ID NO: 2290622
aucauuagcucggacuaca

SEQ ID NO: 2290624 - RNA, 19 nt, Artificial Sequence
  Description of Artificial Sequence: Synthetic oligonucleotide
  Sense strand starting at position 3859 of SEQ ID NO: 1884768
cagcguggugaauauccau

SEQ ID NO: 2290625 - RNA, 19 nt, Artificial Sequence
  Description of Artificial Sequence: Synthetic oligonucleotide
  Antisense strand to SEQ ID NO: 2290624
auggauauucaccacgcug

SEQ ID NO: 2290626 - RNA, 19 nt, Artificial Sequence
  Description of Artificial Sequence: Synthetic oligonucleotide
  Sense strand starting at position 288 of SEQ ID NO: 1884769
cccauuuacuacggaauuu

SEQ ID NO: 2290627 - RNA, 19 nt, Artificial Sequence
  Description of Artificial Sequence: Synthetic oligonucleotide
  Antisense strand to SEQ ID NO: 2290626
aaauuccguaguaaauggg

SEQ ID NO: 2290628 - RNA, 19 nt, Artificial Sequence
  Description of Artificial Sequence: Synthetic oligonucleotide
  Sense strand starting at position 336 of SEQ ID NO: 1884769
ugugacgcccuguuguaau

SEQ ID NO: 2290629 - RNA, 19 nt, Artificial Sequence
  Description of Artificial Sequence: Synthetic oligonucleotide
  Antisense strand to SEQ ID NO: 2290628
auuacaacagggcgucaca

SEQ ID NO: 2290630 - RNA, 19 nt, Artificial Sequence
  Description of Artificial Sequence: Synthetic oligonucleotide
  Sense strand starting at position 432 of SEQ ID NO: 1884769
augaauaacgccuaguauu

SEQ ID NO: 2290631 - RNA, 19 nt, Artificial Sequence
  Description of Artificial Sequence: Synthetic oligonucleotide
  Antisense strand to SEQ ID NO: 2290630
aauacuaggcguuauucau

SEQ ID NO: 2290632 - RNA, 19 nt, Artificial Sequence
  Description of Artificial Sequence: Synthetic oligonucleotide
  Sense strand starting at position 464 of SEQ ID NO: 1884769
cgaggacuguagucaauaa

SEQ ID NO: 2290633 - RNA, 19 nt, Artificial Sequence
  Description of Artificial Sequence: Synthetic oligonucleotide
  Antisense strand to SEQ ID NO: 2290632
uuauugacuacaguccucg

SEQ ID NO: 2290634 - RNA, 19 nt, Artificial Sequence
  Description of Artificial Sequence: Synthetic oligonucleotide
  Sense strand starting at position 578 of SEQ ID NO: 1884769
cugggagcccuguagaaga

SEQ ID NO: 2290635 - RNA, 19 nt, Artificial Sequence
  Description of Artificial Sequence: Synthetic oligonucleotide
  Antisense strand to SEQ ID NO: 2290634
ucuucuacagggcucccag

SEQ ID NO: 2290636 - RNA, 19 nt, Artificial Sequence
  Description of Artificial Sequence: Synthetic oligonucleotide
  Sense strand starting at position 992 of SEQ ID NO: 1884769
aaaugaagcuuggcagaau

SEQ ID NO: 2290637 - RNA, 19 nt, Artificial Sequence
  Description of Artificial Sequence: Synthetic oligonucleotide
  Antisense strand to SEQ ID NO: 2290636
auucugccaagcuucauuu

SEQ ID NO: 2290638 - RNA, 19 nt, Artificial Sequence
  Description of Artificial Sequence: Synthetic oligonucleotide
  Sense strand starting at position 995 of SEQ ID NO: 1884769
ugaagcuuggcagaaucau

SEQ ID NO: 2290639 - RNA, 19 nt, Artificial Sequence
  Description of Artificial Sequence: Synthetic oligonucleotide
  Antisense strand to SEQ ID NO: 2290638
augauucugccaagcuuca

SEQ ID NO: 2290640 - RNA, 19 nt, Artificial Sequence
  Description of Artificial Sequence: Synthetic oligonucleotide
  Sense strand starting at position 1001 of SEQ ID NO: 1884769
uuggcagaaucauaauuua

SEQ ID NO: 2290641 - RNA, 19 nt, Artificial Sequence
  Description of Artificial Sequence: Synthetic oligonucleotide
  Antisense strand to SEQ ID NO: 2290640
uaaauuaugauucugccaa

SEQ ID NO: 2290642 - RNA, 19 nt, Artificial Sequence
  Description of Artificial Sequence: Synthetic oligonucleotide
  Sense strand starting at position 1298 of SEQ ID NO: 1884769
gaguuagggcucugaacac

SEQ ID NO: 2290643 - RNA, 19 nt, Artificial Sequence
  Description of Artificial Sequence: Synthetic oligonucleotide
  Antisense strand to SEQ ID NO: 2290642
guguucagagcccuaacuc

SEQ ID NO: 2290644 - RNA, 19 nt, Artificial Sequence
  Description of Artificial Sequence: Synthetic oligonucleotide
  Sense strand starting at position 1321 of SEQ ID NO: 1884769
ucuuaaagcccugagcuau

SEQ ID NO: 2290645 - RNA, 19 nt, Artificial Sequence
  Description of Artificial Sequence: Synthetic oligonucleotide
  Antisense strand to SEQ ID NO: 2290644
auagcucagggcuuuaaga

SEQ ID NO: 2290646 - RNA, 19 nt, Artificial Sequence
  Description of Artificial Sequence: Synthetic oligonucleotide
  Sense strand starting at position 1345 of SEQ ID NO: 1884769
cagcuuugaacgggacaga

SEQ ID NO: 2290647 - RNA, 19 nt, Artificial Sequence
  Description of Artificial Sequence: Synthetic oligonucleotide
  Antisense strand to SEQ ID NO: 2290646
ucugucccguucaaagcug

SEQ ID NO: 2290648 - RNA, 19 nt, Artificial Sequence
  Description of Artificial Sequence: Synthetic oligonucleotide
  Sense strand starting at position 1559 of SEQ ID NO: 1884769
ccauuuggugccuguugaa

SEQ ID NO: 2290649 - RNA, 19 nt, Artificial Sequence
  Description of Artificial Sequence: Synthetic oligonucleotide
  Antisense strand to SEQ ID NO: 2290648
uucaacaggcaccaaaugg

SEQ ID NO: 2290650 - RNA, 19 nt, Artificial Sequence
  Description of Artificial Sequence: Synthetic oligonucleotide
  Sense strand starting at position 1574 of SEQ ID NO: 1884769
ugaaucagaaucuguggua

SEQ ID NO: 2290651 - RNA, 19 nt, Artificial Sequence
  Description of Artificial Sequence: Synthetic oligonucleotide
  Antisense strand to SEQ ID NO: 2290650
uaccacagauucugauuca

SEQ ID NO: 2290652 - RNA, 19 nt, Artificial Sequence
  Description of Artificial Sequence: Synthetic oligonucleotide
  Sense strand starting at position 1575 of SEQ ID NO: 1884769
gaaucagaaucugugguau

SEQ ID NO: 2290653 - RNA, 19 nt, Artificial Sequence
  Description of Artificial Sequence: Synthetic oligonucleotide
  Antisense strand to SEQ ID NO: 2290652
auaccacagauucugauuc

SEQ ID NO: 2290654 - RNA, 19 nt, Artificial Sequence
  Description of Artificial Sequence: Synthetic oligonucleotide
  Sense strand starting at position 1633 of SEQ ID NO: 1884769
gagugucaagcacaguaaa

SEQ ID NO: 2290655 - RNA, 19 nt, Artificial Sequence
  Description of Artificial Sequence: Synthetic oligonucleotide
  Antisense strand to SEQ ID NO: 2290654
uuuacugugcuugacacuc

SEQ ID NO: 2290656 - RNA, 19 nt, Artificial Sequence
  Description of Artificial Sequence: Synthetic oligonucleotide
  Sense strand starting at position 1636 of SEQ ID NO: 1884769
ugucaagcacaguaaaguu

SEQ ID NO: 2290657 - RNA, 19 nt, Artificial Sequence
  Description of Artificial Sequence: Synthetic oligonucleotide
  Antisense strand to SEQ ID NO: 2290656
aacuuuacugugcuugaca

SEQ ID NO: 2290658 - RNA, 19 nt, Artificial Sequence
  Description of Artificial Sequence: Synthetic oligonucleotide
  Sense strand starting at position 2026 of SEQ ID NO: 1884769
auaagaggagcuuguacuu

SEQ ID NO: 2290659 - RNA, 19 nt, Artificial Sequence
  Description of Artificial Sequence: Synthetic oligonucleotide
  Antisense strand to SEQ ID NO: 2290658
aaguacaagcuccucuuau

SEQ ID NO: 2290660 - RNA, 19 nt, Artificial Sequence
  Description of Artificial Sequence: Synthetic oligonucleotide
  Sense strand starting at position 2062 of SEQ ID NO: 1884769
aucccuuucugguugggaa

SEQ ID NO: 2290661 - RNA, 19 nt, Artificial Sequence
  Description of Artificial Sequence: Synthetic oligonucleotide
  Antisense strand to SEQ ID NO: 2290660
uucccaaccagaaagggau

SEQ ID NO: 2290662 - RNA, 19 nt, Artificial Sequence
  Description of Artificial Sequence: Synthetic oligonucleotide
  Sense strand starting at position 2063 of SEQ ID NO: 1884769
ucccuuucugguugggaaa

SEQ ID NO: 2290663 - RNA, 19 nt, Artificial Sequence
  Description of Artificial Sequence: Synthetic oligonucleotide
  Antisense strand to SEQ ID NO: 2290662
uuucccaaccagaaaggga

SEQ ID NO: 2290664 - RNA, 19 nt, Artificial Sequence
  Description of Artificial Sequence: Synthetic oligonucleotide
  Sense strand starting at position 2064 of SEQ ID NO: 1884769
cccuuucugguugggaaau

SEQ ID NO: 2290665 - RNA, 19 nt, Artificial Sequence
  Description of Artificial Sequence: Synthetic oligonucleotide
  Antisense strand to SEQ ID NO: 2290664
auuucccaaccagaaaggg

SEQ ID NO: 2290666 - RNA, 19 nt, Artificial Sequence
  Description of Artificial Sequence: Synthetic oligonucleotide
  Sense strand starting at position 2188 of SEQ ID NO: 1884769
gguccugagauugguagga

SEQ ID NO: 2290667 - RNA, 19 nt, Artificial Sequence
  Description of Artificial Sequence: Synthetic oligonucleotide
  Antisense strand to SEQ ID NO: 2290666
uccuaccaaucucaggacc

SEQ ID NO: 2290668 - RNA, 19 nt, Artificial Sequence
  Description of Artificial Sequence: Synthetic oligonucleotide
  Sense strand starting at position 2226 of SEQ ID NO: 1884769
agguguugugaacagugga

SEQ ID NO: 2290669 - RNA, 19 nt, Artificial Sequence
  Description of Artificial Sequence: Synthetic oligonucleotide
  Antisense strand to SEQ ID NO: 2290668
uccacuguucacaacaccu

SEQ ID NO: 2290670 - RNA, 19 nt, Artificial Sequence
  Description of Artificial Sequence: Synthetic oligonucleotide
  Sense strand starting at position 2298 of SEQ ID NO: 1884769
ggaaugucuggugggaagu

SEQ ID NO: 2290671 - RNA, 19 nt, Artificial Sequence
  Description of Artificial Sequence: Synthetic oligonucleotide
  Antisense strand to SEQ ID NO: 2290670
acuucccaccagacauucc

SEQ ID NO: 2290672 - RNA, 19 nt, Artificial Sequence
  Description of Artificial Sequence: Synthetic oligonucleotide
  Sense strand starting at position 2594 of SEQ ID NO: 1884769
agaacauuggauggucauu

SEQ ID NO: 2290673 - RNA, 19 nt, Artificial Sequence
  Description of Artificial Sequence: Synthetic oligonucleotide
  Antisense strand to SEQ ID NO: 2290672
aaugaccauccaauguucu

SEQ ID NO: 2290674 - RNA, 19 nt, Artificial Sequence
  Description of Artificial Sequence: Synthetic oligonucleotide
  Sense strand starting at position 2599 of SEQ ID NO: 1884769
auuggauggucauucucau

SEQ ID NO: 2290675 - RNA, 19 nt, Artificial Sequence
  Description of Artificial Sequence: Synthetic oligonucleotide
  Antisense strand to SEQ ID NO: 2290674
augagaaugaccauccaau

SEQ ID NO: 2290676 - RNA, 19 nt, Artificial Sequence
  Description of Artificial Sequence: Synthetic oligonucleotide
  Sense strand starting at position 2879 of SEQ ID NO: 1884769
accucagaguuguuaugaa

SEQ ID NO: 2290677 - RNA, 19 nt, Artificial Sequence
  Description of Artificial Sequence: Synthetic oligonucleotide
  Antisense strand to SEQ ID NO: 2290676
uucauaacaacucugaggu

SEQ ID NO: 2290678 - RNA, 19 nt, Artificial Sequence
  Description of Artificial Sequence: Synthetic oligonucleotide
  Sense strand starting at position 2903 of SEQ ID NO: 1884769
acagacauaagguguguaa

SEQ ID NO: 2290679 - RNA, 19 nt, Artificial Sequence
  Description of Artificial Sequence: Synthetic oligonucleotide
  Antisense strand to SEQ ID NO: 2290678
uuacacaccuuaugucugu

SEQ ID NO: 2290680 - RNA, 19 nt, Artificial Sequence
  Description of Artificial Sequence: Synthetic oligonucleotide
  Sense strand starting at position 2905 of SEQ ID NO: 1884769
agacauaagguguguaaac

SEQ ID NO: 2290681 - RNA, 19 nt, Artificial Sequence
  Description of Artificial Sequence: Synthetic oligonucleotide
  Antisense strand to SEQ ID NO: 2290680
guuuacacaccuuaugucu

SEQ ID NO: 2290682 - RNA, 19 nt, Artificial Sequence
  Description of Artificial Sequence: Synthetic oligonucleotide
  Sense strand starting at position 2934 of SEQ ID NO: 1884769
gugucuaguacacaugacu

SEQ ID NO: 2290683 - RNA, 19 nt, Artificial Sequence
  Description of Artificial Sequence: Synthetic oligonucleotide
  Antisense strand to SEQ ID NO: 2290682
agucauguguacuagacac

SEQ ID NO: 2290684 - RNA, 19 nt, Artificial Sequence
  Description of Artificial Sequence: Synthetic oligonucleotide
  Sense strand starting at position 3016 of SEQ ID NO: 1884769
cuguguaaucucgcugucu

SEQ ID NO: 2290685 - RNA, 19 nt, Artificial Sequence
  Description of Artificial Sequence: Synthetic oligonucleotide
  Antisense strand to SEQ ID NO: 2290684
agacagcgagauuacacag

SEQ ID NO: 2290686 - RNA, 19 nt, Artificial Sequence
  Description of Artificial Sequence: Synthetic oligonucleotide
  Sense strand starting at position 3020 of SEQ ID NO: 1884769
guaaucucgcugucuuguu

SEQ ID NO: 2290687 - RNA, 19 nt, Artificial Sequence
  Description of Artificial Sequence: Synthetic oligonucleotide
  Antisense strand to SEQ ID NO: 2290686
aacaagacagcgagauuac

SEQ ID NO: 2290688 - RNA, 19 nt, Artificial Sequence
  Description of Artificial Sequence: Synthetic oligonucleotide
  Sense strand starting at position 3121 of SEQ ID NO: 1884769
cuuauauguccuuagauua

SEQ ID NO: 2290689 - RNA, 19 nt, Artificial Sequence
  Description of Artificial Sequence: Synthetic oligonucleotide
  Antisense strand to SEQ ID NO: 2290688
uaaucuaaggacauauaag

SEQ ID NO: 2290690 - RNA, 19 nt, Artificial Sequence
  Description of Artificial Sequence: Synthetic oligonucleotide
  Sense strand starting at position 3181 of SEQ ID NO: 1884769
guuuaauauccuuaaguag

SEQ ID NO: 2290691 - RNA, 19 nt, Artificial Sequence
  Description of Artificial Sequence: Synthetic oligonucleotide
  Antisense strand to SEQ ID NO: 2290690
cuacuuaaggauauuaaac

SEQ ID NO: 2290692 - RNA, 19 nt, Artificial Sequence
  Description of Artificial Sequence: Synthetic oligonucleotide
  Sense strand starting at position 3601 of SEQ ID NO: 1884769
cagccuaaggcauauguaa

SEQ ID NO: 2290693 - RNA, 19 nt, Artificial Sequence
  Description of Artificial Sequence: Synthetic oligonucleotide
  Antisense strand to SEQ ID NO: 2290692
uuacauaugccuuaggcug

SEQ ID NO: 2290694 - RNA, 19 nt, Artificial Sequence
  Description of Artificial Sequence: Synthetic oligonucleotide
  Sense strand starting at position 3647 of SEQ ID NO: 1884769
cugcccuauuugucagagu

SEQ ID NO: 2290695 - RNA, 19 nt, Artificial Sequence
  Description of Artificial Sequence: Synthetic oligonucleotide
  Antisense strand to SEQ ID NO: 2290694
acucugacaaauagggcag

SEQ ID NO: 2290696 - RNA, 19 nt, Artificial Sequence
  Description of Artificial Sequence: Synthetic oligonucleotide
  Sense strand starting at position 3661 of SEQ ID NO: 1884769
agagucauguuauugauuc

SEQ ID NO: 2290697 - RNA, 19 nt, Artificial Sequence
  Description of Artificial Sequence: Synthetic oligonucleotide
  Antisense strand to SEQ ID NO: 2290696
gaaucaauaacaugacucu

SEQ ID NO: 2290698 - RNA, 19 nt, Artificial Sequence
  Description of Artificial Sequence: Synthetic oligonucleotide
  Sense strand starting at position 3828 of SEQ ID NO: 1884769
gagagcuucugacccagua

SEQ ID NO: 2290699 - RNA, 19 nt, Artificial Sequence
  Description of Artificial Sequence: Synthetic oligonucleotide
  Antisense strand to SEQ ID NO: 2290698
uacugggucagaagcucuc

SEQ ID NO: 2290700 - RNA, 19 nt, Artificial Sequence
  Description of Artificial Sequence: Synthetic oligonucleotide
  Sense strand starting at position 3892 of SEQ ID NO: 1884769
aggugauaccaaugccuau

SEQ ID NO: 2290701 - RNA, 19 nt, Artificial Sequence
  Description of Artificial Sequence: Synthetic oligonucleotide
  Antisense strand to SEQ ID NO: 2290700
auaggcauugguaucaccu

SEQ ID NO: 2290702 - RNA, 19 nt, Artificial Sequence
  Description of Artificial Sequence: Synthetic oligonucleotide
  Sense strand starting at position 3905 of SEQ ID NO: 1884769
gccuaugauccugggaauc

SEQ ID NO: 2290703 - RNA, 19 nt, Artificial Sequence
  Description of Artificial Sequence: Synthetic oligonucleotide
  Antisense strand to SEQ ID NO: 2290702
gauucccaggaucauaggc

SEQ ID NO: 2290704 - RNA, 19 nt, Artificial Sequence
  Description of Artificial Sequence: Synthetic oligonucleotide
  Sense strand starting at position 3968 of SEQ ID NO: 1884769
uuaagcaugcuugauaaau

SEQ ID NO: 2290705 - RNA, 19 nt, Artificial Sequence
  Description of Artificial Sequence: Synthetic oligonucleotide
  Antisense strand to SEQ ID NO: 2290704
auuuaucaagcaugcuuaa

SEQ ID NO: 2290706 - RNA, 19 nt, Artificial Sequence
  Description of Artificial Sequence: Synthetic oligonucleotide
  Sense strand starting at position 349 of SEQ ID NO: 1884770
gucaauagacaaggaguuu

SEQ ID NO: 2290707 - RNA, 19 nt, Artificial Sequence
  Description of Artificial Sequence: Synthetic oligonucleotide
  Antisense strand to SEQ ID NO: 2290706
aaacuccuugucuauugac

SEQ ID NO: 2290708 - RNA, 19 nt, Artificial Sequence
  Description of Artificial Sequence: Synthetic oligonucleotide
  Sense strand starting at position 414 of SEQ ID NO: 1884770
cuguguucuuauuugccaa

SEQ ID NO: 2290709 - RNA, 19 nt, Artificial Sequence
  Description of Artificial Sequence: Synthetic oligonucleotide
  Antisense strand to SEQ ID NO: 2290708
uuggcaaauaagaacacag

SEQ ID NO: 2290710 - RNA, 19 nt, Artificial Sequence
  Description of Artificial Sequence: Synthetic oligonucleotide
  Sense strand starting at position 455 of SEQ ID NO: 1884770
gugauuauuuauguuguca

SEQ ID NO: 2290711 - RNA, 19 nt, Artificial Sequence
  Description of Artificial Sequence: Synthetic oligonucleotide
  Antisense strand to SEQ ID NO: 2290710
ugacaacauaaauaaucac

SEQ ID NO: 2290712 - RNA, 19 nt, Artificial Sequence
  Description of Artificial Sequence: Synthetic oligonucleotide
  Sense strand starting at position 466 of SEQ ID NO: 1884770
uguugucaaguauaucaca

SEQ ID NO: 2290713 - RNA, 19 nt, Artificial Sequence
  Description of Artificial Sequence: Synthetic oligonucleotide
  Antisense strand to SEQ ID NO: 2290712
ugugauauacuugacaaca

SEQ ID NO: 2290714 - RNA, 19 nt, Artificial Sequence
  Description of Artificial Sequence: Synthetic oligonucleotide
  Sense strand starting at position 563 of SEQ ID NO: 1884770
aucagaguuugcuucuaaa

SEQ ID NO: 2290715 - RNA, 19 nt, Artificial Sequence
  Description of Artificial Sequence: Synthetic oligonucleotide
  Antisense strand to SEQ ID NO: 2290714
uuuagaagcaaacucugau

SEQ ID NO: 2290716 - RNA, 19 nt, Artificial Sequence
  Description of Artificial Sequence: Synthetic oligonucleotide
  Sense strand starting at position 576 of SEQ ID NO: 1884770
ucuaaaugguaucuggaca

SEQ ID NO: 2290717 - RNA, 19 nt, Artificial Sequence
  Description of Artificial Sequence: Synthetic oligonucleotide
  Antisense strand to SEQ ID NO: 2290716
uguccagauaccauuuaga

SEQ ID NO: 2290718 - RNA, 19 nt, Artificial Sequence
  Description of Artificial Sequence: Synthetic oligonucleotide
  Sense strand starting at position 617 of SEQ ID NO: 1884770
auccucuuuguuuaagaga

SEQ ID NO: 2290719 - RNA, 19 nt, Artificial Sequence
  Description of Artificial Sequence: Synthetic oligonucleotide
  Antisense strand to SEQ ID NO: 2290718
ucucuuaaacaaagaggau

SEQ ID NO: 2290720 - RNA, 19 nt, Artificial Sequence
  Description of Artificial Sequence: Synthetic oligonucleotide
  Sense strand starting at position 789 of SEQ ID NO: 1884770
uuugaucuugccgagagau

SEQ ID NO: 2290721 - RNA, 19 nt, Artificial Sequence
  Description of Artificial Sequence: Synthetic oligonucleotide
  Antisense strand to SEQ ID NO: 2290720
aucucucggcaagaucaaa

SEQ ID NO: 2290722 - RNA, 19 nt, Artificial Sequence
  Description of Artificial Sequence: Synthetic oligonucleotide
  Sense strand starting at position 968 of SEQ ID NO: 1884770
auagguuaauucccgggaa

SEQ ID NO: 2290723 - RNA, 19 nt, Artificial Sequence
  Description of Artificial Sequence: Synthetic oligonucleotide
  Antisense strand to SEQ ID NO: 2290722
uucccgggaauuaaccuau

SEQ ID NO: 2290724 - RNA, 19 nt, Artificial Sequence
  Description of Artificial Sequence: Synthetic oligonucleotide
  Sense strand starting at position 970 of SEQ ID NO: 1884770
agguuaauucccgggaagu

SEQ ID NO: 2290725 - RNA, 19 nt, Artificial Sequence
  Description of Artificial Sequence: Synthetic oligonucleotide
  Antisense strand to SEQ ID NO: 2290724
acuucccgggaauuaaccu

SEQ ID NO: 2290726 - RNA, 19 nt, Artificial Sequence
  Description of Artificial Sequence: Synthetic oligonucleotide
  Sense strand starting at position 971 of SEQ ID NO: 1884770
gguuaauucccgggaagua

SEQ ID NO: 2290727 - RNA, 19 nt, Artificial Sequence
  Description of Artificial Sequence: Synthetic oligonucleotide
  Antisense strand to SEQ ID NO: 2290726
uacuucccgggaauuaacc

SEQ ID NO: 2290728 - RNA, 19 nt, Artificial Sequence
  Description of Artificial Sequence: Synthetic oligonucleotide
  Sense strand starting at position 972 of SEQ ID NO: 1884770
guuaauucccgggaaguag

SEQ ID NO: 2290729 - RNA, 19 nt, Artificial Sequence
  Description of Artificial Sequence: Synthetic oligonucleotide
  Antisense strand to SEQ ID NO: 2290728
cuacuucccgggaauuaac

SEQ ID NO: 2290730 - RNA, 19 nt, Artificial Sequence
  Description of Artificial Sequence: Synthetic oligonucleotide
  Sense strand starting at position 1184 of SEQ ID NO: 1884770
agagaaaucgcccagucca

SEQ ID NO: 2290731 - RNA, 19 nt, Artificial Sequence
  Description of Artificial Sequence: Synthetic oligonucleotide
  Antisense strand to SEQ ID NO: 2290730
uggacugggcgauuucucu

SEQ ID NO: 2290732 - RNA, 19 nt, Artificial Sequence
  Description of Artificial Sequence: Synthetic oligonucleotide
  Sense strand starting at position 1312 of SEQ ID NO: 1884770
gauucugugcgcccaugua

SEQ ID NO: 2290733 - RNA, 19 nt, Artificial Sequence
  Description of Artificial Sequence: Synthetic oligonucleotide
  Antisense strand to SEQ ID NO: 2290732
uacaugggcgcacagaauc

SEQ ID NO: 2290734 - RNA, 19 nt, Artificial Sequence
  Description of Artificial Sequence: Synthetic oligonucleotide
  Sense strand starting at position 1324 of SEQ ID NO: 1884770
ccauguaagcucuaaagga

SEQ ID NO: 2290735 - RNA, 19 nt, Artificial Sequence
  Description of Artificial Sequence: Synthetic oligonucleotide
  Antisense strand to SEQ ID NO: 2290734
uccuuuagagcuuacaugg

SEQ ID NO: 2290736 - RNA, 19 nt, Artificial Sequence
  Description of Artificial Sequence: Synthetic oligonucleotide
  Sense strand starting at position 1355 of SEQ ID NO: 1884770
uguggucccagucaaaucu

SEQ ID NO: 2290737 - RNA, 19 nt, Artificial Sequence
  Description of Artificial Sequence: Synthetic oligonucleotide
  Antisense strand to SEQ ID NO: 2290736
agauuugacugggaccaca

SEQ ID NO: 2290738 - RNA, 19 nt, Artificial Sequence
  Description of Artificial Sequence: Synthetic oligonucleotide
  Sense strand starting at position 1507 of SEQ ID NO: 1884770
cuuugucauuuaguaagua

SEQ ID NO: 2290739 - RNA, 19 nt, Artificial Sequence
  Description of Artificial Sequence: Synthetic oligonucleotide
  Antisense strand to SEQ ID NO: 2290738
uacuuacuaaaugacaaag

SEQ ID NO: 2290740 - RNA, 19 nt, Artificial Sequence
  Description of Artificial Sequence: Synthetic oligonucleotide
  Sense strand starting at position 1618 of SEQ ID NO: 1884770
gcaagaggguccacgugua

SEQ ID NO: 2290741 - RNA, 19 nt, Artificial Sequence
  Description of Artificial Sequence: Synthetic oligonucleotide
  Antisense strand to SEQ ID NO: 2290740
uacacguggacccucuugc

SEQ ID NO: 2290742 - RNA, 19 nt, Artificial Sequence
  Description of Artificial Sequence: Synthetic oligonucleotide
  Sense strand starting at position 1752 of SEQ ID NO: 1884770
acuuguagccacuaaagca

SEQ ID NO: 2290743 - RNA, 19 nt, Artificial Sequence
  Description of Artificial Sequence: Synthetic oligonucleotide
  Antisense strand to SEQ ID NO: 2290742
ugcuuuaguggcuacaagu

SEQ ID NO: 2290744 - RNA, 19 nt, Artificial Sequence
  Description of Artificial Sequence: Synthetic oligonucleotide
  Sense strand starting at position 1855 of SEQ ID NO: 1884770
gcugaauacuuucucaaug

SEQ ID NO: 2290745 - RNA, 19 nt, Artificial Sequence
  Description of Artificial Sequence: Synthetic oligonucleotide
  Antisense strand to SEQ ID NO: 2290744
cauugagaaaguauucagc

SEQ ID NO: 2290746 - RNA, 19 nt, Artificial Sequence
  Description of Artificial Sequence: Synthetic oligonucleotide
  Sense strand starting at position 2020 of SEQ ID NO: 1884770
gggcauauuuauguuucuu

SEQ ID NO: 2290747 - RNA, 19 nt, Artificial Sequence
  Description of Artificial Sequence: Synthetic oligonucleotide
  Antisense strand to SEQ ID NO: 2290746
aagaaacauaaauaugccc

SEQ ID NO: 2290748 - RNA, 19 nt, Artificial Sequence
  Description of Artificial Sequence: Synthetic oligonucleotide
  Sense strand starting at position 2032 of SEQ ID NO: 1884770
guuucuuaucgugcgucua

SEQ ID NO: 2290749 - RNA, 19 nt, Artificial Sequence
  Description of Artificial Sequence: Synthetic oligonucleotide
  Antisense strand to SEQ ID NO: 2290748
uagacgcacgauaagaaac

SEQ ID NO: 2290750 - RNA, 19 nt, Artificial Sequence
  Description of Artificial Sequence: Synthetic oligonucleotide
  Sense strand starting at position 2182 of SEQ ID NO: 1884770
cuccuuccagauugaaaug

SEQ ID NO: 2290751 - RNA, 19 nt, Artificial Sequence
  Description of Artificial Sequence: Synthetic oligonucleotide
  Antisense strand to SEQ ID NO: 2290750
cauuucaaucuggaaggag

SEQ ID NO: 2290752 - RNA, 19 nt, Artificial Sequence
  Description of Artificial Sequence: Synthetic oligonucleotide
  Sense strand starting at position 2407 of SEQ ID NO: 1884770
agguuagucucagccaaag

SEQ ID NO: 2290753 - RNA, 19 nt, Artificial Sequence
  Description of Artificial Sequence: Synthetic oligonucleotide
  Antisense strand to SEQ ID NO: 2290752
cuuuggcugagacuaaccu

SEQ ID NO: 2290754 - RNA, 19 nt, Artificial Sequence
  Description of Artificial Sequence: Synthetic oligonucleotide
  Sense strand starting at position 2502 of SEQ ID NO: 1884770
cucccuuguccuggagaac

SEQ ID NO: 2290755 - RNA, 19 nt, Artificial Sequence
  Description of Artificial Sequence: Synthetic oligonucleotide
  Antisense strand to SEQ ID NO: 2290754
guucuccaggacaagggag

SEQ ID NO: 2290756 - RNA, 19 nt, Artificial Sequence
  Description of Artificial Sequence: Synthetic oligonucleotide
  Sense strand starting at position 2503 of SEQ ID NO: 1884770
ucccuuguccuggagaacu

SEQ ID NO: 2290757 - RNA, 19 nt, Artificial Sequence
  Description of Artificial Sequence: Synthetic oligonucleotide
  Antisense strand to SEQ ID NO: 2290756
aguucuccaggacaaggga

SEQ ID NO: 2290758 - RNA, 19 nt, Artificial Sequence
  Description of Artificial Sequence: Synthetic oligonucleotide
  Sense strand starting at position 2859 of SEQ ID NO: 1884770
cccauuuacuacggaauuu

SEQ ID NO: 2290759 - RNA, 19 nt, Artificial Sequence
  Description of Artificial Sequence: Synthetic oligonucleotide
  Antisense strand to SEQ ID NO: 2290758
aaauuccguaguaaauggg

SEQ ID NO: 2290760 - RNA, 19 nt, Artificial Sequence
  Description of Artificial Sequence: Synthetic oligonucleotide
  Sense strand starting at position 2907 of SEQ ID NO: 1884770
ugugacgcccuguuguaau

SEQ ID NO: 2290761 - RNA, 19 nt, Artificial Sequence
  Description of Artificial Sequence: Synthetic oligonucleotide
  Antisense strand to SEQ ID NO: 2290760
auuacaacagggcgucaca

SEQ ID NO: 2290762 - RNA, 19 nt, Artificial Sequence
  Description of Artificial Sequence: Synthetic oligonucleotide
  Sense strand starting at position 3003 of SEQ ID NO: 1884770
augaauaacgccuaguauu

SEQ ID NO: 2290763 - RNA, 19 nt, Artificial Sequence
  Description of Artificial Sequence: Synthetic oligonucleotide
  Antisense strand to SEQ ID NO: 2290762
aauacuaggcguuauucau

SEQ ID NO: 2290764 - RNA, 19 nt, Artificial Sequence
  Description of Artificial Sequence: Synthetic oligonucleotide
  Sense strand starting at position 3035 of SEQ ID NO: 1884770
cgaggacuguagucaauaa

SEQ ID NO: 2290765 - RNA, 19 nt, Artificial Sequence
  Description of Artificial Sequence: Synthetic oligonucleotide
  Antisense strand to SEQ ID NO: 2290764
uuauugacuacaguccucg

SEQ ID NO: 2290766 - RNA, 19 nt, Artificial Sequence
  Description of Artificial Sequence: Synthetic oligonucleotide
  Sense strand starting at position 3149 of SEQ ID NO: 1884770
cugggagcccuguagaaga

SEQ ID NO: 2290767 - RNA, 19 nt, Artificial Sequence
  Description of Artificial Sequence: Synthetic oligonucleotide
  Antisense strand to SEQ ID NO: 2290766
ucuucuacagggcucccag

SEQ ID NO: 2290768 - RNA, 19 nt, Artificial Sequence
  Description of Artificial Sequence: Synthetic oligonucleotide
  Sense strand starting at position 3270 of SEQ ID NO: 1884770
guauccuuccuccaauugu

SEQ ID NO: 2290769 - RNA, 19 nt, Artificial Sequence
  Description of Artificial Sequence: Synthetic oligonucleotide
  Antisense strand to SEQ ID NO: 2290768
acaauuggaggaaggauac

SEQ ID NO: 2290770 - RNA, 19 nt, Artificial Sequence
  Description of Artificial Sequence: Synthetic oligonucleotide
  Sense strand starting at position 3523 of SEQ ID NO: 1884770
aguugaacugcugauguuu

SEQ ID NO: 2290771 - RNA, 19 nt, Artificial Sequence
  Description of Artificial Sequence: Synthetic oligonucleotide
  Antisense strand to SEQ ID NO: 2290770
aaacaucagcaguucaacu

SEQ ID NO: 2290772 - RNA, 19 nt, Artificial Sequence
  Description of Artificial Sequence: Synthetic oligonucleotide
  Sense strand starting at position 3563 of SEQ ID NO: 1884770
aaaugaagcuuggcagaau

SEQ ID NO: 2290773 - RNA, 19 nt, Artificial Sequence
  Description of Artificial Sequence: Synthetic oligonucleotide
  Antisense strand to SEQ ID NO: 2290772
auucugccaagcuucauuu

SEQ ID NO: 2290774 - RNA, 19 nt, Artificial Sequence
  Description of Artificial Sequence: Synthetic oligonucleotide
  Sense strand starting at position 3566 of SEQ ID NO: 1884770
ugaagcuuggcagaaucau

SEQ ID NO: 2290775 - RNA, 19 nt, Artificial Sequence
  Description of Artificial Sequence: Synthetic oligonucleotide
  Antisense strand to SEQ ID NO: 2290774
augauucugccaagcuuca

SEQ ID NO: 2290776 - RNA, 19 nt, Artificial Sequence
  Description of Artificial Sequence: Synthetic oligonucleotide
  Sense strand starting at position 3572 of SEQ ID NO: 1884770
uuggcagaaucauaauuua

SEQ ID NO: 2290777 - RNA, 19 nt, Artificial Sequence
  Description of Artificial Sequence: Synthetic oligonucleotide
  Antisense strand to SEQ ID NO: 2290776
uaaauuaugauucugccaa

SEQ ID NO: 2290778 - RNA, 19 nt, Artificial Sequence
  Description of Artificial Sequence: Synthetic oligonucleotide
  Sense strand starting at position 3773 of SEQ ID NO: 1884770
gcgugaggucuugagauag

SEQ ID NO: 2290779 - RNA, 19 nt, Artificial Sequence
  Description of Artificial Sequence: Synthetic oligonucleotide
  Antisense strand to SEQ ID NO: 2290778
cuaucucaagaccucacgc

SEQ ID NO: 2290780 - RNA, 19 nt, Artificial Sequence
  Description of Artificial Sequence: Synthetic oligonucleotide
  Sense strand starting at position 3869 of SEQ ID NO: 1884770
gaguuagggcucugaacac

SEQ ID NO: 2290781 - RNA, 19 nt, Artificial Sequence
  Description of Artificial Sequence: Synthetic oligonucleotide
  Antisense strand to SEQ ID NO: 2290780
guguucagagcccuaacuc

SEQ ID NO: 2290782 - RNA, 19 nt, Artificial Sequence
  Description of Artificial Sequence: Synthetic oligonucleotide
  Sense strand starting at position 3892 of SEQ ID NO: 1884770
ucuuaaagcccugagcuau

SEQ ID NO: 2290783 - RNA, 19 nt, Artificial Sequence
  Description of Artificial Sequence: Synthetic oligonucleotide
  Antisense strand to SEQ ID NO: 2290782
auagcucagggcuuuaaga

SEQ ID NO: 2290784 - RNA, 19 nt, Artificial Sequence
  Description of Artificial Sequence: Synthetic oligonucleotide
  Sense strand starting at position 3916 of SEQ ID NO: 1884770
cagcuuugaacgggacaga

SEQ ID NO: 2290785 - RNA, 19 nt, Artificial Sequence
  Description of Artificial Sequence: Synthetic oligonucleotide
  Antisense strand to SEQ ID NO: 2290784
ucugucccguucaaagcug

SEQ ID NO: 2290786 - RNA, 19 nt, Artificial Sequence
  Description of Artificial Sequence: Synthetic oligonucleotide
  Sense strand starting at position 29 of SEQ ID NO: 1884771
cuaauuaaaccgugacuuc

SEQ ID NO: 2290787 - RNA, 19 nt, Artificial Sequence
  Description of Artificial Sequence: Synthetic oligonucleotide
  Antisense strand to SEQ ID NO: 2290786
gaagucacgguuuaauuag

SEQ ID NO: 2290788 - RNA, 19 nt, Artificial Sequence
  Description of Artificial Sequence: Synthetic oligonucleotide
  Sense strand starting at position 32 of SEQ ID NO: 1884771
auuaaaccgugacuucuaa

SEQ ID NO: 2290789 - RNA, 19 nt, Artificial Sequence
  Description of Artificial Sequence: Synthetic oligonucleotide
  Antisense strand to SEQ ID NO: 2290788
uuagaagucacgguuuaau

SEQ ID NO: 2290790 - RNA, 19 nt, Artificial Sequence
  Description of Artificial Sequence: Synthetic oligonucleotide
  Sense strand starting at position 272 of SEQ ID NO: 1884771
gacaaaggauggucgacuu

SEQ ID NO: 2290791 - RNA, 19 nt, Artificial Sequence
  Description of Artificial Sequence: Synthetic oligonucleotide
  Antisense strand to SEQ ID NO: 2290790
aagucgaccauccuuuguc

SEQ ID NO: 2290792 - RNA, 19 nt, Artificial Sequence
  Description of Artificial Sequence: Synthetic oligonucleotide
  Sense strand starting at position 459 of SEQ ID NO: 1884771
cuuguccuacauugaggaa

SEQ ID NO: 2290793 - RNA, 19 nt, Artificial Sequence
  Description of Artificial Sequence: Synthetic oligonucleotide
  Antisense strand to SEQ ID NO: 2290792
uuccucaauguaggacaag

SEQ ID NO: 2290794 - RNA, 19 nt, Artificial Sequence
  Description of Artificial Sequence: Synthetic oligonucleotide
  Sense strand starting at position 522 of SEQ ID NO: 1884771
uggagcuguuaauuacaaa

SEQ ID NO: 2290795 - RNA, 19 nt, Artificial Sequence
  Description of Artificial Sequence: Synthetic oligonucleotide
  Antisense strand to SEQ ID NO: 2290794
uuuguaauuaacagcucca

SEQ ID NO: 2290796 - RNA, 19 nt, Artificial Sequence
  Description of Artificial Sequence: Synthetic oligonucleotide
  Sense strand starting at position 726 of SEQ ID NO: 1884771
guugcacaacuugaguuua

SEQ ID NO: 2290797 - RNA, 19 nt, Artificial Sequence
  Description of Artificial Sequence: Synthetic oligonucleotide
  Antisense strand to SEQ ID NO: 2290796
uaaacucaaguugugcaac

SEQ ID NO: 2290798 - RNA, 19 nt, Artificial Sequence
  Description of Artificial Sequence: Synthetic oligonucleotide
  Sense strand starting at position 728 of SEQ ID NO: 1884771
ugcacaacuugaguuuaca

SEQ ID NO: 2290799 - RNA, 19 nt, Artificial Sequence
  Description of Artificial Sequence: Synthetic oligonucleotide
  Antisense strand to SEQ ID NO: 2290798
uguaaacucaaguugugca

SEQ ID NO: 2290800 - RNA, 19 nt, Artificial Sequence
  Description of Artificial Sequence: Synthetic oligonucleotide
  Sense strand starting at position 1036 of SEQ ID NO: 1884771
ggccucggguauuuguaau

SEQ ID NO: 2290801 - RNA, 19 nt, Artificial Sequence
  Description of Artificial Sequence: Synthetic oligonucleotide
  Antisense strand to SEQ ID NO: 2290800
auuacaaauacccgaggcc

SEQ ID NO: 2290802 - RNA, 19 nt, Artificial Sequence
  Description of Artificial Sequence: Synthetic oligonucleotide
  Sense strand starting at position 1042 of SEQ ID NO: 1884771
ggguauuuguaauaaggaa

SEQ ID NO: 2290803 - RNA, 19 nt, Artificial Sequence
  Description of Artificial Sequence: Synthetic oligonucleotide
  Antisense strand to SEQ ID NO: 2290802
uuccuuauuacaaauaccc

SEQ ID NO: 2290804 - RNA, 19 nt, Artificial Sequence
  Description of Artificial Sequence: Synthetic oligonucleotide
  Sense strand starting at position 1059 of SEQ ID NO: 1884771
aagaauucggagcaguguu

SEQ ID NO: 2290805 - RNA, 19 nt, Artificial Sequence
  Description of Artificial Sequence: Synthetic oligonucleotide
  Antisense strand to SEQ ID NO: 2290804
aacacugcuccgaauucuu

SEQ ID NO: 2290806 - RNA, 19 nt, Artificial Sequence
  Description of Artificial Sequence: Synthetic oligonucleotide
  Sense strand starting at position 1374 of SEQ ID NO: 1884771
cuuagcaagccugaggauu

SEQ ID NO: 2290807 - RNA, 19 nt, Artificial Sequence
  Description of Artificial Sequence: Synthetic oligonucleotide
  Antisense strand to SEQ ID NO: 2290806
aauccucaggcuugcuaag

SEQ ID NO: 2290808 - RNA, 19 nt, Artificial Sequence
  Description of Artificial Sequence: Synthetic oligonucleotide
  Sense strand starting at position 1579 of SEQ ID NO: 1884771
gacuaacugcgucaucaga

SEQ ID NO: 2290809 - RNA, 19 nt, Artificial Sequence
  Description of Artificial Sequence: Synthetic oligonucleotide
  Antisense strand to SEQ ID NO: 2290808
ucugaugacgcaguuaguc

SEQ ID NO: 2290810 - RNA, 19 nt, Artificial Sequence
  Description of Artificial Sequence: Synthetic oligonucleotide
  Sense strand starting at position 2349 of SEQ ID NO: 1884771
ccagcaugugguggaagau

SEQ ID NO: 2290811 - RNA, 19 nt, Artificial Sequence
  Description of Artificial Sequence: Synthetic oligonucleotide
  Antisense strand to SEQ ID NO: 2290810
aucuuccaccacaugcugg

SEQ ID NO: 2290812 - RNA, 19 nt, Artificial Sequence
  Description of Artificial Sequence: Synthetic oligonucleotide
  Sense strand starting at position 2436 of SEQ ID NO: 1884771
gguagggauuguguaagga

SEQ ID NO: 2290813 - RNA, 19 nt, Artificial Sequence
  Description of Artificial Sequence: Synthetic oligonucleotide
  Antisense strand to SEQ ID NO: 2290812
uccuuacacaaucccuacc

SEQ ID NO: 2290814 - RNA, 19 nt, Artificial Sequence
  Description of Artificial Sequence: Synthetic oligonucleotide
  Sense strand starting at position 2449 of SEQ ID NO: 1884771
uaaggaggcugccucaauu

SEQ ID NO: 2290815 - RNA, 19 nt, Artificial Sequence
  Description of Artificial Sequence: Synthetic oligonucleotide
  Antisense strand to SEQ ID NO: 2290814
aauugaggcagccuccuua

SEQ ID NO: 2290816 - RNA, 19 nt, Artificial Sequence
  Description of Artificial Sequence: Synthetic oligonucleotide
  Sense strand starting at position 2653 of SEQ ID NO: 1884771
gacggaaacccuugggauu

SEQ ID NO: 2290817 - RNA, 19 nt, Artificial Sequence
  Description of Artificial Sequence: Synthetic oligonucleotide
  Antisense strand to SEQ ID NO: 2290816
aaucccaaggguuuccguc

SEQ ID NO: 2290818 - RNA, 19 nt, Artificial Sequence
  Description of Artificial Sequence: Synthetic oligonucleotide
  Sense strand starting at position 2654 of SEQ ID NO: 1884771
acggaaacccuugggauua

SEQ ID NO: 2290819 - RNA, 19 nt, Artificial Sequence
  Description of Artificial Sequence: Synthetic oligonucleotide
  Antisense strand to SEQ ID NO: 2290818
uaaucccaaggguuuccgu

SEQ ID NO: 2290820 - RNA, 19 nt, Artificial Sequence
  Description of Artificial Sequence: Synthetic oligonucleotide
  Sense strand starting at position 2678 of SEQ ID NO: 1884771
gcaacauagugaccuaauu

SEQ ID NO: 2290821 - RNA, 19 nt, Artificial Sequence
  Description of Artificial Sequence: Synthetic oligonucleotide
  Antisense strand to SEQ ID NO: 2290820
aauuaggucacuauguugc

SEQ ID NO: 2290822 - RNA, 19 nt, Artificial Sequence
  Description of Artificial Sequence: Synthetic oligonucleotide
  Sense strand starting at position 2767 of SEQ ID NO: 1884771
uuaggagacuaccucagua

SEQ ID NO: 2290823 - RNA, 19 nt, Artificial Sequence
  Description of Artificial Sequence: Synthetic oligonucleotide
  Antisense strand to SEQ ID NO: 2290822
uacugagguagucuccuaa

SEQ ID NO: 2290824 - RNA, 19 nt, Artificial Sequence
  Description of Artificial Sequence: Synthetic oligonucleotide
  Sense strand starting at position 2771 of SEQ ID NO: 1884771
gagacuaccucaguaguac

SEQ ID NO: 2290825 - RNA, 19 nt, Artificial Sequence
  Description of Artificial Sequence: Synthetic oligonucleotide
  Antisense strand to SEQ ID NO: 2290824
guacuacugagguagucuc

SEQ ID NO: 2290826 - RNA, 19 nt, Artificial Sequence
  Description of Artificial Sequence: Synthetic oligonucleotide
  Sense strand starting at position 2772 of SEQ ID NO: 1884771
agacuaccucaguaguaca

SEQ ID NO: 2290827 - RNA, 19 nt, Artificial Sequence
  Description of Artificial Sequence: Synthetic oligonucleotide
  Antisense strand to SEQ ID NO: 2290826
uguacuacugagguagucu

SEQ ID NO: 2290828 - RNA, 19 nt, Artificial Sequence
  Description of Artificial Sequence: Synthetic oligonucleotide
  Sense strand starting at position 2793 of SEQ ID NO: 1884771
agaugauuguaucuuggac

SEQ ID NO: 2290829 - RNA, 19 nt, Artificial Sequence
  Description of Artificial Sequence: Synthetic oligonucleotide
  Antisense strand to SEQ ID NO: 2290828
guccaagauacaaucaucu

SEQ ID NO: 2290830 - RNA, 19 nt, Artificial Sequence
  Description of Artificial Sequence: Synthetic oligonucleotide
  Sense strand starting at position 2811 of SEQ ID NO: 1884771
cuaggaugguauucggaua

SEQ ID NO: 2290831 - RNA, 19 nt, Artificial Sequence
  Description of Artificial Sequence: Synthetic oligonucleotide
  Antisense strand to SEQ ID NO: 2290830
uauccgaauaccauccuag

SEQ ID NO: 2290832 - RNA, 19 nt, Artificial Sequence
  Description of Artificial Sequence: Synthetic oligonucleotide
  Sense strand starting at position 2816 of SEQ ID NO: 1884771
augguauucggauagucac

SEQ ID NO: 2290833 - RNA, 19 nt, Artificial Sequence
  Description of Artificial Sequence: Synthetic oligonucleotide
  Antisense strand to SEQ ID NO: 2290832
gugacuauccgaauaccau

SEQ ID NO: 2290834 - RNA, 19 nt, Artificial Sequence
  Description of Artificial Sequence: Synthetic oligonucleotide
  Sense strand starting at position 2863 of SEQ ID NO: 1884771
ccuaauaugugucuugaau

SEQ ID NO: 2290835 - RNA, 19 nt, Artificial Sequence
  Description of Artificial Sequence: Synthetic oligonucleotide
  Antisense strand to SEQ ID NO: 2290834
auucaagacacauauuagg

SEQ ID NO: 2290836 - RNA, 19 nt, Artificial Sequence
  Description of Artificial Sequence: Synthetic oligonucleotide
  Sense strand starting at position 3041 of SEQ ID NO: 1884771
gcauucucugaaugcaaag

SEQ ID NO: 2290837 - RNA, 19 nt, Artificial Sequence
  Description of Artificial Sequence: Synthetic oligonucleotide
  Antisense strand to SEQ ID NO: 2290836
cuuugcauucagagaaugc

SEQ ID NO: 2290838 - RNA, 19 nt, Artificial Sequence
  Description of Artificial Sequence: Synthetic oligonucleotide
  Sense strand starting at position 3080 of SEQ ID NO: 1884771
auaauagcacuugguaaau

SEQ ID NO: 2290839 - RNA, 19 nt, Artificial Sequence
  Description of Artificial Sequence: Synthetic oligonucleotide
  Antisense strand to SEQ ID NO: 2290838
auuuaccaagugcuauuau

SEQ ID NO: 2290840 - RNA, 19 nt, Artificial Sequence
  Description of Artificial Sequence: Synthetic oligonucleotide
  Sense strand starting at position 3313 of SEQ ID NO: 1884771
auuaaugaguuacucaugu

SEQ ID NO: 2290841 - RNA, 19 nt, Artificial Sequence
  Description of Artificial Sequence: Synthetic oligonucleotide
  Antisense strand to SEQ ID NO: 2290840
acaugaguaacucauuaau

SEQ ID NO: 2290842 - RNA, 19 nt, Artificial Sequence
  Description of Artificial Sequence: Synthetic oligonucleotide
  Sense strand starting at position 3362 of SEQ ID NO: 1884771
ucaaguuuagaguguaaga

SEQ ID NO: 2290843 - RNA, 19 nt, Artificial Sequence
  Description of Artificial Sequence: Synthetic oligonucleotide
  Antisense strand to SEQ ID NO: 2290842
ucuuacacucuaaacuuga

SEQ ID NO: 2290844 - RNA, 19 nt, Artificial Sequence
  Description of Artificial Sequence: Synthetic oligonucleotide
  Sense strand starting at position 3364 of SEQ ID NO: 1884771
aaguuuagaguguaagacu

SEQ ID NO: 2290845 - RNA, 19 nt, Artificial Sequence
  Description of Artificial Sequence: Synthetic oligonucleotide
  Antisense strand to SEQ ID NO: 2290844
agucuuacacucuaaacuu

SEQ ID NO: 2290846 - RNA, 19 nt, Artificial Sequence
  Description of Artificial Sequence: Synthetic oligonucleotide
  Sense strand starting at position 3395 of SEQ ID NO: 1884771
uagccuggucuccagacaa

SEQ ID NO: 2290847 - RNA, 19 nt, Artificial Sequence
  Description of Artificial Sequence: Synthetic oligonucleotide
  Antisense strand to SEQ ID NO: 2290846
uugucuggagaccaggcua

SEQ ID NO: 2290848 - RNA, 19 nt, Artificial Sequence
  Description of Artificial Sequence: Synthetic oligonucleotide
  Sense strand starting at position 3418 of SEQ ID NO: 1884771
agagucagauugucuuaca

SEQ ID NO: 2290849 - RNA, 19 nt, Artificial Sequence
  Description of Artificial Sequence: Synthetic oligonucleotide
  Antisense strand to SEQ ID NO: 2290848
uguaagacaaucugacucu

SEQ ID NO: 2290850 - RNA, 19 nt, Artificial Sequence
  Description of Artificial Sequence: Synthetic oligonucleotide
  Sense strand starting at position 3419 of SEQ ID NO: 1884771
gagucagauugucuuacau

SEQ ID NO: 2290851 - RNA, 19 nt, Artificial Sequence
  Description of Artificial Sequence: Synthetic oligonucleotide
  Antisense strand to SEQ ID NO: 2290850
auguaagacaaucugacuc

SEQ ID NO: 2290852 - RNA, 19 nt, Artificial Sequence
  Description of Artificial Sequence: Synthetic oligonucleotide
  Sense strand starting at position 3484 of SEQ ID NO: 1884771
gugugcuaagugucuucau

SEQ ID NO: 2290853 - RNA, 19 nt, Artificial Sequence
  Description of Artificial Sequence: Synthetic oligonucleotide
  Antisense strand to SEQ ID NO: 2290852
augaagacacuuagcacac

SEQ ID NO: 2290854 - RNA, 19 nt, Artificial Sequence
  Description of Artificial Sequence: Synthetic oligonucleotide
  Sense strand starting at position 3486 of SEQ ID NO: 1884771
gugcuaagugucuucaugu

SEQ ID NO: 2290855 - RNA, 19 nt, Artificial Sequence
  Description of Artificial Sequence: Synthetic oligonucleotide
  Antisense strand to SEQ ID NO: 2290854
acaugaagacacuuagcac

SEQ ID NO: 2290856 - RNA, 19 nt, Artificial Sequence
  Description of Artificial Sequence: Synthetic oligonucleotide
  Sense strand starting at position 3539 of SEQ ID NO: 1884771
aagauagguucuguuauug

SEQ ID NO: 2290857 - RNA, 19 nt, Artificial Sequence
  Description of Artificial Sequence: Synthetic oligonucleotide
  Antisense strand to SEQ ID NO: 2290856
caauaacagaaccuaucuu

SEQ ID NO: 2290858 - RNA, 19 nt, Artificial Sequence
  Description of Artificial Sequence: Synthetic oligonucleotide
  Sense strand starting at position 3548 of SEQ ID NO: 1884771
ucuguuauugucgauuugu

SEQ ID NO: 2290859 - RNA, 19 nt, Artificial Sequence
  Description of Artificial Sequence: Synthetic oligonucleotide
  Antisense strand to SEQ ID NO: 2290858
acaaaucgacaauaacaga

SEQ ID NO: 2290860 - RNA, 19 nt, Artificial Sequence
  Description of Artificial Sequence: Synthetic oligonucleotide
  Sense strand starting at position 3582 of SEQ ID NO: 1884771
ggaguuaauuugcaaggga

SEQ ID NO: 2290861 - RNA, 19 nt, Artificial Sequence
  Description of Artificial Sequence: Synthetic oligonucleotide
  Antisense strand to SEQ ID NO: 2290860
ucccuugcaaauuaacucc

SEQ ID NO: 2290862 - RNA, 19 nt, Artificial Sequence
  Description of Artificial Sequence: Synthetic oligonucleotide
  Sense strand starting at position 3625 of SEQ ID NO: 1884771
aaaccugggucaucugauu

SEQ ID NO: 2290863 - RNA, 19 nt, Artificial Sequence
  Description of Artificial Sequence: Synthetic oligonucleotide
  Antisense strand to SEQ ID NO: 2290862
aaucagaugacccagguuu

SEQ ID NO: 2290864 - RNA, 19 nt, Artificial Sequence
  Description of Artificial Sequence: Synthetic oligonucleotide
  Sense strand starting at position 3848 of SEQ ID NO: 1884771
acagaaaugcccugacgag

SEQ ID NO: 2290865 - RNA, 19 nt, Artificial Sequence
  Description of Artificial Sequence: Synthetic oligonucleotide
  Antisense strand to SEQ ID NO: 2290864
cucgucagggcauuucugu

SEQ ID NO: 2290866 - RNA, 19 nt, Artificial Sequence
  Description of Artificial Sequence: Synthetic oligonucleotide
  Sense strand starting at position 194 of SEQ ID NO: 1884772
acaaguuggccugaccaaa

SEQ ID NO: 2290867 - RNA, 19 nt, Artificial Sequence
  Description of Artificial Sequence: Synthetic oligonucleotide
  Antisense strand to SEQ ID NO: 2290866
uuuggucaggccaacuugu

SEQ ID NO: 2290868 - RNA, 19 nt, Artificial Sequence
  Description of Artificial Sequence: Synthetic oligonucleotide
  Sense strand starting at position 207 of SEQ ID NO: 1884772
accaaauugugaucccaga

SEQ ID NO: 2290869 - RNA, 19 nt, Artificial Sequence
  Description of Artificial Sequence: Synthetic oligonucleotide
  Antisense strand to SEQ ID NO: 2290868
ucugggaucacaauuuggu

SEQ ID NO: 2290870 - RNA, 19 nt, Artificial Sequence
  Description of Artificial Sequence: Synthetic oligonucleotide
  Sense strand starting at position 231 of SEQ ID NO: 1884772
ccacuuaguggcuacauaa

SEQ ID NO: 2290871 - RNA, 19 nt, Artificial Sequence
  Description of Artificial Sequence: Synthetic oligonucleotide
  Antisense strand to SEQ ID NO: 2290870
uuauguagccacuaagugg

SEQ ID NO: 2290872 - RNA, 19 nt, Artificial Sequence
  Description of Artificial Sequence: Synthetic oligonucleotide
  Sense strand starting at position 241 of SEQ ID NO: 1884772
gcuacauaaccuugggcaa

SEQ ID NO: 2290873 - RNA, 19 nt, Artificial Sequence
  Description of Artificial Sequence: Synthetic oligonucleotide
  Antisense strand to SEQ ID NO: 2290872
uugcccaagguuauguagc

SEQ ID NO: 2290874 - RNA, 19 nt, Artificial Sequence
  Description of Artificial Sequence: Synthetic oligonucleotide
  Sense strand starting at position 320 of SEQ ID NO: 1884772
aacaucuuggaguggugaa

SEQ ID NO: 2290875 - RNA, 19 nt, Artificial Sequence
  Description of Artificial Sequence: Synthetic oligonucleotide
  Antisense strand to SEQ ID NO: 2290874
uucaccacuccaagauguu

SEQ ID NO: 2290876 - RNA, 19 nt, Artificial Sequence
  Description of Artificial Sequence: Synthetic oligonucleotide
  Sense strand starting at position 376 of SEQ ID NO: 1884772
aagccuggcccguuguaau

SEQ ID NO: 2290877 - RNA, 19 nt, Artificial Sequence
  Description of Artificial Sequence: Synthetic oligonucleotide
  Antisense strand to SEQ ID NO: 2290876
auuacaacgggccaggcuu

SEQ ID NO: 2290878 - RNA, 19 nt, Artificial Sequence
  Description of Artificial Sequence: Synthetic oligonucleotide
  Sense strand starting at position 450 of SEQ ID NO: 1884772
gcugucccugccuaugaaa

SEQ ID NO: 2290879 - RNA, 19 nt, Artificial Sequence
  Description of Artificial Sequence: Synthetic oligonucleotide
  Antisense strand to SEQ ID NO: 2290878
uuucauaggcagggacagc

SEQ ID NO: 2290880 - RNA, 19 nt, Artificial Sequence
  Description of Artificial Sequence: Synthetic oligonucleotide
  Sense strand starting at position 452 of SEQ ID NO: 1884772
ugucccugccuaugaaaua

SEQ ID NO: 2290881 - RNA, 19 nt, Artificial Sequence
  Description of Artificial Sequence: Synthetic oligonucleotide
  Antisense strand to SEQ ID NO: 2290880
uauuucauaggcagggaca

SEQ ID NO: 2290882 - RNA, 19 nt, Artificial Sequence
  Description of Artificial Sequence: Synthetic oligonucleotide
  Sense strand starting at position 1020 of SEQ ID NO: 1884772
uaauuuauugagcgccagu

SEQ ID NO: 2290883 - RNA, 19 nt, Artificial Sequence
  Description of Artificial Sequence: Synthetic oligonucleotide
  Antisense strand to SEQ ID NO: 2290882
acuggcgcucaauaaauua

SEQ ID NO: 2290884 - RNA, 19 nt, Artificial Sequence
  Description of Artificial Sequence: Synthetic oligonucleotide
  Sense strand starting at position 1119 of SEQ ID NO: 1884772
gucgucuuacacugaugga

SEQ ID NO: 2290885 - RNA, 19 nt, Artificial Sequence
  Description of Artificial Sequence: Synthetic oligonucleotide
  Antisense strand to SEQ ID NO: 2290884
uccaucaguguaagacgac

SEQ ID NO: 2290886 - RNA, 19 nt, Artificial Sequence
  Description of Artificial Sequence: Synthetic oligonucleotide
  Sense strand starting at position 1323 of SEQ ID NO: 1884772
gcugaauaacaagguguua

SEQ ID NO: 2290887 - RNA, 19 nt, Artificial Sequence
  Description of Artificial Sequence: Synthetic oligonucleotide
  Antisense strand to SEQ ID NO: 2290886
uaacaccuuguuauucagc

SEQ ID NO: 2290888 - RNA, 19 nt, Artificial Sequence
  Description of Artificial Sequence: Synthetic oligonucleotide
  Sense strand starting at position 1332 of SEQ ID NO: 1884772
caagguguuauuggguuaa

SEQ ID NO: 2290889 - RNA, 19 nt, Artificial Sequence
  Description of Artificial Sequence: Synthetic oligonucleotide
  Antisense strand to SEQ ID NO: 2290888
uuaacccaauaacaccuug

SEQ ID NO: 2290890 - RNA, 19 nt, Artificial Sequence
  Description of Artificial Sequence: Synthetic oligonucleotide
  Sense strand starting at position 1336 of SEQ ID NO: 1884772
guguuauuggguuaaggaa

SEQ ID NO: 2290891 - RNA, 19 nt, Artificial Sequence
  Description of Artificial Sequence: Synthetic oligonucleotide
  Antisense strand to SEQ ID NO: 2290890
uuccuuaacccaauaacac

SEQ ID NO: 2290892 - RNA, 19 nt, Artificial Sequence
  Description of Artificial Sequence: Synthetic oligonucleotide
  Sense strand starting at position 1719 of SEQ ID NO: 1884772
uagacaccguucuugagaa

SEQ ID NO: 2290893 - RNA, 19 nt, Artificial Sequence
  Description of Artificial Sequence: Synthetic oligonucleotide
  Antisense strand to SEQ ID NO: 2290892
uucucaagaacggugucua

SEQ ID NO: 2290894 - RNA, 19 nt, Artificial Sequence
  Description of Artificial Sequence: Synthetic oligonucleotide
  Sense strand starting at position 1738 of SEQ ID NO: 1884772
gcaauagauuucgaccaau

SEQ ID NO: 2290895 - RNA, 19 nt, Artificial Sequence
  Description of Artificial Sequence: Synthetic oligonucleotide
  Antisense strand to SEQ ID NO: 2290894
auuggucgaaaucuauugc

SEQ ID NO: 2290896 - RNA, 19 nt, Artificial Sequence
  Description of Artificial Sequence: Synthetic oligonucleotide
  Sense strand starting at position 2237 of SEQ ID NO: 1884772
ccagcacucugguuuauga

SEQ ID NO: 2290897 - RNA, 19 nt, Artificial Sequence
  Description of Artificial Sequence: Synthetic oligonucleotide
  Antisense strand to SEQ ID NO: 2290896
ucauaaaccagagugcugg

SEQ ID NO: 2290898 - RNA, 19 nt, Artificial Sequence
  Description of Artificial Sequence: Synthetic oligonucleotide
  Sense strand starting at position 2239 of SEQ ID NO: 1884772
agcacucugguuuaugaca

SEQ ID NO: 2290899 - RNA, 19 nt, Artificial Sequence
  Description of Artificial Sequence: Synthetic oligonucleotide
  Antisense strand to SEQ ID NO: 2290898
ugucauaaaccagagugcu

SEQ ID NO: 2290900 - RNA, 19 nt, Artificial Sequence
  Description of Artificial Sequence: Synthetic oligonucleotide
  Sense strand starting at position 2244 of SEQ ID NO: 1884772
ucugguuuaugacauuuga

SEQ ID NO: 2290901 - RNA, 19 nt, Artificial Sequence
  Description of Artificial Sequence: Synthetic oligonucleotide
  Antisense strand to SEQ ID NO: 2290900
ucaaaugucauaaaccaga

SEQ ID NO: 2290902 - RNA, 19 nt, Artificial Sequence
  Description of Artificial Sequence: Synthetic oligonucleotide
  Sense strand starting at position 2255 of SEQ ID NO: 1884772
acauuugaguugcucacuu

SEQ ID NO: 2290903 - RNA, 19 nt, Artificial Sequence
  Description of Artificial Sequence: Synthetic oligonucleotide
  Antisense strand to SEQ ID NO: 2290902
aagugagcaacucaaaugu

SEQ ID NO: 2290904 - RNA, 19 nt, Artificial Sequence
  Description of Artificial Sequence: Synthetic oligonucleotide
  Sense strand starting at position 2525 of SEQ ID NO: 1884772
uacgauauucuggguugaa

SEQ ID NO: 2290905 - RNA, 19 nt, Artificial Sequence
  Description of Artificial Sequence: Synthetic oligonucleotide
  Antisense strand to SEQ ID NO: 2290904
uucaacccagaauaucgua

SEQ ID NO: 2290906 - RNA, 19 nt, Artificial Sequence
  Description of Artificial Sequence: Synthetic oligonucleotide
  Sense strand starting at position 2526 of SEQ ID NO: 1884772
acgauauucuggguugaau

SEQ ID NO: 2290907 - RNA, 19 nt, Artificial Sequence
  Description of Artificial Sequence: Synthetic oligonucleotide
  Antisense strand to SEQ ID NO: 2290906
auucaacccagaauaucgu

SEQ ID NO: 2290908 - RNA, 19 nt, Artificial Sequence
  Description of Artificial Sequence: Synthetic oligonucleotide
  Sense strand starting at position 2528 of SEQ ID NO: 1884772
gauauucuggguugaaucu

SEQ ID NO: 2290909 - RNA, 19 nt, Artificial Sequence
  Description of Artificial Sequence: Synthetic oligonucleotide
  Antisense strand to SEQ ID NO: 2290908
agauucaacccagaauauc

SEQ ID NO: 2290910 - RNA, 19 nt, Artificial Sequence
  Description of Artificial Sequence: Synthetic oligonucleotide
  Sense strand starting at position 2534 of SEQ ID NO: 1884772
cuggguugaaucuaagcuu

SEQ ID NO: 2290911 - RNA, 19 nt, Artificial Sequence
  Description of Artificial Sequence: Synthetic oligonucleotide
  Antisense strand to SEQ ID NO: 2290910
aagcuuagauucaacccag

SEQ ID NO: 2290912 - RNA, 19 nt, Artificial Sequence
  Description of Artificial Sequence: Synthetic oligonucleotide
  Sense strand starting at position 2740 of SEQ ID NO: 1884772
uuugguugaauaugaaaug

SEQ ID NO: 2290913 - RNA, 19 nt, Artificial Sequence
  Description of Artificial Sequence: Synthetic oligonucleotide
  Antisense strand to SEQ ID NO: 2290912
cauuucauauucaaccaaa

SEQ ID NO: 2290914 - RNA, 19 nt, Artificial Sequence
  Description of Artificial Sequence: Synthetic oligonucleotide
  Sense strand starting at position 2836 of SEQ ID NO: 1884772
uacugauaggcucauguuu

SEQ ID NO: 2290915 - RNA, 19 nt, Artificial Sequence
  Description of Artificial Sequence: Synthetic oligonucleotide
  Antisense strand to SEQ ID NO: 2290914
aaacaugagccuaucagua

SEQ ID NO: 2290916 - RNA, 19 nt, Artificial Sequence
  Description of Artificial Sequence: Synthetic oligonucleotide
  Sense strand starting at position 2842 of SEQ ID NO: 1884772
uaggcucauguuugggaga

SEQ ID NO: 2290917 - RNA, 19 nt, Artificial Sequence
  Description of Artificial Sequence: Synthetic oligonucleotide
  Antisense strand to SEQ ID NO: 2290916
ucucccaaacaugagccua

SEQ ID NO: 2290918 - RNA, 19 nt, Artificial Sequence
  Description of Artificial Sequence: Synthetic oligonucleotide
  Sense strand starting at position 2858 of SEQ ID NO: 1884772
agaccaaagcaaugucuua

SEQ ID NO: 2290919 - RNA, 19 nt, Artificial Sequence
  Description of Artificial Sequence: Synthetic oligonucleotide
  Antisense strand to SEQ ID NO: 2290918
uaagacauugcuuuggucu

SEQ ID NO: 2290920 - RNA, 19 nt, Artificial Sequence
  Description of Artificial Sequence: Synthetic oligonucleotide
  Sense strand starting at position 2865 of SEQ ID NO: 1884772
agcaaugucuuagaauuua

SEQ ID NO: 2290921 - RNA, 19 nt, Artificial Sequence
  Description of Artificial Sequence: Synthetic oligonucleotide
  Antisense strand to SEQ ID NO: 2290920
uaaauucuaagacauugcu

SEQ ID NO: 2290922 - RNA, 19 nt, Artificial Sequence
  Description of Artificial Sequence: Synthetic oligonucleotide
  Sense strand starting at position 3373 of SEQ ID NO: 1884772
gcugacuugagcugggaga

SEQ ID NO: 2290923 - RNA, 19 nt, Artificial Sequence
  Description of Artificial Sequence: Synthetic oligonucleotide
  Antisense strand to SEQ ID NO: 2290922
ucucccagcucaagucagc

SEQ ID NO: 2290924 - RNA, 19 nt, Artificial Sequence
  Description of Artificial Sequence: Synthetic oligonucleotide
  Sense strand starting at position 3374 of SEQ ID NO: 1884772
cugacuugagcugggagau

SEQ ID NO: 2290925 - RNA, 19 nt, Artificial Sequence
  Description of Artificial Sequence: Synthetic oligonucleotide
  Antisense strand to SEQ ID NO: 2290924
aucucccagcucaagucag

SEQ ID NO: 2290926 - RNA, 19 nt, Artificial Sequence
  Description of Artificial Sequence: Synthetic oligonucleotide
  Sense strand starting at position 3529 of SEQ ID NO: 1884772
gauggaucaugagauuaga

SEQ ID NO: 2290927 - RNA, 19 nt, Artificial Sequence
  Description of Artificial Sequence: Synthetic oligonucleotide
  Antisense strand to SEQ ID NO: 2290926
ucuaaucucaugauccauc

SEQ ID NO: 2290928 - RNA, 19 nt, Artificial Sequence
  Description of Artificial Sequence: Synthetic oligonucleotide
  Sense strand starting at position 3757 of SEQ ID NO: 1884772
gagggacacuccguaucaa

SEQ ID NO: 2290929 - RNA, 19 nt, Artificial Sequence
  Description of Artificial Sequence: Synthetic oligonucleotide
  Antisense strand to SEQ ID NO: 2290928
uugauacggagugucccuc

SEQ ID NO: 2290930 - RNA, 19 nt, Artificial Sequence
  Description of Artificial Sequence: Synthetic oligonucleotide
  Sense strand starting at position 3854 of SEQ ID NO: 1884772
uggucuacuucccugauca

SEQ ID NO: 2290931 - RNA, 19 nt, Artificial Sequence
  Description of Artificial Sequence: Synthetic oligonucleotide
  Antisense strand to SEQ ID NO: 2290930
ugaucagggaaguagacca

SEQ ID NO: 2290932 - RNA, 19 nt, Artificial Sequence
  Description of Artificial Sequence: Synthetic oligonucleotide
  Sense strand starting at position 3855 of SEQ ID NO: 1884772
ggucuacuucccugaucau

SEQ ID NO: 2290933 - RNA, 19 nt, Artificial Sequence
  Description of Artificial Sequence: Synthetic oligonucleotide
  Antisense strand to SEQ ID NO: 2290932
augaucagggaaguagacc

SEQ ID NO: 2290934 - RNA, 19 nt, Artificial Sequence
  Description of Artificial Sequence: Synthetic oligonucleotide
  Sense strand starting at position 3856 of SEQ ID NO: 1884772
gucuacuucccugaucauu

SEQ ID NO: 2290935 - RNA, 19 nt, Artificial Sequence
  Description of Artificial Sequence: Synthetic oligonucleotide
  Antisense strand to SEQ ID NO: 2290934
aaugaucagggaaguagac

SEQ ID NO: 2290936 - RNA, 19 nt, Artificial Sequence
  Description of Artificial Sequence: Synthetic oligonucleotide
  Sense strand starting at position 3917 of SEQ ID NO: 1884772
agcaaauucugggugggua

SEQ ID NO: 2290937 - RNA, 19 nt, Artificial Sequence
  Description of Artificial Sequence: Synthetic oligonucleotide
  Antisense strand to SEQ ID NO: 2290936
uacccacccagaauuugcu

SEQ ID NO: 2290938 - RNA, 19 nt, Artificial Sequence
  Description of Artificial Sequence: Synthetic oligonucleotide
  Sense strand starting at position 3918 of SEQ ID NO: 1884772
gcaaauucuggguggguau

SEQ ID NO: 2290939 - RNA, 19 nt, Artificial Sequence
  Description of Artificial Sequence: Synthetic oligonucleotide
  Antisense strand to SEQ ID NO: 2290938
auacccacccagaauuugc

SEQ ID NO: 2290940 - RNA, 19 nt, Artificial Sequence
  Description of Artificial Sequence: Synthetic oligonucleotide
  Sense strand starting at position 3919 of SEQ ID NO: 1884772
caaauucuggguggguauu

SEQ ID NO: 2290941 - RNA, 19 nt, Artificial Sequence
  Description of Artificial Sequence: Synthetic oligonucleotide
  Antisense strand to SEQ ID NO: 2290940
aauacccacccagaauuug

SEQ ID NO: 2290942 - RNA, 19 nt, Artificial Sequence
  Description of Artificial Sequence: Synthetic oligonucleotide
  Sense strand starting at position 3946 of SEQ ID NO: 1884772
acagucuagcaguagauga

SEQ ID NO: 2290943 - RNA, 19 nt, Artificial Sequence
  Description of Artificial Sequence: Synthetic oligonucleotide
  Antisense strand to SEQ ID NO: 2290942
ucaucuacugcuagacugu

SEQ ID NO: 2290944 - RNA, 19 nt, Artificial Sequence
  Description of Artificial Sequence: Synthetic oligonucleotide
  Sense strand starting at position 3971 of SEQ ID NO: 1884772
uaaguugguggugaugaga

SEQ ID NO: 2290945 - RNA, 19 nt, Artificial Sequence
  Description of Artificial Sequence: Synthetic oligonucleotide
  Antisense strand to SEQ ID NO: 2290944
ucucaucaccaccaacuua

SEQ ID NO: 2290946 - RNA, 19 nt, Artificial Sequence
  Description of Artificial Sequence: Synthetic oligonucleotide
  Sense strand starting at position 192 of SEQ ID NO: 1884773
gcgagacgcguggcuuuau

SEQ ID NO: 2290947 - RNA, 19 nt, Artificial Sequence
  Description of Artificial Sequence: Synthetic oligonucleotide
  Antisense strand to SEQ ID NO: 2290946
auaaagccacgcgucucgc

SEQ ID NO: 2290948 - RNA, 19 nt, Artificial Sequence
  Description of Artificial Sequence: Synthetic oligonucleotide
  Sense strand starting at position 703 of SEQ ID NO: 1884773
cgccauguugcuuugcaaa

SEQ ID NO: 2290949 - RNA, 19 nt, Artificial Sequence
  Description of Artificial Sequence: Synthetic oligonucleotide
  Antisense strand to SEQ ID NO: 2290948
uuugcaaagcaacauggcg

SEQ ID NO: 2290950 - RNA, 19 nt, Artificial Sequence
  Description of Artificial Sequence: Synthetic oligonucleotide
  Sense strand starting at position 739 of SEQ ID NO: 1884773
gggaaacgucgcccgcuua

SEQ ID NO: 2290951 - RNA, 19 nt, Artificial Sequence
  Description of Artificial Sequence: Synthetic oligonucleotide
  Antisense strand to SEQ ID NO: 2290950
uaagcgggcgacguuuccc

SEQ ID NO: 2290952 - RNA, 19 nt, Artificial Sequence
  Description of Artificial Sequence: Synthetic oligonucleotide
  Sense strand starting at position 822 of SEQ ID NO: 1884773
cacgaagauuacuuacagu

SEQ ID NO: 2290953 - RNA, 19 nt, Artificial Sequence
  Description of Artificial Sequence: Synthetic oligonucleotide
  Antisense strand to SEQ ID NO: 2290952
acuguaaguaaucuucgug

SEQ ID NO: 2290954 - RNA, 19 nt, Artificial Sequence
  Description of Artificial Sequence: Synthetic oligonucleotide
  Sense strand starting at position 1069 of SEQ ID NO: 1884773
guuuccucccgggauccaa

SEQ ID NO: 2290955 - RNA, 19 nt, Artificial Sequence
  Description of Artificial Sequence: Synthetic oligonucleotide
  Antisense strand to SEQ ID NO: 2290954
uuggaucccgggaggaaac

SEQ ID NO: 2290956 - RNA, 19 nt, Artificial Sequence
  Description of Artificial Sequence: Synthetic oligonucleotide
  Sense strand starting at position 1361 of SEQ ID NO: 1884773
uuuccaauugucgggaaug

SEQ ID NO: 2290957 - RNA, 19 nt, Artificial Sequence
  Description of Artificial Sequence: Synthetic oligonucleotide
  Antisense strand to SEQ ID NO: 2290956
cauucccgacaauuggaaa

SEQ ID NO: 2290958 - RNA, 19 nt, Artificial Sequence
  Description of Artificial Sequence: Synthetic oligonucleotide
  Sense strand starting at position 1363 of SEQ ID NO: 1884773
uccaauugucgggaaugau

SEQ ID NO: 2290959 - RNA, 19 nt, Artificial Sequence
  Description of Artificial Sequence: Synthetic oligonucleotide
  Antisense strand to SEQ ID NO: 2290958
aucauucccgacaauugga

SEQ ID NO: 2290960 - RNA, 19 nt, Artificial Sequence
  Description of Artificial Sequence: Synthetic oligonucleotide
  Sense strand starting at position 1366 of SEQ ID NO: 1884773
aauugucgggaaugauaga

SEQ ID NO: 2290961 - RNA, 19 nt, Artificial Sequence
  Description of Artificial Sequence: Synthetic oligonucleotide
  Antisense strand to SEQ ID NO: 2290960
ucuaucauucccgacaauu

SEQ ID NO: 2290962 - RNA, 19 nt, Artificial Sequence
  Description of Artificial Sequence: Synthetic oligonucleotide
  Sense strand starting at position 1488 of SEQ ID NO: 1884773
gugaguuagagugcgcgaa

SEQ ID NO: 2290963 - RNA, 19 nt, Artificial Sequence
  Description of Artificial Sequence: Synthetic oligonucleotide
  Antisense strand to SEQ ID NO: 2290962
uucgcgcacucuaacucac

SEQ ID NO: 2290964 - RNA, 19 nt, Artificial Sequence
  Description of Artificial Sequence: Synthetic oligonucleotide
  Sense strand starting at position 1812 of SEQ ID NO: 1884773
ccauuauaggucugugagg

SEQ ID NO: 2290965 - RNA, 19 nt, Artificial Sequence
  Description of Artificial Sequence: Synthetic oligonucleotide
  Antisense strand to SEQ ID NO: 2290964
ccucacagaccuauaaugg

SEQ ID NO: 2290966 - RNA, 19 nt, Artificial Sequence
  Description of Artificial Sequence: Synthetic oligonucleotide
  Sense strand starting at position 1813 of SEQ ID NO: 1884773
cauuauaggucugugagga

SEQ ID NO: 2290967 - RNA, 19 nt, Artificial Sequence
  Description of Artificial Sequence: Synthetic oligonucleotide
  Antisense strand to SEQ ID NO: 2290966
uccucacagaccuauaaug

SEQ ID NO: 2290968 - RNA, 19 nt, Artificial Sequence
  Description of Artificial Sequence: Synthetic oligonucleotide
  Sense strand starting at position 1814 of SEQ ID NO: 1884773
auuauaggucugugaggaa

SEQ ID NO: 2290969 - RNA, 19 nt, Artificial Sequence
  Description of Artificial Sequence: Synthetic oligonucleotide
  Antisense strand to SEQ ID NO: 2290968
uuccucacagaccuauaau

SEQ ID NO: 2290970 - RNA, 19 nt, Artificial Sequence
  Description of Artificial Sequence: Synthetic oligonucleotide
  Sense strand starting at position 2118 of SEQ ID NO: 1884773
cagagcaaauucuugggau

SEQ ID NO: 2290971 - RNA, 19 nt, Artificial Sequence
  Description of Artificial Sequence: Synthetic oligonucleotide
  Antisense strand to SEQ ID NO: 2290970
aucccaagaauuugcucug

SEQ ID NO: 2290972 - RNA, 19 nt, Artificial Sequence
  Description of Artificial Sequence: Synthetic oligonucleotide
  Sense strand starting at position 2174 of SEQ ID NO: 1884773
ggcgauagcucauuuaaua

SEQ ID NO: 2290973 - RNA, 19 nt, Artificial Sequence
  Description of Artificial Sequence: Synthetic oligonucleotide
  Antisense strand to SEQ ID NO: 2290972
uauuaaaugagcuaucgcc

SEQ ID NO: 2290974 - RNA, 19 nt, Artificial Sequence
  Description of Artificial Sequence: Synthetic oligonucleotide
  Sense strand starting at position 2190 of SEQ ID NO: 1884773
auaggaaaccacuguuuau

SEQ ID NO: 2290975 - RNA, 19 nt, Artificial Sequence
  Description of Artificial Sequence: Synthetic oligonucleotide
  Antisense strand to SEQ ID NO: 2290974
auaaacagugguuuccuau

SEQ ID NO: 2290976 - RNA, 19 nt, Artificial Sequence
  Description of Artificial Sequence: Synthetic oligonucleotide
  Sense strand starting at position 2253 of SEQ ID NO: 1884773
ugaggcuacaucugugaau

SEQ ID NO: 2290977 - RNA, 19 nt, Artificial Sequence
  Description of Artificial Sequence: Synthetic oligonucleotide
  Antisense strand to SEQ ID NO: 2290976
auucacagauguagccuca

SEQ ID NO: 2290978 - RNA, 19 nt, Artificial Sequence
  Description of Artificial Sequence: Synthetic oligonucleotide
  Sense strand starting at position 2254 of SEQ ID NO: 1884773
gaggcuacaucugugaaua

SEQ ID NO: 2290979 - RNA, 19 nt, Artificial Sequence
  Description of Artificial Sequence: Synthetic oligonucleotide
  Antisense strand to SEQ ID NO: 2290978
uauucacagauguagccuc

SEQ ID NO: 2290980 - RNA, 19 nt, Artificial Sequence
  Description of Artificial Sequence: Synthetic oligonucleotide
  Sense strand starting at position 2255 of SEQ ID NO: 1884773
aggcuacaucugugaauaa

SEQ ID NO: 2290981 - RNA, 19 nt, Artificial Sequence
  Description of Artificial Sequence: Synthetic oligonucleotide
  Antisense strand to SEQ ID NO: 2290980
uuauucacagauguagccu

SEQ ID NO: 2290982 - RNA, 19 nt, Artificial Sequence
  Description of Artificial Sequence: Synthetic oligonucleotide
  Sense strand starting at position 2403 of SEQ ID NO: 1884773
ugagaacguguucacauga

SEQ ID NO: 2290983 - RNA, 19 nt, Artificial Sequence
  Description of Artificial Sequence: Synthetic oligonucleotide
  Antisense strand to SEQ ID NO: 2290982
ucaugugaacacguucuca

SEQ ID NO: 2290984 - RNA, 19 nt, Artificial Sequence
  Description of Artificial Sequence: Synthetic oligonucleotide
  Sense strand starting at position 2408 of SEQ ID NO: 1884773
acguguucacaugauaggu

SEQ ID NO: 2290985 - RNA, 19 nt, Artificial Sequence
  Description of Artificial Sequence: Synthetic oligonucleotide
  Antisense strand to SEQ ID NO: 2290984
accuaucaugugaacacgu

SEQ ID NO: 2290986 - RNA, 19 nt, Artificial Sequence
  Description of Artificial Sequence: Synthetic oligonucleotide
  Sense strand starting at position 2465 of SEQ ID NO: 1884773
gguaaugcccucuauaucu

SEQ ID NO: 2290987 - RNA, 19 nt, Artificial Sequence
  Description of Artificial Sequence: Synthetic oligonucleotide
  Antisense strand to SEQ ID NO: 2290986
agauauagagggcauuacc

SEQ ID NO: 2290988 - RNA, 19 nt, Artificial Sequence
  Description of Artificial Sequence: Synthetic oligonucleotide
  Sense strand starting at position 2560 of SEQ ID NO: 1884773
guggccuuucacugaagga

SEQ ID NO: 2290989 - RNA, 19 nt, Artificial Sequence
  Description of Artificial Sequence: Synthetic oligonucleotide
  Antisense strand to SEQ ID NO: 2290988
uccuucagugaaaggccac

SEQ ID NO: 2290990 - RNA, 19 nt, Artificial Sequence
  Description of Artificial Sequence: Synthetic oligonucleotide
  Sense strand starting at position 2609 of SEQ ID NO: 1884773
gacugugaccucuguacaa

SEQ ID NO: 2290991 - RNA, 19 nt, Artificial Sequence
  Description of Artificial Sequence: Synthetic oligonucleotide
  Antisense strand to SEQ ID NO: 2290990
uuguacagaggucacaguc

SEQ ID NO: 2290992 - RNA, 19 nt, Artificial Sequence
  Description of Artificial Sequence: Synthetic oligonucleotide
  Sense strand starting at position 2631 of SEQ ID NO: 1884773
cagggauccugucuuaucu

SEQ ID NO: 2290993 - RNA, 19 nt, Artificial Sequence
  Description of Artificial Sequence: Synthetic oligonucleotide
  Antisense strand to SEQ ID NO: 2290992
agauaagacaggaucccug

SEQ ID NO: 2290994 - RNA, 19 nt, Artificial Sequence
  Description of Artificial Sequence: Synthetic oligonucleotide
  Sense strand starting at position 2965 of SEQ ID NO: 1884773
aggaauugccgagaaugug

SEQ ID NO: 2290995 - RNA, 19 nt, Artificial Sequence
  Description of Artificial Sequence: Synthetic oligonucleotide
  Antisense strand to SEQ ID NO: 2290994
cacauucucggcaauuccu

SEQ ID NO: 2290996 - RNA, 19 nt, Artificial Sequence
  Description of Artificial Sequence: Synthetic oligonucleotide
  Sense strand starting at position 3157 of SEQ ID NO: 1884773
ucaagccaucuuugaagau

SEQ ID NO: 2290997 - RNA, 19 nt, Artificial Sequence
  Description of Artificial Sequence: Synthetic oligonucleotide
  Antisense strand to SEQ ID NO: 2290996
aucuucaaagauggcuuga

SEQ ID NO: 2290998 - RNA, 19 nt, Artificial Sequence
  Description of Artificial Sequence: Synthetic oligonucleotide
  Sense strand starting at position 3172 of SEQ ID NO: 1884773
agaugauggugguuuagua

SEQ ID NO: 2290999 - RNA, 19 nt, Artificial Sequence
  Description of Artificial Sequence: Synthetic oligonucleotide
  Antisense strand to SEQ ID NO: 2290998
uacuaaaccaccaucaucu

SEQ ID NO: 2291000 - RNA, 19 nt, Artificial Sequence
  Description of Artificial Sequence: Synthetic oligonucleotide
  Sense strand starting at position 3323 of SEQ ID NO: 1884773
ugguucauuuguuucgaga

SEQ ID NO: 2291001 - RNA, 19 nt, Artificial Sequence
  Description of Artificial Sequence: Synthetic oligonucleotide
  Antisense strand to SEQ ID NO: 2291000
ucucgaaacaaaugaacca

SEQ ID NO: 2291002 - RNA, 19 nt, Artificial Sequence
  Description of Artificial Sequence: Synthetic oligonucleotide
  Sense strand starting at position 3334 of SEQ ID NO: 1884773
uuucgagaggauggugaau

SEQ ID NO: 2291003 - RNA, 19 nt, Artificial Sequence
  Description of Artificial Sequence: Synthetic oligonucleotide
  Antisense strand to SEQ ID NO: 2291002
auucaccauccucucgaaa

SEQ ID NO: 2291004 - RNA, 19 nt, Artificial Sequence
  Description of Artificial Sequence: Synthetic oligonucleotide
  Sense strand starting at position 3346 of SEQ ID NO: 1884773
ggugaauugagauguucuu

SEQ ID NO: 2291005 - RNA, 19 nt, Artificial Sequence
  Description of Artificial Sequence: Synthetic oligonucleotide
  Antisense strand to SEQ ID NO: 2291004
aagaacaucucaauucacc

SEQ ID NO: 2291006 - RNA, 19 nt, Artificial Sequence
  Description of Artificial Sequence: Synthetic oligonucleotide
  Sense strand starting at position 3436 of SEQ ID NO: 1884773
cccuuuaucccagaaguug

SEQ ID NO: 2291007 - RNA, 19 nt, Artificial Sequence
  Description of Artificial Sequence: Synthetic oligonucleotide
  Antisense strand to SEQ ID NO: 2291006
caacuucugggauaaaggg

SEQ ID NO: 2291008 - RNA, 19 nt, Artificial Sequence
  Description of Artificial Sequence: Synthetic oligonucleotide
  Sense strand starting at position 3556 of SEQ ID NO: 1884773
ugguuuagcaaaugaaaga

SEQ ID NO: 2291009 - RNA, 19 nt, Artificial Sequence
  Description of Artificial Sequence: Synthetic oligonucleotide
  Antisense strand to SEQ ID NO: 2291008
ucuuucauuugcuaaacca

SEQ ID NO: 2291010 - RNA, 19 nt, Artificial Sequence
  Description of Artificial Sequence: Synthetic oligonucleotide
  Sense strand starting at position 3579 of SEQ ID NO: 1884773
ccagguucuccaggugaau

SEQ ID NO: 2291011 - RNA, 19 nt, Artificial Sequence
  Description of Artificial Sequence: Synthetic oligonucleotide
  Antisense strand to SEQ ID NO: 2291010
auucaccuggagaaccugg

SEQ ID NO: 2291012 - RNA, 19 nt, Artificial Sequence
  Description of Artificial Sequence: Synthetic oligonucleotide
  Sense strand starting at position 3644 of SEQ ID NO: 1884773
gaugacagcucaguggaua

SEQ ID NO: 2291013 - RNA, 19 nt, Artificial Sequence
  Description of Artificial Sequence: Synthetic oligonucleotide
  Antisense strand to SEQ ID NO: 2291012
uauccacugagcugucauc

SEQ ID NO: 2291014 - RNA, 19 nt, Artificial Sequence
  Description of Artificial Sequence: Synthetic oligonucleotide
  Sense strand starting at position 3672 of SEQ ID NO: 1884773
ucugguagcacauacgaua

SEQ ID NO: 2291015 - RNA, 19 nt, Artificial Sequence
  Description of Artificial Sequence: Synthetic oligonucleotide
  Antisense strand to SEQ ID NO: 2291014
uaucguaugugcuaccaga

SEQ ID NO: 2291016 - RNA, 19 nt, Artificial Sequence
  Description of Artificial Sequence: Synthetic oligonucleotide
  Sense strand starting at position 3738 of SEQ ID NO: 1884773
guaaguaucucagugaaag

SEQ ID NO: 2291017 - RNA, 19 nt, Artificial Sequence
  Description of Artificial Sequence: Synthetic oligonucleotide
  Antisense strand to SEQ ID NO: 2291016
cuuucacugagauacuuac

SEQ ID NO: 2291018 - RNA, 19 nt, Artificial Sequence
  Description of Artificial Sequence: Synthetic oligonucleotide
  Sense strand starting at position 3739 of SEQ ID NO: 1884773
uaaguaucucagugaaaga

SEQ ID NO: 2291019 - RNA, 19 nt, Artificial Sequence
  Description of Artificial Sequence: Synthetic oligonucleotide
  Antisense strand to SEQ ID NO: 2291018
ucuuucacugagauacuua

SEQ ID NO: 2291020 - RNA, 19 nt, Artificial Sequence
  Description of Artificial Sequence: Synthetic oligonucleotide
  Sense strand starting at position 3923 of SEQ ID NO: 1884773
uccuuuagucaugaugaca

SEQ ID NO: 2291021 - RNA, 19 nt, Artificial Sequence
  Description of Artificial Sequence: Synthetic oligonucleotide
  Antisense strand to SEQ ID NO: 2291020
ugucaucaugacuaaagga

SEQ ID NO: 2291022 - RNA, 19 nt, Artificial Sequence
  Description of Artificial Sequence: Synthetic oligonucleotide
  Sense strand starting at position 3936 of SEQ ID NO: 1884773
augacaauggccugugaaa

SEQ ID NO: 2291023 - RNA, 19 nt, Artificial Sequence
  Description of Artificial Sequence: Synthetic oligonucleotide
  Antisense strand to SEQ ID NO: 2291022
uuucacaggccauugucau

SEQ ID NO: 2291024 - RNA, 19 nt, Artificial Sequence
  Description of Artificial Sequence: Synthetic oligonucleotide
  Sense strand starting at position 3938 of SEQ ID NO: 1884773
gacaauggccugugaaaca

SEQ ID NO: 2291025 - RNA, 19 nt, Artificial Sequence
  Description of Artificial Sequence: Synthetic oligonucleotide
  Antisense strand to SEQ ID NO: 2291024
uguuucacaggccauuguc

SEQ ID NO: 2291026 - RNA, 19 nt, Artificial Sequence
  Description of Artificial Sequence: Synthetic oligonucleotide
  Sense strand starting at position 406 of SEQ ID NO: 1884774
caugguuucuaugucugaa

SEQ ID NO: 2291027 - RNA, 19 nt, Artificial Sequence
  Description of Artificial Sequence: Synthetic oligonucleotide
  Antisense strand to SEQ ID NO: 2291026
uucagacauagaaaccaug

SEQ ID NO: 2291028 - RNA, 19 nt, Artificial Sequence
  Description of Artificial Sequence: Synthetic oligonucleotide
  Sense strand starting at position 410 of SEQ ID NO: 1884774
guuucuaugucugaaccca

SEQ ID NO: 2291029 - RNA, 19 nt, Artificial Sequence
  Description of Artificial Sequence: Synthetic oligonucleotide
  Antisense strand to SEQ ID NO: 2291028
uggguucagacauagaaac

SEQ ID NO: 2291030 - RNA, 19 nt, Artificial Sequence
  Description of Artificial Sequence: Synthetic oligonucleotide
  Sense strand starting at position 418 of SEQ ID NO: 1884774
gucugaacccaugaaucuu

SEQ ID NO: 2291031 - RNA, 19 nt, Artificial Sequence
  Description of Artificial Sequence: Synthetic oligonucleotide
  Antisense strand to SEQ ID NO: 2291030
aagauucauggguucagac

SEQ ID NO: 2291032 - RNA, 19 nt, Artificial Sequence
  Description of Artificial Sequence: Synthetic oligonucleotide
  Sense strand starting at position 439 of SEQ ID NO: 1884774
uucugaaagguccaacuuu

SEQ ID NO: 2291033 - RNA, 19 nt, Artificial Sequence
  Description of Artificial Sequence: Synthetic oligonucleotide
  Antisense strand to SEQ ID NO: 2291032
aaaguuggaccuuucagaa

SEQ ID NO: 2291034 - RNA, 19 nt, Artificial Sequence
  Description of Artificial Sequence: Synthetic oligonucleotide
  Sense strand starting at position 616 of SEQ ID NO: 1884774
gucugaguguccuaugcuc

SEQ ID NO: 2291035 - RNA, 19 nt, Artificial Sequence
  Description of Artificial Sequence: Synthetic oligonucleotide
  Antisense strand to SEQ ID NO: 2291034
gagcauaggacacucagac

SEQ ID NO: 2291036 - RNA, 19 nt, Artificial Sequence
  Description of Artificial Sequence: Synthetic oligonucleotide
  Sense strand starting at position 821 of SEQ ID NO: 1884774
uaccuuaugucagugguaa

SEQ ID NO: 2291037 - RNA, 19 nt, Artificial Sequence
  Description of Artificial Sequence: Synthetic oligonucleotide
  Antisense strand to SEQ ID NO: 2291036
uuaccacugacauaaggua

SEQ ID NO: 2291038 - RNA, 19 nt, Artificial Sequence
  Description of Artificial Sequence: Synthetic oligonucleotide
  Sense strand starting at position 822 of SEQ ID NO: 1884774
accuuaugucagugguaag

SEQ ID NO: 2291039 - RNA, 19 nt, Artificial Sequence
  Description of Artificial Sequence: Synthetic oligonucleotide
  Antisense strand to SEQ ID NO: 2291038
cuuaccacugacauaaggu

SEQ ID NO: 2291040 - RNA, 19 nt, Artificial Sequence
  Description of Artificial Sequence: Synthetic oligonucleotide
  Sense strand starting at position 823 of SEQ ID NO: 1884774
ccuuaugucagugguaagu

SEQ ID NO: 2291041 - RNA, 19 nt, Artificial Sequence
  Description of Artificial Sequence: Synthetic oligonucleotide
  Antisense strand to SEQ ID NO: 2291040
acuuaccacugacauaagg

SEQ ID NO: 2291042 - RNA, 19 nt, Artificial Sequence
  Description of Artificial Sequence: Synthetic oligonucleotide
  Sense strand starting at position 825 of SEQ ID NO: 1884774
uuaugucagugguaaguuc

SEQ ID NO: 2291043 - RNA, 19 nt, Artificial Sequence
  Description of Artificial Sequence: Synthetic oligonucleotide
  Antisense strand to SEQ ID NO: 2291042
gaacuuaccacugacauaa

SEQ ID NO: 2291044 - RNA, 19 nt, Artificial Sequence
  Description of Artificial Sequence: Synthetic oligonucleotide
  Sense strand starting at position 832 of SEQ ID NO: 1884774
agugguaaguuccaggcaa

SEQ ID NO: 2291045 - RNA, 19 nt, Artificial Sequence
  Description of Artificial Sequence: Synthetic oligonucleotide
  Antisense strand to SEQ ID NO: 2291044
uugccuggaacuuaccacu

SEQ ID NO: 2291046 - RNA, 19 nt, Artificial Sequence
  Description of Artificial Sequence: Synthetic oligonucleotide
  Sense strand starting at position 834 of SEQ ID NO: 1884774
ugguaaguuccaggcaacu

SEQ ID NO: 2291047 - RNA, 19 nt, Artificial Sequence
  Description of Artificial Sequence: Synthetic oligonucleotide
  Antisense strand to SEQ ID NO: 2291046
aguugccuggaacuuacca

SEQ ID NO: 2291048 - RNA, 19 nt, Artificial Sequence
  Description of Artificial Sequence: Synthetic oligonucleotide
  Sense strand starting at position 1181 of SEQ ID NO: 1884774
acagaaagcuccuaggauu

SEQ ID NO: 2291049 - RNA, 19 nt, Artificial Sequence
  Description of Artificial Sequence: Synthetic oligonucleotide
  Antisense strand to SEQ ID NO: 2291048
aauccuaggagcuuucugu

SEQ ID NO: 2291050 - RNA, 19 nt, Artificial Sequence
  Description of Artificial Sequence: Synthetic oligonucleotide
  Sense strand starting at position 1189 of SEQ ID NO: 1884774
cuccuaggauuagggauaa

SEQ ID NO: 2291051 - RNA, 19 nt, Artificial Sequence
  Description of Artificial Sequence: Synthetic oligonucleotide
  Antisense strand to SEQ ID NO: 2291050
uuaucccuaauccuaggag

SEQ ID NO: 2291052 - RNA, 19 nt, Artificial Sequence
  Description of Artificial Sequence: Synthetic oligonucleotide
  Sense strand starting at position 1221 of SEQ ID NO: 1884774
agcagaguccacuguuuag

SEQ ID NO: 2291053 - RNA, 19 nt, Artificial Sequence
  Description of Artificial Sequence: Synthetic oligonucleotide
  Antisense strand to SEQ ID NO: 2291052
cuaaacaguggacucugcu

SEQ ID NO: 2291054 - RNA, 19 nt, Artificial Sequence
  Description of Artificial Sequence: Synthetic oligonucleotide
  Sense strand starting at position 1225 of SEQ ID NO: 1884774
gaguccacuguuuaggaga

SEQ ID NO: 2291055 - RNA, 19 nt, Artificial Sequence
  Description of Artificial Sequence: Synthetic oligonucleotide
  Antisense strand to SEQ ID NO: 2291054
ucuccuaaacaguggacuc

SEQ ID NO: 2291056 - RNA, 19 nt, Artificial Sequence
  Description of Artificial Sequence: Synthetic oligonucleotide
  Sense strand starting at position 1721 of SEQ ID NO: 1884774
ggccaagacucaucggauc

SEQ ID NO: 2291057 - RNA, 19 nt, Artificial Sequence
  Description of Artificial Sequence: Synthetic oligonucleotide
  Antisense strand to SEQ ID NO: 2291056
gauccgaugagucuuggcc

SEQ ID NO: 2291058 - RNA, 19 nt, Artificial Sequence
  Description of Artificial Sequence: Synthetic oligonucleotide
  Sense strand starting at position 1735 of SEQ ID NO: 1884774
ggaucuccuucugcagaca

SEQ ID NO: 2291059 - RNA, 19 nt, Artificial Sequence
  Description of Artificial Sequence: Synthetic oligonucleotide
  Antisense strand to SEQ ID NO: 2291058
ugucugcagaaggagaucc

SEQ ID NO: 2291060 - RNA, 19 nt, Artificial Sequence
  Description of Artificial Sequence: Synthetic oligonucleotide
  Sense strand starting at position 2284 of SEQ ID NO: 1884774
ggagguuucucagccgguu

SEQ ID NO: 2291061 - RNA, 19 nt, Artificial Sequence
  Description of Artificial Sequence: Synthetic oligonucleotide
  Antisense strand to SEQ ID NO: 2291060
aaccggcugagaaaccucc

SEQ ID NO: 2291062 - RNA, 19 nt, Artificial Sequence
  Description of Artificial Sequence: Synthetic oligonucleotide
  Sense strand starting at position 2286 of SEQ ID NO: 1884774
agguuucucagccgguuau

SEQ ID NO: 2291063 - RNA, 19 nt, Artificial Sequence
  Description of Artificial Sequence: Synthetic oligonucleotide
  Antisense strand to SEQ ID NO: 2291062
auaaccggcugagaaaccu

SEQ ID NO: 2291064 - RNA, 19 nt, Artificial Sequence
  Description of Artificial Sequence: Synthetic oligonucleotide
  Sense strand starting at position 2289 of SEQ ID NO: 1884774
uuucucagccgguuauguu

SEQ ID NO: 2291065 - RNA, 19 nt, Artificial Sequence
  Description of Artificial Sequence: Synthetic oligonucleotide
  Antisense strand to SEQ ID NO: 2291064
aacauaaccggcugagaaa

SEQ ID NO: 2291066 - RNA, 19 nt, Artificial Sequence
  Description of Artificial Sequence: Synthetic oligonucleotide
  Sense strand starting at position 2437 of SEQ ID NO: 1884774
gaggucaggucuugaaauc

SEQ ID NO: 2291067 - RNA, 19 nt, Artificial Sequence
  Description of Artificial Sequence: Synthetic oligonucleotide
  Antisense strand to SEQ ID NO: 2291066
gauuucaagaccugaccuc

SEQ ID NO: 2291068 - RNA, 19 nt, Artificial Sequence
  Description of Artificial Sequence: Synthetic oligonucleotide
  Sense strand starting at position 2785 of SEQ ID NO: 1884774
agcagaaaccagugagucu

SEQ ID NO: 2291069 - RNA, 19 nt, Artificial Sequence
  Description of Artificial Sequence: Synthetic oligonucleotide
  Antisense strand to SEQ ID NO: 2291068
agacucacugguuucugcu

SEQ ID NO: 2291070 - RNA, 19 nt, Artificial Sequence
  Description of Artificial Sequence: Synthetic oligonucleotide
  Sense strand starting at position 3243 of SEQ ID NO: 1884774
uucugagaauuccuuugac

SEQ ID NO: 2291071 - RNA, 19 nt, Artificial Sequence
  Description of Artificial Sequence: Synthetic oligonucleotide
  Antisense strand to SEQ ID NO: 2291070
gucaaaggaauucucagaa

SEQ ID NO: 2291072 - RNA, 19 nt, Artificial Sequence
  Description of Artificial Sequence: Synthetic oligonucleotide
  Sense strand starting at position 3368 of SEQ ID NO: 1884774
gcaggugcucuccagaaag

SEQ ID NO: 2291073 - RNA, 19 nt, Artificial Sequence
  Description of Artificial Sequence: Synthetic oligonucleotide
  Antisense strand to SEQ ID NO: 2291072
cuuucuggagagcaccugc

SEQ ID NO: 2291074 - RNA, 19 nt, Artificial Sequence
  Description of Artificial Sequence: Synthetic oligonucleotide
  Sense strand starting at position 3370 of SEQ ID NO: 1884774
aggugcucuccagaaagcu

SEQ ID NO: 2291075 - RNA, 19 nt, Artificial Sequence
  Description of Artificial Sequence: Synthetic oligonucleotide
  Antisense strand to SEQ ID NO: 2291074
agcuuucuggagagcaccu

SEQ ID NO: 2291076 - RNA, 19 nt, Artificial Sequence
  Description of Artificial Sequence: Synthetic oligonucleotide
  Sense strand starting at position 3882 of SEQ ID NO: 1884774
guguucucacgcuaauuug

SEQ ID NO: 2291077 - RNA, 19 nt, Artificial Sequence
  Description of Artificial Sequence: Synthetic oligonucleotide
  Antisense strand to SEQ ID NO: 2291076
caaauuagcgugagaacac

SEQ ID NO: 2291078 - RNA, 19 nt, Artificial Sequence
  Description of Artificial Sequence: Synthetic oligonucleotide
  Sense strand starting at position 276 of SEQ ID NO: 1884775
gugagauggguccgaagca

SEQ ID NO: 2291079 - RNA, 19 nt, Artificial Sequence
  Description of Artificial Sequence: Synthetic oligonucleotide
  Antisense strand to SEQ ID NO: 2291078
ugcuucggacccaucucac

SEQ ID NO: 2291080 - RNA, 19 nt, Artificial Sequence
  Description of Artificial Sequence: Synthetic oligonucleotide
  Sense strand starting at position 607 of SEQ ID NO: 1884775
ugccaaggcccucagauau

SEQ ID NO: 2291081 - RNA, 19 nt, Artificial Sequence
  Description of Artificial Sequence: Synthetic oligonucleotide
  Antisense strand to SEQ ID NO: 2291080
auaucugagggccuuggca

SEQ ID NO: 2291082 - RNA, 19 nt, Artificial Sequence
  Description of Artificial Sequence: Synthetic oligonucleotide
  Sense strand starting at position 935 of SEQ ID NO: 1884775
agggaaugccugugagaag

SEQ ID NO: 2291083 - RNA, 19 nt, Artificial Sequence
  Description of Artificial Sequence: Synthetic oligonucleotide
  Antisense strand to SEQ ID NO: 2291082
cuucucacaggcauucccu

SEQ ID NO: 2291084 - RNA, 19 nt, Artificial Sequence
  Description of Artificial Sequence: Synthetic oligonucleotide
  Sense strand starting at position 942 of SEQ ID NO: 1884775
gccugugagaagugacuca

SEQ ID NO: 2291085 - RNA, 19 nt, Artificial Sequence
  Description of Artificial Sequence: Synthetic oligonucleotide
  Antisense strand to SEQ ID NO: 2291084
ugagucacuucucacaggc

SEQ ID NO: 2291086 - RNA, 19 nt, Artificial Sequence
  Description of Artificial Sequence: Synthetic oligonucleotide
  Sense strand starting at position 1017 of SEQ ID NO: 1884775
cccaguuuccagugaagaa

SEQ ID NO: 2291087 - RNA, 19 nt, Artificial Sequence
  Description of Artificial Sequence: Synthetic oligonucleotide
  Antisense strand to SEQ ID NO: 2291086
uucuucacuggaaacuggg

SEQ ID NO: 2291088 - RNA, 19 nt, Artificial Sequence
  Description of Artificial Sequence: Synthetic oligonucleotide
  Sense strand starting at position 1029 of SEQ ID NO: 1884775
ugaagaaacuuccuggcga

SEQ ID NO: 2291089 - RNA, 19 nt, Artificial Sequence
  Description of Artificial Sequence: Synthetic oligonucleotide
  Antisense strand to SEQ ID NO: 2291088
ucgccaggaaguuucuuca

SEQ ID NO: 2291090 - RNA, 19 nt, Artificial Sequence
  Description of Artificial Sequence: Synthetic oligonucleotide
  Sense strand starting at position 1066 of SEQ ID NO: 1884775
ggaguuaaugacugcugca

SEQ ID NO: 2291091 - RNA, 19 nt, Artificial Sequence
  Description of Artificial Sequence: Synthetic oligonucleotide
  Antisense strand to SEQ ID NO: 2291090
ugcagcagucauuaacucc

SEQ ID NO: 2291092 - RNA, 19 nt, Artificial Sequence
  Description of Artificial Sequence: Synthetic oligonucleotide
  Sense strand starting at position 1111 of SEQ ID NO: 1884775
ugcugagcccucuaacuua

SEQ ID NO: 2291093 - RNA, 19 nt, Artificial Sequence
  Description of Artificial Sequence: Synthetic oligonucleotide
  Antisense strand to SEQ ID NO: 2291092
uaaguuagagggcucagca

SEQ ID NO: 2291094 - RNA, 19 nt, Artificial Sequence
  Description of Artificial Sequence: Synthetic oligonucleotide
  Sense strand starting at position 1194 of SEQ ID NO: 1884775
ggcucaacucccgaaguua

SEQ ID NO: 2291095 - RNA, 19 nt, Artificial Sequence
  Description of Artificial Sequence: Synthetic oligonucleotide
  Antisense strand to SEQ ID NO: 2291094
uaacuucgggaguugagcc

SEQ ID NO: 2291096 - RNA, 19 nt, Artificial Sequence
  Description of Artificial Sequence: Synthetic oligonucleotide
  Sense strand starting at position 1316 of SEQ ID NO: 1884775
gcuguuggucugggagaac

SEQ ID NO: 2291097 - RNA, 19 nt, Artificial Sequence
  Description of Artificial Sequence: Synthetic oligonucleotide
  Antisense strand to SEQ ID NO: 2291096
guucucccagaccaacagc

SEQ ID NO: 2291098 - RNA, 19 nt, Artificial Sequence
  Description of Artificial Sequence: Synthetic oligonucleotide
  Sense strand starting at position 1335 of SEQ ID NO: 1884775
gucuaucauggugacugua

SEQ ID NO: 2291099 - RNA, 19 nt, Artificial Sequence
  Description of Artificial Sequence: Synthetic oligonucleotide
  Antisense strand to SEQ ID NO: 2291098
uacagucaccaugauagac

SEQ ID NO: 2291100 - RNA, 19 nt, Artificial Sequence
  Description of Artificial Sequence: Synthetic oligonucleotide
  Sense strand starting at position 1351 of SEQ ID NO: 1884775
guaggugucaauggacuga

SEQ ID NO: 2291101 - RNA, 19 nt, Artificial Sequence
  Description of Artificial Sequence: Synthetic oligonucleotide
  Antisense strand to SEQ ID NO: 2291100
ucaguccauugacaccuac

SEQ ID NO: 2291102 - RNA, 19 nt, Artificial Sequence
  Description of Artificial Sequence: Synthetic oligonucleotide
  Sense strand starting at position 1356 of SEQ ID NO: 1884775
ugucaauggacugaugcua

SEQ ID NO: 2291103 - RNA, 19 nt, Artificial Sequence
  Description of Artificial Sequence: Synthetic oligonucleotide
  Antisense strand to SEQ ID NO: 2291102
uagcaucaguccauugaca

SEQ ID NO: 2291104 - RNA, 19 nt, Artificial Sequence
  Description of Artificial Sequence: Synthetic oligonucleotide
  Sense strand starting at position 1512 of SEQ ID NO: 1884775
uagaaucaugagugauuac

SEQ ID NO: 2291105 - RNA, 19 nt, Artificial Sequence
  Description of Artificial Sequence: Synthetic oligonucleotide
  Antisense strand to SEQ ID NO: 2291104
guaaucacucaugauucua

SEQ ID NO: 2291106 - RNA, 19 nt, Artificial Sequence
  Description of Artificial Sequence: Synthetic oligonucleotide
  Sense strand starting at position 1589 of SEQ ID NO: 1884775
gcuuuauugguugacagcu

SEQ ID NO: 2291107 - RNA, 19 nt, Artificial Sequence
  Description of Artificial Sequence: Synthetic oligonucleotide
  Antisense strand to SEQ ID NO: 2291106
agcugucaaccaauaaagc

SEQ ID NO: 2291108 - RNA, 19 nt, Artificial Sequence
  Description of Artificial Sequence: Synthetic oligonucleotide
  Sense strand starting at position 1597 of SEQ ID NO: 1884775
gguugacagcuguaucagu

SEQ ID NO: 2291109 - RNA, 19 nt, Artificial Sequence
  Description of Artificial Sequence: Synthetic oligonucleotide
  Antisense strand to SEQ ID NO: 2291108
acugauacagcugucaacc

SEQ ID NO: 2291110 - RNA, 19 nt, Artificial Sequence
  Description of Artificial Sequence: Synthetic oligonucleotide
  Sense strand starting at position 1604 of SEQ ID NO: 1884775
agcuguaucagucacucga

SEQ ID NO: 2291111 - RNA, 19 nt, Artificial Sequence
  Description of Artificial Sequence: Synthetic oligonucleotide
  Antisense strand to SEQ ID NO: 2291110
ucgagugacugauacagcu

SEQ ID NO: 2291112 - RNA, 19 nt, Artificial Sequence
  Description of Artificial Sequence: Synthetic oligonucleotide
  Sense strand starting at position 1722 of SEQ ID NO: 1884775
cuggaauugagaggccuaa

SEQ ID NO: 2291113 - RNA, 19 nt, Artificial Sequence
  Description of Artificial Sequence: Synthetic oligonucleotide
  Antisense strand to SEQ ID NO: 2291112
uuaggccucucaauuccag

SEQ ID NO: 2291114 - RNA, 19 nt, Artificial Sequence
  Description of Artificial Sequence: Synthetic oligonucleotide
  Sense strand starting at position 2789 of SEQ ID NO: 1884775
agaggaaagcucuagucgu

SEQ ID NO: 2291115 - RNA, 19 nt, Artificial Sequence
  Description of Artificial Sequence: Synthetic oligonucleotide
  Antisense strand to SEQ ID NO: 2291114
acgacuagagcuuuccucu

SEQ ID NO: 2291116 - RNA, 19 nt, Artificial Sequence
  Description of Artificial Sequence: Synthetic oligonucleotide
  Sense strand starting at position 2891 of SEQ ID NO: 1884775
uuuaaaguauuccuagaga

SEQ ID NO: 2291117 - RNA, 19 nt, Artificial Sequence
  Description of Artificial Sequence: Synthetic oligonucleotide
  Antisense strand to SEQ ID NO: 2291116
ucucuaggaauacuuuaaa

SEQ ID NO: 2291118 - RNA, 19 nt, Artificial Sequence
  Description of Artificial Sequence: Synthetic oligonucleotide
  Sense strand starting at position 2913 of SEQ ID NO: 1884775
gguuucuuucucggaggau

SEQ ID NO: 2291119 - RNA, 19 nt, Artificial Sequence
  Description of Artificial Sequence: Synthetic oligonucleotide
  Antisense strand to SEQ ID NO: 2291118
auccuccgagaaagaaacc

SEQ ID NO: 2291120 - RNA, 19 nt, Artificial Sequence
  Description of Artificial Sequence: Synthetic oligonucleotide
  Sense strand starting at position 2960 of SEQ ID NO: 1884775
acucuuggcuaguuacaca

SEQ ID NO: 2291121 - RNA, 19 nt, Artificial Sequence
  Description of Artificial Sequence: Synthetic oligonucleotide
  Antisense strand to SEQ ID NO: 2291120
uguguaacuagccaagagu

SEQ ID NO: 2291122 - RNA, 19 nt, Artificial Sequence
  Description of Artificial Sequence: Synthetic oligonucleotide
  Sense strand starting at position 3165 of SEQ ID NO: 1884775
uguauucugccagaaccag

SEQ ID NO: 2291123 - RNA, 19 nt, Artificial Sequence
  Description of Artificial Sequence: Synthetic oligonucleotide
  Antisense strand to SEQ ID NO: 2291122
cugguucuggcagaauaca

SEQ ID NO: 2291124 - RNA, 19 nt, Artificial Sequence
  Description of Artificial Sequence: Synthetic oligonucleotide
  Sense strand starting at position 3273 of SEQ ID NO: 1884775
ucaggaucaucacugugau

SEQ ID NO: 2291125 - RNA, 19 nt, Artificial Sequence
  Description of Artificial Sequence: Synthetic oligonucleotide
  Antisense strand to SEQ ID NO: 2291124
aucacagugaugauccuga

SEQ ID NO: 2291126 - RNA, 19 nt, Artificial Sequence
  Description of Artificial Sequence: Synthetic oligonucleotide
  Sense strand starting at position 3274 of SEQ ID NO: 1884775
caggaucaucacugugauu

SEQ ID NO: 2291127 - RNA, 19 nt, Artificial Sequence
  Description of Artificial Sequence: Synthetic oligonucleotide
  Antisense strand to SEQ ID NO: 2291126
aaucacagugaugauccug

SEQ ID NO: 2291128 - RNA, 19 nt, Artificial Sequence
  Description of Artificial Sequence: Synthetic oligonucleotide
  Sense strand starting at position 3286 of SEQ ID NO: 1884775
ugugauuugugguuugcuu

SEQ ID NO: 2291129 - RNA, 19 nt, Artificial Sequence
  Description of Artificial Sequence: Synthetic oligonucleotide
  Antisense strand to SEQ ID NO: 2291128
aagcaaaccacaaaucaca

SEQ ID NO: 2291130 - RNA, 19 nt, Artificial Sequence
  Description of Artificial Sequence: Synthetic oligonucleotide
  Sense strand starting at position 3357 of SEQ ID NO: 1884775
cuggcuuuggcagagguaa

SEQ ID NO: 2291131 - RNA, 19 nt, Artificial Sequence
  Description of Artificial Sequence: Synthetic oligonucleotide
  Antisense strand to SEQ ID NO: 2291130
uuaccucugccaaagccag

SEQ ID NO: 2291132 - RNA, 19 nt, Artificial Sequence
  Description of Artificial Sequence: Synthetic oligonucleotide
  Sense strand starting at position 3405 of SEQ ID NO: 1884775
guucccaauccuuggugaa

SEQ ID NO: 2291133 - RNA, 19 nt, Artificial Sequence
  Description of Artificial Sequence: Synthetic oligonucleotide
  Antisense strand to SEQ ID NO: 2291132
uucaccaaggauugggaac

SEQ ID NO: 2291134 - RNA, 19 nt, Artificial Sequence
  Description of Artificial Sequence: Synthetic oligonucleotide
  Sense strand starting at position 3406 of SEQ ID NO: 1884775
uucccaauccuuggugaaa

SEQ ID NO: 2291135 - RNA, 19 nt, Artificial Sequence
  Description of Artificial Sequence: Synthetic oligonucleotide
  Antisense strand to SEQ ID NO: 2291134
uuucaccaaggauugggaa

SEQ ID NO: 2291136 - RNA, 19 nt, Artificial Sequence
  Description of Artificial Sequence: Synthetic oligonucleotide
  Sense strand starting at position 3407 of SEQ ID NO: 1884775
ucccaauccuuggugaaau

SEQ ID NO: 2291137 - RNA, 19 nt, Artificial Sequence
  Description of Artificial Sequence: Synthetic oligonucleotide
  Antisense strand to SEQ ID NO: 2291136
auuucaccaaggauuggga

SEQ ID NO: 2291138 - RNA, 19 nt, Artificial Sequence
  Description of Artificial Sequence: Synthetic oligonucleotide
  Sense strand starting at position 3417 of SEQ ID NO: 1884775
uggugaaaucagcaucuuu

SEQ ID NO: 2291139 - RNA, 19 nt, Artificial Sequence
  Description of Artificial Sequence: Synthetic oligonucleotide
  Antisense strand to SEQ ID NO: 2291138
aaagaugcugauuucacca

SEQ ID NO: 2291140 - RNA, 19 nt, Artificial Sequence
  Description of Artificial Sequence: Synthetic oligonucleotide
  Sense strand starting at position 3446 of SEQ ID NO: 1884775
agaggaguuuaaucacuuc

SEQ ID NO: 2291141 - RNA, 19 nt, Artificial Sequence
  Description of Artificial Sequence: Synthetic oligonucleotide
  Antisense strand to SEQ ID NO: 2291140
gaagugauuaaacuccucu

SEQ ID NO: 2291142 - RNA, 19 nt, Artificial Sequence
  Description of Artificial Sequence: Synthetic oligonucleotide
  Sense strand starting at position 3572 of SEQ ID NO: 1884775
cuuaguaacugcuuugaau

SEQ ID NO: 2291143 - RNA, 19 nt, Artificial Sequence
  Description of Artificial Sequence: Synthetic oligonucleotide
  Antisense strand to SEQ ID NO: 2291142
auucaaagcaguuacuaag

SEQ ID NO: 2291144 - RNA, 19 nt, Artificial Sequence
  Description of Artificial Sequence: Synthetic oligonucleotide
  Sense strand starting at position 3656 of SEQ ID NO: 1884775
cagugugcccuaguucuuu

SEQ ID NO: 2291145 - RNA, 19 nt, Artificial Sequence
  Description of Artificial Sequence: Synthetic oligonucleotide
  Antisense strand to SEQ ID NO: 2291144
aaagaacuagggcacacug

SEQ ID NO: 2291146 - RNA, 19 nt, Artificial Sequence
  Description of Artificial Sequence: Synthetic oligonucleotide
  Sense strand starting at position 3706 of SEQ ID NO: 1884775
ucaaauugggcucauggua

SEQ ID NO: 2291147 - RNA, 19 nt, Artificial Sequence
  Description of Artificial Sequence: Synthetic oligonucleotide
  Antisense strand to SEQ ID NO: 2291146
uaccaugagcccaauuuga

SEQ ID NO: 2291148 - RNA, 19 nt, Artificial Sequence
  Description of Artificial Sequence: Synthetic oligonucleotide
  Sense strand starting at position 3722 of SEQ ID NO: 1884775
guagaaagagcuuaguuga

SEQ ID NO: 2291149 - RNA, 19 nt, Artificial Sequence
  Description of Artificial Sequence: Synthetic oligonucleotide
  Antisense strand to SEQ ID NO: 2291148
ucaacuaagcucuuucuac

SEQ ID NO: 2291150 - RNA, 19 nt, Artificial Sequence
  Description of Artificial Sequence: Synthetic oligonucleotide
  Sense strand starting at position 3725 of SEQ ID NO: 1884775
gaaagagcuuaguugaccu

SEQ ID NO: 2291151 - RNA, 19 nt, Artificial Sequence
  Description of Artificial Sequence: Synthetic oligonucleotide
  Antisense strand to SEQ ID NO: 2291150
aggucaacuaagcucuuuc

SEQ ID NO: 2291152 - RNA, 19 nt, Artificial Sequence
  Description of Artificial Sequence: Synthetic oligonucleotide
  Sense strand starting at position 3745 of SEQ ID NO: 1884775
cccggugagaaaugcucua

SEQ ID NO: 2291153 - RNA, 19 nt, Artificial Sequence
  Description of Artificial Sequence: Synthetic oligonucleotide
  Antisense strand to SEQ ID NO: 2291152
uagagcauuucucaccggg

SEQ ID NO: 2291154 - RNA, 19 nt, Artificial Sequence
  Description of Artificial Sequence: Synthetic oligonucleotide
  Sense strand starting at position 3798 of SEQ ID NO: 1884775
ggaagugguacagagcaau

SEQ ID NO: 2291155 - RNA, 19 nt, Artificial Sequence
  Description of Artificial Sequence: Synthetic oligonucleotide
  Antisense strand to SEQ ID NO: 2291154
auugcucuguaccacuucc

SEQ ID NO: 2291156 - RNA, 19 nt, Artificial Sequence
  Description of Artificial Sequence: Synthetic oligonucleotide
  Sense strand starting at position 3801 of SEQ ID NO: 1884775
agugguacagagcaaucua

SEQ ID NO: 2291157 - RNA, 19 nt, Artificial Sequence
  Description of Artificial Sequence: Synthetic oligonucleotide
  Antisense strand to SEQ ID NO: 2291156
uagauugcucuguaccacu

SEQ ID NO: 2291158 - RNA, 19 nt, Artificial Sequence
  Description of Artificial Sequence: Synthetic oligonucleotide
  Sense strand starting at position 20 of SEQ ID NO: 1884777
acaccucaguguccaagau

SEQ ID NO: 2291159 - RNA, 19 nt, Artificial Sequence
  Description of Artificial Sequence: Synthetic oligonucleotide
  Antisense strand to SEQ ID NO: 2291158
aucuuggacacugaggugu

SEQ ID NO: 2291160 - RNA, 19 nt, Artificial Sequence
  Description of Artificial Sequence: Synthetic oligonucleotide
  Sense strand starting at position 90 of SEQ ID NO: 1884777
aggucaacguuugcaaaca

SEQ ID NO: 2291161 - RNA, 19 nt, Artificial Sequence
  Description of Artificial Sequence: Synthetic oligonucleotide
  Antisense strand to SEQ ID NO: 2291160
uguuugcaaacguugaccu

SEQ ID NO: 2291162 - RNA, 19 nt, Artificial Sequence
  Description of Artificial Sequence: Synthetic oligonucleotide
  Sense strand starting at position 218 of SEQ ID NO: 1884777
ugggaagucuguuuccgac

SEQ ID NO: 2291163 - RNA, 19 nt, Artificial Sequence
  Description of Artificial Sequence: Synthetic oligonucleotide
  Antisense strand to SEQ ID NO: 2291162
gucggaaacagacuuccca

SEQ ID NO: 2291164 - RNA, 19 nt, Artificial Sequence
  Description of Artificial Sequence: Synthetic oligonucleotide
  Sense strand starting at position 220 of SEQ ID NO: 1884777
ggaagucuguuuccgacca

SEQ ID NO: 2291165 - RNA, 19 nt, Artificial Sequence
  Description of Artificial Sequence: Synthetic oligonucleotide
  Antisense strand to SEQ ID NO: 2291164
uggucggaaacagacuucc

SEQ ID NO: 2291166 - RNA, 19 nt, Artificial Sequence
  Description of Artificial Sequence: Synthetic oligonucleotide
  Sense strand starting at position 284 of SEQ ID NO: 1884777
cuacgaaucccucaauguu

SEQ ID NO: 2291167 - RNA, 19 nt, Artificial Sequence
  Description of Artificial Sequence: Synthetic oligonucleotide
  Antisense strand to SEQ ID NO: 2291166
aacauugagggauucguag

SEQ ID NO: 2291168 - RNA, 19 nt, Artificial Sequence
  Description of Artificial Sequence: Synthetic oligonucleotide
  Sense strand starting at position 357 of SEQ ID NO: 1884777
acaacuucuggaggaguuu

SEQ ID NO: 2291169 - RNA, 19 nt, Artificial Sequence
  Description of Artificial Sequence: Synthetic oligonucleotide
  Antisense strand to SEQ ID NO: 2291168
aaacuccuccagaaguugu

SEQ ID NO: 2291170 - RNA, 19 nt, Artificial Sequence
  Description of Artificial Sequence: Synthetic oligonucleotide
  Sense strand starting at position 1281 of SEQ ID NO: 1884777
ccaaguucgguuuguaaga

SEQ ID NO: 2291171 - RNA, 19 nt, Artificial Sequence
  Description of Artificial Sequence: Synthetic oligonucleotide
  Antisense strand to SEQ ID NO: 2291170
ucuuacaaaccgaacuugg

SEQ ID NO: 2291172 - RNA, 19 nt, Artificial Sequence
  Description of Artificial Sequence: Synthetic oligonucleotide
  Sense strand starting at position 1854 of SEQ ID NO: 1884777
uggcgagugguguauuuaa

SEQ ID NO: 2291173 - RNA, 19 nt, Artificial Sequence
  Description of Artificial Sequence: Synthetic oligonucleotide
  Antisense strand to SEQ ID NO: 2291172
uuaaauacaccacucgcca

SEQ ID NO: 2291174 - RNA, 19 nt, Artificial Sequence
  Description of Artificial Sequence: Synthetic oligonucleotide
  Sense strand starting at position 1861 of SEQ ID NO: 1884777
ugguguauuuaagcacgua

SEQ ID NO: 2291175 - RNA, 19 nt, Artificial Sequence
  Description of Artificial Sequence: Synthetic oligonucleotide
  Antisense strand to SEQ ID NO: 2291174
uacgugcuuaaauacacca

SEQ ID NO: 2291176 - RNA, 19 nt, Artificial Sequence
  Description of Artificial Sequence: Synthetic oligonucleotide
  Sense strand starting at position 1862 of SEQ ID NO: 1884777
gguguauuuaagcacguag

SEQ ID NO: 2291177 - RNA, 19 nt, Artificial Sequence
  Description of Artificial Sequence: Synthetic oligonucleotide
  Antisense strand to SEQ ID NO: 2291176
cuacgugcuuaaauacacc

SEQ ID NO: 2291178 - RNA, 19 nt, Artificial Sequence
  Description of Artificial Sequence: Synthetic oligonucleotide
  Sense strand starting at position 1864 of SEQ ID NO: 1884777
uguauuuaagcacguagau

SEQ ID NO: 2291179 - RNA, 19 nt, Artificial Sequence
  Description of Artificial Sequence: Synthetic oligonucleotide
  Antisense strand to SEQ ID NO: 2291178
aucuacgugcuuaaauaca

SEQ ID NO: 2291180 - RNA, 19 nt, Artificial Sequence
  Description of Artificial Sequence: Synthetic oligonucleotide
  Sense strand starting at position 1873 of SEQ ID NO: 1884777
gcacguagaucauuccaga

SEQ ID NO: 2291181 - RNA, 19 nt, Artificial Sequence
  Description of Artificial Sequence: Synthetic oligonucleotide
  Antisense strand to SEQ ID NO: 2291180
ucuggaaugaucuacgugc

SEQ ID NO: 2291182 - RNA, 19 nt, Artificial Sequence
  Description of Artificial Sequence: Synthetic oligonucleotide
  Sense strand starting at position 1919 of SEQ ID NO: 1884777
uagaauaaccgaugcuuga

SEQ ID NO: 2291183 - RNA, 19 nt, Artificial Sequence
  Description of Artificial Sequence: Synthetic oligonucleotide
  Antisense strand to SEQ ID NO: 2291182
ucaagcaucgguuauucua

SEQ ID NO: 2291184 - RNA, 19 nt, Artificial Sequence
  Description of Artificial Sequence: Synthetic oligonucleotide
  Sense strand starting at position 1923 of SEQ ID NO: 1884777
auaaccgaugcuugacauu

SEQ ID NO: 2291185 - RNA, 19 nt, Artificial Sequence
  Description of Artificial Sequence: Synthetic oligonucleotide
  Antisense strand to SEQ ID NO: 2291184
aaugucaagcaucgguuau

SEQ ID NO: 2291186 - RNA, 19 nt, Artificial Sequence
  Description of Artificial Sequence: Synthetic oligonucleotide
  Sense strand starting at position 1959 of SEQ ID NO: 1884777
augucucugucuguaugaa

SEQ ID NO: 2291187 - RNA, 19 nt, Artificial Sequence
  Description of Artificial Sequence: Synthetic oligonucleotide
  Antisense strand to SEQ ID NO: 2291186
uucauacagacagagacau

SEQ ID NO: 2291188 - RNA, 19 nt, Artificial Sequence
  Description of Artificial Sequence: Synthetic oligonucleotide
  Sense strand starting at position 2001 of SEQ ID NO: 1884777
ccaagacuccuuugagacu

SEQ ID NO: 2291189 - RNA, 19 nt, Artificial Sequence
  Description of Artificial Sequence: Synthetic oligonucleotide
  Antisense strand to SEQ ID NO: 2291188
agucucaaaggagucuugg

SEQ ID NO: 2291190 - RNA, 19 nt, Artificial Sequence
  Description of Artificial Sequence: Synthetic oligonucleotide
  Sense strand starting at position 2084 of SEQ ID NO: 1884777
cacaauuucgugcguagac

SEQ ID NO: 2291191 - RNA, 19 nt, Artificial Sequence
  Description of Artificial Sequence: Synthetic oligonucleotide
  Antisense strand to SEQ ID NO: 2291190
gucuacgcacgaaauugug

SEQ ID NO: 2291192 - RNA, 19 nt, Artificial Sequence
  Description of Artificial Sequence: Synthetic oligonucleotide
  Sense strand starting at position 2085 of SEQ ID NO: 1884777
acaauuucgugcguagacu

SEQ ID NO: 2291193 - RNA, 19 nt, Artificial Sequence
  Description of Artificial Sequence: Synthetic oligonucleotide
  Antisense strand to SEQ ID NO: 2291192
agucuacgcacgaaauugu

SEQ ID NO: 2291194 - RNA, 19 nt, Artificial Sequence
  Description of Artificial Sequence: Synthetic oligonucleotide
  Sense strand starting at position 2097 of SEQ ID NO: 1884777
guagacucacuccaguauu

SEQ ID NO: 2291195 - RNA, 19 nt, Artificial Sequence
  Description of Artificial Sequence: Synthetic oligonucleotide
  Antisense strand to SEQ ID NO: 2291194
aauacuggagugagucuac

SEQ ID NO: 2291196 - RNA, 19 nt, Artificial Sequence
  Description of Artificial Sequence: Synthetic oligonucleotide
  Sense strand starting at position 2147 of SEQ ID NO: 1884777
guuccaagcgcugaggaua

SEQ ID NO: 2291197 - RNA, 19 nt, Artificial Sequence
  Description of Artificial Sequence: Synthetic oligonucleotide
  Antisense strand to SEQ ID NO: 2291196
uauccucagcgcuuggaac

SEQ ID NO: 2291198 - RNA, 19 nt, Artificial Sequence
  Description of Artificial Sequence: Synthetic oligonucleotide
  Sense strand starting at position 2198 of SEQ ID NO: 1884777
uggaguuuacgggacaauu

SEQ ID NO: 2291199 - RNA, 19 nt, Artificial Sequence
  Description of Artificial Sequence: Synthetic oligonucleotide
  Antisense strand to SEQ ID NO: 2291198
aauugucccguaaacucca

SEQ ID NO: 2291200 - RNA, 19 nt, Artificial Sequence
  Description of Artificial Sequence: Synthetic oligonucleotide
  Sense strand starting at position 2251 of SEQ ID NO: 1884777
cuuggauccgauugaaaug

SEQ ID NO: 2291201 - RNA, 19 nt, Artificial Sequence
  Description of Artificial Sequence: Synthetic oligonucleotide
  Antisense strand to SEQ ID NO: 2291200
cauuucaaucggauccaag

SEQ ID NO: 2291202 - RNA, 19 nt, Artificial Sequence
  Description of Artificial Sequence: Synthetic oligonucleotide
  Sense strand starting at position 2269 of SEQ ID NO: 1884777
guaaccauccaguguauuu

SEQ ID NO: 2291203 - RNA, 19 nt, Artificial Sequence
  Description of Artificial Sequence: Synthetic oligonucleotide
  Antisense strand to SEQ ID NO: 2291202
aaauacacuggaugguuac

SEQ ID NO: 2291204 - RNA, 19 nt, Artificial Sequence
  Description of Artificial Sequence: Synthetic oligonucleotide
  Sense strand starting at position 2355 of SEQ ID NO: 1884777
uggaguucugccgaaguag

SEQ ID NO: 2291205 - RNA, 19 nt, Artificial Sequence
  Description of Artificial Sequence: Synthetic oligonucleotide
  Antisense strand to SEQ ID NO: 2291204
cuacuucggcagaacucca

SEQ ID NO: 2291206 - RNA, 19 nt, Artificial Sequence
  Description of Artificial Sequence: Synthetic oligonucleotide
  Sense strand starting at position 2464 of SEQ ID NO: 1884777
gcaucaucuccggaucuga

SEQ ID NO: 2291207 - RNA, 19 nt, Artificial Sequence
  Description of Artificial Sequence: Synthetic oligonucleotide
  Antisense strand to SEQ ID NO: 2291206
ucagauccggagaugaugc

SEQ ID NO: 2291208 - RNA, 19 nt, Artificial Sequence
  Description of Artificial Sequence: Synthetic oligonucleotide
  Sense strand starting at position 2518 of SEQ ID NO: 1884777
ccugcuucuuccuuuagga

SEQ ID NO: 2291209 - RNA, 19 nt, Artificial Sequence
  Description of Artificial Sequence: Synthetic oligonucleotide
  Antisense strand to SEQ ID NO: 2291208
uccuaaaggaagaagcagg

SEQ ID NO: 2291210 - RNA, 19 nt, Artificial Sequence
  Description of Artificial Sequence: Synthetic oligonucleotide
  Sense strand starting at position 2600 of SEQ ID NO: 1884777
gccagcacuagcgaagaau

SEQ ID NO: 2291211 - RNA, 19 nt, Artificial Sequence
  Description of Artificial Sequence: Synthetic oligonucleotide
  Antisense strand to SEQ ID NO: 2291210
auucuucgcuagugcuggc

SEQ ID NO: 2291212 - RNA, 19 nt, Artificial Sequence
  Description of Artificial Sequence: Synthetic oligonucleotide
  Sense strand starting at position 2609 of SEQ ID NO: 1884777
agcgaagaaugcucaguga

SEQ ID NO: 2291213 - RNA, 19 nt, Artificial Sequence
  Description of Artificial Sequence: Synthetic oligonucleotide
  Antisense strand to SEQ ID NO: 2291212
ucacugagcauucuucgcu

SEQ ID NO: 2291214 - RNA, 19 nt, Artificial Sequence
  Description of Artificial Sequence: Synthetic oligonucleotide
  Sense strand starting at position 2612 of SEQ ID NO: 1884777
gaagaaugcucagugaaac

SEQ ID NO: 2291215 - RNA, 19 nt, Artificial Sequence
  Description of Artificial Sequence: Synthetic oligonucleotide
  Antisense strand to SEQ ID NO: 2291214
guuucacugagcauucuuc

SEQ ID NO: 2291216 - RNA, 19 nt, Artificial Sequence
  Description of Artificial Sequence: Synthetic oligonucleotide
  Sense strand starting at position 2623 of SEQ ID NO: 1884777
agugaaaccuuauuccaug

SEQ ID NO: 2291217 - RNA, 19 nt, Artificial Sequence
  Description of Artificial Sequence: Synthetic oligonucleotide
  Antisense strand to SEQ ID NO: 2291216
cauggaauaagguuucacu

SEQ ID NO: 2291218 - RNA, 19 nt, Artificial Sequence
  Description of Artificial Sequence: Synthetic oligonucleotide
  Sense strand starting at position 2624 of SEQ ID NO: 1884777
gugaaaccuuauuccauga

SEQ ID NO: 2291219 - RNA, 19 nt, Artificial Sequence
  Description of Artificial Sequence: Synthetic oligonucleotide
  Antisense strand to SEQ ID NO: 2291218
ucauggaauaagguuucac

SEQ ID NO: 2291220 - RNA, 19 nt, Artificial Sequence
  Description of Artificial Sequence: Synthetic oligonucleotide
  Sense strand starting at position 2695 of SEQ ID NO: 1884777
agcgcaguccaauggaaau

SEQ ID NO: 2291221 - RNA, 19 nt, Artificial Sequence
  Description of Artificial Sequence: Synthetic oligonucleotide
  Antisense strand to SEQ ID NO: 2291220
auuuccauuggacugcgcu

SEQ ID NO: 2291222 - RNA, 19 nt, Artificial Sequence
  Description of Artificial Sequence: Synthetic oligonucleotide
  Sense strand starting at position 2750 of SEQ ID NO: 1884777
guagucacauuugagaaag

SEQ ID NO: 2291223 - RNA, 19 nt, Artificial Sequence
  Description of Artificial Sequence: Synthetic oligonucleotide
  Antisense strand to SEQ ID NO: 2291222
cuuucucaaaugugacuac

SEQ ID NO: 2291224 - RNA, 19 nt, Artificial Sequence
  Description of Artificial Sequence: Synthetic oligonucleotide
  Sense strand starting at position 3150 of SEQ ID NO: 1884777
uucuaugagugcucugaac

SEQ ID NO: 2291225 - RNA, 19 nt, Artificial Sequence
  Description of Artificial Sequence: Synthetic oligonucleotide
  Antisense strand to SEQ ID NO: 2291224
guucagagcacucauagaa

SEQ ID NO: 2291226 - RNA, 19 nt, Artificial Sequence
  Description of Artificial Sequence: Synthetic oligonucleotide
  Sense strand starting at position 3157 of SEQ ID NO: 1884777
agugcucugaaccgaucua

SEQ ID NO: 2291227 - RNA, 19 nt, Artificial Sequence
  Description of Artificial Sequence: Synthetic oligonucleotide
  Antisense strand to SEQ ID NO: 2291226
uagaucgguucagagcacu

SEQ ID NO: 2291228 - RNA, 19 nt, Artificial Sequence
  Description of Artificial Sequence: Synthetic oligonucleotide
  Sense strand starting at position 3158 of SEQ ID NO: 1884777
gugcucugaaccgaucuau

SEQ ID NO: 2291229 - RNA, 19 nt, Artificial Sequence
  Description of Artificial Sequence: Synthetic oligonucleotide
  Antisense strand to SEQ ID NO: 2291228
auagaucgguucagagcac

SEQ ID NO: 2291230 - RNA, 19 nt, Artificial Sequence
  Description of Artificial Sequence: Synthetic oligonucleotide
  Sense strand starting at position 3301 of SEQ ID NO: 1884777
aucucaaagcacugggaua

SEQ ID NO: 2291231 - RNA, 19 nt, Artificial Sequence
  Description of Artificial Sequence: Synthetic oligonucleotide
  Antisense strand to SEQ ID NO: 2291230
uaucccagugcuuugagau

SEQ ID NO: 2291232 - RNA, 19 nt, Artificial Sequence
  Description of Artificial Sequence: Synthetic oligonucleotide
  Sense strand starting at position 3328 of SEQ ID NO: 1884777
cagccaauagcguuguauu

SEQ ID NO: 2291233 - RNA, 19 nt, Artificial Sequence
  Description of Artificial Sequence: Synthetic oligonucleotide
  Antisense strand to SEQ ID NO: 2291232
aauacaacgcuauuggcug

SEQ ID NO: 2291234 - RNA, 19 nt, Artificial Sequence
  Description of Artificial Sequence: Synthetic oligonucleotide
  Sense strand starting at position 3329 of SEQ ID NO: 1884777
agccaauagcguuguauuu

SEQ ID NO: 2291235 - RNA, 19 nt, Artificial Sequence
  Description of Artificial Sequence: Synthetic oligonucleotide
  Antisense strand to SEQ ID NO: 2291234
aaauacaacgcuauuggcu

SEQ ID NO: 2291236 - RNA, 19 nt, Artificial Sequence
  Description of Artificial Sequence: Synthetic oligonucleotide
  Sense strand starting at position 3944 of SEQ ID NO: 1884777
cggugagacuccgucacaa

SEQ ID NO: 2291237 - RNA, 19 nt, Artificial Sequence
  Description of Artificial Sequence: Synthetic oligonucleotide
  Antisense strand to SEQ ID NO: 2291236
uugugacggagucucaccg

SEQ ID NO: 2291238 - RNA, 19 nt, Artificial Sequence
  Description of Artificial Sequence: Synthetic oligonucleotide
  Sense strand starting at position 151 of SEQ ID NO: 1884776
uccaguuccuacuauuuga

SEQ ID NO: 2291239 - RNA, 19 nt, Artificial Sequence
  Description of Artificial Sequence: Synthetic oligonucleotide
  Antisense strand to SEQ ID NO: 2291238
ucaaauaguaggaacugga

SEQ ID NO: 2291240 - RNA, 19 nt, Artificial Sequence
  Description of Artificial Sequence: Synthetic oligonucleotide
  Sense strand starting at position 308 of SEQ ID NO: 1884776
gugucuaguccuggagaga

SEQ ID NO: 2291241 - RNA, 19 nt, Artificial Sequence
  Description of Artificial Sequence: Synthetic oligonucleotide
  Antisense strand to SEQ ID NO: 2291240
ucucuccaggacuagacac

SEQ ID NO: 2291242 - RNA, 19 nt, Artificial Sequence
  Description of Artificial Sequence: Synthetic oligonucleotide
  Sense strand starting at position 309 of SEQ ID NO: 1884776
ugucuaguccuggagagag

SEQ ID NO: 2291243 - RNA, 19 nt, Artificial Sequence
  Description of Artificial Sequence: Synthetic oligonucleotide
  Antisense strand to SEQ ID NO: 2291242
cucucuccaggacuagaca

SEQ ID NO: 2291244 - RNA, 19 nt, Artificial Sequence
  Description of Artificial Sequence: Synthetic oligonucleotide
  Sense strand starting at position 682 of SEQ ID NO: 1884776
gagggaugaugacaaggaa

SEQ ID NO: 2291245 - RNA, 19 nt, Artificial Sequence
  Description of Artificial Sequence: Synthetic oligonucleotide
  Antisense strand to SEQ ID NO: 2291244
uuccuugucaucaucccuc

SEQ ID NO: 2291246 - RNA, 19 nt, Artificial Sequence
  Description of Artificial Sequence: Synthetic oligonucleotide
  Sense strand starting at position 729 of SEQ ID NO: 1884776
guccaucuuggaugcaaau

SEQ ID NO: 2291247 - RNA, 19 nt, Artificial Sequence
  Description of Artificial Sequence: Synthetic oligonucleotide
  Antisense strand to SEQ ID NO: 2291246
auuugcauccaagauggac

SEQ ID NO: 2291248 - RNA, 19 nt, Artificial Sequence
  Description of Artificial Sequence: Synthetic oligonucleotide
  Sense strand starting at position 1234 of SEQ ID NO: 1884776
acaccucaguguccaagau

SEQ ID NO: 2291249 - RNA, 19 nt, Artificial Sequence
  Description of Artificial Sequence: Synthetic oligonucleotide
  Antisense strand to SEQ ID NO: 2291248
aucuuggacacugaggugu

SEQ ID NO: 2291250 - RNA, 19 nt, Artificial Sequence
  Description of Artificial Sequence: Synthetic oligonucleotide
  Sense strand starting at position 1304 of SEQ ID NO: 1884776
aggucaacguuugcaaaca

SEQ ID NO: 2291251 - RNA, 19 nt, Artificial Sequence
  Description of Artificial Sequence: Synthetic oligonucleotide
  Antisense strand to SEQ ID NO: 2291250
uguuugcaaacguugaccu

SEQ ID NO: 2291252 - RNA, 19 nt, Artificial Sequence
  Description of Artificial Sequence: Synthetic oligonucleotide
  Sense strand starting at position 1432 of SEQ ID NO: 1884776
ugggaagucuguuuccgac

SEQ ID NO: 2291253 - RNA, 19 nt, Artificial Sequence
  Description of Artificial Sequence: Synthetic oligonucleotide
  Antisense strand to SEQ ID NO: 2291252
gucggaaacagacuuccca

SEQ ID NO: 2291254 - RNA, 19 nt, Artificial Sequence
  Description of Artificial Sequence: Synthetic oligonucleotide
  Sense strand starting at position 1434 of SEQ ID NO: 1884776
ggaagucuguuuccgacca

SEQ ID NO: 2291255 - RNA, 19 nt, Artificial Sequence
  Description of Artificial Sequence: Synthetic oligonucleotide
  Antisense strand to SEQ ID NO: 2291254
uggucggaaacagacuucc

SEQ ID NO: 2291256 - RNA, 19 nt, Artificial Sequence
  Description of Artificial Sequence: Synthetic oligonucleotide
  Sense strand starting at position 1498 of SEQ ID NO: 1884776
cuacgaaucccucaauguu

SEQ ID NO: 2291257 - RNA, 19 nt, Artificial Sequence
  Description of Artificial Sequence: Synthetic oligonucleotide
  Antisense strand to SEQ ID NO: 2291256
aacauugagggauucguag

SEQ ID NO: 2291258 - RNA, 19 nt, Artificial Sequence
  Description of Artificial Sequence: Synthetic oligonucleotide
  Sense strand starting at position 1571 of SEQ ID NO: 1884776
acaacuucuggaggaguuu

SEQ ID NO: 2291259 - RNA, 19 nt, Artificial Sequence
  Description of Artificial Sequence: Synthetic oligonucleotide
  Antisense strand to SEQ ID NO: 2291258
aaacuccuccagaaguugu

SEQ ID NO: 2291260 - RNA, 19 nt, Artificial Sequence
  Description of Artificial Sequence: Synthetic oligonucleotide
  Sense strand starting at position 2495 of SEQ ID NO: 1884776
ccaaguucgguuuguaaga

SEQ ID NO: 2291261 - RNA, 19 nt, Artificial Sequence
  Description of Artificial Sequence: Synthetic oligonucleotide
  Antisense strand to SEQ ID NO: 2291260
ucuuacaaaccgaacuugg

SEQ ID NO: 2291262 - RNA, 19 nt, Artificial Sequence
  Description of Artificial Sequence: Synthetic oligonucleotide
  Sense strand starting at position 3068 of SEQ ID NO: 1884776
uggcgagugguguauuuaa

SEQ ID NO: 2291263 - RNA, 19 nt, Artificial Sequence
  Description of Artificial Sequence: Synthetic oligonucleotide
  Antisense strand to SEQ ID NO: 2291262
uuaaauacaccacucgcca

SEQ ID NO: 2291264 - RNA, 19 nt, Artificial Sequence
  Description of Artificial Sequence: Synthetic oligonucleotide
  Sense strand starting at position 3075 of SEQ ID NO: 1884776
ugguguauuuaagcacgua

SEQ ID NO: 2291265 - RNA, 19 nt, Artificial Sequence
  Description of Artificial Sequence: Synthetic oligonucleotide
  Antisense strand to SEQ ID NO: 2291264
uacgugcuuaaauacacca

SEQ ID NO: 2291266 - RNA, 19 nt, Artificial Sequence
  Description of Artificial Sequence: Synthetic oligonucleotide
  Sense strand starting at position 3076 of SEQ ID NO: 1884776
gguguauuuaagcacguag

SEQ ID NO: 2291267 - RNA, 19 nt, Artificial Sequence
  Description of Artificial Sequence: Synthetic oligonucleotide
  Antisense strand to SEQ ID NO: 2291266
cuacgugcuuaaauacacc

SEQ ID NO: 2291268 - RNA, 19 nt, Artificial Sequence
  Description of Artificial Sequence: Synthetic oligonucleotide
  Sense strand starting at position 3078 of SEQ ID NO: 1884776
uguauuuaagcacguagau

SEQ ID NO: 2291269 - RNA, 19 nt, Artificial Sequence
  Description of Artificial Sequence: Synthetic oligonucleotide
  Antisense strand to SEQ ID NO: 2291268
aucuacgugcuuaaauaca

SEQ ID NO: 2291270 - RNA, 19 nt, Artificial Sequence
  Description of Artificial Sequence: Synthetic oligonucleotide
  Sense strand starting at position 3087 of SEQ ID NO: 1884776
gcacguagaucauuccaga

SEQ ID NO: 2291271 - RNA, 19 nt, Artificial Sequence
  Description of Artificial Sequence: Synthetic oligonucleotide
  Antisense strand to SEQ ID NO: 2291270
ucuggaaugaucuacgugc

SEQ ID NO: 2291272 - RNA, 19 nt, Artificial Sequence
  Description of Artificial Sequence: Synthetic oligonucleotide
  Sense strand starting at position 3133 of SEQ ID NO: 1884776
uagaauaaccgaugcuuga

SEQ ID NO: 2291273 - RNA, 19 nt, Artificial Sequence
  Description of Artificial Sequence: Synthetic oligonucleotide
  Antisense strand to SEQ ID NO: 2291272
ucaagcaucgguuauucua

SEQ ID NO: 2291274 - RNA, 19 nt, Artificial Sequence
  Description of Artificial Sequence: Synthetic oligonucleotide
  Sense strand starting at position 3137 of SEQ ID NO: 1884776
auaaccgaugcuugacauu

SEQ ID NO: 2291275 - RNA, 19 nt, Artificial Sequence
  Description of Artificial Sequence: Synthetic oligonucleotide
  Antisense strand to SEQ ID NO: 2291274
aaugucaagcaucgguuau

SEQ ID NO: 2291276 - RNA, 19 nt, Artificial Sequence
  Description of Artificial Sequence: Synthetic oligonucleotide
  Sense strand starting at position 3173 of SEQ ID NO: 1884776
augucucugucuguaugaa

SEQ ID NO: 2291277 - RNA, 19 nt, Artificial Sequence
  Description of Artificial Sequence: Synthetic oligonucleotide
  Antisense strand to SEQ ID NO: 2291276
uucauacagacagagacau

SEQ ID NO: 2291278 - RNA, 19 nt, Artificial Sequence
  Description of Artificial Sequence: Synthetic oligonucleotide
  Sense strand starting at position 3215 of SEQ ID NO: 1884776
ccaagacuccuuugagacu

SEQ ID NO: 2291279 - RNA, 19 nt, Artificial Sequence
  Description of Artificial Sequence: Synthetic oligonucleotide
  Antisense strand to SEQ ID NO: 2291278
agucucaaaggagucuugg

SEQ ID NO: 2291280 - RNA, 19 nt, Artificial Sequence
  Description of Artificial Sequence: Synthetic oligonucleotide
  Sense strand starting at position 3298 of SEQ ID NO: 1884776
cacaauuucgugcguagac

SEQ ID NO: 2291281 - RNA, 19 nt, Artificial Sequence
  Description of Artificial Sequence: Synthetic oligonucleotide
  Antisense strand to SEQ ID NO: 2291280
gucuacgcacgaaauugug

SEQ ID NO: 2291282 - RNA, 19 nt, Artificial Sequence
  Description of Artificial Sequence: Synthetic oligonucleotide
  Sense strand starting at position 3299 of SEQ ID NO: 1884776
acaauuucgugcguagacu

SEQ ID NO: 2291283 - RNA, 19 nt, Artificial Sequence
  Description of Artificial Sequence: Synthetic oligonucleotide
  Antisense strand to SEQ ID NO: 2291282
agucuacgcacgaaauugu

SEQ ID NO: 2291284 - RNA, 19 nt, Artificial Sequence
  Description of Artificial Sequence: Synthetic oligonucleotide
  Sense strand starting at position 3311 of SEQ ID NO: 1884776
guagacucacuccaguauu

SEQ ID NO: 2291285 - RNA, 19 nt, Artificial Sequence
  Description of Artificial Sequence: Synthetic oligonucleotide
  Antisense strand to SEQ ID NO: 2291284
aauacuggagugagucuac

SEQ ID NO: 2291286 - RNA, 19 nt, Artificial Sequence
  Description of Artificial Sequence: Synthetic oligonucleotide
  Sense strand starting at position 3361 of SEQ ID NO: 1884776
guuccaagcgcugaggaua

SEQ ID NO: 2291287 - RNA, 19 nt, Artificial Sequence
  Description of Artificial Sequence: Synthetic oligonucleotide
  Antisense strand to SEQ ID NO: 2291286
uauccucagcgcuuggaac

SEQ ID NO: 2291288 - RNA, 19 nt, Artificial Sequence
  Description of Artificial Sequence: Synthetic oligonucleotide
  Sense strand starting at position 3412 of SEQ ID NO: 1884776
uggaguuuacgggacaauu

SEQ ID NO: 2291289 - RNA, 19 nt, Artificial Sequence
  Description of Artificial Sequence: Synthetic oligonucleotide
  Antisense strand to SEQ ID NO: 2291288
aauugucccguaaacucca

SEQ ID NO: 2291290 - RNA, 19 nt, Artificial Sequence
  Description of Artificial Sequence: Synthetic oligonucleotide
  Sense strand starting at position 3465 of SEQ ID NO: 1884776
cuuggauccgauugaaaug

SEQ ID NO: 2291291 - RNA, 19 nt, Artificial Sequence
  Description of Artificial Sequence: Synthetic oligonucleotide
  Antisense strand to SEQ ID NO: 2291290
cauuucaaucggauccaag

SEQ ID NO: 2291292 - RNA, 19 nt, Artificial Sequence
  Description of Artificial Sequence: Synthetic oligonucleotide
  Sense strand starting at position 3483 of SEQ ID NO: 1884776
guaaccauccaguguauuu

SEQ ID NO: 2291293 - RNA, 19 nt, Artificial Sequence
  Description of Artificial Sequence: Synthetic oligonucleotide
  Antisense strand to SEQ ID NO: 2291292
aaauacacuggaugguuac

SEQ ID NO: 2291294 - RNA, 19 nt, Artificial Sequence
  Description of Artificial Sequence: Synthetic oligonucleotide
  Sense strand starting at position 3569 of SEQ ID NO: 1884776
uggaguucugccgaaguag

SEQ ID NO: 2291295 - RNA, 19 nt, Artificial Sequence
  Description of Artificial Sequence: Synthetic oligonucleotide
  Antisense strand to SEQ ID NO: 2291294
cuacuucggcagaacucca

SEQ ID NO: 2291296 - RNA, 19 nt, Artificial Sequence
  Description of Artificial Sequence: Synthetic oligonucleotide
  Sense strand starting at position 3583 of SEQ ID NO: 1884776
aguaguaaagcucguuaaa

SEQ ID NO: 2291297 - RNA, 19 nt, Artificial Sequence
  Description of Artificial Sequence: Synthetic oligonucleotide
  Antisense strand to SEQ ID NO: 2291296
uuuaacgagcuuuacuacu

SEQ ID NO: 2291298 - RNA, 19 nt, Artificial Sequence
  Description of Artificial Sequence: Synthetic oligonucleotide
  Sense strand starting at position 3678 of SEQ ID NO: 1884776
gcaucaucuccggaucuga

SEQ ID NO: 2291299 - RNA, 19 nt, Artificial Sequence
  Description of Artificial Sequence: Synthetic oligonucleotide
  Antisense strand to SEQ ID NO: 2291298
ucagauccggagaugaugc

SEQ ID NO: 2291300 - RNA, 19 nt, Artificial Sequence
  Description of Artificial Sequence: Synthetic oligonucleotide
  Sense strand starting at position 3732 of SEQ ID NO: 1884776
ccugcuucuuccuuuagga

SEQ ID NO: 2291301 - RNA, 19 nt, Artificial Sequence
  Description of Artificial Sequence: Synthetic oligonucleotide
  Antisense strand to SEQ ID NO: 2291300
uccuaaaggaagaagcagg

SEQ ID NO: 2291302 - RNA, 19 nt, Artificial Sequence
  Description of Artificial Sequence: Synthetic oligonucleotide
  Sense strand starting at position 3814 of SEQ ID NO: 1884776
gccagcacuagcgaagaau

SEQ ID NO: 2291303 - RNA, 19 nt, Artificial Sequence
  Description of Artificial Sequence: Synthetic oligonucleotide
  Antisense strand to SEQ ID NO: 2291302
auucuucgcuagugcuggc

SEQ ID NO: 2291304 - RNA, 19 nt, Artificial Sequence
  Description of Artificial Sequence: Synthetic oligonucleotide
  Sense strand starting at position 3823 of SEQ ID NO: 1884776
agcgaagaaugcucaguga

SEQ ID NO: 2291305 - RNA, 19 nt, Artificial Sequence
  Description of Artificial Sequence: Synthetic oligonucleotide
  Antisense strand to SEQ ID NO: 2291304
ucacugagcauucuucgcu

SEQ ID NO: 2291306 - RNA, 19 nt, Artificial Sequence
  Description of Artificial Sequence: Synthetic oligonucleotide
  Sense strand starting at position 3826 of SEQ ID NO: 1884776
gaagaaugcucagugaaac

SEQ ID NO: 2291307 - RNA, 19 nt, Artificial Sequence
  Description of Artificial Sequence: Synthetic oligonucleotide
  Antisense strand to SEQ ID NO: 2291306
guuucacugagcauucuuc

SEQ ID NO: 2291308 - RNA, 19 nt, Artificial Sequence
  Description of Artificial Sequence: Synthetic oligonucleotide
  Sense strand starting at position 3837 of SEQ ID NO: 1884776
agugaaaccuuauuccaug

SEQ ID NO: 2291309 - RNA, 19 nt, Artificial Sequence
  Description of Artificial Sequence: Synthetic oligonucleotide
  Antisense strand to SEQ ID NO: 2291308
cauggaauaagguuucacu

SEQ ID NO: 2291310 - RNA, 19 nt, Artificial Sequence
  Description of Artificial Sequence: Synthetic oligonucleotide
  Sense strand starting at position 3838 of SEQ ID NO: 1884776
gugaaaccuuauuccauga

SEQ ID NO: 2291311 - RNA, 19 nt, Artificial Sequence
  Description of Artificial Sequence: Synthetic oligonucleotide
  Antisense strand to SEQ ID NO: 2291310
ucauggaauaagguuucac

SEQ ID NO: 2291312 - RNA, 19 nt, Artificial Sequence
  Description of Artificial Sequence: Synthetic oligonucleotide
  Sense strand starting at position 3891 of SEQ ID NO: 1884776
cgcccaguccuuuagagca

SEQ ID NO: 2291313 - RNA, 19 nt, Artificial Sequence
  Description of Artificial Sequence: Synthetic oligonucleotide
  Antisense strand to SEQ ID NO: 2291312
ugcucuaaaggacugggcg

SEQ ID NO: 2291314 - RNA, 19 nt, Artificial Sequence
  Description of Artificial Sequence: Synthetic oligonucleotide
  Sense strand starting at position 3909 of SEQ ID NO: 1884776
agcgcaguccaauggaaau

SEQ ID NO: 2291315 - RNA, 19 nt, Artificial Sequence
  Description of Artificial Sequence: Synthetic oligonucleotide
  Antisense strand to SEQ ID NO: 2291314
auuuccauuggacugcgcu

SEQ ID NO: 2291316 - RNA, 19 nt, Artificial Sequence
  Description of Artificial Sequence: Synthetic oligonucleotide
  Sense strand starting at position 3964 of SEQ ID NO: 1884776
guagucacauuugagaaag

SEQ ID NO: 2291317 - RNA, 19 nt, Artificial Sequence
  Description of Artificial Sequence: Synthetic oligonucleotide
  Antisense strand to SEQ ID NO: 2291316
cuuucucaaaugugacuac

SEQ ID NO: 2291318 - RNA, 19 nt, Artificial Sequence
  Description of Artificial Sequence: Synthetic oligonucleotide
  Sense strand starting at position 2200 of SEQ ID NO: 1884778
ggaccucucccgggauacu

SEQ ID NO: 2291319 - RNA, 19 nt, Artificial Sequence
  Description of Artificial Sequence: Synthetic oligonucleotide
  Antisense strand to SEQ ID NO: 2291318
aguaucccgggagaggucc

SEQ ID NO: 2291320 - RNA, 19 nt, Artificial Sequence
  Description of Artificial Sequence: Synthetic oligonucleotide
  Sense strand starting at position 2201 of SEQ ID NO: 1884778
gaccucucccgggauacuu

SEQ ID NO: 2291321 - RNA, 19 nt, Artificial Sequence
  Description of Artificial Sequence: Synthetic oligonucleotide
  Antisense strand to SEQ ID NO: 2291320
aaguaucccgggagagguc

SEQ ID NO: 2291322 - RNA, 19 nt, Artificial Sequence
  Description of Artificial Sequence: Synthetic oligonucleotide
  Sense strand starting at position 2389 of SEQ ID NO: 1884778
cagaacugcggucacuuaa

SEQ ID NO: 2291323 - RNA, 19 nt, Artificial Sequence
  Description of Artificial Sequence: Synthetic oligonucleotide
  Antisense strand to SEQ ID NO: 2291322
uuaagugaccgcaguucug

SEQ ID NO: 2291324 - RNA, 19 nt, Artificial Sequence
  Description of Artificial Sequence: Synthetic oligonucleotide
  Sense strand starting at position 2470 of SEQ ID NO: 1884778
gacggugucuuguuuguau

SEQ ID NO: 2291325 - RNA, 19 nt, Artificial Sequence
  Description of Artificial Sequence: Synthetic oligonucleotide
  Antisense strand to SEQ ID NO: 2291324
auacaaacaagacaccguc

SEQ ID NO: 2291326 - RNA, 19 nt, Artificial Sequence
  Description of Artificial Sequence: Synthetic oligonucleotide
  Sense strand starting at position 2472 of SEQ ID NO: 1884778
cggugucuuguuuguauuu

SEQ ID NO: 2291327 - RNA, 19 nt, Artificial Sequence
  Description of Artificial Sequence: Synthetic oligonucleotide
  Antisense strand to SEQ ID NO: 2291326
aaauacaaacaagacaccg

SEQ ID NO: 2291328 - RNA, 19 nt, Artificial Sequence
  Description of Artificial Sequence: Synthetic oligonucleotide
  Sense strand starting at position 2595 of SEQ ID NO: 1884778
cgugaaacucuucauggag

SEQ ID NO: 2291329 - RNA, 19 nt, Artificial Sequence
  Description of Artificial Sequence: Synthetic oligonucleotide
  Antisense strand to SEQ ID NO: 2291328
cuccaugaagaguuucacg

SEQ ID NO: 2291330 - RNA, 19 nt, Artificial Sequence
  Description of Artificial Sequence: Synthetic oligonucleotide
  Sense strand starting at position 2655 of SEQ ID NO: 1884778
gguaauuggccagacguuu

SEQ ID NO: 2291331 - RNA, 19 nt, Artificial Sequence
  Description of Artificial Sequence: Synthetic oligonucleotide
  Antisense strand to SEQ ID NO: 2291330
aaacgucuggccaauuacc

SEQ ID NO: 2291332 - RNA, 19 nt, Artificial Sequence
  Description of Artificial Sequence: Synthetic oligonucleotide
  Sense strand starting at position 2722 of SEQ ID NO: 1884778
cuuggcuuugaagacaauu

SEQ ID NO: 2291333 - RNA, 19 nt, Artificial Sequence
  Description of Artificial Sequence: Synthetic oligonucleotide
  Antisense strand to SEQ ID NO: 2291332
aauugucuucaaagccaag

SEQ ID NO: 2291334 - RNA, 19 nt, Artificial Sequence
  Description of Artificial Sequence: Synthetic oligonucleotide
  Sense strand starting at position 2750 of SEQ ID NO: 1884778
agugaugucgacugucauu

SEQ ID NO: 2291335 - RNA, 19 nt, Artificial Sequence
  Description of Artificial Sequence: Synthetic oligonucleotide
  Antisense strand to SEQ ID NO: 2291334
aaugacagucgacaucacu

SEQ ID NO: 2291336 - RNA, 19 nt, Artificial Sequence
  Description of Artificial Sequence: Synthetic oligonucleotide
  Sense strand starting at position 2755 of SEQ ID NO: 1884778
ugucgacugucauuacuga

SEQ ID NO: 2291337 - RNA, 19 nt, Artificial Sequence
  Description of Artificial Sequence: Synthetic oligonucleotide
  Antisense strand to SEQ ID NO: 2291336
ucaguaaugacagucgaca

SEQ ID NO: 2291338 - RNA, 19 nt, Artificial Sequence
  Description of Artificial Sequence: Synthetic oligonucleotide
  Sense strand starting at position 2759 of SEQ ID NO: 1884778
gacugucauuacugagaua

SEQ ID NO: 2291339 - RNA, 19 nt, Artificial Sequence
  Description of Artificial Sequence: Synthetic oligonucleotide
  Antisense strand to SEQ ID NO: 2291338
uaucucaguaaugacaguc

SEQ ID NO: 2291340 - RNA, 19 nt, Artificial Sequence
  Description of Artificial Sequence: Synthetic oligonucleotide
  Sense strand starting at position 2762 of SEQ ID NO: 1884778
ugucauuacugagauaaac

SEQ ID NO: 2291341 - RNA, 19 nt, Artificial Sequence
  Description of Artificial Sequence: Synthetic oligonucleotide
  Antisense strand to SEQ ID NO: 2291340
guuuaucucaguaaugaca

SEQ ID NO: 2291342 - RNA, 19 nt, Artificial Sequence
  Description of Artificial Sequence: Synthetic oligonucleotide
  Sense strand starting at position 2793 of SEQ ID NO: 1884778
uuagcauaugcuggguuua

SEQ ID NO: 2291343 - RNA, 19 nt, Artificial Sequence
  Description of Artificial Sequence: Synthetic oligonucleotide
  Antisense strand to SEQ ID NO: 2291342
uaaacccagcauaugcuaa

SEQ ID NO: 2291344 - RNA, 19 nt, Artificial Sequence
  Description of Artificial Sequence: Synthetic oligonucleotide
  Sense strand starting at position 2794 of SEQ ID NO: 1884778
uagcauaugcuggguuuaa

SEQ ID NO: 2291345 - RNA, 19 nt, Artificial Sequence
  Description of Artificial Sequence: Synthetic oligonucleotide
  Antisense strand to SEQ ID NO: 2291344
uuaaacccagcauaugcua

SEQ ID NO: 2291346 - RNA, 19 nt, Artificial Sequence
  Description of Artificial Sequence: Synthetic oligonucleotide
  Sense strand starting at position 2795 of SEQ ID NO: 1884778
agcauaugcuggguuuaaa

SEQ ID NO: 2291347 - RNA, 19 nt, Artificial Sequence
  Description of Artificial Sequence: Synthetic oligonucleotide
  Antisense strand to SEQ ID NO: 2291346
uuuaaacccagcauaugcu

SEQ ID NO: 2291348 - RNA, 19 nt, Artificial Sequence
  Description of Artificial Sequence: Synthetic oligonucleotide
  Sense strand starting at position 2817 of SEQ ID NO: 1884778
uuugguuaauccucagugu

SEQ ID NO: 2291349 - RNA, 19 nt, Artificial Sequence
  Description of Artificial Sequence: Synthetic oligonucleotide
  Antisense strand to SEQ ID NO: 2291348
acacugaggauuaaccaaa

SEQ ID NO: 2291350 - RNA, 19 nt, Artificial Sequence
  Description of Artificial Sequence: Synthetic oligonucleotide
  Sense strand starting at position 2820 of SEQ ID NO: 1884778
gguuaauccucagugucca

SEQ ID NO: 2291351 - RNA, 19 nt, Artificial Sequence
  Description of Artificial Sequence: Synthetic oligonucleotide
  Antisense strand to SEQ ID NO: 2291350
uggacacugaggauuaacc

SEQ ID NO: 2291352 - RNA, 19 nt, Artificial Sequence
  Description of Artificial Sequence: Synthetic oligonucleotide
  Sense strand starting at position 2821 of SEQ ID NO: 1884778
guuaauccucaguguccaa

SEQ ID NO: 2291353 - RNA, 19 nt, Artificial Sequence
  Description of Artificial Sequence: Synthetic oligonucleotide
  Antisense strand to SEQ ID NO: 2291352
uuggacacugaggauuaac

SEQ ID NO: 2291354 - RNA, 19 nt, Artificial Sequence
  Description of Artificial Sequence: Synthetic oligonucleotide
  Sense strand starting at position 2895 of SEQ ID NO: 1884778
uuguaaagccuuuaguuag

SEQ ID NO: 2291355 - RNA, 19 nt, Artificial Sequence
  Description of Artificial Sequence: Synthetic oligonucleotide
  Antisense strand to SEQ ID NO: 2291354
cuaacuaaaggcuuuacaa

SEQ ID NO: 2291356 - RNA, 19 nt, Artificial Sequence
  Description of Artificial Sequence: Synthetic oligonucleotide
  Sense strand starting at position 2901 of SEQ ID NO: 1884778
agccuuuaguuagcugaaa

SEQ ID NO: 2291357 - RNA, 19 nt, Artificial Sequence
  Description of Artificial Sequence: Synthetic oligonucleotide
  Antisense strand to SEQ ID NO: 2291356
uuucagcuaacuaaaggcu

SEQ ID NO: 2291358 - RNA, 19 nt, Artificial Sequence
  Description of Artificial Sequence: Synthetic oligonucleotide
  Sense strand starting at position 2902 of SEQ ID NO: 1884778
gccuuuaguuagcugaaau

SEQ ID NO: 2291359 - RNA, 19 nt, Artificial Sequence
  Description of Artificial Sequence: Synthetic oligonucleotide
  Antisense strand to SEQ ID NO: 2291358
auuucagcuaacuaaaggc

SEQ ID NO: 2291360 - RNA, 19 nt, Artificial Sequence
  Description of Artificial Sequence: Synthetic oligonucleotide
  Sense strand starting at position 2938 of SEQ ID NO: 1884778
ucuuacagaucucuaggau

SEQ ID NO: 2291361 - RNA, 19 nt, Artificial Sequence
  Description of Artificial Sequence: Synthetic oligonucleotide
  Antisense strand to SEQ ID NO: 2291360
auccuagagaucuguaaga

SEQ ID NO: 2291362 - RNA, 19 nt, Artificial Sequence
  Description of Artificial Sequence: Synthetic oligonucleotide
  Sense strand starting at position 3030 of SEQ ID NO: 1884778
aacagaguggguuguuaaa

SEQ ID NO: 2291363 - RNA, 19 nt, Artificial Sequence
  Description of Artificial Sequence: Synthetic oligonucleotide
  Antisense strand to SEQ ID NO: 2291362
uuuaacaacccacucuguu

SEQ ID NO: 2291364 - RNA, 19 nt, Artificial Sequence
  Description of Artificial Sequence: Synthetic oligonucleotide
  Sense strand starting at position 3067 of SEQ ID NO: 1884778
agcaacaugucuguaaaca

SEQ ID NO: 2291365 - RNA, 19 nt, Artificial Sequence
  Description of Artificial Sequence: Synthetic oligonucleotide
  Antisense strand to SEQ ID NO: 2291364
uguuuacagacauguugcu

SEQ ID NO: 2291366 - RNA, 19 nt, Artificial Sequence
  Description of Artificial Sequence: Synthetic oligonucleotide
  Sense strand starting at position 3068 of SEQ ID NO: 1884778
gcaacaugucuguaaacaa

SEQ ID NO: 2291367 - RNA, 19 nt, Artificial Sequence
  Description of Artificial Sequence: Synthetic oligonucleotide
  Antisense strand to SEQ ID NO: 2291366
uuguuuacagacauguugc

SEQ ID NO: 2291368 - RNA, 19 nt, Artificial Sequence
  Description of Artificial Sequence: Synthetic oligonucleotide
  Sense strand starting at position 3078 of SEQ ID NO: 1884778
uguaaacaagucugacauu

SEQ ID NO: 2291369 - RNA, 19 nt, Artificial Sequence
  Description of Artificial Sequence: Synthetic oligonucleotide
  Antisense strand to SEQ ID NO: 2291368
aaugucagacuuguuuaca

SEQ ID NO: 2291370 - RNA, 19 nt, Artificial Sequence
  Description of Artificial Sequence: Synthetic oligonucleotide
  Sense strand starting at position 3079 of SEQ ID NO: 1884778
guaaacaagucugacauuu

SEQ ID NO: 2291371 - RNA, 19 nt, Artificial Sequence
  Description of Artificial Sequence: Synthetic oligonucleotide
  Antisense strand to SEQ ID NO: 2291370
aaaugucagacuuguuuac

SEQ ID NO: 2291372 - RNA, 19 nt, Artificial Sequence
  Description of Artificial Sequence: Synthetic oligonucleotide
  Sense strand starting at position 3117 of SEQ ID NO: 1884778
guaucuauccuacaguuac

SEQ ID NO: 2291373 - RNA, 19 nt, Artificial Sequence
  Description of Artificial Sequence: Synthetic oligonucleotide
  Antisense strand to SEQ ID NO: 2291372
guaacuguaggauagauac

SEQ ID NO: 2291374 - RNA, 19 nt, Artificial Sequence
  Description of Artificial Sequence: Synthetic oligonucleotide
  Sense strand starting at position 3167 of SEQ ID NO: 1884778
uagccuguaagugguuaga

SEQ ID NO: 2291375 - RNA, 19 nt, Artificial Sequence
  Description of Artificial Sequence: Synthetic oligonucleotide
  Antisense strand to SEQ ID NO: 2291374
ucuaaccacuuacaggcua

SEQ ID NO: 2291376 - RNA, 19 nt, Artificial Sequence
  Description of Artificial Sequence: Synthetic oligonucleotide
  Sense strand starting at position 3169 of SEQ ID NO: 1884778
gccuguaagugguuagaau

SEQ ID NO: 2291377 - RNA, 19 nt, Artificial Sequence
  Description of Artificial Sequence: Synthetic oligonucleotide
  Antisense strand to SEQ ID NO: 2291376
auucuaaccacuuacaggc

SEQ ID NO: 2291378 - RNA, 19 nt, Artificial Sequence
  Description of Artificial Sequence: Synthetic oligonucleotide
  Sense strand starting at position 3170 of SEQ ID NO: 1884778
ccuguaagugguuagaauu

SEQ ID NO: 2291379 - RNA, 19 nt, Artificial Sequence
  Description of Artificial Sequence: Synthetic oligonucleotide
  Antisense strand to SEQ ID NO: 2291378
aauucuaaccacuuacagg

SEQ ID NO: 2291380 - RNA, 19 nt, Artificial Sequence
  Description of Artificial Sequence: Synthetic oligonucleotide
  Sense strand starting at position 3234 of SEQ ID NO: 1884778
ucagaauuguuagaaugcu

SEQ ID NO: 2291381 - RNA, 19 nt, Artificial Sequence
  Description of Artificial Sequence: Synthetic oligonucleotide
  Antisense strand to SEQ ID NO: 2291380
agcauucuaacaauucuga

SEQ ID NO: 2291382 - RNA, 19 nt, Artificial Sequence
  Description of Artificial Sequence: Synthetic oligonucleotide
  Sense strand starting at position 3545 of SEQ ID NO: 1884778
gccagaaugcuuuaaauua

SEQ ID NO: 2291383 - RNA, 19 nt, Artificial Sequence
  Description of Artificial Sequence: Synthetic oligonucleotide
  Antisense strand to SEQ ID NO: 2291382
uaauuuaaagcauucuggc

SEQ ID NO: 2291384 - RNA, 19 nt, Artificial Sequence
  Description of Artificial Sequence: Synthetic oligonucleotide
  Sense strand starting at position 3561 of SEQ ID NO: 1884778
uuauaagugucacacagga

SEQ ID NO: 2291385 - RNA, 19 nt, Artificial Sequence
  Description of Artificial Sequence: Synthetic oligonucleotide
  Antisense strand to SEQ ID NO: 2291384
uccugugugacacuuauaa

SEQ ID NO: 2291386 - RNA, 19 nt, Artificial Sequence
  Description of Artificial Sequence: Synthetic oligonucleotide
  Sense strand starting at position 3605 of SEQ ID NO: 1884778
ugaguuguccuuugguuau

SEQ ID NO: 2291387 - RNA, 19 nt, Artificial Sequence
  Description of Artificial Sequence: Synthetic oligonucleotide
  Antisense strand to SEQ ID NO: 2291386
auaaccaaaggacaacuca

SEQ ID NO: 2291388 - RNA, 19 nt, Artificial Sequence
  Description of Artificial Sequence: Synthetic oligonucleotide
  Sense strand starting at position 3607 of SEQ ID NO: 1884778
aguuguccuuugguuauuu

SEQ ID NO: 2291389 - RNA, 19 nt, Artificial Sequence
  Description of Artificial Sequence: Synthetic oligonucleotide
  Antisense strand to SEQ ID NO: 2291388
aaauaaccaaaggacaacu

SEQ ID NO: 2291390 - RNA, 19 nt, Artificial Sequence
  Description of Artificial Sequence: Synthetic oligonucleotide
  Sense strand starting at position 3608 of SEQ ID NO: 1884778
guuguccuuugguuauuua

SEQ ID NO: 2291391 - RNA, 19 nt, Artificial Sequence
  Description of Artificial Sequence: Synthetic oligonucleotide
  Antisense strand to SEQ ID NO: 2291390
uaaauaaccaaaggacaac

SEQ ID NO: 2291392 - RNA, 19 nt, Artificial Sequence
  Description of Artificial Sequence: Synthetic oligonucleotide
  Sense strand starting at position 3615 of SEQ ID NO: 1884778
uuugguuauuuaggacaga

SEQ ID NO: 2291393 - RNA, 19 nt, Artificial Sequence
  Description of Artificial Sequence: Synthetic oligonucleotide
  Antisense strand to SEQ ID NO: 2291392
ucuguccuaaauaaccaaa

SEQ ID NO: 2291394 - RNA, 19 nt, Artificial Sequence
  Description of Artificial Sequence: Synthetic oligonucleotide
  Sense strand starting at position 3689 of SEQ ID NO: 1884778
cgcggacuguauuuagaac

SEQ ID NO: 2291395 - RNA, 19 nt, Artificial Sequence
  Description of Artificial Sequence: Synthetic oligonucleotide
  Antisense strand to SEQ ID NO: 2291394
guucuaaauacaguccgcg

SEQ ID NO: 2291396 - RNA, 19 nt, Artificial Sequence
  Description of Artificial Sequence: Synthetic oligonucleotide
  Sense strand starting at position 3733 of SEQ ID NO: 1884778
uuuagaauuccaugcagca

SEQ ID NO: 2291397 - RNA, 19 nt, Artificial Sequence
  Description of Artificial Sequence: Synthetic oligonucleotide
  Antisense strand to SEQ ID NO: 2291396
ugcugcauggaauucuaaa

SEQ ID NO: 2291398 - RNA, 19 nt, Artificial Sequence
  Description of Artificial Sequence: Synthetic oligonucleotide
  Sense strand starting at position 13 of SEQ ID NO: 1884779
gaacgucuggcagagcauu

SEQ ID NO: 2291399 - RNA, 19 nt, Artificial Sequence
  Description of Artificial Sequence: Synthetic oligonucleotide
  Antisense strand to SEQ ID NO: 2291398
aaugcucugccagacguuc

SEQ ID NO: 2291400 - RNA, 19 nt, Artificial Sequence
  Description of Artificial Sequence: Synthetic oligonucleotide
  Sense strand starting at position 46 of SEQ ID NO: 1884779
gcacaaauacuacgaauaa

SEQ ID NO: 2291401 - RNA, 19 nt, Artificial Sequence
  Description of Artificial Sequence: Synthetic oligonucleotide
  Antisense strand to SEQ ID NO: 2291400
uuauucguaguauuugugc

SEQ ID NO: 2291402 - RNA, 19 nt, Artificial Sequence
  Description of Artificial Sequence: Synthetic oligonucleotide
  Sense strand starting at position 58 of SEQ ID NO: 1884779
cgaauaaauggaugcguga

SEQ ID NO: 2291403 - RNA, 19 nt, Artificial Sequence
  Description of Artificial Sequence: Synthetic oligonucleotide
  Antisense strand to SEQ ID NO: 2291402
ucacgcauccauuuauucg

SEQ ID NO: 2291404 - RNA, 19 nt, Artificial Sequence
  Description of Artificial Sequence: Synthetic oligonucleotide
  Sense strand starting at position 61 of SEQ ID NO: 1884779
auaaauggaugcgugacua

SEQ ID NO: 2291405 - RNA, 19 nt, Artificial Sequence
  Description of Artificial Sequence: Synthetic oligonucleotide
  Antisense strand to SEQ ID NO: 2291404
uagucacgcauccauuuau

SEQ ID NO: 2291406 - RNA, 19 nt, Artificial Sequence
  Description of Artificial Sequence: Synthetic oligonucleotide
  Sense strand starting at position 69 of SEQ ID NO: 1884779
augcgugacuagcuaaaua

SEQ ID NO: 2291407 - RNA, 19 nt, Artificial Sequence
  Description of Artificial Sequence: Synthetic oligonucleotide
  Antisense strand to SEQ ID NO: 2291406
uauuuagcuagucacgcau

SEQ ID NO: 2291408 - RNA, 19 nt, Artificial Sequence
  Description of Artificial Sequence: Synthetic oligonucleotide
  Sense strand starting at position 212 of SEQ ID NO: 1884779
agggcauuccugcauuaca

SEQ ID NO: 2291409 - RNA, 19 nt, Artificial Sequence
  Description of Artificial Sequence: Synthetic oligonucleotide
  Antisense strand to SEQ ID NO: 2291408
uguaaugcaggaaugcccu

SEQ ID NO: 2291410 - RNA, 19 nt, Artificial Sequence
  Description of Artificial Sequence: Synthetic oligonucleotide
  Sense strand starting at position 292 of SEQ ID NO: 1884779
aggccuauggcagaaacau

SEQ ID NO: 2291411 - RNA, 19 nt, Artificial Sequence
  Description of Artificial Sequence: Synthetic oligonucleotide
  Antisense strand to SEQ ID NO: 2291410
auguuucugccauaggccu

SEQ ID NO: 2291412 - RNA, 19 nt, Artificial Sequence
  Description of Artificial Sequence: Synthetic oligonucleotide
  Sense strand starting at position 301 of SEQ ID NO: 1884779
gcagaaacaugucuccuuu

SEQ ID NO: 2291413 - RNA, 19 nt, Artificial Sequence
  Description of Artificial Sequence: Synthetic oligonucleotide
  Antisense strand to SEQ ID NO: 2291412
aaaggagacauguuucugc

SEQ ID NO: 2291414 - RNA, 19 nt, Artificial Sequence
  Description of Artificial Sequence: Synthetic oligonucleotide
  Sense strand starting at position 320 of SEQ ID NO: 1884779
cuuggagucugaguagacu

SEQ ID NO: 2291415 - RNA, 19 nt, Artificial Sequence
  Description of Artificial Sequence: Synthetic oligonucleotide
  Antisense strand to SEQ ID NO: 2291414
agucuacucagacuccaag

SEQ ID NO: 2291416 - RNA, 19 nt, Artificial Sequence
  Description of Artificial Sequence: Synthetic oligonucleotide
  Sense strand starting at position 383 of SEQ ID NO: 1884779
acaccaaagccucagugaa

SEQ ID NO: 2291417 - RNA, 19 nt, Artificial Sequence
  Description of Artificial Sequence: Synthetic oligonucleotide
  Antisense strand to SEQ ID NO: 2291416
uucacugaggcuuuggugu

SEQ ID NO: 2291418 - RNA, 19 nt, Artificial Sequence
  Description of Artificial Sequence: Synthetic oligonucleotide
  Sense strand starting at position 385 of SEQ ID NO: 1884779
accaaagccucagugaaua

SEQ ID NO: 2291419 - RNA, 19 nt, Artificial Sequence
  Description of Artificial Sequence: Synthetic oligonucleotide
  Antisense strand to SEQ ID NO: 2291418
uauucacugaggcuuuggu

SEQ ID NO: 2291420 - RNA, 19 nt, Artificial Sequence
  Description of Artificial Sequence: Synthetic oligonucleotide
  Sense strand starting at position 396 of SEQ ID NO: 1884779
agugaauaucuuuaucuug

SEQ ID NO: 2291421 - RNA, 19 nt, Artificial Sequence
  Description of Artificial Sequence: Synthetic oligonucleotide
  Antisense strand to SEQ ID NO: 2291420
caagauaaagauauucacu

SEQ ID NO: 2291422 - RNA, 19 nt, Artificial Sequence
  Description of Artificial Sequence: Synthetic oligonucleotide
  Sense strand starting at position 398 of SEQ ID NO: 1884779
ugaauaucuuuaucuugga

SEQ ID NO: 2291423 - RNA, 19 nt, Artificial Sequence
  Description of Artificial Sequence: Synthetic oligonucleotide
  Antisense strand to SEQ ID NO: 2291422
uccaagauaaagauauuca

SEQ ID NO: 2291424 - RNA, 19 nt, Artificial Sequence
  Description of Artificial Sequence: Synthetic oligonucleotide
  Sense strand starting at position 442 of SEQ ID NO: 1884779
ggugaaaucaugugguuga

SEQ ID NO: 2291425 - RNA, 19 nt, Artificial Sequence
  Description of Artificial Sequence: Synthetic oligonucleotide
  Antisense strand to SEQ ID NO: 2291424
ucaaccacaugauuucacc

SEQ ID NO: 2291426 - RNA, 19 nt, Artificial Sequence
  Description of Artificial Sequence: Synthetic oligonucleotide
  Sense strand starting at position 443 of SEQ ID NO: 1884779
gugaaaucaugugguugaa

SEQ ID NO: 2291427 - RNA, 19 nt, Artificial Sequence
  Description of Artificial Sequence: Synthetic oligonucleotide
  Antisense strand to SEQ ID NO: 2291426
uucaaccacaugauuucac

SEQ ID NO: 2291428 - RNA, 19 nt, Artificial Sequence
  Description of Artificial Sequence: Synthetic oligonucleotide
  Sense strand starting at position 445 of SEQ ID NO: 1884779
gaaaucaugugguugaaca

SEQ ID NO: 2291429 - RNA, 19 nt, Artificial Sequence
  Description of Artificial Sequence: Synthetic oligonucleotide
  Antisense strand to SEQ ID NO: 2291428
uguucaaccacaugauuuc

SEQ ID NO: 2291430 - RNA, 19 nt, Artificial Sequence
  Description of Artificial Sequence: Synthetic oligonucleotide
  Sense strand starting at position 446 of SEQ ID NO: 1884779
aaaucaugugguugaacaa

SEQ ID NO: 2291431 - RNA, 19 nt, Artificial Sequence
  Description of Artificial Sequence: Synthetic oligonucleotide
  Antisense strand to SEQ ID NO: 2291430
uuguucaaccacaugauuu

SEQ ID NO: 2291432 - RNA, 19 nt, Artificial Sequence
  Description of Artificial Sequence: Synthetic oligonucleotide
  Sense strand starting at position 837 of SEQ ID NO: 1884779
auagcuguccucugauaaa

SEQ ID NO: 2291433 - RNA, 19 nt, Artificial Sequence
  Description of Artificial Sequence: Synthetic oligonucleotide
  Antisense strand to SEQ ID NO: 2291432
uuuaucagaggacagcuau

SEQ ID NO: 2291434 - RNA, 19 nt, Artificial Sequence
  Description of Artificial Sequence: Synthetic oligonucleotide
  Sense strand starting at position 913 of SEQ ID NO: 1884779
aggccuguucugcaacuaa

SEQ ID NO: 2291435 - RNA, 19 nt, Artificial Sequence
  Description of Artificial Sequence: Synthetic oligonucleotide
  Antisense strand to SEQ ID NO: 2291434
uuaguugcagaacaggccu

SEQ ID NO: 2291436 - RNA, 19 nt, Artificial Sequence
  Description of Artificial Sequence: Synthetic oligonucleotide
  Sense strand starting at position 1013 of SEQ ID NO: 1884779
acgugcaugaguugacaua

SEQ ID NO: 2291437 - RNA, 19 nt, Artificial Sequence
  Description of Artificial Sequence: Synthetic oligonucleotide
  Antisense strand to SEQ ID NO: 2291436
uaugucaacucaugcacgu

SEQ ID NO: 2291438 - RNA, 19 nt, Artificial Sequence
  Description of Artificial Sequence: Synthetic oligonucleotide
  Sense strand starting at position 1083 of SEQ ID NO: 1884779
acucaagcguccuaacaaa

SEQ ID NO: 2291439 - RNA, 19 nt, Artificial Sequence
  Description of Artificial Sequence: Synthetic oligonucleotide
  Antisense strand to SEQ ID NO: 2291438
uuuguuaggacgcuugagu

SEQ ID NO: 2291440 - RNA, 19 nt, Artificial Sequence
  Description of Artificial Sequence: Synthetic oligonucleotide
  Sense strand starting at position 1101 of SEQ ID NO: 1884779
aucuuaagagucugaugag

SEQ ID NO: 2291441 - RNA, 19 nt, Artificial Sequence
  Description of Artificial Sequence: Synthetic oligonucleotide
  Antisense strand to SEQ ID NO: 2291440
cucaucagacucuuaagau

SEQ ID NO: 2291442 - RNA, 19 nt, Artificial Sequence
  Description of Artificial Sequence: Synthetic oligonucleotide
  Sense strand starting at position 1102 of SEQ ID NO: 1884779
ucuuaagagucugaugagu

SEQ ID NO: 2291443 - RNA, 19 nt, Artificial Sequence
  Description of Artificial Sequence: Synthetic oligonucleotide
  Antisense strand to SEQ ID NO: 2291442
acucaucagacucuuaaga

SEQ ID NO: 2291444 - RNA, 19 nt, Artificial Sequence
  Description of Artificial Sequence: Synthetic oligonucleotide
  Sense strand starting at position 1107 of SEQ ID NO: 1884779
agagucugaugaguccauu

SEQ ID NO: 2291445 - RNA, 19 nt, Artificial Sequence
  Description of Artificial Sequence: Synthetic oligonucleotide
  Antisense strand to SEQ ID NO: 2291444
aauggacucaucagacucu

SEQ ID NO: 2291446 - RNA, 19 nt, Artificial Sequence
  Description of Artificial Sequence: Synthetic oligonucleotide
  Sense strand starting at position 1110 of SEQ ID NO: 1884779
gucugaugaguccauuccu

SEQ ID NO: 2291447 - RNA, 19 nt, Artificial Sequence
  Description of Artificial Sequence: Synthetic oligonucleotide
  Antisense strand to SEQ ID NO: 2291446
aggaauggacucaucagac

SEQ ID NO: 2291448 - RNA, 19 nt, Artificial Sequence
  Description of Artificial Sequence: Synthetic oligonucleotide
  Sense strand starting at position 2274 of SEQ ID NO: 1884779
gggcuucucuuggauguca

SEQ ID NO: 2291449 - RNA, 19 nt, Artificial Sequence
  Description of Artificial Sequence: Synthetic oligonucleotide
  Antisense strand to SEQ ID NO: 2291448
ugacauccaagagaagccc

SEQ ID NO: 2291450 - RNA, 19 nt, Artificial Sequence
  Description of Artificial Sequence: Synthetic oligonucleotide
  Sense strand starting at position 3456 of SEQ ID NO: 1884779
auaaauagccaauguuuga

SEQ ID NO: 2291451 - RNA, 19 nt, Artificial Sequence
  Description of Artificial Sequence: Synthetic oligonucleotide
  Antisense strand to SEQ ID NO: 2291450
ucaaacauuggcuauuuau

SEQ ID NO: 2291452 - RNA, 19 nt, Artificial Sequence
  Description of Artificial Sequence: Synthetic oligonucleotide
  Sense strand starting at position 3475 of SEQ ID NO: 1884779
ugagguuuccugugugcca

SEQ ID NO: 2291453 - RNA, 19 nt, Artificial Sequence
  Description of Artificial Sequence: Synthetic oligonucleotide
  Antisense strand to SEQ ID NO: 2291452
uggcacacaggaaaccuca

SEQ ID NO: 2291454 - RNA, 19 nt, Artificial Sequence
  Description of Artificial Sequence: Synthetic oligonucleotide
  Sense strand starting at position 3539 of SEQ ID NO: 1884779
cuauaaaguugaucuuguu

SEQ ID NO: 2291455 - RNA, 19 nt, Artificial Sequence
  Description of Artificial Sequence: Synthetic oligonucleotide
  Antisense strand to SEQ ID NO: 2291454
aacaagaucaacuuuauag

SEQ ID NO: 2291456 - RNA, 19 nt, Artificial Sequence
  Description of Artificial Sequence: Synthetic oligonucleotide
  Sense strand starting at position 3605 of SEQ ID NO: 1884779
gcccaaaguuauguaggua

SEQ ID NO: 2291457 - RNA, 19 nt, Artificial Sequence
  Description of Artificial Sequence: Synthetic oligonucleotide
  Antisense strand to SEQ ID NO: 2291456
uaccuacauaacuuugggc

SEQ ID NO: 2291458 - RNA, 19 nt, Artificial Sequence
  Description of Artificial Sequence: Synthetic oligonucleotide
  Sense strand starting at position 3608 of SEQ ID NO: 1884779
caaaguuauguagguaaga

SEQ ID NO: 2291459 - RNA, 19 nt, Artificial Sequence
  Description of Artificial Sequence: Synthetic oligonucleotide
  Antisense strand to SEQ ID NO: 2291458
ucuuaccuacauaacuuug

SEQ ID NO: 2291460 - RNA, 19 nt, Artificial Sequence
  Description of Artificial Sequence: Synthetic oligonucleotide
  Sense strand starting at position 3609 of SEQ ID NO: 1884779
aaaguuauguagguaagaa

SEQ ID NO: 2291461 - RNA, 19 nt, Artificial Sequence
  Description of Artificial Sequence: Synthetic oligonucleotide
  Antisense strand to SEQ ID NO: 2291460
uucuuaccuacauaacuuu

SEQ ID NO: 2291462 - RNA, 19 nt, Artificial Sequence
  Description of Artificial Sequence: Synthetic oligonucleotide
  Sense strand starting at position 3624 of SEQ ID NO: 1884779
agaagugguagcuaguguu

SEQ ID NO: 2291463 - RNA, 19 nt, Artificial Sequence
  Description of Artificial Sequence: Synthetic oligonucleotide
  Antisense strand to SEQ ID NO: 2291462
aacacuagcuaccacuucu

SEQ ID NO: 2291464 - RNA, 19 nt, Artificial Sequence
  Description of Artificial Sequence: Synthetic oligonucleotide
  Sense strand starting at position 3628 of SEQ ID NO: 1884779
gugguagcuaguguuaagu

SEQ ID NO: 2291465 - RNA, 19 nt, Artificial Sequence
  Description of Artificial Sequence: Synthetic oligonucleotide
  Antisense strand to SEQ ID NO: 2291464
acuuaacacuagcuaccac

SEQ ID NO: 2291466 - RNA, 19 nt, Artificial Sequence
  Description of Artificial Sequence: Synthetic oligonucleotide
  Sense strand starting at position 3644 of SEQ ID NO: 1884779
agucaaguuuaaucuaaag

SEQ ID NO: 2291467 - RNA, 19 nt, Artificial Sequence
  Description of Artificial Sequence: Synthetic oligonucleotide
  Antisense strand to SEQ ID NO: 2291466
cuuuagauuaaacuugacu

SEQ ID NO: 2291468 - RNA, 19 nt, Artificial Sequence
  Description of Artificial Sequence: Synthetic oligonucleotide
  Sense strand starting at position 3726 of SEQ ID NO: 1884779
ggagguguaaaucgaacgu

SEQ ID NO: 2291469 - RNA, 19 nt, Artificial Sequence
  Description of Artificial Sequence: Synthetic oligonucleotide
  Antisense strand to SEQ ID NO: 2291468
acguucgauuuacaccucc

SEQ ID NO: 2291470 - RNA, 19 nt, Artificial Sequence
  Description of Artificial Sequence: Synthetic oligonucleotide
  Sense strand starting at position 3816 of SEQ ID NO: 1884779
gagacaaacgcugaucugu

SEQ ID NO: 2291471 - RNA, 19 nt, Artificial Sequence
  Description of Artificial Sequence: Synthetic oligonucleotide
  Antisense strand to SEQ ID NO: 2291470
acagaucagcguuugucuc

SEQ ID NO: 2291472 - RNA, 19 nt, Artificial Sequence
  Description of Artificial Sequence: Synthetic oligonucleotide
  Sense strand starting at position 3818 of SEQ ID NO: 1884779
gacaaacgcugaucuguaa

SEQ ID NO: 2291473 - RNA, 19 nt, Artificial Sequence
  Description of Artificial Sequence: Synthetic oligonucleotide
  Antisense strand to SEQ ID NO: 2291472
uuacagaucagcguuuguc

SEQ ID NO: 2291474 - RNA, 19 nt, Artificial Sequence
  Description of Artificial Sequence: Synthetic oligonucleotide
  Sense strand starting at position 3895 of SEQ ID NO: 1884779
gugaauaugcugggucucu

SEQ ID NO: 2291475 - RNA, 19 nt, Artificial Sequence
  Description of Artificial Sequence: Synthetic oligonucleotide
  Antisense strand to SEQ ID NO: 2291474
agagacccagcauauucac

SEQ ID NO: 2291476 - RNA, 19 nt, Artificial Sequence
  Description of Artificial Sequence: Synthetic oligonucleotide
  Sense strand starting at position 3963 of SEQ ID NO: 1884779
auuugagaaucauacauug

SEQ ID NO: 2291477 - RNA, 19 nt, Artificial Sequence
  Description of Artificial Sequence: Synthetic oligonucleotide
  Antisense strand to SEQ ID NO: 2291476
caauguaugauucucaaau

SEQ ID NO: 2291478 - RNA, 19 nt, Artificial Sequence
  Description of Artificial Sequence: Synthetic oligonucleotide
  Sense strand starting at position 55 of SEQ ID NO: 1884781
ggcucuuaaccacaugcua

SEQ ID NO: 2291479 - RNA, 19 nt, Artificial Sequence
  Description of Artificial Sequence: Synthetic oligonucleotide
  Antisense strand to SEQ ID NO: 2291478
uagcaugugguuaagagcc

SEQ ID NO: 2291480 - RNA, 19 nt, Artificial Sequence
  Description of Artificial Sequence: Synthetic oligonucleotide
  Sense strand starting at position 123 of SEQ ID NO: 1884781
aucuuccuucuggagugaa

SEQ ID NO: 2291481 - RNA, 19 nt, Artificial Sequence
  Description of Artificial Sequence: Synthetic oligonucleotide
  Antisense strand to SEQ ID NO: 2291480
uucacuccagaaggaagau

SEQ ID NO: 2291482 - RNA, 19 nt, Artificial Sequence
  Description of Artificial Sequence: Synthetic oligonucleotide
  Sense strand starting at position 313 of SEQ ID NO: 1884781
ggaaauguguuguuggaga

SEQ ID NO: 2291483 - RNA, 19 nt, Artificial Sequence
  Description of Artificial Sequence: Synthetic oligonucleotide
  Antisense strand to SEQ ID NO: 2291482
ucuccaacaacacauuucc

SEQ ID NO: 2291484 - RNA, 19 nt, Artificial Sequence
  Description of Artificial Sequence: Synthetic oligonucleotide
  Sense strand starting at position 318 of SEQ ID NO: 1884781
uguguuguuggagauucua

SEQ ID NO: 2291485 - RNA, 19 nt, Artificial Sequence
  Description of Artificial Sequence: Synthetic oligonucleotide
  Antisense strand to SEQ ID NO: 2291484
uagaaucuccaacaacaca

SEQ ID NO: 2291486 - RNA, 19 nt, Artificial Sequence
  Description of Artificial Sequence: Synthetic oligonucleotide
  Sense strand starting at position 378 of SEQ ID NO: 1884781
aggaaauccuuucuaaagu

SEQ ID NO: 2291487 - RNA, 19 nt, Artificial Sequence
  Description of Artificial Sequence: Synthetic oligonucleotide
  Antisense strand to SEQ ID NO: 2291486
acuuuagaaaggauuuccu

SEQ ID NO: 2291488 - RNA, 19 nt, Artificial Sequence
  Description of Artificial Sequence: Synthetic oligonucleotide
  Sense strand starting at position 430 of SEQ ID NO: 1884781
accucuuuaguggagguau

SEQ ID NO: 2291489 - RNA, 19 nt, Artificial Sequence
  Description of Artificial Sequence: Synthetic oligonucleotide
  Antisense strand to SEQ ID NO: 2291488
auaccuccacuaaagaggu

SEQ ID NO: 2291490 - RNA, 19 nt, Artificial Sequence
  Description of Artificial Sequence: Synthetic oligonucleotide
  Sense strand starting at position 432 of SEQ ID NO: 1884781
cucuuuaguggagguauua

SEQ ID NO: 2291491 - RNA, 19 nt, Artificial Sequence
  Description of Artificial Sequence: Synthetic oligonucleotide
  Antisense strand to SEQ ID NO: 2291490
uaauaccuccacuaaagag

SEQ ID NO: 2291492 - RNA, 19 nt, Artificial Sequence
  Description of Artificial Sequence: Synthetic oligonucleotide
  Sense strand starting at position 566 of SEQ ID NO: 1884781
acaguaagcccugaacauu

SEQ ID NO: 2291493 - RNA, 19 nt, Artificial Sequence
  Description of Artificial Sequence: Synthetic oligonucleotide
  Antisense strand to SEQ ID NO: 2291492
aauguucagggcuuacugu

SEQ ID NO: 2291494 - RNA, 19 nt, Artificial Sequence
  Description of Artificial Sequence: Synthetic oligonucleotide
  Sense strand starting at position 948 of SEQ ID NO: 1884781
cuaagugucuuacuaauua

SEQ ID NO: 2291495 - RNA, 19 nt, Artificial Sequence
  Description of Artificial Sequence: Synthetic oligonucleotide
  Antisense strand to SEQ ID NO: 2291494
uaauuaguaagacacuuag

SEQ ID NO: 2291496 - RNA, 19 nt, Artificial Sequence
  Description of Artificial Sequence: Synthetic oligonucleotide
  Sense strand starting at position 952 of SEQ ID NO: 1884781
gugucuuacuaauuacaaa

SEQ ID NO: 2291497 - RNA, 19 nt, Artificial Sequence
  Description of Artificial Sequence: Synthetic oligonucleotide
  Antisense strand to SEQ ID NO: 2291496
uuuguaauuaguaagacac

SEQ ID NO: 2291498 - RNA, 19 nt, Artificial Sequence
  Description of Artificial Sequence: Synthetic oligonucleotide
  Sense strand starting at position 973 of SEQ ID NO: 1884781
gagaaagccuggucuguga

SEQ ID NO: 2291499 - RNA, 19 nt, Artificial Sequence
  Description of Artificial Sequence: Synthetic oligonucleotide
  Antisense strand to SEQ ID NO: 2291498
ucacagaccaggcuuucuc

SEQ ID NO: 2291500 - RNA, 19 nt, Artificial Sequence
  Description of Artificial Sequence: Synthetic oligonucleotide
  Sense strand starting at position 1371 of SEQ ID NO: 1884781
guuggaucccuugagguuu

SEQ ID NO: 2291501 - RNA, 19 nt, Artificial Sequence
  Description of Artificial Sequence: Synthetic oligonucleotide
  Antisense strand to SEQ ID NO: 2291500
aaaccucaagggauccaac

SEQ ID NO: 2291502 - RNA, 19 nt, Artificial Sequence
  Description of Artificial Sequence: Synthetic oligonucleotide
  Sense strand starting at position 1567 of SEQ ID NO: 1884781
agguaaccugcucaagguu

SEQ ID NO: 2291503 - RNA, 19 nt, Artificial Sequence
  Description of Artificial Sequence: Synthetic oligonucleotide
  Antisense strand to SEQ ID NO: 2291502
aaccuugagcagguuaccu

SEQ ID NO: 2291504 - RNA, 19 nt, Artificial Sequence
  Description of Artificial Sequence: Synthetic oligonucleotide
  Sense strand starting at position 1603 of SEQ ID NO: 1884781
gcugguguggcugggauuu

SEQ ID NO: 2291505 - RNA, 19 nt, Artificial Sequence
  Description of Artificial Sequence: Synthetic oligonucleotide
  Antisense strand to SEQ ID NO: 2291504
aaaucccagccacaccagc

SEQ ID NO: 2291506 - RNA, 19 nt, Artificial Sequence
  Description of Artificial Sequence: Synthetic oligonucleotide
  Sense strand starting at position 1851 of SEQ ID NO: 1884781
uccugacuuagggaagcuu

SEQ ID NO: 2291507 - RNA, 19 nt, Artificial Sequence
  Description of Artificial Sequence: Synthetic oligonucleotide
  Antisense strand to SEQ ID NO: 2291506
aagcuucccuaagucagga

SEQ ID NO: 2291508 - RNA, 19 nt, Artificial Sequence
  Description of Artificial Sequence: Synthetic oligonucleotide
  Sense strand starting at position 1884 of SEQ ID NO: 1884781
aggaaacagauguguggau

SEQ ID NO: 2291509 - RNA, 19 nt, Artificial Sequence
  Description of Artificial Sequence: Synthetic oligonucleotide
  Antisense strand to SEQ ID NO: 2291508
auccacacaucuguuuccu

SEQ ID NO: 2291510 - RNA, 19 nt, Artificial Sequence
  Description of Artificial Sequence: Synthetic oligonucleotide
  Sense strand starting at position 1937 of SEQ ID NO: 1884781
ggaaacuauuagcccaaca

SEQ ID NO: 2291511 - RNA, 19 nt, Artificial Sequence
  Description of Artificial Sequence: Synthetic oligonucleotide
  Antisense strand to SEQ ID NO: 2291510
uguugggcuaauaguuucc

SEQ ID NO: 2291512 - RNA, 19 nt, Artificial Sequence
  Description of Artificial Sequence: Synthetic oligonucleotide
  Sense strand starting at position 2028 of SEQ ID NO: 1884781
auuauugagugaguggauu

SEQ ID NO: 2291513 - RNA, 19 nt, Artificial Sequence
  Description of Artificial Sequence: Synthetic oligonucleotide
  Antisense strand to SEQ ID NO: 2291512
aauccacucacucaauaau

SEQ ID NO: 2291514 - RNA, 19 nt, Artificial Sequence
  Description of Artificial Sequence: Synthetic oligonucleotide
  Sense strand starting at position 2030 of SEQ ID NO: 1884781
uauugagugaguggauuaa

SEQ ID NO: 2291515 - RNA, 19 nt, Artificial Sequence
  Description of Artificial Sequence: Synthetic oligonucleotide
  Antisense strand to SEQ ID NO: 2291514
uuaauccacucacucaaua

SEQ ID NO: 2291516 - RNA, 19 nt, Artificial Sequence
  Description of Artificial Sequence: Synthetic oligonucleotide
  Sense strand starting at position 2048 of SEQ ID NO: 1884781
auugauuaauuguccagaa

SEQ ID NO: 2291517 - RNA, 19 nt, Artificial Sequence
  Description of Artificial Sequence: Synthetic oligonucleotide
  Antisense strand to SEQ ID NO: 2291516
uucuggacaauuaaucaau

SEQ ID NO: 2291518 - RNA, 19 nt, Artificial Sequence
  Description of Artificial Sequence: Synthetic oligonucleotide
  Sense strand starting at position 2049 of SEQ ID NO: 1884781
uugauuaauuguccagaag

SEQ ID NO: 2291519 - RNA, 19 nt, Artificial Sequence
  Description of Artificial Sequence: Synthetic oligonucleotide
  Antisense strand to SEQ ID NO: 2291518
cuucuggacaauuaaucaa

SEQ ID NO: 2291520 - RNA, 19 nt, Artificial Sequence
  Description of Artificial Sequence: Synthetic oligonucleotide
  Sense strand starting at position 2050 of SEQ ID NO: 1884781
ugauuaauuguccagaagc

SEQ ID NO: 2291521 - RNA, 19 nt, Artificial Sequence
  Description of Artificial Sequence: Synthetic oligonucleotide
  Antisense strand to SEQ ID NO: 2291520
gcuucuggacaauuaauca

SEQ ID NO: 2291522 - RNA, 19 nt, Artificial Sequence
  Description of Artificial Sequence: Synthetic oligonucleotide
  Sense strand starting at position 2052 of SEQ ID NO: 1884781
auuaauuguccagaagcuu

SEQ ID NO: 2291523 - RNA, 19 nt, Artificial Sequence
  Description of Artificial Sequence: Synthetic oligonucleotide
  Antisense strand to SEQ ID NO: 2291522
aagcuucuggacaauuaau

SEQ ID NO: 2291524 - RNA, 19 nt, Artificial Sequence
  Description of Artificial Sequence: Synthetic oligonucleotide
  Sense strand starting at position 2127 of SEQ ID NO: 1884781
guuggccuggauuauuaau

SEQ ID NO: 2291525 - RNA, 19 nt, Artificial Sequence
  Description of Artificial Sequence: Synthetic oligonucleotide
  Antisense strand to SEQ ID NO: 2291524
auuaauaauccaggccaac

SEQ ID NO: 2291526 - RNA, 19 nt, Artificial Sequence
  Description of Artificial Sequence: Synthetic oligonucleotide
  Sense strand starting at position 2129 of SEQ ID NO: 1884781
uggccuggauuauuaauua

SEQ ID NO: 2291527 - RNA, 19 nt, Artificial Sequence
  Description of Artificial Sequence: Synthetic oligonucleotide
  Antisense strand to SEQ ID NO: 2291526
uaauuaauaauccaggcca

SEQ ID NO: 2291528 - RNA, 19 nt, Artificial Sequence
  Description of Artificial Sequence: Synthetic oligonucleotide
  Sense strand starting at position 2141 of SEQ ID NO: 1884781
uuaauuagggcuugaaguc

SEQ ID NO: 2291529 - RNA, 19 nt, Artificial Sequence
  Description of Artificial Sequence: Synthetic oligonucleotide
  Antisense strand to SEQ ID NO: 2291528
gacuucaagcccuaauuaa

SEQ ID NO: 2291530 - RNA, 19 nt, Artificial Sequence
  Description of Artificial Sequence: Synthetic oligonucleotide
  Sense strand starting at position 2575 of SEQ ID NO: 1884781
ccagauaagcugugauaaa

SEQ ID NO: 2291531 - RNA, 19 nt, Artificial Sequence
  Description of Artificial Sequence: Synthetic oligonucleotide
  Antisense strand to SEQ ID NO: 2291530
uuuaucacagcuuaucugg

SEQ ID NO: 2291532 - RNA, 19 nt, Artificial Sequence
  Description of Artificial Sequence: Synthetic oligonucleotide
  Sense strand starting at position 2608 of SEQ ID NO: 1884781
uaaggagacuccuuaggcu

SEQ ID NO: 2291533 - RNA, 19 nt, Artificial Sequence
  Description of Artificial Sequence: Synthetic oligonucleotide
  Antisense strand to SEQ ID NO: 2291532
agccuaaggagucuccuua

SEQ ID NO: 2291534 - RNA, 19 nt, Artificial Sequence
  Description of Artificial Sequence: Synthetic oligonucleotide
  Sense strand starting at position 2626 of SEQ ID NO: 1884781
ucugucuauccugggacau

SEQ ID NO: 2291535 - RNA, 19 nt, Artificial Sequence
  Description of Artificial Sequence: Synthetic oligonucleotide
  Antisense strand to SEQ ID NO: 2291534
augucccaggauagacaga

SEQ ID NO: 2291536 - RNA, 19 nt, Artificial Sequence
  Description of Artificial Sequence: Synthetic oligonucleotide
  Sense strand starting at position 2627 of SEQ ID NO: 1884781
cugucuauccugggacauc

SEQ ID NO: 2291537 - RNA, 19 nt, Artificial Sequence
  Description of Artificial Sequence: Synthetic oligonucleotide
  Antisense strand to SEQ ID NO: 2291536
gaugucccaggauagacag

SEQ ID NO: 2291538 - RNA, 19 nt, Artificial Sequence
  Description of Artificial Sequence: Synthetic oligonucleotide
  Sense strand starting at position 2706 of SEQ ID NO: 1884781
cuuagauugccugaguuaa

SEQ ID NO: 2291539 - RNA, 19 nt, Artificial Sequence
  Description of Artificial Sequence: Synthetic oligonucleotide
  Antisense strand to SEQ ID NO: 2291538
uuaacucaggcaaucuaag

SEQ ID NO: 2291540 - RNA, 19 nt, Artificial Sequence
  Description of Artificial Sequence: Synthetic oligonucleotide
  Sense strand starting at position 2708 of SEQ ID NO: 1884781
uagauugccugaguuaaug

SEQ ID NO: 2291541 - RNA, 19 nt, Artificial Sequence
  Description of Artificial Sequence: Synthetic oligonucleotide
  Antisense strand to SEQ ID NO: 2291540
cauuaacucaggcaaucua

SEQ ID NO: 2291542 - RNA, 19 nt, Artificial Sequence
  Description of Artificial Sequence: Synthetic oligonucleotide
  Sense strand starting at position 2859 of SEQ ID NO: 1884781
ucagaaacuuggcugguua

SEQ ID NO: 2291543 - RNA, 19 nt, Artificial Sequence
  Description of Artificial Sequence: Synthetic oligonucleotide
  Antisense strand to SEQ ID NO: 2291542
uaaccagccaaguuucuga

SEQ ID NO: 2291544 - RNA, 19 nt, Artificial Sequence
  Description of Artificial Sequence: Synthetic oligonucleotide
  Sense strand starting at position 2861 of SEQ ID NO: 1884781
agaaacuuggcugguuacu

SEQ ID NO: 2291545 - RNA, 19 nt, Artificial Sequence
  Description of Artificial Sequence: Synthetic oligonucleotide
  Antisense strand to SEQ ID NO: 2291544
aguaaccagccaaguuucu

SEQ ID NO: 2291546 - RNA, 19 nt, Artificial Sequence
  Description of Artificial Sequence: Synthetic oligonucleotide
  Sense strand starting at position 2995 of SEQ ID NO: 1884781
aguagagaguugcuugaag

SEQ ID NO: 2291547 - RNA, 19 nt, Artificial Sequence
  Description of Artificial Sequence: Synthetic oligonucleotide
  Antisense strand to SEQ ID NO: 2291546
cuucaagcaacucucuacu

SEQ ID NO: 2291548 - RNA, 19 nt, Artificial Sequence
  Description of Artificial Sequence: Synthetic oligonucleotide
  Sense strand starting at position 3031 of SEQ ID NO: 1884781
ucaguaggugucuaaauug

SEQ ID NO: 2291549 - RNA, 19 nt, Artificial Sequence
  Description of Artificial Sequence: Synthetic oligonucleotide
  Antisense strand to SEQ ID NO: 2291548
caauuuagacaccuacuga

SEQ ID NO: 2291550 - RNA, 19 nt, Artificial Sequence
  Description of Artificial Sequence: Synthetic oligonucleotide
  Sense strand starting at position 3069 of SEQ ID NO: 1884781
gcgucacuggugucuuauc

SEQ ID NO: 2291551 - RNA, 19 nt, Artificial Sequence
  Description of Artificial Sequence: Synthetic oligonucleotide
  Antisense strand to SEQ ID NO: 2291550
gauaagacaccagugacgc

SEQ ID NO: 2291552 - RNA, 19 nt, Artificial Sequence
  Description of Artificial Sequence: Synthetic oligonucleotide
  Sense strand starting at position 3285 of SEQ ID NO: 1884781
ggcugcguuagcucugaaa

SEQ ID NO: 2291553 - RNA, 19 nt, Artificial Sequence
  Description of Artificial Sequence: Synthetic oligonucleotide
  Antisense strand to SEQ ID NO: 2291552
uuucagagcuaacgcagcc

SEQ ID NO: 2291554 - RNA, 19 nt, Artificial Sequence
  Description of Artificial Sequence: Synthetic oligonucleotide
  Sense strand starting at position 3510 of SEQ ID NO: 1884781
ugaagaggaucauaaagaa

SEQ ID NO: 2291555 - RNA, 19 nt, Artificial Sequence
  Description of Artificial Sequence: Synthetic oligonucleotide
  Antisense strand to SEQ ID NO: 2291554
uucuuuaugauccucuuca

SEQ ID NO: 2291556 - RNA, 19 nt, Artificial Sequence
  Description of Artificial Sequence: Synthetic oligonucleotide
  Sense strand starting at position 3825 of SEQ ID NO: 1884781
ccaucaugucuuuaugagu

SEQ ID NO: 2291557 - RNA, 19 nt, Artificial Sequence
  Description of Artificial Sequence: Synthetic oligonucleotide
  Antisense strand to SEQ ID NO: 2291556
acucauaaagacaugaugg

SEQ ID NO: 2291558 - RNA, 19 nt, Artificial Sequence
  Description of Artificial Sequence: Synthetic oligonucleotide
  Sense strand starting at position 167 of SEQ ID NO: 1884780
gcaguaauguucccaggag

SEQ ID NO: 2291559 - RNA, 19 nt, Artificial Sequence
  Description of Artificial Sequence: Synthetic oligonucleotide
  Antisense strand to SEQ ID NO: 2291558
cuccugggaacauuacugc

SEQ ID NO: 2291560 - RNA, 19 nt, Artificial Sequence
  Description of Artificial Sequence: Synthetic oligonucleotide
  Sense strand starting at position 171 of SEQ ID NO: 1884780
uaauguucccaggagcauu

SEQ ID NO: 2291561 - RNA, 19 nt, Artificial Sequence
  Description of Artificial Sequence: Synthetic oligonucleotide
  Antisense strand to SEQ ID NO: 2291560
aaugcuccugggaacauua

SEQ ID NO: 2291562 - RNA, 19 nt, Artificial Sequence
  Description of Artificial Sequence: Synthetic oligonucleotide
  Sense strand starting at position 213 of SEQ ID NO: 1884780
aggccuggcaucugaugau

SEQ ID NO: 2291563 - RNA, 19 nt, Artificial Sequence
  Description of Artificial Sequence: Synthetic oligonucleotide
  Antisense strand to SEQ ID NO: 2291562
aucaucagaugccaggccu

SEQ ID NO: 2291564 - RNA, 19 nt, Artificial Sequence
  Description of Artificial Sequence: Synthetic oligonucleotide
  Sense strand starting at position 223 of SEQ ID NO: 1884780
ucugaugaucuugggcaca

SEQ ID NO: 2291565 - RNA, 19 nt, Artificial Sequence
  Description of Artificial Sequence: Synthetic oligonucleotide
  Antisense strand to SEQ ID NO: 2291564
ugugcccaagaucaucaga

SEQ ID NO: 2291566 - RNA, 19 nt, Artificial Sequence
  Description of Artificial Sequence: Synthetic oligonucleotide
  Sense strand starting at position 225 of SEQ ID NO: 1884780
ugaugaucuugggcacagu

SEQ ID NO: 2291567 - RNA, 19 nt, Artificial Sequence
  Description of Artificial Sequence: Synthetic oligonucleotide
  Antisense strand to SEQ ID NO: 2291566
acugugcccaagaucauca

SEQ ID NO: 2291568 - RNA, 19 nt, Artificial Sequence
  Description of Artificial Sequence: Synthetic oligonucleotide
  Sense strand starting at position 287 of SEQ ID NO: 1884780
uuauguuuauaggugcaaa

SEQ ID NO: 2291569 - RNA, 19 nt, Artificial Sequence
  Description of Artificial Sequence: Synthetic oligonucleotide
  Antisense strand to SEQ ID NO: 2291568
uuugcaccuauaaacauaa

SEQ ID NO: 2291570 - RNA, 19 nt, Artificial Sequence
  Description of Artificial Sequence: Synthetic oligonucleotide
  Sense strand starting at position 290 of SEQ ID NO: 1884780
uguuuauaggugcaaaguu

SEQ ID NO: 2291571 - RNA, 19 nt, Artificial Sequence
  Description of Artificial Sequence: Synthetic oligonucleotide
  Antisense strand to SEQ ID NO: 2291570
aacuuugcaccuauaaaca

SEQ ID NO: 2291572 - RNA, 19 nt, Artificial Sequence
  Description of Artificial Sequence: Synthetic oligonucleotide
  Sense strand starting at position 414 of SEQ ID NO: 1884780
gaguuagagaggugugcaa

SEQ ID NO: 2291573 - RNA, 19 nt, Artificial Sequence
  Description of Artificial Sequence: Synthetic oligonucleotide
  Antisense strand to SEQ ID NO: 2291572
uugcacaccucucuaacuc

SEQ ID NO: 2291574 - RNA, 19 nt, Artificial Sequence
  Description of Artificial Sequence: Synthetic oligonucleotide
  Sense strand starting at position 445 of SEQ ID NO: 1884780
cagggcaugcaauagauua

SEQ ID NO: 2291575 - RNA, 19 nt, Artificial Sequence
  Description of Artificial Sequence: Synthetic oligonucleotide
  Antisense strand to SEQ ID NO: 2291574
uaaucuauugcaugcccug

SEQ ID NO: 2291576 - RNA, 19 nt, Artificial Sequence
  Description of Artificial Sequence: Synthetic oligonucleotide
  Sense strand starting at position 453 of SEQ ID NO: 1884780
gcaauagauuaggagaaga

SEQ ID NO: 2291577 - RNA, 19 nt, Artificial Sequence
  Description of Artificial Sequence: Synthetic oligonucleotide
  Antisense strand to SEQ ID NO: 2291576
ucuucuccuaaucuauugc

SEQ ID NO: 2291578 - RNA, 19 nt, Artificial Sequence
  Description of Artificial Sequence: Synthetic oligonucleotide
  Sense strand starting at position 612 of SEQ ID NO: 1884780
caggcugggugaucugaau

SEQ ID NO: 2291579 - RNA, 19 nt, Artificial Sequence
  Description of Artificial Sequence: Synthetic oligonucleotide
  Antisense strand to SEQ ID NO: 2291578
auucagaucacccagccug

SEQ ID NO: 2291580 - RNA, 19 nt, Artificial Sequence
  Description of Artificial Sequence: Synthetic oligonucleotide
  Sense strand starting at position 623 of SEQ ID NO: 1884780
aucugaauuugcugagaga

SEQ ID NO: 2291581 - RNA, 19 nt, Artificial Sequence
  Description of Artificial Sequence: Synthetic oligonucleotide
  Antisense strand to SEQ ID NO: 2291580
ucucucagcaaauucagau

SEQ ID NO: 2291582 - RNA, 19 nt, Artificial Sequence
  Description of Artificial Sequence: Synthetic oligonucleotide
  Sense strand starting at position 626 of SEQ ID NO: 1884780
ugaauuugcugagagaaac

SEQ ID NO: 2291583 - RNA, 19 nt, Artificial Sequence
  Description of Artificial Sequence: Synthetic oligonucleotide
  Antisense strand to SEQ ID NO: 2291582
guuucucucagcaaauuca

SEQ ID NO: 2291584 - RNA, 19 nt, Artificial Sequence
  Description of Artificial Sequence: Synthetic oligonucleotide
  Sense strand starting at position 706 of SEQ ID NO: 1884780
acucacacuugucuggaua

SEQ ID NO: 2291585 - RNA, 19 nt, Artificial Sequence
  Description of Artificial Sequence: Synthetic oligonucleotide
  Antisense strand to SEQ ID NO: 2291584
uauccagacaagugugagu

SEQ ID NO: 2291586 - RNA, 19 nt, Artificial Sequence
  Description of Artificial Sequence: Synthetic oligonucleotide
  Sense strand starting at position 709 of SEQ ID NO: 1884780
cacacuugucuggauaggu

SEQ ID NO: 2291587 - RNA, 19 nt, Artificial Sequence
  Description of Artificial Sequence: Synthetic oligonucleotide
  Antisense strand to SEQ ID NO: 2291586
accuauccagacaagugug

SEQ ID NO: 2291588 - RNA, 19 nt, Artificial Sequence
  Description of Artificial Sequence: Synthetic oligonucleotide
  Sense strand starting at position 718 of SEQ ID NO: 1884780
cuggauagguguguacuua

SEQ ID NO: 2291589 - RNA, 19 nt, Artificial Sequence
  Description of Artificial Sequence: Synthetic oligonucleotide
  Antisense strand to SEQ ID NO: 2291588
uaaguacacaccuauccag

SEQ ID NO: 2291590 - RNA, 19 nt, Artificial Sequence
  Description of Artificial Sequence: Synthetic oligonucleotide
  Sense strand starting at position 719 of SEQ ID NO: 1884780
uggauagguguguacuuaa

SEQ ID NO: 2291591 - RNA, 19 nt, Artificial Sequence
  Description of Artificial Sequence: Synthetic oligonucleotide
  Antisense strand to SEQ ID NO: 2291590
uuaaguacacaccuaucca

SEQ ID NO: 2291592 - RNA, 19 nt, Artificial Sequence
  Description of Artificial Sequence: Synthetic oligonucleotide
  Sense strand starting at position 857 of SEQ ID NO: 1884780
gccugaaugcguuuguuca

SEQ ID NO: 2291593 - RNA, 19 nt, Artificial Sequence
  Description of Artificial Sequence: Synthetic oligonucleotide
  Antisense strand to SEQ ID NO: 2291592
ugaacaaacgcauucaggc

SEQ ID NO: 2291594 - RNA, 19 nt, Artificial Sequence
  Description of Artificial Sequence: Synthetic oligonucleotide
  Sense strand starting at position 879 of SEQ ID NO: 1884780
guguguuuccaugugguca

SEQ ID NO: 2291595 - RNA, 19 nt, Artificial Sequence
  Description of Artificial Sequence: Synthetic oligonucleotide
  Antisense strand to SEQ ID NO: 2291594
ugaccacauggaaacacac

SEQ ID NO: 2291596 - RNA, 19 nt, Artificial Sequence
  Description of Artificial Sequence: Synthetic oligonucleotide
  Sense strand starting at position 1040 of SEQ ID NO: 1884780
caagcauugccgucugucu

SEQ ID NO: 2291597 - RNA, 19 nt, Artificial Sequence
  Description of Artificial Sequence: Synthetic oligonucleotide
  Antisense strand to SEQ ID NO: 2291596
agacagacggcaaugcuug

SEQ ID NO: 2291598 - RNA, 19 nt, Artificial Sequence
  Description of Artificial Sequence: Synthetic oligonucleotide
  Sense strand starting at position 1475 of SEQ ID NO: 1884780
ggagccaaucgccagagau

SEQ ID NO: 2291599 - RNA, 19 nt, Artificial Sequence
  Description of Artificial Sequence: Synthetic oligonucleotide
  Antisense strand to SEQ ID NO: 2291598
aucucuggcgauuggcucc

SEQ ID NO: 2291600 - RNA, 19 nt, Artificial Sequence
  Description of Artificial Sequence: Synthetic oligonucleotide
  Sense strand starting at position 1477 of SEQ ID NO: 1884780
agccaaucgccagagaucu

SEQ ID NO: 2291601 - RNA, 19 nt, Artificial Sequence
  Description of Artificial Sequence: Synthetic oligonucleotide
  Antisense strand to SEQ ID NO: 2291600
agaucucuggcgauuggcu

SEQ ID NO: 2291602 - RNA, 19 nt, Artificial Sequence
  Description of Artificial Sequence: Synthetic oligonucleotide
  Sense strand starting at position 1665 of SEQ ID NO: 1884780
uuuaauuaggccugaacaa

SEQ ID NO: 2291603 - RNA, 19 nt, Artificial Sequence
  Description of Artificial Sequence: Synthetic oligonucleotide
  Antisense strand to SEQ ID NO: 2291602
uuguucaggccuaauuaaa

SEQ ID NO: 2291604 - RNA, 19 nt, Artificial Sequence
  Description of Artificial Sequence: Synthetic oligonucleotide
  Sense strand starting at position 2170 of SEQ ID NO: 1884780
agacuuucuccuggacuuu

SEQ ID NO: 2291605 - RNA, 19 nt, Artificial Sequence
  Description of Artificial Sequence: Synthetic oligonucleotide
  Antisense strand to SEQ ID NO: 2291604
aaaguccaggagaaagucu

SEQ ID NO: 2291606 - RNA, 19 nt, Artificial Sequence
  Description of Artificial Sequence: Synthetic oligonucleotide
  Sense strand starting at position 2553 of SEQ ID NO: 1884780
cgggacuucccugguucua

SEQ ID NO: 2291607 - RNA, 19 nt, Artificial Sequence
  Description of Artificial Sequence: Synthetic oligonucleotide
  Antisense strand to SEQ ID NO: 2291606
uagaaccagggaagucccg

SEQ ID NO: 2291608 - RNA, 19 nt, Artificial Sequence
  Description of Artificial Sequence: Synthetic oligonucleotide
  Sense strand starting at position 2616 of SEQ ID NO: 1884780
cucaccaugugagucuuaa

SEQ ID NO: 2291609 - RNA, 19 nt, Artificial Sequence
  Description of Artificial Sequence: Synthetic oligonucleotide
  Antisense strand to SEQ ID NO: 2291608
uuaagacucacauggugag

SEQ ID NO: 2291610 - RNA, 19 nt, Artificial Sequence
  Description of Artificial Sequence: Synthetic oligonucleotide
  Sense strand starting at position 2625 of SEQ ID NO: 1884780
ugagucuuaaccugggcuu

SEQ ID NO: 2291611 - RNA, 19 nt, Artificial Sequence
  Description of Artificial Sequence: Synthetic oligonucleotide
  Antisense strand to SEQ ID NO: 2291610
aagcccagguuaagacuca

SEQ ID NO: 2291612 - RNA, 19 nt, Artificial Sequence
  Description of Artificial Sequence: Synthetic oligonucleotide
  Sense strand starting at position 2699 of SEQ ID NO: 1884780
cgcugugauaacgaaugua

SEQ ID NO: 2291613 - RNA, 19 nt, Artificial Sequence
  Description of Artificial Sequence: Synthetic oligonucleotide
  Antisense strand to SEQ ID NO: 2291612
uacauucguuaucacagcg

SEQ ID NO: 2291614 - RNA, 19 nt, Artificial Sequence
  Description of Artificial Sequence: Synthetic oligonucleotide
  Sense strand starting at position 2702 of SEQ ID NO: 1884780
ugugauaacgaauguaaca

SEQ ID NO: 2291615 - RNA, 19 nt, Artificial Sequence
  Description of Artificial Sequence: Synthetic oligonucleotide
  Antisense strand to SEQ ID NO: 2291614
uguuacauucguuaucaca

SEQ ID NO: 2291616 - RNA, 19 nt, Artificial Sequence
  Description of Artificial Sequence: Synthetic oligonucleotide
  Sense strand starting at position 2727 of SEQ ID NO: 1884780
gcacaugggacuuagucua

SEQ ID NO: 2291617 - RNA, 19 nt, Artificial Sequence
  Description of Artificial Sequence: Synthetic oligonucleotide
  Antisense strand to SEQ ID NO: 2291616
uagacuaagucccaugugc

SEQ ID NO: 2291618 - RNA, 19 nt, Artificial Sequence
  Description of Artificial Sequence: Synthetic oligonucleotide
  Sense strand starting at position 2902 of SEQ ID NO: 1884780
cuaggcucugauugcaaga

SEQ ID NO: 2291619 - RNA, 19 nt, Artificial Sequence
  Description of Artificial Sequence: Synthetic oligonucleotide
  Antisense strand to SEQ ID NO: 2291618
ucuugcaaucagagccuag

SEQ ID NO: 2291620 - RNA, 19 nt, Artificial Sequence
  Description of Artificial Sequence: Synthetic oligonucleotide
  Sense strand starting at position 3258 of SEQ ID NO: 1884780
gagagacacacguguccuu

SEQ ID NO: 2291621 - RNA, 19 nt, Artificial Sequence
  Description of Artificial Sequence: Synthetic oligonucleotide
  Antisense strand to SEQ ID NO: 2291620
aaggacacgugugucucuc

SEQ ID NO: 2291622 - RNA, 19 nt, Artificial Sequence
  Description of Artificial Sequence: Synthetic oligonucleotide
  Sense strand starting at position 3263 of SEQ ID NO: 1884780
acacacguguccuuugaga

SEQ ID NO: 2291623 - RNA, 19 nt, Artificial Sequence
  Description of Artificial Sequence: Synthetic oligonucleotide
  Antisense strand to SEQ ID NO: 2291622
ucucaaaggacacgugugu

SEQ ID NO: 2291624 - RNA, 19 nt, Artificial Sequence
  Description of Artificial Sequence: Synthetic oligonucleotide
  Sense strand starting at position 3488 of SEQ ID NO: 1884780
agaugaggcuggucgucaa

SEQ ID NO: 2291625 - RNA, 19 nt, Artificial Sequence
  Description of Artificial Sequence: Synthetic oligonucleotide
  Antisense strand to SEQ ID NO: 2291624
uugacgaccagccucaucu

SEQ ID NO: 2291626 - RNA, 19 nt, Artificial Sequence
  Description of Artificial Sequence: Synthetic oligonucleotide
  Sense strand starting at position 3531 of SEQ ID NO: 1884780
ugggcaugcccucaacaaa

SEQ ID NO: 2291627 - RNA, 19 nt, Artificial Sequence
  Description of Artificial Sequence: Synthetic oligonucleotide
  Antisense strand to SEQ ID NO: 2291626
uuuguugagggcaugccca

SEQ ID NO: 2291628 - RNA, 19 nt, Artificial Sequence
  Description of Artificial Sequence: Synthetic oligonucleotide
  Sense strand starting at position 3542 of SEQ ID NO: 1884780
ucaacaaaggcuuaucagu

SEQ ID NO: 2291629 - RNA, 19 nt, Artificial Sequence
  Description of Artificial Sequence: Synthetic oligonucleotide
  Antisense strand to SEQ ID NO: 2291628
acugauaagccuuuguuga

SEQ ID NO: 2291630 - RNA, 19 nt, Artificial Sequence
  Description of Artificial Sequence: Synthetic oligonucleotide
  Sense strand starting at position 3547 of SEQ ID NO: 1884780
aaaggcuuaucaguugagu

SEQ ID NO: 2291631 - RNA, 19 nt, Artificial Sequence
  Description of Artificial Sequence: Synthetic oligonucleotide
  Antisense strand to SEQ ID NO: 2291630
acucaacugauaagccuuu

SEQ ID NO: 2291632 - RNA, 19 nt, Artificial Sequence
  Description of Artificial Sequence: Synthetic oligonucleotide
  Sense strand starting at position 3582 of SEQ ID NO: 1884780
gaacaaguccugugacucu

SEQ ID NO: 2291633 - RNA, 19 nt, Artificial Sequence
  Description of Artificial Sequence: Synthetic oligonucleotide
  Antisense strand to SEQ ID NO: 2291632
agagucacaggacuuguuc

SEQ ID NO: 2291634 - RNA, 19 nt, Artificial Sequence
  Description of Artificial Sequence: Synthetic oligonucleotide
  Sense strand starting at position 3640 of SEQ ID NO: 1884780
ggaggaagaucugaaggaa

SEQ ID NO: 2291635 - RNA, 19 nt, Artificial Sequence
  Description of Artificial Sequence: Synthetic oligonucleotide
  Antisense strand to SEQ ID NO: 2291634
uuccuucagaucuuccucc

SEQ ID NO: 2291636 - RNA, 19 nt, Artificial Sequence
  Description of Artificial Sequence: Synthetic oligonucleotide
  Sense strand starting at position 3746 of SEQ ID NO: 1884780
uagagcucucagugaagug

SEQ ID NO: 2291637 - RNA, 19 nt, Artificial Sequence
  Description of Artificial Sequence: Synthetic oligonucleotide
  Antisense strand to SEQ ID NO: 2291636
cacuucacugagagcucua

SEQ ID NO: 2291638 - RNA, 19 nt, Artificial Sequence
  Description of Artificial Sequence: Synthetic oligonucleotide
  Sense strand starting at position 5 of SEQ ID NO: 1884782
agagguauggucugaggaa

SEQ ID NO: 2291639 - RNA, 19 nt, Artificial Sequence
  Description of Artificial Sequence: Synthetic oligonucleotide
  Antisense strand to SEQ ID NO: 2291638
uuccucagaccauaccucu

SEQ ID NO: 2291640 - RNA, 19 nt, Artificial Sequence
  Description of Artificial Sequence: Synthetic oligonucleotide
  Sense strand starting at position 42 of SEQ ID NO: 1884782
ucucaaauagagugugaaa

SEQ ID NO: 2291641 - RNA, 19 nt, Artificial Sequence
  Description of Artificial Sequence: Synthetic oligonucleotide
  Antisense strand to SEQ ID NO: 2291640
uuucacacucuauuugaga

SEQ ID NO: 2291642 - RNA, 19 nt, Artificial Sequence
  Description of Artificial Sequence: Synthetic oligonucleotide
  Sense strand starting at position 579 of SEQ ID NO: 1884782
gccacaugagcuuaaagau

SEQ ID NO: 2291643 - RNA, 19 nt, Artificial Sequence
  Description of Artificial Sequence: Synthetic oligonucleotide
  Antisense strand to SEQ ID NO: 2291642
aucuuuaagcucauguggc

SEQ ID NO: 2291644 - RNA, 19 nt, Artificial Sequence
  Description of Artificial Sequence: Synthetic oligonucleotide
  Sense strand starting at position 601 of SEQ ID NO: 1884782
gcuauaauugcagaaguau

SEQ ID NO: 2291645 - RNA, 19 nt, Artificial Sequence
  Description of Artificial Sequence: Synthetic oligonucleotide
  Antisense strand to SEQ ID NO: 2291644
auacuucugcaauuauagc

SEQ ID NO: 2291646 - RNA, 19 nt, Artificial Sequence
  Description of Artificial Sequence: Synthetic oligonucleotide
  Sense strand starting at position 646 of SEQ ID NO: 1884782
cgcauuucuagcuggagga

SEQ ID NO: 2291647 - RNA, 19 nt, Artificial Sequence
  Description of Artificial Sequence: Synthetic oligonucleotide
  Antisense strand to SEQ ID NO: 2291646
uccuccagcuagaaaugcg

SEQ ID NO: 2291648 - RNA, 19 nt, Artificial Sequence
  Description of Artificial Sequence: Synthetic oligonucleotide
  Sense strand starting at position 688 of SEQ ID NO: 1884782
ccugaaaguacgggucaga

SEQ ID NO: 2291649 - RNA, 19 nt, Artificial Sequence
  Description of Artificial Sequence: Synthetic oligonucleotide
  Antisense strand to SEQ ID NO: 2291648
ucugacccguacuuucagg

SEQ ID NO: 2291650 - RNA, 19 nt, Artificial Sequence
  Description of Artificial Sequence: Synthetic oligonucleotide
  Sense strand starting at position 881 of SEQ ID NO: 1884782
ugaugcacaugucugaaua

SEQ ID NO: 2291651 - RNA, 19 nt, Artificial Sequence
  Description of Artificial Sequence: Synthetic oligonucleotide
  Antisense strand to SEQ ID NO: 2291650
uauucagacaugugcauca

SEQ ID NO: 2291652 - RNA, 19 nt, Artificial Sequence
  Description of Artificial Sequence: Synthetic oligonucleotide
  Sense strand starting at position 882 of SEQ ID NO: 1884782
gaugcacaugucugaauag

SEQ ID NO: 2291653 - RNA, 19 nt, Artificial Sequence
  Description of Artificial Sequence: Synthetic oligonucleotide
  Antisense strand to SEQ ID NO: 2291652
cuauucagacaugugcauc

SEQ ID NO: 2291654 - RNA, 19 nt, Artificial Sequence
  Description of Artificial Sequence: Synthetic oligonucleotide
  Sense strand starting at position 958 of SEQ ID NO: 1884782
ucaucucaccagggugauu

SEQ ID NO: 2291655 - RNA, 19 nt, Artificial Sequence
  Description of Artificial Sequence: Synthetic oligonucleotide
  Antisense strand to SEQ ID NO: 2291654
aaucacccuggugagauga

SEQ ID NO: 2291656 - RNA, 19 nt, Artificial Sequence
  Description of Artificial Sequence: Synthetic oligonucleotide
  Sense strand starting at position 1153 of SEQ ID NO: 1884782
guuggaacuauccgacaaa

SEQ ID NO: 2291657 - RNA, 19 nt, Artificial Sequence
  Description of Artificial Sequence: Synthetic oligonucleotide
  Antisense strand to SEQ ID NO: 2291656
uuugucggauaguuccaac

SEQ ID NO: 2291658 - RNA, 19 nt, Artificial Sequence
  Description of Artificial Sequence: Synthetic oligonucleotide
  Sense strand starting at position 1509 of SEQ ID NO: 1884782
guaaauguccuuuacauac

SEQ ID NO: 2291659 - RNA, 19 nt, Artificial Sequence
  Description of Artificial Sequence: Synthetic oligonucleotide
  Antisense strand to SEQ ID NO: 2291658
guauguaaaggacauuuac

SEQ ID NO: 2291660 - RNA, 19 nt, Artificial Sequence
  Description of Artificial Sequence: Synthetic oligonucleotide
  Sense strand starting at position 1550 of SEQ ID NO: 1884782
aagagcuuccaugauaggu

SEQ ID NO: 2291661 - RNA, 19 nt, Artificial Sequence
  Description of Artificial Sequence: Synthetic oligonucleotide
  Antisense strand to SEQ ID NO: 2291660
accuaucauggaagcucuu

SEQ ID NO: 2291662 - RNA, 19 nt, Artificial Sequence
  Description of Artificial Sequence: Synthetic oligonucleotide
  Sense strand starting at position 1579 of SEQ ID NO: 1884782
uguaauaaugaugguaucu

SEQ ID NO: 2291663 - RNA, 19 nt, Artificial Sequence
  Description of Artificial Sequence: Synthetic oligonucleotide
  Antisense strand to SEQ ID NO: 2291662
agauaccaucauuauuaca

SEQ ID NO: 2291664 - RNA, 19 nt, Artificial Sequence
  Description of Artificial Sequence: Synthetic oligonucleotide
  Sense strand starting at position 1584 of SEQ ID NO: 1884782
uaaugaugguaucuuguau

SEQ ID NO: 2291665 - RNA, 19 nt, Artificial Sequence
  Description of Artificial Sequence: Synthetic oligonucleotide
  Antisense strand to SEQ ID NO: 2291664
auacaagauaccaucauua

SEQ ID NO: 2291666 - RNA, 19 nt, Artificial Sequence
  Description of Artificial Sequence: Synthetic oligonucleotide
  Sense strand starting at position 1596 of SEQ ID NO: 1884782
cuuguaucugaguaacacu

SEQ ID NO: 2291667 - RNA, 19 nt, Artificial Sequence
  Description of Artificial Sequence: Synthetic oligonucleotide
  Antisense strand to SEQ ID NO: 2291666
aguguuacucagauacaag

SEQ ID NO: 2291668 - RNA, 19 nt, Artificial Sequence
  Description of Artificial Sequence: Synthetic oligonucleotide
  Sense strand starting at position 1604 of SEQ ID NO: 1884782
ugaguaacacuuuagaguu

SEQ ID NO: 2291669 - RNA, 19 nt, Artificial Sequence
  Description of Artificial Sequence: Synthetic oligonucleotide
  Antisense strand to SEQ ID NO: 2291668
aacucuaaaguguuacuca

SEQ ID NO: 2291670 - RNA, 19 nt, Artificial Sequence
  Description of Artificial Sequence: Synthetic oligonucleotide
  Sense strand starting at position 1611 of SEQ ID NO: 1884782
cacuuuagaguuuguauag

SEQ ID NO: 2291671 - RNA, 19 nt, Artificial Sequence
  Description of Artificial Sequence: Synthetic oligonucleotide
  Antisense strand to SEQ ID NO: 2291670
cuauacaaacucuaaagug

SEQ ID NO: 2291672 - RNA, 19 nt, Artificial Sequence
  Description of Artificial Sequence: Synthetic oligonucleotide
  Sense strand starting at position 1612 of SEQ ID NO: 1884782
acuuuagaguuuguauaga

SEQ ID NO: 2291673 - RNA, 19 nt, Artificial Sequence
  Description of Artificial Sequence: Synthetic oligonucleotide
  Antisense strand to SEQ ID NO: 2291672
ucuauacaaacucuaaagu

SEQ ID NO: 2291674 - RNA, 19 nt, Artificial Sequence
  Description of Artificial Sequence: Synthetic oligonucleotide
  Sense strand starting at position 1722 of SEQ ID NO: 1884782
aguuguuagaacugggaau

SEQ ID NO: 2291675 - RNA, 19 nt, Artificial Sequence
  Description of Artificial Sequence: Synthetic oligonucleotide
  Antisense strand to SEQ ID NO: 2291674
auucccaguucuaacaacu

SEQ ID NO: 2291676 - RNA, 19 nt, Artificial Sequence
  Description of Artificial Sequence: Synthetic oligonucleotide
  Sense strand starting at position 1723 of SEQ ID NO: 1884782
guuguuagaacugggaaua

SEQ ID NO: 2291677 - RNA, 19 nt, Artificial Sequence
  Description of Artificial Sequence: Synthetic oligonucleotide
  Antisense strand to SEQ ID NO: 2291676
uauucccaguucuaacaac

SEQ ID NO: 2291678 - RNA, 19 nt, Artificial Sequence
  Description of Artificial Sequence: Synthetic oligonucleotide
  Sense strand starting at position 1724 of SEQ ID NO: 1884782
uuguuagaacugggaauau

SEQ ID NO: 2291679 - RNA, 19 nt, Artificial Sequence
  Description of Artificial Sequence: Synthetic oligonucleotide
  Antisense strand to SEQ ID NO: 2291678
auauucccaguucuaacaa

SEQ ID NO: 2291680 - RNA, 19 nt, Artificial Sequence
  Description of Artificial Sequence: Synthetic oligonucleotide
  Sense strand starting at position 1984 of SEQ ID NO: 1884782
aguuucuaugagugaucua

SEQ ID NO: 2291681 - RNA, 19 nt, Artificial Sequence
  Description of Artificial Sequence: Synthetic oligonucleotide
  Antisense strand to SEQ ID NO: 2291680
uagaucacucauagaaacu

SEQ ID NO: 2291682 - RNA, 19 nt, Artificial Sequence
  Description of Artificial Sequence: Synthetic oligonucleotide
  Sense strand starting at position 1987 of SEQ ID NO: 1884782
uucuaugagugaucuaaac

SEQ ID NO: 2291683 - RNA, 19 nt, Artificial Sequence
  Description of Artificial Sequence: Synthetic oligonucleotide
  Antisense strand to SEQ ID NO: 2291682
guuuagaucacucauagaa

SEQ ID NO: 2291684 - RNA, 19 nt, Artificial Sequence
  Description of Artificial Sequence: Synthetic oligonucleotide
  Sense strand starting at position 2108 of SEQ ID NO: 1884782
augucaagccuuuaaguua

SEQ ID NO: 2291685 - RNA, 19 nt, Artificial Sequence
  Description of Artificial Sequence: Synthetic oligonucleotide
  Antisense strand to SEQ ID NO: 2291684
uaacuuaaaggcuugacau

SEQ ID NO: 2291686 - RNA, 19 nt, Artificial Sequence
  Description of Artificial Sequence: Synthetic oligonucleotide
  Sense strand starting at position 2385 of SEQ ID NO: 1884782
aaugaauguuagguaagua

SEQ ID NO: 2291687 - RNA, 19 nt, Artificial Sequence
  Description of Artificial Sequence: Synthetic oligonucleotide
  Antisense strand to SEQ ID NO: 2291686
uacuuaccuaacauucauu

SEQ ID NO: 2291688 - RNA, 19 nt, Artificial Sequence
  Description of Artificial Sequence: Synthetic oligonucleotide
  Sense strand starting at position 2389 of SEQ ID NO: 1884782
aauguuagguaaguaaaga

SEQ ID NO: 2291689 - RNA, 19 nt, Artificial Sequence
  Description of Artificial Sequence: Synthetic oligonucleotide
  Antisense strand to SEQ ID NO: 2291688
ucuuuacuuaccuaacauu

SEQ ID NO: 2291690 - RNA, 19 nt, Artificial Sequence
  Description of Artificial Sequence: Synthetic oligonucleotide
  Sense strand starting at position 2508 of SEQ ID NO: 1884782
gcugcuauggcugcuacaa

SEQ ID NO: 2291691 - RNA, 19 nt, Artificial Sequence
  Description of Artificial Sequence: Synthetic oligonucleotide
  Antisense strand to SEQ ID NO: 2291690
uuguagcagccauagcagc

SEQ ID NO: 2291692 - RNA, 19 nt, Artificial Sequence
  Description of Artificial Sequence: Synthetic oligonucleotide
  Sense strand starting at position 2612 of SEQ ID NO: 1884782
aagagcuucuugucagaug

SEQ ID NO: 2291693 - RNA, 19 nt, Artificial Sequence
  Description of Artificial Sequence: Synthetic oligonucleotide
  Antisense strand to SEQ ID NO: 2291692
caucugacaagaagcucuu

SEQ ID NO: 2291694 - RNA, 19 nt, Artificial Sequence
  Description of Artificial Sequence: Synthetic oligonucleotide
  Sense strand starting at position 2628 of SEQ ID NO: 1884782
auguguugauuucuuguau

SEQ ID NO: 2291695 - RNA, 19 nt, Artificial Sequence
  Description of Artificial Sequence: Synthetic oligonucleotide
  Antisense strand to SEQ ID NO: 2291694
auacaagaaaucaacacau

SEQ ID NO: 2291696 - RNA, 19 nt, Artificial Sequence
  Description of Artificial Sequence: Synthetic oligonucleotide
  Sense strand starting at position 2629 of SEQ ID NO: 1884782
uguguugauuucuuguaua

SEQ ID NO: 2291697 - RNA, 19 nt, Artificial Sequence
  Description of Artificial Sequence: Synthetic oligonucleotide
  Antisense strand to SEQ ID NO: 2291696
uauacaagaaaucaacaca

SEQ ID NO: 2291698 - RNA, 19 nt, Artificial Sequence
  Description of Artificial Sequence: Synthetic oligonucleotide
  Sense strand starting at position 2746 of SEQ ID NO: 1884782
guaacaagugccuagauga

SEQ ID NO: 2291699 - RNA, 19 nt, Artificial Sequence
  Description of Artificial Sequence: Synthetic oligonucleotide
  Antisense strand to SEQ ID NO: 2291698
ucaucuaggcacuuguuac

SEQ ID NO: 2291700 - RNA, 19 nt, Artificial Sequence
  Description of Artificial Sequence: Synthetic oligonucleotide
  Sense strand starting at position 3151 of SEQ ID NO: 1884782
acaacaugugauugccaaa

SEQ ID NO: 2291701 - RNA, 19 nt, Artificial Sequence
  Description of Artificial Sequence: Synthetic oligonucleotide
  Antisense strand to SEQ ID NO: 2291700
uuuggcaaucacauguugu

SEQ ID NO: 2291702 - RNA, 19 nt, Artificial Sequence
  Description of Artificial Sequence: Synthetic oligonucleotide
  Sense strand starting at position 3366 of SEQ ID NO: 1884782
ccagaaucucagcaucuga

SEQ ID NO: 2291703 - RNA, 19 nt, Artificial Sequence
  Description of Artificial Sequence: Synthetic oligonucleotide
  Antisense strand to SEQ ID NO: 2291702
ucagaugcugagauucugg

SEQ ID NO: 2291704 - RNA, 19 nt, Artificial Sequence
  Description of Artificial Sequence: Synthetic oligonucleotide
  Sense strand starting at position 3421 of SEQ ID NO: 1884782
cuggaaugcugacucacuu

SEQ ID NO: 2291705 - RNA, 19 nt, Artificial Sequence
  Description of Artificial Sequence: Synthetic oligonucleotide
  Antisense strand to SEQ ID NO: 2291704
aagugagucagcauuccag

SEQ ID NO: 2291706 - RNA, 19 nt, Artificial Sequence
  Description of Artificial Sequence: Synthetic oligonucleotide
  Sense strand starting at position 3474 of SEQ ID NO: 1884782
uccaguugccuugaacacu

SEQ ID NO: 2291707 - RNA, 19 nt, Artificial Sequence
  Description of Artificial Sequence: Synthetic oligonucleotide
  Antisense strand to SEQ ID NO: 2291706
aguguucaaggcaacugga

SEQ ID NO: 2291708 - RNA, 19 nt, Artificial Sequence
  Description of Artificial Sequence: Synthetic oligonucleotide
  Sense strand starting at position 3746 of SEQ ID NO: 1884782
uggaccuuccagugaaacu

SEQ ID NO: 2291709 - RNA, 19 nt, Artificial Sequence
  Description of Artificial Sequence: Synthetic oligonucleotide
  Antisense strand to SEQ ID NO: 2291708
aguuucacuggaaggucca

SEQ ID NO: 2291710 - RNA, 19 nt, Artificial Sequence
  Description of Artificial Sequence: Synthetic oligonucleotide
  Sense strand starting at position 3796 of SEQ ID NO: 1884782
gacaacaugccagguuauu

SEQ ID NO: 2291711 - RNA, 19 nt, Artificial Sequence
  Description of Artificial Sequence: Synthetic oligonucleotide
  Antisense strand to SEQ ID NO: 2291710
aauaaccuggcauguuguc

SEQ ID NO: 2291712 - RNA, 19 nt, Artificial Sequence
  Description of Artificial Sequence: Synthetic oligonucleotide
  Sense strand starting at position 3809 of SEQ ID NO: 1884782
guuauuacugcuuacuaug

SEQ ID NO: 2291713 - RNA, 19 nt, Artificial Sequence
  Description of Artificial Sequence: Synthetic oligonucleotide
  Antisense strand to SEQ ID NO: 2291712
cauaguaagcaguaauaac

SEQ ID NO: 2291714 - RNA, 19 nt, Artificial Sequence
  Description of Artificial Sequence: Synthetic oligonucleotide
  Sense strand starting at position 3861 of SEQ ID NO: 1884782
guucuuauuuaauuggcau

SEQ ID NO: 2291715 - RNA, 19 nt, Artificial Sequence
  Description of Artificial Sequence: Synthetic oligonucleotide
  Antisense strand to SEQ ID NO: 2291714
augccaauuaaauaagaac

SEQ ID NO: 2291716 - RNA, 19 nt, Artificial Sequence
  Description of Artificial Sequence: Synthetic oligonucleotide
  Sense strand starting at position 3874 of SEQ ID NO: 1884782
uggcauaacuaacuaauga

SEQ ID NO: 2291717 - RNA, 19 nt, Artificial Sequence
  Description of Artificial Sequence: Synthetic oligonucleotide
  Antisense strand to SEQ ID NO: 2291716
ucauuaguuaguuaugcca

SEQ ID NO: 2291718 - RNA, 19 nt, Artificial Sequence
  Description of Artificial Sequence: Synthetic oligonucleotide
  Sense strand starting at position 26 of SEQ ID NO: 1884783
uuaaucacugccuagguua

SEQ ID NO: 2291719 - RNA, 19 nt, Artificial Sequence
  Description of Artificial Sequence: Synthetic oligonucleotide
  Antisense strand to SEQ ID NO: 2291718
uaaccuaggcagugauuaa

SEQ ID NO: 2291720 - RNA, 19 nt, Artificial Sequence
  Description of Artificial Sequence: Synthetic oligonucleotide
  Sense strand starting at position 110 of SEQ ID NO: 1884783
auuguaauuucggcacauu

SEQ ID NO: 2291721 - RNA, 19 nt, Artificial Sequence
  Description of Artificial Sequence: Synthetic oligonucleotide
  Antisense strand to SEQ ID NO: 2291720
aaugugccgaaauuacaau

SEQ ID NO: 2291722 - RNA, 19 nt, Artificial Sequence
  Description of Artificial Sequence: Synthetic oligonucleotide
  Sense strand starting at position 122 of SEQ ID NO: 1884783
gcacauuggcuugauaacu

SEQ ID NO: 2291723 - RNA, 19 nt, Artificial Sequence
  Description of Artificial Sequence: Synthetic oligonucleotide
  Antisense strand to SEQ ID NO: 2291722
aguuaucaagccaaugugc

SEQ ID NO: 2291724 - RNA, 19 nt, Artificial Sequence
  Description of Artificial Sequence: Synthetic oligonucleotide
  Sense strand starting at position 172 of SEQ ID NO: 1884783
ucuacaggucuugacauua

SEQ ID NO: 2291725 - RNA, 19 nt, Artificial Sequence
  Description of Artificial Sequence: Synthetic oligonucleotide
  Antisense strand to SEQ ID NO: 2291724
uaaugucaagaccuguaga

SEQ ID NO: 2291726 - RNA, 19 nt, Artificial Sequence
  Description of Artificial Sequence: Synthetic oligonucleotide
  Sense strand starting at position 188 of SEQ ID NO: 1884783
uuaguaggaucccugaaau

SEQ ID NO: 2291727 - RNA, 19 nt, Artificial Sequence
  Description of Artificial Sequence: Synthetic oligonucleotide
  Antisense strand to SEQ ID NO: 2291726
auuucagggauccuacuaa

SEQ ID NO: 2291728 - RNA, 19 nt, Artificial Sequence
  Description of Artificial Sequence: Synthetic oligonucleotide
  Sense strand starting at position 241 of SEQ ID NO: 1884783
gggagauagcacugauuac

SEQ ID NO: 2291729 - RNA, 19 nt, Artificial Sequence
  Description of Artificial Sequence: Synthetic oligonucleotide
  Antisense strand to SEQ ID NO: 2291728
guaaucagugcuaucuccc

SEQ ID NO: 2291730 - RNA, 19 nt, Artificial Sequence
  Description of Artificial Sequence: Synthetic oligonucleotide
  Sense strand starting at position 366 of SEQ ID NO: 1884783
aggauuauugcgggaauua

SEQ ID NO: 2291731 - RNA, 19 nt, Artificial Sequence
  Description of Artificial Sequence: Synthetic oligonucleotide
  Antisense strand to SEQ ID NO: 2291730
uaauucccgcaauaauccu

SEQ ID NO: 2291732 - RNA, 19 nt, Artificial Sequence
  Description of Artificial Sequence: Synthetic oligonucleotide
  Sense strand starting at position 376 of SEQ ID NO: 1884783
cgggaauuaaacgagcuaa

SEQ ID NO: 2291733 - RNA, 19 nt, Artificial Sequence
  Description of Artificial Sequence: Synthetic oligonucleotide
  Antisense strand to SEQ ID NO: 2291732
uuagcucguuuaauucccg

SEQ ID NO: 2291734 - RNA, 19 nt, Artificial Sequence
  Description of Artificial Sequence: Synthetic oligonucleotide
  Sense strand starting at position 403 of SEQ ID NO: 1884783
aaagcaccuuguuuagaga

SEQ ID NO: 2291735 - RNA, 19 nt, Artificial Sequence
  Description of Artificial Sequence: Synthetic oligonucleotide
  Antisense strand to SEQ ID NO: 2291734
ucucuaaacaaggugcuuu

SEQ ID NO: 2291736 - RNA, 19 nt, Artificial Sequence
  Description of Artificial Sequence: Synthetic oligonucleotide
  Sense strand starting at position 532 of SEQ ID NO: 1884783
ucaauagguugcccaagaa

SEQ ID NO: 2291737 - RNA, 19 nt, Artificial Sequence
  Description of Artificial Sequence: Synthetic oligonucleotide
  Antisense strand to SEQ ID NO: 2291736
uucuugggcaaccuauuga

SEQ ID NO: 2291738 - RNA, 19 nt, Artificial Sequence
  Description of Artificial Sequence: Synthetic oligonucleotide
  Sense strand starting at position 552 of SEQ ID NO: 1884783
agaauuacaucagugcuga

SEQ ID NO: 2291739 - RNA, 19 nt, Artificial Sequence
  Description of Artificial Sequence: Synthetic oligonucleotide
  Antisense strand to SEQ ID NO: 2291738
ucagcacugauguaauucu

SEQ ID NO: 2291740 - RNA, 19 nt, Artificial Sequence
  Description of Artificial Sequence: Synthetic oligonucleotide
  Sense strand starting at position 553 of SEQ ID NO: 1884783
gaauuacaucagugcugag

SEQ ID NO: 2291741 - RNA, 19 nt, Artificial Sequence
  Description of Artificial Sequence: Synthetic oligonucleotide
  Antisense strand to SEQ ID NO: 2291740
cucagcacugauguaauuc

SEQ ID NO: 2291742 - RNA, 19 nt, Artificial Sequence
  Description of Artificial Sequence: Synthetic oligonucleotide
  Sense strand starting at position 578 of SEQ ID NO: 1884783
auauuugugcagugugaau

SEQ ID NO: 2291743 - RNA, 19 nt, Artificial Sequence
  Description of Artificial Sequence: Synthetic oligonucleotide
  Antisense strand to SEQ ID NO: 2291742
auucacacugcacaaauau

SEQ ID NO: 2291744 - RNA, 19 nt, Artificial Sequence
  Description of Artificial Sequence: Synthetic oligonucleotide
  Sense strand starting at position 690 of SEQ ID NO: 1884783
uugccauaaccagaaugua

SEQ ID NO: 2291745 - RNA, 19 nt, Artificial Sequence
  Description of Artificial Sequence: Synthetic oligonucleotide
  Antisense strand to SEQ ID NO: 2291744
uacauucugguuauggcaa

SEQ ID NO: 2291746 - RNA, 19 nt, Artificial Sequence
  Description of Artificial Sequence: Synthetic oligonucleotide
  Sense strand starting at position 918 of SEQ ID NO: 1884783
cugguauaccaauaauugu

SEQ ID NO: 2291747 - RNA, 19 nt, Artificial Sequence
  Description of Artificial Sequence: Synthetic oligonucleotide
  Antisense strand to SEQ ID NO: 2291746
acaauuauugguauaccag

SEQ ID NO: 2291748 - RNA, 19 nt, Artificial Sequence
  Description of Artificial Sequence: Synthetic oligonucleotide
  Sense strand starting at position 1191 of SEQ ID NO: 1884783
acuaauaauuggucacuga

SEQ ID NO: 2291749 - RNA, 19 nt, Artificial Sequence
  Description of Artificial Sequence: Synthetic oligonucleotide
  Antisense strand to SEQ ID NO: 2291748
ucagugaccaauuauuagu

SEQ ID NO: 2291750 - RNA, 19 nt, Artificial Sequence
  Description of Artificial Sequence: Synthetic oligonucleotide
  Sense strand starting at position 1227 of SEQ ID NO: 1884783
agguuuagggugcauucaa

SEQ ID NO: 2291751 - RNA, 19 nt, Artificial Sequence
  Description of Artificial Sequence: Synthetic oligonucleotide
  Antisense strand to SEQ ID NO: 2291750
uugaaugcacccuaaaccu

SEQ ID NO: 2291752 - RNA, 19 nt, Artificial Sequence
  Description of Artificial Sequence: Synthetic oligonucleotide
  Sense strand starting at position 1748 of SEQ ID NO: 1884783
agagucgaaguguaauuga

SEQ ID NO: 2291753 - RNA, 19 nt, Artificial Sequence
  Description of Artificial Sequence: Synthetic oligonucleotide
  Antisense strand to SEQ ID NO: 2291752
ucaauuacacuucgacucu

SEQ ID NO: 2291754 - RNA, 19 nt, Artificial Sequence
  Description of Artificial Sequence: Synthetic oligonucleotide
  Sense strand starting at position 1753 of SEQ ID NO: 1884783
cgaaguguaauugaguaua

SEQ ID NO: 2291755 - RNA, 19 nt, Artificial Sequence
  Description of Artificial Sequence: Synthetic oligonucleotide
  Antisense strand to SEQ ID NO: 2291754
uauacucaauuacacuucg

SEQ ID NO: 2291756 - RNA, 19 nt, Artificial Sequence
  Description of Artificial Sequence: Synthetic oligonucleotide
  Sense strand starting at position 1758 of SEQ ID NO: 1884783
uguaauugaguauauccau

SEQ ID NO: 2291757 - RNA, 19 nt, Artificial Sequence
  Description of Artificial Sequence: Synthetic oligonucleotide
  Antisense strand to SEQ ID NO: 2291756
auggauauacucaauuaca

SEQ ID NO: 2291758 - RNA, 19 nt, Artificial Sequence
  Description of Artificial Sequence: Synthetic oligonucleotide
  Sense strand starting at position 1807 of SEQ ID NO: 1884783
auuccauuguucuugagag

SEQ ID NO: 2291759 - RNA, 19 nt, Artificial Sequence
  Description of Artificial Sequence: Synthetic oligonucleotide
  Antisense strand to SEQ ID NO: 2291758
cucucaagaacaauggaau

SEQ ID NO: 2291760 - RNA, 19 nt, Artificial Sequence
  Description of Artificial Sequence: Synthetic oligonucleotide
  Sense strand starting at position 1860 of SEQ ID NO: 1884783
cuuucugcuccugagauga

SEQ ID NO: 2291761 - RNA, 19 nt, Artificial Sequence
  Description of Artificial Sequence: Synthetic oligonucleotide
  Antisense strand to SEQ ID NO: 2291760
ucaucucaggagcagaaag

SEQ ID NO: 2291762 - RNA, 19 nt, Artificial Sequence
  Description of Artificial Sequence: Synthetic oligonucleotide
  Sense strand starting at position 1871 of SEQ ID NO: 1884783
ugagaugacugucugugga

SEQ ID NO: 2291763 - RNA, 19 nt, Artificial Sequence
  Description of Artificial Sequence: Synthetic oligonucleotide
  Antisense strand to SEQ ID NO: 2291762
uccacagacagucaucuca

SEQ ID NO: 2291764 - RNA, 19 nt, Artificial Sequence
  Description of Artificial Sequence: Synthetic oligonucleotide
  Sense strand starting at position 1873 of SEQ ID NO: 1884783
agaugacugucuguggaca

SEQ ID NO: 2291765 - RNA, 19 nt, Artificial Sequence
  Description of Artificial Sequence: Synthetic oligonucleotide
  Antisense strand to SEQ ID NO: 2291764
uguccacagacagucaucu

SEQ ID NO: 2291766 - RNA, 19 nt, Artificial Sequence
  Description of Artificial Sequence: Synthetic oligonucleotide
  Sense strand starting at position 1874 of SEQ ID NO: 1884783
gaugacugucuguggacaa

SEQ ID NO: 2291767 - RNA, 19 nt, Artificial Sequence
  Description of Artificial Sequence: Synthetic oligonucleotide
  Antisense strand to SEQ ID NO: 2291766
uuguccacagacagucauc

SEQ ID NO: 2291768 - RNA, 19 nt, Artificial Sequence
  Description of Artificial Sequence: Synthetic oligonucleotide
  Sense strand starting at position 1895 of SEQ ID NO: 1884783
gagaaucucugagucaaau

SEQ ID NO: 2291769 - RNA, 19 nt, Artificial Sequence
  Description of Artificial Sequence: Synthetic oligonucleotide
  Antisense strand to SEQ ID NO: 2291768
auuugacucagagauucuc

SEQ ID NO: 2291770 - RNA, 19 nt, Artificial Sequence
  Description of Artificial Sequence: Synthetic oligonucleotide
  Sense strand starting at position 1924 of SEQ ID NO: 1884783
agguacuuaccggaguuua

SEQ ID NO: 2291771 - RNA, 19 nt, Artificial Sequence
  Description of Artificial Sequence: Synthetic oligonucleotide
  Antisense strand to SEQ ID NO: 2291770
uaaacuccgguaaguaccu

SEQ ID NO: 2291772 - RNA, 19 nt, Artificial Sequence
  Description of Artificial Sequence: Synthetic oligonucleotide
  Sense strand starting at position 2293 of SEQ ID NO: 1884783
uugguaggagcuuacaaua

SEQ ID NO: 2291773 - RNA, 19 nt, Artificial Sequence
  Description of Artificial Sequence: Synthetic oligonucleotide
  Antisense strand to SEQ ID NO: 2291772
uauuguaagcuccuaccaa

SEQ ID NO: 2291774 - RNA, 19 nt, Artificial Sequence
  Description of Artificial Sequence: Synthetic oligonucleotide
  Sense strand starting at position 2331 of SEQ ID NO: 1884783
ugaagaaacucauugcuua

SEQ ID NO: 2291775 - RNA, 19 nt, Artificial Sequence
  Description of Artificial Sequence: Synthetic oligonucleotide
  Antisense strand to SEQ ID NO: 2291774
uaagcaaugaguuucuuca

SEQ ID NO: 2291776 - RNA, 19 nt, Artificial Sequence
  Description of Artificial Sequence: Synthetic oligonucleotide
  Sense strand starting at position 2532 of SEQ ID NO: 1884783
uuuccaagucuauauagua

SEQ ID NO: 2291777 - RNA, 19 nt, Artificial Sequence
  Description of Artificial Sequence: Synthetic oligonucleotide
  Antisense strand to SEQ ID NO: 2291776
uacuauauagacuuggaaa

SEQ ID NO: 2291778 - RNA, 19 nt, Artificial Sequence
  Description of Artificial Sequence: Synthetic oligonucleotide
  Sense strand starting at position 2755 of SEQ ID NO: 1884783
agguguugggacugaaaua

SEQ ID NO: 2291779 - RNA, 19 nt, Artificial Sequence
  Description of Artificial Sequence: Synthetic oligonucleotide
  Antisense strand to SEQ ID NO: 2291778
uauuucagucccaacaccu

SEQ ID NO: 2291780 - RNA, 19 nt, Artificial Sequence
  Description of Artificial Sequence: Synthetic oligonucleotide
  Sense strand starting at position 2852 of SEQ ID NO: 1884783
ccuaacauugcuggaaacu

SEQ ID NO: 2291781 - RNA, 19 nt, Artificial Sequence
  Description of Artificial Sequence: Synthetic oligonucleotide
  Antisense strand to SEQ ID NO: 2291780
aguuuccagcaauguuagg

SEQ ID NO: 2291782 - RNA, 19 nt, Artificial Sequence
  Description of Artificial Sequence: Synthetic oligonucleotide
  Sense strand starting at position 2930 of SEQ ID NO: 1884783
aguguugucaaggaucaac

SEQ ID NO: 2291783 - RNA, 19 nt, Artificial Sequence
  Description of Artificial Sequence: Synthetic oligonucleotide
  Antisense strand to SEQ ID NO: 2291782
guugauccuugacaacacu

SEQ ID NO: 2291784 - RNA, 19 nt, Artificial Sequence
  Description of Artificial Sequence: Synthetic oligonucleotide
  Sense strand starting at position 2962 of SEQ ID NO: 1884783
aguuaauguggugaggaca

SEQ ID NO: 2291785 - RNA, 19 nt, Artificial Sequence
  Description of Artificial Sequence: Synthetic oligonucleotide
  Antisense strand to SEQ ID NO: 2291784
uguccucaccacauuaacu

SEQ ID NO: 2291786 - RNA, 19 nt, Artificial Sequence
  Description of Artificial Sequence: Synthetic oligonucleotide
  Sense strand starting at position 3098 of SEQ ID NO: 1884783
agugguguuaaggaaaguu

SEQ ID NO: 2291787 - RNA, 19 nt, Artificial Sequence
  Description of Artificial Sequence: Synthetic oligonucleotide
  Antisense strand to SEQ ID NO: 2291786
aacuuuccuuaacaccacu

SEQ ID NO: 2291788 - RNA, 19 nt, Artificial Sequence
  Description of Artificial Sequence: Synthetic oligonucleotide
  Sense strand starting at position 3112 of SEQ ID NO: 1884783
aaguuaaugugacuagacu

SEQ ID NO: 2291789 - RNA, 19 nt, Artificial Sequence
  Description of Artificial Sequence: Synthetic oligonucleotide
  Antisense strand to SEQ ID NO: 2291788
agucuagucacauuaacuu

SEQ ID NO: 2291790 - RNA, 19 nt, Artificial Sequence
  Description of Artificial Sequence: Synthetic oligonucleotide
  Sense strand starting at position 3121 of SEQ ID NO: 1884783
ugacuagacucucuggauu

SEQ ID NO: 2291791 - RNA, 19 nt, Artificial Sequence
  Description of Artificial Sequence: Synthetic oligonucleotide
  Antisense strand to SEQ ID NO: 2291790
aauccagagagucuaguca

SEQ ID NO: 2291792 - RNA, 19 nt, Artificial Sequence
  Description of Artificial Sequence: Synthetic oligonucleotide
  Sense strand starting at position 3166 of SEQ ID NO: 1884783
agagaaacuuugccuaucu

SEQ ID NO: 2291793 - RNA, 19 nt, Artificial Sequence
  Description of Artificial Sequence: Synthetic oligonucleotide
  Antisense strand to SEQ ID NO: 2291792
agauaggcaaaguuucucu

SEQ ID NO: 2291794 - RNA, 19 nt, Artificial Sequence
  Description of Artificial Sequence: Synthetic oligonucleotide
  Sense strand starting at position 3334 of SEQ ID NO: 1884783
gugguagauuugcuucuca

SEQ ID NO: 2291795 - RNA, 19 nt, Artificial Sequence
  Description of Artificial Sequence: Synthetic oligonucleotide
  Antisense strand to SEQ ID NO: 2291794
ugagaagcaaaucuaccac

SEQ ID NO: 2291796 - RNA, 19 nt, Artificial Sequence
  Description of Artificial Sequence: Synthetic oligonucleotide
  Sense strand starting at position 3691 of SEQ ID NO: 1884783
cuggccuaacuguaagauu

SEQ ID NO: 2291797 - RNA, 19 nt, Artificial Sequence
  Description of Artificial Sequence: Synthetic oligonucleotide
  Antisense strand to SEQ ID NO: 2291796
aaucuuacaguuaggccag

SEQ ID NO: 2291798 - RNA, 19 nt, Artificial Sequence
  Description of Artificial Sequence: Synthetic oligonucleotide
  Sense strand starting at position 433 of SEQ ID NO: 1884784
ggaaauauggugugaaucc

SEQ ID NO: 2291799 - RNA, 19 nt, Artificial Sequence
  Description of Artificial Sequence: Synthetic oligonucleotide
  Antisense strand to SEQ ID NO: 2291798
ggauucacaccauauuucc

SEQ ID NO: 2291800 - RNA, 19 nt, Artificial Sequence
  Description of Artificial Sequence: Synthetic oligonucleotide
  Sense strand starting at position 1032 of SEQ ID NO: 1884784
cagugauuccauugagaua

SEQ ID NO: 2291801 - RNA, 19 nt, Artificial Sequence
  Description of Artificial Sequence: Synthetic oligonucleotide
  Antisense strand to SEQ ID NO: 2291800
uaucucaauggaaucacug

SEQ ID NO: 2291802 - RNA, 19 nt, Artificial Sequence
  Description of Artificial Sequence: Synthetic oligonucleotide
  Sense strand starting at position 1043 of SEQ ID NO: 1884784
uugagauaauuguucugag

SEQ ID NO: 2291803 - RNA, 19 nt, Artificial Sequence
  Description of Artificial Sequence: Synthetic oligonucleotide
  Antisense strand to SEQ ID NO: 2291802
cucagaacaauuaucucaa

SEQ ID NO: 2291804 - RNA, 19 nt, Artificial Sequence
  Description of Artificial Sequence: Synthetic oligonucleotide
  Sense strand starting at position 1044 of SEQ ID NO: 1884784
ugagauaauuguucugagu

SEQ ID NO: 2291805 - RNA, 19 nt, Artificial Sequence
  Description of Artificial Sequence: Synthetic oligonucleotide
  Antisense strand to SEQ ID NO: 2291804
acucagaacaauuaucuca

SEQ ID NO: 2291806 - RNA, 19 nt, Artificial Sequence
  Description of Artificial Sequence: Synthetic oligonucleotide
  Sense strand starting at position 1133 of SEQ ID NO: 1884784
cucugugcuggcuugcaaa

SEQ ID NO: 2291807 - RNA, 19 nt, Artificial Sequence
  Description of Artificial Sequence: Synthetic oligonucleotide
  Antisense strand to SEQ ID NO: 2291806
uuugcaagccagcacagag

SEQ ID NO: 2291808 - RNA, 19 nt, Artificial Sequence
  Description of Artificial Sequence: Synthetic oligonucleotide
  Sense strand starting at position 1220 of SEQ ID NO: 1884784
gggcuauuccggagcuguc

SEQ ID NO: 2291809 - RNA, 19 nt, Artificial Sequence
  Description of Artificial Sequence: Synthetic oligonucleotide
  Antisense strand to SEQ ID NO: 2291808
gacagcuccggaauagccc

SEQ ID NO: 2291810 - RNA, 19 nt, Artificial Sequence
  Description of Artificial Sequence: Synthetic oligonucleotide
  Sense strand starting at position 1230 of SEQ ID NO: 1884784
ggagcugucccgaggcuuu

SEQ ID NO: 2291811 - RNA, 19 nt, Artificial Sequence
  Description of Artificial Sequence: Synthetic oligonucleotide
  Antisense strand to SEQ ID NO: 2291810
aaagccucgggacagcucc

SEQ ID NO: 2291812 - RNA, 19 nt, Artificial Sequence
  Description of Artificial Sequence: Synthetic oligonucleotide
  Sense strand starting at position 1299 of SEQ ID NO: 1884784
cuuaguaaacaggguaaau

SEQ ID NO: 2291813 - RNA, 19 nt, Artificial Sequence
  Description of Artificial Sequence: Synthetic oligonucleotide
  Antisense strand to SEQ ID NO: 2291812
auuuacccuguuuacuaag

SEQ ID NO: 2291814 - RNA, 19 nt, Artificial Sequence
  Description of Artificial Sequence: Synthetic oligonucleotide
  Sense strand starting at position 1326 of SEQ ID NO: 1884784
uggugaacucaauaguuua

SEQ ID NO: 2291815 - RNA, 19 nt, Artificial Sequence
  Description of Artificial Sequence: Synthetic oligonucleotide
  Antisense strand to SEQ ID NO: 2291814
uaaacuauugaguucacca

SEQ ID NO: 2291816 - RNA, 19 nt, Artificial Sequence
  Description of Artificial Sequence: Synthetic oligonucleotide
  Sense strand starting at position 1333 of SEQ ID NO: 1884784
cucaauaguuuauuaggau

SEQ ID NO: 2291817 - RNA, 19 nt, Artificial Sequence
  Description of Artificial Sequence: Synthetic oligonucleotide
  Antisense strand to SEQ ID NO: 2291816
auccuaauaaacuauugag

SEQ ID NO: 2291818 - RNA, 19 nt, Artificial Sequence
  Description of Artificial Sequence: Synthetic oligonucleotide
  Sense strand starting at position 1339 of SEQ ID NO: 1884784
aguuuauuaggauggcaag

SEQ ID NO: 2291819 - RNA, 19 nt, Artificial Sequence
  Description of Artificial Sequence: Synthetic oligonucleotide
  Antisense strand to SEQ ID NO: 2291818
cuugccauccuaauaaacu

SEQ ID NO: 2291820 - RNA, 19 nt, Artificial Sequence
  Description of Artificial Sequence: Synthetic oligonucleotide
  Sense strand starting at position 1386 of SEQ ID NO: 1884784
ucuacucaguuaucaggau

SEQ ID NO: 2291821 - RNA, 19 nt, Artificial Sequence
  Description of Artificial Sequence: Synthetic oligonucleotide
  Antisense strand to SEQ ID NO: 2291820
auccugauaacugaguaga

SEQ ID NO: 2291822 - RNA, 19 nt, Artificial Sequence
  Description of Artificial Sequence: Synthetic oligonucleotide
  Sense strand starting at position 1390 of SEQ ID NO: 1884784
cucaguuaucaggauucuu

SEQ ID NO: 2291823 - RNA, 19 nt, Artificial Sequence
  Description of Artificial Sequence: Synthetic oligonucleotide
  Antisense strand to SEQ ID NO: 2291822
aagaauccugauaacugag

SEQ ID NO: 2291824 - RNA, 19 nt, Artificial Sequence
  Description of Artificial Sequence: Synthetic oligonucleotide
  Sense strand starting at position 1816 of SEQ ID NO: 1884784
uacagauaugcguacauga

SEQ ID NO: 2291825 - RNA, 19 nt, Artificial Sequence
  Description of Artificial Sequence: Synthetic oligonucleotide
  Antisense strand to SEQ ID NO: 2291824
ucauguacgcauaucugua

SEQ ID NO: 2291826 - RNA, 19 nt, Artificial Sequence
  Description of Artificial Sequence: Synthetic oligonucleotide
  Sense strand starting at position 1818 of SEQ ID NO: 1884784
cagauaugcguacaugacu

SEQ ID NO: 2291827 - RNA, 19 nt, Artificial Sequence
  Description of Artificial Sequence: Synthetic oligonucleotide
  Antisense strand to SEQ ID NO: 2291826
agucauguacgcauaucug

SEQ ID NO: 2291828 - RNA, 19 nt, Artificial Sequence
  Description of Artificial Sequence: Synthetic oligonucleotide
  Sense strand starting at position 1986 of SEQ ID NO: 1884784
uccagauuccuuuaaagug

SEQ ID NO: 2291829 - RNA, 19 nt, Artificial Sequence
  Description of Artificial Sequence: Synthetic oligonucleotide
  Antisense strand to SEQ ID NO: 2291828
cacuuuaaaggaaucugga

SEQ ID NO: 2291830 - RNA, 19 nt, Artificial Sequence
  Description of Artificial Sequence: Synthetic oligonucleotide
  Sense strand starting at position 2023 of SEQ ID NO: 1884784
gggcgacuaacaugagaau

SEQ ID NO: 2291831 - RNA, 19 nt, Artificial Sequence
  Description of Artificial Sequence: Synthetic oligonucleotide
  Antisense strand to SEQ ID NO: 2291830
auucucauguuagucgccc

SEQ ID NO: 2291832 - RNA, 19 nt, Artificial Sequence
  Description of Artificial Sequence: Synthetic oligonucleotide
  Sense strand starting at position 2032 of SEQ ID NO: 1884784
acaugagaauuccuguuug

SEQ ID NO: 2291833 - RNA, 19 nt, Artificial Sequence
  Description of Artificial Sequence: Synthetic oligonucleotide
  Antisense strand to SEQ ID NO: 2291832
caaacaggaauucucaugu

SEQ ID NO: 2291834 - RNA, 19 nt, Artificial Sequence
  Description of Artificial Sequence: Synthetic oligonucleotide
  Sense strand starting at position 2054 of SEQ ID NO: 1884784
ggucauugucaugaccuca

SEQ ID NO: 2291835 - RNA, 19 nt, Artificial Sequence
  Description of Artificial Sequence: Synthetic oligonucleotide
  Antisense strand to SEQ ID NO: 2291834
ugaggucaugacaaugacc

SEQ ID NO: 2291836 - RNA, 19 nt, Artificial Sequence
  Description of Artificial Sequence: Synthetic oligonucleotide
  Sense strand starting at position 2245 of SEQ ID NO: 1884784
gcugaaagagaucguauaa

SEQ ID NO: 2291837 - RNA, 19 nt, Artificial Sequence
  Description of Artificial Sequence: Synthetic oligonucleotide
  Antisense strand to SEQ ID NO: 2291836
uuauacgaucucuuucagc

SEQ ID NO: 2291838 - RNA, 19 nt, Artificial Sequence
  Description of Artificial Sequence: Synthetic oligonucleotide
  Sense strand starting at position 2370 of SEQ ID NO: 1884784
cucuauuugcuacggaauu

SEQ ID NO: 2291839 - RNA, 19 nt, Artificial Sequence
  Description of Artificial Sequence: Synthetic oligonucleotide
  Antisense strand to SEQ ID NO: 2291838
aauuccguagcaaauagag

SEQ ID NO: 2291840 - RNA, 19 nt, Artificial Sequence
  Description of Artificial Sequence: Synthetic oligonucleotide
  Sense strand starting at position 2438 of SEQ ID NO: 1884784
aaaguaacaguuugaaaug

SEQ ID NO: 2291841 - RNA, 19 nt, Artificial Sequence
  Description of Artificial Sequence: Synthetic oligonucleotide
  Antisense strand to SEQ ID NO: 2291840
cauuucaaacuguuacuuu

SEQ ID NO: 2291842 - RNA, 19 nt, Artificial Sequence
  Description of Artificial Sequence: Synthetic oligonucleotide
  Sense strand starting at position 2454 of SEQ ID NO: 1884784
augauuagacuagguuauc

SEQ ID NO: 2291843 - RNA, 19 nt, Artificial Sequence
  Description of Artificial Sequence: Synthetic oligonucleotide
  Antisense strand to SEQ ID NO: 2291842
gauaaccuagucuaaucau

SEQ ID NO: 2291844 - RNA, 19 nt, Artificial Sequence
  Description of Artificial Sequence: Synthetic oligonucleotide
  Sense strand starting at position 2455 of SEQ ID NO: 1884784
ugauuagacuagguuauca

SEQ ID NO: 2291845 - RNA, 19 nt, Artificial Sequence
  Description of Artificial Sequence: Synthetic oligonucleotide
  Antisense strand to SEQ ID NO: 2291844
ugauaaccuagucuaauca

SEQ ID NO: 2291846 - RNA, 19 nt, Artificial Sequence
  Description of Artificial Sequence: Synthetic oligonucleotide
  Sense strand starting at position 2457 of SEQ ID NO: 1884784
auuagacuagguuaucagu

SEQ ID NO: 2291847 - RNA, 19 nt, Artificial Sequence
  Description of Artificial Sequence: Synthetic oligonucleotide
  Antisense strand to SEQ ID NO: 2291846
acugauaaccuagucuaau

SEQ ID NO: 2291848 - RNA, 19 nt, Artificial Sequence
  Description of Artificial Sequence: Synthetic oligonucleotide
  Sense strand starting at position 2468 of SEQ ID NO: 1884784
uuaucaguggcagaaauuc

SEQ ID NO: 2291849 - RNA, 19 nt, Artificial Sequence
  Description of Artificial Sequence: Synthetic oligonucleotide
  Antisense strand to SEQ ID NO: 2291848
gaauuucugccacugauaa

SEQ ID NO: 2291850 - RNA, 19 nt, Artificial Sequence
  Description of Artificial Sequence: Synthetic oligonucleotide
  Sense strand starting at position 2476 of SEQ ID NO: 1884784
ggcagaaauucuuuaugac

SEQ ID NO: 2291851 - RNA, 19 nt, Artificial Sequence
  Description of Artificial Sequence: Synthetic oligonucleotide
  Antisense strand to SEQ ID NO: 2291850
gucauaaagaauuucugcc

SEQ ID NO: 2291852 - RNA, 19 nt, Artificial Sequence
  Description of Artificial Sequence: Synthetic oligonucleotide
  Sense strand starting at position 2477 of SEQ ID NO: 1884784
gcagaaauucuuuaugacc

SEQ ID NO: 2291853 - RNA, 19 nt, Artificial Sequence
  Description of Artificial Sequence: Synthetic oligonucleotide
  Antisense strand to SEQ ID NO: 2291852
ggucauaaagaauuucugc

SEQ ID NO: 2291854 - RNA, 19 nt, Artificial Sequence
  Description of Artificial Sequence: Synthetic oligonucleotide
  Sense strand starting at position 2486 of SEQ ID NO: 1884784
cuuuaugacccagaggucu

SEQ ID NO: 2291855 - RNA, 19 nt, Artificial Sequence
  Description of Artificial Sequence: Synthetic oligonucleotide
  Antisense strand to SEQ ID NO: 2291854
agaccucugggucauaaag

SEQ ID NO: 2291856 - RNA, 19 nt, Artificial Sequence
  Description of Artificial Sequence: Synthetic oligonucleotide
  Sense strand starting at position 2527 of SEQ ID NO: 1884784
agaaguugucaccaucugu

SEQ ID NO: 2291857 - RNA, 19 nt, Artificial Sequence
  Description of Artificial Sequence: Synthetic oligonucleotide
  Antisense strand to SEQ ID NO: 2291856
acagauggugacaacuucu

SEQ ID NO: 2291858 - RNA, 19 nt, Artificial Sequence
  Description of Artificial Sequence: Synthetic oligonucleotide
  Sense strand starting at position 2557 of SEQ ID NO: 1884784
uugccuugugcuguuuaua

SEQ ID NO: 2291859 - RNA, 19 nt, Artificial Sequence
  Description of Artificial Sequence: Synthetic oligonucleotide
  Antisense strand to SEQ ID NO: 2291858
uauaaacagcacaaggcaa

SEQ ID NO: 2291860 - RNA, 19 nt, Artificial Sequence
  Description of Artificial Sequence: Synthetic oligonucleotide
  Sense strand starting at position 2558 of SEQ ID NO: 1884784
ugccuugugcuguuuauac

SEQ ID NO: 2291861 - RNA, 19 nt, Artificial Sequence
  Description of Artificial Sequence: Synthetic oligonucleotide
  Antisense strand to SEQ ID NO: 2291860
guauaaacagcacaaggca

SEQ ID NO: 2291862 - RNA, 19 nt, Artificial Sequence
  Description of Artificial Sequence: Synthetic oligonucleotide
  Sense strand starting at position 2582 of SEQ ID NO: 1884784
ucaguuggaguuggaagaa

SEQ ID NO: 2291863 - RNA, 19 nt, Artificial Sequence
  Description of Artificial Sequence: Synthetic oligonucleotide
  Antisense strand to SEQ ID NO: 2291862
uucuuccaacuccaacuga

SEQ ID NO: 2291864 - RNA, 19 nt, Artificial Sequence
  Description of Artificial Sequence: Synthetic oligonucleotide
  Sense strand starting at position 2635 of SEQ ID NO: 1884784
gucucugaggguuaauauu

SEQ ID NO: 2291865 - RNA, 19 nt, Artificial Sequence
  Description of Artificial Sequence: Synthetic oligonucleotide
  Antisense strand to SEQ ID NO: 2291864
aauauuaacccucagagac

SEQ ID NO: 2291866 - RNA, 19 nt, Artificial Sequence
  Description of Artificial Sequence: Synthetic oligonucleotide
  Sense strand starting at position 2939 of SEQ ID NO: 1884784
aaaggauugucccuuuaag

SEQ ID NO: 2291867 - RNA, 19 nt, Artificial Sequence
  Description of Artificial Sequence: Synthetic oligonucleotide
  Antisense strand to SEQ ID NO: 2291866
cuuaaagggacaauccuuu

SEQ ID NO: 2291868 - RNA, 19 nt, Artificial Sequence
  Description of Artificial Sequence: Synthetic oligonucleotide
  Sense strand starting at position 2998 of SEQ ID NO: 1884784
gugcaaacacuugauaaau

SEQ ID NO: 2291869 - RNA, 19 nt, Artificial Sequence
  Description of Artificial Sequence: Synthetic oligonucleotide
  Antisense strand to SEQ ID NO: 2291868
auuuaucaaguguuugcac

SEQ ID NO: 2291870 - RNA, 19 nt, Artificial Sequence
  Description of Artificial Sequence: Synthetic oligonucleotide
  Sense strand starting at position 3400 of SEQ ID NO: 1884784
gugaguuuaaguggagaga

SEQ ID NO: 2291871 - RNA, 19 nt, Artificial Sequence
  Description of Artificial Sequence: Synthetic oligonucleotide
  Antisense strand to SEQ ID NO: 2291870
ucucuccacuuaaacucac

SEQ ID NO: 2291872 - RNA, 19 nt, Artificial Sequence
  Description of Artificial Sequence: Synthetic oligonucleotide
  Sense strand starting at position 3474 of SEQ ID NO: 1884784
gucagugucagagagacau

SEQ ID NO: 2291873 - RNA, 19 nt, Artificial Sequence
  Description of Artificial Sequence: Synthetic oligonucleotide
  Antisense strand to SEQ ID NO: 2291872
augucucucugacacugac

SEQ ID NO: 2291874 - RNA, 19 nt, Artificial Sequence
  Description of Artificial Sequence: Synthetic oligonucleotide
  Sense strand starting at position 3910 of SEQ ID NO: 1884784
agccaagaucuagacucuu

SEQ ID NO: 2291875 - RNA, 19 nt, Artificial Sequence
  Description of Artificial Sequence: Synthetic oligonucleotide
  Antisense strand to SEQ ID NO: 2291874
aagagucuagaucuuggcu

SEQ ID NO: 2291876 - RNA, 19 nt, Artificial Sequence
  Description of Artificial Sequence: Synthetic oligonucleotide
  Sense strand starting at position 3947 of SEQ ID NO: 1884784
cuaagagcccuuuaugggu

SEQ ID NO: 2291877 - RNA, 19 nt, Artificial Sequence
  Description of Artificial Sequence: Synthetic oligonucleotide
  Antisense strand to SEQ ID NO: 2291876
acccauaaagggcucuuag

SEQ ID NO: 2291878 - RNA, 19 nt, Artificial Sequence
  Description of Artificial Sequence: Synthetic oligonucleotide
  Sense strand starting at position 37 of SEQ ID NO: 1884785
gggcuaugggauuaucuau

SEQ ID NO: 2291879 - RNA, 19 nt, Artificial Sequence
  Description of Artificial Sequence: Synthetic oligonucleotide
  Antisense strand to SEQ ID NO: 2291878
auagauaaucccauagccc

SEQ ID NO: 2291880 - RNA, 19 nt, Artificial Sequence
  Description of Artificial Sequence: Synthetic oligonucleotide
  Sense strand starting at position 123 of SEQ ID NO: 1884785
gccagcucugucuuaggca

SEQ ID NO: 2291881 - RNA, 19 nt, Artificial Sequence
  Description of Artificial Sequence: Synthetic oligonucleotide
  Antisense strand to SEQ ID NO: 2291880
ugccuaagacagagcuggc

SEQ ID NO: 2291882 - RNA, 19 nt, Artificial Sequence
  Description of Artificial Sequence: Synthetic oligonucleotide
  Sense strand starting at position 527 of SEQ ID NO: 1884785
guguuaucauucuugauuu

SEQ ID NO: 2291883 - RNA, 19 nt, Artificial Sequence
  Description of Artificial Sequence: Synthetic oligonucleotide
  Antisense strand to SEQ ID NO: 2291882
aaaucaagaaugauaacac

SEQ ID NO: 2291884 - RNA, 19 nt, Artificial Sequence
  Description of Artificial Sequence: Synthetic oligonucleotide
  Sense strand starting at position 614 of SEQ ID NO: 1884785
uuaccugaguccuuaagag

SEQ ID NO: 2291885 - RNA, 19 nt, Artificial Sequence
  Description of Artificial Sequence: Synthetic oligonucleotide
  Antisense strand to SEQ ID NO: 2291884
cucuuaaggacucagguaa

SEQ ID NO: 2291886 - RNA, 19 nt, Artificial Sequence
  Description of Artificial Sequence: Synthetic oligonucleotide
  Sense strand starting at position 638 of SEQ ID NO: 1884785
gacuguauacccgaauguu

SEQ ID NO: 2291887 - RNA, 19 nt, Artificial Sequence
  Description of Artificial Sequence: Synthetic oligonucleotide
  Antisense strand to SEQ ID NO: 2291886
aacauucggguauacaguc

SEQ ID NO: 2291888 - RNA, 19 nt, Artificial Sequence
  Description of Artificial Sequence: Synthetic oligonucleotide
  Sense strand starting at position 646 of SEQ ID NO: 1884785
acccgaauguuucccauaa

SEQ ID NO: 2291889 - RNA, 19 nt, Artificial Sequence
  Description of Artificial Sequence: Synthetic oligonucleotide
  Antisense strand to SEQ ID NO: 2291888
uuaugggaaacauucgggu

SEQ ID NO: 2291890 - RNA, 19 nt, Artificial Sequence
  Description of Artificial Sequence: Synthetic oligonucleotide
  Sense strand starting at position 690 of SEQ ID NO: 1884785
uguuaaggaacagguaaua

SEQ ID NO: 2291891 - RNA, 19 nt, Artificial Sequence
  Description of Artificial Sequence: Synthetic oligonucleotide
  Antisense strand to SEQ ID NO: 2291890
uauuaccuguuccuuaaca

SEQ ID NO: 2291892 - RNA, 19 nt, Artificial Sequence
  Description of Artificial Sequence: Synthetic oligonucleotide
  Sense strand starting at position 803 of SEQ ID NO: 1884785
ggaagaguauuugaccacu

SEQ ID NO: 2291893 - RNA, 19 nt, Artificial Sequence
  Description of Artificial Sequence: Synthetic oligonucleotide
  Antisense strand to SEQ ID NO: 2291892
aguggucaaauacucuucc

SEQ ID NO: 2291894 - RNA, 19 nt, Artificial Sequence
  Description of Artificial Sequence: Synthetic oligonucleotide
  Sense strand starting at position 832 of SEQ ID NO: 1884785
agaauuaugaugcauggca

SEQ ID NO: 2291895 - RNA, 19 nt, Artificial Sequence
  Description of Artificial Sequence: Synthetic oligonucleotide
  Antisense strand to SEQ ID NO: 2291894
ugccaugcaucauaauucu

SEQ ID NO: 2291896 - RNA, 19 nt, Artificial Sequence
  Description of Artificial Sequence: Synthetic oligonucleotide
  Sense strand starting at position 927 of SEQ ID NO: 1884785
ccagacuuguacuuccuau

SEQ ID NO: 2291897 - RNA, 19 nt, Artificial Sequence
  Description of Artificial Sequence: Synthetic oligonucleotide
  Antisense strand to SEQ ID NO: 2291896
auaggaaguacaagucugg

SEQ ID NO: 2291898 - RNA, 19 nt, Artificial Sequence
  Description of Artificial Sequence: Synthetic oligonucleotide
  Sense strand starting at position 973 of SEQ ID NO: 1884785
gguagaaaugaagguuagu

SEQ ID NO: 2291899 - RNA, 19 nt, Artificial Sequence
  Description of Artificial Sequence: Synthetic oligonucleotide
  Antisense strand to SEQ ID NO: 2291898
acuaaccuucauuucuacc

SEQ ID NO: 2291900 - RNA, 19 nt, Artificial Sequence
  Description of Artificial Sequence: Synthetic oligonucleotide
  Sense strand starting at position 976 of SEQ ID NO: 1884785
agaaaugaagguuaguguu

SEQ ID NO: 2291901 - RNA, 19 nt, Artificial Sequence
  Description of Artificial Sequence: Synthetic oligonucleotide
  Antisense strand to SEQ ID NO: 2291900
aacacuaaccuucauuucu

SEQ ID NO: 2291902 - RNA, 19 nt, Artificial Sequence
  Description of Artificial Sequence: Synthetic oligonucleotide
  Sense strand starting at position 1033 of SEQ ID NO: 1884785
ccauaaaugucaucuguca

SEQ ID NO: 2291903 - RNA, 19 nt, Artificial Sequence
  Description of Artificial Sequence: Synthetic oligonucleotide
  Antisense strand to SEQ ID NO: 2291902
ugacagaugacauuuaugg

SEQ ID NO: 2291904 - RNA, 19 nt, Artificial Sequence
  Description of Artificial Sequence: Synthetic oligonucleotide
  Sense strand starting at position 1120 of SEQ ID NO: 1884785
uguugagcucuugauaucu

SEQ ID NO: 2291905 - RNA, 19 nt, Artificial Sequence
  Description of Artificial Sequence: Synthetic oligonucleotide
  Antisense strand to SEQ ID NO: 2291904
agauaucaagagcucaaca

SEQ ID NO: 2291906 - RNA, 19 nt, Artificial Sequence
  Description of Artificial Sequence: Synthetic oligonucleotide
  Sense strand starting at position 1125 of SEQ ID NO: 1884785
agcucuugauaucuauaag

SEQ ID NO: 2291907 - RNA, 19 nt, Artificial Sequence
  Description of Artificial Sequence: Synthetic oligonucleotide
  Antisense strand to SEQ ID NO: 2291906
cuuauagauaucaagagcu

SEQ ID NO: 2291908 - RNA, 19 nt, Artificial Sequence
  Description of Artificial Sequence: Synthetic oligonucleotide
  Sense strand starting at position 1128 of SEQ ID NO: 1884785
ucuugauaucuauaagcug

SEQ ID NO: 2291909 - RNA, 19 nt, Artificial Sequence
  Description of Artificial Sequence: Synthetic oligonucleotide
  Antisense strand to SEQ ID NO: 2291908
cagcuuauagauaucaaga

SEQ ID NO: 2291910 - RNA, 19 nt, Artificial Sequence
  Description of Artificial Sequence: Synthetic oligonucleotide
  Sense strand starting at position 1352 of SEQ ID NO: 1884785
gugcguauacagucaugca

SEQ ID NO: 2291911 - RNA, 19 nt, Artificial Sequence
  Description of Artificial Sequence: Synthetic oligonucleotide
  Antisense strand to SEQ ID NO: 2291910
ugcaugacuguauacgcac

SEQ ID NO: 2291912 - RNA, 19 nt, Artificial Sequence
  Description of Artificial Sequence: Synthetic oligonucleotide
  Sense strand starting at position 1390 of SEQ ID NO: 1884785
ucuacaaaggauugcauau

SEQ ID NO: 2291913 - RNA, 19 nt, Artificial Sequence
  Description of Artificial Sequence: Synthetic oligonucleotide
  Antisense strand to SEQ ID NO: 2291912
auaugcaauccuuuguaga

SEQ ID NO: 2291914 - RNA, 19 nt, Artificial Sequence
  Description of Artificial Sequence: Synthetic oligonucleotide
  Sense strand starting at position 1657 of SEQ ID NO: 1884785
ugcauaacuggauauguaa

SEQ ID NO: 2291915 - RNA, 19 nt, Artificial Sequence
  Description of Artificial Sequence: Synthetic oligonucleotide
  Antisense strand to SEQ ID NO: 2291914
uuacauauccaguuaugca

SEQ ID NO: 2291916 - RNA, 19 nt, Artificial Sequence
  Description of Artificial Sequence: Synthetic oligonucleotide
  Sense strand starting at position 2225 of SEQ ID NO: 1884785
guuugaucacccuaguuug

SEQ ID NO: 2291917 - RNA, 19 nt, Artificial Sequence
  Description of Artificial Sequence: Synthetic oligonucleotide
  Antisense strand to SEQ ID NO: 2291916
caaacuagggugaucaaac

SEQ ID NO: 2291918 - RNA, 19 nt, Artificial Sequence
  Description of Artificial Sequence: Synthetic oligonucleotide
  Sense strand starting at position 2260 of SEQ ID NO: 1884785
cugaaacagugaguucuuu

SEQ ID NO: 2291919 - RNA, 19 nt, Artificial Sequence
  Description of Artificial Sequence: Synthetic oligonucleotide
  Antisense strand to SEQ ID NO: 2291918
aaagaacucacuguuucag

SEQ ID NO: 2291920 - RNA, 19 nt, Artificial Sequence
  Description of Artificial Sequence: Synthetic oligonucleotide
  Sense strand starting at position 2308 of SEQ ID NO: 1884785
gagagauagugacuugguu

SEQ ID NO: 2291921 - RNA, 19 nt, Artificial Sequence
  Description of Artificial Sequence: Synthetic oligonucleotide
  Antisense strand to SEQ ID NO: 2291920
aaccaagucacuaucucuc

SEQ ID NO: 2291922 - RNA, 19 nt, Artificial Sequence
  Description of Artificial Sequence: Synthetic oligonucleotide
  Sense strand starting at position 2310 of SEQ ID NO: 1884785
gagauagugacuugguuuc

SEQ ID NO: 2291923 - RNA, 19 nt, Artificial Sequence
  Description of Artificial Sequence: Synthetic oligonucleotide
  Antisense strand to SEQ ID NO: 2291922
gaaaccaagucacuaucuc

SEQ ID NO: 2291924 - RNA, 19 nt, Artificial Sequence
  Description of Artificial Sequence: Synthetic oligonucleotide
  Sense strand starting at position 2474 of SEQ ID NO: 1884785
acacuugggcaaugaugau

SEQ ID NO: 2291925 - RNA, 19 nt, Artificial Sequence
  Description of Artificial Sequence: Synthetic oligonucleotide
  Antisense strand to SEQ ID NO: 2291924
aucaucauugcccaagugu

SEQ ID NO: 2291926 - RNA, 19 nt, Artificial Sequence
  Description of Artificial Sequence: Synthetic oligonucleotide
  Sense strand starting at position 2620 of SEQ ID NO: 1884785
guguauaaagcauaccaau

SEQ ID NO: 2291927 - RNA, 19 nt, Artificial Sequence
  Description of Artificial Sequence: Synthetic oligonucleotide
  Antisense strand to SEQ ID NO: 2291926
auugguaugcuuuauacac

SEQ ID NO: 2291928 - RNA, 19 nt, Artificial Sequence
  Description of Artificial Sequence: Synthetic oligonucleotide
  Sense strand starting at position 2688 of SEQ ID NO: 1884785
aaagucauagcagauguuu

SEQ ID NO: 2291929 - RNA, 19 nt, Artificial Sequence
  Description of Artificial Sequence: Synthetic oligonucleotide
  Antisense strand to SEQ ID NO: 2291928
aaacaucugcuaugacuuu

SEQ ID NO: 2291930 - RNA, 19 nt, Artificial Sequence
  Description of Artificial Sequence: Synthetic oligonucleotide
  Sense strand starting at position 2814 of SEQ ID NO: 1884785
ucaugucagaaggaguagu

SEQ ID NO: 2291931 - RNA, 19 nt, Artificial Sequence
  Description of Artificial Sequence: Synthetic oligonucleotide
  Antisense strand to SEQ ID NO: 2291930
acuacuccuucugacauga

SEQ ID NO: 2291932 - RNA, 19 nt, Artificial Sequence
  Description of Artificial Sequence: Synthetic oligonucleotide
  Sense strand starting at position 2895 of SEQ ID NO: 1884785
acagcauauguuuaagauc

SEQ ID NO: 2291933 - RNA, 19 nt, Artificial Sequence
  Description of Artificial Sequence: Synthetic oligonucleotide
  Antisense strand to SEQ ID NO: 2291932
gaucuuaaacauaugcugu

SEQ ID NO: 2291934 - RNA, 19 nt, Artificial Sequence
  Description of Artificial Sequence: Synthetic oligonucleotide
  Sense strand starting at position 2940 of SEQ ID NO: 1884785
auguauuaggguuaaucau

SEQ ID NO: 2291935 - RNA, 19 nt, Artificial Sequence
  Description of Artificial Sequence: Synthetic oligonucleotide
  Antisense strand to SEQ ID NO: 2291934
augauuaacccuaauacau

SEQ ID NO: 2291936 - RNA, 19 nt, Artificial Sequence
  Description of Artificial Sequence: Synthetic oligonucleotide
  Sense strand starting at position 2949 of SEQ ID NO: 1884785
gguuaaucauuugaaauug

SEQ ID NO: 2291937 - RNA, 19 nt, Artificial Sequence
  Description of Artificial Sequence: Synthetic oligonucleotide
  Antisense strand to SEQ ID NO: 2291936
caauuucaaaugauuaacc

SEQ ID NO: 2291938 - RNA, 19 nt, Artificial Sequence
  Description of Artificial Sequence: Synthetic oligonucleotide
  Sense strand starting at position 3064 of SEQ ID NO: 1884785
ccuugaagcccaugaggaa

SEQ ID NO: 2291939 - RNA, 19 nt, Artificial Sequence
  Description of Artificial Sequence: Synthetic oligonucleotide
  Antisense strand to SEQ ID NO: 2291938
uuccucaugggcuucaagg

SEQ ID NO: 2291940 - RNA, 19 nt, Artificial Sequence
  Description of Artificial Sequence: Synthetic oligonucleotide
  Sense strand starting at position 3090 of SEQ ID NO: 1884785
agagaacuuuggccuuaac

SEQ ID NO: 2291941 - RNA, 19 nt, Artificial Sequence
  Description of Artificial Sequence: Synthetic oligonucleotide
  Antisense strand to SEQ ID NO: 2291940
guuaaggccaaaguucucu

SEQ ID NO: 2291942 - RNA, 19 nt, Artificial Sequence
  Description of Artificial Sequence: Synthetic oligonucleotide
  Sense strand starting at position 3196 of SEQ ID NO: 1884785
cgucuuccaggugagagaa

SEQ ID NO: 2291943 - RNA, 19 nt, Artificial Sequence
  Description of Artificial Sequence: Synthetic oligonucleotide
  Antisense strand to SEQ ID NO: 2291942
uucucucaccuggaagacg

SEQ ID NO: 2291944 - RNA, 19 nt, Artificial Sequence
  Description of Artificial Sequence: Synthetic oligonucleotide
  Sense strand starting at position 3516 of SEQ ID NO: 1884785
agagaaaucuugcuuuaua

SEQ ID NO: 2291945 - RNA, 19 nt, Artificial Sequence
  Description of Artificial Sequence: Synthetic oligonucleotide
  Antisense strand to SEQ ID NO: 2291944
uauaaagcaagauuucucu

SEQ ID NO: 2291946 - RNA, 19 nt, Artificial Sequence
  Description of Artificial Sequence: Synthetic oligonucleotide
  Sense strand starting at position 3781 of SEQ ID NO: 1884785
ggaucauacugauuccugu

SEQ ID NO: 2291947 - RNA, 19 nt, Artificial Sequence
  Description of Artificial Sequence: Synthetic oligonucleotide
  Antisense strand to SEQ ID NO: 2291946
acaggaaucaguaugaucc

SEQ ID NO: 2291948 - RNA, 19 nt, Artificial Sequence
  Description of Artificial Sequence: Synthetic oligonucleotide
  Sense strand starting at position 3815 of SEQ ID NO: 1884785
aagauuguagugcauuaaa

SEQ ID NO: 2291949 - RNA, 19 nt, Artificial Sequence
  Description of Artificial Sequence: Synthetic oligonucleotide
  Antisense strand to SEQ ID NO: 2291948
uuuaaugcacuacaaucuu

SEQ ID NO: 2291950 - RNA, 19 nt, Artificial Sequence
  Description of Artificial Sequence: Synthetic oligonucleotide
  Sense strand starting at position 3870 of SEQ ID NO: 1884785
caccuaguuuauguggaau

SEQ ID NO: 2291951 - RNA, 19 nt, Artificial Sequence
  Description of Artificial Sequence: Synthetic oligonucleotide
  Antisense strand to SEQ ID NO: 2291950
auuccacauaaacuaggug

SEQ ID NO: 2291952 - RNA, 19 nt, Artificial Sequence
  Description of Artificial Sequence: Synthetic oligonucleotide
  Sense strand starting at position 3873 of SEQ ID NO: 1884785
cuaguuuauguggaauacu

SEQ ID NO: 2291953 - RNA, 19 nt, Artificial Sequence
  Description of Artificial Sequence: Synthetic oligonucleotide
  Antisense strand to SEQ ID NO: 2291952
aguauuccacauaaacuag

SEQ ID NO: 2291954 - RNA, 19 nt, Artificial Sequence
  Description of Artificial Sequence: Synthetic oligonucleotide
  Sense strand starting at position 3876 of SEQ ID NO: 1884785
guuuauguggaauacuguu

SEQ ID NO: 2291955 - RNA, 19 nt, Artificial Sequence
  Description of Artificial Sequence: Synthetic oligonucleotide
  Antisense strand to SEQ ID NO: 2291954
aacaguauuccacauaaac

SEQ ID NO: 2291956 - RNA, 19 nt, Artificial Sequence
  Description of Artificial Sequence: Synthetic oligonucleotide
  Sense strand starting at position 3958 of SEQ ID NO: 1884785
auagacuaucuuggcaauu

SEQ ID NO: 2291957 - RNA, 19 nt, Artificial Sequence
  Description of Artificial Sequence: Synthetic oligonucleotide
  Antisense strand to SEQ ID NO: 2291956
aauugccaagauagucuau

SEQ ID NO: 2291958 - RNA, 19 nt, Artificial Sequence
  Description of Artificial Sequence: Synthetic oligonucleotide
  Sense strand starting at position 121 of SEQ ID NO: 1884786
aauuguauaggcuguauuu

SEQ ID NO: 2291959 - RNA, 19 nt, Artificial Sequence
  Description of Artificial Sequence: Synthetic oligonucleotide
  Antisense strand to SEQ ID NO: 2291958
aaauacagccuauacaauu

SEQ ID NO: 2291960 - RNA, 19 nt, Artificial Sequence
  Description of Artificial Sequence: Synthetic oligonucleotide
  Sense strand starting at position 133 of SEQ ID NO: 1884786
uguauuuguugcuugguua

SEQ ID NO: 2291961 - RNA, 19 nt, Artificial Sequence
  Description of Artificial Sequence: Synthetic oligonucleotide
  Antisense strand to SEQ ID NO: 2291960
uaaccaagcaacaaauaca

SEQ ID NO: 2291962 - RNA, 19 nt, Artificial Sequence
  Description of Artificial Sequence: Synthetic oligonucleotide
  Sense strand starting at position 134 of SEQ ID NO: 1884786
guauuuguugcuugguuaa

SEQ ID NO: 2291963 - RNA, 19 nt, Artificial Sequence
  Description of Artificial Sequence: Synthetic oligonucleotide
  Antisense strand to SEQ ID NO: 2291962
uuaaccaagcaacaaauac

SEQ ID NO: 2291964 - RNA, 19 nt, Artificial Sequence
  Description of Artificial Sequence: Synthetic oligonucleotide
  Sense strand starting at position 185 of SEQ ID NO: 1884786
gguuacagauaucucuaca

SEQ ID NO: 2291965 - RNA, 19 nt, Artificial Sequence
  Description of Artificial Sequence: Synthetic oligonucleotide
  Antisense strand to SEQ ID NO: 2291964
uguagagauaucuguaacc

SEQ ID NO: 2291966 - RNA, 19 nt, Artificial Sequence
  Description of Artificial Sequence: Synthetic oligonucleotide
  Sense strand starting at position 390 of SEQ ID NO: 1884786
caguaaggaucuuacaaag

SEQ ID NO: 2291967 - RNA, 19 nt, Artificial Sequence
  Description of Artificial Sequence: Synthetic oligonucleotide
  Antisense strand to SEQ ID NO: 2291966
cuuuguaagauccuuacug

SEQ ID NO: 2291968 - RNA, 19 nt, Artificial Sequence
  Description of Artificial Sequence: Synthetic oligonucleotide
  Sense strand starting at position 423 of SEQ ID NO: 1884786
aguagaguggaacauguuu

SEQ ID NO: 2291969 - RNA, 19 nt, Artificial Sequence
  Description of Artificial Sequence: Synthetic oligonucleotide
  Antisense strand to SEQ ID NO: 2291968
aaacauguuccacucuacu

SEQ ID NO: 2291970 - RNA, 19 nt, Artificial Sequence
  Description of Artificial Sequence: Synthetic oligonucleotide
  Sense strand starting at position 532 of SEQ ID NO: 1884786
auuaucuugguccauuaua

SEQ ID NO: 2291971 - RNA, 19 nt, Artificial Sequence
  Description of Artificial Sequence: Synthetic oligonucleotide
  Antisense strand to SEQ ID NO: 2291970
uauaauggaccaagauaau

SEQ ID NO: 2291972 - RNA, 19 nt, Artificial Sequence
  Description of Artificial Sequence: Synthetic oligonucleotide
  Sense strand starting at position 661 of SEQ ID NO: 1884786
uucauugacguuuggaaag

SEQ ID NO: 2291973 - RNA, 19 nt, Artificial Sequence
  Description of Artificial Sequence: Synthetic oligonucleotide
  Antisense strand to SEQ ID NO: 2291972
cuuuccaaacgucaaugaa

SEQ ID NO: 2291974 - RNA, 19 nt, Artificial Sequence
  Description of Artificial Sequence: Synthetic oligonucleotide
  Sense strand starting at position 1070 of SEQ ID NO: 1884786
cagucuuccggauguugaa

SEQ ID NO: 2291975 - RNA, 19 nt, Artificial Sequence
  Description of Artificial Sequence: Synthetic oligonucleotide
  Antisense strand to SEQ ID NO: 2291974
uucaacauccggaagacug

SEQ ID NO: 2291976 - RNA, 19 nt, Artificial Sequence
  Description of Artificial Sequence: Synthetic oligonucleotide
  Sense strand starting at position 1101 of SEQ ID NO: 1884786
cuccaaggauucgaaggaa

SEQ ID NO: 2291977 - RNA, 19 nt, Artificial Sequence
  Description of Artificial Sequence: Synthetic oligonucleotide
  Antisense strand to SEQ ID NO: 2291976
uuccuucgaauccuuggag

SEQ ID NO: 2291978 - RNA, 19 nt, Artificial Sequence
  Description of Artificial Sequence: Synthetic oligonucleotide
  Sense strand starting at position 1104 of SEQ ID NO: 1884786
caaggauucgaaggaaguu

SEQ ID NO: 2291979 - RNA, 19 nt, Artificial Sequence
  Description of Artificial Sequence: Synthetic oligonucleotide
  Antisense strand to SEQ ID NO: 2291978
aacuuccuucgaauccuug

SEQ ID NO: 2291980 - RNA, 19 nt, Artificial Sequence
  Description of Artificial Sequence: Synthetic oligonucleotide
  Sense strand starting at position 1116 of SEQ ID NO: 1884786
ggaaguugauguuuagguu

SEQ ID NO: 2291981 - RNA, 19 nt, Artificial Sequence
  Description of Artificial Sequence: Synthetic oligonucleotide
  Antisense strand to SEQ ID NO: 2291980
aaccuaaacaucaacuucc

SEQ ID NO: 2291982 - RNA, 19 nt, Artificial Sequence
  Description of Artificial Sequence: Synthetic oligonucleotide
  Sense strand starting at position 1175 of SEQ ID NO: 1884786
guaguaauaccguaccuac

SEQ ID NO: 2291983 - RNA, 19 nt, Artificial Sequence
  Description of Artificial Sequence: Synthetic oligonucleotide
  Antisense strand to SEQ ID NO: 2291982
guagguacgguauuacuac

SEQ ID NO: 2291984 - RNA, 19 nt, Artificial Sequence
  Description of Artificial Sequence: Synthetic oligonucleotide
  Sense strand starting at position 2875 of SEQ ID NO: 1884786
ccgucaccuccugaguagu

SEQ ID NO: 2291985 - RNA, 19 nt, Artificial Sequence
  Description of Artificial Sequence: Synthetic oligonucleotide
  Antisense strand to SEQ ID NO: 2291984
acuacucaggaggugacgg

SEQ ID NO: 2291986 - RNA, 19 nt, Artificial Sequence
  Description of Artificial Sequence: Synthetic oligonucleotide
  Sense strand starting at position 2877 of SEQ ID NO: 1884786
gucaccuccugaguaguga

SEQ ID NO: 2291987 - RNA, 19 nt, Artificial Sequence
  Description of Artificial Sequence: Synthetic oligonucleotide
  Antisense strand to SEQ ID NO: 2291986
ucacuacucaggaggugac

SEQ ID NO: 2291988 - RNA, 19 nt, Artificial Sequence
  Description of Artificial Sequence: Synthetic oligonucleotide
  Sense strand starting at position 2917 of SEQ ID NO: 1884786
ugguguguuuacucaccau

SEQ ID NO: 2291989 - RNA, 19 nt, Artificial Sequence
  Description of Artificial Sequence: Synthetic oligonucleotide
  Antisense strand to SEQ ID NO: 2291988
auggugaguaaacacacca

SEQ ID NO: 2291990 - RNA, 19 nt, Artificial Sequence
  Description of Artificial Sequence: Synthetic oligonucleotide
  Sense strand starting at position 3003 of SEQ ID NO: 1884786
cggucgugucgugugaacu

SEQ ID NO: 2291991 - RNA, 19 nt, Artificial Sequence
  Description of Artificial Sequence: Synthetic oligonucleotide
  Antisense strand to SEQ ID NO: 2291990
aguucacacgacacgaccg

SEQ ID NO: 2291992 - RNA, 19 nt, Artificial Sequence
  Description of Artificial Sequence: Synthetic oligonucleotide
  Sense strand starting at position 3015 of SEQ ID NO: 1884786
gugaacuugcucuagccaa

SEQ ID NO: 2291993 - RNA, 19 nt, Artificial Sequence
  Description of Artificial Sequence: Synthetic oligonucleotide
  Antisense strand to SEQ ID NO: 2291992
uuggcuagagcaaguucac

SEQ ID NO: 2291994 - RNA, 19 nt, Artificial Sequence
  Description of Artificial Sequence: Synthetic oligonucleotide
  Sense strand starting at position 3030 of SEQ ID NO: 1884786
ccaaauuagguuuauagca

SEQ ID NO: 2291995 - RNA, 19 nt, Artificial Sequence
  Description of Artificial Sequence: Synthetic oligonucleotide
  Antisense strand to SEQ ID NO: 2291994
ugcuauaaaccuaauuugg

SEQ ID NO: 2291996 - RNA, 19 nt, Artificial Sequence
  Description of Artificial Sequence: Synthetic oligonucleotide
  Sense strand starting at position 3158 of SEQ ID NO: 1884786
ugaaguaucugcuuuccag

SEQ ID NO: 2291997 - RNA, 19 nt, Artificial Sequence
  Description of Artificial Sequence: Synthetic oligonucleotide
  Antisense strand to SEQ ID NO: 2291996
cuggaaagcagauacuuca

SEQ ID NO: 2291998 - RNA, 19 nt, Artificial Sequence
  Description of Artificial Sequence: Synthetic oligonucleotide
  Sense strand starting at position 3161 of SEQ ID NO: 1884786
aguaucugcuuuccagaaa

SEQ ID NO: 2291999 - RNA, 19 nt, Artificial Sequence
  Description of Artificial Sequence: Synthetic oligonucleotide
  Antisense strand to SEQ ID NO: 2291998
uuucuggaaagcagauacu

SEQ ID NO: 2292000 - RNA, 19 nt, Artificial Sequence
  Description of Artificial Sequence: Synthetic oligonucleotide
  Sense strand starting at position 3218 of SEQ ID NO: 1884786
uugcaauaauucgccuuua

SEQ ID NO: 2292001 - RNA, 19 nt, Artificial Sequence
  Description of Artificial Sequence: Synthetic oligonucleotide
  Antisense strand to SEQ ID NO: 2292000
uaaaggcgaauuauugcaa

SEQ ID NO: 2292002 - RNA, 19 nt, Artificial Sequence
  Description of Artificial Sequence: Synthetic oligonucleotide
  Sense strand starting at position 3219 of SEQ ID NO: 1884786
ugcaauaauucgccuuuau

SEQ ID NO: 2292003 - RNA, 19 nt, Artificial Sequence
  Description of Artificial Sequence: Synthetic oligonucleotide
  Antisense strand to SEQ ID NO: 2292002
auaaaggcgaauuauugca

SEQ ID NO: 2292004 - RNA, 19 nt, Artificial Sequence
  Description of Artificial Sequence: Synthetic oligonucleotide
  Sense strand starting at position 3229 of SEQ ID NO: 1884786
cgccuuuauuuccuuguau

SEQ ID NO: 2292005 - RNA, 19 nt, Artificial Sequence
  Description of Artificial Sequence: Synthetic oligonucleotide
  Antisense strand to SEQ ID NO: 2292004
auacaaggaaauaaaggcg

SEQ ID NO: 2292006 - RNA, 19 nt, Artificial Sequence
  Description of Artificial Sequence: Synthetic oligonucleotide
  Sense strand starting at position 3230 of SEQ ID NO: 1884786
gccuuuauuuccuuguaua

SEQ ID NO: 2292007 - RNA, 19 nt, Artificial Sequence
  Description of Artificial Sequence: Synthetic oligonucleotide
  Antisense strand to SEQ ID NO: 2292006
uauacaaggaaauaaaggc

SEQ ID NO: 2292008 - RNA, 19 nt, Artificial Sequence
  Description of Artificial Sequence: Synthetic oligonucleotide
  Sense strand starting at position 3238 of SEQ ID NO: 1884786
uuccuuguauaucuguaaa

SEQ ID NO: 2292009 - RNA, 19 nt, Artificial Sequence
  Description of Artificial Sequence: Synthetic oligonucleotide
  Antisense strand to SEQ ID NO: 2292008
uuuacagauauacaaggaa

SEQ ID NO: 2292010 - RNA, 19 nt, Artificial Sequence
  Description of Artificial Sequence: Synthetic oligonucleotide
  Sense strand starting at position 3240 of SEQ ID NO: 1884786
ccuuguauaucuguaaacu

SEQ ID NO: 2292011 - RNA, 19 nt, Artificial Sequence
  Description of Artificial Sequence: Synthetic oligonucleotide
  Antisense strand to SEQ ID NO: 2292010
aguuuacagauauacaagg

SEQ ID NO: 2292012 - RNA, 19 nt, Artificial Sequence
  Description of Artificial Sequence: Synthetic oligonucleotide
  Sense strand starting at position 3241 of SEQ ID NO: 1884786
cuuguauaucuguaaacuc

SEQ ID NO: 2292013 - RNA, 19 nt, Artificial Sequence
  Description of Artificial Sequence: Synthetic oligonucleotide
  Antisense strand to SEQ ID NO: 2292012
gaguuuacagauauacaag

SEQ ID NO: 2292014 - RNA, 19 nt, Artificial Sequence
  Description of Artificial Sequence: Synthetic oligonucleotide
  Sense strand starting at position 3363 of SEQ ID NO: 1884786
uugaguaaaguacaguuaa

SEQ ID NO: 2292015 - RNA, 19 nt, Artificial Sequence
  Description of Artificial Sequence: Synthetic oligonucleotide
  Antisense strand to SEQ ID NO: 2292014
uuaacuguacuuuacucaa

SEQ ID NO: 2292016 - RNA, 19 nt, Artificial Sequence
  Description of Artificial Sequence: Synthetic oligonucleotide
  Sense strand starting at position 3473 of SEQ ID NO: 1884786
uuuaucauugaaggucaaa

SEQ ID NO: 2292017 - RNA, 19 nt, Artificial Sequence
  Description of Artificial Sequence: Synthetic oligonucleotide
  Antisense strand to SEQ ID NO: 2292016
uuugaccuucaaugauaaa

SEQ ID NO: 2292018 - RNA, 19 nt, Artificial Sequence
  Description of Artificial Sequence: Synthetic oligonucleotide
  Sense strand starting at position 3565 of SEQ ID NO: 1884786
uuugacauaucagcagaca

SEQ ID NO: 2292019 - RNA, 19 nt, Artificial Sequence
  Description of Artificial Sequence: Synthetic oligonucleotide
  Antisense strand to SEQ ID NO: 2292018
ugucugcugauaugucaaa

SEQ ID NO: 2292020 - RNA, 19 nt, Artificial Sequence
  Description of Artificial Sequence: Synthetic oligonucleotide
  Sense strand starting at position 3576 of SEQ ID NO: 1884786
agcagacauugugugaauu

SEQ ID NO: 2292021 - RNA, 19 nt, Artificial Sequence
  Description of Artificial Sequence: Synthetic oligonucleotide
  Antisense strand to SEQ ID NO: 2292020
aauucacacaaugucugcu

SEQ ID NO: 2292022 - RNA, 19 nt, Artificial Sequence
  Description of Artificial Sequence: Synthetic oligonucleotide
  Sense strand starting at position 3578 of SEQ ID NO: 1884786
cagacauugugugaauuua

SEQ ID NO: 2292023 - RNA, 19 nt, Artificial Sequence
  Description of Artificial Sequence: Synthetic oligonucleotide
  Antisense strand to SEQ ID NO: 2292022
uaaauucacacaaugucug

SEQ ID NO: 2292024 - RNA, 19 nt, Artificial Sequence
  Description of Artificial Sequence: Synthetic oligonucleotide
  Sense strand starting at position 3611 of SEQ ID NO: 1884786
gguacugguguagguagaa

SEQ ID NO: 2292025 - RNA, 19 nt, Artificial Sequence
  Description of Artificial Sequence: Synthetic oligonucleotide
  Antisense strand to SEQ ID NO: 2292024
uucuaccuacaccaguacc

SEQ ID NO: 2292026 - RNA, 19 nt, Artificial Sequence
  Description of Artificial Sequence: Synthetic oligonucleotide
  Sense strand starting at position 3716 of SEQ ID NO: 1884786
auacuagugucuuuccuuu

SEQ ID NO: 2292027 - RNA, 19 nt, Artificial Sequence
  Description of Artificial Sequence: Synthetic oligonucleotide
  Antisense strand to SEQ ID NO: 2292026
aaaggaaagacacuaguau

SEQ ID NO: 2292028 - RNA, 19 nt, Artificial Sequence
  Description of Artificial Sequence: Synthetic oligonucleotide
  Sense strand starting at position 3850 of SEQ ID NO: 1884786
augacuuccagagggugua

SEQ ID NO: 2292029 - RNA, 19 nt, Artificial Sequence
  Description of Artificial Sequence: Synthetic oligonucleotide
  Antisense strand to SEQ ID NO: 2292028
uacacccucuggaagucau

SEQ ID NO: 2292030 - RNA, 19 nt, Artificial Sequence
  Description of Artificial Sequence: Synthetic oligonucleotide
  Sense strand starting at position 3866 of SEQ ID NO: 1884786
guaagucugauaugagagu

SEQ ID NO: 2292031 - RNA, 19 nt, Artificial Sequence
  Description of Artificial Sequence: Synthetic oligonucleotide
  Antisense strand to SEQ ID NO: 2292030
acucucauaucagacuuac

SEQ ID NO: 2292032 - RNA, 19 nt, Artificial Sequence
  Description of Artificial Sequence: Synthetic oligonucleotide
  Sense strand starting at position 3935 of SEQ ID NO: 1884786
auaauaaauguguggguua

SEQ ID NO: 2292033 - RNA, 19 nt, Artificial Sequence
  Description of Artificial Sequence: Synthetic oligonucleotide
  Antisense strand to SEQ ID NO: 2292032
uaacccacacauuuauuau

SEQ ID NO: 2292034 - RNA, 19 nt, Artificial Sequence
  Description of Artificial Sequence: Synthetic oligonucleotide
  Sense strand starting at position 3938 of SEQ ID NO: 1884786
auaaauguguggguuagga

SEQ ID NO: 2292035 - RNA, 19 nt, Artificial Sequence
  Description of Artificial Sequence: Synthetic oligonucleotide
  Antisense strand to SEQ ID NO: 2292034
uccuaacccacacauuuau

SEQ ID NO: 2292036 - RNA, 19 nt, Artificial Sequence
  Description of Artificial Sequence: Synthetic oligonucleotide
  Sense strand starting at position 3940 of SEQ ID NO: 1884786
aaauguguggguuaggagu

SEQ ID NO: 2292037 - RNA, 19 nt, Artificial Sequence
  Description of Artificial Sequence: Synthetic oligonucleotide
  Antisense strand to SEQ ID NO: 2292036
acuccuaacccacacauuu

SEQ ID NO: 2292038 - RNA, 19 nt, Artificial Sequence
  Description of Artificial Sequence: Synthetic oligonucleotide
  Sense strand starting at position 136 of SEQ ID NO: 1884787
uuguuaacugcuugguaca

SEQ ID NO: 2292039 - RNA, 19 nt, Artificial Sequence
  Description of Artificial Sequence: Synthetic oligonucleotide
  Antisense strand to SEQ ID NO: 2292038
uguaccaagcaguuaacaa

SEQ ID NO: 2292040 - RNA, 19 nt, Artificial Sequence
  Description of Artificial Sequence: Synthetic oligonucleotide
  Sense strand starting at position 138 of SEQ ID NO: 1884787
guuaacugcuugguacaga

SEQ ID NO: 2292041 - RNA, 19 nt, Artificial Sequence
  Description of Artificial Sequence: Synthetic oligonucleotide
  Antisense strand to SEQ ID NO: 2292040
ucuguaccaagcaguuaac

SEQ ID NO: 2292042 - RNA, 19 nt, Artificial Sequence
  Description of Artificial Sequence: Synthetic oligonucleotide
  Sense strand starting at position 216 of SEQ ID NO: 1884787
ggaauuaacugucuuuaac

SEQ ID NO: 2292043 - RNA, 19 nt, Artificial Sequence
  Description of Artificial Sequence: Synthetic oligonucleotide
  Antisense strand to SEQ ID NO: 2292042
guuaaagacaguuaauucc

SEQ ID NO: 2292044 - RNA, 19 nt, Artificial Sequence
  Description of Artificial Sequence: Synthetic oligonucleotide
  Sense strand starting at position 274 of SEQ ID NO: 1884787
ugaggaucugaauguguau

SEQ ID NO: 2292045 - RNA, 19 nt, Artificial Sequence
  Description of Artificial Sequence: Synthetic oligonucleotide
  Antisense strand to SEQ ID NO: 2292044
auacacauucagauccuca

SEQ ID NO: 2292046 - RNA, 19 nt, Artificial Sequence
  Description of Artificial Sequence: Synthetic oligonucleotide
  Sense strand starting at position 289 of SEQ ID NO: 1884787
guaugcuuaggagaucuga

SEQ ID NO: 2292047 - RNA, 19 nt, Artificial Sequence
  Description of Artificial Sequence: Synthetic oligonucleotide
  Antisense strand to SEQ ID NO: 2292046
ucagaucuccuaagcauac

SEQ ID NO: 2292048 - RNA, 19 nt, Artificial Sequence
  Description of Artificial Sequence: Synthetic oligonucleotide
  Sense strand starting at position 319 of SEQ ID NO: 1884787
agacaagcuucuuuggaaa

SEQ ID NO: 2292049 - RNA, 19 nt, Artificial Sequence
  Description of Artificial Sequence: Synthetic oligonucleotide
  Antisense strand to SEQ ID NO: 2292048
uuuccaaagaagcuugucu

SEQ ID NO: 2292050 - RNA, 19 nt, Artificial Sequence
  Description of Artificial Sequence: Synthetic oligonucleotide
  Sense strand starting at position 363 of SEQ ID NO: 1884787
ggaagaaggcugggaguua

SEQ ID NO: 2292051 - RNA, 19 nt, Artificial Sequence
  Description of Artificial Sequence: Synthetic oligonucleotide
  Antisense strand to SEQ ID NO: 2292050
uaacucccagccuucuucc

SEQ ID NO: 2292052 - RNA, 19 nt, Artificial Sequence
  Description of Artificial Sequence: Synthetic oligonucleotide
  Sense strand starting at position 364 of SEQ ID NO: 1884787
gaagaaggcugggaguuaa

SEQ ID NO: 2292053 - RNA, 19 nt, Artificial Sequence
  Description of Artificial Sequence: Synthetic oligonucleotide
  Antisense strand to SEQ ID NO: 2292052
uuaacucccagccuucuuc

SEQ ID NO: 2292054 - RNA, 19 nt, Artificial Sequence
  Description of Artificial Sequence: Synthetic oligonucleotide
  Sense strand starting at position 481 of SEQ ID NO: 1884787
agagaaauucucuggucca

SEQ ID NO: 2292055 - RNA, 19 nt, Artificial Sequence
  Description of Artificial Sequence: Synthetic oligonucleotide
  Antisense strand to SEQ ID NO: 2292054
uggaccagagaauuucucu

SEQ ID NO: 2292056 - RNA, 19 nt, Artificial Sequence
  Description of Artificial Sequence: Synthetic oligonucleotide
  Sense strand starting at position 484 of SEQ ID NO: 1884787
gaaauucucugguccaguu

SEQ ID NO: 2292057 - RNA, 19 nt, Artificial Sequence
  Description of Artificial Sequence: Synthetic oligonucleotide
  Antisense strand to SEQ ID NO: 2292056
aacuggaccagagaauuuc

SEQ ID NO: 2292058 - RNA, 19 nt, Artificial Sequence
  Description of Artificial Sequence: Synthetic oligonucleotide
  Sense strand starting at position 577 of SEQ ID NO: 1884787
cccuuuagcgaccacaauu

SEQ ID NO: 2292059 - RNA, 19 nt, Artificial Sequence
  Description of Artificial Sequence: Synthetic oligonucleotide
  Antisense strand to SEQ ID NO: 2292058
aauuguggucgcuaaaggg

SEQ ID NO: 2292060 - RNA, 19 nt, Artificial Sequence
  Description of Artificial Sequence: Synthetic oligonucleotide
  Sense strand starting at position 585 of SEQ ID NO: 1884787
cgaccacaauucucaugua

SEQ ID NO: 2292061 - RNA, 19 nt, Artificial Sequence
  Description of Artificial Sequence: Synthetic oligonucleotide
  Antisense strand to SEQ ID NO: 2292060
uacaugagaauuguggucg

SEQ ID NO: 2292062 - RNA, 19 nt, Artificial Sequence
  Description of Artificial Sequence: Synthetic oligonucleotide
  Sense strand starting at position 612 of SEQ ID NO: 1884787
gggagaaauuagcauccua

SEQ ID NO: 2292063 - RNA, 19 nt, Artificial Sequence
  Description of Artificial Sequence: Synthetic oligonucleotide
  Antisense strand to SEQ ID NO: 2292062
uaggaugcuaauuucuccc

SEQ ID NO: 2292064 - RNA, 19 nt, Artificial Sequence
  Description of Artificial Sequence: Synthetic oligonucleotide
  Sense strand starting at position 1352 of SEQ ID NO: 1884787
augcuaacuuuaucaggua

SEQ ID NO: 2292065 - RNA, 19 nt, Artificial Sequence
  Description of Artificial Sequence: Synthetic oligonucleotide
  Antisense strand to SEQ ID NO: 2292064
uaccugauaaaguuagcau

SEQ ID NO: 2292066 - RNA, 19 nt, Artificial Sequence
  Description of Artificial Sequence: Synthetic oligonucleotide
  Sense strand starting at position 1364 of SEQ ID NO: 1884787
ucagguaucccagaacuuu

SEQ ID NO: 2292067 - RNA, 19 nt, Artificial Sequence
  Description of Artificial Sequence: Synthetic oligonucleotide
  Antisense strand to SEQ ID NO: 2292066
aaaguucugggauaccuga

SEQ ID NO: 2292068 - RNA, 19 nt, Artificial Sequence
  Description of Artificial Sequence: Synthetic oligonucleotide
  Sense strand starting at position 1446 of SEQ ID NO: 1884787
caguuuccugaaggaaugu

SEQ ID NO: 2292069 - RNA, 19 nt, Artificial Sequence
  Description of Artificial Sequence: Synthetic oligonucleotide
  Antisense strand to SEQ ID NO: 2292068
acauuccuucaggaaacug

SEQ ID NO: 2292070 - RNA, 19 nt, Artificial Sequence
  Description of Artificial Sequence: Synthetic oligonucleotide
  Sense strand starting at position 1508 of SEQ ID NO: 1884787
ggaggagucuguaacgaca

SEQ ID NO: 2292071 - RNA, 19 nt, Artificial Sequence
  Description of Artificial Sequence: Synthetic oligonucleotide
  Antisense strand to SEQ ID NO: 2292070
ugucguuacagacuccucc

SEQ ID NO: 2292072 - RNA, 19 nt, Artificial Sequence
  Description of Artificial Sequence: Synthetic oligonucleotide
  Sense strand starting at position 1563 of SEQ ID NO: 1884787
uuuggugguuugguaaauu

SEQ ID NO: 2292073 - RNA, 19 nt, Artificial Sequence
  Description of Artificial Sequence: Synthetic oligonucleotide
  Antisense strand to SEQ ID NO: 2292072
aauuuaccaaaccaccaaa

SEQ ID NO: 2292074 - RNA, 19 nt, Artificial Sequence
  Description of Artificial Sequence: Synthetic oligonucleotide
  Sense strand starting at position 1589 of SEQ ID NO: 1884787
ggguaucauccacaaugcu

SEQ ID NO: 2292075 - RNA, 19 nt, Artificial Sequence
  Description of Artificial Sequence: Synthetic oligonucleotide
  Antisense strand to SEQ ID NO: 2292074
agcauuguggaugauaccc

SEQ ID NO: 2292076 - RNA, 19 nt, Artificial Sequence
  Description of Artificial Sequence: Synthetic oligonucleotide
  Sense strand starting at position 1722 of SEQ ID NO: 1884787
agggcuuccuacucuaaac

SEQ ID NO: 2292077 - RNA, 19 nt, Artificial Sequence
  Description of Artificial Sequence: Synthetic oligonucleotide
  Antisense strand to SEQ ID NO: 2292076
guuuagaguaggaagcccu

SEQ ID NO: 2292078 - RNA, 19 nt, Artificial Sequence
  Description of Artificial Sequence: Synthetic oligonucleotide
  Sense strand starting at position 2024 of SEQ ID NO: 1884787
uuggguaaggcuugcuuua

SEQ ID NO: 2292079 - RNA, 19 nt, Artificial Sequence
  Description of Artificial Sequence: Synthetic oligonucleotide
  Antisense strand to SEQ ID NO: 2292078
uaaagcaagccuuacccaa

SEQ ID NO: 2292080 - RNA, 19 nt, Artificial Sequence
  Description of Artificial Sequence: Synthetic oligonucleotide
  Sense strand starting at position 2026 of SEQ ID NO: 1884787
ggguaaggcuugcuuuauu

SEQ ID NO: 2292081 - RNA, 19 nt, Artificial Sequence
  Description of Artificial Sequence: Synthetic oligonucleotide
  Antisense strand to SEQ ID NO: 2292080
aauaaagcaagccuuaccc

SEQ ID NO: 2292082 - RNA, 19 nt, Artificial Sequence
  Description of Artificial Sequence: Synthetic oligonucleotide
  Sense strand starting at position 2034 of SEQ ID NO: 1884787
cuugcuuuauuggccaauu

SEQ ID NO: 2292083 - RNA, 19 nt, Artificial Sequence
  Description of Artificial Sequence: Synthetic oligonucleotide
  Antisense strand to SEQ ID NO: 2292082
aauuggccaauaaagcaag

SEQ ID NO: 2292084 - RNA, 19 nt, Artificial Sequence
  Description of Artificial Sequence: Synthetic oligonucleotide
  Sense strand starting at position 2035 of SEQ ID NO: 1884787
uugcuuuauuggccaauua

SEQ ID NO: 2292085 - RNA, 19 nt, Artificial Sequence
  Description of Artificial Sequence: Synthetic oligonucleotide
  Antisense strand to SEQ ID NO: 2292084
uaauuggccaauaaagcaa

SEQ ID NO: 2292086 - RNA, 19 nt, Artificial Sequence
  Description of Artificial Sequence: Synthetic oligonucleotide
  Sense strand starting at position 2036 of SEQ ID NO: 1884787
ugcuuuauuggccaauuau

SEQ ID NO: 2292087 - RNA, 19 nt, Artificial Sequence
  Description of Artificial Sequence: Synthetic oligonucleotide
  Antisense strand to SEQ ID NO: 2292086
auaauuggccaauaaagca

SEQ ID NO: 2292088 - RNA, 19 nt, Artificial Sequence
  Description of Artificial Sequence: Synthetic oligonucleotide
  Sense strand starting at position 2062 of SEQ ID NO: 1884787
gcuugcuuaccggaagcaa

SEQ ID NO: 2292089 - RNA, 19 nt, Artificial Sequence
  Description of Artificial Sequence: Synthetic oligonucleotide
  Antisense strand to SEQ ID NO: 2292088
uugcuuccgguaagcaagc

SEQ ID NO: 2292090 - RNA, 19 nt, Artificial Sequence
  Description of Artificial Sequence: Synthetic oligonucleotide
  Sense strand starting at position 2105 of SEQ ID NO: 1884787
guuugauugucagcuugaa

SEQ ID NO: 2292091 - RNA, 19 nt, Artificial Sequence
  Description of Artificial Sequence: Synthetic oligonucleotide
  Antisense strand to SEQ ID NO: 2292090
uucaagcugacaaucaaac

SEQ ID NO: 2292092 - RNA, 19 nt, Artificial Sequence
  Description of Artificial Sequence: Synthetic oligonucleotide
  Sense strand starting at position 2109 of SEQ ID NO: 1884787
gauugucagcuugaauacu

SEQ ID NO: 2292093 - RNA, 19 nt, Artificial Sequence
  Description of Artificial Sequence: Synthetic oligonucleotide
  Antisense strand to SEQ ID NO: 2292092
aguauucaagcugacaauc

SEQ ID NO: 2292094 - RNA, 19 nt, Artificial Sequence
  Description of Artificial Sequence: Synthetic oligonucleotide
  Sense strand starting at position 2201 of SEQ ID NO: 1884787
agaagaagcgauuguuaau

SEQ ID NO: 2292095 - RNA, 19 nt, Artificial Sequence
  Description of Artificial Sequence: Synthetic oligonucleotide
  Antisense strand to SEQ ID NO: 2292094
auuaacaaucgcuucuucu

SEQ ID NO: 2292096 - RNA, 19 nt, Artificial Sequence
  Description of Artificial Sequence: Synthetic oligonucleotide
  Sense strand starting at position 2244 of SEQ ID NO: 1884787
cgugauauugucggacuga

SEQ ID NO: 2292097 - RNA, 19 nt, Artificial Sequence
  Description of Artificial Sequence: Synthetic oligonucleotide
  Antisense strand to SEQ ID NO: 2292096
ucaguccgacaauaucacg

SEQ ID NO: 2292098 - RNA, 19 nt, Artificial Sequence
  Description of Artificial Sequence: Synthetic oligonucleotide
  Sense strand starting at position 2302 of SEQ ID NO: 1884787
gugucuccuuagccuuuaa

SEQ ID NO: 2292099 - RNA, 19 nt, Artificial Sequence
  Description of Artificial Sequence: Synthetic oligonucleotide
  Antisense strand to SEQ ID NO: 2292098
uuaaaggcuaaggagacac

SEQ ID NO: 2292100 - RNA, 19 nt, Artificial Sequence
  Description of Artificial Sequence: Synthetic oligonucleotide
  Sense strand starting at position 2337 of SEQ ID NO: 1884787
ccggaauccugcccuaauc

SEQ ID NO: 2292101 - RNA, 19 nt, Artificial Sequence
  Description of Artificial Sequence: Synthetic oligonucleotide
  Antisense strand to SEQ ID NO: 2292100
gauuagggcaggauuccgg

SEQ ID NO: 2292102 - RNA, 19 nt, Artificial Sequence
  Description of Artificial Sequence: Synthetic oligonucleotide
  Sense strand starting at position 2372 of SEQ ID NO: 1884787
gcauuagguccaugaucuc

SEQ ID NO: 2292103 - RNA, 19 nt, Artificial Sequence
  Description of Artificial Sequence: Synthetic oligonucleotide
  Antisense strand to SEQ ID NO: 2292102
gagaucauggaccuaaugc

SEQ ID NO: 2292104 - RNA, 19 nt, Artificial Sequence
  Description of Artificial Sequence: Synthetic oligonucleotide
  Sense strand starting at position 2381 of SEQ ID NO: 1884787
ccaugaucucuguggcuag

SEQ ID NO: 2292105 - RNA, 19 nt, Artificial Sequence
  Description of Artificial Sequence: Synthetic oligonucleotide
  Antisense strand to SEQ ID NO: 2292104
cuagccacagagaucaugg

SEQ ID NO: 2292106 - RNA, 19 nt, Artificial Sequence
  Description of Artificial Sequence: Synthetic oligonucleotide
  Sense strand starting at position 2512 of SEQ ID NO: 1884787
aggaguugauagucgcaau

SEQ ID NO: 2292107 - RNA, 19 nt, Artificial Sequence
  Description of Artificial Sequence: Synthetic oligonucleotide
  Antisense strand to SEQ ID NO: 2292106
auugcgacuaucaacuccu

SEQ ID NO: 2292108 - RNA, 19 nt, Artificial Sequence
  Description of Artificial Sequence: Synthetic oligonucleotide
  Sense strand starting at position 2513 of SEQ ID NO: 1884787
ggaguugauagucgcaaua

SEQ ID NO: 2292109 - RNA, 19 nt, Artificial Sequence
  Description of Artificial Sequence: Synthetic oligonucleotide
  Antisense strand to SEQ ID NO: 2292108
uauugcgacuaucaacucc

SEQ ID NO: 2292110 - RNA, 19 nt, Artificial Sequence
  Description of Artificial Sequence: Synthetic oligonucleotide
  Sense strand starting at position 2604 of SEQ ID NO: 1884787
acuugagcucaacgugaaa

SEQ ID NO: 2292111 - RNA, 19 nt, Artificial Sequence
  Description of Artificial Sequence: Synthetic oligonucleotide
  Antisense strand to SEQ ID NO: 2292110
uuucacguugagcucaagu

SEQ ID NO: 2292112 - RNA, 19 nt, Artificial Sequence
  Description of Artificial Sequence: Synthetic oligonucleotide
  Sense strand starting at position 2618 of SEQ ID NO: 1884787
ugaaaucggcuuuggagau

SEQ ID NO: 2292113 - RNA, 19 nt, Artificial Sequence
  Description of Artificial Sequence: Synthetic oligonucleotide
  Antisense strand to SEQ ID NO: 2292112
aucuccaaagccgauuuca

SEQ ID NO: 2292114 - RNA, 19 nt, Artificial Sequence
  Description of Artificial Sequence: Synthetic oligonucleotide
  Sense strand starting at position 3272 of SEQ ID NO: 1884787
gcgagaucucgucauugca

SEQ ID NO: 2292115 - RNA, 19 nt, Artificial Sequence
  Description of Artificial Sequence: Synthetic oligonucleotide
  Antisense strand to SEQ ID NO: 2292114
ugcaaugacgagaucucgc

SEQ ID NO: 2292116 - RNA, 19 nt, Artificial Sequence
  Description of Artificial Sequence: Synthetic oligonucleotide
  Sense strand starting at position 3589 of SEQ ID NO: 1884787
uugguuuccugaucccuga

SEQ ID NO: 2292117 - RNA, 19 nt, Artificial Sequence
  Description of Artificial Sequence: Synthetic oligonucleotide
  Antisense strand to SEQ ID NO: 2292116
ucagggaucaggaaaccaa

SEQ ID NO: 2292118 - RNA, 19 nt, Artificial Sequence
  Description of Artificial Sequence: Synthetic oligonucleotide
  Sense strand starting at position 1 of SEQ ID NO: 1884788
aagaguuucuagcugaaca

SEQ ID NO: 2292119 - RNA, 19 nt, Artificial Sequence
  Description of Artificial Sequence: Synthetic oligonucleotide
  Antisense strand to SEQ ID NO: 2292118
uguucagcuagaaacucuu

SEQ ID NO: 2292120 - RNA, 19 nt, Artificial Sequence
  Description of Artificial Sequence: Synthetic oligonucleotide
  Sense strand starting at position 3 of SEQ ID NO: 1884788
gaguuucuagcugaacauu

SEQ ID NO: 2292121 - RNA, 19 nt, Artificial Sequence
  Description of Artificial Sequence: Synthetic oligonucleotide
  Antisense strand to SEQ ID NO: 2292120
aauguucagcuagaaacuc

SEQ ID NO: 2292122 - RNA, 19 nt, Artificial Sequence
  Description of Artificial Sequence: Synthetic oligonucleotide
  Sense strand starting at position 89 of SEQ ID NO: 1884788
guuccaccagaauauguau

SEQ ID NO: 2292123 - RNA, 19 nt, Artificial Sequence
  Description of Artificial Sequence: Synthetic oligonucleotide
  Antisense strand to SEQ ID NO: 2292122
auacauauucugguggaac

SEQ ID NO: 2292124 - RNA, 19 nt, Artificial Sequence
  Description of Artificial Sequence: Synthetic oligonucleotide
  Sense strand starting at position 255 of SEQ ID NO: 1884788
agaaucuauuugcaaaguu

SEQ ID NO: 2292125 - RNA, 19 nt, Artificial Sequence
  Description of Artificial Sequence: Synthetic oligonucleotide
  Antisense strand to SEQ ID NO: 2292124
aacuuugcaaauagauucu

SEQ ID NO: 2292126 - RNA, 19 nt, Artificial Sequence
  Description of Artificial Sequence: Synthetic oligonucleotide
  Sense strand starting at position 265 of SEQ ID NO: 1884788
ugcaaaguuuagguaauau

SEQ ID NO: 2292127 - RNA, 19 nt, Artificial Sequence
  Description of Artificial Sequence: Synthetic oligonucleotide
  Antisense strand to SEQ ID NO: 2292126
auauuaccuaaacuuugca

SEQ ID NO: 2292128 - RNA, 19 nt, Artificial Sequence
  Description of Artificial Sequence: Synthetic oligonucleotide
  Sense strand starting at position 368 of SEQ ID NO: 1884788
gcuaaaggucaaggaauca

SEQ ID NO: 2292129 - RNA, 19 nt, Artificial Sequence
  Description of Artificial Sequence: Synthetic oligonucleotide
  Antisense strand to SEQ ID NO: 2292128
ugauuccuugaccuuuagc

SEQ ID NO: 2292130 - RNA, 19 nt, Artificial Sequence
  Description of Artificial Sequence: Synthetic oligonucleotide
  Sense strand starting at position 506 of SEQ ID NO: 1884788
ugugguuguuucucauaua

SEQ ID NO: 2292131 - RNA, 19 nt, Artificial Sequence
  Description of Artificial Sequence: Synthetic oligonucleotide
  Antisense strand to SEQ ID NO: 2292130
uauaugagaaacaaccaca

SEQ ID NO: 2292132 - RNA, 19 nt, Artificial Sequence
  Description of Artificial Sequence: Synthetic oligonucleotide
  Sense strand starting at position 540 of SEQ ID NO: 1884788
auccaugugucuuugugau

SEQ ID NO: 2292133 - RNA, 19 nt, Artificial Sequence
  Description of Artificial Sequence: Synthetic oligonucleotide
  Antisense strand to SEQ ID NO: 2292132
aucacaaagacacauggau

SEQ ID NO: 2292134 - RNA, 19 nt, Artificial Sequence
  Description of Artificial Sequence: Synthetic oligonucleotide
  Sense strand starting at position 542 of SEQ ID NO: 1884788
ccaugugucuuugugauca

SEQ ID NO: 2292135 - RNA, 19 nt, Artificial Sequence
  Description of Artificial Sequence: Synthetic oligonucleotide
  Antisense strand to SEQ ID NO: 2292134
ugaucacaaagacacaugg

SEQ ID NO: 2292136 - RNA, 19 nt, Artificial Sequence
  Description of Artificial Sequence: Synthetic oligonucleotide
  Sense strand starting at position 546 of SEQ ID NO: 1884788
gugucuuugugaucaccag

SEQ ID NO: 2292137 - RNA, 19 nt, Artificial Sequence
  Description of Artificial Sequence: Synthetic oligonucleotide
  Antisense strand to SEQ ID NO: 2292136
cuggugaucacaaagacac

SEQ ID NO: 2292138 - RNA, 19 nt, Artificial Sequence
  Description of Artificial Sequence: Synthetic oligonucleotide
  Sense strand starting at position 550 of SEQ ID NO: 1884788
cuuugugaucaccaggauc

SEQ ID NO: 2292139 - RNA, 19 nt, Artificial Sequence
  Description of Artificial Sequence: Synthetic oligonucleotide
  Antisense strand to SEQ ID NO: 2292138
gauccuggugaucacaaag

SEQ ID NO: 2292140 - RNA, 19 nt, Artificial Sequence
  Description of Artificial Sequence: Synthetic oligonucleotide
  Sense strand starting at position 552 of SEQ ID NO: 1884788
uugugaucaccaggaucau

SEQ ID NO: 2292141 - RNA, 19 nt, Artificial Sequence
  Description of Artificial Sequence: Synthetic oligonucleotide
  Antisense strand to SEQ ID NO: 2292140
augauccuggugaucacaa

SEQ ID NO: 2292142 - RNA, 19 nt, Artificial Sequence
  Description of Artificial Sequence: Synthetic oligonucleotide
  Sense strand starting at position 603 of SEQ ID NO: 1884788
gcuuaaguuagguguuuaa

SEQ ID NO: 2292143 - RNA, 19 nt, Artificial Sequence
  Description of Artificial Sequence: Synthetic oligonucleotide
  Antisense strand to SEQ ID NO: 2292142
uuaaacaccuaacuuaagc

SEQ ID NO: 2292144 - RNA, 19 nt, Artificial Sequence
  Description of Artificial Sequence: Synthetic oligonucleotide
  Sense strand starting at position 606 of SEQ ID NO: 1884788
uaaguuagguguuuaaaga

SEQ ID NO: 2292145 - RNA, 19 nt, Artificial Sequence
  Description of Artificial Sequence: Synthetic oligonucleotide
  Antisense strand to SEQ ID NO: 2292144
ucuuuaaacaccuaacuua

SEQ ID NO: 2292146 - RNA, 19 nt, Artificial Sequence
  Description of Artificial Sequence: Synthetic oligonucleotide
  Sense strand starting at position 706 of SEQ ID NO: 1884788
caucguguggaagacagau

SEQ ID NO: 2292147 - RNA, 19 nt, Artificial Sequence
  Description of Artificial Sequence: Synthetic oligonucleotide
  Antisense strand to SEQ ID NO: 2292146
aucugucuuccacacgaug

SEQ ID NO: 2292148 - RNA, 19 nt, Artificial Sequence
  Description of Artificial Sequence: Synthetic oligonucleotide
  Sense strand starting at position 935 of SEQ ID NO: 1884788
ugaagaacaguuugugugu

SEQ ID NO: 2292149 - RNA, 19 nt, Artificial Sequence
  Description of Artificial Sequence: Synthetic oligonucleotide
  Antisense strand to SEQ ID NO: 2292148
acacacaaacuguucuuca

SEQ ID NO: 2292150 - RNA, 19 nt, Artificial Sequence
  Description of Artificial Sequence: Synthetic oligonucleotide
  Sense strand starting at position 1030 of SEQ ID NO: 1884788
cguaauugggccuaugaaa

SEQ ID NO: 2292151 - RNA, 19 nt, Artificial Sequence
  Description of Artificial Sequence: Synthetic oligonucleotide
  Antisense strand to SEQ ID NO: 2292150
uuucauaggcccaauuacg

SEQ ID NO: 2292152 - RNA, 19 nt, Artificial Sequence
  Description of Artificial Sequence: Synthetic oligonucleotide
  Sense strand starting at position 1102 of SEQ ID NO: 1884788
ccagaaauaugggagacau

SEQ ID NO: 2292153 - RNA, 19 nt, Artificial Sequence
  Description of Artificial Sequence: Synthetic oligonucleotide
  Antisense strand to SEQ ID NO: 2292152
augucucccauauuucugg

SEQ ID NO: 2292154 - RNA, 19 nt, Artificial Sequence
  Description of Artificial Sequence: Synthetic oligonucleotide
  Sense strand starting at position 1626 of SEQ ID NO: 1884788
ggccgaucccgagaaagga

SEQ ID NO: 2292155 - RNA, 19 nt, Artificial Sequence
  Description of Artificial Sequence: Synthetic oligonucleotide
  Antisense strand to SEQ ID NO: 2292154
uccuuucucgggaucggcc

SEQ ID NO: 2292156 - RNA, 19 nt, Artificial Sequence
  Description of Artificial Sequence: Synthetic oligonucleotide
  Sense strand starting at position 2054 of SEQ ID NO: 1884788
gggaguuguaggcgguaac

SEQ ID NO: 2292157 - RNA, 19 nt, Artificial Sequence
  Description of Artificial Sequence: Synthetic oligonucleotide
  Antisense strand to SEQ ID NO: 2292156
guuaccgccuacaacuccc

SEQ ID NO: 2292158 - RNA, 19 nt, Artificial Sequence
  Description of Artificial Sequence: Synthetic oligonucleotide
  Sense strand starting at position 2055 of SEQ ID NO: 1884788
ggaguuguaggcgguaacu

SEQ ID NO: 2292159 - RNA, 19 nt, Artificial Sequence
  Description of Artificial Sequence: Synthetic oligonucleotide
  Antisense strand to SEQ ID NO: 2292158
aguuaccgccuacaacucc

SEQ ID NO: 2292160 - RNA, 19 nt, Artificial Sequence
  Description of Artificial Sequence: Synthetic oligonucleotide
  Sense strand starting at position 2179 of SEQ ID NO: 1884788
cgaauucuccuccaaagcu

SEQ ID NO: 2292161 - RNA, 19 nt, Artificial Sequence
  Description of Artificial Sequence: Synthetic oligonucleotide
  Antisense strand to SEQ ID NO: 2292160
agcuuuggaggagaauucg

SEQ ID NO: 2292162 - RNA, 19 nt, Artificial Sequence
  Description of Artificial Sequence: Synthetic oligonucleotide
  Sense strand starting at position 2323 of SEQ ID NO: 1884788
gcaauaucuugaguuaucu

SEQ ID NO: 2292163 - RNA, 19 nt, Artificial Sequence
  Description of Artificial Sequence: Synthetic oligonucleotide
  Antisense strand to SEQ ID NO: 2292162
agauaacucaagauauugc

SEQ ID NO: 2292164 - RNA, 19 nt, Artificial Sequence
  Description of Artificial Sequence: Synthetic oligonucleotide
  Sense strand starting at position 2332 of SEQ ID NO: 1884788
ugaguuaucuacuuauaug

SEQ ID NO: 2292165 - RNA, 19 nt, Artificial Sequence
  Description of Artificial Sequence: Synthetic oligonucleotide
  Antisense strand to SEQ ID NO: 2292164
cauauaaguagauaacuca

SEQ ID NO: 2292166 - RNA, 19 nt, Artificial Sequence
  Description of Artificial Sequence: Synthetic oligonucleotide
  Sense strand starting at position 2350 of SEQ ID NO: 1884788
gagggagugcuuugagugu

SEQ ID NO: 2292167 - RNA, 19 nt, Artificial Sequence
  Description of Artificial Sequence: Synthetic oligonucleotide
  Antisense strand to SEQ ID NO: 2292166
acacucaaagcacucccuc

SEQ ID NO: 2292168 - RNA, 19 nt, Artificial Sequence
  Description of Artificial Sequence: Synthetic oligonucleotide
  Sense strand starting at position 3210 of SEQ ID NO: 1884788
aguuguaugugauuugcca

SEQ ID NO: 2292169 - RNA, 19 nt, Artificial Sequence
  Description of Artificial Sequence: Synthetic oligonucleotide
  Antisense strand to SEQ ID NO: 2292168
uggcaaaucacauacaacu

SEQ ID NO: 2292170 - RNA, 19 nt, Artificial Sequence
  Description of Artificial Sequence: Synthetic oligonucleotide
  Sense strand starting at position 3212 of SEQ ID NO: 1884788
uuguaugugauuugccaag

SEQ ID NO: 2292171 - RNA, 19 nt, Artificial Sequence
  Description of Artificial Sequence: Synthetic oligonucleotide
  Antisense strand to SEQ ID NO: 2292170
cuuggcaaaucacauacaa

SEQ ID NO: 2292172 - RNA, 19 nt, Artificial Sequence
  Description of Artificial Sequence: Synthetic oligonucleotide
  Sense strand starting at position 3387 of SEQ ID NO: 1884788
ugaauacacuggccucauu

SEQ ID NO: 2292173 - RNA, 19 nt, Artificial Sequence
  Description of Artificial Sequence: Synthetic oligonucleotide
  Antisense strand to SEQ ID NO: 2292172
aaugaggccaguguauuca

SEQ ID NO: 2292174 - RNA, 19 nt, Artificial Sequence
  Description of Artificial Sequence: Synthetic oligonucleotide
  Sense strand starting at position 3492 of SEQ ID NO: 1884788
auaauaucugcucgaaugu

SEQ ID NO: 2292175 - RNA, 19 nt, Artificial Sequence
  Description of Artificial Sequence: Synthetic oligonucleotide
  Antisense strand to SEQ ID NO: 2292174
acauucgagcagauauuau

SEQ ID NO: 2292176 - RNA, 19 nt, Artificial Sequence
  Description of Artificial Sequence: Synthetic oligonucleotide
  Sense strand starting at position 3519 of SEQ ID NO: 1884788
ccgagaucuucccuaacca

SEQ ID NO: 2292177 - RNA, 19 nt, Artificial Sequence
  Description of Artificial Sequence: Synthetic oligonucleotide
  Antisense strand to SEQ ID NO: 2292176
ugguuagggaagaucucgg

SEQ ID NO: 2292178 - RNA, 19 nt, Artificial Sequence
  Description of Artificial Sequence: Synthetic oligonucleotide
  Sense strand starting at position 3520 of SEQ ID NO: 1884788
cgagaucuucccuaaccau

SEQ ID NO: 2292179 - RNA, 19 nt, Artificial Sequence
  Description of Artificial Sequence: Synthetic oligonucleotide
  Antisense strand to SEQ ID NO: 2292178
augguuagggaagaucucg

SEQ ID NO: 2292180 - RNA, 19 nt, Artificial Sequence
  Description of Artificial Sequence: Synthetic oligonucleotide
  Sense strand starting at position 3636 of SEQ ID NO: 1884788
ggcacaaaugccuaaccau

SEQ ID NO: 2292181 - RNA, 19 nt, Artificial Sequence
  Description of Artificial Sequence: Synthetic oligonucleotide
  Antisense strand to SEQ ID NO: 2292180
augguuaggcauuugugcc

SEQ ID NO: 2292182 - RNA, 19 nt, Artificial Sequence
  Description of Artificial Sequence: Synthetic oligonucleotide
  Sense strand starting at position 3731 of SEQ ID NO: 1884788
ugucuugucucacuugacu

SEQ ID NO: 2292183 - RNA, 19 nt, Artificial Sequence
  Description of Artificial Sequence: Synthetic oligonucleotide
  Antisense strand to SEQ ID NO: 2292182
agucaagugagacaagaca

SEQ ID NO: 2292184 - RNA, 19 nt, Artificial Sequence
  Description of Artificial Sequence: Synthetic oligonucleotide
  Sense strand starting at position 3745 of SEQ ID NO: 1884788
ugacuaaauucggugagag

SEQ ID NO: 2292185 - RNA, 19 nt, Artificial Sequence
  Description of Artificial Sequence: Synthetic oligonucleotide
  Antisense strand to SEQ ID NO: 2292184
cucucaccgaauuuaguca

SEQ ID NO: 2292186 - RNA, 19 nt, Artificial Sequence
  Description of Artificial Sequence: Synthetic oligonucleotide
  Sense strand starting at position 3746 of SEQ ID NO: 1884788
gacuaaauucggugagagc

SEQ ID NO: 2292187 - RNA, 19 nt, Artificial Sequence
  Description of Artificial Sequence: Synthetic oligonucleotide
  Antisense strand to SEQ ID NO: 2292186
gcucucaccgaauuuaguc

SEQ ID NO: 2292188 - RNA, 19 nt, Artificial Sequence
  Description of Artificial Sequence: Synthetic oligonucleotide
  Sense strand starting at position 3747 of SEQ ID NO: 1884788
acuaaauucggugagagca

SEQ ID NO: 2292189 - RNA, 19 nt, Artificial Sequence
  Description of Artificial Sequence: Synthetic oligonucleotide
  Antisense strand to SEQ ID NO: 2292188
ugcucucaccgaauuuagu

SEQ ID NO: 2292190 - RNA, 19 nt, Artificial Sequence
  Description of Artificial Sequence: Synthetic oligonucleotide
  Sense strand starting at position 3809 of SEQ ID NO: 1884788
ccuaguaguugacauuuaa

SEQ ID NO: 2292191 - RNA, 19 nt, Artificial Sequence
  Description of Artificial Sequence: Synthetic oligonucleotide
  Antisense strand to SEQ ID NO: 2292190
uuaaaugucaacuacuagg

SEQ ID NO: 2292192 - RNA, 19 nt, Artificial Sequence
  Description of Artificial Sequence: Synthetic oligonucleotide
  Sense strand starting at position 3869 of SEQ ID NO: 1884788
gauuuaaacucacguuagg

SEQ ID NO: 2292193 - RNA, 19 nt, Artificial Sequence
  Description of Artificial Sequence: Synthetic oligonucleotide
  Antisense strand to SEQ ID NO: 2292192
ccuaacgugaguuuaaauc

SEQ ID NO: 2292194 - RNA, 19 nt, Artificial Sequence
  Description of Artificial Sequence: Synthetic oligonucleotide
  Sense strand starting at position 3880 of SEQ ID NO: 1884788
acguuaggcugguuccaaa

SEQ ID NO: 2292195 - RNA, 19 nt, Artificial Sequence
  Description of Artificial Sequence: Synthetic oligonucleotide
  Antisense strand to SEQ ID NO: 2292194
uuuggaaccagccuaacgu

SEQ ID NO: 2292196 - RNA, 19 nt, Artificial Sequence
  Description of Artificial Sequence: Synthetic oligonucleotide
  Sense strand starting at position 3959 of SEQ ID NO: 1884788
ccaucucagcuuuagaagu

SEQ ID NO: 2292197 - RNA, 19 nt, Artificial Sequence
  Description of Artificial Sequence: Synthetic oligonucleotide
  Antisense strand to SEQ ID NO: 2292196
acuucuaaagcugagaugg

SEQ ID NO: 2292198 - RNA, 19 nt, Artificial Sequence
  Description of Artificial Sequence: Synthetic oligonucleotide
  Sense strand starting at position 64 of SEQ ID NO: 1884789
ggcacuguguaucuaguua

SEQ ID NO: 2292199 - RNA, 19 nt, Artificial Sequence
  Description of Artificial Sequence: Synthetic oligonucleotide
  Antisense strand to SEQ ID NO: 2292198
uaacuagauacacagugcc

SEQ ID NO: 2292200 - RNA, 19 nt, Artificial Sequence
  Description of Artificial Sequence: Synthetic oligonucleotide
  Sense strand starting at position 227 of SEQ ID NO: 1884789
uguguaucucgcuaaucua

SEQ ID NO: 2292201 - RNA, 19 nt, Artificial Sequence
  Description of Artificial Sequence: Synthetic oligonucleotide
  Antisense strand to SEQ ID NO: 2292200
uagauuagcgagauacaca

SEQ ID NO: 2292202 - RNA, 19 nt, Artificial Sequence
  Description of Artificial Sequence: Synthetic oligonucleotide
  Sense strand starting at position 429 of SEQ ID NO: 1884789
agcaguaacucacuaggau

SEQ ID NO: 2292203 - RNA, 19 nt, Artificial Sequence
  Description of Artificial Sequence: Synthetic oligonucleotide
  Antisense strand to SEQ ID NO: 2292202
auccuagugaguuacugcu

SEQ ID NO: 2292204 - RNA, 19 nt, Artificial Sequence
  Description of Artificial Sequence: Synthetic oligonucleotide
  Sense strand starting at position 430 of SEQ ID NO: 1884789
gcaguaacucacuaggauu

SEQ ID NO: 2292205 - RNA, 19 nt, Artificial Sequence
  Description of Artificial Sequence: Synthetic oligonucleotide
  Antisense strand to SEQ ID NO: 2292204
aauccuagugaguuacugc

SEQ ID NO: 2292206 - RNA, 19 nt, Artificial Sequence
  Description of Artificial Sequence: Synthetic oligonucleotide
  Sense strand starting at position 699 of SEQ ID NO: 1884789
aucggaacaucugagggaa

SEQ ID NO: 2292207 - RNA, 19 nt, Artificial Sequence
  Description of Artificial Sequence: Synthetic oligonucleotide
  Antisense strand to SEQ ID NO: 2292206
uucccucagauguuccgau

SEQ ID NO: 2292208 - RNA, 19 nt, Artificial Sequence
  Description of Artificial Sequence: Synthetic oligonucleotide
  Sense strand starting at position 769 of SEQ ID NO: 1884789
uucagucuugcguuaguga

SEQ ID NO: 2292209 - RNA, 19 nt, Artificial Sequence
  Description of Artificial Sequence: Synthetic oligonucleotide
  Antisense strand to SEQ ID NO: 2292208
ucacuaacgcaagacugaa

SEQ ID NO: 2292210 - RNA, 19 nt, Artificial Sequence
  Description of Artificial Sequence: Synthetic oligonucleotide
  Sense strand starting at position 831 of SEQ ID NO: 1884789
cuccaagggugcuucuuaa

SEQ ID NO: 2292211 - RNA, 19 nt, Artificial Sequence
  Description of Artificial Sequence: Synthetic oligonucleotide
  Antisense strand to SEQ ID NO: 2292210
uuaagaagcacccuuggag

SEQ ID NO: 2292212 - RNA, 19 nt, Artificial Sequence
  Description of Artificial Sequence: Synthetic oligonucleotide
  Sense strand starting at position 923 of SEQ ID NO: 1884789
cauucuauuccagaggugu

SEQ ID NO: 2292213 - RNA, 19 nt, Artificial Sequence
  Description of Artificial Sequence: Synthetic oligonucleotide
  Antisense strand to SEQ ID NO: 2292212
acaccucuggaauagaaug

SEQ ID NO: 2292214 - RNA, 19 nt, Artificial Sequence
  Description of Artificial Sequence: Synthetic oligonucleotide
  Sense strand starting at position 938 of SEQ ID NO: 1884789
gugucaauuuaccagacaa

SEQ ID NO: 2292215 - RNA, 19 nt, Artificial Sequence
  Description of Artificial Sequence: Synthetic oligonucleotide
  Antisense strand to SEQ ID NO: 2292214
uugucugguaaauugacac

SEQ ID NO: 2292216 - RNA, 19 nt, Artificial Sequence
  Description of Artificial Sequence: Synthetic oligonucleotide
  Sense strand starting at position 1024 of SEQ ID NO: 1884789
gugggccauuuguauacau

SEQ ID NO: 2292217 - RNA, 19 nt, Artificial Sequence
  Description of Artificial Sequence: Synthetic oligonucleotide
  Antisense strand to SEQ ID NO: 2292216
auguauacaaauggcccac

SEQ ID NO: 2292218 - RNA, 19 nt, Artificial Sequence
  Description of Artificial Sequence: Synthetic oligonucleotide
  Sense strand starting at position 1033 of SEQ ID NO: 1884789
uuguauacaucuuuggaga

SEQ ID NO: 2292219 - RNA, 19 nt, Artificial Sequence
  Description of Artificial Sequence: Synthetic oligonucleotide
  Antisense strand to SEQ ID NO: 2292218
ucuccaaagauguauacaa

SEQ ID NO: 2292220 - RNA, 19 nt, Artificial Sequence
  Description of Artificial Sequence: Synthetic oligonucleotide
  Sense strand starting at position 1034 of SEQ ID NO: 1884789
uguauacaucuuuggagaa

SEQ ID NO: 2292221 - RNA, 19 nt, Artificial Sequence
  Description of Artificial Sequence: Synthetic oligonucleotide
  Antisense strand to SEQ ID NO: 2292220
uucuccaaagauguauaca

SEQ ID NO: 2292222 - RNA, 19 nt, Artificial Sequence
  Description of Artificial Sequence: Synthetic oligonucleotide
  Sense strand starting at position 1252 of SEQ ID NO: 1884789
uuucgauaguuuguaacac

SEQ ID NO: 2292223 - RNA, 19 nt, Artificial Sequence
  Description of Artificial Sequence: Synthetic oligonucleotide
  Antisense strand to SEQ ID NO: 2292222
guguuacaaacuaucgaaa

SEQ ID NO: 2292224 - RNA, 19 nt, Artificial Sequence
  Description of Artificial Sequence: Synthetic oligonucleotide
  Sense strand starting at position 1348 of SEQ ID NO: 1884789
cugucauuccaggaaagcu

SEQ ID NO: 2292225 - RNA, 19 nt, Artificial Sequence
  Description of Artificial Sequence: Synthetic oligonucleotide
  Antisense strand to SEQ ID NO: 2292224
agcuuuccuggaaugacag

SEQ ID NO: 2292226 - RNA, 19 nt, Artificial Sequence
  Description of Artificial Sequence: Synthetic oligonucleotide
  Sense strand starting at position 1370 of SEQ ID NO: 1884789
agcauaagaugaucccauu

SEQ ID NO: 2292227 - RNA, 19 nt, Artificial Sequence
  Description of Artificial Sequence: Synthetic oligonucleotide
  Antisense strand to SEQ ID NO: 2292226
aaugggaucaucuuaugcu

SEQ ID NO: 2292228 - RNA, 19 nt, Artificial Sequence
  Description of Artificial Sequence: Synthetic oligonucleotide
  Sense strand starting at position 1373 of SEQ ID NO: 1884789
auaagaugaucccauuggu

SEQ ID NO: 2292229 - RNA, 19 nt, Artificial Sequence
  Description of Artificial Sequence: Synthetic oligonucleotide
  Antisense strand to SEQ ID NO: 2292228
accaaugggaucaucuuau

SEQ ID NO: 2292230 - RNA, 19 nt, Artificial Sequence
  Description of Artificial Sequence: Synthetic oligonucleotide
  Sense strand starting at position 1376 of SEQ ID NO: 1884789
agaugaucccauuggucau

SEQ ID NO: 2292231 - RNA, 19 nt, Artificial Sequence
  Description of Artificial Sequence: Synthetic oligonucleotide
  Antisense strand to SEQ ID NO: 2292230
augaccaaugggaucaucu

SEQ ID NO: 2292232 - RNA, 19 nt, Artificial Sequence
  Description of Artificial Sequence: Synthetic oligonucleotide
  Sense strand starting at position 1482 of SEQ ID NO: 1884789
ugaggugauucguuguccu

SEQ ID NO: 2292233 - RNA, 19 nt, Artificial Sequence
  Description of Artificial Sequence: Synthetic oligonucleotide
  Antisense strand to SEQ ID NO: 2292232
aggacaacgaaucaccuca

SEQ ID NO: 2292234 - RNA, 19 nt, Artificial Sequence
  Description of Artificial Sequence: Synthetic oligonucleotide
  Sense strand starting at position 1590 of SEQ ID NO: 1884789
ucauaaacucgucaucuag

SEQ ID NO: 2292235 - RNA, 19 nt, Artificial Sequence
  Description of Artificial Sequence: Synthetic oligonucleotide
  Antisense strand to SEQ ID NO: 2292234
cuagaugacgaguuuauga

SEQ ID NO: 2292236 - RNA, 19 nt, Artificial Sequence
  Description of Artificial Sequence: Synthetic oligonucleotide
  Sense strand starting at position 1666 of SEQ ID NO: 1884789
aggugucguccguuucaaa

SEQ ID NO: 2292237 - RNA, 19 nt, Artificial Sequence
  Description of Artificial Sequence: Synthetic oligonucleotide
  Antisense strand to SEQ ID NO: 2292236
uuugaaacggacgacaccu

SEQ ID NO: 2292238 - RNA, 19 nt, Artificial Sequence
  Description of Artificial Sequence: Synthetic oligonucleotide
  Sense strand starting at position 1667 of SEQ ID NO: 1884789
ggugucguccguuucaaag

SEQ ID NO: 2292239 - RNA, 19 nt, Artificial Sequence
  Description of Artificial Sequence: Synthetic oligonucleotide
  Antisense strand to SEQ ID NO: 2292238
cuuugaaacggacgacacc

SEQ ID NO: 2292240 - RNA, 19 nt, Artificial Sequence
  Description of Artificial Sequence: Synthetic oligonucleotide
  Sense strand starting at position 1783 of SEQ ID NO: 1884789
agaacaucggcugauguuu

SEQ ID NO: 2292241 - RNA, 19 nt, Artificial Sequence
  Description of Artificial Sequence: Synthetic oligonucleotide
  Antisense strand to SEQ ID NO: 2292240
aaacaucagccgauguucu

SEQ ID NO: 2292242 - RNA, 19 nt, Artificial Sequence
  Description of Artificial Sequence: Synthetic oligonucleotide
  Sense strand starting at position 1797 of SEQ ID NO: 1884789
uguuucaucuggucaggga

SEQ ID NO: 2292243 - RNA, 19 nt, Artificial Sequence
  Description of Artificial Sequence: Synthetic oligonucleotide
  Antisense strand to SEQ ID NO: 2292242
ucccugaccagaugaaaca

SEQ ID NO: 2292244 - RNA, 19 nt, Artificial Sequence
  Description of Artificial Sequence: Synthetic oligonucleotide
  Sense strand starting at position 1798 of SEQ ID NO: 1884789
guuucaucuggucagggaa

SEQ ID NO: 2292245 - RNA, 19 nt, Artificial Sequence
  Description of Artificial Sequence: Synthetic oligonucleotide
  Antisense strand to SEQ ID NO: 2292244
uucccugaccagaugaaac

SEQ ID NO: 2292246 - RNA, 19 nt, Artificial Sequence
  Description of Artificial Sequence: Synthetic oligonucleotide
  Sense strand starting at position 2449 of SEQ ID NO: 1884789
ggauuaucuuacguagaua

SEQ ID NO: 2292247 - RNA, 19 nt, Artificial Sequence
  Description of Artificial Sequence: Synthetic oligonucleotide
  Antisense strand to SEQ ID NO: 2292246
uaucuacguaagauaaucc

SEQ ID NO: 2292248 - RNA, 19 nt, Artificial Sequence
  Description of Artificial Sequence: Synthetic oligonucleotide
  Sense strand starting at position 2452 of SEQ ID NO: 1884789
uuaucuuacguagauaaga

SEQ ID NO: 2292249 - RNA, 19 nt, Artificial Sequence
  Description of Artificial Sequence: Synthetic oligonucleotide
  Antisense strand to SEQ ID NO: 2292248
ucuuaucuacguaagauaa

SEQ ID NO: 2292250 - RNA, 19 nt, Artificial Sequence
  Description of Artificial Sequence: Synthetic oligonucleotide
  Sense strand starting at position 2591 of SEQ ID NO: 1884789
ccgauaaaguuagcugcau

SEQ ID NO: 2292251 - RNA, 19 nt, Artificial Sequence
  Description of Artificial Sequence: Synthetic oligonucleotide
  Antisense strand to SEQ ID NO: 2292250
augcagcuaacuuuaucgg

SEQ ID NO: 2292252 - RNA, 19 nt, Artificial Sequence
  Description of Artificial Sequence: Synthetic oligonucleotide
  Sense strand starting at position 2595 of SEQ ID NO: 1884789
uaaaguuagcugcaugagu

SEQ ID NO: 2292253 - RNA, 19 nt, Artificial Sequence
  Description of Artificial Sequence: Synthetic oligonucleotide
  Antisense strand to SEQ ID NO: 2292252
acucaugcagcuaacuuua

SEQ ID NO: 2292254 - RNA, 19 nt, Artificial Sequence
  Description of Artificial Sequence: Synthetic oligonucleotide
  Sense strand starting at position 2673 of SEQ ID NO: 1884789
gagugcacuugaccagauu

SEQ ID NO: 2292255 - RNA, 19 nt, Artificial Sequence
  Description of Artificial Sequence: Synthetic oligonucleotide
  Antisense strand to SEQ ID NO: 2292254
aaucuggucaagugcacuc

SEQ ID NO: 2292256 - RNA, 19 nt, Artificial Sequence
  Description of Artificial Sequence: Synthetic oligonucleotide
  Sense strand starting at position 2676 of SEQ ID NO: 1884789
ugcacuugaccagauuguu

SEQ ID NO: 2292257 - RNA, 19 nt, Artificial Sequence
  Description of Artificial Sequence: Synthetic oligonucleotide
  Antisense strand to SEQ ID NO: 2292256
aacaaucuggucaagugca

SEQ ID NO: 2292258 - RNA, 19 nt, Artificial Sequence
  Description of Artificial Sequence: Synthetic oligonucleotide
  Sense strand starting at position 2955 of SEQ ID NO: 1884789
ggccauacgguagauagua

SEQ ID NO: 2292259 - RNA, 19 nt, Artificial Sequence
  Description of Artificial Sequence: Synthetic oligonucleotide
  Antisense strand to SEQ ID NO: 2292258
uacuaucuaccguauggcc

SEQ ID NO: 2292260 - RNA, 19 nt, Artificial Sequence
  Description of Artificial Sequence: Synthetic oligonucleotide
  Sense strand starting at position 3127 of SEQ ID NO: 1884789
gucuguacucaguaaugag

SEQ ID NO: 2292261 - RNA, 19 nt, Artificial Sequence
  Description of Artificial Sequence: Synthetic oligonucleotide
  Antisense strand to SEQ ID NO: 2292260
cucauuacugaguacagac

SEQ ID NO: 2292262 - RNA, 19 nt, Artificial Sequence
  Description of Artificial Sequence: Synthetic oligonucleotide
  Sense strand starting at position 3134 of SEQ ID NO: 1884789
cucaguaaugagugauaau

SEQ ID NO: 2292263 - RNA, 19 nt, Artificial Sequence
  Description of Artificial Sequence: Synthetic oligonucleotide
  Antisense strand to SEQ ID NO: 2292262
auuaucacucauuacugag

SEQ ID NO: 2292264 - RNA, 19 nt, Artificial Sequence
  Description of Artificial Sequence: Synthetic oligonucleotide
  Sense strand starting at position 3311 of SEQ ID NO: 1884789
ugaacaagucacugcaaau

SEQ ID NO: 2292265 - RNA, 19 nt, Artificial Sequence
  Description of Artificial Sequence: Synthetic oligonucleotide
  Antisense strand to SEQ ID NO: 2292264
auuugcagugacuuguuca

SEQ ID NO: 2292266 - RNA, 19 nt, Artificial Sequence
  Description of Artificial Sequence: Synthetic oligonucleotide
  Sense strand starting at position 3441 of SEQ ID NO: 1884789
gugaaauaauacuuacguu

SEQ ID NO: 2292267 - RNA, 19 nt, Artificial Sequence
  Description of Artificial Sequence: Synthetic oligonucleotide
  Antisense strand to SEQ ID NO: 2292266
aacguaaguauuauuucac

SEQ ID NO: 2292268 - RNA, 19 nt, Artificial Sequence
  Description of Artificial Sequence: Synthetic oligonucleotide
  Sense strand starting at position 3451 of SEQ ID NO: 1884789
acuuacguuucuucuguau

SEQ ID NO: 2292269 - RNA, 19 nt, Artificial Sequence
  Description of Artificial Sequence: Synthetic oligonucleotide
  Antisense strand to SEQ ID NO: 2292268
auacagaagaaacguaagu

SEQ ID NO: 2292270 - RNA, 19 nt, Artificial Sequence
  Description of Artificial Sequence: Synthetic oligonucleotide
  Sense strand starting at position 3483 of SEQ ID NO: 1884789
cauucuagaguuugguaac

SEQ ID NO: 2292271 - RNA, 19 nt, Artificial Sequence
  Description of Artificial Sequence: Synthetic oligonucleotide
  Antisense strand to SEQ ID NO: 2292270
guuaccaaacucuagaaug

SEQ ID NO: 2292272 - RNA, 19 nt, Artificial Sequence
  Description of Artificial Sequence: Synthetic oligonucleotide
  Sense strand starting at position 3520 of SEQ ID NO: 1884789
cccacuuauccugguggga

SEQ ID NO: 2292273 - RNA, 19 nt, Artificial Sequence
  Description of Artificial Sequence: Synthetic oligonucleotide
  Antisense strand to SEQ ID NO: 2292272
ucccaccaggauaaguggg

SEQ ID NO: 2292274 - RNA, 19 nt, Artificial Sequence
  Description of Artificial Sequence: Synthetic oligonucleotide
  Sense strand starting at position 3872 of SEQ ID NO: 1884789
augccuaugaggugucgaa

SEQ ID NO: 2292275 - RNA, 19 nt, Artificial Sequence
  Description of Artificial Sequence: Synthetic oligonucleotide
  Antisense strand to SEQ ID NO: 2292274
uucgacaccucauaggcau

SEQ ID NO: 2292276 - RNA, 19 nt, Artificial Sequence
  Description of Artificial Sequence: Synthetic oligonucleotide
  Sense strand starting at position 3956 of SEQ ID NO: 1884789
cguauauuccagugaggaa

SEQ ID NO: 2292277 - RNA, 19 nt, Artificial Sequence
  Description of Artificial Sequence: Synthetic oligonucleotide
  Antisense strand to SEQ ID NO: 2292276
uuccucacuggaauauacg

SEQ ID NO: 2292278 - RNA, 19 nt, Artificial Sequence
  Description of Artificial Sequence: Synthetic oligonucleotide
  Sense strand starting at position 107 of SEQ ID NO: 1884790
agaggaaccuugucugucu

SEQ ID NO: 2292279 - RNA, 19 nt, Artificial Sequence
  Description of Artificial Sequence: Synthetic oligonucleotide
  Antisense strand to SEQ ID NO: 2292278
agacagacaagguuccucu

SEQ ID NO: 2292280 - RNA, 19 nt, Artificial Sequence
  Description of Artificial Sequence: Synthetic oligonucleotide
  Sense strand starting at position 108 of SEQ ID NO: 1884790
gaggaaccuugucugucuu

SEQ ID NO: 2292281 - RNA, 19 nt, Artificial Sequence
  Description of Artificial Sequence: Synthetic oligonucleotide
  Antisense strand to SEQ ID NO: 2292280
aagacagacaagguuccuc

SEQ ID NO: 2292282 - RNA, 19 nt, Artificial Sequence
  Description of Artificial Sequence: Synthetic oligonucleotide
  Sense strand starting at position 265 of SEQ ID NO: 1884790
gaggucccaugacuugaau

SEQ ID NO: 2292283 - RNA, 19 nt, Artificial Sequence
  Description of Artificial Sequence: Synthetic oligonucleotide
  Antisense strand to SEQ ID NO: 2292282
auucaagucaugggaccuc

SEQ ID NO: 2292284 - RNA, 19 nt, Artificial Sequence
  Description of Artificial Sequence: Synthetic oligonucleotide
  Sense strand starting at position 298 of SEQ ID NO: 1884790
uggccaguucuuuaauggu

SEQ ID NO: 2292285 - RNA, 19 nt, Artificial Sequence
  Description of Artificial Sequence: Synthetic oligonucleotide
  Antisense strand to SEQ ID NO: 2292284
accauuaaagaacuggcca

SEQ ID NO: 2292286 - RNA, 19 nt, Artificial Sequence
  Description of Artificial Sequence: Synthetic oligonucleotide
  Sense strand starting at position 437 of SEQ ID NO: 1884790
agugcuugaacucaggauu

SEQ ID NO: 2292287 - RNA, 19 nt, Artificial Sequence
  Description of Artificial Sequence: Synthetic oligonucleotide
  Antisense strand to SEQ ID NO: 2292286
aauccugaguucaagcacu

SEQ ID NO: 2292288 - RNA, 19 nt, Artificial Sequence
  Description of Artificial Sequence: Synthetic oligonucleotide
  Sense strand starting at position 595 of SEQ ID NO: 1884790
uguuaaguauuaucucacu

SEQ ID NO: 2292289 - RNA, 19 nt, Artificial Sequence
  Description of Artificial Sequence: Synthetic oligonucleotide
  Antisense strand to SEQ ID NO: 2292288
agugagauaauacuuaaca

SEQ ID NO: 2292290 - RNA, 19 nt, Artificial Sequence
  Description of Artificial Sequence: Synthetic oligonucleotide
  Sense strand starting at position 623 of SEQ ID NO: 1884790
gugguaauuauggaucuca

SEQ ID NO: 2292291 - RNA, 19 nt, Artificial Sequence
  Description of Artificial Sequence: Synthetic oligonucleotide
  Antisense strand to SEQ ID NO: 2292290
ugagauccauaauuaccac

SEQ ID NO: 2292292 - RNA, 19 nt, Artificial Sequence
  Description of Artificial Sequence: Synthetic oligonucleotide
  Sense strand starting at position 633 of SEQ ID NO: 1884790
uggaucucauuauuccaga

SEQ ID NO: 2292293 - RNA, 19 nt, Artificial Sequence
  Description of Artificial Sequence: Synthetic oligonucleotide
  Antisense strand to SEQ ID NO: 2292292
ucuggaauaaugagaucca

SEQ ID NO: 2292294 - RNA, 19 nt, Artificial Sequence
  Description of Artificial Sequence: Synthetic oligonucleotide
  Sense strand starting at position 638 of SEQ ID NO: 1884790
cucauuauuccagaagcag

SEQ ID NO: 2292295 - RNA, 19 nt, Artificial Sequence
  Description of Artificial Sequence: Synthetic oligonucleotide
  Antisense strand to SEQ ID NO: 2292294
cugcuucuggaauaaugag

SEQ ID NO: 2292296 - RNA, 19 nt, Artificial Sequence
  Description of Artificial Sequence: Synthetic oligonucleotide
  Sense strand starting at position 661 of SEQ ID NO: 1884790
ggcuaaaucauagagguuu

SEQ ID NO: 2292297 - RNA, 19 nt, Artificial Sequence
  Description of Artificial Sequence: Synthetic oligonucleotide
  Antisense strand to SEQ ID NO: 2292296
aaaccucuaugauuuagcc

SEQ ID NO: 2292298 - RNA, 19 nt, Artificial Sequence
  Description of Artificial Sequence: Synthetic oligonucleotide
  Sense strand starting at position 831 of SEQ ID NO: 1884790
cgagguuagaguugugaaa

SEQ ID NO: 2292299 - RNA, 19 nt, Artificial Sequence
  Description of Artificial Sequence: Synthetic oligonucleotide
  Antisense strand to SEQ ID NO: 2292298
uuucacaacucuaaccucg

SEQ ID NO: 2292300 - RNA, 19 nt, Artificial Sequence
  Description of Artificial Sequence: Synthetic oligonucleotide
  Sense strand starting at position 857 of SEQ ID NO: 1884790
aggaacauauuaguucuua

SEQ ID NO: 2292301 - RNA, 19 nt, Artificial Sequence
  Description of Artificial Sequence: Synthetic oligonucleotide
  Antisense strand to SEQ ID NO: 2292300
uaagaacuaauauguuccu

SEQ ID NO: 2292302 - RNA, 19 nt, Artificial Sequence
  Description of Artificial Sequence: Synthetic oligonucleotide
  Sense strand starting at position 858 of SEQ ID NO: 1884790
ggaacauauuaguucuuaa

SEQ ID NO: 2292303 - RNA, 19 nt, Artificial Sequence
  Description of Artificial Sequence: Synthetic oligonucleotide
  Antisense strand to SEQ ID NO: 2292302
uuaagaacuaauauguucc

SEQ ID NO: 2292304 - RNA, 19 nt, Artificial Sequence
  Description of Artificial Sequence: Synthetic oligonucleotide
  Sense strand starting at position 1218 of SEQ ID NO: 1884790
gauggccuggcccauaaua

SEQ ID NO: 2292305 - RNA, 19 nt, Artificial Sequence
  Description of Artificial Sequence: Synthetic oligonucleotide
  Antisense strand to SEQ ID NO: 2292304
uauuaugggccaggccauc

SEQ ID NO: 2292306 - RNA, 19 nt, Artificial Sequence
  Description of Artificial Sequence: Synthetic oligonucleotide
  Sense strand starting at position 1346 of SEQ ID NO: 1884790
ugacacuuccgucaacaau

SEQ ID NO: 2292307 - RNA, 19 nt, Artificial Sequence
  Description of Artificial Sequence: Synthetic oligonucleotide
  Antisense strand to SEQ ID NO: 2292306
auuguugacggaaguguca

SEQ ID NO: 2292308 - RNA, 19 nt, Artificial Sequence
  Description of Artificial Sequence: Synthetic oligonucleotide
  Sense strand starting at position 1357 of SEQ ID NO: 1884790
ucaacaaucuggucaacug

SEQ ID NO: 2292309 - RNA, 19 nt, Artificial Sequence
  Description of Artificial Sequence: Synthetic oligonucleotide
  Antisense strand to SEQ ID NO: 2292308
caguugaccagauuguuga

SEQ ID NO: 2292310 - RNA, 19 nt, Artificial Sequence
  Description of Artificial Sequence: Synthetic oligonucleotide
  Sense strand starting at position 1539 of SEQ ID NO: 1884790
guaagagacagguggguua

SEQ ID NO: 2292311 - RNA, 19 nt, Artificial Sequence
  Description of Artificial Sequence: Synthetic oligonucleotide
  Antisense strand to SEQ ID NO: 2292310
uaacccaccugucucuuac

SEQ ID NO: 2292312 - RNA, 19 nt, Artificial Sequence
  Description of Artificial Sequence: Synthetic oligonucleotide
  Sense strand starting at position 1931 of SEQ ID NO: 1884790
ccuucuucgccggcagaau

SEQ ID NO: 2292313 - RNA, 19 nt, Artificial Sequence
  Description of Artificial Sequence: Synthetic oligonucleotide
  Antisense strand to SEQ ID NO: 2292312
auucugccggcgaagaagg

SEQ ID NO: 2292314 - RNA, 19 nt, Artificial Sequence
  Description of Artificial Sequence: Synthetic oligonucleotide
  Sense strand starting at position 1944 of SEQ ID NO: 1884790
cagaauugcuacgcugaaa

SEQ ID NO: 2292315 - RNA, 19 nt, Artificial Sequence
  Description of Artificial Sequence: Synthetic oligonucleotide
  Antisense strand to SEQ ID NO: 2292314
uuucagcguagcaauucug

SEQ ID NO: 2292316 - RNA, 19 nt, Artificial Sequence
  Description of Artificial Sequence: Synthetic oligonucleotide
  Sense strand starting at position 1982 of SEQ ID NO: 1884790
ggcaaacgccacugaauuu

SEQ ID NO: 2292317 - RNA, 19 nt, Artificial Sequence
  Description of Artificial Sequence: Synthetic oligonucleotide
  Antisense strand to SEQ ID NO: 2292316
aaauucaguggcguuugcc

SEQ ID NO: 2292318 - RNA, 19 nt, Artificial Sequence
  Description of Artificial Sequence: Synthetic oligonucleotide
  Sense strand starting at position 2220 of SEQ ID NO: 1884790
guacuaaucccuggauggu

SEQ ID NO: 2292319 - RNA, 19 nt, Artificial Sequence
  Description of Artificial Sequence: Synthetic oligonucleotide
  Antisense strand to SEQ ID NO: 2292318
accauccagggauuaguac

SEQ ID NO: 2292320 - RNA, 19 nt, Artificial Sequence
  Description of Artificial Sequence: Synthetic oligonucleotide
  Sense strand starting at position 2221 of SEQ ID NO: 1884790
uacuaaucccuggaugguu

SEQ ID NO: 2292321 - RNA, 19 nt, Artificial Sequence
  Description of Artificial Sequence: Synthetic oligonucleotide
  Antisense strand to SEQ ID NO: 2292320
aaccauccagggauuagua

SEQ ID NO: 2292322 - RNA, 19 nt, Artificial Sequence
  Description of Artificial Sequence: Synthetic oligonucleotide
  Sense strand starting at position 2736 of SEQ ID NO: 1884790
gggagagucgcugggacuu

SEQ ID NO: 2292323 - RNA, 19 nt, Artificial Sequence
  Description of Artificial Sequence: Synthetic oligonucleotide
  Antisense strand to SEQ ID NO: 2292322
aagucccagcgacucuccc

SEQ ID NO: 2292324 - RNA, 19 nt, Artificial Sequence
  Description of Artificial Sequence: Synthetic oligonucleotide
  Sense strand starting at position 2813 of SEQ ID NO: 1884790
ugggaaauuugcgaaaggu

SEQ ID NO: 2292325 - RNA, 19 nt, Artificial Sequence
  Description of Artificial Sequence: Synthetic oligonucleotide
  Antisense strand to SEQ ID NO: 2292324
accuuucgcaaauuuccca

SEQ ID NO: 2292326 - RNA, 19 nt, Artificial Sequence
  Description of Artificial Sequence: Synthetic oligonucleotide
  Sense strand starting at position 2877 of SEQ ID NO: 1884790
uuuggagagggcgaguaau

SEQ ID NO: 2292327 - RNA, 19 nt, Artificial Sequence
  Description of Artificial Sequence: Synthetic oligonucleotide
  Antisense strand to SEQ ID NO: 2292326
auuacucgcccucuccaaa

SEQ ID NO: 2292328 - RNA, 19 nt, Artificial Sequence
  Description of Artificial Sequence: Synthetic oligonucleotide
  Sense strand starting at position 2910 of SEQ ID NO: 1884790
ugggauguggcccagcaaa

SEQ ID NO: 2292329 - RNA, 19 nt, Artificial Sequence
  Description of Artificial Sequence: Synthetic oligonucleotide
  Antisense strand to SEQ ID NO: 2292328
uuugcugggccacauccca

SEQ ID NO: 2292330 - RNA, 19 nt, Artificial Sequence
  Description of Artificial Sequence: Synthetic oligonucleotide
  Sense strand starting at position 2940 of SEQ ID NO: 1884790
gucuuuggagucguaguuu

SEQ ID NO: 2292331 - RNA, 19 nt, Artificial Sequence
  Description of Artificial Sequence: Synthetic oligonucleotide
  Antisense strand to SEQ ID NO: 2292330
aaacuacgacuccaaagac

SEQ ID NO: 2292332 - RNA, 19 nt, Artificial Sequence
  Description of Artificial Sequence: Synthetic oligonucleotide
  Sense strand starting at position 2965 of SEQ ID NO: 1884790
uagaauuaaugggcagagu

SEQ ID NO: 2292333 - RNA, 19 nt, Artificial Sequence
  Description of Artificial Sequence: Synthetic oligonucleotide
  Antisense strand to SEQ ID NO: 2292332
acucugcccauuaauucua

SEQ ID NO: 2292334 - RNA, 19 nt, Artificial Sequence
  Description of Artificial Sequence: Synthetic oligonucleotide
  Sense strand starting at position 3085 of SEQ ID NO: 1884790
aaauaacuguugucuggua

SEQ ID NO: 2292335 - RNA, 19 nt, Artificial Sequence
  Description of Artificial Sequence: Synthetic oligonucleotide
  Antisense strand to SEQ ID NO: 2292334
uaccagacaacaguuauuu

SEQ ID NO: 2292336 - RNA, 19 nt, Artificial Sequence
  Description of Artificial Sequence: Synthetic oligonucleotide
  Sense strand starting at position 3086 of SEQ ID NO: 1884790
aauaacuguugucugguaa

SEQ ID NO: 2292337 - RNA, 19 nt, Artificial Sequence
  Description of Artificial Sequence: Synthetic oligonucleotide
  Antisense strand to SEQ ID NO: 2292336
uuaccagacaacaguuauu

SEQ ID NO: 2292338 - RNA, 19 nt, Artificial Sequence
  Description of Artificial Sequence: Synthetic oligonucleotide
  Sense strand starting at position 3087 of SEQ ID NO: 1884790
auaacuguugucugguaaa

SEQ ID NO: 2292339 - RNA, 19 nt, Artificial Sequence
  Description of Artificial Sequence: Synthetic oligonucleotide
  Antisense strand to SEQ ID NO: 2292338
uuuaccagacaacaguuau

SEQ ID NO: 2292340 - RNA, 19 nt, Artificial Sequence
  Description of Artificial Sequence: Synthetic oligonucleotide
  Sense strand starting at position 3174 of SEQ ID NO: 1884790
acacuccuagggugugaau

SEQ ID NO: 2292341 - RNA, 19 nt, Artificial Sequence
  Description of Artificial Sequence: Synthetic oligonucleotide
  Antisense strand to SEQ ID NO: 2292340
auucacacccuaggagugu

SEQ ID NO: 2292342 - RNA, 19 nt, Artificial Sequence
  Description of Artificial Sequence: Synthetic oligonucleotide
  Sense strand starting at position 3176 of SEQ ID NO: 1884790
acuccuagggugugaauca

SEQ ID NO: 2292343 - RNA, 19 nt, Artificial Sequence
  Description of Artificial Sequence: Synthetic oligonucleotide
  Antisense strand to SEQ ID NO: 2292342
ugauucacacccuaggagu

SEQ ID NO: 2292344 - RNA, 19 nt, Artificial Sequence
  Description of Artificial Sequence: Synthetic oligonucleotide
  Sense strand starting at position 3183 of SEQ ID NO: 1884790
gggugugaaucauccaguu

SEQ ID NO: 2292345 - RNA, 19 nt, Artificial Sequence
  Description of Artificial Sequence: Synthetic oligonucleotide
  Antisense strand to SEQ ID NO: 2292344
aacuggaugauucacaccc

SEQ ID NO: 2292346 - RNA, 19 nt, Artificial Sequence
  Description of Artificial Sequence: Synthetic oligonucleotide
  Sense strand starting at position 3185 of SEQ ID NO: 1884790
gugugaaucauccaguuua

SEQ ID NO: 2292347 - RNA, 19 nt, Artificial Sequence
  Description of Artificial Sequence: Synthetic oligonucleotide
  Antisense strand to SEQ ID NO: 2292346
uaaacuggaugauucacac

SEQ ID NO: 2292348 - RNA, 19 nt, Artificial Sequence
  Description of Artificial Sequence: Synthetic oligonucleotide
  Sense strand starting at position 3583 of SEQ ID NO: 1884790
gcuucuauacucugguaag

SEQ ID NO: 2292349 - RNA, 19 nt, Artificial Sequence
  Description of Artificial Sequence: Synthetic oligonucleotide
  Antisense strand to SEQ ID NO: 2292348
cuuaccagaguauagaagc

SEQ ID NO: 2292350 - RNA, 19 nt, Artificial Sequence
  Description of Artificial Sequence: Synthetic oligonucleotide
  Sense strand starting at position 3600 of SEQ ID NO: 1884790
agacaaucccagugaguua

SEQ ID NO: 2292351 - RNA, 19 nt, Artificial Sequence
  Description of Artificial Sequence: Synthetic oligonucleotide
  Antisense strand to SEQ ID NO: 2292350
uaacucacugggauugucu

SEQ ID NO: 2292352 - RNA, 19 nt, Artificial Sequence
  Description of Artificial Sequence: Synthetic oligonucleotide
  Sense strand starting at position 3819 of SEQ ID NO: 1884790
ccaggucaccgcuagauua

SEQ ID NO: 2292353 - RNA, 19 nt, Artificial Sequence
  Description of Artificial Sequence: Synthetic oligonucleotide
  Antisense strand to SEQ ID NO: 2292352
uaaucuagcggugaccugg

SEQ ID NO: 2292354 - RNA, 19 nt, Artificial Sequence
  Description of Artificial Sequence: Synthetic oligonucleotide
  Sense strand starting at position 3964 of SEQ ID NO: 1884790
agacaaagguucuccaagu

SEQ ID NO: 2292355 - RNA, 19 nt, Artificial Sequence
  Description of Artificial Sequence: Synthetic oligonucleotide
  Antisense strand to SEQ ID NO: 2292354
acuuggagaaccuuugucu

SEQ ID NO: 2292356 - RNA, 19 nt, Artificial Sequence
  Description of Artificial Sequence: Synthetic oligonucleotide
  Sense strand starting at position 3965 of SEQ ID NO: 1884790
gacaaagguucuccaaguc

SEQ ID NO: 2292357 - RNA, 19 nt, Artificial Sequence
  Description of Artificial Sequence: Synthetic oligonucleotide
  Antisense strand to SEQ ID NO: 2292356
gacuuggagaaccuuuguc

SEQ ID NO: 2292358 - RNA, 19 nt, Artificial Sequence
  Description of Artificial Sequence: Synthetic oligonucleotide
  Sense strand starting at position 87 of SEQ ID NO: 1884791
guugcuuuagccuccgauu

SEQ ID NO: 2292359 - RNA, 19 nt, Artificial Sequence
  Description of Artificial Sequence: Synthetic oligonucleotide
  Antisense strand to SEQ ID NO: 2292358
aaucggaggcuaaagcaac

SEQ ID NO: 2292360 - RNA, 19 nt, Artificial Sequence
  Description of Artificial Sequence: Synthetic oligonucleotide
  Sense strand starting at position 229 of SEQ ID NO: 1884791
gcacuccuucuagaagucu

SEQ ID NO: 2292361 - RNA, 19 nt, Artificial Sequence
  Description of Artificial Sequence: Synthetic oligonucleotide
  Antisense strand to SEQ ID NO: 2292360
agacuucuagaaggagugc

SEQ ID NO: 2292362 - RNA, 19 nt, Artificial Sequence
  Description of Artificial Sequence: Synthetic oligonucleotide
  Sense strand starting at position 287 of SEQ ID NO: 1884791
acgguugacuugucacuaa

SEQ ID NO: 2292363 - RNA, 19 nt, Artificial Sequence
  Description of Artificial Sequence: Synthetic oligonucleotide
  Antisense strand to SEQ ID NO: 2292362
uuagugacaagucaaccgu

SEQ ID NO: 2292364 - RNA, 19 nt, Artificial Sequence
  Description of Artificial Sequence: Synthetic oligonucleotide
  Sense strand starting at position 290 of SEQ ID NO: 1884791
guugacuugucacuaaguc

SEQ ID NO: 2292365 - RNA, 19 nt, Artificial Sequence
  Description of Artificial Sequence: Synthetic oligonucleotide
  Antisense strand to SEQ ID NO: 2292364
gacuuagugacaagucaac

SEQ ID NO: 2292366 - RNA, 19 nt, Artificial Sequence
  Description of Artificial Sequence: Synthetic oligonucleotide
  Sense strand starting at position 291 of SEQ ID NO: 1884791
uugacuugucacuaaguca

SEQ ID NO: 2292367 - RNA, 19 nt, Artificial Sequence
  Description of Artificial Sequence: Synthetic oligonucleotide
  Antisense strand to SEQ ID NO: 2292366
ugacuuagugacaagucaa

SEQ ID NO: 2292368 - RNA, 19 nt, Artificial Sequence
  Description of Artificial Sequence: Synthetic oligonucleotide
  Sense strand starting at position 298 of SEQ ID NO: 1884791
gucacuaagucacuaagga

SEQ ID NO: 2292369 - RNA, 19 nt, Artificial Sequence
  Description of Artificial Sequence: Synthetic oligonucleotide
  Antisense strand to SEQ ID NO: 2292368
uccuuagugacuuagugac

SEQ ID NO: 2292370 - RNA, 19 nt, Artificial Sequence
  Description of Artificial Sequence: Synthetic oligonucleotide
  Sense strand starting at position 402 of SEQ ID NO: 1884791
gaugguucagaccguuaug

SEQ ID NO: 2292371 - RNA, 19 nt, Artificial Sequence
  Description of Artificial Sequence: Synthetic oligonucleotide
  Antisense strand to SEQ ID NO: 2292370
cauaacggucugaaccauc

SEQ ID NO: 2292372 - RNA, 19 nt, Artificial Sequence
  Description of Artificial Sequence: Synthetic oligonucleotide
  Sense strand starting at position 2153 of SEQ ID NO: 1884791
ggaucugaaucuugauuug

SEQ ID NO: 2292373 - RNA, 19 nt, Artificial Sequence
  Description of Artificial Sequence: Synthetic oligonucleotide
  Antisense strand to SEQ ID NO: 2292372
caaaucaagauucagaucc

SEQ ID NO: 2292374 - RNA, 19 nt, Artificial Sequence
  Description of Artificial Sequence: Synthetic oligonucleotide
  Sense strand starting at position 2174 of SEQ ID NO: 1884791
guuguuguuaaauggguga

SEQ ID NO: 2292375 - RNA, 19 nt, Artificial Sequence
  Description of Artificial Sequence: Synthetic oligonucleotide
  Antisense strand to SEQ ID NO: 2292374
ucacccauuuaacaacaac

SEQ ID NO: 2292376 - RNA, 19 nt, Artificial Sequence
  Description of Artificial Sequence: Synthetic oligonucleotide
  Sense strand starting at position 2176 of SEQ ID NO: 1884791
uguuguuaaaugggugaga

SEQ ID NO: 2292377 - RNA, 19 nt, Artificial Sequence
  Description of Artificial Sequence: Synthetic oligonucleotide
  Antisense strand to SEQ ID NO: 2292376
ucucacccauuuaacaaca

SEQ ID NO: 2292378 - RNA, 19 nt, Artificial Sequence
  Description of Artificial Sequence: Synthetic oligonucleotide
  Sense strand starting at position 2178 of SEQ ID NO: 1884791
uuguuaaaugggugagaga

SEQ ID NO: 2292379 - RNA, 19 nt, Artificial Sequence
  Description of Artificial Sequence: Synthetic oligonucleotide
  Antisense strand to SEQ ID NO: 2292378
ucucucacccauuuaacaa

SEQ ID NO: 2292380 - RNA, 19 nt, Artificial Sequence
  Description of Artificial Sequence: Synthetic oligonucleotide
  Sense strand starting at position 2211 of SEQ ID NO: 1884791
ccugaacuuuguguuaaag

SEQ ID NO: 2292381 - RNA, 19 nt, Artificial Sequence
  Description of Artificial Sequence: Synthetic oligonucleotide
  Antisense strand to SEQ ID NO: 2292380
cuuuaacacaaaguucagg

SEQ ID NO: 2292382 - RNA, 19 nt, Artificial Sequence
  Description of Artificial Sequence: Synthetic oligonucleotide
  Sense strand starting at position 2221 of SEQ ID NO: 1884791
guguuaaagacuuagguca

SEQ ID NO: 2292383 - RNA, 19 nt, Artificial Sequence
  Description of Artificial Sequence: Synthetic oligonucleotide
  Antisense strand to SEQ ID NO: 2292382
ugaccuaagucuuuaacac

SEQ ID NO: 2292384 - RNA, 19 nt, Artificial Sequence
  Description of Artificial Sequence: Synthetic oligonucleotide
  Sense strand starting at position 2279 of SEQ ID NO: 1884791
uauugauugcacuaacgua

SEQ ID NO: 2292385 - RNA, 19 nt, Artificial Sequence
  Description of Artificial Sequence: Synthetic oligonucleotide
  Antisense strand to SEQ ID NO: 2292384
uacguuagugcaaucaaua

SEQ ID NO: 2292386 - RNA, 19 nt, Artificial Sequence
  Description of Artificial Sequence: Synthetic oligonucleotide
  Sense strand starting at position 2465 of SEQ ID NO: 1884791
auauucuucggagguagaa

SEQ ID NO: 2292387 - RNA, 19 nt, Artificial Sequence
  Description of Artificial Sequence: Synthetic oligonucleotide
  Antisense strand to SEQ ID NO: 2292386
uucuaccuccgaagaauau

SEQ ID NO: 2292388 - RNA, 19 nt, Artificial Sequence
  Description of Artificial Sequence: Synthetic oligonucleotide
  Sense strand starting at position 2580 of SEQ ID NO: 1884791
auguaaucacauuguuucu

SEQ ID NO: 2292389 - RNA, 19 nt, Artificial Sequence
  Description of Artificial Sequence: Synthetic oligonucleotide
  Antisense strand to SEQ ID NO: 2292388
agaaacaaugugauuacau

SEQ ID NO: 2292390 - RNA, 19 nt, Artificial Sequence
  Description of Artificial Sequence: Synthetic oligonucleotide
  Sense strand starting at position 2617 of SEQ ID NO: 1884791
acauguuaagaauggcuuu

SEQ ID NO: 2292391 - RNA, 19 nt, Artificial Sequence
  Description of Artificial Sequence: Synthetic oligonucleotide
  Antisense strand to SEQ ID NO: 2292390
aaagccauucuuaacaugu

SEQ ID NO: 2292392 - RNA, 19 nt, Artificial Sequence
  Description of Artificial Sequence: Synthetic oligonucleotide
  Sense strand starting at position 2620 of SEQ ID NO: 1884791
uguuaagaauggcuuuguu

SEQ ID NO: 2292393 - RNA, 19 nt, Artificial Sequence
  Description of Artificial Sequence: Synthetic oligonucleotide
  Antisense strand to SEQ ID NO: 2292392
aacaaagccauucuuaaca

SEQ ID NO: 2292394 - RNA, 19 nt, Artificial Sequence
  Description of Artificial Sequence: Synthetic oligonucleotide
  Sense strand starting at position 2624 of SEQ ID NO: 1884791
aagaauggcuuuguuaaag

SEQ ID NO: 2292395 - RNA, 19 nt, Artificial Sequence
  Description of Artificial Sequence: Synthetic oligonucleotide
  Antisense strand to SEQ ID NO: 2292394
cuuuaacaaagccauucuu

SEQ ID NO: 2292396 - RNA, 19 nt, Artificial Sequence
  Description of Artificial Sequence: Synthetic oligonucleotide
  Sense strand starting at position 2630 of SEQ ID NO: 1884791
ggcuuuguuaaaggauaug

SEQ ID NO: 2292397 - RNA, 19 nt, Artificial Sequence
  Description of Artificial Sequence: Synthetic oligonucleotide
  Antisense strand to SEQ ID NO: 2292396
cauauccuuuaacaaagcc

SEQ ID NO: 2292398 - RNA, 19 nt, Artificial Sequence
  Description of Artificial Sequence: Synthetic oligonucleotide
  Sense strand starting at position 2636 of SEQ ID NO: 1884791
guuaaaggauaugaagaaa

SEQ ID NO: 2292399 - RNA, 19 nt, Artificial Sequence
  Description of Artificial Sequence: Synthetic oligonucleotide
  Antisense strand to SEQ ID NO: 2292398
uuucuucauauccuuuaac

SEQ ID NO: 2292400 - RNA, 19 nt, Artificial Sequence
  Description of Artificial Sequence: Synthetic oligonucleotide
  Sense strand starting at position 2674 of SEQ ID NO: 1884791
uggagagauucuucucgag

SEQ ID NO: 2292401 - RNA, 19 nt, Artificial Sequence
  Description of Artificial Sequence: Synthetic oligonucleotide
  Antisense strand to SEQ ID NO: 2292400
cucgagaagaaucucucca

SEQ ID NO: 2292402 - RNA, 19 nt, Artificial Sequence
  Description of Artificial Sequence: Synthetic oligonucleotide
  Sense strand starting at position 2676 of SEQ ID NO: 1884791
gagagauucuucucgagau

SEQ ID NO: 2292403 - RNA, 19 nt, Artificial Sequence
  Description of Artificial Sequence: Synthetic oligonucleotide
  Antisense strand to SEQ ID NO: 2292402
aucucgagaagaaucucuc

SEQ ID NO: 2292404 - RNA, 19 nt, Artificial Sequence
  Description of Artificial Sequence: Synthetic oligonucleotide
  Sense strand starting at position 2680 of SEQ ID NO: 1884791
gauucuucucgagauuggu

SEQ ID NO: 2292405 - RNA, 19 nt, Artificial Sequence
  Description of Artificial Sequence: Synthetic oligonucleotide
  Antisense strand to SEQ ID NO: 2292404
accaaucucgagaagaauc

SEQ ID NO: 2292406 - RNA, 19 nt, Artificial Sequence
  Description of Artificial Sequence: Synthetic oligonucleotide
  Sense strand starting at position 2683 of SEQ ID NO: 1884791
ucuucucgagauuggugaa

SEQ ID NO: 2292407 - RNA, 19 nt, Artificial Sequence
  Description of Artificial Sequence: Synthetic oligonucleotide
  Antisense strand to SEQ ID NO: 2292406
uucaccaaucucgagaaga

SEQ ID NO: 2292408 - RNA, 19 nt, Artificial Sequence
  Description of Artificial Sequence: Synthetic oligonucleotide
  Sense strand starting at position 2776 of SEQ ID NO: 1884791
ggccuucugucagugauga

SEQ ID NO: 2292409 - RNA, 19 nt, Artificial Sequence
  Description of Artificial Sequence: Synthetic oligonucleotide
  Antisense strand to SEQ ID NO: 2292408
ucaucacugacagaaggcc

SEQ ID NO: 2292410 - RNA, 19 nt, Artificial Sequence
  Description of Artificial Sequence: Synthetic oligonucleotide
  Sense strand starting at position 2781 of SEQ ID NO: 1884791
ucugucagugaugacuaau

SEQ ID NO: 2292411 - RNA, 19 nt, Artificial Sequence
  Description of Artificial Sequence: Synthetic oligonucleotide
  Antisense strand to SEQ ID NO: 2292410
auuagucaucacugacaga

SEQ ID NO: 2292412 - RNA, 19 nt, Artificial Sequence
  Description of Artificial Sequence: Synthetic oligonucleotide
  Sense strand starting at position 2861 of SEQ ID NO: 1884791
uuaggugugaccuaggacu

SEQ ID NO: 2292413 - RNA, 19 nt, Artificial Sequence
  Description of Artificial Sequence: Synthetic oligonucleotide
  Antisense strand to SEQ ID NO: 2292412
aguccuaggucacaccuaa

SEQ ID NO: 2292414 - RNA, 19 nt, Artificial Sequence
  Description of Artificial Sequence: Synthetic oligonucleotide
  Sense strand starting at position 2874 of SEQ ID NO: 1884791
aggacucuuuaggcacaga

SEQ ID NO: 2292415 - RNA, 19 nt, Artificial Sequence
  Description of Artificial Sequence: Synthetic oligonucleotide
  Antisense strand to SEQ ID NO: 2292414
ucugugccuaaagaguccu

SEQ ID NO: 2292416 - RNA, 19 nt, Artificial Sequence
  Description of Artificial Sequence: Synthetic oligonucleotide
  Sense strand starting at position 2892 of SEQ ID NO: 1884791
agagaaugauguuaacaaa

SEQ ID NO: 2292417 - RNA, 19 nt, Artificial Sequence
  Description of Artificial Sequence: Synthetic oligonucleotide
  Antisense strand to SEQ ID NO: 2292416
uuuguuaacaucauucucu

SEQ ID NO: 2292418 - RNA, 19 nt, Artificial Sequence
  Description of Artificial Sequence: Synthetic oligonucleotide
  Sense strand starting at position 3081 of SEQ ID NO: 1884791
gaaagcaucuaucuguagu

SEQ ID NO: 2292419 - RNA, 19 nt, Artificial Sequence
  Description of Artificial Sequence: Synthetic oligonucleotide
  Antisense strand to SEQ ID NO: 2292418
acuacagauagaugcuuuc

SEQ ID NO: 2292420 - RNA, 19 nt, Artificial Sequence
  Description of Artificial Sequence: Synthetic oligonucleotide
  Sense strand starting at position 3138 of SEQ ID NO: 1884791
gucagaaaucccugccauc

SEQ ID NO: 2292421 - RNA, 19 nt, Artificial Sequence
  Description of Artificial Sequence: Synthetic oligonucleotide
  Antisense strand to SEQ ID NO: 2292420
gauggcagggauuucugac

SEQ ID NO: 2292422 - RNA, 19 nt, Artificial Sequence
  Description of Artificial Sequence: Synthetic oligonucleotide
  Sense strand starting at position 3165 of SEQ ID NO: 1884791
uacguucuaguguaaagag

SEQ ID NO: 2292423 - RNA, 19 nt, Artificial Sequence
  Description of Artificial Sequence: Synthetic oligonucleotide
  Antisense strand to SEQ ID NO: 2292422
cucuuuacacuagaacgua

SEQ ID NO: 2292424 - RNA, 19 nt, Artificial Sequence
  Description of Artificial Sequence: Synthetic oligonucleotide
  Sense strand starting at position 3284 of SEQ ID NO: 1884791
guuguagcauuuguauaua

SEQ ID NO: 2292425 - RNA, 19 nt, Artificial Sequence
  Description of Artificial Sequence: Synthetic oligonucleotide
  Antisense strand to SEQ ID NO: 2292424
uauauacaaaugcuacaac

SEQ ID NO: 2292426 - RNA, 19 nt, Artificial Sequence
  Description of Artificial Sequence: Synthetic oligonucleotide
  Sense strand starting at position 3528 of SEQ ID NO: 1884791
uguauauaguucuccagau

SEQ ID NO: 2292427 - RNA, 19 nt, Artificial Sequence
  Description of Artificial Sequence: Synthetic oligonucleotide
  Antisense strand to SEQ ID NO: 2292426
aucuggagaacuauauaca

SEQ ID NO: 2292428 - RNA, 19 nt, Artificial Sequence
  Description of Artificial Sequence: Synthetic oligonucleotide
  Sense strand starting at position 3529 of SEQ ID NO: 1884791
guauauaguucuccagaug

SEQ ID NO: 2292429 - RNA, 19 nt, Artificial Sequence
  Description of Artificial Sequence: Synthetic oligonucleotide
  Antisense strand to SEQ ID NO: 2292428
caucuggagaacuauauac

SEQ ID NO: 2292430 - RNA, 19 nt, Artificial Sequence
  Description of Artificial Sequence: Synthetic oligonucleotide
  Sense strand starting at position 3543 of SEQ ID NO: 1884791
agauguuaauaagugcuau

SEQ ID NO: 2292431 - RNA, 19 nt, Artificial Sequence
  Description of Artificial Sequence: Synthetic oligonucleotide
  Antisense strand to SEQ ID NO: 2292430
auagcacuuauuaacaucu

SEQ ID NO: 2292432 - RNA, 19 nt, Artificial Sequence
  Description of Artificial Sequence: Synthetic oligonucleotide
  Sense strand starting at position 3549 of SEQ ID NO: 1884791
uaauaagugcuaugaggaa

SEQ ID NO: 2292433 - RNA, 19 nt, Artificial Sequence
  Description of Artificial Sequence: Synthetic oligonucleotide
  Antisense strand to SEQ ID NO: 2292432
uuccucauagcacuuauua

SEQ ID NO: 2292434 - RNA, 19 nt, Artificial Sequence
  Description of Artificial Sequence: Synthetic oligonucleotide
  Sense strand starting at position 3774 of SEQ ID NO: 1884791
gugggacagucacuaguuu

SEQ ID NO: 2292435 - RNA, 19 nt, Artificial Sequence
  Description of Artificial Sequence: Synthetic oligonucleotide
  Antisense strand to SEQ ID NO: 2292434
aaacuagugacugucccac

SEQ ID NO: 2292436 - RNA, 19 nt, Artificial Sequence
  Description of Artificial Sequence: Synthetic oligonucleotide
  Sense strand starting at position 3839 of SEQ ID NO: 1884791
gggagaguaguagguaaga

SEQ ID NO: 2292437 - RNA, 19 nt, Artificial Sequence
  Description of Artificial Sequence: Synthetic oligonucleotide
  Antisense strand to SEQ ID NO: 2292436
ucuuaccuacuacucuccc

SEQ ID NO: 2292438 - RNA, 19 nt, Artificial Sequence
  Description of Artificial Sequence: Synthetic oligonucleotide
  Sense strand starting at position 278 of SEQ ID NO: 1884792
cguaaagguucugugcuga

SEQ ID NO: 2292439 - RNA, 19 nt, Artificial Sequence
  Description of Artificial Sequence: Synthetic oligonucleotide
  Antisense strand to SEQ ID NO: 2292438
ucagcacagaaccuuuacg

SEQ ID NO: 2292440 - RNA, 19 nt, Artificial Sequence
  Description of Artificial Sequence: Synthetic oligonucleotide
  Sense strand starting at position 2825 of SEQ ID NO: 1884792
agaggccuucuucgacaau

SEQ ID NO: 2292441 - RNA, 19 nt, Artificial Sequence
  Description of Artificial Sequence: Synthetic oligonucleotide
  Antisense strand to SEQ ID NO: 2292440
auugucgaagaaggccucu

SEQ ID NO: 2292442 - RNA, 19 nt, Artificial Sequence
  Description of Artificial Sequence: Synthetic oligonucleotide
  Sense strand starting at position 2828 of SEQ ID NO: 1884792
ggccuucuucgacaaugaa

SEQ ID NO: 2292443 - RNA, 19 nt, Artificial Sequence
  Description of Artificial Sequence: Synthetic oligonucleotide
  Antisense strand to SEQ ID NO: 2292442
uucauugucgaagaaggcc

SEQ ID NO: 2292444 - RNA, 19 nt, Artificial Sequence
  Description of Artificial Sequence: Synthetic oligonucleotide
  Sense strand starting at position 2888 of SEQ ID NO: 1884792
gugacaaugcuaggccuau

SEQ ID NO: 2292445 - RNA, 19 nt, Artificial Sequence
  Description of Artificial Sequence: Synthetic oligonucleotide
  Antisense strand to SEQ ID NO: 2292444
auaggccuagcauugucac

SEQ ID NO: 2292446 - RNA, 19 nt, Artificial Sequence
  Description of Artificial Sequence: Synthetic oligonucleotide
  Sense strand starting at position 2972 of SEQ ID NO: 1884792
aaaugucccuauggaaaga

SEQ ID NO: 2292447 - RNA, 19 nt, Artificial Sequence
  Description of Artificial Sequence: Synthetic oligonucleotide
  Antisense strand to SEQ ID NO: 2292446
ucuuuccauagggacauuu

SEQ ID NO: 2292448 - RNA, 19 nt, Artificial Sequence
  Description of Artificial Sequence: Synthetic oligonucleotide
  Sense strand starting at position 2999 of SEQ ID NO: 1884792
aauugcaugugguuaaauc

SEQ ID NO: 2292449 - RNA, 19 nt, Artificial Sequence
  Description of Artificial Sequence: Synthetic oligonucleotide
  Antisense strand to SEQ ID NO: 2292448
gauuuaaccacaugcaauu

SEQ ID NO: 2292450 - RNA, 19 nt, Artificial Sequence
  Description of Artificial Sequence: Synthetic oligonucleotide
  Sense strand starting at position 3000 of SEQ ID NO: 1884792
auugcaugugguuaaaucu

SEQ ID NO: 2292451 - RNA, 19 nt, Artificial Sequence
  Description of Artificial Sequence: Synthetic oligonucleotide
  Antisense strand to SEQ ID NO: 2292450
agauuuaaccacaugcaau

SEQ ID NO: 2292452 - RNA, 19 nt, Artificial Sequence
  Description of Artificial Sequence: Synthetic oligonucleotide
  Sense strand starting at position 3006 of SEQ ID NO: 1884792
ugugguuaaaucuauaugu

SEQ ID NO: 2292453 - RNA, 19 nt, Artificial Sequence
  Description of Artificial Sequence: Synthetic oligonucleotide
  Antisense strand to SEQ ID NO: 2292452
acauauagauuuaaccaca

SEQ ID NO: 2292454 - RNA, 19 nt, Artificial Sequence
  Description of Artificial Sequence: Synthetic oligonucleotide
  Sense strand starting at position 3008 of SEQ ID NO: 1884792
ugguuaaaucuauauguug

SEQ ID NO: 2292455 - RNA, 19 nt, Artificial Sequence
  Description of Artificial Sequence: Synthetic oligonucleotide
  Antisense strand to SEQ ID NO: 2292454
caacauauagauuuaacca

SEQ ID NO: 2292456 - RNA, 19 nt, Artificial Sequence
  Description of Artificial Sequence: Synthetic oligonucleotide
  Sense strand starting at position 3023 of SEQ ID NO: 1884792
guuguaaucccuuauuacc

SEQ ID NO: 2292457 - RNA, 19 nt, Artificial Sequence
  Description of Artificial Sequence: Synthetic oligonucleotide
  Antisense strand to SEQ ID NO: 2292456
gguaauaagggauuacaac

SEQ ID NO: 2292458 - RNA, 19 nt, Artificial Sequence
  Description of Artificial Sequence: Synthetic oligonucleotide
  Sense strand starting at position 3043 of SEQ ID NO: 1884792
agcaauucugcacauaguu

SEQ ID NO: 2292459 - RNA, 19 nt, Artificial Sequence
  Description of Artificial Sequence: Synthetic oligonucleotide
  Antisense strand to SEQ ID NO: 2292458
aacuaugugcagaauugcu

SEQ ID NO: 2292460 - RNA, 19 nt, Artificial Sequence
  Description of Artificial Sequence: Synthetic oligonucleotide
  Sense strand starting at position 3180 of SEQ ID NO: 1884792
cucuguugcccaguuugua

SEQ ID NO: 2292461 - RNA, 19 nt, Artificial Sequence
  Description of Artificial Sequence: Synthetic oligonucleotide
  Antisense strand to SEQ ID NO: 2292460
uacaaacugggcaacagag

SEQ ID NO: 2292462 - RNA, 19 nt, Artificial Sequence
  Description of Artificial Sequence: Synthetic oligonucleotide
  Sense strand starting at position 3738 of SEQ ID NO: 1884792
uccagugaacaguguguaa

SEQ ID NO: 2292463 - RNA, 19 nt, Artificial Sequence
  Description of Artificial Sequence: Synthetic oligonucleotide
  Antisense strand to SEQ ID NO: 2292462
uuacacacuguucacugga

SEQ ID NO: 2292464 - RNA, 19 nt, Artificial Sequence
  Description of Artificial Sequence: Synthetic oligonucleotide
  Sense strand starting at position 3740 of SEQ ID NO: 1884792
cagugaacaguguguaaac

SEQ ID NO: 2292465 - RNA, 19 nt, Artificial Sequence
  Description of Artificial Sequence: Synthetic oligonucleotide
  Antisense strand to SEQ ID NO: 2292464
guuuacacacuguucacug

SEQ ID NO: 2292466 - RNA, 19 nt, Artificial Sequence
  Description of Artificial Sequence: Synthetic oligonucleotide
  Sense strand starting at position 3750 of SEQ ID NO: 1884792
uguguaaaccagcagcauu

SEQ ID NO: 2292467 - RNA, 19 nt, Artificial Sequence
  Description of Artificial Sequence: Synthetic oligonucleotide
  Antisense strand to SEQ ID NO: 2292466
aaugcugcugguuuacaca

SEQ ID NO: 2292468 - RNA, 19 nt, Artificial Sequence
  Description of Artificial Sequence: Synthetic oligonucleotide
  Sense strand starting at position 3849 of SEQ ID NO: 1884792
uuaacagacuuguacagua

SEQ ID NO: 2292469 - RNA, 19 nt, Artificial Sequence
  Description of Artificial Sequence: Synthetic oligonucleotide
  Antisense strand to SEQ ID NO: 2292468
uacuguacaagucuguuaa

SEQ ID NO: 2292470 - RNA, 19 nt, Artificial Sequence
  Description of Artificial Sequence: Synthetic oligonucleotide
  Sense strand starting at position 3854 of SEQ ID NO: 1884792
agacuuguacaguaaugua

SEQ ID NO: 2292471 - RNA, 19 nt, Artificial Sequence
  Description of Artificial Sequence: Synthetic oligonucleotide
  Antisense strand to SEQ ID NO: 2292470
uacauuacuguacaagucu

SEQ ID NO: 2292472 - RNA, 19 nt, Artificial Sequence
  Description of Artificial Sequence: Synthetic oligonucleotide
  Sense strand starting at position 3857 of SEQ ID NO: 1884792
cuuguacaguaauguacau

SEQ ID NO: 2292473 - RNA, 19 nt, Artificial Sequence
  Description of Artificial Sequence: Synthetic oligonucleotide
  Antisense strand to SEQ ID NO: 2292472
auguacauuacuguacaag

SEQ ID NO: 2292474 - RNA, 19 nt, Artificial Sequence
  Description of Artificial Sequence: Synthetic oligonucleotide
  Sense strand starting at position 3877 of SEQ ID NO: 1884792
gcaacuuuauaauggugga

SEQ ID NO: 2292475 - RNA, 19 nt, Artificial Sequence
  Description of Artificial Sequence: Synthetic oligonucleotide
  Antisense strand to SEQ ID NO: 2292474
uccaccauuauaaaguugc

SEQ ID NO: 2292476 - RNA, 19 nt, Artificial Sequence
  Description of Artificial Sequence: Synthetic oligonucleotide
  Sense strand starting at position 58 of SEQ ID NO: 1884793
gguaguguaguguagauau

SEQ ID NO: 2292477 - RNA, 19 nt, Artificial Sequence
  Description of Artificial Sequence: Synthetic oligonucleotide
  Antisense strand to SEQ ID NO: 2292476
auaucuacacuacacuacc

SEQ ID NO: 2292478 - RNA, 19 nt, Artificial Sequence
  Description of Artificial Sequence: Synthetic oligonucleotide
  Sense strand starting at position 90 of SEQ ID NO: 1884793
gaggaugauuuaggaaauu

SEQ ID NO: 2292479 - RNA, 19 nt, Artificial Sequence
  Description of Artificial Sequence: Synthetic oligonucleotide
  Antisense strand to SEQ ID NO: 2292478
aauuuccuaaaucauccuc

SEQ ID NO: 2292480 - RNA, 19 nt, Artificial Sequence
  Description of Artificial Sequence: Synthetic oligonucleotide
  Sense strand starting at position 195 of SEQ ID NO: 1884793
uuucuuccucaagagaggu

SEQ ID NO: 2292481 - RNA, 19 nt, Artificial Sequence
  Description of Artificial Sequence: Synthetic oligonucleotide
  Antisense strand to SEQ ID NO: 2292480
accucucuugaggaagaaa

SEQ ID NO: 2292482 - RNA, 19 nt, Artificial Sequence
  Description of Artificial Sequence: Synthetic oligonucleotide
  Sense strand starting at position 290 of SEQ ID NO: 1884793
aauugauaugcauauguug

SEQ ID NO: 2292483 - RNA, 19 nt, Artificial Sequence
  Description of Artificial Sequence: Synthetic oligonucleotide
  Antisense strand to SEQ ID NO: 2292482
caacauaugcauaucaauu

SEQ ID NO: 2292484 - RNA, 19 nt, Artificial Sequence
  Description of Artificial Sequence: Synthetic oligonucleotide
  Sense strand starting at position 1036 of SEQ ID NO: 1884793
ucacauugugcugagagaa

SEQ ID NO: 2292485 - RNA, 19 nt, Artificial Sequence
  Description of Artificial Sequence: Synthetic oligonucleotide
  Antisense strand to SEQ ID NO: 2292484
uucucucagcacaauguga

SEQ ID NO: 2292486 - RNA, 19 nt, Artificial Sequence
  Description of Artificial Sequence: Synthetic oligonucleotide
  Sense strand starting at position 1480 of SEQ ID NO: 1884793
aucccuuaauucguaagga

SEQ ID NO: 2292487 - RNA, 19 nt, Artificial Sequence
  Description of Artificial Sequence: Synthetic oligonucleotide
  Antisense strand to SEQ ID NO: 2292486
uccuuacgaauuaagggau

SEQ ID NO: 2292488 - RNA, 19 nt, Artificial Sequence
  Description of Artificial Sequence: Synthetic oligonucleotide
  Sense strand starting at position 1607 of SEQ ID NO: 1884793
gggucccuccugugagacu

SEQ ID NO: 2292489 - RNA, 19 nt, Artificial Sequence
  Description of Artificial Sequence: Synthetic oligonucleotide
  Antisense strand to SEQ ID NO: 2292488
agucucacaggagggaccc

SEQ ID NO: 2292490 - RNA, 19 nt, Artificial Sequence
  Description of Artificial Sequence: Synthetic oligonucleotide
  Sense strand starting at position 1788 of SEQ ID NO: 1884793
uagagacuguuguucgaga

SEQ ID NO: 2292491 - RNA, 19 nt, Artificial Sequence
  Description of Artificial Sequence: Synthetic oligonucleotide
  Antisense strand to SEQ ID NO: 2292490
ucucgaacaacagucucua

SEQ ID NO: 2292492 - RNA, 19 nt, Artificial Sequence
  Description of Artificial Sequence: Synthetic oligonucleotide
  Sense strand starting at position 1790 of SEQ ID NO: 1884793
gagacuguuguucgagaac

SEQ ID NO: 2292493 - RNA, 19 nt, Artificial Sequence
  Description of Artificial Sequence: Synthetic oligonucleotide
  Antisense strand to SEQ ID NO: 2292492
guucucgaacaacagucuc

SEQ ID NO: 2292494 - RNA, 19 nt, Artificial Sequence
  Description of Artificial Sequence: Synthetic oligonucleotide
  Sense strand starting at position 1793 of SEQ ID NO: 1884793
acuguuguucgagaacaca

SEQ ID NO: 2292495 - RNA, 19 nt, Artificial Sequence
  Description of Artificial Sequence: Synthetic oligonucleotide
  Antisense strand to SEQ ID NO: 2292494
uguguucucgaacaacagu

SEQ ID NO: 2292496 - RNA, 19 nt, Artificial Sequence
  Description of Artificial Sequence: Synthetic oligonucleotide
  Sense strand starting at position 1815 of SEQ ID NO: 1884793
ugggacaaccuccgugaau

SEQ ID NO: 2292497 - RNA, 19 nt, Artificial Sequence
  Description of Artificial Sequence: Synthetic oligonucleotide
  Antisense strand to SEQ ID NO: 2292496
auucacggagguuguccca

SEQ ID NO: 2292498 - RNA, 19 nt, Artificial Sequence
  Description of Artificial Sequence: Synthetic oligonucleotide
  Sense strand starting at position 1816 of SEQ ID NO: 1884793
gggacaaccuccgugaauu

SEQ ID NO: 2292499 - RNA, 19 nt, Artificial Sequence
  Description of Artificial Sequence: Synthetic oligonucleotide
  Antisense strand to SEQ ID NO: 2292498
aauucacggagguuguccc

SEQ ID NO: 2292500 - RNA, 19 nt, Artificial Sequence
  Description of Artificial Sequence: Synthetic oligonucleotide
  Sense strand starting at position 1988 of SEQ ID NO: 1884793
cauuguggucugcaacaaa

SEQ ID NO: 2292501 - RNA, 19 nt, Artificial Sequence
  Description of Artificial Sequence: Synthetic oligonucleotide
  Antisense strand to SEQ ID NO: 2292500
uuuguugcagaccacaaug

SEQ ID NO: 2292502 - RNA, 19 nt, Artificial Sequence
  Description of Artificial Sequence: Synthetic oligonucleotide
  Sense strand starting at position 2260 of SEQ ID NO: 1884793
ccuucuccacggugagaaa

SEQ ID NO: 2292503 - RNA, 19 nt, Artificial Sequence
  Description of Artificial Sequence: Synthetic oligonucleotide
  Antisense strand to SEQ ID NO: 2292502
uuucucaccguggagaagg

SEQ ID NO: 2292504 - RNA, 19 nt, Artificial Sequence
  Description of Artificial Sequence: Synthetic oligonucleotide
  Sense strand starting at position 2326 of SEQ ID NO: 1884793
ggacuuagcccuccgcgua

SEQ ID NO: 2292505 - RNA, 19 nt, Artificial Sequence
  Description of Artificial Sequence: Synthetic oligonucleotide
  Antisense strand to SEQ ID NO: 2292504
uacgcggagggcuaagucc

SEQ ID NO: 2292506 - RNA, 19 nt, Artificial Sequence
  Description of Artificial Sequence: Synthetic oligonucleotide
  Sense strand starting at position 2347 of SEQ ID NO: 1884793
ccgcgcuuccugagaagug

SEQ ID NO: 2292507 - RNA, 19 nt, Artificial Sequence
  Description of Artificial Sequence: Synthetic oligonucleotide
  Antisense strand to SEQ ID NO: 2292506
cacuucucaggaagcgcgg

SEQ ID NO: 2292508 - RNA, 19 nt, Artificial Sequence
  Description of Artificial Sequence: Synthetic oligonucleotide
  Sense strand starting at position 2686 of SEQ ID NO: 1884793
cugacaggucccgggaaua

SEQ ID NO: 2292509 - RNA, 19 nt, Artificial Sequence
  Description of Artificial Sequence: Synthetic oligonucleotide
  Antisense strand to SEQ ID NO: 2292508
uauucccgggaccugucag

SEQ ID NO: 2292510 - RNA, 19 nt, Artificial Sequence
  Description of Artificial Sequence: Synthetic oligonucleotide
  Sense strand starting at position 2848 of SEQ ID NO: 1884793
uagcaacgguaucuaagau

SEQ ID NO: 2292511 - RNA, 19 nt, Artificial Sequence
  Description of Artificial Sequence: Synthetic oligonucleotide
  Antisense strand to SEQ ID NO: 2292510
aucuuagauaccguugcua

SEQ ID NO: 2292512 - RNA, 19 nt, Artificial Sequence
  Description of Artificial Sequence: Synthetic oligonucleotide
  Sense strand starting at position 2906 of SEQ ID NO: 1884793
cgaggauccaucugggugu

SEQ ID NO: 2292513 - RNA, 19 nt, Artificial Sequence
  Description of Artificial Sequence: Synthetic oligonucleotide
  Antisense strand to SEQ ID NO: 2292512
acacccagauggauccucg

SEQ ID NO: 2292514 - RNA, 19 nt, Artificial Sequence
  Description of Artificial Sequence: Synthetic oligonucleotide
  Sense strand starting at position 3094 of SEQ ID NO: 1884793
caguguuugcuggaaggga

SEQ ID NO: 2292515 - RNA, 19 nt, Artificial Sequence
  Description of Artificial Sequence: Synthetic oligonucleotide
  Antisense strand to SEQ ID NO: 2292514
ucccuuccagcaaacacug

SEQ ID NO: 2292516 - RNA, 19 nt, Artificial Sequence
  Description of Artificial Sequence: Synthetic oligonucleotide
  Sense strand starting at position 3095 of SEQ ID NO: 1884793
aguguuugcuggaagggaa

SEQ ID NO: 2292517 - RNA, 19 nt, Artificial Sequence
  Description of Artificial Sequence: Synthetic oligonucleotide
  Antisense strand to SEQ ID NO: 2292516
uucccuuccagcaaacacu

SEQ ID NO: 2292518 - RNA, 19 nt, Artificial Sequence
  Description of Artificial Sequence: Synthetic oligonucleotide
  Sense strand starting at position 3138 of SEQ ID NO: 1884793
gaggguuccagucgagaau

SEQ ID NO: 2292519 - RNA, 19 nt, Artificial Sequence
  Description of Artificial Sequence: Synthetic oligonucleotide
  Antisense strand to SEQ ID NO: 2292518
auucucgacuggaacccuc

SEQ ID NO: 2292520 - RNA, 19 nt, Artificial Sequence
  Description of Artificial Sequence: Synthetic oligonucleotide
  Sense strand starting at position 3283 of SEQ ID NO: 1884793
caguuagaguagcuaaauc

SEQ ID NO: 2292521 - RNA, 19 nt, Artificial Sequence
  Description of Artificial Sequence: Synthetic oligonucleotide
  Antisense strand to SEQ ID NO: 2292520
gauuuagcuacucuaacug

SEQ ID NO: 2292522 - RNA, 19 nt, Artificial Sequence
  Description of Artificial Sequence: Synthetic oligonucleotide
  Sense strand starting at position 3395 of SEQ ID NO: 1884793
ccucuuagggugggagaaa

SEQ ID NO: 2292523 - RNA, 19 nt, Artificial Sequence
  Description of Artificial Sequence: Synthetic oligonucleotide
  Antisense strand to SEQ ID NO: 2292522
uuucucccacccuaagagg

SEQ ID NO: 2292524 - RNA, 19 nt, Artificial Sequence
  Description of Artificial Sequence: Synthetic oligonucleotide
  Sense strand starting at position 3415 of SEQ ID NO: 1884793
ggugaagaguuguuccuac

SEQ ID NO: 2292525 - RNA, 19 nt, Artificial Sequence
  Description of Artificial Sequence: Synthetic oligonucleotide
  Antisense strand to SEQ ID NO: 2292524
guaggaacaacucuucacc

SEQ ID NO: 2292526 - RNA, 19 nt, Artificial Sequence
  Description of Artificial Sequence: Synthetic oligonucleotide
  Sense strand starting at position 3456 of SEQ ID NO: 1884793
gguaguagauuagcaucau

SEQ ID NO: 2292527 - RNA, 19 nt, Artificial Sequence
  Description of Artificial Sequence: Synthetic oligonucleotide
  Antisense strand to SEQ ID NO: 2292526
augaugcuaaucuacuacc

SEQ ID NO: 2292528 - RNA, 19 nt, Artificial Sequence
  Description of Artificial Sequence: Synthetic oligonucleotide
  Sense strand starting at position 3462 of SEQ ID NO: 1884793
agauuagcaucauccggau

SEQ ID NO: 2292529 - RNA, 19 nt, Artificial Sequence
  Description of Artificial Sequence: Synthetic oligonucleotide
  Antisense strand to SEQ ID NO: 2292528
auccggaugaugcuaaucu

SEQ ID NO: 2292530 - RNA, 19 nt, Artificial Sequence
  Description of Artificial Sequence: Synthetic oligonucleotide
  Sense strand starting at position 3466 of SEQ ID NO: 1884793
uagcaucauccggauagau

SEQ ID NO: 2292531 - RNA, 19 nt, Artificial Sequence
  Description of Artificial Sequence: Synthetic oligonucleotide
  Antisense strand to SEQ ID NO: 2292530
aucuauccggaugaugcua

SEQ ID NO: 2292532 - RNA, 19 nt, Artificial Sequence
  Description of Artificial Sequence: Synthetic oligonucleotide
  Sense strand starting at position 3468 of SEQ ID NO: 1884793
gcaucauccggauagaugu

SEQ ID NO: 2292533 - RNA, 19 nt, Artificial Sequence
  Description of Artificial Sequence: Synthetic oligonucleotide
  Antisense strand to SEQ ID NO: 2292532
acaucuauccggaugaugc

SEQ ID NO: 2292534 - RNA, 19 nt, Artificial Sequence
  Description of Artificial Sequence: Synthetic oligonucleotide
  Sense strand starting at position 3490 of SEQ ID NO: 1884793
gaggacggcuguuuggaua

SEQ ID NO: 2292535 - RNA, 19 nt, Artificial Sequence
  Description of Artificial Sequence: Synthetic oligonucleotide
  Antisense strand to SEQ ID NO: 2292534
uauccaaacagccguccuc

SEQ ID NO: 2292536 - RNA, 19 nt, Artificial Sequence
  Description of Artificial Sequence: Synthetic oligonucleotide
  Sense strand starting at position 3534 of SEQ ID NO: 1884793
uugacagauucuguuucca

SEQ ID NO: 2292537 - RNA, 19 nt, Artificial Sequence
  Description of Artificial Sequence: Synthetic oligonucleotide
  Antisense strand to SEQ ID NO: 2292536
uggaaacagaaucugucaa

SEQ ID NO: 2292538 - RNA, 19 nt, Artificial Sequence
  Description of Artificial Sequence: Synthetic oligonucleotide
  Sense strand starting at position 3536 of SEQ ID NO: 1884793
gacagauucuguuuccagc

SEQ ID NO: 2292539 - RNA, 19 nt, Artificial Sequence
  Description of Artificial Sequence: Synthetic oligonucleotide
  Antisense strand to SEQ ID NO: 2292538
gcuggaaacagaaucuguc

SEQ ID NO: 2292540 - RNA, 19 nt, Artificial Sequence
  Description of Artificial Sequence: Synthetic oligonucleotide
  Sense strand starting at position 3570 of SEQ ID NO: 1884793
aguggagugcuucaguauu

SEQ ID NO: 2292541 - RNA, 19 nt, Artificial Sequence
  Description of Artificial Sequence: Synthetic oligonucleotide
  Antisense strand to SEQ ID NO: 2292540
aauacugaagcacuccacu

SEQ ID NO: 2292542 - RNA, 19 nt, Artificial Sequence
  Description of Artificial Sequence: Synthetic oligonucleotide
  Sense strand starting at position 3616 of SEQ ID NO: 1884793
gcaaucauuugguauacaa

SEQ ID NO: 2292543 - RNA, 19 nt, Artificial Sequence
  Description of Artificial Sequence: Synthetic oligonucleotide
  Antisense strand to SEQ ID NO: 2292542
uuguauaccaaaugauugc

SEQ ID NO: 2292544 - RNA, 19 nt, Artificial Sequence
  Description of Artificial Sequence: Synthetic oligonucleotide
  Sense strand starting at position 3629 of SEQ ID NO: 1884793
auacaaugcuguuugaagu

SEQ ID NO: 2292545 - RNA, 19 nt, Artificial Sequence
  Description of Artificial Sequence: Synthetic oligonucleotide
  Antisense strand to SEQ ID NO: 2292544
acuucaaacagcauuguau

SEQ ID NO: 2292546 - RNA, 19 nt, Artificial Sequence
  Description of Artificial Sequence: Synthetic oligonucleotide
  Sense strand starting at position 3684 of SEQ ID NO: 1884793
caguuaagaucuuugugau

SEQ ID NO: 2292547 - RNA, 19 nt, Artificial Sequence
  Description of Artificial Sequence: Synthetic oligonucleotide
  Antisense strand to SEQ ID NO: 2292546
aucacaaagaucuuaacug

SEQ ID NO: 2292548 - RNA, 19 nt, Artificial Sequence
  Description of Artificial Sequence: Synthetic oligonucleotide
  Sense strand starting at position 3685 of SEQ ID NO: 1884793
aguuaagaucuuugugaug

SEQ ID NO: 2292549 - RNA, 19 nt, Artificial Sequence
  Description of Artificial Sequence: Synthetic oligonucleotide
  Antisense strand to SEQ ID NO: 2292548
caucacaaagaucuuaacu

SEQ ID NO: 2292550 - RNA, 19 nt, Artificial Sequence
  Description of Artificial Sequence: Synthetic oligonucleotide
  Sense strand starting at position 3770 of SEQ ID NO: 1884793
aguuuaguucucuacacag

SEQ ID NO: 2292551 - RNA, 19 nt, Artificial Sequence
  Description of Artificial Sequence: Synthetic oligonucleotide
  Antisense strand to SEQ ID NO: 2292550
cuguguagagaacuaaacu

SEQ ID NO: 2292552 - RNA, 19 nt, Artificial Sequence
  Description of Artificial Sequence: Synthetic oligonucleotide
  Sense strand starting at position 3817 of SEQ ID NO: 1884793
accgucugucaaugaauau

SEQ ID NO: 2292553 - RNA, 19 nt, Artificial Sequence
  Description of Artificial Sequence: Synthetic oligonucleotide
  Antisense strand to SEQ ID NO: 2292552
auauucauugacagacggu

SEQ ID NO: 2292554 - RNA, 19 nt, Artificial Sequence
  Description of Artificial Sequence: Synthetic oligonucleotide
  Sense strand starting at position 3841 of SEQ ID NO: 1884793
aagguaugaagguguaauu

SEQ ID NO: 2292555 - RNA, 19 nt, Artificial Sequence
  Description of Artificial Sequence: Synthetic oligonucleotide
  Antisense strand to SEQ ID NO: 2292554
aauuacaccuucauaccuu

SEQ ID NO: 2292556 - RNA, 19 nt, Artificial Sequence
  Description of Artificial Sequence: Synthetic oligonucleotide
  Sense strand starting at position 4 of SEQ ID NO: 1884794
cuguaaagugucugaugau

SEQ ID NO: 2292557 - RNA, 19 nt, Artificial Sequence
  Description of Artificial Sequence: Synthetic oligonucleotide
  Antisense strand to SEQ ID NO: 2292556
aucaucagacacuuuacag

SEQ ID NO: 2292558 - RNA, 19 nt, Artificial Sequence
  Description of Artificial Sequence: Synthetic oligonucleotide
  Sense strand starting at position 33 of SEQ ID NO: 1884794
guggaugcucgguggauuu

SEQ ID NO: 2292559 - RNA, 19 nt, Artificial Sequence
  Description of Artificial Sequence: Synthetic oligonucleotide
  Antisense strand to SEQ ID NO: 2292558
aaauccaccgagcauccac

SEQ ID NO: 2292560 - RNA, 19 nt, Artificial Sequence
  Description of Artificial Sequence: Synthetic oligonucleotide
  Sense strand starting at position 67 of SEQ ID NO: 1884794
gcauccuaauagguuauga

SEQ ID NO: 2292561 - RNA, 19 nt, Artificial Sequence
  Description of Artificial Sequence: Synthetic oligonucleotide
  Antisense strand to SEQ ID NO: 2292560
ucauaaccuauuaggaugc

SEQ ID NO: 2292562 - RNA, 19 nt, Artificial Sequence
  Description of Artificial Sequence: Synthetic oligonucleotide
  Sense strand starting at position 69 of SEQ ID NO: 1884794
auccuaauagguuaugagu

SEQ ID NO: 2292563 - RNA, 19 nt, Artificial Sequence
  Description of Artificial Sequence: Synthetic oligonucleotide
  Antisense strand to SEQ ID NO: 2292562
acucauaaccuauuaggau

SEQ ID NO: 2292564 - RNA, 19 nt, Artificial Sequence
  Description of Artificial Sequence: Synthetic oligonucleotide
  Sense strand starting at position 78 of SEQ ID NO: 1884794
gguuaugagucucugaauc

SEQ ID NO: 2292565 - RNA, 19 nt, Artificial Sequence
  Description of Artificial Sequence: Synthetic oligonucleotide
  Antisense strand to SEQ ID NO: 2292564
gauucagagacucauaacc

SEQ ID NO: 2292566 - RNA, 19 nt, Artificial Sequence
  Description of Artificial Sequence: Synthetic oligonucleotide
  Sense strand starting at position 237 of SEQ ID NO: 1884794
cauugcaaucucuggagga

SEQ ID NO: 2292567 - RNA, 19 nt, Artificial Sequence
  Description of Artificial Sequence: Synthetic oligonucleotide
  Antisense strand to SEQ ID NO: 2292566
uccuccagagauugcaaug

SEQ ID NO: 2292568 - RNA, 19 nt, Artificial Sequence
  Description of Artificial Sequence: Synthetic oligonucleotide
  Sense strand starting at position 906 of SEQ ID NO: 1884794
ugauucuccuguccaggaa

SEQ ID NO: 2292569 - RNA, 19 nt, Artificial Sequence
  Description of Artificial Sequence: Synthetic oligonucleotide
  Antisense strand to SEQ ID NO: 2292568
uuccuggacaggagaauca

SEQ ID NO: 2292570 - RNA, 19 nt, Artificial Sequence
  Description of Artificial Sequence: Synthetic oligonucleotide
  Sense strand starting at position 1083 of SEQ ID NO: 1884794
gaagcaucugucugacuga

SEQ ID NO: 2292571 - RNA, 19 nt, Artificial Sequence
  Description of Artificial Sequence: Synthetic oligonucleotide
  Antisense strand to SEQ ID NO: 2292570
ucagucagacagaugcuuc

SEQ ID NO: 2292572 - RNA, 19 nt, Artificial Sequence
  Description of Artificial Sequence: Synthetic oligonucleotide
  Sense strand starting at position 1211 of SEQ ID NO: 1884794
gugagcucccaacaagaca

SEQ ID NO: 2292573 - RNA, 19 nt, Artificial Sequence
  Description of Artificial Sequence: Synthetic oligonucleotide
  Antisense strand to SEQ ID NO: 2292572
ugucuuguugggagcucac

SEQ ID NO: 2292574 - RNA, 19 nt, Artificial Sequence
  Description of Artificial Sequence: Synthetic oligonucleotide
  Sense strand starting at position 1263 of SEQ ID NO: 1884794
gugugugacgccucuuuca

SEQ ID NO: 2292575 - RNA, 19 nt, Artificial Sequence
  Description of Artificial Sequence: Synthetic oligonucleotide
  Antisense strand to SEQ ID NO: 2292574
ugaaagaggcgucacacac

SEQ ID NO: 2292576 - RNA, 19 nt, Artificial Sequence
  Description of Artificial Sequence: Synthetic oligonucleotide
  Sense strand starting at position 1265 of SEQ ID NO: 1884794
gugugacgccucuuucagu

SEQ ID NO: 2292577 - RNA, 19 nt, Artificial Sequence
  Description of Artificial Sequence: Synthetic oligonucleotide
  Antisense strand to SEQ ID NO: 2292576
acugaaagaggcgucacac

SEQ ID NO: 2292578 - RNA, 19 nt, Artificial Sequence
  Description of Artificial Sequence: Synthetic oligonucleotide
  Sense strand starting at position 1460 of SEQ ID NO: 1884794
ggacuuauuugcucaagcu

SEQ ID NO: 2292579 - RNA, 19 nt, Artificial Sequence
  Description of Artificial Sequence: Synthetic oligonucleotide
  Antisense strand to SEQ ID NO: 2292578
agcuugagcaaauaagucc

SEQ ID NO: 2292580 - RNA, 19 nt, Artificial Sequence
  Description of Artificial Sequence: Synthetic oligonucleotide
  Sense strand starting at position 1475 of SEQ ID NO: 1884794
agcuuauagucauuguaaa

SEQ ID NO: 2292581 - RNA, 19 nt, Artificial Sequence
  Description of Artificial Sequence: Synthetic oligonucleotide
  Antisense strand to SEQ ID NO: 2292580
uuuacaaugacuauaagcu

SEQ ID NO: 2292582 - RNA, 19 nt, Artificial Sequence
  Description of Artificial Sequence: Synthetic oligonucleotide
  Sense strand starting at position 1476 of SEQ ID NO: 1884794
gcuuauagucauuguaaag

SEQ ID NO: 2292583 - RNA, 19 nt, Artificial Sequence
  Description of Artificial Sequence: Synthetic oligonucleotide
  Antisense strand to SEQ ID NO: 2292582
cuuuacaaugacuauaagc

SEQ ID NO: 2292584 - RNA, 19 nt, Artificial Sequence
  Description of Artificial Sequence: Synthetic oligonucleotide
  Sense strand starting at position 1738 of SEQ ID NO: 1884794
gguguucuguagaaggaga

SEQ ID NO: 2292585 - RNA, 19 nt, Artificial Sequence
  Description of Artificial Sequence: Synthetic oligonucleotide
  Antisense strand to SEQ ID NO: 2292584
ucuccuucuacagaacacc

SEQ ID NO: 2292586 - RNA, 19 nt, Artificial Sequence
  Description of Artificial Sequence: Synthetic oligonucleotide
  Sense strand starting at position 1752 of SEQ ID NO: 1884794
ggagaaauugcauguguua

SEQ ID NO: 2292587 - RNA, 19 nt, Artificial Sequence
  Description of Artificial Sequence: Synthetic oligonucleotide
  Antisense strand to SEQ ID NO: 2292586
uaacacaugcaauuucucc

SEQ ID NO: 2292588 - RNA, 19 nt, Artificial Sequence
  Description of Artificial Sequence: Synthetic oligonucleotide
  Sense strand starting at position 1755 of SEQ ID NO: 1884794
gaaauugcauguguuacaa

SEQ ID NO: 2292589 - RNA, 19 nt, Artificial Sequence
  Description of Artificial Sequence: Synthetic oligonucleotide
  Antisense strand to SEQ ID NO: 2292588
uuguaacacaugcaauuuc

SEQ ID NO: 2292590 - RNA, 19 nt, Artificial Sequence
  Description of Artificial Sequence: Synthetic oligonucleotide
  Sense strand starting at position 1995 of SEQ ID NO: 1884794
ugacucuuucucgaaaccu

SEQ ID NO: 2292591 - RNA, 19 nt, Artificial Sequence
  Description of Artificial Sequence: Synthetic oligonucleotide
  Antisense strand to SEQ ID NO: 2292590
agguuucgagaaagaguca

SEQ ID NO: 2292592 - RNA, 19 nt, Artificial Sequence
  Description of Artificial Sequence: Synthetic oligonucleotide
  Sense strand starting at position 2068 of SEQ ID NO: 1884794
uugugagguaaaugaguca

SEQ ID NO: 2292593 - RNA, 19 nt, Artificial Sequence
  Description of Artificial Sequence: Synthetic oligonucleotide
  Antisense strand to SEQ ID NO: 2292592
ugacucauuuaccucacaa

SEQ ID NO: 2292594 - RNA, 19 nt, Artificial Sequence
  Description of Artificial Sequence: Synthetic oligonucleotide
  Sense strand starting at position 2071 of SEQ ID NO: 1884794
ugagguaaaugagucaaua

SEQ ID NO: 2292595 - RNA, 19 nt, Artificial Sequence
  Description of Artificial Sequence: Synthetic oligonucleotide
  Antisense strand to SEQ ID NO: 2292594
uauugacucauuuaccuca

SEQ ID NO: 2292596 - RNA, 19 nt, Artificial Sequence
  Description of Artificial Sequence: Synthetic oligonucleotide
  Sense strand starting at position 2090 of SEQ ID NO: 1884794
uauagagaguauucuguaa

SEQ ID NO: 2292597 - RNA, 19 nt, Artificial Sequence
  Description of Artificial Sequence: Synthetic oligonucleotide
  Antisense strand to SEQ ID NO: 2292596
uuacagaauacucucuaua

SEQ ID NO: 2292598 - RNA, 19 nt, Artificial Sequence
  Description of Artificial Sequence: Synthetic oligonucleotide
  Sense strand starting at position 2094 of SEQ ID NO: 1884794
gagaguauucuguaagugc

SEQ ID NO: 2292599 - RNA, 19 nt, Artificial Sequence
  Description of Artificial Sequence: Synthetic oligonucleotide
  Antisense strand to SEQ ID NO: 2292598
gcacuuacagaauacucuc

SEQ ID NO: 2292600 - RNA, 19 nt, Artificial Sequence
  Description of Artificial Sequence: Synthetic oligonucleotide
  Sense strand starting at position 2108 of SEQ ID NO: 1884794
agugcuggccauuauuauu

SEQ ID NO: 2292601 - RNA, 19 nt, Artificial Sequence
  Description of Artificial Sequence: Synthetic oligonucleotide
  Antisense strand to SEQ ID NO: 2292600
aauaauaauggccagcacu

SEQ ID NO: 2292602 - RNA, 19 nt, Artificial Sequence
  Description of Artificial Sequence: Synthetic oligonucleotide
  Sense strand starting at position 2155 of SEQ ID NO: 1884794
cagggaaguucuuccuguu

SEQ ID NO: 2292603 - RNA, 19 nt, Artificial Sequence
  Description of Artificial Sequence: Synthetic oligonucleotide
  Antisense strand to SEQ ID NO: 2292602
aacaggaagaacuucccug

SEQ ID NO: 2292604 - RNA, 19 nt, Artificial Sequence
  Description of Artificial Sequence: Synthetic oligonucleotide
  Sense strand starting at position 2448 of SEQ ID NO: 1884794
agagaucauuaugcuaagu

SEQ ID NO: 2292605 - RNA, 19 nt, Artificial Sequence
  Description of Artificial Sequence: Synthetic oligonucleotide
  Antisense strand to SEQ ID NO: 2292604
acuuagcauaaugaucucu

SEQ ID NO: 2292606 - RNA, 19 nt, Artificial Sequence
  Description of Artificial Sequence: Synthetic oligonucleotide
  Sense strand starting at position 3057 of SEQ ID NO: 1884794
uuaugaaagacuuggguca

SEQ ID NO: 2292607 - RNA, 19 nt, Artificial Sequence
  Description of Artificial Sequence: Synthetic oligonucleotide
  Antisense strand to SEQ ID NO: 2292606
ugacccaagucuuucauaa

SEQ ID NO: 2292608 - RNA, 19 nt, Artificial Sequence
  Description of Artificial Sequence: Synthetic oligonucleotide
  Sense strand starting at position 3058 of SEQ ID NO: 1884794
uaugaaagacuugggucau

SEQ ID NO: 2292609 - RNA, 19 nt, Artificial Sequence
  Description of Artificial Sequence: Synthetic oligonucleotide
  Antisense strand to SEQ ID NO: 2292608
augacccaagucuuucaua

SEQ ID NO: 2292610 - RNA, 19 nt, Artificial Sequence
  Description of Artificial Sequence: Synthetic oligonucleotide
  Sense strand starting at position 3064 of SEQ ID NO: 1884794
agacuugggucauucugga

SEQ ID NO: 2292611 - RNA, 19 nt, Artificial Sequence
  Description of Artificial Sequence: Synthetic oligonucleotide
  Antisense strand to SEQ ID NO: 2292610
uccagaaugacccaagucu

SEQ ID NO: 2292612 - RNA, 19 nt, Artificial Sequence
  Description of Artificial Sequence: Synthetic oligonucleotide
  Sense strand starting at position 3077 of SEQ ID NO: 1884794
ucuggaguucuugauauug

SEQ ID NO: 2292613 - RNA, 19 nt, Artificial Sequence
  Description of Artificial Sequence: Synthetic oligonucleotide
  Antisense strand to SEQ ID NO: 2292612
caauaucaagaacuccaga

SEQ ID NO: 2292614 - RNA, 19 nt, Artificial Sequence
  Description of Artificial Sequence: Synthetic oligonucleotide
  Sense strand starting at position 3083 of SEQ ID NO: 1884794
guucuugauauuggaaggu

SEQ ID NO: 2292615 - RNA, 19 nt, Artificial Sequence
  Description of Artificial Sequence: Synthetic oligonucleotide
  Antisense strand to SEQ ID NO: 2292614
accuuccaauaucaagaac

SEQ ID NO: 2292616 - RNA, 19 nt, Artificial Sequence
  Description of Artificial Sequence: Synthetic oligonucleotide
  Sense strand starting at position 3118 of SEQ ID NO: 1884794
ccgaaaguuuacuuccaac

SEQ ID NO: 2292617 - RNA, 19 nt, Artificial Sequence
  Description of Artificial Sequence: Synthetic oligonucleotide
  Antisense strand to SEQ ID NO: 2292616
guuggaaguaaacuuucgg

SEQ ID NO: 2292618 - RNA, 19 nt, Artificial Sequence
  Description of Artificial Sequence: Synthetic oligonucleotide
  Sense strand starting at position 3176 of SEQ ID NO: 1884794
ggcuuuaucccacacugua

SEQ ID NO: 2292619 - RNA, 19 nt, Artificial Sequence
  Description of Artificial Sequence: Synthetic oligonucleotide
  Antisense strand to SEQ ID NO: 2292618
uacagugugggauaaagcc

SEQ ID NO: 2292620 - RNA, 19 nt, Artificial Sequence
  Description of Artificial Sequence: Synthetic oligonucleotide
  Sense strand starting at position 3230 of SEQ ID NO: 1884794
gaggccagcucuccugaau

SEQ ID NO: 2292621 - RNA, 19 nt, Artificial Sequence
  Description of Artificial Sequence: Synthetic oligonucleotide
  Antisense strand to SEQ ID NO: 2292620
auucaggagagcuggccuc

SEQ ID NO: 2292622 - RNA, 19 nt, Artificial Sequence
  Description of Artificial Sequence: Synthetic oligonucleotide
  Sense strand starting at position 3245 of SEQ ID NO: 1884794
gaauccuuagcugggaaga

SEQ ID NO: 2292623 - RNA, 19 nt, Artificial Sequence
  Description of Artificial Sequence: Synthetic oligonucleotide
  Antisense strand to SEQ ID NO: 2292622
ucuucccagcuaaggauuc

SEQ ID NO: 2292624 - RNA, 19 nt, Artificial Sequence
  Description of Artificial Sequence: Synthetic oligonucleotide
  Sense strand starting at position 3284 of SEQ ID NO: 1884794
guacucaaugaauguauga

SEQ ID NO: 2292625 - RNA, 19 nt, Artificial Sequence
  Description of Artificial Sequence: Synthetic oligonucleotide
  Antisense strand to SEQ ID NO: 2292624
ucauacauucauugaguac

SEQ ID NO: 2292626 - RNA, 19 nt, Artificial Sequence
  Description of Artificial Sequence: Synthetic oligonucleotide
  Sense strand starting at position 3691 of SEQ ID NO: 1884794
ggacguaauguguacagua

SEQ ID NO: 2292627 - RNA, 19 nt, Artificial Sequence
  Description of Artificial Sequence: Synthetic oligonucleotide
  Antisense strand to SEQ ID NO: 2292626
uacuguacacauuacgucc

SEQ ID NO: 2292628 - RNA, 19 nt, Artificial Sequence
  Description of Artificial Sequence: Synthetic oligonucleotide
  Sense strand starting at position 3722 of SEQ ID NO: 1884794
gcuaucuaauggguaugga

SEQ ID NO: 2292629 - RNA, 19 nt, Artificial Sequence
  Description of Artificial Sequence: Synthetic oligonucleotide
  Antisense strand to SEQ ID NO: 2292628
uccauacccauuagauagc

SEQ ID NO: 2292630 - RNA, 19 nt, Artificial Sequence
  Description of Artificial Sequence: Synthetic oligonucleotide
  Sense strand starting at position 3798 of SEQ ID NO: 1884794
gguuguuauuauguaggau

SEQ ID NO: 2292631 - RNA, 19 nt, Artificial Sequence
  Description of Artificial Sequence: Synthetic oligonucleotide
  Antisense strand to SEQ ID NO: 2292630
auccuacauaauaacaacc

SEQ ID NO: 2292632 - RNA, 19 nt, Artificial Sequence
  Description of Artificial Sequence: Synthetic oligonucleotide
  Sense strand starting at position 3799 of SEQ ID NO: 1884794
guuguuauuauguaggaug

SEQ ID NO: 2292633 - RNA, 19 nt, Artificial Sequence
  Description of Artificial Sequence: Synthetic oligonucleotide
  Antisense strand to SEQ ID NO: 2292632
cauccuacauaauaacaac

SEQ ID NO: 2292634 - RNA, 19 nt, Artificial Sequence
  Description of Artificial Sequence: Synthetic oligonucleotide
  Sense strand starting at position 3804 of SEQ ID NO: 1884794
uauuauguaggaugagauu

SEQ ID NO: 2292635 - RNA, 19 nt, Artificial Sequence
  Description of Artificial Sequence: Synthetic oligonucleotide
  Antisense strand to SEQ ID NO: 2292634
aaucucauccuacauaaua

SEQ ID NO: 2292636 - RNA, 19 nt, Artificial Sequence
  Description of Artificial Sequence: Synthetic oligonucleotide
  Sense strand starting at position 258 of SEQ ID NO: 1884795
agugcauuaguuuagcaaa

SEQ ID NO: 2292637 - RNA, 19 nt, Artificial Sequence
  Description of Artificial Sequence: Synthetic oligonucleotide
  Antisense strand to SEQ ID NO: 2292636
uuugcuaaacuaaugcacu

SEQ ID NO: 2292638 - RNA, 19 nt, Artificial Sequence
  Description of Artificial Sequence: Synthetic oligonucleotide
  Sense strand starting at position 284 of SEQ ID NO: 1884795
cagggaugucagugaaaca

SEQ ID NO: 2292639 - RNA, 19 nt, Artificial Sequence
  Description of Artificial Sequence: Synthetic oligonucleotide
  Antisense strand to SEQ ID NO: 2292638
uguuucacugacaucccug

SEQ ID NO: 2292640 - RNA, 19 nt, Artificial Sequence
  Description of Artificial Sequence: Synthetic oligonucleotide
  Sense strand starting at position 295 of SEQ ID NO: 1884795
gugaaacaccuuuguguua

SEQ ID NO: 2292641 - RNA, 19 nt, Artificial Sequence
  Description of Artificial Sequence: Synthetic oligonucleotide
  Antisense strand to SEQ ID NO: 2292640
uaacacaaagguguuucac

SEQ ID NO: 2292642 - RNA, 19 nt, Artificial Sequence
  Description of Artificial Sequence: Synthetic oligonucleotide
  Sense strand starting at position 324 of SEQ ID NO: 1884795
uuuguacaccuuggacaau

SEQ ID NO: 2292643 - RNA, 19 nt, Artificial Sequence
  Description of Artificial Sequence: Synthetic oligonucleotide
  Antisense strand to SEQ ID NO: 2292642
auuguccaagguguacaaa

SEQ ID NO: 2292644 - RNA, 19 nt, Artificial Sequence
  Description of Artificial Sequence: Synthetic oligonucleotide
  Sense strand starting at position 430 of SEQ ID NO: 1884795
ucaguaacccucggugaac

SEQ ID NO: 2292645 - RNA, 19 nt, Artificial Sequence
  Description of Artificial Sequence: Synthetic oligonucleotide
  Antisense strand to SEQ ID NO: 2292644
guucaccgaggguuacuga

SEQ ID NO: 2292646 - RNA, 19 nt, Artificial Sequence
  Description of Artificial Sequence: Synthetic oligonucleotide
  Sense strand starting at position 431 of SEQ ID NO: 1884795
caguaacccucggugaacu

SEQ ID NO: 2292647 - RNA, 19 nt, Artificial Sequence
  Description of Artificial Sequence: Synthetic oligonucleotide
  Antisense strand to SEQ ID NO: 2292646
aguucaccgaggguuacug

SEQ ID NO: 2292648 - RNA, 19 nt, Artificial Sequence
  Description of Artificial Sequence: Synthetic oligonucleotide
  Sense strand starting at position 468 of SEQ ID NO: 1884795
cguacaauacaguaagaua

SEQ ID NO: 2292649 - RNA, 19 nt, Artificial Sequence
  Description of Artificial Sequence: Synthetic oligonucleotide
  Antisense strand to SEQ ID NO: 2292648
uaucuuacuguauuguacg

SEQ ID NO: 2292650 - RNA, 19 nt, Artificial Sequence
  Description of Artificial Sequence: Synthetic oligonucleotide
  Sense strand starting at position 531 of SEQ ID NO: 1884795
uauuguuacgacuguucua

SEQ ID NO: 2292651 - RNA, 19 nt, Artificial Sequence
  Description of Artificial Sequence: Synthetic oligonucleotide
  Antisense strand to SEQ ID NO: 2292650
uagaacagucguaacaaua

SEQ ID NO: 2292652 - RNA, 19 nt, Artificial Sequence
  Description of Artificial Sequence: Synthetic oligonucleotide
  Sense strand starting at position 534 of SEQ ID NO: 1884795
uguuacgacuguucuauuu

SEQ ID NO: 2292653 - RNA, 19 nt, Artificial Sequence
  Description of Artificial Sequence: Synthetic oligonucleotide
  Antisense strand to SEQ ID NO: 2292652
aaauagaacagucguaaca

SEQ ID NO: 2292654 - RNA, 19 nt, Artificial Sequence
  Description of Artificial Sequence: Synthetic oligonucleotide
  Sense strand starting at position 577 of SEQ ID NO: 1884795
uccugugccuaguuuauga

SEQ ID NO: 2292655 - RNA, 19 nt, Artificial Sequence
  Description of Artificial Sequence: Synthetic oligonucleotide
  Antisense strand to SEQ ID NO: 2292654
ucauaaacuaggcacagga

SEQ ID NO: 2292656 - RNA, 19 nt, Artificial Sequence
  Description of Artificial Sequence: Synthetic oligonucleotide
  Sense strand starting at position 602 of SEQ ID NO: 1884795
cuuuaucguagauauggaa

SEQ ID NO: 2292657 - RNA, 19 nt, Artificial Sequence
  Description of Artificial Sequence: Synthetic oligonucleotide
  Antisense strand to SEQ ID NO: 2292656
uuccauaucuacgauaaag

SEQ ID NO: 2292658 - RNA, 19 nt, Artificial Sequence
  Description of Artificial Sequence: Synthetic oligonucleotide
  Sense strand starting at position 782 of SEQ ID NO: 1884795
gugguucccagacaagacu

SEQ ID NO: 2292659 - RNA, 19 nt, Artificial Sequence
  Description of Artificial Sequence: Synthetic oligonucleotide
  Antisense strand to SEQ ID NO: 2292658
agucuugucugggaaccac

SEQ ID NO: 2292660 - RNA, 19 nt, Artificial Sequence
  Description of Artificial Sequence: Synthetic oligonucleotide
  Sense strand starting at position 918 of SEQ ID NO: 1884795
gccaguuaacuguaaguaa

SEQ ID NO: 2292661 - RNA, 19 nt, Artificial Sequence
  Description of Artificial Sequence: Synthetic oligonucleotide
  Antisense strand to SEQ ID NO: 2292660
uuacuuacaguuaacuggc

SEQ ID NO: 2292662 - RNA, 19 nt, Artificial Sequence
  Description of Artificial Sequence: Synthetic oligonucleotide
  Sense strand starting at position 1019 of SEQ ID NO: 1884795
gcgucuuuacuguaaaggu

SEQ ID NO: 2292663 - RNA, 19 nt, Artificial Sequence
  Description of Artificial Sequence: Synthetic oligonucleotide
  Antisense strand to SEQ ID NO: 2292662
accuuuacaguaaagacgc

SEQ ID NO: 2292664 - RNA, 19 nt, Artificial Sequence
  Description of Artificial Sequence: Synthetic oligonucleotide
  Sense strand starting at position 1029 of SEQ ID NO: 1884795
uguaaagguggugguauua

SEQ ID NO: 2292665 - RNA, 19 nt, Artificial Sequence
  Description of Artificial Sequence: Synthetic oligonucleotide
  Antisense strand to SEQ ID NO: 2292664
uaauaccaccaccuuuaca

SEQ ID NO: 2292666 - RNA, 19 nt, Artificial Sequence
  Description of Artificial Sequence: Synthetic oligonucleotide
  Sense strand starting at position 1210 of SEQ ID NO: 1884795
ucgucuuuccuggagugca

SEQ ID NO: 2292667 - RNA, 19 nt, Artificial Sequence
  Description of Artificial Sequence: Synthetic oligonucleotide
  Antisense strand to SEQ ID NO: 2292666
ugcacuccaggaaagacga

SEQ ID NO: 2292668 - RNA, 19 nt, Artificial Sequence
  Description of Artificial Sequence: Synthetic oligonucleotide
  Sense strand starting at position 1644 of SEQ ID NO: 1884795
gggaguguucacugaggga

SEQ ID NO: 2292669 - RNA, 19 nt, Artificial Sequence
  Description of Artificial Sequence: Synthetic oligonucleotide
  Antisense strand to SEQ ID NO: 2292668
ucccucagugaacacuccc

SEQ ID NO: 2292670 - RNA, 19 nt, Artificial Sequence
  Description of Artificial Sequence: Synthetic oligonucleotide
  Sense strand starting at position 2187 of SEQ ID NO: 1884795
ugggcacugaguuguauuu

SEQ ID NO: 2292671 - RNA, 19 nt, Artificial Sequence
  Description of Artificial Sequence: Synthetic oligonucleotide
  Antisense strand to SEQ ID NO: 2292670
aaauacaacucagugccca

SEQ ID NO: 2292672 - RNA, 19 nt, Artificial Sequence
  Description of Artificial Sequence: Synthetic oligonucleotide
  Sense strand starting at position 2403 of SEQ ID NO: 1884795
augagauguuacgugggau

SEQ ID NO: 2292673 - RNA, 19 nt, Artificial Sequence
  Description of Artificial Sequence: Synthetic oligonucleotide
  Antisense strand to SEQ ID NO: 2292672
aucccacguaacaucucau

SEQ ID NO: 2292674 - RNA, 19 nt, Artificial Sequence
  Description of Artificial Sequence: Synthetic oligonucleotide
  Sense strand starting at position 2404 of SEQ ID NO: 1884795
ugagauguuacgugggauc

SEQ ID NO: 2292675 - RNA, 19 nt, Artificial Sequence
  Description of Artificial Sequence: Synthetic oligonucleotide
  Antisense strand to SEQ ID NO: 2292674
gaucccacguaacaucuca

SEQ ID NO: 2292676 - RNA, 19 nt, Artificial Sequence
  Description of Artificial Sequence: Synthetic oligonucleotide
  Sense strand starting at position 2411 of SEQ ID NO: 1884795
uuacgugggauccgaagau

SEQ ID NO: 2292677 - RNA, 19 nt, Artificial Sequence
  Description of Artificial Sequence: Synthetic oligonucleotide
  Antisense strand to SEQ ID NO: 2292676
aucuucggaucccacguaa

SEQ ID NO: 2292678 - RNA, 19 nt, Artificial Sequence
  Description of Artificial Sequence: Synthetic oligonucleotide
  Sense strand starting at position 2432 of SEQ ID NO: 1884795
acaagacucuugccuguga

SEQ ID NO: 2292679 - RNA, 19 nt, Artificial Sequence
  Description of Artificial Sequence: Synthetic oligonucleotide
  Antisense strand to SEQ ID NO: 2292678
ucacaggcaagagucuugu

SEQ ID NO: 2292680 - RNA, 19 nt, Artificial Sequence
  Description of Artificial Sequence: Synthetic oligonucleotide
  Sense strand starting at position 2443 of SEQ ID NO: 1884795
gccugugaccacugaaaug

SEQ ID NO: 2292681 - RNA, 19 nt, Artificial Sequence
  Description of Artificial Sequence: Synthetic oligonucleotide
  Antisense strand to SEQ ID NO: 2292680
cauuucaguggucacaggc

SEQ ID NO: 2292682 - RNA, 19 nt, Artificial Sequence
  Description of Artificial Sequence: Synthetic oligonucleotide
  Sense strand starting at position 2463 of SEQ ID NO: 1884795
ugggacaugucccugguuu

SEQ ID NO: 2292683 - RNA, 19 nt, Artificial Sequence
  Description of Artificial Sequence: Synthetic oligonucleotide
  Antisense strand to SEQ ID NO: 2292682
aaaccagggacauguccca

SEQ ID NO: 2292684 - RNA, 19 nt, Artificial Sequence
  Description of Artificial Sequence: Synthetic oligonucleotide
  Sense strand starting at position 2464 of SEQ ID NO: 1884795
gggacaugucccugguuuc

SEQ ID NO: 2292685 - RNA, 19 nt, Artificial Sequence
  Description of Artificial Sequence: Synthetic oligonucleotide
  Antisense strand to SEQ ID NO: 2292684
gaaaccagggacauguccc

SEQ ID NO: 2292686 - RNA, 19 nt, Artificial Sequence
  Description of Artificial Sequence: Synthetic oligonucleotide
  Sense strand starting at position 2505 of SEQ ID NO: 1884795
gagcuuuggagcugugcau

SEQ ID NO: 2292687 - RNA, 19 nt, Artificial Sequence
  Description of Artificial Sequence: Synthetic oligonucleotide
  Antisense strand to SEQ ID NO: 2292686
augcacagcuccaaagcuc

SEQ ID NO: 2292688 - RNA, 19 nt, Artificial Sequence
  Description of Artificial Sequence: Synthetic oligonucleotide
  Sense strand starting at position 2550 of SEQ ID NO: 1884795
ccaucuauuuaagagugaa

SEQ ID NO: 2292689 - RNA, 19 nt, Artificial Sequence
  Description of Artificial Sequence: Synthetic oligonucleotide
  Antisense strand to SEQ ID NO: 2292688
uucacucuuaaauagaugg

SEQ ID NO: 2292690 - RNA, 19 nt, Artificial Sequence
  Description of Artificial Sequence: Synthetic oligonucleotide
  Sense strand starting at position 2562 of SEQ ID NO: 1884795
gagugaaacccguaucacu

SEQ ID NO: 2292691 - RNA, 19 nt, Artificial Sequence
  Description of Artificial Sequence: Synthetic oligonucleotide
  Antisense strand to SEQ ID NO: 2292690
agugauacggguuucacuc

SEQ ID NO: 2292692 - RNA, 19 nt, Artificial Sequence
  Description of Artificial Sequence: Synthetic oligonucleotide
  Sense strand starting at position 2668 of SEQ ID NO: 1884795
gcaaguauagccuaguugu

SEQ ID NO: 2292693 - RNA, 19 nt, Artificial Sequence
  Description of Artificial Sequence: Synthetic oligonucleotide
  Antisense strand to SEQ ID NO: 2292692
acaacuaggcuauacuugc

SEQ ID NO: 2292694 - RNA, 19 nt, Artificial Sequence
  Description of Artificial Sequence: Synthetic oligonucleotide
  Sense strand starting at position 2671 of SEQ ID NO: 1884795
aguauagccuaguugucua

SEQ ID NO: 2292695 - RNA, 19 nt, Artificial Sequence
  Description of Artificial Sequence: Synthetic oligonucleotide
  Antisense strand to SEQ ID NO: 2292694
uagacaacuaggcuauacu

SEQ ID NO: 2292696 - RNA, 19 nt, Artificial Sequence
  Description of Artificial Sequence: Synthetic oligonucleotide
  Sense strand starting at position 2676 of SEQ ID NO: 1884795
agccuaguugucuaaacug

SEQ ID NO: 2292697 - RNA, 19 nt, Artificial Sequence
  Description of Artificial Sequence: Synthetic oligonucleotide
  Antisense strand to SEQ ID NO: 2292696
caguuuagacaacuaggcu

SEQ ID NO: 2292698 - RNA, 19 nt, Artificial Sequence
  Description of Artificial Sequence: Synthetic oligonucleotide
  Sense strand starting at position 3090 of SEQ ID NO: 1884795
aaguguuguccuuccgcca

SEQ ID NO: 2292699 - RNA, 19 nt, Artificial Sequence
  Description of Artificial Sequence: Synthetic oligonucleotide
  Antisense strand to SEQ ID NO: 2292698
uggcggaaggacaacacuu

SEQ ID NO: 2292700 - RNA, 19 nt, Artificial Sequence
  Description of Artificial Sequence: Synthetic oligonucleotide
  Sense strand starting at position 3120 of SEQ ID NO: 1884795
gugguaaaguuggcaugaa

SEQ ID NO: 2292701 - RNA, 19 nt, Artificial Sequence
  Description of Artificial Sequence: Synthetic oligonucleotide
  Antisense strand to SEQ ID NO: 2292700
uucaugccaacuuuaccac

SEQ ID NO: 2292702 - RNA, 19 nt, Artificial Sequence
  Description of Artificial Sequence: Synthetic oligonucleotide
  Sense strand starting at position 3128 of SEQ ID NO: 1884795
guuggcaugaaauaugcua

SEQ ID NO: 2292703 - RNA, 19 nt, Artificial Sequence
  Description of Artificial Sequence: Synthetic oligonucleotide
  Antisense strand to SEQ ID NO: 2292702
uagcauauuucaugccaac

SEQ ID NO: 2292704 - RNA, 19 nt, Artificial Sequence
  Description of Artificial Sequence: Synthetic oligonucleotide
  Sense strand starting at position 3224 of SEQ ID NO: 1884795
ccaagauacuacuggagga

SEQ ID NO: 2292705 - RNA, 19 nt, Artificial Sequence
  Description of Artificial Sequence: Synthetic oligonucleotide
  Antisense strand to SEQ ID NO: 2292704
uccuccaguaguaucuugg

SEQ ID NO: 2292706 - RNA, 19 nt, Artificial Sequence
  Description of Artificial Sequence: Synthetic oligonucleotide
  Sense strand starting at position 3287 of SEQ ID NO: 1884795
cacuuaguuaagugggagu

SEQ ID NO: 2292707 - RNA, 19 nt, Artificial Sequence
  Description of Artificial Sequence: Synthetic oligonucleotide
  Antisense strand to SEQ ID NO: 2292706
acucccacuuaacuaagug

SEQ ID NO: 2292708 - RNA, 19 nt, Artificial Sequence
  Description of Artificial Sequence: Synthetic oligonucleotide
  Sense strand starting at position 3300 of SEQ ID NO: 1884795
gggaguagucuucaaagua

SEQ ID NO: 2292709 - RNA, 19 nt, Artificial Sequence
  Description of Artificial Sequence: Synthetic oligonucleotide
  Antisense strand to SEQ ID NO: 2292708
uacuuugaagacuacuccc

SEQ ID NO: 2292710 - RNA, 19 nt, Artificial Sequence
  Description of Artificial Sequence: Synthetic oligonucleotide
  Sense strand starting at position 3453 of SEQ ID NO: 1884795
aaauaaagguucccgagua

SEQ ID NO: 2292711 - RNA, 19 nt, Artificial Sequence
  Description of Artificial Sequence: Synthetic oligonucleotide
  Antisense strand to SEQ ID NO: 2292710
uacucgggaaccuuuauuu

SEQ ID NO: 2292712 - RNA, 19 nt, Artificial Sequence
  Description of Artificial Sequence: Synthetic oligonucleotide
  Sense strand starting at position 3850 of SEQ ID NO: 1884795
ggcaaacuaccugaacagu

SEQ ID NO: 2292713 - RNA, 19 nt, Artificial Sequence
  Description of Artificial Sequence: Synthetic oligonucleotide
  Antisense strand to SEQ ID NO: 2292712
acuguucagguaguuugcc

SEQ ID NO: 2292714 - RNA, 19 nt, Artificial Sequence
  Description of Artificial Sequence: Synthetic oligonucleotide
  Sense strand starting at position 3955 of SEQ ID NO: 1884795
guacaaucgucccucagca

SEQ ID NO: 2292715 - RNA, 19 nt, Artificial Sequence
  Description of Artificial Sequence: Synthetic oligonucleotide
  Antisense strand to SEQ ID NO: 2292714
ugcugagggacgauuguac

SEQ ID NO: 2292716 - RNA, 19 nt, Artificial Sequence
  Description of Artificial Sequence: Synthetic oligonucleotide
  Sense strand starting at position 141 of SEQ ID NO: 1884796
agaaguauuugcuggaaga

SEQ ID NO: 2292717 - RNA, 19 nt, Artificial Sequence
  Description of Artificial Sequence: Synthetic oligonucleotide
  Antisense strand to SEQ ID NO: 2292716
ucuuccagcaaauacuucu

SEQ ID NO: 2292718 - RNA, 19 nt, Artificial Sequence
  Description of Artificial Sequence: Synthetic oligonucleotide
  Sense strand starting at position 284 of SEQ ID NO: 1884796
cuaggcaagccuugggaaa

SEQ ID NO: 2292719 - RNA, 19 nt, Artificial Sequence
  Description of Artificial Sequence: Synthetic oligonucleotide
  Antisense strand to SEQ ID NO: 2292718
uuucccaaggcuugccuag

SEQ ID NO: 2292720 - RNA, 19 nt, Artificial Sequence
  Description of Artificial Sequence: Synthetic oligonucleotide
  Sense strand starting at position 295 of SEQ ID NO: 1884796
uugggaaagucacugcuua

SEQ ID NO: 2292721 - RNA, 19 nt, Artificial Sequence
  Description of Artificial Sequence: Synthetic oligonucleotide
  Antisense strand to SEQ ID NO: 2292720
uaagcagugacuuucccaa

SEQ ID NO: 2292722 - RNA, 19 nt, Artificial Sequence
  Description of Artificial Sequence: Synthetic oligonucleotide
  Sense strand starting at position 296 of SEQ ID NO: 1884796
ugggaaagucacugcuuaa

SEQ ID NO: 2292723 - RNA, 19 nt, Artificial Sequence
  Description of Artificial Sequence: Synthetic oligonucleotide
  Antisense strand to SEQ ID NO: 2292722
uuaagcagugacuuuccca

SEQ ID NO: 2292724 - RNA, 19 nt, Artificial Sequence
  Description of Artificial Sequence: Synthetic oligonucleotide
  Sense strand starting at position 355 of SEQ ID NO: 1884796
uauugagagccaugucuac

SEQ ID NO: 2292725 - RNA, 19 nt, Artificial Sequence
  Description of Artificial Sequence: Synthetic oligonucleotide
  Antisense strand to SEQ ID NO: 2292724
guagacauggcucucaaua

SEQ ID NO: 2292726 - RNA, 19 nt, Artificial Sequence
  Description of Artificial Sequence: Synthetic oligonucleotide
  Sense strand starting at position 524 of SEQ ID NO: 1884796
uaaguugugaaagagugau

SEQ ID NO: 2292727 - RNA, 19 nt, Artificial Sequence
  Description of Artificial Sequence: Synthetic oligonucleotide
  Antisense strand to SEQ ID NO: 2292726
aucacucuuucacaacuua

SEQ ID NO: 2292728 - RNA, 19 nt, Artificial Sequence
  Description of Artificial Sequence: Synthetic oligonucleotide
  Sense strand starting at position 528 of SEQ ID NO: 1884796
uugugaaagagugauguga

SEQ ID NO: 2292729 - RNA, 19 nt, Artificial Sequence
  Description of Artificial Sequence: Synthetic oligonucleotide
  Antisense strand to SEQ ID NO: 2292728
ucacaucacucuuucacaa

SEQ ID NO: 2292730 - RNA, 19 nt, Artificial Sequence
  Description of Artificial Sequence: Synthetic oligonucleotide
  Sense strand starting at position 781 of SEQ ID NO: 1884796
agguguacugagcaagcaa

SEQ ID NO: 2292731 - RNA, 19 nt, Artificial Sequence
  Description of Artificial Sequence: Synthetic oligonucleotide
  Antisense strand to SEQ ID NO: 2292730
uugcuugcucaguacaccu

SEQ ID NO: 2292732 - RNA, 19 nt, Artificial Sequence
  Description of Artificial Sequence: Synthetic oligonucleotide
  Sense strand starting at position 1067 of SEQ ID NO: 1884796
ggagcuaagcguaaugcga

SEQ ID NO: 2292733 - RNA, 19 nt, Artificial Sequence
  Description of Artificial Sequence: Synthetic oligonucleotide
  Antisense strand to SEQ ID NO: 2292732
ucgcauuacgcuuagcucc

SEQ ID NO: 2292734 - RNA, 19 nt, Artificial Sequence
  Description of Artificial Sequence: Synthetic oligonucleotide
  Sense strand starting at position 1101 of SEQ ID NO: 1884796
ccggaacgaaguugucuaa

SEQ ID NO: 2292735 - RNA, 19 nt, Artificial Sequence
  Description of Artificial Sequence: Synthetic oligonucleotide
  Antisense strand to SEQ ID NO: 2292734
uuagacaacuucguuccgg

SEQ ID NO: 2292736 - RNA, 19 nt, Artificial Sequence
  Description of Artificial Sequence: Synthetic oligonucleotide
  Sense strand starting at position 1110 of SEQ ID NO: 1884796
aguugucuaaaccgaagau

SEQ ID NO: 2292737 - RNA, 19 nt, Artificial Sequence
  Description of Artificial Sequence: Synthetic oligonucleotide
  Antisense strand to SEQ ID NO: 2292736
aucuucgguuuagacaacu

SEQ ID NO: 2292738 - RNA, 19 nt, Artificial Sequence
  Description of Artificial Sequence: Synthetic oligonucleotide
  Sense strand starting at position 1264 of SEQ ID NO: 1884796
aaacgugagaucuagugca

SEQ ID NO: 2292739 - RNA, 19 nt, Artificial Sequence
  Description of Artificial Sequence: Synthetic oligonucleotide
  Antisense strand to SEQ ID NO: 2292738
ugcacuagaucucacguuu

SEQ ID NO: 2292740 - RNA, 19 nt, Artificial Sequence
  Description of Artificial Sequence: Synthetic oligonucleotide
  Sense strand starting at position 2198 of SEQ ID NO: 1884796
gucgauuagcaccgaaaca

SEQ ID NO: 2292741 - RNA, 19 nt, Artificial Sequence
  Description of Artificial Sequence: Synthetic oligonucleotide
  Antisense strand to SEQ ID NO: 2292740
uguuucggugcuaaucgac

SEQ ID NO: 2292742 - RNA, 19 nt, Artificial Sequence
  Description of Artificial Sequence: Synthetic oligonucleotide
  Sense strand starting at position 2559 of SEQ ID NO: 1884796
cgaaauuaguggucuucug

SEQ ID NO: 2292743 - RNA, 19 nt, Artificial Sequence
  Description of Artificial Sequence: Synthetic oligonucleotide
  Antisense strand to SEQ ID NO: 2292742
cagaagaccacuaauuucg

SEQ ID NO: 2292744 - RNA, 19 nt, Artificial Sequence
  Description of Artificial Sequence: Synthetic oligonucleotide
  Sense strand starting at position 2567 of SEQ ID NO: 1884796
guggucuucugaccugaga

SEQ ID NO: 2292745 - RNA, 19 nt, Artificial Sequence
  Description of Artificial Sequence: Synthetic oligonucleotide
  Antisense strand to SEQ ID NO: 2292744
ucucaggucagaagaccac

SEQ ID NO: 2292746 - RNA, 19 nt, Artificial Sequence
  Description of Artificial Sequence: Synthetic oligonucleotide
  Sense strand starting at position 2569 of SEQ ID NO: 1884796
ggucuucugaccugagacu

SEQ ID NO: 2292747 - RNA, 19 nt, Artificial Sequence
  Description of Artificial Sequence: Synthetic oligonucleotide
  Antisense strand to SEQ ID NO: 2292746
agucucaggucagaagacc

SEQ ID NO: 2292748 - RNA, 19 nt, Artificial Sequence
  Description of Artificial Sequence: Synthetic oligonucleotide
  Sense strand starting at position 2666 of SEQ ID NO: 1884796
ggagcgugggcggaaauua

SEQ ID NO: 2292749 - RNA, 19 nt, Artificial Sequence
  Description of Artificial Sequence: Synthetic oligonucleotide
  Antisense strand to SEQ ID NO: 2292748
uaauuuccgcccacgcucc

SEQ ID NO: 2292750 - RNA, 19 nt, Artificial Sequence
  Description of Artificial Sequence: Synthetic oligonucleotide
  Sense strand starting at position 2677 of SEQ ID NO: 1884796
ggaaauuaguguccacguu

SEQ ID NO: 2292751 - RNA, 19 nt, Artificial Sequence
  Description of Artificial Sequence: Synthetic oligonucleotide
  Antisense strand to SEQ ID NO: 2292750
aacguggacacuaauuucc

SEQ ID NO: 2292752 - RNA, 19 nt, Artificial Sequence
  Description of Artificial Sequence: Synthetic oligonucleotide
  Sense strand starting at position 2879 of SEQ ID NO: 1884796
ccauuaauuuaaggaugua

SEQ ID NO: 2292753 - RNA, 19 nt, Artificial Sequence
  Description of Artificial Sequence: Synthetic oligonucleotide
  Antisense strand to SEQ ID NO: 2292752
uacauccuuaaauuaaugg

SEQ ID NO: 2292754 - RNA, 19 nt, Artificial Sequence
  Description of Artificial Sequence: Synthetic oligonucleotide
  Sense strand starting at position 2919 of SEQ ID NO: 1884796
gaaaguaagaaugguguga

SEQ ID NO: 2292755 - RNA, 19 nt, Artificial Sequence
  Description of Artificial Sequence: Synthetic oligonucleotide
  Antisense strand to SEQ ID NO: 2292754
ucacaccauucuuacuuuc

SEQ ID NO: 2292756 - RNA, 19 nt, Artificial Sequence
  Description of Artificial Sequence: Synthetic oligonucleotide
  Sense strand starting at position 2923 of SEQ ID NO: 1884796
guaagaauggugugaauua

SEQ ID NO: 2292757 - RNA, 19 nt, Artificial Sequence
  Description of Artificial Sequence: Synthetic oligonucleotide
  Antisense strand to SEQ ID NO: 2292756
uaauucacaccauucuuac

SEQ ID NO: 2292758 - RNA, 19 nt, Artificial Sequence
  Description of Artificial Sequence: Synthetic oligonucleotide
  Sense strand starting at position 2955 of SEQ ID NO: 1884796
ccuuccaguguuuauuaaa

SEQ ID NO: 2292759 - RNA, 19 nt, Artificial Sequence
  Description of Artificial Sequence: Synthetic oligonucleotide
  Antisense strand to SEQ ID NO: 2292758
uuuaauaaacacuggaagg

SEQ ID NO: 2292760 - RNA, 19 nt, Artificial Sequence
  Description of Artificial Sequence: Synthetic oligonucleotide
  Sense strand starting at position 2980 of SEQ ID NO: 1884796
uucgguguccuugagagga

SEQ ID NO: 2292761 - RNA, 19 nt, Artificial Sequence
  Description of Artificial Sequence: Synthetic oligonucleotide
  Antisense strand to SEQ ID NO: 2292760
uccucucaaggacaccgaa

SEQ ID NO: 2292762 - RNA, 19 nt, Artificial Sequence
  Description of Artificial Sequence: Synthetic oligonucleotide
  Sense strand starting at position 2984 of SEQ ID NO: 1884796
guguccuugagaggaguua

SEQ ID NO: 2292763 - RNA, 19 nt, Artificial Sequence
  Description of Artificial Sequence: Synthetic oligonucleotide
  Antisense strand to SEQ ID NO: 2292762
uaacuccucucaaggacac

SEQ ID NO: 2292764 - RNA, 19 nt, Artificial Sequence
  Description of Artificial Sequence: Synthetic oligonucleotide
  Sense strand starting at position 2985 of SEQ ID NO: 1884796
uguccuugagaggaguuaa

SEQ ID NO: 2292765 - RNA, 19 nt, Artificial Sequence
  Description of Artificial Sequence: Synthetic oligonucleotide
  Antisense strand to SEQ ID NO: 2292764
uuaacuccucucaaggaca

SEQ ID NO: 2292766 - RNA, 19 nt, Artificial Sequence
  Description of Artificial Sequence: Synthetic oligonucleotide
  Sense strand starting at position 3170 of SEQ ID NO: 1884796
ucgacaugcacuuggauca

SEQ ID NO: 2292767 - RNA, 19 nt, Artificial Sequence
  Description of Artificial Sequence: Synthetic oligonucleotide
  Antisense strand to SEQ ID NO: 2292766
ugauccaagugcaugucga

SEQ ID NO: 2292768 - RNA, 19 nt, Artificial Sequence
  Description of Artificial Sequence: Synthetic oligonucleotide
  Sense strand starting at position 3374 of SEQ ID NO: 1884796
cuuguuacucccuagcagu

SEQ ID NO: 2292769 - RNA, 19 nt, Artificial Sequence
  Description of Artificial Sequence: Synthetic oligonucleotide
  Antisense strand to SEQ ID NO: 2292768
acugcuagggaguaacaag

SEQ ID NO: 2292770 - RNA, 19 nt, Artificial Sequence
  Description of Artificial Sequence: Synthetic oligonucleotide
  Sense strand starting at position 3491 of SEQ ID NO: 1884796
uguggucuuacuuaacugu

SEQ ID NO: 2292771 - RNA, 19 nt, Artificial Sequence
  Description of Artificial Sequence: Synthetic oligonucleotide
  Antisense strand to SEQ ID NO: 2292770
acaguuaaguaagaccaca

SEQ ID NO: 2292772 - RNA, 19 nt, Artificial Sequence
  Description of Artificial Sequence: Synthetic oligonucleotide
  Sense strand starting at position 3494 of SEQ ID NO: 1884796
ggucuuacuuaacuguaaa

SEQ ID NO: 2292773 - RNA, 19 nt, Artificial Sequence
  Description of Artificial Sequence: Synthetic oligonucleotide
  Antisense strand to SEQ ID NO: 2292772
uuuacaguuaaguaagacc

SEQ ID NO: 2292774 - RNA, 19 nt, Artificial Sequence
  Description of Artificial Sequence: Synthetic oligonucleotide
  Sense strand starting at position 3509 of SEQ ID NO: 1884796
uaaagugagguuugaagua

SEQ ID NO: 2292775 - RNA, 19 nt, Artificial Sequence
  Description of Artificial Sequence: Synthetic oligonucleotide
  Antisense strand to SEQ ID NO: 2292774
uacuucaaaccucacuuua

SEQ ID NO: 2292776 - RNA, 19 nt, Artificial Sequence
  Description of Artificial Sequence: Synthetic oligonucleotide
  Sense strand starting at position 3518 of SEQ ID NO: 1884796
guuugaaguaggugucuga

SEQ ID NO: 2292777 - RNA, 19 nt, Artificial Sequence
  Description of Artificial Sequence: Synthetic oligonucleotide
  Antisense strand to SEQ ID NO: 2292776
ucagacaccuacuucaaac

SEQ ID NO: 2292778 - RNA, 19 nt, Artificial Sequence
  Description of Artificial Sequence: Synthetic oligonucleotide
  Sense strand starting at position 3521 of SEQ ID NO: 1884796
ugaaguaggugucugagau

SEQ ID NO: 2292779 - RNA, 19 nt, Artificial Sequence
  Description of Artificial Sequence: Synthetic oligonucleotide
  Antisense strand to SEQ ID NO: 2292778
aucucagacaccuacuuca

SEQ ID NO: 2292780 - RNA, 19 nt, Artificial Sequence
  Description of Artificial Sequence: Synthetic oligonucleotide
  Sense strand starting at position 3529 of SEQ ID NO: 1884796
gugucugagauacaucaug

SEQ ID NO: 2292781 - RNA, 19 nt, Artificial Sequence
  Description of Artificial Sequence: Synthetic oligonucleotide
  Antisense strand to SEQ ID NO: 2292780
caugauguaucucagacac

SEQ ID NO: 2292782 - RNA, 19 nt, Artificial Sequence
  Description of Artificial Sequence: Synthetic oligonucleotide
  Sense strand starting at position 3568 of SEQ ID NO: 1884796
ggagaauuaaguugcuaag

SEQ ID NO: 2292783 - RNA, 19 nt, Artificial Sequence
  Description of Artificial Sequence: Synthetic oligonucleotide
  Antisense strand to SEQ ID NO: 2292782
cuuagcaacuuaauucucc

SEQ ID NO: 2292784 - RNA, 19 nt, Artificial Sequence
  Description of Artificial Sequence: Synthetic oligonucleotide
  Sense strand starting at position 3587 of SEQ ID NO: 1884796
cgcuauguuauacacggaa

SEQ ID NO: 2292785 - RNA, 19 nt, Artificial Sequence
  Description of Artificial Sequence: Synthetic oligonucleotide
  Antisense strand to SEQ ID NO: 2292784
uuccguguauaacauagcg

SEQ ID NO: 2292786 - RNA, 19 nt, Artificial Sequence
  Description of Artificial Sequence: Synthetic oligonucleotide
  Sense strand starting at position 3590 of SEQ ID NO: 1884796
uauguuauacacggaaaua

SEQ ID NO: 2292787 - RNA, 19 nt, Artificial Sequence
  Description of Artificial Sequence: Synthetic oligonucleotide
  Antisense strand to SEQ ID NO: 2292786
uauuuccguguauaacaua

SEQ ID NO: 2292788 - RNA, 19 nt, Artificial Sequence
  Description of Artificial Sequence: Synthetic oligonucleotide
  Sense strand starting at position 3601 of SEQ ID NO: 1884796
cggaaauacuguccuaaca

SEQ ID NO: 2292789 - RNA, 19 nt, Artificial Sequence
  Description of Artificial Sequence: Synthetic oligonucleotide
  Antisense strand to SEQ ID NO: 2292788
uguuaggacaguauuuccg

SEQ ID NO: 2292790 - RNA, 19 nt, Artificial Sequence
  Description of Artificial Sequence: Synthetic oligonucleotide
  Sense strand starting at position 3868 of SEQ ID NO: 1884796
aaguaaguguggucugaca

SEQ ID NO: 2292791 - RNA, 19 nt, Artificial Sequence
  Description of Artificial Sequence: Synthetic oligonucleotide
  Antisense strand to SEQ ID NO: 2292790
ugucagaccacacuuacuu

SEQ ID NO: 2292792 - RNA, 19 nt, Artificial Sequence
  Description of Artificial Sequence: Synthetic oligonucleotide
  Sense strand starting at position 3870 of SEQ ID NO: 1884796
guaaguguggucugacaaa

SEQ ID NO: 2292793 - RNA, 19 nt, Artificial Sequence
  Description of Artificial Sequence: Synthetic oligonucleotide
  Antisense strand to SEQ ID NO: 2292792
uuugucagaccacacuuac

SEQ ID NO: 2292794 - RNA, 19 nt, Artificial Sequence
  Description of Artificial Sequence: Synthetic oligonucleotide
  Sense strand starting at position 3977 of SEQ ID NO: 1884796
gacggagauuuggagauaa

SEQ ID NO: 2292795 - RNA, 19 nt, Artificial Sequence
  Description of Artificial Sequence: Synthetic oligonucleotide
  Antisense strand to SEQ ID NO: 2292794
uuaucuccaaaucuccguc

SEQ ID NO: 2292796 - RNA, 19 nt, Artificial Sequence
  Description of Artificial Sequence: Synthetic oligonucleotide
  Sense strand starting at position 3237 of SEQ ID NO: 1884797
ggguuaaguaaauguauua

SEQ ID NO: 2292797 - RNA, 19 nt, Artificial Sequence
  Description of Artificial Sequence: Synthetic oligonucleotide
  Antisense strand to SEQ ID NO: 2292796
uaauacauuuacuuaaccc

SEQ ID NO: 2292798 - RNA, 19 nt, Artificial Sequence
  Description of Artificial Sequence: Synthetic oligonucleotide
  Sense strand starting at position 3561 of SEQ ID NO: 1884797
cuuggaugccuccagaucu

SEQ ID NO: 2292799 - RNA, 19 nt, Artificial Sequence
  Description of Artificial Sequence: Synthetic oligonucleotide
  Antisense strand to SEQ ID NO: 2292798
agaucuggaggcauccaag

SEQ ID NO: 2292800 - RNA, 19 nt, Artificial Sequence
  Description of Artificial Sequence: Synthetic oligonucleotide
  Sense strand starting at position 3740 of SEQ ID NO: 1884797
acagaagacucuucgguga

SEQ ID NO: 2292801 - RNA, 19 nt, Artificial Sequence
  Description of Artificial Sequence: Synthetic oligonucleotide
  Antisense strand to SEQ ID NO: 2292800
ucaccgaagagucuucugu

SEQ ID NO: 2292802 - RNA, 19 nt, Artificial Sequence
  Description of Artificial Sequence: Synthetic oligonucleotide
  Sense strand starting at position 3742 of SEQ ID NO: 1884797
agaagacucuucggugaua

SEQ ID NO: 2292803 - RNA, 19 nt, Artificial Sequence
  Description of Artificial Sequence: Synthetic oligonucleotide
  Antisense strand to SEQ ID NO: 2292802
uaucaccgaagagucuucu

SEQ ID NO: 2292804 - RNA, 19 nt, Artificial Sequence
  Description of Artificial Sequence: Synthetic oligonucleotide
  Sense strand starting at position 3743 of SEQ ID NO: 1884797
gaagacucuucggugauau

SEQ ID NO: 2292805 - RNA, 19 nt, Artificial Sequence
  Description of Artificial Sequence: Synthetic oligonucleotide
  Antisense strand to SEQ ID NO: 2292804
auaucaccgaagagucuuc

SEQ ID NO: 2292806 - RNA, 19 nt, Artificial Sequence
  Description of Artificial Sequence: Synthetic oligonucleotide
  Sense strand starting at position 3744 of SEQ ID NO: 1884797
aagacucuucggugauauu

SEQ ID NO: 2292807 - RNA, 19 nt, Artificial Sequence
  Description of Artificial Sequence: Synthetic oligonucleotide
  Antisense strand to SEQ ID NO: 2292806
aauaucaccgaagagucuu

SEQ ID NO: 2292808 - RNA, 19 nt, Artificial Sequence
  Description of Artificial Sequence: Synthetic oligonucleotide
  Sense strand starting at position 24 of SEQ ID NO: 1884798
ggagguaucugacuuguua

SEQ ID NO: 2292809 - RNA, 19 nt, Artificial Sequence
  Description of Artificial Sequence: Synthetic oligonucleotide
  Antisense strand to SEQ ID NO: 2292808
uaacaagucagauaccucc

SEQ ID NO: 2292810 - RNA, 19 nt, Artificial Sequence
  Description of Artificial Sequence: Synthetic oligonucleotide
  Sense strand starting at position 45 of SEQ ID NO: 1884798
gcucuaugccgauugccua

SEQ ID NO: 2292811 - RNA, 19 nt, Artificial Sequence
  Description of Artificial Sequence: Synthetic oligonucleotide
  Antisense strand to SEQ ID NO: 2292810
uaggcaaucggcauagagc

SEQ ID NO: 2292812 - RNA, 19 nt, Artificial Sequence
  Description of Artificial Sequence: Synthetic oligonucleotide
  Sense strand starting at position 251 of SEQ ID NO: 1884798
ggaugacucugagcugagu

SEQ ID NO: 2292813 - RNA, 19 nt, Artificial Sequence
  Description of Artificial Sequence: Synthetic oligonucleotide
  Antisense strand to SEQ ID NO: 2292812
acucagcucagagucaucc

SEQ ID NO: 2292814 - RNA, 19 nt, Artificial Sequence
  Description of Artificial Sequence: Synthetic oligonucleotide
  Sense strand starting at position 284 of SEQ ID NO: 1884798
agcuuuaggguuuaaugca

SEQ ID NO: 2292815 - RNA, 19 nt, Artificial Sequence
  Description of Artificial Sequence: Synthetic oligonucleotide
  Antisense strand to SEQ ID NO: 2292814
ugcauuaaacccuaaagcu

SEQ ID NO: 2292816 - RNA, 19 nt, Artificial Sequence
  Description of Artificial Sequence: Synthetic oligonucleotide
  Sense strand starting at position 461 of SEQ ID NO: 1884798
ucauaauggacccgugacu

SEQ ID NO: 2292817 - RNA, 19 nt, Artificial Sequence
  Description of Artificial Sequence: Synthetic oligonucleotide
  Antisense strand to SEQ ID NO: 2292816
agucacggguccauuauga

SEQ ID NO: 2292818 - RNA, 19 nt, Artificial Sequence
  Description of Artificial Sequence: Synthetic oligonucleotide
  Sense strand starting at position 499 of SEQ ID NO: 1884798
agcuaaugucaugaucugu

SEQ ID NO: 2292819 - RNA, 19 nt, Artificial Sequence
  Description of Artificial Sequence: Synthetic oligonucleotide
  Antisense strand to SEQ ID NO: 2292818
acagaucaugacauuagcu

SEQ ID NO: 2292820 - RNA, 19 nt, Artificial Sequence
  Description of Artificial Sequence: Synthetic oligonucleotide
  Sense strand starting at position 581 of SEQ ID NO: 1884798
gguggaaugcuucacugga

SEQ ID NO: 2292821 - RNA, 19 nt, Artificial Sequence
  Description of Artificial Sequence: Synthetic oligonucleotide
  Antisense strand to SEQ ID NO: 2292820
uccagugaagcauuccacc

SEQ ID NO: 2292822 - RNA, 19 nt, Artificial Sequence
  Description of Artificial Sequence: Synthetic oligonucleotide
  Sense strand starting at position 733 of SEQ ID NO: 1884798
aucauagcaucuuuggaga

SEQ ID NO: 2292823 - RNA, 19 nt, Artificial Sequence
  Description of Artificial Sequence: Synthetic oligonucleotide
  Antisense strand to SEQ ID NO: 2292822
ucuccaaagaugcuaugau

SEQ ID NO: 2292824 - RNA, 19 nt, Artificial Sequence
  Description of Artificial Sequence: Synthetic oligonucleotide
  Sense strand starting at position 794 of SEQ ID NO: 1884798
uuggaucucucugcugaga

SEQ ID NO: 2292825 - RNA, 19 nt, Artificial Sequence
  Description of Artificial Sequence: Synthetic oligonucleotide
  Antisense strand to SEQ ID NO: 2292824
ucucagcagagagauccaa

SEQ ID NO: 2292826 - RNA, 19 nt, Artificial Sequence
  Description of Artificial Sequence: Synthetic oligonucleotide
  Sense strand starting at position 803 of SEQ ID NO: 1884798
ucugcugagauuuggcauu

SEQ ID NO: 2292827 - RNA, 19 nt, Artificial Sequence
  Description of Artificial Sequence: Synthetic oligonucleotide
  Antisense strand to SEQ ID NO: 2292826
aaugccaaaucucagcaga

SEQ ID NO: 2292828 - RNA, 19 nt, Artificial Sequence
  Description of Artificial Sequence: Synthetic oligonucleotide
  Sense strand starting at position 837 of SEQ ID NO: 1884798
uccuaauucuuccuggaag

SEQ ID NO: 2292829 - RNA, 19 nt, Artificial Sequence
  Description of Artificial Sequence: Synthetic oligonucleotide
  Antisense strand to SEQ ID NO: 2292828
cuuccaggaagaauuagga

SEQ ID NO: 2292830 - RNA, 19 nt, Artificial Sequence
  Description of Artificial Sequence: Synthetic oligonucleotide
  Sense strand starting at position 888 of SEQ ID NO: 1884798
gucugagagcuggguagaa

SEQ ID NO: 2292831 - RNA, 19 nt, Artificial Sequence
  Description of Artificial Sequence: Synthetic oligonucleotide
  Antisense strand to SEQ ID NO: 2292830
uucuacccagcucucagac

SEQ ID NO: 2292832 - RNA, 19 nt, Artificial Sequence
  Description of Artificial Sequence: Synthetic oligonucleotide
  Sense strand starting at position 1026 of SEQ ID NO: 1884798
uauuuaaagugggaaucau

SEQ ID NO: 2292833 - RNA, 19 nt, Artificial Sequence
  Description of Artificial Sequence: Synthetic oligonucleotide
  Antisense strand to SEQ ID NO: 2292832
augauucccacuuuaaaua

SEQ ID NO: 2292834 - RNA, 19 nt, Artificial Sequence
  Description of Artificial Sequence: Synthetic oligonucleotide
  Sense strand starting at position 1107 of SEQ ID NO: 1884798
uuaauaguaccuggcacau

SEQ ID NO: 2292835 - RNA, 19 nt, Artificial Sequence
  Description of Artificial Sequence: Synthetic oligonucleotide
  Antisense strand to SEQ ID NO: 2292834
augugccagguacuauuaa

SEQ ID NO: 2292836 - RNA, 19 nt, Artificial Sequence
  Description of Artificial Sequence: Synthetic oligonucleotide
  Sense strand starting at position 1243 of SEQ ID NO: 1884798
cuggaugucuuuccucaca

SEQ ID NO: 2292837 - RNA, 19 nt, Artificial Sequence
  Description of Artificial Sequence: Synthetic oligonucleotide
  Antisense strand to SEQ ID NO: 2292836
ugugaggaaagacauccag

SEQ ID NO: 2292838 - RNA, 19 nt, Artificial Sequence
  Description of Artificial Sequence: Synthetic oligonucleotide
  Sense strand starting at position 1245 of SEQ ID NO: 1884798
ggaugucuuuccucacaag

SEQ ID NO: 2292839 - RNA, 19 nt, Artificial Sequence
  Description of Artificial Sequence: Synthetic oligonucleotide
  Antisense strand to SEQ ID NO: 2292838
cuugugaggaaagacaucc

SEQ ID NO: 2292840 - RNA, 19 nt, Artificial Sequence
  Description of Artificial Sequence: Synthetic oligonucleotide
  Sense strand starting at position 1439 of SEQ ID NO: 1884798
aacagauucuggguccuuu

SEQ ID NO: 2292841 - RNA, 19 nt, Artificial Sequence
  Description of Artificial Sequence: Synthetic oligonucleotide
  Antisense strand to SEQ ID NO: 2292840
aaaggacccagaaucuguu

SEQ ID NO: 2292842 - RNA, 19 nt, Artificial Sequence
  Description of Artificial Sequence: Synthetic oligonucleotide
  Sense strand starting at position 1609 of SEQ ID NO: 1884798
auacuaaucugucugcaga

SEQ ID NO: 2292843 - RNA, 19 nt, Artificial Sequence
  Description of Artificial Sequence: Synthetic oligonucleotide
  Antisense strand to SEQ ID NO: 2292842
ucugcagacagauuaguau

SEQ ID NO: 2292844 - RNA, 19 nt, Artificial Sequence
  Description of Artificial Sequence: Synthetic oligonucleotide
  Sense strand starting at position 1668 of SEQ ID NO: 1884798
gcuggaaucucacucaaac

SEQ ID NO: 2292845 - RNA, 19 nt, Artificial Sequence
  Description of Artificial Sequence: Synthetic oligonucleotide
  Antisense strand to SEQ ID NO: 2292844
guuugagugagauuccagc

SEQ ID NO: 2292846 - RNA, 19 nt, Artificial Sequence
  Description of Artificial Sequence: Synthetic oligonucleotide
  Sense strand starting at position 2029 of SEQ ID NO: 1884798
gugacaucaucaguuugau

SEQ ID NO: 2292847 - RNA, 19 nt, Artificial Sequence
  Description of Artificial Sequence: Synthetic oligonucleotide
  Antisense strand to SEQ ID NO: 2292846
aucaaacugaugaugucac

SEQ ID NO: 2292848 - RNA, 19 nt, Artificial Sequence
  Description of Artificial Sequence: Synthetic oligonucleotide
  Sense strand starting at position 2032 of SEQ ID NO: 1884798
acaucaucaguuugauuag

SEQ ID NO: 2292849 - RNA, 19 nt, Artificial Sequence
  Description of Artificial Sequence: Synthetic oligonucleotide
  Antisense strand to SEQ ID NO: 2292848
cuaaucaaacugaugaugu

SEQ ID NO: 2292850 - RNA, 19 nt, Artificial Sequence
  Description of Artificial Sequence: Synthetic oligonucleotide
  Sense strand starting at position 2035 of SEQ ID NO: 1884798
ucaucaguuugauuagaag

SEQ ID NO: 2292851 - RNA, 19 nt, Artificial Sequence
  Description of Artificial Sequence: Synthetic oligonucleotide
  Antisense strand to SEQ ID NO: 2292850
cuucuaaucaaacugauga

SEQ ID NO: 2292852 - RNA, 19 nt, Artificial Sequence
  Description of Artificial Sequence: Synthetic oligonucleotide
  Sense strand starting at position 2844 of SEQ ID NO: 1884798
ggugauagauacccugaca

SEQ ID NO: 2292853 - RNA, 19 nt, Artificial Sequence
  Description of Artificial Sequence: Synthetic oligonucleotide
  Antisense strand to SEQ ID NO: 2292852
ugucaggguaucuaucacc

SEQ ID NO: 2292854 - RNA, 19 nt, Artificial Sequence
  Description of Artificial Sequence: Synthetic oligonucleotide
  Sense strand starting at position 3060 of SEQ ID NO: 1884798
uggagauuccagcacuucu

SEQ ID NO: 2292855 - RNA, 19 nt, Artificial Sequence
  Description of Artificial Sequence: Synthetic oligonucleotide
  Antisense strand to SEQ ID NO: 2292854
agaagugcuggaaucucca

SEQ ID NO: 2292856 - RNA, 19 nt, Artificial Sequence
  Description of Artificial Sequence: Synthetic oligonucleotide
  Sense strand starting at position 3078 of SEQ ID NO: 1884798
ucuugcaggaguugauaga

SEQ ID NO: 2292857 - RNA, 19 nt, Artificial Sequence
  Description of Artificial Sequence: Synthetic oligonucleotide
  Antisense strand to SEQ ID NO: 2292856
ucuaucaacuccugcaaga

SEQ ID NO: 2292858 - RNA, 19 nt, Artificial Sequence
  Description of Artificial Sequence: Synthetic oligonucleotide
  Sense strand starting at position 3146 of SEQ ID NO: 1884798
acuugacuccauugacagu

SEQ ID NO: 2292859 - RNA, 19 nt, Artificial Sequence
  Description of Artificial Sequence: Synthetic oligonucleotide
  Antisense strand to SEQ ID NO: 2292858
acugucaauggagucaagu

SEQ ID NO: 2292860 - RNA, 19 nt, Artificial Sequence
  Description of Artificial Sequence: Synthetic oligonucleotide
  Sense strand starting at position 3298 of SEQ ID NO: 1884798
uucucugaccacuauggua

SEQ ID NO: 2292861 - RNA, 19 nt, Artificial Sequence
  Description of Artificial Sequence: Synthetic oligonucleotide
  Antisense strand to SEQ ID NO: 2292860
uaccauaguggucagagaa

SEQ ID NO: 2292862 - RNA, 19 nt, Artificial Sequence
  Description of Artificial Sequence: Synthetic oligonucleotide
  Sense strand starting at position 3300 of SEQ ID NO: 1884798
cucugaccacuaugguauu

SEQ ID NO: 2292863 - RNA, 19 nt, Artificial Sequence
  Description of Artificial Sequence: Synthetic oligonucleotide
  Antisense strand to SEQ ID NO: 2292862
aauaccauaguggucagag

SEQ ID NO: 2292864 - RNA, 19 nt, Artificial Sequence
  Description of Artificial Sequence: Synthetic oligonucleotide
  Sense strand starting at position 3728 of SEQ ID NO: 1884798
cagacucuacagugggaau

SEQ ID NO: 2292865 - RNA, 19 nt, Artificial Sequence
  Description of Artificial Sequence: Synthetic oligonucleotide
  Antisense strand to SEQ ID NO: 2292864
auucccacuguagagucug

SEQ ID NO: 2292866 - RNA, 19 nt, Artificial Sequence
  Description of Artificial Sequence: Synthetic oligonucleotide
  Sense strand starting at position 3778 of SEQ ID NO: 1884798
gccaauaaaguugguaaau

SEQ ID NO: 2292867 - RNA, 19 nt, Artificial Sequence
  Description of Artificial Sequence: Synthetic oligonucleotide
  Antisense strand to SEQ ID NO: 2292866
auuuaccaacuuuauuggc

SEQ ID NO: 2292868 - RNA, 19 nt, Artificial Sequence
  Description of Artificial Sequence: Synthetic oligonucleotide
  Sense strand starting at position 3779 of SEQ ID NO: 1884798
ccaauaaaguugguaaauu

SEQ ID NO: 2292869 - RNA, 19 nt, Artificial Sequence
  Description of Artificial Sequence: Synthetic oligonucleotide
  Antisense strand to SEQ ID NO: 2292868
aauuuaccaacuuuauugg

SEQ ID NO: 2292870 - RNA, 19 nt, Artificial Sequence
  Description of Artificial Sequence: Synthetic oligonucleotide
  Sense strand starting at position 3805 of SEQ ID NO: 1884798
augggcaaauucuuuaaca

SEQ ID NO: 2292871 - RNA, 19 nt, Artificial Sequence
  Description of Artificial Sequence: Synthetic oligonucleotide
  Antisense strand to SEQ ID NO: 2292870
uguuaaagaauuugcccau

SEQ ID NO: 2292872 - RNA, 19 nt, Artificial Sequence
  Description of Artificial Sequence: Synthetic oligonucleotide
  Sense strand starting at position 3806 of SEQ ID NO: 1884798
ugggcaaauucuuuaacau

SEQ ID NO: 2292873 - RNA, 19 nt, Artificial Sequence
  Description of Artificial Sequence: Synthetic oligonucleotide
  Antisense strand to SEQ ID NO: 2292872
auguuaaagaauuugccca

SEQ ID NO: 2292874 - RNA, 19 nt, Artificial Sequence
  Description of Artificial Sequence: Synthetic oligonucleotide
  Sense strand starting at position 3831 of SEQ ID NO: 1884798
ccuaucgaugcucacuaaa

SEQ ID NO: 2292875 - RNA, 19 nt, Artificial Sequence
  Description of Artificial Sequence: Synthetic oligonucleotide
  Antisense strand to SEQ ID NO: 2292874
uuuagugagcaucgauagg

SEQ ID NO: 2292876 - RNA, 19 nt, Artificial Sequence
  Description of Artificial Sequence: Synthetic oligonucleotide
  Sense strand starting at position 3834 of SEQ ID NO: 1884798
aucgaugcucacuaaagaa

SEQ ID NO: 2292877 - RNA, 19 nt, Artificial Sequence
  Description of Artificial Sequence: Synthetic oligonucleotide
  Antisense strand to SEQ ID NO: 2292876
uucuuuagugagcaucgau

SEQ ID NO: 2292878 - RNA, 19 nt, Artificial Sequence
  Description of Artificial Sequence: Synthetic oligonucleotide
  Sense strand starting at position 3861 of SEQ ID NO: 1884798
cuuugaauauccguaaauc

SEQ ID NO: 2292879 - RNA, 19 nt, Artificial Sequence
  Description of Artificial Sequence: Synthetic oligonucleotide
  Antisense strand to SEQ ID NO: 2292878
gauuuacggauauucaaag

SEQ ID NO: 2292880 - RNA, 19 nt, Artificial Sequence
  Description of Artificial Sequence: Synthetic oligonucleotide
  Sense strand starting at position 3862 of SEQ ID NO: 1884798
uuugaauauccguaaaucu

SEQ ID NO: 2292881 - RNA, 19 nt, Artificial Sequence
  Description of Artificial Sequence: Synthetic oligonucleotide
  Antisense strand to SEQ ID NO: 2292880
agauuuacggauauucaaa

SEQ ID NO: 2292882 - RNA, 19 nt, Artificial Sequence
  Description of Artificial Sequence: Synthetic oligonucleotide
  Sense strand starting at position 3939 of SEQ ID NO: 1884798
cagauaguuuaauugguga

SEQ ID NO: 2292883 - RNA, 19 nt, Artificial Sequence
  Description of Artificial Sequence: Synthetic oligonucleotide
  Antisense strand to SEQ ID NO: 2292882
ucaccaauuaaacuaucug

SEQ ID NO: 2292884 - RNA, 19 nt, Artificial Sequence
  Description of Artificial Sequence: Synthetic oligonucleotide
  Sense strand starting at position 3941 of SEQ ID NO: 1884798
gauaguuuaauuggugagu

SEQ ID NO: 2292885 - RNA, 19 nt, Artificial Sequence
  Description of Artificial Sequence: Synthetic oligonucleotide
  Antisense strand to SEQ ID NO: 2292884
acucaccaauuaaacuauc

SEQ ID NO: 2292886 - RNA, 19 nt, Artificial Sequence
  Description of Artificial Sequence: Synthetic oligonucleotide
  Sense strand starting at position 3944 of SEQ ID NO: 1884798
aguuuaauuggugaguucu

SEQ ID NO: 2292887 - RNA, 19 nt, Artificial Sequence
  Description of Artificial Sequence: Synthetic oligonucleotide
  Antisense strand to SEQ ID NO: 2292886
agaacucaccaauuaaacu

SEQ ID NO: 2292888 - RNA, 19 nt, Artificial Sequence
  Description of Artificial Sequence: Synthetic oligonucleotide
  Sense strand starting at position 180 of SEQ ID NO: 1884799
cgggaaucaucacaaauag

SEQ ID NO: 2292889 - RNA, 19 nt, Artificial Sequence
  Description of Artificial Sequence: Synthetic oligonucleotide
  Antisense strand to SEQ ID NO: 2292888
cuauuugugaugauucccg

SEQ ID NO: 2292890 - RNA, 19 nt, Artificial Sequence
  Description of Artificial Sequence: Synthetic oligonucleotide
  Sense strand starting at position 198 of SEQ ID NO: 1884799
ggacauaacuaguauaaac

SEQ ID NO: 2292891 - RNA, 19 nt, Artificial Sequence
  Description of Artificial Sequence: Synthetic oligonucleotide
  Antisense strand to SEQ ID NO: 2292890
guuuauacuaguuaugucc

SEQ ID NO: 2292892 - RNA, 19 nt, Artificial Sequence
  Description of Artificial Sequence: Synthetic oligonucleotide
  Sense strand starting at position 449 of SEQ ID NO: 1884799
ucugcagugagcuagacuu

SEQ ID NO: 2292893 - RNA, 19 nt, Artificial Sequence
  Description of Artificial Sequence: Synthetic oligonucleotide
  Antisense strand to SEQ ID NO: 2292892
aagucuagcucacugcaga

SEQ ID NO: 2292894 - RNA, 19 nt, Artificial Sequence
  Description of Artificial Sequence: Synthetic oligonucleotide
  Sense strand starting at position 480 of SEQ ID NO: 1884799
ugauaaugccaccgugagu

SEQ ID NO: 2292895 - RNA, 19 nt, Artificial Sequence
  Description of Artificial Sequence: Synthetic oligonucleotide
  Antisense strand to SEQ ID NO: 2292894
acucacgguggcauuauca

SEQ ID NO: 2292896 - RNA, 19 nt, Artificial Sequence
  Description of Artificial Sequence: Synthetic oligonucleotide
  Sense strand starting at position 611 of SEQ ID NO: 1884799
ggucuagggccagguguua

SEQ ID NO: 2292897 - RNA, 19 nt, Artificial Sequence
  Description of Artificial Sequence: Synthetic oligonucleotide
  Antisense strand to SEQ ID NO: 2292896
uaacaccuggcccuagacc

SEQ ID NO: 2292898 - RNA, 19 nt, Artificial Sequence
  Description of Artificial Sequence: Synthetic oligonucleotide
  Sense strand starting at position 1037 of SEQ ID NO: 1884799
cuagcaugguuucuuuaua

SEQ ID NO: 2292899 - RNA, 19 nt, Artificial Sequence
  Description of Artificial Sequence: Synthetic oligonucleotide
  Antisense strand to SEQ ID NO: 2292898
uauaaagaaaccaugcuag

SEQ ID NO: 2292900 - RNA, 19 nt, Artificial Sequence
  Description of Artificial Sequence: Synthetic oligonucleotide
  Sense strand starting at position 1100 of SEQ ID NO: 1884799
ugacgaaagcauugcuauc

SEQ ID NO: 2292901 - RNA, 19 nt, Artificial Sequence
  Description of Artificial Sequence: Synthetic oligonucleotide
  Antisense strand to SEQ ID NO: 2292900
gauagcaaugcuuucguca

SEQ ID NO: 2292902 - RNA, 19 nt, Artificial Sequence
  Description of Artificial Sequence: Synthetic oligonucleotide
  Sense strand starting at position 1120 of SEQ ID NO: 1884799
cugcuacaauuacugagau

SEQ ID NO: 2292903 - RNA, 19 nt, Artificial Sequence
  Description of Artificial Sequence: Synthetic oligonucleotide
  Antisense strand to SEQ ID NO: 2292902
aucucaguaauuguagcag

SEQ ID NO: 2292904 - RNA, 19 nt, Artificial Sequence
  Description of Artificial Sequence: Synthetic oligonucleotide
  Sense strand starting at position 1267 of SEQ ID NO: 1884799
gggcaaucacuuugcccaa

SEQ ID NO: 2292905 - RNA, 19 nt, Artificial Sequence
  Description of Artificial Sequence: Synthetic oligonucleotide
  Antisense strand to SEQ ID NO: 2292904
uugggcaaagugauugccc

SEQ ID NO: 2292906 - RNA, 19 nt, Artificial Sequence
  Description of Artificial Sequence: Synthetic oligonucleotide
  Sense strand starting at position 1268 of SEQ ID NO: 1884799
ggcaaucacuuugcccaaa

SEQ ID NO: 2292907 - RNA, 19 nt, Artificial Sequence
  Description of Artificial Sequence: Synthetic oligonucleotide
  Antisense strand to SEQ ID NO: 2292906
uuugggcaaagugauugcc

SEQ ID NO: 2292908 - RNA, 19 nt, Artificial Sequence
  Description of Artificial Sequence: Synthetic oligonucleotide
  Sense strand starting at position 1310 of SEQ ID NO: 1884799
uggagaaguggcugggaua

SEQ ID NO: 2292909 - RNA, 19 nt, Artificial Sequence
  Description of Artificial Sequence: Synthetic oligonucleotide
  Antisense strand to SEQ ID NO: 2292908
uaucccagccacuucucca

SEQ ID NO: 2292910 - RNA, 19 nt, Artificial Sequence
  Description of Artificial Sequence: Synthetic oligonucleotide
  Sense strand starting at position 1313 of SEQ ID NO: 1884799
agaaguggcugggauagaa

SEQ ID NO: 2292911 - RNA, 19 nt, Artificial Sequence
  Description of Artificial Sequence: Synthetic oligonucleotide
  Antisense strand to SEQ ID NO: 2292910
uucuaucccagccacuucu

SEQ ID NO: 2292912 - RNA, 19 nt, Artificial Sequence
  Description of Artificial Sequence: Synthetic oligonucleotide
  Sense strand starting at position 1341 of SEQ ID NO: 1884799
gucugauucugaguccuag

SEQ ID NO: 2292913 - RNA, 19 nt, Artificial Sequence
  Description of Artificial Sequence: Synthetic oligonucleotide
  Antisense strand to SEQ ID NO: 2292912
cuaggacucagaaucagac

SEQ ID NO: 2292914 - RNA, 19 nt, Artificial Sequence
  Description of Artificial Sequence: Synthetic oligonucleotide
  Sense strand starting at position 1405 of SEQ ID NO: 1884799
cgccaaauguggccaauuu

SEQ ID NO: 2292915 - RNA, 19 nt, Artificial Sequence
  Description of Artificial Sequence: Synthetic oligonucleotide
  Antisense strand to SEQ ID NO: 2292914
aaauuggccacauuuggcg

SEQ ID NO: 2292916 - RNA, 19 nt, Artificial Sequence
  Description of Artificial Sequence: Synthetic oligonucleotide
  Sense strand starting at position 1471 of SEQ ID NO: 1884799
cagacaucccgguggguga

SEQ ID NO: 2292917 - RNA, 19 nt, Artificial Sequence
  Description of Artificial Sequence: Synthetic oligonucleotide
  Antisense strand to SEQ ID NO: 2292916
ucacccaccgggaugucug

SEQ ID NO: 2292918 - RNA, 19 nt, Artificial Sequence
  Description of Artificial Sequence: Synthetic oligonucleotide
  Sense strand starting at position 1552 of SEQ ID NO: 1884799
cuaggucucuguucugaca

SEQ ID NO: 2292919 - RNA, 19 nt, Artificial Sequence
  Description of Artificial Sequence: Synthetic oligonucleotide
  Antisense strand to SEQ ID NO: 2292918
ugucagaacagagaccuag

SEQ ID NO: 2292920 - RNA, 19 nt, Artificial Sequence
  Description of Artificial Sequence: Synthetic oligonucleotide
  Sense strand starting at position 1623 of SEQ ID NO: 1884799
ggagcuguccaauacggua

SEQ ID NO: 2292921 - RNA, 19 nt, Artificial Sequence
  Description of Artificial Sequence: Synthetic oligonucleotide
  Antisense strand to SEQ ID NO: 2292920
uaccguauuggacagcucc

SEQ ID NO: 2292922 - RNA, 19 nt, Artificial Sequence
  Description of Artificial Sequence: Synthetic oligonucleotide
  Sense strand starting at position 1663 of SEQ ID NO: 1884799
ggcuaucacuuccugucau

SEQ ID NO: 2292923 - RNA, 19 nt, Artificial Sequence
  Description of Artificial Sequence: Synthetic oligonucleotide
  Antisense strand to SEQ ID NO: 2292922
augacaggaagugauagcc

SEQ ID NO: 2292924 - RNA, 19 nt, Artificial Sequence
  Description of Artificial Sequence: Synthetic oligonucleotide
  Sense strand starting at position 1676 of SEQ ID NO: 1884799
ugucauagugaccauuaga

SEQ ID NO: 2292925 - RNA, 19 nt, Artificial Sequence
  Description of Artificial Sequence: Synthetic oligonucleotide
  Antisense strand to SEQ ID NO: 2292924
ucuaauggucacuaugaca

SEQ ID NO: 2292926 - RNA, 19 nt, Artificial Sequence
  Description of Artificial Sequence: Synthetic oligonucleotide
  Sense strand starting at position 1782 of SEQ ID NO: 1884799
agaggaagcuauguuagua

SEQ ID NO: 2292927 - RNA, 19 nt, Artificial Sequence
  Description of Artificial Sequence: Synthetic oligonucleotide
  Antisense strand to SEQ ID NO: 2292926
uacuaacauagcuuccucu

SEQ ID NO: 2292928 - RNA, 19 nt, Artificial Sequence
  Description of Artificial Sequence: Synthetic oligonucleotide
  Sense strand starting at position 1786 of SEQ ID NO: 1884799
gaagcuauguuaguagaca

SEQ ID NO: 2292929 - RNA, 19 nt, Artificial Sequence
  Description of Artificial Sequence: Synthetic oligonucleotide
  Antisense strand to SEQ ID NO: 2292928
ugucuacuaacauagcuuc

SEQ ID NO: 2292930 - RNA, 19 nt, Artificial Sequence
  Description of Artificial Sequence: Synthetic oligonucleotide
  Sense strand starting at position 2098 of SEQ ID NO: 1884799
gcgcgauaggugagagcaa

SEQ ID NO: 2292931 - RNA, 19 nt, Artificial Sequence
  Description of Artificial Sequence: Synthetic oligonucleotide
  Antisense strand to SEQ ID NO: 2292930
uugcucucaccuaucgcgc

SEQ ID NO: 2292932 - RNA, 19 nt, Artificial Sequence
  Description of Artificial Sequence: Synthetic oligonucleotide
  Sense strand starting at position 2318 of SEQ ID NO: 1884799
ggugauguguggucaggau

SEQ ID NO: 2292933 - RNA, 19 nt, Artificial Sequence
  Description of Artificial Sequence: Synthetic oligonucleotide
  Antisense strand to SEQ ID NO: 2292932
auccugaccacacaucacc

SEQ ID NO: 2292934 - RNA, 19 nt, Artificial Sequence
  Description of Artificial Sequence: Synthetic oligonucleotide
  Sense strand starting at position 2322 of SEQ ID NO: 1884799
auguguggucaggaugaua

SEQ ID NO: 2292935 - RNA, 19 nt, Artificial Sequence
  Description of Artificial Sequence: Synthetic oligonucleotide
  Antisense strand to SEQ ID NO: 2292934
uaucauccugaccacacau

SEQ ID NO: 2292936 - RNA, 19 nt, Artificial Sequence
  Description of Artificial Sequence: Synthetic oligonucleotide
  Sense strand starting at position 2345 of SEQ ID NO: 1884799
agauucguccuguaagagg

SEQ ID NO: 2292937 - RNA, 19 nt, Artificial Sequence
  Description of Artificial Sequence: Synthetic oligonucleotide
  Antisense strand to SEQ ID NO: 2292936
ccucuuacaggacgaaucu

SEQ ID NO: 2292938 - RNA, 19 nt, Artificial Sequence
  Description of Artificial Sequence: Synthetic oligonucleotide
  Sense strand starting at position 2368 of SEQ ID NO: 1884799
cucugagugcugugggaug

SEQ ID NO: 2292939 - RNA, 19 nt, Artificial Sequence
  Description of Artificial Sequence: Synthetic oligonucleotide
  Antisense strand to SEQ ID NO: 2292938
caucccacagcacucagag

SEQ ID NO: 2292940 - RNA, 19 nt, Artificial Sequence
  Description of Artificial Sequence: Synthetic oligonucleotide
  Sense strand starting at position 2370 of SEQ ID NO: 1884799
cugagugcugugggaugua

SEQ ID NO: 2292941 - RNA, 19 nt, Artificial Sequence
  Description of Artificial Sequence: Synthetic oligonucleotide
  Antisense strand to SEQ ID NO: 2292940
uacaucccacagcacucag

SEQ ID NO: 2292942 - RNA, 19 nt, Artificial Sequence
  Description of Artificial Sequence: Synthetic oligonucleotide
  Sense strand starting at position 2379 of SEQ ID NO: 1884799
gugggauguaguugucuga

SEQ ID NO: 2292943 - RNA, 19 nt, Artificial Sequence
  Description of Artificial Sequence: Synthetic oligonucleotide
  Antisense strand to SEQ ID NO: 2292942
ucagacaacuacaucccac

SEQ ID NO: 2292944 - RNA, 19 nt, Artificial Sequence
  Description of Artificial Sequence: Synthetic oligonucleotide
  Sense strand starting at position 2383 of SEQ ID NO: 1884799
gauguaguugucugagggu

SEQ ID NO: 2292945 - RNA, 19 nt, Artificial Sequence
  Description of Artificial Sequence: Synthetic oligonucleotide
  Antisense strand to SEQ ID NO: 2292944
acccucagacaacuacauc

SEQ ID NO: 2292946 - RNA, 19 nt, Artificial Sequence
  Description of Artificial Sequence: Synthetic oligonucleotide
  Sense strand starting at position 2385 of SEQ ID NO: 1884799
uguaguugucugaggguca

SEQ ID NO: 2292947 - RNA, 19 nt, Artificial Sequence
  Description of Artificial Sequence: Synthetic oligonucleotide
  Antisense strand to SEQ ID NO: 2292946
ugacccucagacaacuaca

SEQ ID NO: 2292948 - RNA, 19 nt, Artificial Sequence
  Description of Artificial Sequence: Synthetic oligonucleotide
  Sense strand starting at position 2454 of SEQ ID NO: 1884799
gugaucacuccugagucau

SEQ ID NO: 2292949 - RNA, 19 nt, Artificial Sequence
  Description of Artificial Sequence: Synthetic oligonucleotide
  Antisense strand to SEQ ID NO: 2292948
augacucaggagugaucac

SEQ ID NO: 2292950 - RNA, 19 nt, Artificial Sequence
  Description of Artificial Sequence: Synthetic oligonucleotide
  Sense strand starting at position 2629 of SEQ ID NO: 1884799
uuaagauuagcugggugua

SEQ ID NO: 2292951 - RNA, 19 nt, Artificial Sequence
  Description of Artificial Sequence: Synthetic oligonucleotide
  Antisense strand to SEQ ID NO: 2292950
uacacccagcuaaucuuaa

SEQ ID NO: 2292952 - RNA, 19 nt, Artificial Sequence
  Description of Artificial Sequence: Synthetic oligonucleotide
  Sense strand starting at position 2810 of SEQ ID NO: 1884799
guauguaccaugugagguu

SEQ ID NO: 2292953 - RNA, 19 nt, Artificial Sequence
  Description of Artificial Sequence: Synthetic oligonucleotide
  Antisense strand to SEQ ID NO: 2292952
aaccucacaugguacauac

SEQ ID NO: 2292954 - RNA, 19 nt, Artificial Sequence
  Description of Artificial Sequence: Synthetic oligonucleotide
  Sense strand starting at position 2817 of SEQ ID NO: 1884799
ccaugugagguuuaacuua

SEQ ID NO: 2292955 - RNA, 19 nt, Artificial Sequence
  Description of Artificial Sequence: Synthetic oligonucleotide
  Antisense strand to SEQ ID NO: 2292954
uaaguuaaaccucacaugg

SEQ ID NO: 2292956 - RNA, 19 nt, Artificial Sequence
  Description of Artificial Sequence: Synthetic oligonucleotide
  Sense strand starting at position 2898 of SEQ ID NO: 1884799
gguggaguauucccauccu

SEQ ID NO: 2292957 - RNA, 19 nt, Artificial Sequence
  Description of Artificial Sequence: Synthetic oligonucleotide
  Antisense strand to SEQ ID NO: 2292956
aggaugggaauacuccacc

SEQ ID NO: 2292958 - RNA, 19 nt, Artificial Sequence
  Description of Artificial Sequence: Synthetic oligonucleotide
  Sense strand starting at position 2936 of SEQ ID NO: 1884799
ccaagucaccuuggaaagu

SEQ ID NO: 2292959 - RNA, 19 nt, Artificial Sequence
  Description of Artificial Sequence: Synthetic oligonucleotide
  Antisense strand to SEQ ID NO: 2292958
acuuuccaaggugacuugg

SEQ ID NO: 2292960 - RNA, 19 nt, Artificial Sequence
  Description of Artificial Sequence: Synthetic oligonucleotide
  Sense strand starting at position 3045 of SEQ ID NO: 1884799
agauccugcaggcaagauu

SEQ ID NO: 2292961 - RNA, 19 nt, Artificial Sequence
  Description of Artificial Sequence: Synthetic oligonucleotide
  Antisense strand to SEQ ID NO: 2292960
aaucuugccugcaggaucu

SEQ ID NO: 2292962 - RNA, 19 nt, Artificial Sequence
  Description of Artificial Sequence: Synthetic oligonucleotide
  Sense strand starting at position 3840 of SEQ ID NO: 1884799
ugggauauuuccugucuca

SEQ ID NO: 2292963 - RNA, 19 nt, Artificial Sequence
  Description of Artificial Sequence: Synthetic oligonucleotide
  Antisense strand to SEQ ID NO: 2292962
ugagacaggaaauauccca

SEQ ID NO: 2292964 - RNA, 19 nt, Artificial Sequence
  Description of Artificial Sequence: Synthetic oligonucleotide
  Sense strand starting at position 3890 of SEQ ID NO: 1884799
cagggagucuuccugauca

SEQ ID NO: 2292965 - RNA, 19 nt, Artificial Sequence
  Description of Artificial Sequence: Synthetic oligonucleotide
  Antisense strand to SEQ ID NO: 2292964
ugaucaggaagacucccug

SEQ ID NO: 2292966 - RNA, 19 nt, Artificial Sequence
  Description of Artificial Sequence: Synthetic oligonucleotide
  Sense strand starting at position 3918 of SEQ ID NO: 1884799
guuccaagcuuccuucuga

SEQ ID NO: 2292967 - RNA, 19 nt, Artificial Sequence
  Description of Artificial Sequence: Synthetic oligonucleotide
  Antisense strand to SEQ ID NO: 2292966
ucagaaggaagcuuggaac

SEQ ID NO: 2292968 - RNA, 19 nt, Artificial Sequence
  Description of Artificial Sequence: Synthetic oligonucleotide
  Sense strand starting at position 361 of SEQ ID NO: 1884800
aauugcucuuucguaagau

SEQ ID NO: 2292969 - RNA, 19 nt, Artificial Sequence
  Description of Artificial Sequence: Synthetic oligonucleotide
  Antisense strand to SEQ ID NO: 2292968
aucuuacgaaagagcaauu

SEQ ID NO: 2292970 - RNA, 19 nt, Artificial Sequence
  Description of Artificial Sequence: Synthetic oligonucleotide
  Sense strand starting at position 362 of SEQ ID NO: 1884800
auugcucuuucguaagaug

SEQ ID NO: 2292971 - RNA, 19 nt, Artificial Sequence
  Description of Artificial Sequence: Synthetic oligonucleotide
  Antisense strand to SEQ ID NO: 2292970
caucuuacgaaagagcaau

SEQ ID NO: 2292972 - RNA, 19 nt, Artificial Sequence
  Description of Artificial Sequence: Synthetic oligonucleotide
  Sense strand starting at position 365 of SEQ ID NO: 1884800
gcucuuucguaagaugaga

SEQ ID NO: 2292973 - RNA, 19 nt, Artificial Sequence
  Description of Artificial Sequence: Synthetic oligonucleotide
  Antisense strand to SEQ ID NO: 2292972
ucucaucuuacgaaagagc

SEQ ID NO: 2292974 - RNA, 19 nt, Artificial Sequence
  Description of Artificial Sequence: Synthetic oligonucleotide
  Sense strand starting at position 734 of SEQ ID NO: 1884800
gugaauugccauugaacag

SEQ ID NO: 2292975 - RNA, 19 nt, Artificial Sequence
  Description of Artificial Sequence: Synthetic oligonucleotide
  Antisense strand to SEQ ID NO: 2292974
cuguucaauggcaauucac

SEQ ID NO: 2292976 - RNA, 19 nt, Artificial Sequence
  Description of Artificial Sequence: Synthetic oligonucleotide
  Sense strand starting at position 785 of SEQ ID NO: 1884800
cuggaaacauucuaagugu

SEQ ID NO: 2292977 - RNA, 19 nt, Artificial Sequence
  Description of Artificial Sequence: Synthetic oligonucleotide
  Antisense strand to SEQ ID NO: 2292976
acacuuagaauguuuccag

SEQ ID NO: 2292978 - RNA, 19 nt, Artificial Sequence
  Description of Artificial Sequence: Synthetic oligonucleotide
  Sense strand starting at position 931 of SEQ ID NO: 1884800
gagccaucagauuguauuc

SEQ ID NO: 2292979 - RNA, 19 nt, Artificial Sequence
  Description of Artificial Sequence: Synthetic oligonucleotide
  Antisense strand to SEQ ID NO: 2292978
gaauacaaucugauggcuc

SEQ ID NO: 2292980 - RNA, 19 nt, Artificial Sequence
  Description of Artificial Sequence: Synthetic oligonucleotide
  Sense strand starting at position 933 of SEQ ID NO: 1884800
gccaucagauuguauucua

SEQ ID NO: 2292981 - RNA, 19 nt, Artificial Sequence
  Description of Artificial Sequence: Synthetic oligonucleotide
  Antisense strand to SEQ ID NO: 2292980
uagaauacaaucugauggc

SEQ ID NO: 2292982 - RNA, 19 nt, Artificial Sequence
  Description of Artificial Sequence: Synthetic oligonucleotide
  Sense strand starting at position 936 of SEQ ID NO: 1884800
aucagauuguauucuaagu

SEQ ID NO: 2292983 - RNA, 19 nt, Artificial Sequence
  Description of Artificial Sequence: Synthetic oligonucleotide
  Antisense strand to SEQ ID NO: 2292982
acuuagaauacaaucugau

SEQ ID NO: 2292984 - RNA, 19 nt, Artificial Sequence
  Description of Artificial Sequence: Synthetic oligonucleotide
  Sense strand starting at position 963 of SEQ ID NO: 1884800
gagacagugcgcuuagcuu

SEQ ID NO: 2292985 - RNA, 19 nt, Artificial Sequence
  Description of Artificial Sequence: Synthetic oligonucleotide
  Antisense strand to SEQ ID NO: 2292984
aagcuaagcgcacugucuc

SEQ ID NO: 2292986 - RNA, 19 nt, Artificial Sequence
  Description of Artificial Sequence: Synthetic oligonucleotide
  Sense strand starting at position 1091 of SEQ ID NO: 1884800
ggaauauucuaagugcucu

SEQ ID NO: 2292987 - RNA, 19 nt, Artificial Sequence
  Description of Artificial Sequence: Synthetic oligonucleotide
  Antisense strand to SEQ ID NO: 2292986
agagcacuuagaauauucc

SEQ ID NO: 2292988 - RNA, 19 nt, Artificial Sequence
  Description of Artificial Sequence: Synthetic oligonucleotide
  Sense strand starting at position 1148 of SEQ ID NO: 1884800
ggaguuguccuccggaaug

SEQ ID NO: 2292989 - RNA, 19 nt, Artificial Sequence
  Description of Artificial Sequence: Synthetic oligonucleotide
  Antisense strand to SEQ ID NO: 2292988
cauuccggaggacaacucc

SEQ ID NO: 2292990 - RNA, 19 nt, Artificial Sequence
  Description of Artificial Sequence: Synthetic oligonucleotide
  Sense strand starting at position 1171 of SEQ ID NO: 1884800
ucagaaaucugacagcacu

SEQ ID NO: 2292991 - RNA, 19 nt, Artificial Sequence
  Description of Artificial Sequence: Synthetic oligonucleotide
  Antisense strand to SEQ ID NO: 2292990
agugcugucagauuucuga

SEQ ID NO: 2292992 - RNA, 19 nt, Artificial Sequence
  Description of Artificial Sequence: Synthetic oligonucleotide
  Sense strand starting at position 1181 of SEQ ID NO: 1884800
gacagcacuggucaagauu

SEQ ID NO: 2292993 - RNA, 19 nt, Artificial Sequence
  Description of Artificial Sequence: Synthetic oligonucleotide
  Antisense strand to SEQ ID NO: 2292992
aaucuugaccagugcuguc

SEQ ID NO: 2292994 - RNA, 19 nt, Artificial Sequence
  Description of Artificial Sequence: Synthetic oligonucleotide
  Sense strand starting at position 2006 of SEQ ID NO: 1884800
ccugcauggccggaaagau

SEQ ID NO: 2292995 - RNA, 19 nt, Artificial Sequence
  Description of Artificial Sequence: Synthetic oligonucleotide
  Antisense strand to SEQ ID NO: 2292994
aucuuuccggccaugcagg

SEQ ID NO: 2292996 - RNA, 19 nt, Artificial Sequence
  Description of Artificial Sequence: Synthetic oligonucleotide
  Sense strand starting at position 2015 of SEQ ID NO: 1884800
ccggaaagaugaguuucau

SEQ ID NO: 2292997 - RNA, 19 nt, Artificial Sequence
  Description of Artificial Sequence: Synthetic oligonucleotide
  Antisense strand to SEQ ID NO: 2292996
augaaacucaucuuuccgg

SEQ ID NO: 2292998 - RNA, 19 nt, Artificial Sequence
  Description of Artificial Sequence: Synthetic oligonucleotide
  Sense strand starting at position 125 of SEQ ID NO: 1884801
guuacauuguccucuuaua

SEQ ID NO: 2292999 - RNA, 19 nt, Artificial Sequence
  Description of Artificial Sequence: Synthetic oligonucleotide
  Antisense strand to SEQ ID NO: 2292998
uauaagaggacaauguaac

SEQ ID NO: 2293000 - RNA, 19 nt, Artificial Sequence
  Description of Artificial Sequence: Synthetic oligonucleotide
  Sense strand starting at position 165 of SEQ ID NO: 1884801
aacuuuggcucccgaguua

SEQ ID NO: 2293001 - RNA, 19 nt, Artificial Sequence
  Description of Artificial Sequence: Synthetic oligonucleotide
  Antisense strand to SEQ ID NO: 2293000
uaacucgggagccaaaguu

SEQ ID NO: 2293002 - RNA, 19 nt, Artificial Sequence
  Description of Artificial Sequence: Synthetic oligonucleotide
  Sense strand starting at position 491 of SEQ ID NO: 1884801
ccaugauucccugacuuug

SEQ ID NO: 2293003 - RNA, 19 nt, Artificial Sequence
  Description of Artificial Sequence: Synthetic oligonucleotide
  Antisense strand to SEQ ID NO: 2293002
caaagucagggaaucaugg

SEQ ID NO: 2293004 - RNA, 19 nt, Artificial Sequence
  Description of Artificial Sequence: Synthetic oligonucleotide
  Sense strand starting at position 2251 of SEQ ID NO: 1884801
ggcagguccuggguagaga

SEQ ID NO: 2293005 - RNA, 19 nt, Artificial Sequence
  Description of Artificial Sequence: Synthetic oligonucleotide
  Antisense strand to SEQ ID NO: 2293004
ucucuacccaggaccugcc

SEQ ID NO: 2293006 - RNA, 19 nt, Artificial Sequence
  Description of Artificial Sequence: Synthetic oligonucleotide
  Sense strand starting at position 2531 of SEQ ID NO: 1884801
uugacuaugucuuggcaca

SEQ ID NO: 2293007 - RNA, 19 nt, Artificial Sequence
  Description of Artificial Sequence: Synthetic oligonucleotide
  Antisense strand to SEQ ID NO: 2293006
ugugccaagacauagucaa

SEQ ID NO: 2293008 - RNA, 19 nt, Artificial Sequence
  Description of Artificial Sequence: Synthetic oligonucleotide
  Sense strand starting at position 2532 of SEQ ID NO: 1884801
ugacuaugucuuggcacau

SEQ ID NO: 2293009 - RNA, 19 nt, Artificial Sequence
  Description of Artificial Sequence: Synthetic oligonucleotide
  Antisense strand to SEQ ID NO: 2293008
augugccaagacauaguca

SEQ ID NO: 2293010 - RNA, 19 nt, Artificial Sequence
  Description of Artificial Sequence: Synthetic oligonucleotide
  Sense strand starting at position 2533 of SEQ ID NO: 1884801
gacuaugucuuggcacaug

SEQ ID NO: 2293011 - RNA, 19 nt, Artificial Sequence
  Description of Artificial Sequence: Synthetic oligonucleotide
  Antisense strand to SEQ ID NO: 2293010
caugugccaagacauaguc

SEQ ID NO: 2293012 - RNA, 19 nt, Artificial Sequence
  Description of Artificial Sequence: Synthetic oligonucleotide
  Sense strand starting at position 3388 of SEQ ID NO: 1884801
cgauaucugccacgaaggu

SEQ ID NO: 2293013 - RNA, 19 nt, Artificial Sequence
  Description of Artificial Sequence: Synthetic oligonucleotide
  Antisense strand to SEQ ID NO: 2293012
accuucguggcagauaucg

SEQ ID NO: 2293014 - RNA, 19 nt, Artificial Sequence
  Description of Artificial Sequence: Synthetic oligonucleotide
  Sense strand starting at position 3706 of SEQ ID NO: 1884801
gagcgaauuuguuaaguac

SEQ ID NO: 2293015 - RNA, 19 nt, Artificial Sequence
  Description of Artificial Sequence: Synthetic oligonucleotide
  Antisense strand to SEQ ID NO: 2293014
guacuuaacaaauucgcuc

SEQ ID NO: 2293016 - RNA, 19 nt, Artificial Sequence
  Description of Artificial Sequence: Synthetic oligonucleotide
  Sense strand starting at position 8 of SEQ ID NO: 1884802
gaucuuugaugcugggaaa

SEQ ID NO: 2293017 - RNA, 19 nt, Artificial Sequence
  Description of Artificial Sequence: Synthetic oligonucleotide
  Antisense strand to SEQ ID NO: 2293016
uuucccagcaucaaagauc

SEQ ID NO: 2293018 - RNA, 19 nt, Artificial Sequence
  Description of Artificial Sequence: Synthetic oligonucleotide
  Sense strand starting at position 221 of SEQ ID NO: 1884802
gucugauauucccuaccca

SEQ ID NO: 2293019 - RNA, 19 nt, Artificial Sequence
  Description of Artificial Sequence: Synthetic oligonucleotide
  Antisense strand to SEQ ID NO: 2293018
uggguagggaauaucagac

SEQ ID NO: 2293020 - RNA, 19 nt, Artificial Sequence
  Description of Artificial Sequence: Synthetic oligonucleotide
  Sense strand starting at position 564 of SEQ ID NO: 1884802
agaucuguagcucagaguu

SEQ ID NO: 2293021 - RNA, 19 nt, Artificial Sequence
  Description of Artificial Sequence: Synthetic oligonucleotide
  Antisense strand to SEQ ID NO: 2293020
aacucugagcuacagaucu

SEQ ID NO: 2293022 - RNA, 19 nt, Artificial Sequence
  Description of Artificial Sequence: Synthetic oligonucleotide
  Sense strand starting at position 708 of SEQ ID NO: 1884802
gguggucagcucuaucaaa

SEQ ID NO: 2293023 - RNA, 19 nt, Artificial Sequence
  Description of Artificial Sequence: Synthetic oligonucleotide
  Antisense strand to SEQ ID NO: 2293022
uuugauagagcugaccacc

SEQ ID NO: 2293024 - RNA, 19 nt, Artificial Sequence
  Description of Artificial Sequence: Synthetic oligonucleotide
  Sense strand starting at position 839 of SEQ ID NO: 1884802
auuguauucuuagguaaug

SEQ ID NO: 2293025 - RNA, 19 nt, Artificial Sequence
  Description of Artificial Sequence: Synthetic oligonucleotide
  Antisense strand to SEQ ID NO: 2293024
cauuaccuaagaauacaau

SEQ ID NO: 2293026 - RNA, 19 nt, Artificial Sequence
  Description of Artificial Sequence: Synthetic oligonucleotide
  Sense strand starting at position 840 of SEQ ID NO: 1884802
uuguauucuuagguaauga

SEQ ID NO: 2293027 - RNA, 19 nt, Artificial Sequence
  Description of Artificial Sequence: Synthetic oligonucleotide
  Antisense strand to SEQ ID NO: 2293026
ucauuaccuaagaauacaa

SEQ ID NO: 2293028 - RNA, 19 nt, Artificial Sequence
  Description of Artificial Sequence: Synthetic oligonucleotide
  Sense strand starting at position 904 of SEQ ID NO: 1884802
gaguucugguguucaggga

SEQ ID NO: 2293029 - RNA, 19 nt, Artificial Sequence
  Description of Artificial Sequence: Synthetic oligonucleotide
  Antisense strand to SEQ ID NO: 2293028
ucccugaacaccagaacuc

SEQ ID NO: 2293030 - RNA, 19 nt, Artificial Sequence
  Description of Artificial Sequence: Synthetic oligonucleotide
  Sense strand starting at position 908 of SEQ ID NO: 1884802
ucugguguucagggaucuu

SEQ ID NO: 2293031 - RNA, 19 nt, Artificial Sequence
  Description of Artificial Sequence: Synthetic oligonucleotide
  Antisense strand to SEQ ID NO: 2293030
aagaucccugaacaccaga

SEQ ID NO: 2293032 - RNA, 19 nt, Artificial Sequence
  Description of Artificial Sequence: Synthetic oligonucleotide
  Sense strand starting at position 998 of SEQ ID NO: 1884802
ggugcagugccagauagaa

SEQ ID NO: 2293033 - RNA, 19 nt, Artificial Sequence
  Description of Artificial Sequence: Synthetic oligonucleotide
  Antisense strand to SEQ ID NO: 2293032
uucuaucuggcacugcacc

SEQ ID NO: 2293034 - RNA, 19 nt, Artificial Sequence
  Description of Artificial Sequence: Synthetic oligonucleotide
  Sense strand starting at position 1007 of SEQ ID NO: 1884802
ccagauagaagcuguggaa

SEQ ID NO: 2293035 - RNA, 19 nt, Artificial Sequence
  Description of Artificial Sequence: Synthetic oligonucleotide
  Antisense strand to SEQ ID NO: 2293034
uuccacagcuucuaucugg

SEQ ID NO: 2293036 - RNA, 19 nt, Artificial Sequence
  Description of Artificial Sequence: Synthetic oligonucleotide
  Sense strand starting at position 1620 of SEQ ID NO: 1884802
uugaguggcaaauaagagu

SEQ ID NO: 2293037 - RNA, 19 nt, Artificial Sequence
  Description of Artificial Sequence: Synthetic oligonucleotide
  Antisense strand to SEQ ID NO: 2293036
acucuuauuugccacucaa

SEQ ID NO: 2293038 - RNA, 19 nt, Artificial Sequence
  Description of Artificial Sequence: Synthetic oligonucleotide
  Sense strand starting at position 1676 of SEQ ID NO: 1884802
gugcuaacuacuuacgugu

SEQ ID NO: 2293039 - RNA, 19 nt, Artificial Sequence
  Description of Artificial Sequence: Synthetic oligonucleotide
  Antisense strand to SEQ ID NO: 2293038
acacguaaguaguuagcac

SEQ ID NO: 2293040 - RNA, 19 nt, Artificial Sequence
  Description of Artificial Sequence: Synthetic oligonucleotide
  Sense strand starting at position 1679 of SEQ ID NO: 1884802
cuaacuacuuacgugucaa

SEQ ID NO: 2293041 - RNA, 19 nt, Artificial Sequence
  Description of Artificial Sequence: Synthetic oligonucleotide
  Antisense strand to SEQ ID NO: 2293040
uugacacguaaguaguuag

SEQ ID NO: 2293042 - RNA, 19 nt, Artificial Sequence
  Description of Artificial Sequence: Synthetic oligonucleotide
  Sense strand starting at position 1689 of SEQ ID NO: 1884802
acgugucaaugggaucuuu

SEQ ID NO: 2293043 - RNA, 19 nt, Artificial Sequence
  Description of Artificial Sequence: Synthetic oligonucleotide
  Antisense strand to SEQ ID NO: 2293042
aaagaucccauugacacgu

SEQ ID NO: 2293044 - RNA, 19 nt, Artificial Sequence
  Description of Artificial Sequence: Synthetic oligonucleotide
  Sense strand starting at position 2296 of SEQ ID NO: 1884802
acucaaauguaagggauuu

SEQ ID NO: 2293045 - RNA, 19 nt, Artificial Sequence
  Description of Artificial Sequence: Synthetic oligonucleotide
  Antisense strand to SEQ ID NO: 2293044
aaaucccuuacauuugagu

SEQ ID NO: 2293046 - RNA, 19 nt, Artificial Sequence
  Description of Artificial Sequence: Synthetic oligonucleotide
  Sense strand starting at position 2330 of SEQ ID NO: 1884802
ugucaagaauuauggauuu

SEQ ID NO: 2293047 - RNA, 19 nt, Artificial Sequence
  Description of Artificial Sequence: Synthetic oligonucleotide
  Antisense strand to SEQ ID NO: 2293046
aaauccauaauucuugaca

SEQ ID NO: 2293048 - RNA, 19 nt, Artificial Sequence
  Description of Artificial Sequence: Synthetic oligonucleotide
  Sense strand starting at position 2395 of SEQ ID NO: 1884802
gcagaaugaccauguaugu

SEQ ID NO: 2293049 - RNA, 19 nt, Artificial Sequence
  Description of Artificial Sequence: Synthetic oligonucleotide
  Antisense strand to SEQ ID NO: 2293048
acauacauggucauucugc

SEQ ID NO: 2293050 - RNA, 19 nt, Artificial Sequence
  Description of Artificial Sequence: Synthetic oligonucleotide
  Sense strand starting at position 2401 of SEQ ID NO: 1884802
ugaccauguaugugaggga

SEQ ID NO: 2293051 - RNA, 19 nt, Artificial Sequence
  Description of Artificial Sequence: Synthetic oligonucleotide
  Antisense strand to SEQ ID NO: 2293050
ucccucacauacaugguca

SEQ ID NO: 2293052 - RNA, 19 nt, Artificial Sequence
  Description of Artificial Sequence: Synthetic oligonucleotide
  Sense strand starting at position 2402 of SEQ ID NO: 1884802
gaccauguaugugagggaa

SEQ ID NO: 2293053 - RNA, 19 nt, Artificial Sequence
  Description of Artificial Sequence: Synthetic oligonucleotide
  Antisense strand to SEQ ID NO: 2293052
uucccucacauacaugguc

SEQ ID NO: 2293054 - RNA, 19 nt, Artificial Sequence
  Description of Artificial Sequence: Synthetic oligonucleotide
  Sense strand starting at position 2404 of SEQ ID NO: 1884802
ccauguaugugagggaaga

SEQ ID NO: 2293055 - RNA, 19 nt, Artificial Sequence
  Description of Artificial Sequence: Synthetic oligonucleotide
  Antisense strand to SEQ ID NO: 2293054
ucuucccucacauacaugg

SEQ ID NO: 2293056 - RNA, 19 nt, Artificial Sequence
  Description of Artificial Sequence: Synthetic oligonucleotide
  Sense strand starting at position 2504 of SEQ ID NO: 1884802
gagugucccuucugcaauu

SEQ ID NO: 2293057 - RNA, 19 nt, Artificial Sequence
  Description of Artificial Sequence: Synthetic oligonucleotide
  Antisense strand to SEQ ID NO: 2293056
aauugcagaagggacacuc

SEQ ID NO: 2293058 - RNA, 19 nt, Artificial Sequence
  Description of Artificial Sequence: Synthetic oligonucleotide
  Sense strand starting at position 2526 of SEQ ID NO: 1884802
gggagaaacuuaggaaaua

SEQ ID NO: 2293059 - RNA, 19 nt, Artificial Sequence
  Description of Artificial Sequence: Synthetic oligonucleotide
  Antisense strand to SEQ ID NO: 2293058
uauuuccuaaguuucuccc

SEQ ID NO: 2293060 - RNA, 19 nt, Artificial Sequence
  Description of Artificial Sequence: Synthetic oligonucleotide
  Sense strand starting at position 2527 of SEQ ID NO: 1884802
ggagaaacuuaggaaauaa

SEQ ID NO: 2293061 - RNA, 19 nt, Artificial Sequence
  Description of Artificial Sequence: Synthetic oligonucleotide
  Antisense strand to SEQ ID NO: 2293060
uuauuuccuaaguuucucc

SEQ ID NO: 2293062 - RNA, 19 nt, Artificial Sequence
  Description of Artificial Sequence: Synthetic oligonucleotide
  Sense strand starting at position 2601 of SEQ ID NO: 1884802
ggauaaacucccugaaagc

SEQ ID NO: 2293063 - RNA, 19 nt, Artificial Sequence
  Description of Artificial Sequence: Synthetic oligonucleotide
  Antisense strand to SEQ ID NO: 2293062
gcuuucagggaguuuaucc

SEQ ID NO: 2293064 - RNA, 19 nt, Artificial Sequence
  Description of Artificial Sequence: Synthetic oligonucleotide
  Sense strand starting at position 2624 of SEQ ID NO: 1884802
cgagcaaacuuaggaaaga

SEQ ID NO: 2293065 - RNA, 19 nt, Artificial Sequence
  Description of Artificial Sequence: Synthetic oligonucleotide
  Antisense strand to SEQ ID NO: 2293064
ucuuuccuaaguuugcucg

SEQ ID NO: 2293066 - RNA, 19 nt, Artificial Sequence
  Description of Artificial Sequence: Synthetic oligonucleotide
  Sense strand starting at position 2625 of SEQ ID NO: 1884802
gagcaaacuuaggaaagaa

SEQ ID NO: 2293067 - RNA, 19 nt, Artificial Sequence
  Description of Artificial Sequence: Synthetic oligonucleotide
  Antisense strand to SEQ ID NO: 2293066
uucuuuccuaaguuugcuc

SEQ ID NO: 2293068 - RNA, 19 nt, Artificial Sequence
  Description of Artificial Sequence: Synthetic oligonucleotide
  Sense strand starting at position 3202 of SEQ ID NO: 1884802
auggauaaaucguccgaga

SEQ ID NO: 2293069 - RNA, 19 nt, Artificial Sequence
  Description of Artificial Sequence: Synthetic oligonucleotide
  Antisense strand to SEQ ID NO: 2293068
ucucggacgauuuauccau

SEQ ID NO: 2293070 - RNA, 19 nt, Artificial Sequence
  Description of Artificial Sequence: Synthetic oligonucleotide
  Sense strand starting at position 3204 of SEQ ID NO: 1884802
ggauaaaucguccgagaag

SEQ ID NO: 2293071 - RNA, 19 nt, Artificial Sequence
  Description of Artificial Sequence: Synthetic oligonucleotide
  Antisense strand to SEQ ID NO: 2293070
cuucucggacgauuuaucc

SEQ ID NO: 2293072 - RNA, 19 nt, Artificial Sequence
  Description of Artificial Sequence: Synthetic oligonucleotide
  Sense strand starting at position 3205 of SEQ ID NO: 1884802
gauaaaucguccgagaaga

SEQ ID NO: 2293073 - RNA, 19 nt, Artificial Sequence
  Description of Artificial Sequence: Synthetic oligonucleotide
  Antisense strand to SEQ ID NO: 2293072
ucuucucggacgauuuauc

SEQ ID NO: 2293074 - RNA, 19 nt, Artificial Sequence
  Description of Artificial Sequence: Synthetic oligonucleotide
  Sense strand starting at position 3309 of SEQ ID NO: 1884802
cagaauuauuugggagccu

SEQ ID NO: 2293075 - RNA, 19 nt, Artificial Sequence
  Description of Artificial Sequence: Synthetic oligonucleotide
  Antisense strand to SEQ ID NO: 2293074
aggcucccaaauaauucug

SEQ ID NO: 2293076 - RNA, 19 nt, Artificial Sequence
  Description of Artificial Sequence: Synthetic oligonucleotide
  Sense strand starting at position 3310 of SEQ ID NO: 1884802
agaauuauuugggagccuu

SEQ ID NO: 2293077 - RNA, 19 nt, Artificial Sequence
  Description of Artificial Sequence: Synthetic oligonucleotide
  Antisense strand to SEQ ID NO: 2293076
aaggcucccaaauaauucu

SEQ ID NO: 2293078 - RNA, 19 nt, Artificial Sequence
  Description of Artificial Sequence: Synthetic oligonucleotide
  Sense strand starting at position 3322 of SEQ ID NO: 1884802
gagccuuuggcuugaaugu

SEQ ID NO: 2293079 - RNA, 19 nt, Artificial Sequence
  Description of Artificial Sequence: Synthetic oligonucleotide
  Antisense strand to SEQ ID NO: 2293078
acauucaagccaaaggcuc

SEQ ID NO: 2293080 - RNA, 19 nt, Artificial Sequence
  Description of Artificial Sequence: Synthetic oligonucleotide
  Sense strand starting at position 3323 of SEQ ID NO: 1884802
agccuuuggcuugaaugua

SEQ ID NO: 2293081 - RNA, 19 nt, Artificial Sequence
  Description of Artificial Sequence: Synthetic oligonucleotide
  Antisense strand to SEQ ID NO: 2293080
uacauucaagccaaaggcu

SEQ ID NO: 2293082 - RNA, 19 nt, Artificial Sequence
  Description of Artificial Sequence: Synthetic oligonucleotide
  Sense strand starting at position 3343 of SEQ ID NO: 1884802
ucagguaauccaggcaaga

SEQ ID NO: 2293083 - RNA, 19 nt, Artificial Sequence
  Description of Artificial Sequence: Synthetic oligonucleotide
  Antisense strand to SEQ ID NO: 2293082
ucuugccuggauuaccuga

SEQ ID NO: 2293084 - RNA, 19 nt, Artificial Sequence
  Description of Artificial Sequence: Synthetic oligonucleotide
  Sense strand starting at position 3485 of SEQ ID NO: 1884802
gagggugguccuugacucu

SEQ ID NO: 2293085 - RNA, 19 nt, Artificial Sequence
  Description of Artificial Sequence: Synthetic oligonucleotide
  Antisense strand to SEQ ID NO: 2293084
agagucaaggaccacccuc

SEQ ID NO: 2293086 - RNA, 19 nt, Artificial Sequence
  Description of Artificial Sequence: Synthetic oligonucleotide
  Sense strand starting at position 3504 of SEQ ID NO: 1884802
cccuaagucucuucgcaac

SEQ ID NO: 2293087 - RNA, 19 nt, Artificial Sequence
  Description of Artificial Sequence: Synthetic oligonucleotide
  Antisense strand to SEQ ID NO: 2293086
guugcgaagagacuuaggg

SEQ ID NO: 2293088 - RNA, 19 nt, Artificial Sequence
  Description of Artificial Sequence: Synthetic oligonucleotide
  Sense strand starting at position 3525 of SEQ ID NO: 1884802
cuggcagguccauaauaaa

SEQ ID NO: 2293089 - RNA, 19 nt, Artificial Sequence
  Description of Artificial Sequence: Synthetic oligonucleotide
  Antisense strand to SEQ ID NO: 2293088
uuuauuauggaccugccag

SEQ ID NO: 2293090 - RNA, 19 nt, Artificial Sequence
  Description of Artificial Sequence: Synthetic oligonucleotide
  Sense strand starting at position 3591 of SEQ ID NO: 1884802
gccuuugaggccuauccau

SEQ ID NO: 2293091 - RNA, 19 nt, Artificial Sequence
  Description of Artificial Sequence: Synthetic oligonucleotide
  Antisense strand to SEQ ID NO: 2293090
auggauaggccucaaaggc

SEQ ID NO: 2293092 - RNA, 19 nt, Artificial Sequence
  Description of Artificial Sequence: Synthetic oligonucleotide
  Sense strand starting at position 3971 of SEQ ID NO: 1884802
agaggagucuggucucucu

SEQ ID NO: 2293093 - RNA, 19 nt, Artificial Sequence
  Description of Artificial Sequence: Synthetic oligonucleotide
  Antisense strand to SEQ ID NO: 2293092
agagagaccagacuccucu

SEQ ID NO: 2293094 - RNA, 19 nt, Artificial Sequence
  Description of Artificial Sequence: Synthetic oligonucleotide
  Sense strand starting at position 173 of SEQ ID NO: 1884803
gcaggagacuaucuuucua

SEQ ID NO: 2293095 - RNA, 19 nt, Artificial Sequence
  Description of Artificial Sequence: Synthetic oligonucleotide
  Antisense strand to SEQ ID NO: 2293094
uagaaagauagucuccugc

SEQ ID NO: 2293096 - RNA, 19 nt, Artificial Sequence
  Description of Artificial Sequence: Synthetic oligonucleotide
  Sense strand starting at position 259 of SEQ ID NO: 1884803
gacauuauugcgcguggaa

SEQ ID NO: 2293097 - RNA, 19 nt, Artificial Sequence
  Description of Artificial Sequence: Synthetic oligonucleotide
  Antisense strand to SEQ ID NO: 2293096
uuccacgcgcaauaauguc

SEQ ID NO: 2293098 - RNA, 19 nt, Artificial Sequence
  Description of Artificial Sequence: Synthetic oligonucleotide
  Sense strand starting at position 2015 of SEQ ID NO: 1884803
guggguucgccuuugaagu

SEQ ID NO: 2293099 - RNA, 19 nt, Artificial Sequence
  Description of Artificial Sequence: Synthetic oligonucleotide
  Antisense strand to SEQ ID NO: 2293098
acuucaaaggcgaacccac

SEQ ID NO: 2293100 - RNA, 19 nt, Artificial Sequence
  Description of Artificial Sequence: Synthetic oligonucleotide
  Sense strand starting at position 2039 of SEQ ID NO: 1884803
uguugccauguuugaauua

SEQ ID NO: 2293101 - RNA, 19 nt, Artificial Sequence
  Description of Artificial Sequence: Synthetic oligonucleotide
  Antisense strand to SEQ ID NO: 2293100
uaauucaaacauggcaaca

SEQ ID NO: 2293102 - RNA, 19 nt, Artificial Sequence
  Description of Artificial Sequence: Synthetic oligonucleotide
  Sense strand starting at position 2562 of SEQ ID NO: 1884803
ugaggacugugggcgaauu

SEQ ID NO: 2293103 - RNA, 19 nt, Artificial Sequence
  Description of Artificial Sequence: Synthetic oligonucleotide
  Antisense strand to SEQ ID NO: 2293102
aauucgcccacaguccuca

SEQ ID NO: 2293104 - RNA, 19 nt, Artificial Sequence
  Description of Artificial Sequence: Synthetic oligonucleotide
  Sense strand starting at position 2659 of SEQ ID NO: 1884803
ggaguugguuucuugaggu

SEQ ID NO: 2293105 - RNA, 19 nt, Artificial Sequence
  Description of Artificial Sequence: Synthetic oligonucleotide
  Antisense strand to SEQ ID NO: 2293104
accucaagaaaccaacucc

SEQ ID NO: 2293106 - RNA, 19 nt, Artificial Sequence
  Description of Artificial Sequence: Synthetic oligonucleotide
  Sense strand starting at position 2706 of SEQ ID NO: 1884803
cuaugacccuagucaguuu

SEQ ID NO: 2293107 - RNA, 19 nt, Artificial Sequence
  Description of Artificial Sequence: Synthetic oligonucleotide
  Antisense strand to SEQ ID NO: 2293106
aaacugacuagggucauag

SEQ ID NO: 2293108 - RNA, 19 nt, Artificial Sequence
  Description of Artificial Sequence: Synthetic oligonucleotide
  Sense strand starting at position 2769 of SEQ ID NO: 1884803
cucggaagauuaggauuua

SEQ ID NO: 2293109 - RNA, 19 nt, Artificial Sequence
  Description of Artificial Sequence: Synthetic oligonucleotide
  Antisense strand to SEQ ID NO: 2293108
uaaauccuaaucuuccgag

SEQ ID NO: 2293110 - RNA, 19 nt, Artificial Sequence
  Description of Artificial Sequence: Synthetic oligonucleotide
  Sense strand starting at position 2780 of SEQ ID NO: 1884803
aggauuuacucuugaguua

SEQ ID NO: 2293111 - RNA, 19 nt, Artificial Sequence
  Description of Artificial Sequence: Synthetic oligonucleotide
  Antisense strand to SEQ ID NO: 2293110
uaacucaagaguaaauccu

SEQ ID NO: 2293112 - RNA, 19 nt, Artificial Sequence
  Description of Artificial Sequence: Synthetic oligonucleotide
  Sense strand starting at position 2805 of SEQ ID NO: 1884803
gacccuauccgagacaguu

SEQ ID NO: 2293113 - RNA, 19 nt, Artificial Sequence
  Description of Artificial Sequence: Synthetic oligonucleotide
  Antisense strand to SEQ ID NO: 2293112
aacugucucggauaggguc

SEQ ID NO: 2293114 - RNA, 19 nt, Artificial Sequence
  Description of Artificial Sequence: Synthetic oligonucleotide
  Sense strand starting at position 2959 of SEQ ID NO: 1884803
acuggaauuugccagacuu

SEQ ID NO: 2293115 - RNA, 19 nt, Artificial Sequence
  Description of Artificial Sequence: Synthetic oligonucleotide
  Antisense strand to SEQ ID NO: 2293114
aagucuggcaaauuccagu

SEQ ID NO: 2293116 - RNA, 19 nt, Artificial Sequence
  Description of Artificial Sequence: Synthetic oligonucleotide
  Sense strand starting at position 3047 of SEQ ID NO: 1884803
uuuguuucugguggaguuu

SEQ ID NO: 2293117 - RNA, 19 nt, Artificial Sequence
  Description of Artificial Sequence: Synthetic oligonucleotide
  Antisense strand to SEQ ID NO: 2293116
aaacuccaccagaaacaaa

SEQ ID NO: 2293118 - RNA, 19 nt, Artificial Sequence
  Description of Artificial Sequence: Synthetic oligonucleotide
  Sense strand starting at position 3143 of SEQ ID NO: 1884803
gcgugacucaguguuuggu

SEQ ID NO: 2293119 - RNA, 19 nt, Artificial Sequence
  Description of Artificial Sequence: Synthetic oligonucleotide
  Antisense strand to SEQ ID NO: 2293118
accaaacacugagucacgc

SEQ ID NO: 2293120 - RNA, 19 nt, Artificial Sequence
  Description of Artificial Sequence: Synthetic oligonucleotide
  Sense strand starting at position 3152 of SEQ ID NO: 1884803
aguguuuggugguuauuca

SEQ ID NO: 2293121 - RNA, 19 nt, Artificial Sequence
  Description of Artificial Sequence: Synthetic oligonucleotide
  Antisense strand to SEQ ID NO: 2293120
ugaauaaccaccaaacacu

SEQ ID NO: 2293122 - RNA, 19 nt, Artificial Sequence
  Description of Artificial Sequence: Synthetic oligonucleotide
  Sense strand starting at position 3159 of SEQ ID NO: 1884803
ggugguuauucagugccuu

SEQ ID NO: 2293123 - RNA, 19 nt, Artificial Sequence
  Description of Artificial Sequence: Synthetic oligonucleotide
  Antisense strand to SEQ ID NO: 2293122
aaggcacugaauaaccacc

SEQ ID NO: 2293124 - RNA, 19 nt, Artificial Sequence
  Description of Artificial Sequence: Synthetic oligonucleotide
  Sense strand starting at position 3256 of SEQ ID NO: 1884803
ggaggaagcugcucaggaa

SEQ ID NO: 2293125 - RNA, 19 nt, Artificial Sequence
  Description of Artificial Sequence: Synthetic oligonucleotide
  Antisense strand to SEQ ID NO: 2293124
uuccugagcagcuuccucc

SEQ ID NO: 2293126 - RNA, 19 nt, Artificial Sequence
  Description of Artificial Sequence: Synthetic oligonucleotide
  Sense strand starting at position 3290 of SEQ ID NO: 1884803
cggcuagcuucuucccaga

SEQ ID NO: 2293127 - RNA, 19 nt, Artificial Sequence
  Description of Artificial Sequence: Synthetic oligonucleotide
  Antisense strand to SEQ ID NO: 2293126
ucugggaagaagcuagccg

SEQ ID NO: 2293128 - RNA, 19 nt, Artificial Sequence
  Description of Artificial Sequence: Synthetic oligonucleotide
  Sense strand starting at position 3303 of SEQ ID NO: 1884803
cccagaucccgugaacugu

SEQ ID NO: 2293129 - RNA, 19 nt, Artificial Sequence
  Description of Artificial Sequence: Synthetic oligonucleotide
  Antisense strand to SEQ ID NO: 2293128
acaguucacgggaucuggg

SEQ ID NO: 2293130 - RNA, 19 nt, Artificial Sequence
  Description of Artificial Sequence: Synthetic oligonucleotide
  Sense strand starting at position 3309 of SEQ ID NO: 1884803
ucccgugaacugugguuga

SEQ ID NO: 2293131 - RNA, 19 nt, Artificial Sequence
  Description of Artificial Sequence: Synthetic oligonucleotide
  Antisense strand to SEQ ID NO: 2293130
ucaaccacaguucacggga

SEQ ID NO: 2293132 - RNA, 19 nt, Artificial Sequence
  Description of Artificial Sequence: Synthetic oligonucleotide
  Sense strand starting at position 3313 of SEQ ID NO: 1884803
gugaacugugguugaccuu

SEQ ID NO: 2293133 - RNA, 19 nt, Artificial Sequence
  Description of Artificial Sequence: Synthetic oligonucleotide
  Antisense strand to SEQ ID NO: 2293132
aaggucaaccacaguucac

SEQ ID NO: 2293134 - RNA, 19 nt, Artificial Sequence
  Description of Artificial Sequence: Synthetic oligonucleotide
  Sense strand starting at position 3332 of SEQ ID NO: 1884803
cugguuaccucuccuagau

SEQ ID NO: 2293135 - RNA, 19 nt, Artificial Sequence
  Description of Artificial Sequence: Synthetic oligonucleotide
  Antisense strand to SEQ ID NO: 2293134
aucuaggagagguaaccag

SEQ ID NO: 2293136 - RNA, 19 nt, Artificial Sequence
  Description of Artificial Sequence: Synthetic oligonucleotide
  Sense strand starting at position 3334 of SEQ ID NO: 1884803
gguuaccucuccuagauuu

SEQ ID NO: 2293137 - RNA, 19 nt, Artificial Sequence
  Description of Artificial Sequence: Synthetic oligonucleotide
  Antisense strand to SEQ ID NO: 2293136
aaaucuaggagagguaacc

SEQ ID NO: 2293138 - RNA, 19 nt, Artificial Sequence
  Description of Artificial Sequence: Synthetic oligonucleotide
  Sense strand starting at position 3407 of SEQ ID NO: 1884803
aaauuaugcugguuugaca

SEQ ID NO: 2293139 - RNA, 19 nt, Artificial Sequence
  Description of Artificial Sequence: Synthetic oligonucleotide
  Antisense strand to SEQ ID NO: 2293138
ugucaaaccagcauaauuu

SEQ ID NO: 2293140 - RNA, 19 nt, Artificial Sequence
  Description of Artificial Sequence: Synthetic oligonucleotide
  Sense strand starting at position 3414 of SEQ ID NO: 1884803
gcugguuugacacauggau

SEQ ID NO: 2293141 - RNA, 19 nt, Artificial Sequence
  Description of Artificial Sequence: Synthetic oligonucleotide
  Antisense strand to SEQ ID NO: 2293140
auccaugugucaaaccagc

SEQ ID NO: 2293142 - RNA, 19 nt, Artificial Sequence
  Description of Artificial Sequence: Synthetic oligonucleotide
  Sense strand starting at position 3426 of SEQ ID NO: 1884803
cauggaugcuucuuuggua

SEQ ID NO: 2293143 - RNA, 19 nt, Artificial Sequence
  Description of Artificial Sequence: Synthetic oligonucleotide
  Antisense strand to SEQ ID NO: 2293142
uaccaaagaagcauccaug

SEQ ID NO: 2293144 - RNA, 19 nt, Artificial Sequence
  Description of Artificial Sequence: Synthetic oligonucleotide
  Sense strand starting at position 3427 of SEQ ID NO: 1884803
auggaugcuucuuugguau

SEQ ID NO: 2293145 - RNA, 19 nt, Artificial Sequence
  Description of Artificial Sequence: Synthetic oligonucleotide
  Antisense strand to SEQ ID NO: 2293144
auaccaaagaagcauccau

SEQ ID NO: 2293146 - RNA, 19 nt, Artificial Sequence
  Description of Artificial Sequence: Synthetic oligonucleotide
  Sense strand starting at position 3453 of SEQ ID NO: 1884803
uugccuguagucuagacau

SEQ ID NO: 2293147 - RNA, 19 nt, Artificial Sequence
  Description of Artificial Sequence: Synthetic oligonucleotide
  Antisense strand to SEQ ID NO: 2293146
augucuagacuacaggcaa

SEQ ID NO: 2293148 - RNA, 19 nt, Artificial Sequence
  Description of Artificial Sequence: Synthetic oligonucleotide
  Sense strand starting at position 3492 of SEQ ID NO: 1884803
uguugcuucuuuccugauu

SEQ ID NO: 2293149 - RNA, 19 nt, Artificial Sequence
  Description of Artificial Sequence: Synthetic oligonucleotide
  Antisense strand to SEQ ID NO: 2293148
aaucaggaaagaagcaaca

SEQ ID NO: 2293150 - RNA, 19 nt, Artificial Sequence
  Description of Artificial Sequence: Synthetic oligonucleotide
  Sense strand starting at position 3493 of SEQ ID NO: 1884803
guugcuucuuuccugauuu

SEQ ID NO: 2293151 - RNA, 19 nt, Artificial Sequence
  Description of Artificial Sequence: Synthetic oligonucleotide
  Antisense strand to SEQ ID NO: 2293150
aaaucaggaaagaagcaac

SEQ ID NO: 2293152 - RNA, 19 nt, Artificial Sequence
  Description of Artificial Sequence: Synthetic oligonucleotide
  Sense strand starting at position 3528 of SEQ ID NO: 1884803
auguguaaggccuagaauc

SEQ ID NO: 2293153 - RNA, 19 nt, Artificial Sequence
  Description of Artificial Sequence: Synthetic oligonucleotide
  Antisense strand to SEQ ID NO: 2293152
gauucuaggccuuacacau

SEQ ID NO: 2293154 - RNA, 19 nt, Artificial Sequence
  Description of Artificial Sequence: Synthetic oligonucleotide
  Sense strand starting at position 3530 of SEQ ID NO: 1884803
guguaaggccuagaaucua

SEQ ID NO: 2293155 - RNA, 19 nt, Artificial Sequence
  Description of Artificial Sequence: Synthetic oligonucleotide
  Antisense strand to SEQ ID NO: 2293154
uagauucuaggccuuacac

SEQ ID NO: 2293156 - RNA, 19 nt, Artificial Sequence
  Description of Artificial Sequence: Synthetic oligonucleotide
  Sense strand starting at position 3538 of SEQ ID NO: 1884803
ccuagaaucuaagugauca

SEQ ID NO: 2293157 - RNA, 19 nt, Artificial Sequence
  Description of Artificial Sequence: Synthetic oligonucleotide
  Antisense strand to SEQ ID NO: 2293156
ugaucacuuagauucuagg

SEQ ID NO: 2293158 - RNA, 19 nt, Artificial Sequence
  Description of Artificial Sequence: Synthetic oligonucleotide
  Sense strand starting at position 3549 of SEQ ID NO: 1884803
agugaucauuacuaggaaa

SEQ ID NO: 2293159 - RNA, 19 nt, Artificial Sequence
  Description of Artificial Sequence: Synthetic oligonucleotide
  Antisense strand to SEQ ID NO: 2293158
uuuccuaguaaugaucacu

SEQ ID NO: 2293160 - RNA, 19 nt, Artificial Sequence
  Description of Artificial Sequence: Synthetic oligonucleotide
  Sense strand starting at position 3605 of SEQ ID NO: 1884803
aaucgauacuaguugaaau

SEQ ID NO: 2293161 - RNA, 19 nt, Artificial Sequence
  Description of Artificial Sequence: Synthetic oligonucleotide
  Antisense strand to SEQ ID NO: 2293160
auuucaacuaguaucgauu

SEQ ID NO: 2293162 - RNA, 19 nt, Artificial Sequence
  Description of Artificial Sequence: Synthetic oligonucleotide
  Sense strand starting at position 3716 of SEQ ID NO: 1884803
acauuucuguaguaaauag

SEQ ID NO: 2293163 - RNA, 19 nt, Artificial Sequence
  Description of Artificial Sequence: Synthetic oligonucleotide
  Antisense strand to SEQ ID NO: 2293162
cuauuuacuacagaaaugu

SEQ ID NO: 2293164 - RNA, 19 nt, Artificial Sequence
  Description of Artificial Sequence: Synthetic oligonucleotide
  Sense strand starting at position 3734 of SEQ ID NO: 1884803
gaaagagcaugucaggaaa

SEQ ID NO: 2293165 - RNA, 19 nt, Artificial Sequence
  Description of Artificial Sequence: Synthetic oligonucleotide
  Antisense strand to SEQ ID NO: 2293164
uuuccugacaugcucuuuc

SEQ ID NO: 2293166 - RNA, 19 nt, Artificial Sequence
  Description of Artificial Sequence: Synthetic oligonucleotide
  Sense strand starting at position 3846 of SEQ ID NO: 1884803
gaaagagcaugucaagaaa

SEQ ID NO: 2293167 - RNA, 19 nt, Artificial Sequence
  Description of Artificial Sequence: Synthetic oligonucleotide
  Antisense strand to SEQ ID NO: 2293166
uuucuugacaugcucuuuc

SEQ ID NO: 2293168 - RNA, 19 nt, Artificial Sequence
  Description of Artificial Sequence: Synthetic oligonucleotide
  Sense strand starting at position 3950 of SEQ ID NO: 1884803
uugcaaauacgcugagauu

SEQ ID NO: 2293169 - RNA, 19 nt, Artificial Sequence
  Description of Artificial Sequence: Synthetic oligonucleotide
  Antisense strand to SEQ ID NO: 2293168
aaucucagcguauuugcaa

SEQ ID NO: 2293170 - RNA, 19 nt, Artificial Sequence
  Description of Artificial Sequence: Synthetic oligonucleotide
  Sense strand starting at position 3959 of SEQ ID NO: 1884803
cgcugagauuguuugaguu

SEQ ID NO: 2293171 - RNA, 19 nt, Artificial Sequence
  Description of Artificial Sequence: Synthetic oligonucleotide
  Antisense strand to SEQ ID NO: 2293170
aacucaaacaaucucagcg

SEQ ID NO: 2293172 - RNA, 19 nt, Artificial Sequence
  Description of Artificial Sequence: Synthetic oligonucleotide
  Sense strand starting at position 3963 of SEQ ID NO: 1884803
gagauuguuugaguuguuu

SEQ ID NO: 2293173 - RNA, 19 nt, Artificial Sequence
  Description of Artificial Sequence: Synthetic oligonucleotide
  Antisense strand to SEQ ID NO: 2293172
aaacaacucaaacaaucuc

SEQ ID NO: 2293174 - RNA, 19 nt, Artificial Sequence
  Description of Artificial Sequence: Synthetic oligonucleotide
  Sense strand starting at position 4 of SEQ ID NO: 1884804
ggcccauucguauagagga

SEQ ID NO: 2293175 - RNA, 19 nt, Artificial Sequence
  Description of Artificial Sequence: Synthetic oligonucleotide
  Antisense strand to SEQ ID NO: 2293174
uccucuauacgaaugggcc

SEQ ID NO: 2293176 - RNA, 19 nt, Artificial Sequence
  Description of Artificial Sequence: Synthetic oligonucleotide
  Sense strand starting at position 173 of SEQ ID NO: 1884804
cuuccucuggguugaacaa

SEQ ID NO: 2293177 - RNA, 19 nt, Artificial Sequence
  Description of Artificial Sequence: Synthetic oligonucleotide
  Antisense strand to SEQ ID NO: 2293176
uuguucaacccagaggaag

SEQ ID NO: 2293178 - RNA, 19 nt, Artificial Sequence
  Description of Artificial Sequence: Synthetic oligonucleotide
  Sense strand starting at position 352 of SEQ ID NO: 1884804
aagugaugguuucuaaccu

SEQ ID NO: 2293179 - RNA, 19 nt, Artificial Sequence
  Description of Artificial Sequence: Synthetic oligonucleotide
  Antisense strand to SEQ ID NO: 2293178
agguuagaaaccaucacuu

SEQ ID NO: 2293180 - RNA, 19 nt, Artificial Sequence
  Description of Artificial Sequence: Synthetic oligonucleotide
  Sense strand starting at position 356 of SEQ ID NO: 1884804
gaugguuucuaaccugaca

SEQ ID NO: 2293181 - RNA, 19 nt, Artificial Sequence
  Description of Artificial Sequence: Synthetic oligonucleotide
  Antisense strand to SEQ ID NO: 2293180
ugucagguuagaaaccauc

SEQ ID NO: 2293182 - RNA, 19 nt, Artificial Sequence
  Description of Artificial Sequence: Synthetic oligonucleotide
  Sense strand starting at position 438 of SEQ ID NO: 1884804
acacgagguuuccuuaaac

SEQ ID NO: 2293183 - RNA, 19 nt, Artificial Sequence
  Description of Artificial Sequence: Synthetic oligonucleotide
  Antisense strand to SEQ ID NO: 2293182
guuuaaggaaaccucgugu

SEQ ID NO: 2293184 - RNA, 19 nt, Artificial Sequence
  Description of Artificial Sequence: Synthetic oligonucleotide
  Sense strand starting at position 814 of SEQ ID NO: 1884804
aacagaugagcuuggcuaa

SEQ ID NO: 2293185 - RNA, 19 nt, Artificial Sequence
  Description of Artificial Sequence: Synthetic oligonucleotide
  Antisense strand to SEQ ID NO: 2293184
uuagccaagcucaucuguu

SEQ ID NO: 2293186 - RNA, 19 nt, Artificial Sequence
  Description of Artificial Sequence: Synthetic oligonucleotide
  Sense strand starting at position 815 of SEQ ID NO: 1884804
acagaugagcuuggcuaau

SEQ ID NO: 2293187 - RNA, 19 nt, Artificial Sequence
  Description of Artificial Sequence: Synthetic oligonucleotide
  Antisense strand to SEQ ID NO: 2293186
auuagccaagcucaucugu

SEQ ID NO: 2293188 - RNA, 19 nt, Artificial Sequence
  Description of Artificial Sequence: Synthetic oligonucleotide
  Sense strand starting at position 817 of SEQ ID NO: 1884804
agaugagcuuggcuaauga

SEQ ID NO: 2293189 - RNA, 19 nt, Artificial Sequence
  Description of Artificial Sequence: Synthetic oligonucleotide
  Antisense strand to SEQ ID NO: 2293188
ucauuagccaagcucaucu

SEQ ID NO: 2293190 - RNA, 19 nt, Artificial Sequence
  Description of Artificial Sequence: Synthetic oligonucleotide
  Sense strand starting at position 1166 of SEQ ID NO: 1884804
ucuaucuaugauuguggaa

SEQ ID NO: 2293191 - RNA, 19 nt, Artificial Sequence
  Description of Artificial Sequence: Synthetic oligonucleotide
  Antisense strand to SEQ ID NO: 2293190
uuccacaaucauagauaga

SEQ ID NO: 2293192 - RNA, 19 nt, Artificial Sequence
  Description of Artificial Sequence: Synthetic oligonucleotide
  Sense strand starting at position 1180 of SEQ ID NO: 1884804
uggaaauucugaguugaau

SEQ ID NO: 2293193 - RNA, 19 nt, Artificial Sequence
  Description of Artificial Sequence: Synthetic oligonucleotide
  Antisense strand to SEQ ID NO: 2293192
auucaacucagaauuucca

SEQ ID NO: 2293194 - RNA, 19 nt, Artificial Sequence
  Description of Artificial Sequence: Synthetic oligonucleotide
  Sense strand starting at position 1200 of SEQ ID NO: 1884804
ccaaauaucuuggugguua

SEQ ID NO: 2293195 - RNA, 19 nt, Artificial Sequence
  Description of Artificial Sequence: Synthetic oligonucleotide
  Antisense strand to SEQ ID NO: 2293194
uaaccaccaagauauuugg

SEQ ID NO: 2293196 - RNA, 19 nt, Artificial Sequence
  Description of Artificial Sequence: Synthetic oligonucleotide
  Sense strand starting at position 1211 of SEQ ID NO: 1884804
ggugguuaggucaguguau

SEQ ID NO: 2293197 - RNA, 19 nt, Artificial Sequence
  Description of Artificial Sequence: Synthetic oligonucleotide
  Antisense strand to SEQ ID NO: 2293196
auacacugaccuaaccacc

SEQ ID NO: 2293198 - RNA, 19 nt, Artificial Sequence
  Description of Artificial Sequence: Synthetic oligonucleotide
  Sense strand starting at position 1220 of SEQ ID NO: 1884804
gucaguguauuaccaacaa

SEQ ID NO: 2293199 - RNA, 19 nt, Artificial Sequence
  Description of Artificial Sequence: Synthetic oligonucleotide
  Antisense strand to SEQ ID NO: 2293198
uuguugguaauacacugac

SEQ ID NO: 2293200 - RNA, 19 nt, Artificial Sequence
  Description of Artificial Sequence: Synthetic oligonucleotide
  Sense strand starting at position 1224 of SEQ ID NO: 1884804
guguauuaccaacaaugac

SEQ ID NO: 2293201 - RNA, 19 nt, Artificial Sequence
  Description of Artificial Sequence: Synthetic oligonucleotide
  Antisense strand to SEQ ID NO: 2293200
gucauuguugguaauacac

SEQ ID NO: 2293202 - RNA, 19 nt, Artificial Sequence
  Description of Artificial Sequence: Synthetic oligonucleotide
  Sense strand starting at position 1393 of SEQ ID NO: 1884804
acuguaauacuguaaucau

SEQ ID NO: 2293203 - RNA, 19 nt, Artificial Sequence
  Description of Artificial Sequence: Synthetic oligonucleotide
  Antisense strand to SEQ ID NO: 2293202
augauuacaguauuacagu

SEQ ID NO: 2293204 - RNA, 19 nt, Artificial Sequence
  Description of Artificial Sequence: Synthetic oligonucleotide
  Sense strand starting at position 1442 of SEQ ID NO: 1884804
ucaaauaucuagucaaugu

SEQ ID NO: 2293205 - RNA, 19 nt, Artificial Sequence
  Description of Artificial Sequence: Synthetic oligonucleotide
  Antisense strand to SEQ ID NO: 2293204
acauugacuagauauuuga

SEQ ID NO: 2293206 - RNA, 19 nt, Artificial Sequence
  Description of Artificial Sequence: Synthetic oligonucleotide
  Sense strand starting at position 1659 of SEQ ID NO: 1884804
uucuguaggagucaagcua

SEQ ID NO: 2293207 - RNA, 19 nt, Artificial Sequence
  Description of Artificial Sequence: Synthetic oligonucleotide
  Antisense strand to SEQ ID NO: 2293206
uagcuugacuccuacagaa

SEQ ID NO: 2293208 - RNA, 19 nt, Artificial Sequence
  Description of Artificial Sequence: Synthetic oligonucleotide
  Sense strand starting at position 1726 of SEQ ID NO: 1884804
ugaauuguguuaccaaccu

SEQ ID NO: 2293209 - RNA, 19 nt, Artificial Sequence
  Description of Artificial Sequence: Synthetic oligonucleotide
  Antisense strand to SEQ ID NO: 2293208
agguugguaacacaauuca

SEQ ID NO: 2293210 - RNA, 19 nt, Artificial Sequence
  Description of Artificial Sequence: Synthetic oligonucleotide
  Sense strand starting at position 1802 of SEQ ID NO: 1884804
agugaauauuaagcuucua

SEQ ID NO: 2293211 - RNA, 19 nt, Artificial Sequence
  Description of Artificial Sequence: Synthetic oligonucleotide
  Antisense strand to SEQ ID NO: 2293210
uagaagcuuaauauucacu

SEQ ID NO: 2293212 - RNA, 19 nt, Artificial Sequence
  Description of Artificial Sequence: Synthetic oligonucleotide
  Sense strand starting at position 1823 of SEQ ID NO: 1884804
uauaguaguagaggugaga

SEQ ID NO: 2293213 - RNA, 19 nt, Artificial Sequence
  Description of Artificial Sequence: Synthetic oligonucleotide
  Antisense strand to SEQ ID NO: 2293212
ucucaccucuacuacuaua

SEQ ID NO: 2293214 - RNA, 19 nt, Artificial Sequence
  Description of Artificial Sequence: Synthetic oligonucleotide
  Sense strand starting at position 2112 of SEQ ID NO: 1884804
uguggcaucagugaaucuu

SEQ ID NO: 2293215 - RNA, 19 nt, Artificial Sequence
  Description of Artificial Sequence: Synthetic oligonucleotide
  Antisense strand to SEQ ID NO: 2293214
aagauucacugaugccaca

SEQ ID NO: 2293216 - RNA, 19 nt, Artificial Sequence
  Description of Artificial Sequence: Synthetic oligonucleotide
  Sense strand starting at position 2350 of SEQ ID NO: 1884804
aggacuuucccuugcugga

SEQ ID NO: 2293217 - RNA, 19 nt, Artificial Sequence
  Description of Artificial Sequence: Synthetic oligonucleotide
  Antisense strand to SEQ ID NO: 2293216
uccagcaagggaaaguccu

SEQ ID NO: 2293218 - RNA, 19 nt, Artificial Sequence
  Description of Artificial Sequence: Synthetic oligonucleotide
  Sense strand starting at position 2694 of SEQ ID NO: 1884804
ggugcuugugaaugaauaa

SEQ ID NO: 2293219 - RNA, 19 nt, Artificial Sequence
  Description of Artificial Sequence: Synthetic oligonucleotide
  Antisense strand to SEQ ID NO: 2293218
uuauucauucacaagcacc

SEQ ID NO: 2293220 - RNA, 19 nt, Artificial Sequence
  Description of Artificial Sequence: Synthetic oligonucleotide
  Sense strand starting at position 2787 of SEQ ID NO: 1884804
gguggguacguggauugau

SEQ ID NO: 2293221 - RNA, 19 nt, Artificial Sequence
  Description of Artificial Sequence: Synthetic oligonucleotide
  Antisense strand to SEQ ID NO: 2293220
aucaauccacguacccacc

SEQ ID NO: 2293222 - RNA, 19 nt, Artificial Sequence
  Description of Artificial Sequence: Synthetic oligonucleotide
  Sense strand starting at position 2795 of SEQ ID NO: 1884804
cguggauugauggguggau

SEQ ID NO: 2293223 - RNA, 19 nt, Artificial Sequence
  Description of Artificial Sequence: Synthetic oligonucleotide
  Antisense strand to SEQ ID NO: 2293222
auccacccaucaauccacg

SEQ ID NO: 2293224 - RNA, 19 nt, Artificial Sequence
  Description of Artificial Sequence: Synthetic oligonucleotide
  Sense strand starting at position 2796 of SEQ ID NO: 1884804
guggauugauggguggaua

SEQ ID NO: 2293225 - RNA, 19 nt, Artificial Sequence
  Description of Artificial Sequence: Synthetic oligonucleotide
  Antisense strand to SEQ ID NO: 2293224
uauccacccaucaauccac

SEQ ID NO: 2293226 - RNA, 19 nt, Artificial Sequence
  Description of Artificial Sequence: Synthetic oligonucleotide
  Sense strand starting at position 2807 of SEQ ID NO: 1884804
gguggauacaugcauggau

SEQ ID NO: 2293227 - RNA, 19 nt, Artificial Sequence
  Description of Artificial Sequence: Synthetic oligonucleotide
  Antisense strand to SEQ ID NO: 2293226
auccaugcauguauccacc

SEQ ID NO: 2293228 - RNA, 19 nt, Artificial Sequence
  Description of Artificial Sequence: Synthetic oligonucleotide
  Sense strand starting at position 2955 of SEQ ID NO: 1884804
uguguaaguauagauggau

SEQ ID NO: 2293229 - RNA, 19 nt, Artificial Sequence
  Description of Artificial Sequence: Synthetic oligonucleotide
  Antisense strand to SEQ ID NO: 2293228
auccaucuauacuuacaca

SEQ ID NO: 2293230 - RNA, 19 nt, Artificial Sequence
  Description of Artificial Sequence: Synthetic oligonucleotide
  Sense strand starting at position 2958 of SEQ ID NO: 1884804
guaaguauagauggaugga

SEQ ID NO: 2293231 - RNA, 19 nt, Artificial Sequence
  Description of Artificial Sequence: Synthetic oligonucleotide
  Antisense strand to SEQ ID NO: 2293230
uccauccaucuauacuuac

SEQ ID NO: 2293232 - RNA, 19 nt, Artificial Sequence
  Description of Artificial Sequence: Synthetic oligonucleotide
  Sense strand starting at position 3165 of SEQ ID NO: 1884804
cccagaauaguuggugaug

SEQ ID NO: 2293233 - RNA, 19 nt, Artificial Sequence
  Description of Artificial Sequence: Synthetic oligonucleotide
  Antisense strand to SEQ ID NO: 2293232
caucaccaacuauucuggg

SEQ ID NO: 2293234 - RNA, 19 nt, Artificial Sequence
  Description of Artificial Sequence: Synthetic oligonucleotide
  Sense strand starting at position 3166 of SEQ ID NO: 1884804
ccagaauaguuggugauga

SEQ ID NO: 2293235 - RNA, 19 nt, Artificial Sequence
  Description of Artificial Sequence: Synthetic oligonucleotide
  Antisense strand to SEQ ID NO: 2293234
ucaucaccaacuauucugg

SEQ ID NO: 2293236 - RNA, 19 nt, Artificial Sequence
  Description of Artificial Sequence: Synthetic oligonucleotide
  Sense strand starting at position 3243 of SEQ ID NO: 1884804
aaaguaagccagggaaagu

SEQ ID NO: 2293237 - RNA, 19 nt, Artificial Sequence
  Description of Artificial Sequence: Synthetic oligonucleotide
  Antisense strand to SEQ ID NO: 2293236
acuuucccuggcuuacuuu

SEQ ID NO: 2293238 - RNA, 19 nt, Artificial Sequence
  Description of Artificial Sequence: Synthetic oligonucleotide
  Sense strand starting at position 3452 of SEQ ID NO: 1884804
gcuugcagcagagagaauu

SEQ ID NO: 2293239 - RNA, 19 nt, Artificial Sequence
  Description of Artificial Sequence: Synthetic oligonucleotide
  Antisense strand to SEQ ID NO: 2293238
aauucucucugcugcaagc

SEQ ID NO: 2293240 - RNA, 19 nt, Artificial Sequence
  Description of Artificial Sequence: Synthetic oligonucleotide
  Sense strand starting at position 3470 of SEQ ID NO: 1884804
ugauuugaguguucuagca

SEQ ID NO: 2293241 - RNA, 19 nt, Artificial Sequence
  Description of Artificial Sequence: Synthetic oligonucleotide
  Antisense strand to SEQ ID NO: 2293240
ugcuagaacacucaaauca

SEQ ID NO: 2293242 - RNA, 19 nt, Artificial Sequence
  Description of Artificial Sequence: Synthetic oligonucleotide
  Sense strand starting at position 3593 of SEQ ID NO: 1884804
caggacagcuuccuauaga

SEQ ID NO: 2293243 - RNA, 19 nt, Artificial Sequence
  Description of Artificial Sequence: Synthetic oligonucleotide
  Antisense strand to SEQ ID NO: 2293242
ucuauaggaagcuguccug

SEQ ID NO: 2293244 - RNA, 19 nt, Artificial Sequence
  Description of Artificial Sequence: Synthetic oligonucleotide
  Sense strand starting at position 3604 of SEQ ID NO: 1884804
ccuauagacuaucuguuau

SEQ ID NO: 2293245 - RNA, 19 nt, Artificial Sequence
  Description of Artificial Sequence: Synthetic oligonucleotide
  Antisense strand to SEQ ID NO: 2293244
auaacagauagucuauagg

SEQ ID NO: 2293246 - RNA, 19 nt, Artificial Sequence
  Description of Artificial Sequence: Synthetic oligonucleotide
  Sense strand starting at position 3697 of SEQ ID NO: 1884804
gccaauuuccuuuggugau

SEQ ID NO: 2293247 - RNA, 19 nt, Artificial Sequence
  Description of Artificial Sequence: Synthetic oligonucleotide
  Antisense strand to SEQ ID NO: 2293246
aucaccaaaggaaauuggc

SEQ ID NO: 2293248 - RNA, 19 nt, Artificial Sequence
  Description of Artificial Sequence: Synthetic oligonucleotide
  Sense strand starting at position 3710 of SEQ ID NO: 1884804
ggugaugacucucugauuc

SEQ ID NO: 2293249 - RNA, 19 nt, Artificial Sequence
  Description of Artificial Sequence: Synthetic oligonucleotide
  Antisense strand to SEQ ID NO: 2293248
gaaucagagagucaucacc

SEQ ID NO: 2293250 - RNA, 19 nt, Artificial Sequence
  Description of Artificial Sequence: Synthetic oligonucleotide
  Sense strand starting at position 3905 of SEQ ID NO: 1884804
uacgucauuccggaggaca

SEQ ID NO: 2293251 - RNA, 19 nt, Artificial Sequence
  Description of Artificial Sequence: Synthetic oligonucleotide
  Antisense strand to SEQ ID NO: 2293250
uguccuccggaaugacgua

SEQ ID NO: 2293252 - RNA, 19 nt, Artificial Sequence
  Description of Artificial Sequence: Synthetic oligonucleotide
  Sense strand starting at position 3952 of SEQ ID NO: 1884804
gucccacguggauaucaau

SEQ ID NO: 2293253 - RNA, 19 nt, Artificial Sequence
  Description of Artificial Sequence: Synthetic oligonucleotide
  Antisense strand to SEQ ID NO: 2293252
auugauauccacgugggac

SEQ ID NO: 2293254 - RNA, 19 nt, Artificial Sequence
  Description of Artificial Sequence: Synthetic oligonucleotide
  Sense strand starting at position 498 of SEQ ID NO: 1884805
uugauaagauucucaguaa

SEQ ID NO: 2293255 - RNA, 19 nt, Artificial Sequence
  Description of Artificial Sequence: Synthetic oligonucleotide
  Antisense strand to SEQ ID NO: 2293254
uuacugagaaucuuaucaa

SEQ ID NO: 2293256 - RNA, 19 nt, Artificial Sequence
  Description of Artificial Sequence: Synthetic oligonucleotide
  Sense strand starting at position 501 of SEQ ID NO: 1884805
auaagauucucaguaaugu

SEQ ID NO: 2293257 - RNA, 19 nt, Artificial Sequence
  Description of Artificial Sequence: Synthetic oligonucleotide
  Antisense strand to SEQ ID NO: 2293256
acauuacugagaaucuuau

SEQ ID NO: 2293258 - RNA, 19 nt, Artificial Sequence
  Description of Artificial Sequence: Synthetic oligonucleotide
  Sense strand starting at position 502 of SEQ ID NO: 1884805
uaagauucucaguaaugug

SEQ ID NO: 2293259 - RNA, 19 nt, Artificial Sequence
  Description of Artificial Sequence: Synthetic oligonucleotide
  Antisense strand to SEQ ID NO: 2293258
cacauuacugagaaucuua

SEQ ID NO: 2293260 - RNA, 19 nt, Artificial Sequence
  Description of Artificial Sequence: Synthetic oligonucleotide
  Sense strand starting at position 544 of SEQ ID NO: 1884805
ccuuacauugcugauggaa

SEQ ID NO: 2293261 - RNA, 19 nt, Artificial Sequence
  Description of Artificial Sequence: Synthetic oligonucleotide
  Antisense strand to SEQ ID NO: 2293260
uuccaucagcaauguaagg

SEQ ID NO: 2293262 - RNA, 19 nt, Artificial Sequence
  Description of Artificial Sequence: Synthetic oligonucleotide
  Sense strand starting at position 619 of SEQ ID NO: 1884805
aaaugugcauuguugacaa

SEQ ID NO: 2293263 - RNA, 19 nt, Artificial Sequence
  Description of Artificial Sequence: Synthetic oligonucleotide
  Antisense strand to SEQ ID NO: 2293262
uugucaacaaugcacauuu

SEQ ID NO: 2293264 - RNA, 19 nt, Artificial Sequence
  Description of Artificial Sequence: Synthetic oligonucleotide
  Sense strand starting at position 638 of SEQ ID NO: 1884805
guaauuccaugucuuagaa

SEQ ID NO: 2293265 - RNA, 19 nt, Artificial Sequence
  Description of Artificial Sequence: Synthetic oligonucleotide
  Antisense strand to SEQ ID NO: 2293264
uucuaagacauggaauuac

SEQ ID NO: 2293266 - RNA, 19 nt, Artificial Sequence
  Description of Artificial Sequence: Synthetic oligonucleotide
  Sense strand starting at position 701 of SEQ ID NO: 1884805
guacaaggauaugcauauu

SEQ ID NO: 2293267 - RNA, 19 nt, Artificial Sequence
  Description of Artificial Sequence: Synthetic oligonucleotide
  Antisense strand to SEQ ID NO: 2293266
aauaugcauauccuuguac

SEQ ID NO: 2293268 - RNA, 19 nt, Artificial Sequence
  Description of Artificial Sequence: Synthetic oligonucleotide
  Sense strand starting at position 707 of SEQ ID NO: 1884805
ggauaugcauauuccauag

SEQ ID NO: 2293269 - RNA, 19 nt, Artificial Sequence
  Description of Artificial Sequence: Synthetic oligonucleotide
  Antisense strand to SEQ ID NO: 2293268
cuauggaauaugcauaucc

SEQ ID NO: 2293270 - RNA, 19 nt, Artificial Sequence
  Description of Artificial Sequence: Synthetic oligonucleotide
  Sense strand starting at position 798 of SEQ ID NO: 1884805
uggaaaucuaugcagcagu

SEQ ID NO: 2293271 - RNA, 19 nt, Artificial Sequence
  Description of Artificial Sequence: Synthetic oligonucleotide
  Antisense strand to SEQ ID NO: 2293270
acugcugcauagauuucca

SEQ ID NO: 2293272 - RNA, 19 nt, Artificial Sequence
  Description of Artificial Sequence: Synthetic oligonucleotide
  Sense strand starting at position 841 of SEQ ID NO: 1884805
ugcacuguucuggaacaau

SEQ ID NO: 2293273 - RNA, 19 nt, Artificial Sequence
  Description of Artificial Sequence: Synthetic oligonucleotide
  Antisense strand to SEQ ID NO: 2293272
auuguuccagaacagugca

SEQ ID NO: 2293274 - RNA, 19 nt, Artificial Sequence
  Description of Artificial Sequence: Synthetic oligonucleotide
  Sense strand starting at position 928 of SEQ ID NO: 1884805
gugagaaugugcuugaaua

SEQ ID NO: 2293275 - RNA, 19 nt, Artificial Sequence
  Description of Artificial Sequence: Synthetic oligonucleotide
  Antisense strand to SEQ ID NO: 2293274
uauucaagcacauucucac

SEQ ID NO: 2293276 - RNA, 19 nt, Artificial Sequence
  Description of Artificial Sequence: Synthetic oligonucleotide
  Sense strand starting at position 929 of SEQ ID NO: 1884805
ugagaaugugcuugaauau

SEQ ID NO: 2293277 - RNA, 19 nt, Artificial Sequence
  Description of Artificial Sequence: Synthetic oligonucleotide
  Antisense strand to SEQ ID NO: 2293276
auauucaagcacauucuca

SEQ ID NO: 2293278 - RNA, 19 nt, Artificial Sequence
  Description of Artificial Sequence: Synthetic oligonucleotide
  Sense strand starting at position 1177 of SEQ ID NO: 1884805
cuacaugaugccuaggauu

SEQ ID NO: 2293279 - RNA, 19 nt, Artificial Sequence
  Description of Artificial Sequence: Synthetic oligonucleotide
  Antisense strand to SEQ ID NO: 2293278
aauccuaggcaucauguag

SEQ ID NO: 2293280 - RNA, 19 nt, Artificial Sequence
  Description of Artificial Sequence: Synthetic oligonucleotide
  Sense strand starting at position 1189 of SEQ ID NO: 1884805
uaggauugccauuaguaau

SEQ ID NO: 2293281 - RNA, 19 nt, Artificial Sequence
  Description of Artificial Sequence: Synthetic oligonucleotide
  Antisense strand to SEQ ID NO: 2293280
auuacuaauggcaauccua

SEQ ID NO: 2293282 - RNA, 19 nt, Artificial Sequence
  Description of Artificial Sequence: Synthetic oligonucleotide
  Sense strand starting at position 2054 of SEQ ID NO: 1884805
acaggacuccuccgggaau

SEQ ID NO: 2293283 - RNA, 19 nt, Artificial Sequence
  Description of Artificial Sequence: Synthetic oligonucleotide
  Antisense strand to SEQ ID NO: 2293282
auucccggaggaguccugu

SEQ ID NO: 2293284 - RNA, 19 nt, Artificial Sequence
  Description of Artificial Sequence: Synthetic oligonucleotide
  Sense strand starting at position 2132 of SEQ ID NO: 1884805
augagaauauaagaccaaa

SEQ ID NO: 2293285 - RNA, 19 nt, Artificial Sequence
  Description of Artificial Sequence: Synthetic oligonucleotide
  Antisense strand to SEQ ID NO: 2293284
uuuggucuuauauucucau

SEQ ID NO: 2293286 - RNA, 19 nt, Artificial Sequence
  Description of Artificial Sequence: Synthetic oligonucleotide
  Sense strand starting at position 2271 of SEQ ID NO: 1884805
agcaguuuaggagagguuu

SEQ ID NO: 2293287 - RNA, 19 nt, Artificial Sequence
  Description of Artificial Sequence: Synthetic oligonucleotide
  Antisense strand to SEQ ID NO: 2293286
aaaccucuccuaaacugcu

SEQ ID NO: 2293288 - RNA, 19 nt, Artificial Sequence
  Description of Artificial Sequence: Synthetic oligonucleotide
  Sense strand starting at position 2273 of SEQ ID NO: 1884805
caguuuaggagagguuuga

SEQ ID NO: 2293289 - RNA, 19 nt, Artificial Sequence
  Description of Artificial Sequence: Synthetic oligonucleotide
  Antisense strand to SEQ ID NO: 2293288
ucaaaccucuccuaaacug

SEQ ID NO: 2293290 - RNA, 19 nt, Artificial Sequence
  Description of Artificial Sequence: Synthetic oligonucleotide
  Sense strand starting at position 2277 of SEQ ID NO: 1884805
uuaggagagguuugaguca

SEQ ID NO: 2293291 - RNA, 19 nt, Artificial Sequence
  Description of Artificial Sequence: Synthetic oligonucleotide
  Antisense strand to SEQ ID NO: 2293290
ugacucaaaccucuccuaa

SEQ ID NO: 2293292 - RNA, 19 nt, Artificial Sequence
  Description of Artificial Sequence: Synthetic oligonucleotide
  Sense strand starting at position 2284 of SEQ ID NO: 1884805
agguuugagucacuggaaa

SEQ ID NO: 2293293 - RNA, 19 nt, Artificial Sequence
  Description of Artificial Sequence: Synthetic oligonucleotide
  Antisense strand to SEQ ID NO: 2293292
uuuccagugacucaaaccu

SEQ ID NO: 2293294 - RNA, 19 nt, Artificial Sequence
  Description of Artificial Sequence: Synthetic oligonucleotide
  Sense strand starting at position 2446 of SEQ ID NO: 1884805
auuggaauguuagcugaua

SEQ ID NO: 2293295 - RNA, 19 nt, Artificial Sequence
  Description of Artificial Sequence: Synthetic oligonucleotide
  Antisense strand to SEQ ID NO: 2293294
uaucagcuaacauuccaau

SEQ ID NO: 2293296 - RNA, 19 nt, Artificial Sequence
  Description of Artificial Sequence: Synthetic oligonucleotide
  Sense strand starting at position 2447 of SEQ ID NO: 1884805
uuggaauguuagcugauau

SEQ ID NO: 2293297 - RNA, 19 nt, Artificial Sequence
  Description of Artificial Sequence: Synthetic oligonucleotide
  Antisense strand to SEQ ID NO: 2293296
auaucagcuaacauuccaa

SEQ ID NO: 2293298 - RNA, 19 nt, Artificial Sequence
  Description of Artificial Sequence: Synthetic oligonucleotide
  Sense strand starting at position 2448 of SEQ ID NO: 1884805
uggaauguuagcugauaua

SEQ ID NO: 2293299 - RNA, 19 nt, Artificial Sequence
  Description of Artificial Sequence: Synthetic oligonucleotide
  Antisense strand to SEQ ID NO: 2293298
uauaucagcuaacauucca

SEQ ID NO: 2293300 - RNA, 19 nt, Artificial Sequence
  Description of Artificial Sequence: Synthetic oligonucleotide
  Sense strand starting at position 2746 of SEQ ID NO: 1884805
aguagaaaugagugagucu

SEQ ID NO: 2293301 - RNA, 19 nt, Artificial Sequence
  Description of Artificial Sequence: Synthetic oligonucleotide
  Antisense strand to SEQ ID NO: 2293300
agacucacucauuucuacu

SEQ ID NO: 2293302 - RNA, 19 nt, Artificial Sequence
  Description of Artificial Sequence: Synthetic oligonucleotide
  Sense strand starting at position 2817 of SEQ ID NO: 1884805
ggcucauccaugggucaga

SEQ ID NO: 2293303 - RNA, 19 nt, Artificial Sequence
  Description of Artificial Sequence: Synthetic oligonucleotide
  Antisense strand to SEQ ID NO: 2293302
ucugacccauggaugagcc

SEQ ID NO: 2293304 - RNA, 19 nt, Artificial Sequence
  Description of Artificial Sequence: Synthetic oligonucleotide
  Sense strand starting at position 2971 of SEQ ID NO: 1884805
guugccaaagcauaguaaa

SEQ ID NO: 2293305 - RNA, 19 nt, Artificial Sequence
  Description of Artificial Sequence: Synthetic oligonucleotide
  Antisense strand to SEQ ID NO: 2293304
uuuacuaugcuuuggcaac

SEQ ID NO: 2293306 - RNA, 19 nt, Artificial Sequence
  Description of Artificial Sequence: Synthetic oligonucleotide
  Sense strand starting at position 2985 of SEQ ID NO: 1884805
guaaauucugggcagcaaa

SEQ ID NO: 2293307 - RNA, 19 nt, Artificial Sequence
  Description of Artificial Sequence: Synthetic oligonucleotide
  Antisense strand to SEQ ID NO: 2293306
uuugcugcccagaauuuac

SEQ ID NO: 2293308 - RNA, 19 nt, Artificial Sequence
  Description of Artificial Sequence: Synthetic oligonucleotide
  Sense strand starting at position 3005 of SEQ ID NO: 1884805
acggcaauuguccacaaca

SEQ ID NO: 2293309 - RNA, 19 nt, Artificial Sequence
  Description of Artificial Sequence: Synthetic oligonucleotide
  Antisense strand to SEQ ID NO: 2293308
uguuguggacaauugccgu

SEQ ID NO: 2293310 - RNA, 19 nt, Artificial Sequence
  Description of Artificial Sequence: Synthetic oligonucleotide
  Sense strand starting at position 3007 of SEQ ID NO: 1884805
ggcaauuguccacaacaaa

SEQ ID NO: 2293311 - RNA, 19 nt, Artificial Sequence
  Description of Artificial Sequence: Synthetic oligonucleotide
  Antisense strand to SEQ ID NO: 2293310
uuuguuguggacaauugcc

SEQ ID NO: 2293312 - RNA, 19 nt, Artificial Sequence
  Description of Artificial Sequence: Synthetic oligonucleotide
  Sense strand starting at position 3061 of SEQ ID NO: 1884805
guggaaauugaaggucuca

SEQ ID NO: 2293313 - RNA, 19 nt, Artificial Sequence
  Description of Artificial Sequence: Synthetic oligonucleotide
  Antisense strand to SEQ ID NO: 2293312
ugagaccuucaauuuccac

SEQ ID NO: 2293314 - RNA, 19 nt, Artificial Sequence
  Description of Artificial Sequence: Synthetic oligonucleotide
  Sense strand starting at position 3076 of SEQ ID NO: 1884805
cucagauguuaaguaacuu

SEQ ID NO: 2293315 - RNA, 19 nt, Artificial Sequence
  Description of Artificial Sequence: Synthetic oligonucleotide
  Antisense strand to SEQ ID NO: 2293314
aaguuacuuaacaucugag

SEQ ID NO: 2293316 - RNA, 19 nt, Artificial Sequence
  Description of Artificial Sequence: Synthetic oligonucleotide
  Sense strand starting at position 3104 of SEQ ID NO: 1884805
cauauaguggcauagauug

SEQ ID NO: 2293317 - RNA, 19 nt, Artificial Sequence
  Description of Artificial Sequence: Synthetic oligonucleotide
  Antisense strand to SEQ ID NO: 2293316
caaucuaugccacuauaug

SEQ ID NO: 2293318 - RNA, 19 nt, Artificial Sequence
  Description of Artificial Sequence: Synthetic oligonucleotide
  Sense strand starting at position 3270 of SEQ ID NO: 1884805
cuuggaguuaugggcaaag

SEQ ID NO: 2293319 - RNA, 19 nt, Artificial Sequence
  Description of Artificial Sequence: Synthetic oligonucleotide
  Antisense strand to SEQ ID NO: 2293318
cuuugcccauaacuccaag

SEQ ID NO: 2293320 - RNA, 19 nt, Artificial Sequence
  Description of Artificial Sequence: Synthetic oligonucleotide
  Sense strand starting at position 3272 of SEQ ID NO: 1884805
uggaguuaugggcaaaguu

SEQ ID NO: 2293321 - RNA, 19 nt, Artificial Sequence
  Description of Artificial Sequence: Synthetic oligonucleotide
  Antisense strand to SEQ ID NO: 2293320
aacuuugcccauaacucca

SEQ ID NO: 2293322 - RNA, 19 nt, Artificial Sequence
  Description of Artificial Sequence: Synthetic oligonucleotide
  Sense strand starting at position 3342 of SEQ ID NO: 1884805
agauguuauuugccagcua

SEQ ID NO: 2293323 - RNA, 19 nt, Artificial Sequence
  Description of Artificial Sequence: Synthetic oligonucleotide
  Antisense strand to SEQ ID NO: 2293322
uagcuggcaaauaacaucu

SEQ ID NO: 2293324 - RNA, 19 nt, Artificial Sequence
  Description of Artificial Sequence: Synthetic oligonucleotide
  Sense strand starting at position 3533 of SEQ ID NO: 1884805
gagagauuccuagguugag

SEQ ID NO: 2293325 - RNA, 19 nt, Artificial Sequence
  Description of Artificial Sequence: Synthetic oligonucleotide
  Antisense strand to SEQ ID NO: 2293324
cucaaccuaggaaucucuc

SEQ ID NO: 2293326 - RNA, 19 nt, Artificial Sequence
  Description of Artificial Sequence: Synthetic oligonucleotide
  Sense strand starting at position 3683 of SEQ ID NO: 1884805
gagcucuugggaggaauaa

SEQ ID NO: 2293327 - RNA, 19 nt, Artificial Sequence
  Description of Artificial Sequence: Synthetic oligonucleotide
  Antisense strand to SEQ ID NO: 2293326
uuauuccucccaagagcuc

SEQ ID NO: 2293328 - RNA, 19 nt, Artificial Sequence
  Description of Artificial Sequence: Synthetic oligonucleotide
  Sense strand starting at position 3710 of SEQ ID NO: 1884805
gcacaaaggagcuaguaua

SEQ ID NO: 2293329 - RNA, 19 nt, Artificial Sequence
  Description of Artificial Sequence: Synthetic oligonucleotide
  Antisense strand to SEQ ID NO: 2293328
uauacuagcuccuuugugc

SEQ ID NO: 2293330 - RNA, 19 nt, Artificial Sequence
  Description of Artificial Sequence: Synthetic oligonucleotide
  Sense strand starting at position 3747 of SEQ ID NO: 1884805
uccaccaaugguugauauu

SEQ ID NO: 2293331 - RNA, 19 nt, Artificial Sequence
  Description of Artificial Sequence: Synthetic oligonucleotide
  Antisense strand to SEQ ID NO: 2293330
aauaucaaccauuggugga

SEQ ID NO: 2293332 - RNA, 19 nt, Artificial Sequence
  Description of Artificial Sequence: Synthetic oligonucleotide
  Sense strand starting at position 3784 of SEQ ID NO: 1884805
gguugcacgagguaaugaa

SEQ ID NO: 2293333 - RNA, 19 nt, Artificial Sequence
  Description of Artificial Sequence: Synthetic oligonucleotide
  Antisense strand to SEQ ID NO: 2293332
uucauuaccucgugcaacc

SEQ ID NO: 2293334 - RNA, 19 nt, Artificial Sequence
  Description of Artificial Sequence: Synthetic oligonucleotide
  Sense strand starting at position 230 of SEQ ID NO: 1884806
guuacagacuuaucuucca

SEQ ID NO: 2293335 - RNA, 19 nt, Artificial Sequence
  Description of Artificial Sequence: Synthetic oligonucleotide
  Antisense strand to SEQ ID NO: 2293334
uggaagauaagucuguaac

SEQ ID NO: 2293336 - RNA, 19 nt, Artificial Sequence
  Description of Artificial Sequence: Synthetic oligonucleotide
  Sense strand starting at position 233 of SEQ ID NO: 1884806
acagacuuaucuuccaguu

SEQ ID NO: 2293337 - RNA, 19 nt, Artificial Sequence
  Description of Artificial Sequence: Synthetic oligonucleotide
  Antisense strand to SEQ ID NO: 2293336
aacuggaagauaagucugu

SEQ ID NO: 2293338 - RNA, 19 nt, Artificial Sequence
  Description of Artificial Sequence: Synthetic oligonucleotide
  Sense strand starting at position 245 of SEQ ID NO: 1884806
uccaguugcugauuucuca

SEQ ID NO: 2293339 - RNA, 19 nt, Artificial Sequence
  Description of Artificial Sequence: Synthetic oligonucleotide
  Antisense strand to SEQ ID NO: 2293338
ugagaaaucagcaacugga

SEQ ID NO: 2293340 - RNA, 19 nt, Artificial Sequence
  Description of Artificial Sequence: Synthetic oligonucleotide
  Sense strand starting at position 252 of SEQ ID NO: 1884806
gcugauuucucagaacccu

SEQ ID NO: 2293341 - RNA, 19 nt, Artificial Sequence
  Description of Artificial Sequence: Synthetic oligonucleotide
  Antisense strand to SEQ ID NO: 2293340
aggguucugagaaaucagc

SEQ ID NO: 2293342 - RNA, 19 nt, Artificial Sequence
  Description of Artificial Sequence: Synthetic oligonucleotide
  Sense strand starting at position 288 of SEQ ID NO: 1884806
gucuauuuguugguuucca

SEQ ID NO: 2293343 - RNA, 19 nt, Artificial Sequence
  Description of Artificial Sequence: Synthetic oligonucleotide
  Antisense strand to SEQ ID NO: 2293342
uggaaaccaacaaauagac

SEQ ID NO: 2293344 - RNA, 19 nt, Artificial Sequence
  Description of Artificial Sequence: Synthetic oligonucleotide
  Sense strand starting at position 289 of SEQ ID NO: 1884806
ucuauuuguugguuuccau

SEQ ID NO: 2293345 - RNA, 19 nt, Artificial Sequence
  Description of Artificial Sequence: Synthetic oligonucleotide
  Antisense strand to SEQ ID NO: 2293344
auggaaaccaacaaauaga

SEQ ID NO: 2293346 - RNA, 19 nt, Artificial Sequence
  Description of Artificial Sequence: Synthetic oligonucleotide
  Sense strand starting at position 366 of SEQ ID NO: 1884806
ggcaaucugaagugguuau

SEQ ID NO: 2293347 - RNA, 19 nt, Artificial Sequence
  Description of Artificial Sequence: Synthetic oligonucleotide
  Antisense strand to SEQ ID NO: 2293346
auaaccacuucagauugcc

SEQ ID NO: 2293348 - RNA, 19 nt, Artificial Sequence
  Description of Artificial Sequence: Synthetic oligonucleotide
  Sense strand starting at position 367 of SEQ ID NO: 1884806
gcaaucugaagugguuaua

SEQ ID NO: 2293349 - RNA, 19 nt, Artificial Sequence
  Description of Artificial Sequence: Synthetic oligonucleotide
  Antisense strand to SEQ ID NO: 2293348
uauaaccacuucagauugc

SEQ ID NO: 2293350 - RNA, 19 nt, Artificial Sequence
  Description of Artificial Sequence: Synthetic oligonucleotide
  Sense strand starting at position 370 of SEQ ID NO: 1884806
aucugaagugguuauagcu

SEQ ID NO: 2293351 - RNA, 19 nt, Artificial Sequence
  Description of Artificial Sequence: Synthetic oligonucleotide
  Antisense strand to SEQ ID NO: 2293350
agcuauaaccacuucagau

SEQ ID NO: 2293352 - RNA, 19 nt, Artificial Sequence
  Description of Artificial Sequence: Synthetic oligonucleotide
  Sense strand starting at position 390 of SEQ ID NO: 1884806
aaauaaugggccugaacgu

SEQ ID NO: 2293353 - RNA, 19 nt, Artificial Sequence
  Description of Artificial Sequence: Synthetic oligonucleotide
  Antisense strand to SEQ ID NO: 2293352
acguucaggcccauuauuu

SEQ ID NO: 2293354 - RNA, 19 nt, Artificial Sequence
  Description of Artificial Sequence: Synthetic oligonucleotide
  Sense strand starting at position 399 of SEQ ID NO: 1884806
gccugaacguggcugaauu

SEQ ID NO: 2293355 - RNA, 19 nt, Artificial Sequence
  Description of Artificial Sequence: Synthetic oligonucleotide
  Antisense strand to SEQ ID NO: 2293354
aauucagccacguucaggc

SEQ ID NO: 2293356 - RNA, 19 nt, Artificial Sequence
  Description of Artificial Sequence: Synthetic oligonucleotide
  Sense strand starting at position 400 of SEQ ID NO: 1884806
ccugaacguggcugaauua

SEQ ID NO: 2293357 - RNA, 19 nt, Artificial Sequence
  Description of Artificial Sequence: Synthetic oligonucleotide
  Antisense strand to SEQ ID NO: 2293356
uaauucagccacguucagg

SEQ ID NO: 2293358 - RNA, 19 nt, Artificial Sequence
  Description of Artificial Sequence: Synthetic oligonucleotide
  Sense strand starting at position 401 of SEQ ID NO: 1884806
cugaacguggcugaauuaa

SEQ ID NO: 2293359 - RNA, 19 nt, Artificial Sequence
  Description of Artificial Sequence: Synthetic oligonucleotide
  Antisense strand to SEQ ID NO: 2293358
uuaauucagccacguucag

SEQ ID NO: 2293360 - RNA, 19 nt, Artificial Sequence
  Description of Artificial Sequence: Synthetic oligonucleotide
  Sense strand starting at position 443 of SEQ ID NO: 1884806
ggaggcacuuucucaaaua

SEQ ID NO: 2293361 - RNA, 19 nt, Artificial Sequence
  Description of Artificial Sequence: Synthetic oligonucleotide
  Antisense strand to SEQ ID NO: 2293360
uauuugagaaagugccucc

SEQ ID NO: 2293362 - RNA, 19 nt, Artificial Sequence
  Description of Artificial Sequence: Synthetic oligonucleotide
  Sense strand starting at position 568 of SEQ ID NO: 1884806
aaggaccuuugccaggaaa

SEQ ID NO: 2293363 - RNA, 19 nt, Artificial Sequence
  Description of Artificial Sequence: Synthetic oligonucleotide
  Antisense strand to SEQ ID NO: 2293362
uuuccuggcaaagguccuu

SEQ ID NO: 2293364 - RNA, 19 nt, Artificial Sequence
  Description of Artificial Sequence: Synthetic oligonucleotide
  Sense strand starting at position 599 of SEQ ID NO: 1884806
ccaagugauuuccgcugaa

SEQ ID NO: 2293365 - RNA, 19 nt, Artificial Sequence
  Description of Artificial Sequence: Synthetic oligonucleotide
  Antisense strand to SEQ ID NO: 2293364
uucagcggaaaucacuugg

SEQ ID NO: 2293366 - RNA, 19 nt, Artificial Sequence
  Description of Artificial Sequence: Synthetic oligonucleotide
  Sense strand starting at position 602 of SEQ ID NO: 1884806
agugauuuccgcugaauua

SEQ ID NO: 2293367 - RNA, 19 nt, Artificial Sequence
  Description of Artificial Sequence: Synthetic oligonucleotide
  Antisense strand to SEQ ID NO: 2293366
uaauucagcggaaaucacu

SEQ ID NO: 2293368 - RNA, 19 nt, Artificial Sequence
  Description of Artificial Sequence: Synthetic oligonucleotide
  Sense strand starting at position 765 of SEQ ID NO: 1884806
guucuaacugcccggaguu

SEQ ID NO: 2293369 - RNA, 19 nt, Artificial Sequence
  Description of Artificial Sequence: Synthetic oligonucleotide
  Antisense strand to SEQ ID NO: 2293368
aacuccgggcaguuagaac

SEQ ID NO: 2293370 - RNA, 19 nt, Artificial Sequence
  Description of Artificial Sequence: Synthetic oligonucleotide
  Sense strand starting at position 766 of SEQ ID NO: 1884806
uucuaacugcccggaguuu

SEQ ID NO: 2293371 - RNA, 19 nt, Artificial Sequence
  Description of Artificial Sequence: Synthetic oligonucleotide
  Antisense strand to SEQ ID NO: 2293370
aaacuccgggcaguuagaa

SEQ ID NO: 2293372 - RNA, 19 nt, Artificial Sequence
  Description of Artificial Sequence: Synthetic oligonucleotide
  Sense strand starting at position 777 of SEQ ID NO: 1884806
cggaguuucuaccuucuuu

SEQ ID NO: 2293373 - RNA, 19 nt, Artificial Sequence
  Description of Artificial Sequence: Synthetic oligonucleotide
  Antisense strand to SEQ ID NO: 2293372
aaagaagguagaaacuccg

SEQ ID NO: 2293374 - RNA, 19 nt, Artificial Sequence
  Description of Artificial Sequence: Synthetic oligonucleotide
  Sense strand starting at position 879 of SEQ ID NO: 1884806
gccugaaccugccuauuaa

SEQ ID NO: 2293375 - RNA, 19 nt, Artificial Sequence
  Description of Artificial Sequence: Synthetic oligonucleotide
  Antisense strand to SEQ ID NO: 2293374
uuaauaggcagguucaggc

SEQ ID NO: 2293376 - RNA, 19 nt, Artificial Sequence
  Description of Artificial Sequence: Synthetic oligonucleotide
  Sense strand starting at position 891 of SEQ ID NO: 1884806
cuauuaauucugggauucu

SEQ ID NO: 2293377 - RNA, 19 nt, Artificial Sequence
  Description of Artificial Sequence: Synthetic oligonucleotide
  Antisense strand to SEQ ID NO: 2293376
agaaucccagaauuaauag

SEQ ID NO: 2293378 - RNA, 19 nt, Artificial Sequence
  Description of Artificial Sequence: Synthetic oligonucleotide
  Sense strand starting at position 901 of SEQ ID NO: 1884806
ugggauucugggcgcucaa

SEQ ID NO: 2293379 - RNA, 19 nt, Artificial Sequence
  Description of Artificial Sequence: Synthetic oligonucleotide
  Antisense strand to SEQ ID NO: 2293378
uugagcgcccagaauccca

SEQ ID NO: 2293380 - RNA, 19 nt, Artificial Sequence
  Description of Artificial Sequence: Synthetic oligonucleotide
  Sense strand starting at position 913 of SEQ ID NO: 1884806
cgcucaaaugucuguugaa

SEQ ID NO: 2293381 - RNA, 19 nt, Artificial Sequence
  Description of Artificial Sequence: Synthetic oligonucleotide
  Antisense strand to SEQ ID NO: 2293380
uucaacagacauuugagcg

SEQ ID NO: 2293382 - RNA, 19 nt, Artificial Sequence
  Description of Artificial Sequence: Synthetic oligonucleotide
  Sense strand starting at position 914 of SEQ ID NO: 1884806
gcucaaaugucuguugaac

SEQ ID NO: 2293383 - RNA, 19 nt, Artificial Sequence
  Description of Artificial Sequence: Synthetic oligonucleotide
  Antisense strand to SEQ ID NO: 2293382
guucaacagacauuugagc

SEQ ID NO: 2293384 - RNA, 19 nt, Artificial Sequence
  Description of Artificial Sequence: Synthetic oligonucleotide
  Sense strand starting at position 966 of SEQ ID NO: 1884806
ccaaguuucuuaccgaugu

SEQ ID NO: 2293385 - RNA, 19 nt, Artificial Sequence
  Description of Artificial Sequence: Synthetic oligonucleotide
  Antisense strand to SEQ ID NO: 2293384
acaucgguaagaaacuugg

SEQ ID NO: 2293386 - RNA, 19 nt, Artificial Sequence
  Description of Artificial Sequence: Synthetic oligonucleotide
  Sense strand starting at position 1014 of SEQ ID NO: 1884806
gccaauacucuccgaggaa

SEQ ID NO: 2293387 - RNA, 19 nt, Artificial Sequence
  Description of Artificial Sequence: Synthetic oligonucleotide
  Antisense strand to SEQ ID NO: 2293386
uuccucggagaguauuggc

SEQ ID NO: 2293388 - RNA, 19 nt, Artificial Sequence
  Description of Artificial Sequence: Synthetic oligonucleotide
  Sense strand starting at position 1015 of SEQ ID NO: 1884806
ccaauacucuccgaggaag

SEQ ID NO: 2293389 - RNA, 19 nt, Artificial Sequence
  Description of Artificial Sequence: Synthetic oligonucleotide
  Antisense strand to SEQ ID NO: 2293388
cuuccucggagaguauugg

SEQ ID NO: 2293390 - RNA, 19 nt, Artificial Sequence
  Description of Artificial Sequence: Synthetic oligonucleotide
  Sense strand starting at position 1055 of SEQ ID NO: 1884806
gcagaaagcuggucaguga

SEQ ID NO: 2293391 - RNA, 19 nt, Artificial Sequence
  Description of Artificial Sequence: Synthetic oligonucleotide
  Antisense strand to SEQ ID NO: 2293390
ucacugaccagcuuucugc

SEQ ID NO: 2293392 - RNA, 19 nt, Artificial Sequence
  Description of Artificial Sequence: Synthetic oligonucleotide
  Sense strand starting at position 1243 of SEQ ID NO: 1884806
cccugcucccuggaacuau

SEQ ID NO: 2293393 - RNA, 19 nt, Artificial Sequence
  Description of Artificial Sequence: Synthetic oligonucleotide
  Antisense strand to SEQ ID NO: 2293392
auaguuccagggagcaggg

SEQ ID NO: 2293394 - RNA, 19 nt, Artificial Sequence
  Description of Artificial Sequence: Synthetic oligonucleotide
  Sense strand starting at position 1370 of SEQ ID NO: 1884806
guuuccgaacuuuggaaga

SEQ ID NO: 2293395 - RNA, 19 nt, Artificial Sequence
  Description of Artificial Sequence: Synthetic oligonucleotide
  Antisense strand to SEQ ID NO: 2293394
ucuuccaaaguucggaaac

SEQ ID NO: 2293396 - RNA, 19 nt, Artificial Sequence
  Description of Artificial Sequence: Synthetic oligonucleotide
  Sense strand starting at position 1483 of SEQ ID NO: 1884806
uggcgcauccuugggaaca

SEQ ID NO: 2293397 - RNA, 19 nt, Artificial Sequence
  Description of Artificial Sequence: Synthetic oligonucleotide
  Antisense strand to SEQ ID NO: 2293396
uguucccaaggaugcgcca

SEQ ID NO: 2293398 - RNA, 19 nt, Artificial Sequence
  Description of Artificial Sequence: Synthetic oligonucleotide
  Sense strand starting at position 1562 of SEQ ID NO: 1884806
gggacgucguguccuaagu

SEQ ID NO: 2293399 - RNA, 19 nt, Artificial Sequence
  Description of Artificial Sequence: Synthetic oligonucleotide
  Antisense strand to SEQ ID NO: 2293398
acuuaggacacgacguccc

SEQ ID NO: 2293400 - RNA, 19 nt, Artificial Sequence
  Description of Artificial Sequence: Synthetic oligonucleotide
  Sense strand starting at position 1807 of SEQ ID NO: 1884806
gggcacaucacucgccaaa

SEQ ID NO: 2293401 - RNA, 19 nt, Artificial Sequence
  Description of Artificial Sequence: Synthetic oligonucleotide
  Antisense strand to SEQ ID NO: 2293400
uuuggcgagugaugugccc

SEQ ID NO: 2293402 - RNA, 19 nt, Artificial Sequence
  Description of Artificial Sequence: Synthetic oligonucleotide
  Sense strand starting at position 1809 of SEQ ID NO: 1884806
gcacaucacucgccaaauc

SEQ ID NO: 2293403 - RNA, 19 nt, Artificial Sequence
  Description of Artificial Sequence: Synthetic oligonucleotide
  Antisense strand to SEQ ID NO: 2293402
gauuuggcgagugaugugc

SEQ ID NO: 2293404 - RNA, 19 nt, Artificial Sequence
  Description of Artificial Sequence: Synthetic oligonucleotide
  Sense strand starting at position 1845 of SEQ ID NO: 1884806
gcgaaugacuuccuauaau

SEQ ID NO: 2293405 - RNA, 19 nt, Artificial Sequence
  Description of Artificial Sequence: Synthetic oligonucleotide
  Antisense strand to SEQ ID NO: 2293404
auuauaggaagucauucgc

SEQ ID NO: 2293406 - RNA, 19 nt, Artificial Sequence
  Description of Artificial Sequence: Synthetic oligonucleotide
  Sense strand starting at position 2100 of SEQ ID NO: 1884806
cuuagcucgucucuuugaa

SEQ ID NO: 2293407 - RNA, 19 nt, Artificial Sequence
  Description of Artificial Sequence: Synthetic oligonucleotide
  Antisense strand to SEQ ID NO: 2293406
uucaaagagacgagcuaag

SEQ ID NO: 2293408 - RNA, 19 nt, Artificial Sequence
  Description of Artificial Sequence: Synthetic oligonucleotide
  Sense strand starting at position 2102 of SEQ ID NO: 1884806
uagcucgucucuuugaaau

SEQ ID NO: 2293409 - RNA, 19 nt, Artificial Sequence
  Description of Artificial Sequence: Synthetic oligonucleotide
  Antisense strand to SEQ ID NO: 2293408
auuucaaagagacgagcua

SEQ ID NO: 2293410 - RNA, 19 nt, Artificial Sequence
  Description of Artificial Sequence: Synthetic oligonucleotide
  Sense strand starting at position 2104 of SEQ ID NO: 1884806
gcucgucucuuugaaauuu

SEQ ID NO: 2293411 - RNA, 19 nt, Artificial Sequence
  Description of Artificial Sequence: Synthetic oligonucleotide
  Antisense strand to SEQ ID NO: 2293410
aaauuucaaagagacgagc

SEQ ID NO: 2293412 - RNA, 19 nt, Artificial Sequence
  Description of Artificial Sequence: Synthetic oligonucleotide
  Sense strand starting at position 2216 of SEQ ID NO: 1884806
cuuuauggcccaggcuaua

SEQ ID NO: 2293413 - RNA, 19 nt, Artificial Sequence
  Description of Artificial Sequence: Synthetic oligonucleotide
  Antisense strand to SEQ ID NO: 2293412
uauagccugggccauaaag

SEQ ID NO: 2293414 - RNA, 19 nt, Artificial Sequence
  Description of Artificial Sequence: Synthetic oligonucleotide
  Sense strand starting at position 209 of SEQ ID NO: 1884807
uuaaguauuagccaggugu

SEQ ID NO: 2293415 - RNA, 19 nt, Artificial Sequence
  Description of Artificial Sequence: Synthetic oligonucleotide
  Antisense strand to SEQ ID NO: 2293414
acaccuggcuaauacuuaa

SEQ ID NO: 2293416 - RNA, 19 nt, Artificial Sequence
  Description of Artificial Sequence: Synthetic oligonucleotide
  Sense strand starting at position 570 of SEQ ID NO: 1884807
augggaggcucucuugagu

SEQ ID NO: 2293417 - RNA, 19 nt, Artificial Sequence
  Description of Artificial Sequence: Synthetic oligonucleotide
  Antisense strand to SEQ ID NO: 2293416
acucaagagagccucccau

SEQ ID NO: 2293418 - RNA, 19 nt, Artificial Sequence
  Description of Artificial Sequence: Synthetic oligonucleotide
  Sense strand starting at position 787 of SEQ ID NO: 1884807
ccaauaggaugaguuacua

SEQ ID NO: 2293419 - RNA, 19 nt, Artificial Sequence
  Description of Artificial Sequence: Synthetic oligonucleotide
  Antisense strand to SEQ ID NO: 2293418
uaguaacucauccuauugg

SEQ ID NO: 2293420 - RNA, 19 nt, Artificial Sequence
  Description of Artificial Sequence: Synthetic oligonucleotide
  Sense strand starting at position 791 of SEQ ID NO: 1884807
uaggaugaguuacuaacua

SEQ ID NO: 2293421 - RNA, 19 nt, Artificial Sequence
  Description of Artificial Sequence: Synthetic oligonucleotide
  Antisense strand to SEQ ID NO: 2293420
uaguuaguaacucauccua

SEQ ID NO: 2293422 - RNA, 19 nt, Artificial Sequence
  Description of Artificial Sequence: Synthetic oligonucleotide
  Sense strand starting at position 953 of SEQ ID NO: 1884807
gaacuugucuugcuggaga

SEQ ID NO: 2293423 - RNA, 19 nt, Artificial Sequence
  Description of Artificial Sequence: Synthetic oligonucleotide
  Antisense strand to SEQ ID NO: 2293422
ucuccagcaagacaaguuc

SEQ ID NO: 2293424 - RNA, 19 nt, Artificial Sequence
  Description of Artificial Sequence: Synthetic oligonucleotide
  Sense strand starting at position 955 of SEQ ID NO: 1884807
acuugucuugcuggagaag

SEQ ID NO: 2293425 - RNA, 19 nt, Artificial Sequence
  Description of Artificial Sequence: Synthetic oligonucleotide
  Antisense strand to SEQ ID NO: 2293424
cuucuccagcaagacaagu

SEQ ID NO: 2293426 - RNA, 19 nt, Artificial Sequence
  Description of Artificial Sequence: Synthetic oligonucleotide
  Sense strand starting at position 966 of SEQ ID NO: 1884807
uggagaagcagucaaggua

SEQ ID NO: 2293427 - RNA, 19 nt, Artificial Sequence
  Description of Artificial Sequence: Synthetic oligonucleotide
  Antisense strand to SEQ ID NO: 2293426
uaccuugacugcuucucca

SEQ ID NO: 2293428 - RNA, 19 nt, Artificial Sequence
  Description of Artificial Sequence: Synthetic oligonucleotide
  Sense strand starting at position 1045 of SEQ ID NO: 1884807
ggccuuaaaggcgaugauu

SEQ ID NO: 2293429 - RNA, 19 nt, Artificial Sequence
  Description of Artificial Sequence: Synthetic oligonucleotide
  Antisense strand to SEQ ID NO: 2293428
aaucaucgccuuuaaggcc

SEQ ID NO: 2293430 - RNA, 19 nt, Artificial Sequence
  Description of Artificial Sequence: Synthetic oligonucleotide
  Sense strand starting at position 1047 of SEQ ID NO: 1884807
ccuuaaaggcgaugauuag

SEQ ID NO: 2293431 - RNA, 19 nt, Artificial Sequence
  Description of Artificial Sequence: Synthetic oligonucleotide
  Antisense strand to SEQ ID NO: 2293430
cuaaucaucgccuuuaagg

SEQ ID NO: 2293432 - RNA, 19 nt, Artificial Sequence
  Description of Artificial Sequence: Synthetic oligonucleotide
  Sense strand starting at position 1426 of SEQ ID NO: 1884807
uagcgagagcaucaguaau

SEQ ID NO: 2293433 - RNA, 19 nt, Artificial Sequence
  Description of Artificial Sequence: Synthetic oligonucleotide
  Antisense strand to SEQ ID NO: 2293432
auuacugaugcucucgcua

SEQ ID NO: 2293434 - RNA, 19 nt, Artificial Sequence
  Description of Artificial Sequence: Synthetic oligonucleotide
  Sense strand starting at position 1428 of SEQ ID NO: 1884807
gcgagagcaucaguaauga

SEQ ID NO: 2293435 - RNA, 19 nt, Artificial Sequence
  Description of Artificial Sequence: Synthetic oligonucleotide
  Antisense strand to SEQ ID NO: 2293434
ucauuacugaugcucucgc

SEQ ID NO: 2293436 - RNA, 19 nt, Artificial Sequence
  Description of Artificial Sequence: Synthetic oligonucleotide
  Sense strand starting at position 1488 of SEQ ID NO: 1884807
gggcaaguuccugaaucuu

SEQ ID NO: 2293437 - RNA, 19 nt, Artificial Sequence
  Description of Artificial Sequence: Synthetic oligonucleotide
  Antisense strand to SEQ ID NO: 2293436
aagauucaggaacuugccc

SEQ ID NO: 2293438 - RNA, 19 nt, Artificial Sequence
  Description of Artificial Sequence: Synthetic oligonucleotide
  Sense strand starting at position 1867 of SEQ ID NO: 1884807
cuggccuuuaccugaggau

SEQ ID NO: 2293439 - RNA, 19 nt, Artificial Sequence
  Description of Artificial Sequence: Synthetic oligonucleotide
  Antisense strand to SEQ ID NO: 2293438
auccucagguaaaggccag

SEQ ID NO: 2293440 - RNA, 19 nt, Artificial Sequence
  Description of Artificial Sequence: Synthetic oligonucleotide
  Sense strand starting at position 2009 of SEQ ID NO: 1884807
gcgccugagagugaugaca

SEQ ID NO: 2293441 - RNA, 19 nt, Artificial Sequence
  Description of Artificial Sequence: Synthetic oligonucleotide
  Antisense strand to SEQ ID NO: 2293440
ugucaucacucucaggcgc

SEQ ID NO: 2293442 - RNA, 19 nt, Artificial Sequence
  Description of Artificial Sequence: Synthetic oligonucleotide
  Sense strand starting at position 2128 of SEQ ID NO: 1884807
gcugguucgccgagaaauu

SEQ ID NO: 2293443 - RNA, 19 nt, Artificial Sequence
  Description of Artificial Sequence: Synthetic oligonucleotide
  Antisense strand to SEQ ID NO: 2293442
aauuucucggcgaaccagc

SEQ ID NO: 2293444 - RNA, 19 nt, Artificial Sequence
  Description of Artificial Sequence: Synthetic oligonucleotide
  Sense strand starting at position 2129 of SEQ ID NO: 1884807
cugguucgccgagaaauuu

SEQ ID NO: 2293445 - RNA, 19 nt, Artificial Sequence
  Description of Artificial Sequence: Synthetic oligonucleotide
  Antisense strand to SEQ ID NO: 2293444
aaauuucucggcgaaccag

SEQ ID NO: 2293446 - RNA, 19 nt, Artificial Sequence
  Description of Artificial Sequence: Synthetic oligonucleotide
  Sense strand starting at position 2264 of SEQ ID NO: 1884807
ccaccacacucaucguauu

SEQ ID NO: 2293447 - RNA, 19 nt, Artificial Sequence
  Description of Artificial Sequence: Synthetic oligonucleotide
  Antisense strand to SEQ ID NO: 2293446
aauacgaugaguguggugg

SEQ ID NO: 2293448 - RNA, 19 nt, Artificial Sequence
  Description of Artificial Sequence: Synthetic oligonucleotide
  Sense strand starting at position 2382 of SEQ ID NO: 1884807
ugucucuccgaaugacaaa

SEQ ID NO: 2293449 - RNA, 19 nt, Artificial Sequence
  Description of Artificial Sequence: Synthetic oligonucleotide
  Antisense strand to SEQ ID NO: 2293448
uuugucauucggagagaca

SEQ ID NO: 2293450 - RNA, 19 nt, Artificial Sequence
  Description of Artificial Sequence: Synthetic oligonucleotide
  Sense strand starting at position 2475 of SEQ ID NO: 1884807
ugggcauaguuacucauau

SEQ ID NO: 2293451 - RNA, 19 nt, Artificial Sequence
  Description of Artificial Sequence: Synthetic oligonucleotide
  Antisense strand to SEQ ID NO: 2293450
auaugaguaacuaugccca

SEQ ID NO: 2293452 - RNA, 19 nt, Artificial Sequence
  Description of Artificial Sequence: Synthetic oligonucleotide
  Sense strand starting at position 2476 of SEQ ID NO: 1884807
gggcauaguuacucauauu

SEQ ID NO: 2293453 - RNA, 19 nt, Artificial Sequence
  Description of Artificial Sequence: Synthetic oligonucleotide
  Antisense strand to SEQ ID NO: 2293452
aauaugaguaacuaugccc

SEQ ID NO: 2293454 - RNA, 19 nt, Artificial Sequence
  Description of Artificial Sequence: Synthetic oligonucleotide
  Sense strand starting at position 2525 of SEQ ID NO: 1884807
ggaagugauuaauccgagu

SEQ ID NO: 2293455 - RNA, 19 nt, Artificial Sequence
  Description of Artificial Sequence: Synthetic oligonucleotide
  Antisense strand to SEQ ID NO: 2293454
acucggauuaaucacuucc

SEQ ID NO: 2293456 - RNA, 19 nt, Artificial Sequence
  Description of Artificial Sequence: Synthetic oligonucleotide
  Sense strand starting at position 2606 of SEQ ID NO: 1884807
gggucugggcgggauuaua

SEQ ID NO: 2293457 - RNA, 19 nt, Artificial Sequence
  Description of Artificial Sequence: Synthetic oligonucleotide
  Antisense strand to SEQ ID NO: 2293456
uauaaucccgcccagaccc

SEQ ID NO: 2293458 - RNA, 19 nt, Artificial Sequence
  Description of Artificial Sequence: Synthetic oligonucleotide
  Sense strand starting at position 2748 of SEQ ID NO: 1884807
guggaacugcuuugaauug

SEQ ID NO: 2293459 - RNA, 19 nt, Artificial Sequence
  Description of Artificial Sequence: Synthetic oligonucleotide
  Antisense strand to SEQ ID NO: 2293458
caauucaaagcaguuccac

SEQ ID NO: 2293460 - RNA, 19 nt, Artificial Sequence
  Description of Artificial Sequence: Synthetic oligonucleotide
  Sense strand starting at position 2755 of SEQ ID NO: 1884807
ugcuuugaauuguuaagaa

SEQ ID NO: 2293461 - RNA, 19 nt, Artificial Sequence
  Description of Artificial Sequence: Synthetic oligonucleotide
  Antisense strand to SEQ ID NO: 2293460
uucuuaacaauucaaagca

SEQ ID NO: 2293462 - RNA, 19 nt, Artificial Sequence
  Description of Artificial Sequence: Synthetic oligonucleotide
  Sense strand starting at position 3348 of SEQ ID NO: 1884807
aaguaugugguuugaauca

SEQ ID NO: 2293463 - RNA, 19 nt, Artificial Sequence
  Description of Artificial Sequence: Synthetic oligonucleotide
  Antisense strand to SEQ ID NO: 2293462
ugauucaaaccacauacuu

SEQ ID NO: 2293464 - RNA, 19 nt, Artificial Sequence
  Description of Artificial Sequence: Synthetic oligonucleotide
  Sense strand starting at position 3353 of SEQ ID NO: 1884807
ugugguuugaaucaugguu

SEQ ID NO: 2293465 - RNA, 19 nt, Artificial Sequence
  Description of Artificial Sequence: Synthetic oligonucleotide
  Antisense strand to SEQ ID NO: 2293464
aaccaugauucaaaccaca

SEQ ID NO: 2293466 - RNA, 19 nt, Artificial Sequence
  Description of Artificial Sequence: Synthetic oligonucleotide
  Sense strand starting at position 3358 of SEQ ID NO: 1884807
uuugaaucaugguuauaag

SEQ ID NO: 2293467 - RNA, 19 nt, Artificial Sequence
  Description of Artificial Sequence: Synthetic oligonucleotide
  Antisense strand to SEQ ID NO: 2293466
cuuauaaccaugauucaaa

SEQ ID NO: 2293468 - RNA, 19 nt, Artificial Sequence
  Description of Artificial Sequence: Synthetic oligonucleotide
  Sense strand starting at position 3359 of SEQ ID NO: 1884807
uugaaucaugguuauaagu

SEQ ID NO: 2293469 - RNA, 19 nt, Artificial Sequence
  Description of Artificial Sequence: Synthetic oligonucleotide
  Antisense strand to SEQ ID NO: 2293468
acuuauaaccaugauucaa

SEQ ID NO: 2293470 - RNA, 19 nt, Artificial Sequence
  Description of Artificial Sequence: Synthetic oligonucleotide
  Sense strand starting at position 3445 of SEQ ID NO: 1884807
ucauguaggucuuuauaau

SEQ ID NO: 2293471 - RNA, 19 nt, Artificial Sequence
  Description of Artificial Sequence: Synthetic oligonucleotide
  Antisense strand to SEQ ID NO: 2293470
auuauaaagaccuacauga

SEQ ID NO: 2293472 - RNA, 19 nt, Artificial Sequence
  Description of Artificial Sequence: Synthetic oligonucleotide
  Sense strand starting at position 3446 of SEQ ID NO: 1884807
cauguaggucuuuauaaug

SEQ ID NO: 2293473 - RNA, 19 nt, Artificial Sequence
  Description of Artificial Sequence: Synthetic oligonucleotide
  Antisense strand to SEQ ID NO: 2293472
cauuauaaagaccuacaug

SEQ ID NO: 2293474 - RNA, 19 nt, Artificial Sequence
  Description of Artificial Sequence: Synthetic oligonucleotide
  Sense strand starting at position 3568 of SEQ ID NO: 1884807
ccuugacagucaccuugaa

SEQ ID NO: 2293475 - RNA, 19 nt, Artificial Sequence
  Description of Artificial Sequence: Synthetic oligonucleotide
  Antisense strand to SEQ ID NO: 2293474
uucaaggugacugucaagg

SEQ ID NO: 2293476 - RNA, 19 nt, Artificial Sequence
  Description of Artificial Sequence: Synthetic oligonucleotide
  Sense strand starting at position 3626 of SEQ ID NO: 1884807
gucaacuaacucugugaac

SEQ ID NO: 2293477 - RNA, 19 nt, Artificial Sequence
  Description of Artificial Sequence: Synthetic oligonucleotide
  Antisense strand to SEQ ID NO: 2293476
guucacagaguuaguugac

SEQ ID NO: 2293478 - RNA, 19 nt, Artificial Sequence
  Description of Artificial Sequence: Synthetic oligonucleotide
  Sense strand starting at position 3653 of SEQ ID NO: 1884807
cagauuugaugaggaacuu

SEQ ID NO: 2293479 - RNA, 19 nt, Artificial Sequence
  Description of Artificial Sequence: Synthetic oligonucleotide
  Antisense strand to SEQ ID NO: 2293478
aaguuccucaucaaaucug

SEQ ID NO: 2293480 - RNA, 19 nt, Artificial Sequence
  Description of Artificial Sequence: Synthetic oligonucleotide
  Sense strand starting at position 3799 of SEQ ID NO: 1884807
uugagauuaugguugcaau

SEQ ID NO: 2293481 - RNA, 19 nt, Artificial Sequence
  Description of Artificial Sequence: Synthetic oligonucleotide
  Antisense strand to SEQ ID NO: 2293480
auugcaaccauaaucucaa

SEQ ID NO: 2293482 - RNA, 19 nt, Artificial Sequence
  Description of Artificial Sequence: Synthetic oligonucleotide
  Sense strand starting at position 3800 of SEQ ID NO: 1884807
ugagauuaugguugcaaua

SEQ ID NO: 2293483 - RNA, 19 nt, Artificial Sequence
  Description of Artificial Sequence: Synthetic oligonucleotide
  Antisense strand to SEQ ID NO: 2293482
uauugcaaccauaaucuca

SEQ ID NO: 2293484 - RNA, 19 nt, Artificial Sequence
  Description of Artificial Sequence: Synthetic oligonucleotide
  Sense strand starting at position 3815 of SEQ ID NO: 1884807
aauacuuggcguggaauca

SEQ ID NO: 2293485 - RNA, 19 nt, Artificial Sequence
  Description of Artificial Sequence: Synthetic oligonucleotide
  Antisense strand to SEQ ID NO: 2293484
ugauuccacgccaaguauu

SEQ ID NO: 2293486 - RNA, 19 nt, Artificial Sequence
  Description of Artificial Sequence: Synthetic oligonucleotide
  Sense strand starting at position 3851 of SEQ ID NO: 1884807
cuuguaugcaaacgaugau

SEQ ID NO: 2293487 - RNA, 19 nt, Artificial Sequence
  Description of Artificial Sequence: Synthetic oligonucleotide
  Antisense strand to SEQ ID NO: 2293486
aucaucguuugcauacaag

SEQ ID NO: 2293488 - RNA, 19 nt, Artificial Sequence
  Description of Artificial Sequence: Synthetic oligonucleotide
  Sense strand starting at position 3852 of SEQ ID NO: 1884807
uuguaugcaaacgaugaua

SEQ ID NO: 2293489 - RNA, 19 nt, Artificial Sequence
  Description of Artificial Sequence: Synthetic oligonucleotide
  Antisense strand to SEQ ID NO: 2293488
uaucaucguuugcauacaa

SEQ ID NO: 2293490 - RNA, 19 nt, Artificial Sequence
  Description of Artificial Sequence: Synthetic oligonucleotide
  Sense strand starting at position 3854 of SEQ ID NO: 1884807
guaugcaaacgaugauaaa

SEQ ID NO: 2293491 - RNA, 19 nt, Artificial Sequence
  Description of Artificial Sequence: Synthetic oligonucleotide
  Antisense strand to SEQ ID NO: 2293490
uuuaucaucguuugcauac

SEQ ID NO: 2293492 - RNA, 19 nt, Artificial Sequence
  Description of Artificial Sequence: Synthetic oligonucleotide
  Sense strand starting at position 3942 of SEQ ID NO: 1884807
gucacuauuuaugaaagca

SEQ ID NO: 2293493 - RNA, 19 nt, Artificial Sequence
  Description of Artificial Sequence: Synthetic oligonucleotide
  Antisense strand to SEQ ID NO: 2293492
ugcuuucauaaauagugac

SEQ ID NO: 2293494 - RNA, 19 nt, Artificial Sequence
  Description of Artificial Sequence: Synthetic oligonucleotide
  Sense strand starting at position 50 of SEQ ID NO: 1884808
uuuaaauaagcugagugau

SEQ ID NO: 2293495 - RNA, 19 nt, Artificial Sequence
  Description of Artificial Sequence: Synthetic oligonucleotide
  Antisense strand to SEQ ID NO: 2293494
aucacucagcuuauuuaaa

SEQ ID NO: 2293496 - RNA, 19 nt, Artificial Sequence
  Description of Artificial Sequence: Synthetic oligonucleotide
  Sense strand starting at position 60 of SEQ ID NO: 1884808
cugagugauguccaaaucu

SEQ ID NO: 2293497 - RNA, 19 nt, Artificial Sequence
  Description of Artificial Sequence: Synthetic oligonucleotide
  Antisense strand to SEQ ID NO: 2293496
agauuuggacaucacucag

SEQ ID NO: 2293498 - RNA, 19 nt, Artificial Sequence
  Description of Artificial Sequence: Synthetic oligonucleotide
  Sense strand starting at position 214 of SEQ ID NO: 1884808
gugggacuuuaaccuauau

SEQ ID NO: 2293499 - RNA, 19 nt, Artificial Sequence
  Description of Artificial Sequence: Synthetic oligonucleotide
  Antisense strand to SEQ ID NO: 2293498
auauagguuaaagucccac

SEQ ID NO: 2293500 - RNA, 19 nt, Artificial Sequence
  Description of Artificial Sequence: Synthetic oligonucleotide
  Sense strand starting at position 283 of SEQ ID NO: 1884808
gguauacagguauauuauu

SEQ ID NO: 2293501 - RNA, 19 nt, Artificial Sequence
  Description of Artificial Sequence: Synthetic oligonucleotide
  Antisense strand to SEQ ID NO: 2293500
aauaauauaccuguauacc

SEQ ID NO: 2293502 - RNA, 19 nt, Artificial Sequence
  Description of Artificial Sequence: Synthetic oligonucleotide
  Sense strand starting at position 560 of SEQ ID NO: 1884808
agcauaguucuauaagaca

SEQ ID NO: 2293503 - RNA, 19 nt, Artificial Sequence
  Description of Artificial Sequence: Synthetic oligonucleotide
  Antisense strand to SEQ ID NO: 2293502
ugucuuauagaacuaugcu

SEQ ID NO: 2293504 - RNA, 19 nt, Artificial Sequence
  Description of Artificial Sequence: Synthetic oligonucleotide
  Sense strand starting at position 733 of SEQ ID NO: 1884808
uguccaaaucagugaggau

SEQ ID NO: 2293505 - RNA, 19 nt, Artificial Sequence
  Description of Artificial Sequence: Synthetic oligonucleotide
  Antisense strand to SEQ ID NO: 2293504
auccucacugauuuggaca

SEQ ID NO: 2293506 - RNA, 19 nt, Artificial Sequence
  Description of Artificial Sequence: Synthetic oligonucleotide
  Sense strand starting at position 788 of SEQ ID NO: 1884808
ggcacuacccuuuagcaua

SEQ ID NO: 2293507 - RNA, 19 nt, Artificial Sequence
  Description of Artificial Sequence: Synthetic oligonucleotide
  Antisense strand to SEQ ID NO: 2293506
uaugcuaaaggguagugcc

SEQ ID NO: 2293508 - RNA, 19 nt, Artificial Sequence
  Description of Artificial Sequence: Synthetic oligonucleotide
  Sense strand starting at position 904 of SEQ ID NO: 1884808
aagacaugucuaggaaagu

SEQ ID NO: 2293509 - RNA, 19 nt, Artificial Sequence
  Description of Artificial Sequence: Synthetic oligonucleotide
  Antisense strand to SEQ ID NO: 2293508
acuuuccuagacaugucuu

SEQ ID NO: 2293510 - RNA, 19 nt, Artificial Sequence
  Description of Artificial Sequence: Synthetic oligonucleotide
  Sense strand starting at position 953 of SEQ ID NO: 1884808
gcuucuaauucccuaagag

SEQ ID NO: 2293511 - RNA, 19 nt, Artificial Sequence
  Description of Artificial Sequence: Synthetic oligonucleotide
  Antisense strand to SEQ ID NO: 2293510
cucuuagggaauuagaagc

SEQ ID NO: 2293512 - RNA, 19 nt, Artificial Sequence
  Description of Artificial Sequence: Synthetic oligonucleotide
  Sense strand starting at position 1038 of SEQ ID NO: 1884808
gggaauaguugaguuguua

SEQ ID NO: 2293513 - RNA, 19 nt, Artificial Sequence
  Description of Artificial Sequence: Synthetic oligonucleotide
  Antisense strand to SEQ ID NO: 2293512
uaacaacucaacuauuccc

SEQ ID NO: 2293514 - RNA, 19 nt, Artificial Sequence
  Description of Artificial Sequence: Synthetic oligonucleotide
  Sense strand starting at position 1085 of SEQ ID NO: 1884808
aagcaagaaccgcauugua

SEQ ID NO: 2293515 - RNA, 19 nt, Artificial Sequence
  Description of Artificial Sequence: Synthetic oligonucleotide
  Antisense strand to SEQ ID NO: 2293514
uacaaugcgguucuugcuu

SEQ ID NO: 2293516 - RNA, 19 nt, Artificial Sequence
  Description of Artificial Sequence: Synthetic oligonucleotide
  Sense strand starting at position 1143 of SEQ ID NO: 1884808
cugagacacuuccuuagga

SEQ ID NO: 2293517 - RNA, 19 nt, Artificial Sequence
  Description of Artificial Sequence: Synthetic oligonucleotide
  Antisense strand to SEQ ID NO: 2293516
uccuaaggaagugucucag

SEQ ID NO: 2293518 - RNA, 19 nt, Artificial Sequence
  Description of Artificial Sequence: Synthetic oligonucleotide
  Sense strand starting at position 1228 of SEQ ID NO: 1884808
augugacaucgaugaugga

SEQ ID NO: 2293519 - RNA, 19 nt, Artificial Sequence
  Description of Artificial Sequence: Synthetic oligonucleotide
  Antisense strand to SEQ ID NO: 2293518
uccaucaucgaugucacau

SEQ ID NO: 2293520 - RNA, 19 nt, Artificial Sequence
  Description of Artificial Sequence: Synthetic oligonucleotide
  Sense strand starting at position 1344 of SEQ ID NO: 1884808
aggaaccugucuuuguuaa

SEQ ID NO: 2293521 - RNA, 19 nt, Artificial Sequence
  Description of Artificial Sequence: Synthetic oligonucleotide
  Antisense strand to SEQ ID NO: 2293520
uuaacaaagacagguuccu

SEQ ID NO: 2293522 - RNA, 19 nt, Artificial Sequence
  Description of Artificial Sequence: Synthetic oligonucleotide
  Sense strand starting at position 2180 of SEQ ID NO: 1884808
agugaagaaagcugguaau

SEQ ID NO: 2293523 - RNA, 19 nt, Artificial Sequence
  Description of Artificial Sequence: Synthetic oligonucleotide
  Antisense strand to SEQ ID NO: 2293522
auuaccagcuuucuucacu

SEQ ID NO: 2293524 - RNA, 19 nt, Artificial Sequence
  Description of Artificial Sequence: Synthetic oligonucleotide
  Sense strand starting at position 2193 of SEQ ID NO: 1884808
gguaauagaugucugacaa

SEQ ID NO: 2293525 - RNA, 19 nt, Artificial Sequence
  Description of Artificial Sequence: Synthetic oligonucleotide
  Antisense strand to SEQ ID NO: 2293524
uugucagacaucuauuacc

SEQ ID NO: 2293526 - RNA, 19 nt, Artificial Sequence
  Description of Artificial Sequence: Synthetic oligonucleotide
  Sense strand starting at position 2194 of SEQ ID NO: 1884808
guaauagaugucugacaaa

SEQ ID NO: 2293527 - RNA, 19 nt, Artificial Sequence
  Description of Artificial Sequence: Synthetic oligonucleotide
  Antisense strand to SEQ ID NO: 2293526
uuugucagacaucuauuac

SEQ ID NO: 2293528 - RNA, 19 nt, Artificial Sequence
  Description of Artificial Sequence: Synthetic oligonucleotide
  Sense strand starting at position 2264 of SEQ ID NO: 1884808
agugaaauguuaucccgaa

SEQ ID NO: 2293529 - RNA, 19 nt, Artificial Sequence
  Description of Artificial Sequence: Synthetic oligonucleotide
  Antisense strand to SEQ ID NO: 2293528
uucgggauaacauuucacu

SEQ ID NO: 2293530 - RNA, 19 nt, Artificial Sequence
  Description of Artificial Sequence: Synthetic oligonucleotide
  Sense strand starting at position 2268 of SEQ ID NO: 1884808
aaauguuaucccgaauuga

SEQ ID NO: 2293531 - RNA, 19 nt, Artificial Sequence
  Description of Artificial Sequence: Synthetic oligonucleotide
  Antisense strand to SEQ ID NO: 2293530
ucaauucgggauaacauuu

SEQ ID NO: 2293532 - RNA, 19 nt, Artificial Sequence
  Description of Artificial Sequence: Synthetic oligonucleotide
  Sense strand starting at position 2282 of SEQ ID NO: 1884808
auugauuucugacacugaa

SEQ ID NO: 2293533 - RNA, 19 nt, Artificial Sequence
  Description of Artificial Sequence: Synthetic oligonucleotide
  Antisense strand to SEQ ID NO: 2293532
uucagugucagaaaucaau

SEQ ID NO: 2293534 - RNA, 19 nt, Artificial Sequence
  Description of Artificial Sequence: Synthetic oligonucleotide
  Sense strand starting at position 2313 of SEQ ID NO: 1884808
auuaaugagucaucaguuu

SEQ ID NO: 2293535 - RNA, 19 nt, Artificial Sequence
  Description of Artificial Sequence: Synthetic oligonucleotide
  Antisense strand to SEQ ID NO: 2293534
aaacugaugacucauuaau

SEQ ID NO: 2293536 - RNA, 19 nt, Artificial Sequence
  Description of Artificial Sequence: Synthetic oligonucleotide
  Sense strand starting at position 2353 of SEQ ID NO: 1884808
gaguaacaggucugaggaa

SEQ ID NO: 2293537 - RNA, 19 nt, Artificial Sequence
  Description of Artificial Sequence: Synthetic oligonucleotide
  Antisense strand to SEQ ID NO: 2293536
uuccucagaccuguuacuc

SEQ ID NO: 2293538 - RNA, 19 nt, Artificial Sequence
  Description of Artificial Sequence: Synthetic oligonucleotide
  Sense strand starting at position 2446 of SEQ ID NO: 1884808
accuguugaguuggaaauu

SEQ ID NO: 2293539 - RNA, 19 nt, Artificial Sequence
  Description of Artificial Sequence: Synthetic oligonucleotide
  Antisense strand to SEQ ID NO: 2293538
aauuuccaacucaacaggu

SEQ ID NO: 2293540 - RNA, 19 nt, Artificial Sequence
  Description of Artificial Sequence: Synthetic oligonucleotide
  Sense strand starting at position 2510 of SEQ ID NO: 1884808
acagaaauauugcuaguuc

SEQ ID NO: 2293541 - RNA, 19 nt, Artificial Sequence
  Description of Artificial Sequence: Synthetic oligonucleotide
  Antisense strand to SEQ ID NO: 2293540
gaacuagcaauauuucugu

SEQ ID NO: 2293542 - RNA, 19 nt, Artificial Sequence
  Description of Artificial Sequence: Synthetic oligonucleotide
  Sense strand starting at position 2550 of SEQ ID NO: 1884808
aggccaacuuaauugauga

SEQ ID NO: 2293543 - RNA, 19 nt, Artificial Sequence
  Description of Artificial Sequence: Synthetic oligonucleotide
  Antisense strand to SEQ ID NO: 2293542
ucaucaauuaaguuggccu

SEQ ID NO: 2293544 - RNA, 19 nt, Artificial Sequence
  Description of Artificial Sequence: Synthetic oligonucleotide
  Sense strand starting at position 2873 of SEQ ID NO: 1884808
acuugcuuugaagacuuua

SEQ ID NO: 2293545 - RNA, 19 nt, Artificial Sequence
  Description of Artificial Sequence: Synthetic oligonucleotide
  Antisense strand to SEQ ID NO: 2293544
uaaagucuucaaagcaagu

SEQ ID NO: 2293546 - RNA, 19 nt, Artificial Sequence
  Description of Artificial Sequence: Synthetic oligonucleotide
  Sense strand starting at position 2888 of SEQ ID NO: 1884808
uuuaaauucuaagcaugga

SEQ ID NO: 2293547 - RNA, 19 nt, Artificial Sequence
  Description of Artificial Sequence: Synthetic oligonucleotide
  Antisense strand to SEQ ID NO: 2293546
uccaugcuuagaauuuaaa

SEQ ID NO: 2293548 - RNA, 19 nt, Artificial Sequence
  Description of Artificial Sequence: Synthetic oligonucleotide
  Sense strand starting at position 2957 of SEQ ID NO: 1884808
gcuuaauagcauuaagcag

SEQ ID NO: 2293549 - RNA, 19 nt, Artificial Sequence
  Description of Artificial Sequence: Synthetic oligonucleotide
  Antisense strand to SEQ ID NO: 2293548
cugcuuaaugcuauuaagc

SEQ ID NO: 2293550 - RNA, 19 nt, Artificial Sequence
  Description of Artificial Sequence: Synthetic oligonucleotide
  Sense strand starting at position 3140 of SEQ ID NO: 1884808
cuacuaugacugcauagua

SEQ ID NO: 2293551 - RNA, 19 nt, Artificial Sequence
  Description of Artificial Sequence: Synthetic oligonucleotide
  Antisense strand to SEQ ID NO: 2293550
uacuaugcagucauaguag

SEQ ID NO: 2293552 - RNA, 19 nt, Artificial Sequence
  Description of Artificial Sequence: Synthetic oligonucleotide
  Sense strand starting at position 3226 of SEQ ID NO: 1884808
uuuagugaauuagcaauca

SEQ ID NO: 2293553 - RNA, 19 nt, Artificial Sequence
  Description of Artificial Sequence: Synthetic oligonucleotide
  Antisense strand to SEQ ID NO: 2293552
ugauugcuaauucacuaaa

SEQ ID NO: 2293554 - RNA, 19 nt, Artificial Sequence
  Description of Artificial Sequence: Synthetic oligonucleotide
  Sense strand starting at position 3311 of SEQ ID NO: 1884808
agggaagccuuucuggaaa

SEQ ID NO: 2293555 - RNA, 19 nt, Artificial Sequence
  Description of Artificial Sequence: Synthetic oligonucleotide
  Antisense strand to SEQ ID NO: 2293554
uuuccagaaaggcuucccu

SEQ ID NO: 2293556 - RNA, 19 nt, Artificial Sequence
  Description of Artificial Sequence: Synthetic oligonucleotide
  Sense strand starting at position 3389 of SEQ ID NO: 1884808
auguaaugugccuaaggag

SEQ ID NO: 2293557 - RNA, 19 nt, Artificial Sequence
  Description of Artificial Sequence: Synthetic oligonucleotide
  Antisense strand to SEQ ID NO: 2293556
cuccuuaggcacauuacau

SEQ ID NO: 2293558 - RNA, 19 nt, Artificial Sequence
  Description of Artificial Sequence: Synthetic oligonucleotide
  Sense strand starting at position 3413 of SEQ ID NO: 1884808
gauccuaaacgcuagaagu

SEQ ID NO: 2293559 - RNA, 19 nt, Artificial Sequence
  Description of Artificial Sequence: Synthetic oligonucleotide
  Antisense strand to SEQ ID NO: 2293558
acuucuagcguuuaggauc

SEQ ID NO: 2293560 - RNA, 19 nt, Artificial Sequence
  Description of Artificial Sequence: Synthetic oligonucleotide
  Sense strand starting at position 3415 of SEQ ID NO: 1884808
uccuaaacgcuagaaguau

SEQ ID NO: 2293561 - RNA, 19 nt, Artificial Sequence
  Description of Artificial Sequence: Synthetic oligonucleotide
  Antisense strand to SEQ ID NO: 2293560
auacuucuagcguuuagga

SEQ ID NO: 2293562 - RNA, 19 nt, Artificial Sequence
  Description of Artificial Sequence: Synthetic oligonucleotide
  Sense strand starting at position 3435 of SEQ ID NO: 1884808
uuaguauggcuagaaccua

SEQ ID NO: 2293563 - RNA, 19 nt, Artificial Sequence
  Description of Artificial Sequence: Synthetic oligonucleotide
  Antisense strand to SEQ ID NO: 2293562
uagguucuagccauacuaa

SEQ ID NO: 2293564 - RNA, 19 nt, Artificial Sequence
  Description of Artificial Sequence: Synthetic oligonucleotide
  Sense strand starting at position 3467 of SEQ ID NO: 1884808
guggcaagugcugaaagau

SEQ ID NO: 2293565 - RNA, 19 nt, Artificial Sequence
  Description of Artificial Sequence: Synthetic oligonucleotide
  Antisense strand to SEQ ID NO: 2293564
aucuuucagcacuugccac

SEQ ID NO: 2293566 - RNA, 19 nt, Artificial Sequence
  Description of Artificial Sequence: Synthetic oligonucleotide
  Sense strand starting at position 3610 of SEQ ID NO: 1884808
uagguauacucuccggaac

SEQ ID NO: 2293567 - RNA, 19 nt, Artificial Sequence
  Description of Artificial Sequence: Synthetic oligonucleotide
  Antisense strand to SEQ ID NO: 2293566
guuccggagaguauaccua

SEQ ID NO: 2293568 - RNA, 19 nt, Artificial Sequence
  Description of Artificial Sequence: Synthetic oligonucleotide
  Sense strand starting at position 3611 of SEQ ID NO: 1884808
agguauacucuccggaaca

SEQ ID NO: 2293569 - RNA, 19 nt, Artificial Sequence
  Description of Artificial Sequence: Synthetic oligonucleotide
  Antisense strand to SEQ ID NO: 2293568
uguuccggagaguauaccu

SEQ ID NO: 2293570 - RNA, 19 nt, Artificial Sequence
  Description of Artificial Sequence: Synthetic oligonucleotide
  Sense strand starting at position 3613 of SEQ ID NO: 1884808
guauacucuccggaacauc

SEQ ID NO: 2293571 - RNA, 19 nt, Artificial Sequence
  Description of Artificial Sequence: Synthetic oligonucleotide
  Antisense strand to SEQ ID NO: 2293570
gauguuccggagaguauac

SEQ ID NO: 2293572 - RNA, 19 nt, Artificial Sequence
  Description of Artificial Sequence: Synthetic oligonucleotide
  Sense strand starting at position 3844 of SEQ ID NO: 1884808
acaauacagaguggugaau

SEQ ID NO: 2293573 - RNA, 19 nt, Artificial Sequence
  Description of Artificial Sequence: Synthetic oligonucleotide
  Antisense strand to SEQ ID NO: 2293572
auucaccacucuguauugu

SEQ ID NO: 2293574 - RNA, 19 nt, Artificial Sequence
  Description of Artificial Sequence: Synthetic oligonucleotide
  Sense strand starting at position 221 of SEQ ID NO: 1884809
cuaauuggagcuuaacauu

SEQ ID NO: 2293575 - RNA, 19 nt, Artificial Sequence
  Description of Artificial Sequence: Synthetic oligonucleotide
  Antisense strand to SEQ ID NO: 2293574
aauguuaagcuccaauuag

SEQ ID NO: 2293576 - RNA, 19 nt, Artificial Sequence
  Description of Artificial Sequence: Synthetic oligonucleotide
  Sense strand starting at position 456 of SEQ ID NO: 1884809
ugucaugucccuuaacaug

SEQ ID NO: 2293577 - RNA, 19 nt, Artificial Sequence
  Description of Artificial Sequence: Synthetic oligonucleotide
  Antisense strand to SEQ ID NO: 2293576
cauguuaagggacaugaca

SEQ ID NO: 2293578 - RNA, 19 nt, Artificial Sequence
  Description of Artificial Sequence: Synthetic oligonucleotide
  Sense strand starting at position 491 of SEQ ID NO: 1884809
ugagucauugccuaauuaa

SEQ ID NO: 2293579 - RNA, 19 nt, Artificial Sequence
  Description of Artificial Sequence: Synthetic oligonucleotide
  Antisense strand to SEQ ID NO: 2293578
uuaauuaggcaaugacuca

SEQ ID NO: 2293580 - RNA, 19 nt, Artificial Sequence
  Description of Artificial Sequence: Synthetic oligonucleotide
  Sense strand starting at position 579 of SEQ ID NO: 1884809
uuugaaugccauugauuag

SEQ ID NO: 2293581 - RNA, 19 nt, Artificial Sequence
  Description of Artificial Sequence: Synthetic oligonucleotide
  Antisense strand to SEQ ID NO: 2293580
cuaaucaauggcauucaaa

SEQ ID NO: 2293582 - RNA, 19 nt, Artificial Sequence
  Description of Artificial Sequence: Synthetic oligonucleotide
  Sense strand starting at position 582 of SEQ ID NO: 1884809
gaaugccauugauuaggaa

SEQ ID NO: 2293583 - RNA, 19 nt, Artificial Sequence
  Description of Artificial Sequence: Synthetic oligonucleotide
  Antisense strand to SEQ ID NO: 2293582
uuccuaaucaauggcauuc

SEQ ID NO: 2293584 - RNA, 19 nt, Artificial Sequence
  Description of Artificial Sequence: Synthetic oligonucleotide
  Sense strand starting at position 621 of SEQ ID NO: 1884809
uuaccuucccaaugagaag

SEQ ID NO: 2293585 - RNA, 19 nt, Artificial Sequence
  Description of Artificial Sequence: Synthetic oligonucleotide
  Antisense strand to SEQ ID NO: 2293584
cuucucauugggaagguaa

SEQ ID NO: 2293586 - RNA, 19 nt, Artificial Sequence
  Description of Artificial Sequence: Synthetic oligonucleotide
  Sense strand starting at position 638 of SEQ ID NO: 1884809
agggauuaacuuugcaaac

SEQ ID NO: 2293587 - RNA, 19 nt, Artificial Sequence
  Description of Artificial Sequence: Synthetic oligonucleotide
  Antisense strand to SEQ ID NO: 2293586
guuugcaaaguuaaucccu

SEQ ID NO: 2293588 - RNA, 19 nt, Artificial Sequence
  Description of Artificial Sequence: Synthetic oligonucleotide
  Sense strand starting at position 639 of SEQ ID NO: 1884809
gggauuaacuuugcaaaca

SEQ ID NO: 2293589 - RNA, 19 nt, Artificial Sequence
  Description of Artificial Sequence: Synthetic oligonucleotide
  Antisense strand to SEQ ID NO: 2293588
uguuugcaaaguuaauccc

SEQ ID NO: 2293590 - RNA, 19 nt, Artificial Sequence
  Description of Artificial Sequence: Synthetic oligonucleotide
  Sense strand starting at position 718 of SEQ ID NO: 1884809
uucugaauucuggguauug

SEQ ID NO: 2293591 - RNA, 19 nt, Artificial Sequence
  Description of Artificial Sequence: Synthetic oligonucleotide
  Antisense strand to SEQ ID NO: 2293590
caauacccagaauucagaa

SEQ ID NO: 2293592 - RNA, 19 nt, Artificial Sequence
  Description of Artificial Sequence: Synthetic oligonucleotide
  Sense strand starting at position 720 of SEQ ID NO: 1884809
cugaauucuggguauugcu

SEQ ID NO: 2293593 - RNA, 19 nt, Artificial Sequence
  Description of Artificial Sequence: Synthetic oligonucleotide
  Antisense strand to SEQ ID NO: 2293592
agcaauacccagaauucag

SEQ ID NO: 2293594 - RNA, 19 nt, Artificial Sequence
  Description of Artificial Sequence: Synthetic oligonucleotide
  Sense strand starting at position 728 of SEQ ID NO: 1884809
uggguauugcuugaaucug

SEQ ID NO: 2293595 - RNA, 19 nt, Artificial Sequence
  Description of Artificial Sequence: Synthetic oligonucleotide
  Antisense strand to SEQ ID NO: 2293594
cagauucaagcaauaccca

SEQ ID NO: 2293596 - RNA, 19 nt, Artificial Sequence
  Description of Artificial Sequence: Synthetic oligonucleotide
  Sense strand starting at position 777 of SEQ ID NO: 1884809
ggaagcuagccugagauua

SEQ ID NO: 2293597 - RNA, 19 nt, Artificial Sequence
  Description of Artificial Sequence: Synthetic oligonucleotide
  Antisense strand to SEQ ID NO: 2293596
uaaucucaggcuagcuucc

SEQ ID NO: 2293598 - RNA, 19 nt, Artificial Sequence
  Description of Artificial Sequence: Synthetic oligonucleotide
  Sense strand starting at position 1185 of SEQ ID NO: 1884809
ugagucuccgagugaauuu

SEQ ID NO: 2293599 - RNA, 19 nt, Artificial Sequence
  Description of Artificial Sequence: Synthetic oligonucleotide
  Antisense strand to SEQ ID NO: 2293598
aaauucacucggagacuca

SEQ ID NO: 2293600 - RNA, 19 nt, Artificial Sequence
  Description of Artificial Sequence: Synthetic oligonucleotide
  Sense strand starting at position 1228 of SEQ ID NO: 1884809
agguuaaagucuucagagg

SEQ ID NO: 2293601 - RNA, 19 nt, Artificial Sequence
  Description of Artificial Sequence: Synthetic oligonucleotide
  Antisense strand to SEQ ID NO: 2293600
ccucugaagacuuuaaccu

SEQ ID NO: 2293602 - RNA, 19 nt, Artificial Sequence
  Description of Artificial Sequence: Synthetic oligonucleotide
  Sense strand starting at position 1229 of SEQ ID NO: 1884809
gguuaaagucuucagaggu

SEQ ID NO: 2293603 - RNA, 19 nt, Artificial Sequence
  Description of Artificial Sequence: Synthetic oligonucleotide
  Antisense strand to SEQ ID NO: 2293602
accucugaagacuuuaacc

SEQ ID NO: 2293604 - RNA, 19 nt, Artificial Sequence
  Description of Artificial Sequence: Synthetic oligonucleotide
  Sense strand starting at position 1410 of SEQ ID NO: 1884809
aaugaugacugaguuucua

SEQ ID NO: 2293605 - RNA, 19 nt, Artificial Sequence
  Description of Artificial Sequence: Synthetic oligonucleotide
  Antisense strand to SEQ ID NO: 2293604
uagaaacucagucaucauu

SEQ ID NO: 2293606 - RNA, 19 nt, Artificial Sequence
  Description of Artificial Sequence: Synthetic oligonucleotide
  Sense strand starting at position 1428 of SEQ ID NO: 1884809
auucuauuaguguauccaa

SEQ ID NO: 2293607 - RNA, 19 nt, Artificial Sequence
  Description of Artificial Sequence: Synthetic oligonucleotide
  Antisense strand to SEQ ID NO: 2293606
uuggauacacuaauagaau

SEQ ID NO: 2293608 - RNA, 19 nt, Artificial Sequence
  Description of Artificial Sequence: Synthetic oligonucleotide
  Sense strand starting at position 1483 of SEQ ID NO: 1884809
ucaguaaguagcuauggaa

SEQ ID NO: 2293609 - RNA, 19 nt, Artificial Sequence
  Description of Artificial Sequence: Synthetic oligonucleotide
  Antisense strand to SEQ ID NO: 2293608
uuccauagcuacuuacuga

SEQ ID NO: 2293610 - RNA, 19 nt, Artificial Sequence
  Description of Artificial Sequence: Synthetic oligonucleotide
  Sense strand starting at position 1490 of SEQ ID NO: 1884809
guagcuauggaaugaauau

SEQ ID NO: 2293611 - RNA, 19 nt, Artificial Sequence
  Description of Artificial Sequence: Synthetic oligonucleotide
  Antisense strand to SEQ ID NO: 2293610
auauucauuccauagcuac

SEQ ID NO: 2293612 - RNA, 19 nt, Artificial Sequence
  Description of Artificial Sequence: Synthetic oligonucleotide
  Sense strand starting at position 1497 of SEQ ID NO: 1884809
uggaaugaauaugugugua

SEQ ID NO: 2293613 - RNA, 19 nt, Artificial Sequence
  Description of Artificial Sequence: Synthetic oligonucleotide
  Antisense strand to SEQ ID NO: 2293612
uacacacauauucauucca

SEQ ID NO: 2293614 - RNA, 19 nt, Artificial Sequence
  Description of Artificial Sequence: Synthetic oligonucleotide
  Sense strand starting at position 1499 of SEQ ID NO: 1884809
gaaugaauauguguguaca

SEQ ID NO: 2293615 - RNA, 19 nt, Artificial Sequence
  Description of Artificial Sequence: Synthetic oligonucleotide
  Antisense strand to SEQ ID NO: 2293614
uguacacacauauucauuc

SEQ ID NO: 2293616 - RNA, 19 nt, Artificial Sequence
  Description of Artificial Sequence: Synthetic oligonucleotide
  Sense strand starting at position 1591 of SEQ ID NO: 1884809
gcuggaaucugaucugaac

SEQ ID NO: 2293617 - RNA, 19 nt, Artificial Sequence
  Description of Artificial Sequence: Synthetic oligonucleotide
  Antisense strand to SEQ ID NO: 2293616
guucagaucagauuccagc

SEQ ID NO: 2293618 - RNA, 19 nt, Artificial Sequence
  Description of Artificial Sequence: Synthetic oligonucleotide
  Sense strand starting at position 1846 of SEQ ID NO: 1884809
gggacugagaguuguggaa

SEQ ID NO: 2293619 - RNA, 19 nt, Artificial Sequence
  Description of Artificial Sequence: Synthetic oligonucleotide
  Antisense strand to SEQ ID NO: 2293618
uuccacaacucucaguccc

SEQ ID NO: 2293620 - RNA, 19 nt, Artificial Sequence
  Description of Artificial Sequence: Synthetic oligonucleotide
  Sense strand starting at position 2094 of SEQ ID NO: 1884809
ucccauucugaauagguuu

SEQ ID NO: 2293621 - RNA, 19 nt, Artificial Sequence
  Description of Artificial Sequence: Synthetic oligonucleotide
  Antisense strand to SEQ ID NO: 2293620
aaaccuauucagaauggga

SEQ ID NO: 2293622 - RNA, 19 nt, Artificial Sequence
  Description of Artificial Sequence: Synthetic oligonucleotide
  Sense strand starting at position 2140 of SEQ ID NO: 1884809
accgguuaacuggaaagua

SEQ ID NO: 2293623 - RNA, 19 nt, Artificial Sequence
  Description of Artificial Sequence: Synthetic oligonucleotide
  Antisense strand to SEQ ID NO: 2293622
uacuuuccaguuaaccggu

SEQ ID NO: 2293624 - RNA, 19 nt, Artificial Sequence
  Description of Artificial Sequence: Synthetic oligonucleotide
  Sense strand starting at position 2221 of SEQ ID NO: 1884809
cccagaaguccauggaaua

SEQ ID NO: 2293625 - RNA, 19 nt, Artificial Sequence
  Description of Artificial Sequence: Synthetic oligonucleotide
  Antisense strand to SEQ ID NO: 2293624
uauuccauggacuucuggg

SEQ ID NO: 2293626 - RNA, 19 nt, Artificial Sequence
  Description of Artificial Sequence: Synthetic oligonucleotide
  Sense strand starting at position 2421 of SEQ ID NO: 1884809
aguagaguucuaggaaaua

SEQ ID NO: 2293627 - RNA, 19 nt, Artificial Sequence
  Description of Artificial Sequence: Synthetic oligonucleotide
  Antisense strand to SEQ ID NO: 2293626
uauuuccuagaacucuacu

SEQ ID NO: 2293628 - RNA, 19 nt, Artificial Sequence
  Description of Artificial Sequence: Synthetic oligonucleotide
  Sense strand starting at position 2431 of SEQ ID NO: 1884809
uaggaaauauuaguggagu

SEQ ID NO: 2293629 - RNA, 19 nt, Artificial Sequence
  Description of Artificial Sequence: Synthetic oligonucleotide
  Antisense strand to SEQ ID NO: 2293628
acuccacuaauauuuccua

SEQ ID NO: 2293630 - RNA, 19 nt, Artificial Sequence
  Description of Artificial Sequence: Synthetic oligonucleotide
  Sense strand starting at position 2437 of SEQ ID NO: 1884809
auauuaguggagugaauga

SEQ ID NO: 2293631 - RNA, 19 nt, Artificial Sequence
  Description of Artificial Sequence: Synthetic oligonucleotide
  Antisense strand to SEQ ID NO: 2293630
ucauucacuccacuaauau

SEQ ID NO: 2293632 - RNA, 19 nt, Artificial Sequence
  Description of Artificial Sequence: Synthetic oligonucleotide
  Sense strand starting at position 2863 of SEQ ID NO: 1884809
gagugaggcaguuacagaa

SEQ ID NO: 2293633 - RNA, 19 nt, Artificial Sequence
  Description of Artificial Sequence: Synthetic oligonucleotide
  Antisense strand to SEQ ID NO: 2293632
uucuguaacugccucacuc

SEQ ID NO: 2293634 - RNA, 19 nt, Artificial Sequence
  Description of Artificial Sequence: Synthetic oligonucleotide
  Sense strand starting at position 2899 of SEQ ID NO: 1884809
gguaguguccugaguuugu

SEQ ID NO: 2293635 - RNA, 19 nt, Artificial Sequence
  Description of Artificial Sequence: Synthetic oligonucleotide
  Antisense strand to SEQ ID NO: 2293634
acaaacucaggacacuacc

SEQ ID NO: 2293636 - RNA, 19 nt, Artificial Sequence
  Description of Artificial Sequence: Synthetic oligonucleotide
  Sense strand starting at position 2916 of SEQ ID NO: 1884809
guuccuaugggauaucuca

SEQ ID NO: 2293637 - RNA, 19 nt, Artificial Sequence
  Description of Artificial Sequence: Synthetic oligonucleotide
  Antisense strand to SEQ ID NO: 2293636
ugagauaucccauaggaac

SEQ ID NO: 2293638 - RNA, 19 nt, Artificial Sequence
  Description of Artificial Sequence: Synthetic oligonucleotide
  Sense strand starting at position 3000 of SEQ ID NO: 1884809
aggugagauuacuugcaua

SEQ ID NO: 2293639 - RNA, 19 nt, Artificial Sequence
  Description of Artificial Sequence: Synthetic oligonucleotide
  Antisense strand to SEQ ID NO: 2293638
uaugcaaguaaucucaccu

SEQ ID NO: 2293640 - RNA, 19 nt, Artificial Sequence
  Description of Artificial Sequence: Synthetic oligonucleotide
  Sense strand starting at position 3013 of SEQ ID NO: 1884809
ugcauaaggccacauauau

SEQ ID NO: 2293641 - RNA, 19 nt, Artificial Sequence
  Description of Artificial Sequence: Synthetic oligonucleotide
  Antisense strand to SEQ ID NO: 2293640
auauauguggccuuaugca

SEQ ID NO: 2293642 - RNA, 19 nt, Artificial Sequence
  Description of Artificial Sequence: Synthetic oligonucleotide
  Sense strand starting at position 3021 of SEQ ID NO: 1884809
gccacauauauggguggau

SEQ ID NO: 2293643 - RNA, 19 nt, Artificial Sequence
  Description of Artificial Sequence: Synthetic oligonucleotide
  Antisense strand to SEQ ID NO: 2293642
auccacccauauauguggc

SEQ ID NO: 2293644 - RNA, 19 nt, Artificial Sequence
  Description of Artificial Sequence: Synthetic oligonucleotide
  Sense strand starting at position 3022 of SEQ ID NO: 1884809
ccacauauauggguggauu

SEQ ID NO: 2293645 - RNA, 19 nt, Artificial Sequence
  Description of Artificial Sequence: Synthetic oligonucleotide
  Antisense strand to SEQ ID NO: 2293644
aauccacccauauaugugg

SEQ ID NO: 2293646 - RNA, 19 nt, Artificial Sequence
  Description of Artificial Sequence: Synthetic oligonucleotide
  Sense strand starting at position 3174 of SEQ ID NO: 1884809
gggccuaggaacugaucua

SEQ ID NO: 2293647 - RNA, 19 nt, Artificial Sequence
  Description of Artificial Sequence: Synthetic oligonucleotide
  Antisense strand to SEQ ID NO: 2293646
uagaucaguuccuaggccc

SEQ ID NO: 2293648 - RNA, 19 nt, Artificial Sequence
  Description of Artificial Sequence: Synthetic oligonucleotide
  Sense strand starting at position 3314 of SEQ ID NO: 1884809
ugggcaugugaguagguaa

SEQ ID NO: 2293649 - RNA, 19 nt, Artificial Sequence
  Description of Artificial Sequence: Synthetic oligonucleotide
  Antisense strand to SEQ ID NO: 2293648
uuaccuacucacaugccca

SEQ ID NO: 2293650 - RNA, 19 nt, Artificial Sequence
  Description of Artificial Sequence: Synthetic oligonucleotide
  Sense strand starting at position 3812 of SEQ ID NO: 1884809
aucaccaugugaucaaagu

SEQ ID NO: 2293651 - RNA, 19 nt, Artificial Sequence
  Description of Artificial Sequence: Synthetic oligonucleotide
  Antisense strand to SEQ ID NO: 2293650
acuuugaucacauggugau

SEQ ID NO: 2293652 - RNA, 19 nt, Artificial Sequence
  Description of Artificial Sequence: Synthetic oligonucleotide
  Sense strand starting at position 3919 of SEQ ID NO: 1884809
gccguugcucugucaggaa

SEQ ID NO: 2293653 - RNA, 19 nt, Artificial Sequence
  Description of Artificial Sequence: Synthetic oligonucleotide
  Antisense strand to SEQ ID NO: 2293652
uuccugacagagcaacggc

SEQ ID NO: 2293654 - RNA, 19 nt, Artificial Sequence
  Description of Artificial Sequence: Synthetic oligonucleotide
  Sense strand starting at position 155 of SEQ ID NO: 1884810
ucaucaucugcagaaacgu

SEQ ID NO: 2293655 - RNA, 19 nt, Artificial Sequence
  Description of Artificial Sequence: Synthetic oligonucleotide
  Antisense strand to SEQ ID NO: 2293654
acguuucugcagaugauga

SEQ ID NO: 2293656 - RNA, 19 nt, Artificial Sequence
  Description of Artificial Sequence: Synthetic oligonucleotide
  Sense strand starting at position 327 of SEQ ID NO: 1884810
gaaguugagcugugaaaug

SEQ ID NO: 2293657 - RNA, 19 nt, Artificial Sequence
  Description of Artificial Sequence: Synthetic oligonucleotide
  Antisense strand to SEQ ID NO: 2293656
cauuucacagcucaacuuc

SEQ ID NO: 2293658 - RNA, 19 nt, Artificial Sequence
  Description of Artificial Sequence: Synthetic oligonucleotide
  Sense strand starting at position 537 of SEQ ID NO: 1884810
agguaaauugggcagaugu

SEQ ID NO: 2293659 - RNA, 19 nt, Artificial Sequence
  Description of Artificial Sequence: Synthetic oligonucleotide
  Antisense strand to SEQ ID NO: 2293658
acaucugcccaauuuaccu

SEQ ID NO: 2293660 - RNA, 19 nt, Artificial Sequence
  Description of Artificial Sequence: Synthetic oligonucleotide
  Sense strand starting at position 539 of SEQ ID NO: 1884810
guaaauugggcagauguaa

SEQ ID NO: 2293661 - RNA, 19 nt, Artificial Sequence
  Description of Artificial Sequence: Synthetic oligonucleotide
  Antisense strand to SEQ ID NO: 2293660
uuacaucugcccaauuuac

SEQ ID NO: 2293662 - RNA, 19 nt, Artificial Sequence
  Description of Artificial Sequence: Synthetic oligonucleotide
  Sense strand starting at position 547 of SEQ ID NO: 1884810
ggcagauguaaauaaggca

SEQ ID NO: 2293663 - RNA, 19 nt, Artificial Sequence
  Description of Artificial Sequence: Synthetic oligonucleotide
  Antisense strand to SEQ ID NO: 2293662
ugccuuauuuacaucugcc

SEQ ID NO: 2293664 - RNA, 19 nt, Artificial Sequence
  Description of Artificial Sequence: Synthetic oligonucleotide
  Sense strand starting at position 597 of SEQ ID NO: 1884810
ccaagauccgcacacuaaa

SEQ ID NO: 2293665 - RNA, 19 nt, Artificial Sequence
  Description of Artificial Sequence: Synthetic oligonucleotide
  Antisense strand to SEQ ID NO: 2293664
uuuagugugcggaucuugg

SEQ ID NO: 2293666 - RNA, 19 nt, Artificial Sequence
  Description of Artificial Sequence: Synthetic oligonucleotide
  Sense strand starting at position 608 of SEQ ID NO: 1884810
acacuaaauacgggaaguu

SEQ ID NO: 2293667 - RNA, 19 nt, Artificial Sequence
  Description of Artificial Sequence: Synthetic oligonucleotide
  Antisense strand to SEQ ID NO: 2293666
aacuucccguauuuagugu

SEQ ID NO: 2293668 - RNA, 19 nt, Artificial Sequence
  Description of Artificial Sequence: Synthetic oligonucleotide
  Sense strand starting at position 667 of SEQ ID NO: 1884810
caggaauucggacgauuau

SEQ ID NO: 2293669 - RNA, 19 nt, Artificial Sequence
  Description of Artificial Sequence: Synthetic oligonucleotide
  Antisense strand to SEQ ID NO: 2293668
auaaucguccgaauuccug

SEQ ID NO: 2293670 - RNA, 19 nt, Artificial Sequence
  Description of Artificial Sequence: Synthetic oligonucleotide
  Sense strand starting at position 673 of SEQ ID NO: 1884810
uucggacgauuaucugaaa

SEQ ID NO: 2293671 - RNA, 19 nt, Artificial Sequence
  Description of Artificial Sequence: Synthetic oligonucleotide
  Antisense strand to SEQ ID NO: 2293670
uuucagauaaucguccgaa

SEQ ID NO: 2293672 - RNA, 19 nt, Artificial Sequence
  Description of Artificial Sequence: Synthetic oligonucleotide
  Sense strand starting at position 777 of SEQ ID NO: 1884810
uaacguauagaguagguua

SEQ ID NO: 2293673 - RNA, 19 nt, Artificial Sequence
  Description of Artificial Sequence: Synthetic oligonucleotide
  Antisense strand to SEQ ID NO: 2293672
uaaccuacucuauacguua

SEQ ID NO: 2293674 - RNA, 19 nt, Artificial Sequence
  Description of Artificial Sequence: Synthetic oligonucleotide
  Sense strand starting at position 790 of SEQ ID NO: 1884810
agguuaaagagacguagaa

SEQ ID NO: 2293675 - RNA, 19 nt, Artificial Sequence
  Description of Artificial Sequence: Synthetic oligonucleotide
  Antisense strand to SEQ ID NO: 2293674
uucuacgucucuuuaaccu

SEQ ID NO: 2293676 - RNA, 19 nt, Artificial Sequence
  Description of Artificial Sequence: Synthetic oligonucleotide
  Sense strand starting at position 824 of SEQ ID NO: 1884810
acaaguuuagcaugaggga

SEQ ID NO: 2293677 - RNA, 19 nt, Artificial Sequence
  Description of Artificial Sequence: Synthetic oligonucleotide
  Antisense strand to SEQ ID NO: 2293676
ucccucaugcuaaacuugu

SEQ ID NO: 2293678 - RNA, 19 nt, Artificial Sequence
  Description of Artificial Sequence: Synthetic oligonucleotide
  Sense strand starting at position 853 of SEQ ID NO: 1884810
aggaaagacaccugguguu

SEQ ID NO: 2293679 - RNA, 19 nt, Artificial Sequence
  Description of Artificial Sequence: Synthetic oligonucleotide
  Antisense strand to SEQ ID NO: 2293678
aacaccaggugucuuuccu

SEQ ID NO: 2293680 - RNA, 19 nt, Artificial Sequence
  Description of Artificial Sequence: Synthetic oligonucleotide
  Sense strand starting at position 920 of SEQ ID NO: 1884810
gcugcaaucccguucucau

SEQ ID NO: 2293681 - RNA, 19 nt, Artificial Sequence
  Description of Artificial Sequence: Synthetic oligonucleotide
  Antisense strand to SEQ ID NO: 2293680
augagaacgggauugcagc

SEQ ID NO: 2293682 - RNA, 19 nt, Artificial Sequence
  Description of Artificial Sequence: Synthetic oligonucleotide
  Sense strand starting at position 1135 of SEQ ID NO: 1884810
ucgcgauuucccuaaggug

SEQ ID NO: 2293683 - RNA, 19 nt, Artificial Sequence
  Description of Artificial Sequence: Synthetic oligonucleotide
  Antisense strand to SEQ ID NO: 2293682
caccuuagggaaaucgcga

SEQ ID NO: 2293684 - RNA, 19 nt, Artificial Sequence
  Description of Artificial Sequence: Synthetic oligonucleotide
  Sense strand starting at position 1417 of SEQ ID NO: 1884810
ggcacauaucucuacugua

SEQ ID NO: 2293685 - RNA, 19 nt, Artificial Sequence
  Description of Artificial Sequence: Synthetic oligonucleotide
  Antisense strand to SEQ ID NO: 2293684
uacaguagagauaugugcc

SEQ ID NO: 2293686 - RNA, 19 nt, Artificial Sequence
  Description of Artificial Sequence: Synthetic oligonucleotide
  Sense strand starting at position 1431 of SEQ ID NO: 1884810
cuguaaucagaacgagaug

SEQ ID NO: 2293687 - RNA, 19 nt, Artificial Sequence
  Description of Artificial Sequence: Synthetic oligonucleotide
  Antisense strand to SEQ ID NO: 2293686
caucucguucugauuacag

SEQ ID NO: 2293688 - RNA, 19 nt, Artificial Sequence
  Description of Artificial Sequence: Synthetic oligonucleotide
  Sense strand starting at position 1436 of SEQ ID NO: 1884810
aucagaacgagauguaaca

SEQ ID NO: 2293689 - RNA, 19 nt, Artificial Sequence
  Description of Artificial Sequence: Synthetic oligonucleotide
  Antisense strand to SEQ ID NO: 2293688
uguuacaucucguucugau

SEQ ID NO: 2293690 - RNA, 19 nt, Artificial Sequence
  Description of Artificial Sequence: Synthetic oligonucleotide
  Sense strand starting at position 1724 of SEQ ID NO: 1884810
cgcgaaagucgugcuggaa

SEQ ID NO: 2293691 - RNA, 19 nt, Artificial Sequence
  Description of Artificial Sequence: Synthetic oligonucleotide
  Antisense strand to SEQ ID NO: 2293690
uuccagcacgacuuucgcg

SEQ ID NO: 2293692 - RNA, 19 nt, Artificial Sequence
  Description of Artificial Sequence: Synthetic oligonucleotide
  Sense strand starting at position 1991 of SEQ ID NO: 1884810
gcugcaaacccugaccaau

SEQ ID NO: 2293693 - RNA, 19 nt, Artificial Sequence
  Description of Artificial Sequence: Synthetic oligonucleotide
  Antisense strand to SEQ ID NO: 2293692
auuggucaggguuugcagc

SEQ ID NO: 2293694 - RNA, 19 nt, Artificial Sequence
  Description of Artificial Sequence: Synthetic oligonucleotide
  Sense strand starting at position 2344 of SEQ ID NO: 1884810
cugaccuucggugagugau

SEQ ID NO: 2293695 - RNA, 19 nt, Artificial Sequence
  Description of Artificial Sequence: Synthetic oligonucleotide
  Antisense strand to SEQ ID NO: 2293694
aucacucaccgaaggucag

SEQ ID NO: 2293696 - RNA, 19 nt, Artificial Sequence
  Description of Artificial Sequence: Synthetic oligonucleotide
  Sense strand starting at position 2471 of SEQ ID NO: 1884810
gucaccauuccucgaaaga

SEQ ID NO: 2293697 - RNA, 19 nt, Artificial Sequence
  Description of Artificial Sequence: Synthetic oligonucleotide
  Antisense strand to SEQ ID NO: 2293696
ucuuucgaggaauggugac

SEQ ID NO: 2293698 - RNA, 19 nt, Artificial Sequence
  Description of Artificial Sequence: Synthetic oligonucleotide
  Sense strand starting at position 2496 of SEQ ID NO: 1884810
gggaauuacguuuauucuc

SEQ ID NO: 2293699 - RNA, 19 nt, Artificial Sequence
  Description of Artificial Sequence: Synthetic oligonucleotide
  Antisense strand to SEQ ID NO: 2293698
gagaauaaacguaauuccc

SEQ ID NO: 2293700 - RNA, 19 nt, Artificial Sequence
  Description of Artificial Sequence: Synthetic oligonucleotide
  Sense strand starting at position 2752 of SEQ ID NO: 1884810
gcccgugucccuucuuaga

SEQ ID NO: 2293701 - RNA, 19 nt, Artificial Sequence
  Description of Artificial Sequence: Synthetic oligonucleotide
  Antisense strand to SEQ ID NO: 2293700
ucuaagaagggacacgggc

SEQ ID NO: 2293702 - RNA, 19 nt, Artificial Sequence
  Description of Artificial Sequence: Synthetic oligonucleotide
  Sense strand starting at position 2812 of SEQ ID NO: 1884810
cagugucagcguguuugau

SEQ ID NO: 2293703 - RNA, 19 nt, Artificial Sequence
  Description of Artificial Sequence: Synthetic oligonucleotide
  Antisense strand to SEQ ID NO: 2293702
aucaaacacgcugacacug

SEQ ID NO: 2293704 - RNA, 19 nt, Artificial Sequence
  Description of Artificial Sequence: Synthetic oligonucleotide
  Sense strand starting at position 2813 of SEQ ID NO: 1884810
agugucagcguguuugauu

SEQ ID NO: 2293705 - RNA, 19 nt, Artificial Sequence
  Description of Artificial Sequence: Synthetic oligonucleotide
  Antisense strand to SEQ ID NO: 2293704
aaucaaacacgcugacacu

SEQ ID NO: 2293706 - RNA, 19 nt, Artificial Sequence
  Description of Artificial Sequence: Synthetic oligonucleotide
  Sense strand starting at position 3038 of SEQ ID NO: 1884810
ucugcuuaacguuauuuau

SEQ ID NO: 2293707 - RNA, 19 nt, Artificial Sequence
  Description of Artificial Sequence: Synthetic oligonucleotide
  Antisense strand to SEQ ID NO: 2293706
auaaauaacguuaagcaga

SEQ ID NO: 2293708 - RNA, 19 nt, Artificial Sequence
  Description of Artificial Sequence: Synthetic oligonucleotide
  Sense strand starting at position 3052 of SEQ ID NO: 1884810
uuuauaaaugaucggagac

SEQ ID NO: 2293709 - RNA, 19 nt, Artificial Sequence
  Description of Artificial Sequence: Synthetic oligonucleotide
  Antisense strand to SEQ ID NO: 2293708
gucuccgaucauuuauaaa

SEQ ID NO: 2293710 - RNA, 19 nt, Artificial Sequence
  Description of Artificial Sequence: Synthetic oligonucleotide
  Sense strand starting at position 3157 of SEQ ID NO: 1884810
gcuuuaccuuugguauuua

SEQ ID NO: 2293711 - RNA, 19 nt, Artificial Sequence
  Description of Artificial Sequence: Synthetic oligonucleotide
  Antisense strand to SEQ ID NO: 2293710
uaaauaccaaagguaaagc

SEQ ID NO: 2293712 - RNA, 19 nt, Artificial Sequence
  Description of Artificial Sequence: Synthetic oligonucleotide
  Sense strand starting at position 3252 of SEQ ID NO: 1884810
ugaucauccuccuuggaga

SEQ ID NO: 2293713 - RNA, 19 nt, Artificial Sequence
  Description of Artificial Sequence: Synthetic oligonucleotide
  Antisense strand to SEQ ID NO: 2293712
ucuccaaggaggaugauca

SEQ ID NO: 2293714 - RNA, 19 nt, Artificial Sequence
  Description of Artificial Sequence: Synthetic oligonucleotide
  Sense strand starting at position 3270 of SEQ ID NO: 1884810
aagugugauguugaagagu

SEQ ID NO: 2293715 - RNA, 19 nt, Artificial Sequence
  Description of Artificial Sequence: Synthetic oligonucleotide
  Antisense strand to SEQ ID NO: 2293714
acucuucaacaucacacuu

SEQ ID NO: 2293716 - RNA, 19 nt, Artificial Sequence
  Description of Artificial Sequence: Synthetic oligonucleotide
  Sense strand starting at position 3398 of SEQ ID NO: 1884810
ugaaguaguacagagguuu

SEQ ID NO: 2293717 - RNA, 19 nt, Artificial Sequence
  Description of Artificial Sequence: Synthetic oligonucleotide
  Antisense strand to SEQ ID NO: 2293716
aaaccucuguacuacuuca

SEQ ID NO: 2293718 - RNA, 19 nt, Artificial Sequence
  Description of Artificial Sequence: Synthetic oligonucleotide
  Sense strand starting at position 3409 of SEQ ID NO: 1884810
agagguuuguguucauuug

SEQ ID NO: 2293719 - RNA, 19 nt, Artificial Sequence
  Description of Artificial Sequence: Synthetic oligonucleotide
  Antisense strand to SEQ ID NO: 2293718
caaaugaacacaaaccucu

SEQ ID NO: 2293720 - RNA, 19 nt, Artificial Sequence
  Description of Artificial Sequence: Synthetic oligonucleotide
  Sense strand starting at position 3426 of SEQ ID NO: 1884810
ugaacuuacguauacagau

SEQ ID NO: 2293721 - RNA, 19 nt, Artificial Sequence
  Description of Artificial Sequence: Synthetic oligonucleotide
  Antisense strand to SEQ ID NO: 2293720
aucuguauacguaaguuca

SEQ ID NO: 2293722 - RNA, 19 nt, Artificial Sequence
  Description of Artificial Sequence: Synthetic oligonucleotide
  Sense strand starting at position 3483 of SEQ ID NO: 1884810
guaucucuucuccaaaggu

SEQ ID NO: 2293723 - RNA, 19 nt, Artificial Sequence
  Description of Artificial Sequence: Synthetic oligonucleotide
  Antisense strand to SEQ ID NO: 2293722
accuuuggagaagagauac

SEQ ID NO: 2293724 - RNA, 19 nt, Artificial Sequence
  Description of Artificial Sequence: Synthetic oligonucleotide
  Sense strand starting at position 3562 of SEQ ID NO: 1884810
cuaacuugucccuaggagu

SEQ ID NO: 2293725 - RNA, 19 nt, Artificial Sequence
  Description of Artificial Sequence: Synthetic oligonucleotide
  Antisense strand to SEQ ID NO: 2293724
acuccuagggacaaguuag

SEQ ID NO: 2293726 - RNA, 19 nt, Artificial Sequence
  Description of Artificial Sequence: Synthetic oligonucleotide
  Sense strand starting at position 3568 of SEQ ID NO: 1884810
ugucccuaggagugaugaa

SEQ ID NO: 2293727 - RNA, 19 nt, Artificial Sequence
  Description of Artificial Sequence: Synthetic oligonucleotide
  Antisense strand to SEQ ID NO: 2293726
uucaucacuccuagggaca

SEQ ID NO: 2293728 - RNA, 19 nt, Artificial Sequence
  Description of Artificial Sequence: Synthetic oligonucleotide
  Sense strand starting at position 3589 of SEQ ID NO: 1884810
cugagugaauuccuuugaa

SEQ ID NO: 2293729 - RNA, 19 nt, Artificial Sequence
  Description of Artificial Sequence: Synthetic oligonucleotide
  Antisense strand to SEQ ID NO: 2293728
uucaaaggaauucacucag

SEQ ID NO: 2293730 - RNA, 19 nt, Artificial Sequence
  Description of Artificial Sequence: Synthetic oligonucleotide
  Sense strand starting at position 3783 of SEQ ID NO: 1884810
cucacuguggagcauaaau

SEQ ID NO: 2293731 - RNA, 19 nt, Artificial Sequence
  Description of Artificial Sequence: Synthetic oligonucleotide
  Antisense strand to SEQ ID NO: 2293730
auuuaugcuccacagugag

SEQ ID NO: 2293732 - RNA, 19 nt, Artificial Sequence
  Description of Artificial Sequence: Synthetic oligonucleotide
  Sense strand starting at position 3912 of SEQ ID NO: 1884810
acauaaugagacgguauau

SEQ ID NO: 2293733 - RNA, 19 nt, Artificial Sequence
  Description of Artificial Sequence: Synthetic oligonucleotide
  Antisense strand to SEQ ID NO: 2293732
auauaccgucucauuaugu

SEQ ID NO: 2293734 - RNA, 19 nt, Artificial Sequence
  Description of Artificial Sequence: Synthetic oligonucleotide
  Sense strand starting at position 14 of SEQ ID NO: 1884811
aaggcaaaguucucagacu

SEQ ID NO: 2293735 - RNA, 19 nt, Artificial Sequence
  Description of Artificial Sequence: Synthetic oligonucleotide
  Antisense strand to SEQ ID NO: 2293734
agucugagaacuuugccuu

SEQ ID NO: 2293736 - RNA, 19 nt, Artificial Sequence
  Description of Artificial Sequence: Synthetic oligonucleotide
  Sense strand starting at position 23 of SEQ ID NO: 1884811
uucucagacucaguggaaa

SEQ ID NO: 2293737 - RNA, 19 nt, Artificial Sequence
  Description of Artificial Sequence: Synthetic oligonucleotide
  Antisense strand to SEQ ID NO: 2293736
uuuccacugagucugagaa

SEQ ID NO: 2293738 - RNA, 19 nt, Artificial Sequence
  Description of Artificial Sequence: Synthetic oligonucleotide
  Sense strand starting at position 75 of SEQ ID NO: 1884811
gaaagaggauuugggucuu

SEQ ID NO: 2293739 - RNA, 19 nt, Artificial Sequence
  Description of Artificial Sequence: Synthetic oligonucleotide
  Antisense strand to SEQ ID NO: 2293738
aagacccaaauccucuuuc

SEQ ID NO: 2293740 - RNA, 19 nt, Artificial Sequence
  Description of Artificial Sequence: Synthetic oligonucleotide
  Sense strand starting at position 203 of SEQ ID NO: 1884811
gccagcuuguaauuuagaa

SEQ ID NO: 2293741 - RNA, 19 nt, Artificial Sequence
  Description of Artificial Sequence: Synthetic oligonucleotide
  Antisense strand to SEQ ID NO: 2293740
uucuaaauuacaagcuggc

SEQ ID NO: 2293742 - RNA, 19 nt, Artificial Sequence
  Description of Artificial Sequence: Synthetic oligonucleotide
  Sense strand starting at position 264 of SEQ ID NO: 1884811
cagguaugguucuuaauag

SEQ ID NO: 2293743 - RNA, 19 nt, Artificial Sequence
  Description of Artificial Sequence: Synthetic oligonucleotide
  Antisense strand to SEQ ID NO: 2293742
cuauuaagaaccauaccug

SEQ ID NO: 2293744 - RNA, 19 nt, Artificial Sequence
  Description of Artificial Sequence: Synthetic oligonucleotide
  Sense strand starting at position 274 of SEQ ID NO: 1884811
ucuuaauagcagggauaca

SEQ ID NO: 2293745 - RNA, 19 nt, Artificial Sequence
  Description of Artificial Sequence: Synthetic oligonucleotide
  Antisense strand to SEQ ID NO: 2293744
uguaucccugcuauuaaga

SEQ ID NO: 2293746 - RNA, 19 nt, Artificial Sequence
  Description of Artificial Sequence: Synthetic oligonucleotide
  Sense strand starting at position 747 of SEQ ID NO: 1884811
agagguggcuuguucagaa

SEQ ID NO: 2293747 - RNA, 19 nt, Artificial Sequence
  Description of Artificial Sequence: Synthetic oligonucleotide
  Antisense strand to SEQ ID NO: 2293746
uucugaacaagccaccucu

SEQ ID NO: 2293748 - RNA, 19 nt, Artificial Sequence
  Description of Artificial Sequence: Synthetic oligonucleotide
  Sense strand starting at position 976 of SEQ ID NO: 1884811
agggcauucuggucccaga

SEQ ID NO: 2293749 - RNA, 19 nt, Artificial Sequence
  Description of Artificial Sequence: Synthetic oligonucleotide
  Antisense strand to SEQ ID NO: 2293748
ucugggaccagaaugcccu

SEQ ID NO: 2293750 - RNA, 19 nt, Artificial Sequence
  Description of Artificial Sequence: Synthetic oligonucleotide
  Sense strand starting at position 1100 of SEQ ID NO: 1884811
uccuauugcuacccagaga

SEQ ID NO: 2293751 - RNA, 19 nt, Artificial Sequence
  Description of Artificial Sequence: Synthetic oligonucleotide
  Antisense strand to SEQ ID NO: 2293750
ucucuggguagcaauagga

SEQ ID NO: 2293752 - RNA, 19 nt, Artificial Sequence
  Description of Artificial Sequence: Synthetic oligonucleotide
  Sense strand starting at position 1160 of SEQ ID NO: 1884811
ucacauugucaaugucuau

SEQ ID NO: 2293753 - RNA, 19 nt, Artificial Sequence
  Description of Artificial Sequence: Synthetic oligonucleotide
  Antisense strand to SEQ ID NO: 2293752
auagacauugacaauguga

SEQ ID NO: 2293754 - RNA, 19 nt, Artificial Sequence
  Description of Artificial Sequence: Synthetic oligonucleotide
  Sense strand starting at position 1164 of SEQ ID NO: 1884811
auugucaaugucuaugcua

SEQ ID NO: 2293755 - RNA, 19 nt, Artificial Sequence
  Description of Artificial Sequence: Synthetic oligonucleotide
  Antisense strand to SEQ ID NO: 2293754
uagcauagacauugacaau

SEQ ID NO: 2293756 - RNA, 19 nt, Artificial Sequence
  Description of Artificial Sequence: Synthetic oligonucleotide
  Sense strand starting at position 1173 of SEQ ID NO: 1884811
gucuaugcuaagggaguaa

SEQ ID NO: 2293757 - RNA, 19 nt, Artificial Sequence
  Description of Artificial Sequence: Synthetic oligonucleotide
  Antisense strand to SEQ ID NO: 2293756
uuacucccuuagcauagac

SEQ ID NO: 2293758 - RNA, 19 nt, Artificial Sequence
  Description of Artificial Sequence: Synthetic oligonucleotide
  Sense strand starting at position 1321 of SEQ ID NO: 1884811
gccagucucguggcaguaa

SEQ ID NO: 2293759 - RNA, 19 nt, Artificial Sequence
  Description of Artificial Sequence: Synthetic oligonucleotide
  Antisense strand to SEQ ID NO: 2293758
uuacugccacgagacuggc

SEQ ID NO: 2293760 - RNA, 19 nt, Artificial Sequence
  Description of Artificial Sequence: Synthetic oligonucleotide
  Sense strand starting at position 1419 of SEQ ID NO: 1884811
gagucaccacuuugagaug

SEQ ID NO: 2293761 - RNA, 19 nt, Artificial Sequence
  Description of Artificial Sequence: Synthetic oligonucleotide
  Antisense strand to SEQ ID NO: 2293760
caucucaaaguggugacuc

SEQ ID NO: 2293762 - RNA, 19 nt, Artificial Sequence
  Description of Artificial Sequence: Synthetic oligonucleotide
  Sense strand starting at position 1424 of SEQ ID NO: 1884811
accacuuugagauguggga

SEQ ID NO: 2293763 - RNA, 19 nt, Artificial Sequence
  Description of Artificial Sequence: Synthetic oligonucleotide
  Antisense strand to SEQ ID NO: 2293762
ucccacaucucaaaguggu

SEQ ID NO: 2293764 - RNA, 19 nt, Artificial Sequence
  Description of Artificial Sequence: Synthetic oligonucleotide
  Sense strand starting at position 1523 of SEQ ID NO: 1884811
ggugaagacugaguaugga

SEQ ID NO: 2293765 - RNA, 19 nt, Artificial Sequence
  Description of Artificial Sequence: Synthetic oligonucleotide
  Antisense strand to SEQ ID NO: 2293764
uccauacucagucuucacc

SEQ ID NO: 2293766 - RNA, 19 nt, Artificial Sequence
  Description of Artificial Sequence: Synthetic oligonucleotide
  Sense strand starting at position 1783 of SEQ ID NO: 1884811
uggccaauuugcucuguca

SEQ ID NO: 2293767 - RNA, 19 nt, Artificial Sequence
  Description of Artificial Sequence: Synthetic oligonucleotide
  Antisense strand to SEQ ID NO: 2293766
ugacagagcaaauuggcca

SEQ ID NO: 2293768 - RNA, 19 nt, Artificial Sequence
  Description of Artificial Sequence: Synthetic oligonucleotide
  Sense strand starting at position 1786 of SEQ ID NO: 1884811
ccaauuugcucugucaggu

SEQ ID NO: 2293769 - RNA, 19 nt, Artificial Sequence
  Description of Artificial Sequence: Synthetic oligonucleotide
  Antisense strand to SEQ ID NO: 2293768
accugacagagcaaauugg

SEQ ID NO: 2293770 - RNA, 19 nt, Artificial Sequence
  Description of Artificial Sequence: Synthetic oligonucleotide
  Sense strand starting at position 1802 of SEQ ID NO: 1884811
gguuuccuccgauaucaca

SEQ ID NO: 2293771 - RNA, 19 nt, Artificial Sequence
  Description of Artificial Sequence: Synthetic oligonucleotide
  Antisense strand to SEQ ID NO: 2293770
ugugauaucggaggaaacc

SEQ ID NO: 2293772 - RNA, 19 nt, Artificial Sequence
  Description of Artificial Sequence: Synthetic oligonucleotide
  Sense strand starting at position 1853 of SEQ ID NO: 1884811
gcaugaucccagugacaac

SEQ ID NO: 2293773 - RNA, 19 nt, Artificial Sequence
  Description of Artificial Sequence: Synthetic oligonucleotide
  Antisense strand to SEQ ID NO: 2293772
guugucacugggaucaugc

SEQ ID NO: 2293774 - RNA, 19 nt, Artificial Sequence
  Description of Artificial Sequence: Synthetic oligonucleotide
  Sense strand starting at position 1979 of SEQ ID NO: 1884811
agcccauuggucuaugaga

SEQ ID NO: 2293775 - RNA, 19 nt, Artificial Sequence
  Description of Artificial Sequence: Synthetic oligonucleotide
  Antisense strand to SEQ ID NO: 2293774
ucucauagaccaaugggcu

SEQ ID NO: 2293776 - RNA, 19 nt, Artificial Sequence
  Description of Artificial Sequence: Synthetic oligonucleotide
  Sense strand starting at position 1981 of SEQ ID NO: 1884811
cccauuggucuaugagaaa

SEQ ID NO: 2293777 - RNA, 19 nt, Artificial Sequence
  Description of Artificial Sequence: Synthetic oligonucleotide
  Antisense strand to SEQ ID NO: 2293776
uuucucauagaccaauggg

SEQ ID NO: 2293778 - RNA, 19 nt, Artificial Sequence
  Description of Artificial Sequence: Synthetic oligonucleotide
  Sense strand starting at position 2062 of SEQ ID NO: 1884811
aggaaagcugcucaugcaa

SEQ ID NO: 2293779 - RNA, 19 nt, Artificial Sequence
  Description of Artificial Sequence: Synthetic oligonucleotide
  Antisense strand to SEQ ID NO: 2293778
uugcaugagcagcuuuccu

SEQ ID NO: 2293780 - RNA, 19 nt, Artificial Sequence
  Description of Artificial Sequence: Synthetic oligonucleotide
  Sense strand starting at position 2172 of SEQ ID NO: 1884811
gucuguguacuuuauauau

SEQ ID NO: 2293781 - RNA, 19 nt, Artificial Sequence
  Description of Artificial Sequence: Synthetic oligonucleotide
  Antisense strand to SEQ ID NO: 2293780
auauauaaaguacacagac

SEQ ID NO: 2293782 - RNA, 19 nt, Artificial Sequence
  Description of Artificial Sequence: Synthetic oligonucleotide
  Sense strand starting at position 2385 of SEQ ID NO: 1884811
agcagacuacguuauccaa

SEQ ID NO: 2293783 - RNA, 19 nt, Artificial Sequence
  Description of Artificial Sequence: Synthetic oligonucleotide
  Antisense strand to SEQ ID NO: 2293782
uuggauaacguagucugcu

SEQ ID NO: 2293784 - RNA, 19 nt, Artificial Sequence
  Description of Artificial Sequence: Synthetic oligonucleotide
  Sense strand starting at position 2388 of SEQ ID NO: 1884811
agacuacguuauccaacau

SEQ ID NO: 2293785 - RNA, 19 nt, Artificial Sequence
  Description of Artificial Sequence: Synthetic oligonucleotide
  Antisense strand to SEQ ID NO: 2293784
auguuggauaacguagucu

SEQ ID NO: 2293786 - RNA, 19 nt, Artificial Sequence
  Description of Artificial Sequence: Synthetic oligonucleotide
  Sense strand starting at position 2936 of SEQ ID NO: 1884811
gcuaaaugcuaagugauag

SEQ ID NO: 2293787 - RNA, 19 nt, Artificial Sequence
  Description of Artificial Sequence: Synthetic oligonucleotide
  Antisense strand to SEQ ID NO: 2293786
cuaucacuuagcauuuagc

SEQ ID NO: 2293788 - RNA, 19 nt, Artificial Sequence
  Description of Artificial Sequence: Synthetic oligonucleotide
  Sense strand starting at position 3018 of SEQ ID NO: 1884811
cuagaaucaccuggaaucu

SEQ ID NO: 2293789 - RNA, 19 nt, Artificial Sequence
  Description of Artificial Sequence: Synthetic oligonucleotide
  Antisense strand to SEQ ID NO: 2293788
agauuccaggugauucuag

SEQ ID NO: 2293790 - RNA, 19 nt, Artificial Sequence
  Description of Artificial Sequence: Synthetic oligonucleotide
  Sense strand starting at position 3046 of SEQ ID NO: 1884811
guaaaugaaucugaauuuc

SEQ ID NO: 2293791 - RNA, 19 nt, Artificial Sequence
  Description of Artificial Sequence: Synthetic oligonucleotide
  Antisense strand to SEQ ID NO: 2293790
gaaauucagauucauuuac

SEQ ID NO: 2293792 - RNA, 19 nt, Artificial Sequence
  Description of Artificial Sequence: Synthetic oligonucleotide
  Sense strand starting at position 3067 of SEQ ID NO: 1884811
acucaauaguuggcuauga

SEQ ID NO: 2293793 - RNA, 19 nt, Artificial Sequence
  Description of Artificial Sequence: Synthetic oligonucleotide
  Antisense strand to SEQ ID NO: 2293792
ucauagccaacuauugagu

SEQ ID NO: 2293794 - RNA, 19 nt, Artificial Sequence
  Description of Artificial Sequence: Synthetic oligonucleotide
  Sense strand starting at position 3069 of SEQ ID NO: 1884811
ucaauaguuggcuaugacu

SEQ ID NO: 2293795 - RNA, 19 nt, Artificial Sequence
  Description of Artificial Sequence: Synthetic oligonucleotide
  Antisense strand to SEQ ID NO: 2293794
agucauagccaacuauuga

SEQ ID NO: 2293796 - RNA, 19 nt, Artificial Sequence
  Description of Artificial Sequence: Synthetic oligonucleotide
  Sense strand starting at position 3071 of SEQ ID NO: 1884811
aauaguuggcuaugacuua

SEQ ID NO: 2293797 - RNA, 19 nt, Artificial Sequence
  Description of Artificial Sequence: Synthetic oligonucleotide
  Antisense strand to SEQ ID NO: 2293796
uaagucauagccaacuauu

SEQ ID NO: 2293798 - RNA, 19 nt, Artificial Sequence
  Description of Artificial Sequence: Synthetic oligonucleotide
  Sense strand starting at position 3100 of SEQ ID NO: 1884811
aaccaagaacuguguuaug

SEQ ID NO: 2293799 - RNA, 19 nt, Artificial Sequence
  Description of Artificial Sequence: Synthetic oligonucleotide
  Antisense strand to SEQ ID NO: 2293798
cauaacacaguucuugguu

SEQ ID NO: 2293800 - RNA, 19 nt, Artificial Sequence
  Description of Artificial Sequence: Synthetic oligonucleotide
  Sense strand starting at position 3123 of SEQ ID NO: 1884811
uguguauugcuuguuaugu

SEQ ID NO: 2293801 - RNA, 19 nt, Artificial Sequence
  Description of Artificial Sequence: Synthetic oligonucleotide
  Antisense strand to SEQ ID NO: 2293800
acauaacaagcaauacaca

SEQ ID NO: 2293802 - RNA, 19 nt, Artificial Sequence
  Description of Artificial Sequence: Synthetic oligonucleotide
  Sense strand starting at position 3156 of SEQ ID NO: 1884811
guugguaucaaugguugaa

SEQ ID NO: 2293803 - RNA, 19 nt, Artificial Sequence
  Description of Artificial Sequence: Synthetic oligonucleotide
  Antisense strand to SEQ ID NO: 2293802
uucaaccauugauaccaac

SEQ ID NO: 2293804 - RNA, 19 nt, Artificial Sequence
  Description of Artificial Sequence: Synthetic oligonucleotide
  Sense strand starting at position 3241 of SEQ ID NO: 1884811
guucuacaauuuguaguua

SEQ ID NO: 2293805 - RNA, 19 nt, Artificial Sequence
  Description of Artificial Sequence: Synthetic oligonucleotide
  Antisense strand to SEQ ID NO: 2293804
uaacuacaaauuguagaac

SEQ ID NO: 2293806 - RNA, 19 nt, Artificial Sequence
  Description of Artificial Sequence: Synthetic oligonucleotide
  Sense strand starting at position 3257 of SEQ ID NO: 1884811
uuaguuaguguacaagagu

SEQ ID NO: 2293807 - RNA, 19 nt, Artificial Sequence
  Description of Artificial Sequence: Synthetic oligonucleotide
  Antisense strand to SEQ ID NO: 2293806
acucuuguacacuaacuaa

SEQ ID NO: 2293808 - RNA, 19 nt, Artificial Sequence
  Description of Artificial Sequence: Synthetic oligonucleotide
  Sense strand starting at position 3266 of SEQ ID NO: 1884811
guacaagagugguucucaa

SEQ ID NO: 2293809 - RNA, 19 nt, Artificial Sequence
  Description of Artificial Sequence: Synthetic oligonucleotide
  Antisense strand to SEQ ID NO: 2293808
uugagaaccacucuuguac

SEQ ID NO: 2293810 - RNA, 19 nt, Artificial Sequence
  Description of Artificial Sequence: Synthetic oligonucleotide
  Sense strand starting at position 3726 of SEQ ID NO: 1884811
guaagucucaggcacagua

SEQ ID NO: 2293811 - RNA, 19 nt, Artificial Sequence
  Description of Artificial Sequence: Synthetic oligonucleotide
  Antisense strand to SEQ ID NO: 2293810
uacugugccugagacuuac

SEQ ID NO: 2293812 - RNA, 19 nt, Artificial Sequence
  Description of Artificial Sequence: Synthetic oligonucleotide
  Sense strand starting at position 3802 of SEQ ID NO: 1884811
auggaaucauugguuauau

SEQ ID NO: 2293813 - RNA, 19 nt, Artificial Sequence
  Description of Artificial Sequence: Synthetic oligonucleotide
  Antisense strand to SEQ ID NO: 2293812
auauaaccaaugauuccau

SEQ ID NO: 2293814 - RNA, 19 nt, Artificial Sequence
  Description of Artificial Sequence: Synthetic oligonucleotide
  Sense strand starting at position 2031 of SEQ ID NO: 1884812
caacuagcgcucuggaaga

SEQ ID NO: 2293815 - RNA, 19 nt, Artificial Sequence
  Description of Artificial Sequence: Synthetic oligonucleotide
  Antisense strand to SEQ ID NO: 2293814
ucuuccagagcgcuaguug

SEQ ID NO: 2293816 - RNA, 19 nt, Artificial Sequence
  Description of Artificial Sequence: Synthetic oligonucleotide
  Sense strand starting at position 2082 of SEQ ID NO: 1884812
agagcaaucuccgaauccu

SEQ ID NO: 2293817 - RNA, 19 nt, Artificial Sequence
  Description of Artificial Sequence: Synthetic oligonucleotide
  Antisense strand to SEQ ID NO: 2293816
aggauucggagauugcucu

SEQ ID NO: 2293818 - RNA, 19 nt, Artificial Sequence
  Description of Artificial Sequence: Synthetic oligonucleotide
  Sense strand starting at position 2159 of SEQ ID NO: 1884812
agaugaauuuagcgguuac

SEQ ID NO: 2293819 - RNA, 19 nt, Artificial Sequence
  Description of Artificial Sequence: Synthetic oligonucleotide
  Antisense strand to SEQ ID NO: 2293818
guaaccgcuaaauucaucu

SEQ ID NO: 2293820 - RNA, 19 nt, Artificial Sequence
  Description of Artificial Sequence: Synthetic oligonucleotide
  Sense strand starting at position 2208 of SEQ ID NO: 1884812
cacauaaacucguaggaaa

SEQ ID NO: 2293821 - RNA, 19 nt, Artificial Sequence
  Description of Artificial Sequence: Synthetic oligonucleotide
  Antisense strand to SEQ ID NO: 2293820
uuuccuacgaguuuaugug

SEQ ID NO: 2293822 - RNA, 19 nt, Artificial Sequence
  Description of Artificial Sequence: Synthetic oligonucleotide
  Sense strand starting at position 2210 of SEQ ID NO: 1884812
cauaaacucguaggaaaua

SEQ ID NO: 2293823 - RNA, 19 nt, Artificial Sequence
  Description of Artificial Sequence: Synthetic oligonucleotide
  Antisense strand to SEQ ID NO: 2293822
uauuuccuacgaguuuaug

SEQ ID NO: 2293824 - RNA, 19 nt, Artificial Sequence
  Description of Artificial Sequence: Synthetic oligonucleotide
  Sense strand starting at position 2211 of SEQ ID NO: 1884812
auaaacucguaggaaauaa

SEQ ID NO: 2293825 - RNA, 19 nt, Artificial Sequence
  Description of Artificial Sequence: Synthetic oligonucleotide
  Antisense strand to SEQ ID NO: 2293824
uuauuuccuacgaguuuau

SEQ ID NO: 2293826 - RNA, 19 nt, Artificial Sequence
  Description of Artificial Sequence: Synthetic oligonucleotide
  Sense strand starting at position 2287 of SEQ ID NO: 1884812
agacguugcuaugcuaagu

SEQ ID NO: 2293827 - RNA, 19 nt, Artificial Sequence
  Description of Artificial Sequence: Synthetic oligonucleotide
  Antisense strand to SEQ ID NO: 2293826
acuuagcauagcaacgucu

SEQ ID NO: 2293828 - RNA, 19 nt, Artificial Sequence
  Description of Artificial Sequence: Synthetic oligonucleotide
  Sense strand starting at position 2300 of SEQ ID NO: 1884812
cuaaguggauguucucaua

SEQ ID NO: 2293829 - RNA, 19 nt, Artificial Sequence
  Description of Artificial Sequence: Synthetic oligonucleotide
  Antisense strand to SEQ ID NO: 2293828
uaugagaacauccacuuag

SEQ ID NO: 2293830 - RNA, 19 nt, Artificial Sequence
  Description of Artificial Sequence: Synthetic oligonucleotide
  Sense strand starting at position 2303 of SEQ ID NO: 1884812
aguggauguucucauauaa

SEQ ID NO: 2293831 - RNA, 19 nt, Artificial Sequence
  Description of Artificial Sequence: Synthetic oligonucleotide
  Antisense strand to SEQ ID NO: 2293830
uuauaugagaacauccacu

SEQ ID NO: 2293832 - RNA, 19 nt, Artificial Sequence
  Description of Artificial Sequence: Synthetic oligonucleotide
  Sense strand starting at position 2328 of SEQ ID NO: 1884812
guacuacucagguagguuu

SEQ ID NO: 2293833 - RNA, 19 nt, Artificial Sequence
  Description of Artificial Sequence: Synthetic oligonucleotide
  Antisense strand to SEQ ID NO: 2293832
aaaccuaccugaguaguac

SEQ ID NO: 2293834 - RNA, 19 nt, Artificial Sequence
  Description of Artificial Sequence: Synthetic oligonucleotide
  Sense strand starting at position 2339 of SEQ ID NO: 1884812
guagguuucugucuccgca

SEQ ID NO: 2293835 - RNA, 19 nt, Artificial Sequence
  Description of Artificial Sequence: Synthetic oligonucleotide
  Antisense strand to SEQ ID NO: 2293834
ugcggagacagaaaccuac

SEQ ID NO: 2293836 - RNA, 19 nt, Artificial Sequence
  Description of Artificial Sequence: Synthetic oligonucleotide
  Sense strand starting at position 2381 of SEQ ID NO: 1884812
acagccuguccgcggaauu

SEQ ID NO: 2293837 - RNA, 19 nt, Artificial Sequence
  Description of Artificial Sequence: Synthetic oligonucleotide
  Antisense strand to SEQ ID NO: 2293836
aauuccgcggacaggcugu

SEQ ID NO: 2293838 - RNA, 19 nt, Artificial Sequence
  Description of Artificial Sequence: Synthetic oligonucleotide
  Sense strand starting at position 2392 of SEQ ID NO: 1884812
gcggaauucugccugccca

SEQ ID NO: 2293839 - RNA, 19 nt, Artificial Sequence
  Description of Artificial Sequence: Synthetic oligonucleotide
  Antisense strand to SEQ ID NO: 2293838
ugggcaggcagaauuccgc

SEQ ID NO: 2293840 - RNA, 19 nt, Artificial Sequence
  Description of Artificial Sequence: Synthetic oligonucleotide
  Sense strand starting at position 2421 of SEQ ID NO: 1884812
cguggacuguuucuuauac

SEQ ID NO: 2293841 - RNA, 19 nt, Artificial Sequence
  Description of Artificial Sequence: Synthetic oligonucleotide
  Antisense strand to SEQ ID NO: 2293840
guauaagaaacaguccacg

SEQ ID NO: 2293842 - RNA, 19 nt, Artificial Sequence
  Description of Artificial Sequence: Synthetic oligonucleotide
  Sense strand starting at position 2422 of SEQ ID NO: 1884812
guggacuguuucuuauaca

SEQ ID NO: 2293843 - RNA, 19 nt, Artificial Sequence
  Description of Artificial Sequence: Synthetic oligonucleotide
  Antisense strand to SEQ ID NO: 2293842
uguauaagaaacaguccac

SEQ ID NO: 2293844 - RNA, 19 nt, Artificial Sequence
  Description of Artificial Sequence: Synthetic oligonucleotide
  Sense strand starting at position 2423 of SEQ ID NO: 1884812
uggacuguuucuuauacaa

SEQ ID NO: 2293845 - RNA, 19 nt, Artificial Sequence
  Description of Artificial Sequence: Synthetic oligonucleotide
  Antisense strand to SEQ ID NO: 2293844
uuguauaagaaacagucca

SEQ ID NO: 2293846 - RNA, 19 nt, Artificial Sequence
  Description of Artificial Sequence: Synthetic oligonucleotide
  Sense strand starting at position 2550 of SEQ ID NO: 1884812
gagugaugaccagacguga

SEQ ID NO: 2293847 - RNA, 19 nt, Artificial Sequence
  Description of Artificial Sequence: Synthetic oligonucleotide
  Antisense strand to SEQ ID NO: 2293846
ucacgucuggucaucacuc

SEQ ID NO: 2293848 - RNA, 19 nt, Artificial Sequence
  Description of Artificial Sequence: Synthetic oligonucleotide
  Sense strand starting at position 2564 of SEQ ID NO: 1884812
cgugaaugcuuccugugcu

SEQ ID NO: 2293849 - RNA, 19 nt, Artificial Sequence
  Description of Artificial Sequence: Synthetic oligonucleotide
  Antisense strand to SEQ ID NO: 2293848
agcacaggaagcauucacg

SEQ ID NO: 2293850 - RNA, 19 nt, Artificial Sequence
  Description of Artificial Sequence: Synthetic oligonucleotide
  Sense strand starting at position 2757 of SEQ ID NO: 1884812
ccgggucucuuuguaaaug

SEQ ID NO: 2293851 - RNA, 19 nt, Artificial Sequence
  Description of Artificial Sequence: Synthetic oligonucleotide
  Antisense strand to SEQ ID NO: 2293850
cauuuacaaagagacccgg

SEQ ID NO: 2293852 - RNA, 19 nt, Artificial Sequence
  Description of Artificial Sequence: Synthetic oligonucleotide
  Sense strand starting at position 2765 of SEQ ID NO: 1884812
cuuuguaaaugaguccaga

SEQ ID NO: 2293853 - RNA, 19 nt, Artificial Sequence
  Description of Artificial Sequence: Synthetic oligonucleotide
  Antisense strand to SEQ ID NO: 2293852
ucuggacucauuuacaaag

SEQ ID NO: 2293854 - RNA, 19 nt, Artificial Sequence
  Description of Artificial Sequence: Synthetic oligonucleotide
  Sense strand starting at position 2797 of SEQ ID NO: 1884812
auggcagcuuauucuuaua

SEQ ID NO: 2293855 - RNA, 19 nt, Artificial Sequence
  Description of Artificial Sequence: Synthetic oligonucleotide
  Antisense strand to SEQ ID NO: 2293854
uauaagaauaagcugccau

SEQ ID NO: 2293856 - RNA, 19 nt, Artificial Sequence
  Description of Artificial Sequence: Synthetic oligonucleotide
  Sense strand starting at position 2799 of SEQ ID NO: 1884812
ggcagcuuauucuuauaua

SEQ ID NO: 2293857 - RNA, 19 nt, Artificial Sequence
  Description of Artificial Sequence: Synthetic oligonucleotide
  Antisense strand to SEQ ID NO: 2293856
uauauaagaauaagcugcc

SEQ ID NO: 2293858 - RNA, 19 nt, Artificial Sequence
  Description of Artificial Sequence: Synthetic oligonucleotide
  Sense strand starting at position 2942 of SEQ ID NO: 1884812
acaguuaacaccgauacgu

SEQ ID NO: 2293859 - RNA, 19 nt, Artificial Sequence
  Description of Artificial Sequence: Synthetic oligonucleotide
  Antisense strand to SEQ ID NO: 2293858
acguaucgguguuaacugu

SEQ ID NO: 2293860 - RNA, 19 nt, Artificial Sequence
  Description of Artificial Sequence: Synthetic oligonucleotide
  Sense strand starting at position 2944 of SEQ ID NO: 1884812
aguuaacaccgauacguga

SEQ ID NO: 2293861 - RNA, 19 nt, Artificial Sequence
  Description of Artificial Sequence: Synthetic oligonucleotide
  Antisense strand to SEQ ID NO: 2293860
ucacguaucgguguuaacu

SEQ ID NO: 2293862 - RNA, 19 nt, Artificial Sequence
  Description of Artificial Sequence: Synthetic oligonucleotide
  Sense strand starting at position 2948 of SEQ ID NO: 1884812
aacaccgauacgugaugua

SEQ ID NO: 2293863 - RNA, 19 nt, Artificial Sequence
  Description of Artificial Sequence: Synthetic oligonucleotide
  Antisense strand to SEQ ID NO: 2293862
uacaucacguaucgguguu

SEQ ID NO: 2293864 - RNA, 19 nt, Artificial Sequence
  Description of Artificial Sequence: Synthetic oligonucleotide
  Sense strand starting at position 2953 of SEQ ID NO: 1884812
cgauacgugauguaauguu

SEQ ID NO: 2293865 - RNA, 19 nt, Artificial Sequence
  Description of Artificial Sequence: Synthetic oligonucleotide
  Antisense strand to SEQ ID NO: 2293864
aacauuacaucacguaucg

SEQ ID NO: 2293866 - RNA, 19 nt, Artificial Sequence
  Description of Artificial Sequence: Synthetic oligonucleotide
  Sense strand starting at position 3102 of SEQ ID NO: 1884812
ugucauuacugccuagaac

SEQ ID NO: 2293867 - RNA, 19 nt, Artificial Sequence
  Description of Artificial Sequence: Synthetic oligonucleotide
  Antisense strand to SEQ ID NO: 2293866
guucuaggcaguaaugaca

SEQ ID NO: 2293868 - RNA, 19 nt, Artificial Sequence
  Description of Artificial Sequence: Synthetic oligonucleotide
  Sense strand starting at position 3103 of SEQ ID NO: 1884812
gucauuacugccuagaaca

SEQ ID NO: 2293869 - RNA, 19 nt, Artificial Sequence
  Description of Artificial Sequence: Synthetic oligonucleotide
  Antisense strand to SEQ ID NO: 2293868
uguucuaggcaguaaugac

SEQ ID NO: 2293870 - RNA, 19 nt, Artificial Sequence
  Description of Artificial Sequence: Synthetic oligonucleotide
  Sense strand starting at position 3111 of SEQ ID NO: 1884812
ugccuagaacaaugaugaa

SEQ ID NO: 2293871 - RNA, 19 nt, Artificial Sequence
  Description of Artificial Sequence: Synthetic oligonucleotide
  Antisense strand to SEQ ID NO: 2293870
uucaucauuguucuaggca

SEQ ID NO: 2293872 - RNA, 19 nt, Artificial Sequence
  Description of Artificial Sequence: Synthetic oligonucleotide
  Sense strand starting at position 3161 of SEQ ID NO: 1884812
agcuauugucaugguuuag

SEQ ID NO: 2293873 - RNA, 19 nt, Artificial Sequence
  Description of Artificial Sequence: Synthetic oligonucleotide
  Antisense strand to SEQ ID NO: 2293872
cuaaaccaugacaauagcu

SEQ ID NO: 2293874 - RNA, 19 nt, Artificial Sequence
  Description of Artificial Sequence: Synthetic oligonucleotide
  Sense strand starting at position 3181 of SEQ ID NO: 1884812
cggucuuuccggagccagu

SEQ ID NO: 2293875 - RNA, 19 nt, Artificial Sequence
  Description of Artificial Sequence: Synthetic oligonucleotide
  Antisense strand to SEQ ID NO: 2293874
acuggcuccggaaagaccg

SEQ ID NO: 2293876 - RNA, 19 nt, Artificial Sequence
  Description of Artificial Sequence: Synthetic oligonucleotide
  Sense strand starting at position 3207 of SEQ ID NO: 1884812
agccuaaauccuggcuuua

SEQ ID NO: 2293877 - RNA, 19 nt, Artificial Sequence
  Description of Artificial Sequence: Synthetic oligonucleotide
  Antisense strand to SEQ ID NO: 2293876
uaaagccaggauuuaggcu

SEQ ID NO: 2293878 - RNA, 19 nt, Artificial Sequence
  Description of Artificial Sequence: Synthetic oligonucleotide
  Sense strand starting at position 3219 of SEQ ID NO: 1884812
ggcuuuaccacugagcagu

SEQ ID NO: 2293879 - RNA, 19 nt, Artificial Sequence
  Description of Artificial Sequence: Synthetic oligonucleotide
  Antisense strand to SEQ ID NO: 2293878
acugcucagugguaaagcc

SEQ ID NO: 2293880 - RNA, 19 nt, Artificial Sequence
  Description of Artificial Sequence: Synthetic oligonucleotide
  Sense strand starting at position 3232 of SEQ ID NO: 1884812
agcagugaccuuugauaag

SEQ ID NO: 2293881 - RNA, 19 nt, Artificial Sequence
  Description of Artificial Sequence: Synthetic oligonucleotide
  Antisense strand to SEQ ID NO: 2293880
cuuaucaaaggucacugcu

SEQ ID NO: 2293882 - RNA, 19 nt, Artificial Sequence
  Description of Artificial Sequence: Synthetic oligonucleotide
  Sense strand starting at position 3235 of SEQ ID NO: 1884812
agugaccuuugauaaguua

SEQ ID NO: 2293883 - RNA, 19 nt, Artificial Sequence
  Description of Artificial Sequence: Synthetic oligonucleotide
  Antisense strand to SEQ ID NO: 2293882
uaacuuaucaaaggucacu

SEQ ID NO: 2293884 - RNA, 19 nt, Artificial Sequence
  Description of Artificial Sequence: Synthetic oligonucleotide
  Sense strand starting at position 3368 of SEQ ID NO: 1884812
acgagauguuccuggaaug

SEQ ID NO: 2293885 - RNA, 19 nt, Artificial Sequence
  Description of Artificial Sequence: Synthetic oligonucleotide
  Antisense strand to SEQ ID NO: 2293884
cauuccaggaacaucucgu

SEQ ID NO: 2293886 - RNA, 19 nt, Artificial Sequence
  Description of Artificial Sequence: Synthetic oligonucleotide
  Sense strand starting at position 3369 of SEQ ID NO: 1884812
cgagauguuccuggaauga

SEQ ID NO: 2293887 - RNA, 19 nt, Artificial Sequence
  Description of Artificial Sequence: Synthetic oligonucleotide
  Antisense strand to SEQ ID NO: 2293886
ucauuccaggaacaucucg

SEQ ID NO: 2293888 - RNA, 19 nt, Artificial Sequence
  Description of Artificial Sequence: Synthetic oligonucleotide
  Sense strand starting at position 3380 of SEQ ID NO: 1884812
uggaaugaguucuguaaac

SEQ ID NO: 2293889 - RNA, 19 nt, Artificial Sequence
  Description of Artificial Sequence: Synthetic oligonucleotide
  Antisense strand to SEQ ID NO: 2293888
guuuacagaacucauucca

SEQ ID NO: 2293890 - RNA, 19 nt, Artificial Sequence
  Description of Artificial Sequence: Synthetic oligonucleotide
  Sense strand starting at position 3925 of SEQ ID NO: 1884812
uccucuucccucugaguca

SEQ ID NO: 2293891 - RNA, 19 nt, Artificial Sequence
  Description of Artificial Sequence: Synthetic oligonucleotide
  Antisense strand to SEQ ID NO: 2293890
ugacucagagggaagagga

SEQ ID NO: 2293892 - RNA, 19 nt, Artificial Sequence
  Description of Artificial Sequence: Synthetic oligonucleotide
  Sense strand starting at position 3956 of SEQ ID NO: 1884812
augagugaaguucgaccau

SEQ ID NO: 2293893 - RNA, 19 nt, Artificial Sequence
  Description of Artificial Sequence: Synthetic oligonucleotide
  Antisense strand to SEQ ID NO: 2293892
auggucgaacuucacucau

SEQ ID NO: 2293894 - RNA, 19 nt, Artificial Sequence
  Description of Artificial Sequence: Synthetic oligonucleotide
  Sense strand starting at position 16 of SEQ ID NO: 1884813
agguguuucagguagaagg

SEQ ID NO: 2293895 - RNA, 19 nt, Artificial Sequence
  Description of Artificial Sequence: Synthetic oligonucleotide
  Antisense strand to SEQ ID NO: 2293894
ccuucuaccugaaacaccu

SEQ ID NO: 2293896 - RNA, 19 nt, Artificial Sequence
  Description of Artificial Sequence: Synthetic oligonucleotide
  Sense strand starting at position 18 of SEQ ID NO: 1884813
guguuucagguagaaggaa

SEQ ID NO: 2293897 - RNA, 19 nt, Artificial Sequence
  Description of Artificial Sequence: Synthetic oligonucleotide
  Antisense strand to SEQ ID NO: 2293896
uuccuucuaccugaaacac

SEQ ID NO: 2293898 - RNA, 19 nt, Artificial Sequence
  Description of Artificial Sequence: Synthetic oligonucleotide
  Sense strand starting at position 116 of SEQ ID NO: 1884813
gauggucuguuuccaugau

SEQ ID NO: 2293899 - RNA, 19 nt, Artificial Sequence
  Description of Artificial Sequence: Synthetic oligonucleotide
  Antisense strand to SEQ ID NO: 2293898
aucauggaaacagaccauc

SEQ ID NO: 2293900 - RNA, 19 nt, Artificial Sequence
  Description of Artificial Sequence: Synthetic oligonucleotide
  Sense strand starting at position 120 of SEQ ID NO: 1884813
gucuguuuccaugauguga

SEQ ID NO: 2293901 - RNA, 19 nt, Artificial Sequence
  Description of Artificial Sequence: Synthetic oligonucleotide
  Antisense strand to SEQ ID NO: 2293900
ucacaucauggaaacagac

SEQ ID NO: 2293902 - RNA, 19 nt, Artificial Sequence
  Description of Artificial Sequence: Synthetic oligonucleotide
  Sense strand starting at position 180 of SEQ ID NO: 1884813
gaaagugaugacugcaguu

SEQ ID NO: 2293903 - RNA, 19 nt, Artificial Sequence
  Description of Artificial Sequence: Synthetic oligonucleotide
  Antisense strand to SEQ ID NO: 2293902
aacugcagucaucacuuuc

SEQ ID NO: 2293904 - RNA, 19 nt, Artificial Sequence
  Description of Artificial Sequence: Synthetic oligonucleotide
  Sense strand starting at position 373 of SEQ ID NO: 1884813
uggaaugggugacuucaua

SEQ ID NO: 2293905 - RNA, 19 nt, Artificial Sequence
  Description of Artificial Sequence: Synthetic oligonucleotide
  Antisense strand to SEQ ID NO: 2293904
uaugaagucacccauucca

SEQ ID NO: 2293906 - RNA, 19 nt, Artificial Sequence
  Description of Artificial Sequence: Synthetic oligonucleotide
  Sense strand starting at position 414 of SEQ ID NO: 1884813
gagaacucaguuuggccaa

SEQ ID NO: 2293907 - RNA, 19 nt, Artificial Sequence
  Description of Artificial Sequence: Synthetic oligonucleotide
  Antisense strand to SEQ ID NO: 2293906
uuggccaaacugaguucuc

SEQ ID NO: 2293908 - RNA, 19 nt, Artificial Sequence
  Description of Artificial Sequence: Synthetic oligonucleotide
  Sense strand starting at position 421 of SEQ ID NO: 1884813
caguuuggccaagagaagu

SEQ ID NO: 2293909 - RNA, 19 nt, Artificial Sequence
  Description of Artificial Sequence: Synthetic oligonucleotide
  Antisense strand to SEQ ID NO: 2293908
acuucucuuggccaaacug

SEQ ID NO: 2293910 - RNA, 19 nt, Artificial Sequence
  Description of Artificial Sequence: Synthetic oligonucleotide
  Sense strand starting at position 452 of SEQ ID NO: 1884813
uugguaaucacguaacagu

SEQ ID NO: 2293911 - RNA, 19 nt, Artificial Sequence
  Description of Artificial Sequence: Synthetic oligonucleotide
  Antisense strand to SEQ ID NO: 2293910
acuguuacgugauuaccaa

SEQ ID NO: 2293912 - RNA, 19 nt, Artificial Sequence
  Description of Artificial Sequence: Synthetic oligonucleotide
  Sense strand starting at position 919 of SEQ ID NO: 1884813
aggccauacggcuaguaaa

SEQ ID NO: 2293913 - RNA, 19 nt, Artificial Sequence
  Description of Artificial Sequence: Synthetic oligonucleotide
  Antisense strand to SEQ ID NO: 2293912
uuuacuagccguauggccu

SEQ ID NO: 2293914 - RNA, 19 nt, Artificial Sequence
  Description of Artificial Sequence: Synthetic oligonucleotide
  Sense strand starting at position 1193 of SEQ ID NO: 1884813
gggucccuauccucuuaaa

SEQ ID NO: 2293915 - RNA, 19 nt, Artificial Sequence
  Description of Artificial Sequence: Synthetic oligonucleotide
  Antisense strand to SEQ ID NO: 2293914
uuuaagaggauagggaccc

SEQ ID NO: 2293916 - RNA, 19 nt, Artificial Sequence
  Description of Artificial Sequence: Synthetic oligonucleotide
  Sense strand starting at position 1289 of SEQ ID NO: 1884813
gcauguacuguccauaaag

SEQ ID NO: 2293917 - RNA, 19 nt, Artificial Sequence
  Description of Artificial Sequence: Synthetic oligonucleotide
  Antisense strand to SEQ ID NO: 2293916
cuuuauggacaguacaugc

SEQ ID NO: 2293918 - RNA, 19 nt, Artificial Sequence
  Description of Artificial Sequence: Synthetic oligonucleotide
  Sense strand starting at position 1291 of SEQ ID NO: 1884813
auguacuguccauaaaguu

SEQ ID NO: 2293919 - RNA, 19 nt, Artificial Sequence
  Description of Artificial Sequence: Synthetic oligonucleotide
  Antisense strand to SEQ ID NO: 2293918
aacuuuauggacaguacau

SEQ ID NO: 2293920 - RNA, 19 nt, Artificial Sequence
  Description of Artificial Sequence: Synthetic oligonucleotide
  Sense strand starting at position 1331 of SEQ ID NO: 1884813
aggagaacaguccgaguuu

SEQ ID NO: 2293921 - RNA, 19 nt, Artificial Sequence
  Description of Artificial Sequence: Synthetic oligonucleotide
  Antisense strand to SEQ ID NO: 2293920
aaacucggacuguucuccu

SEQ ID NO: 2293922 - RNA, 19 nt, Artificial Sequence
  Description of Artificial Sequence: Synthetic oligonucleotide
  Sense strand starting at position 1368 of SEQ ID NO: 1884813
gggcauugucuggacugaa

SEQ ID NO: 2293923 - RNA, 19 nt, Artificial Sequence
  Description of Artificial Sequence: Synthetic oligonucleotide
  Antisense strand to SEQ ID NO: 2293922
uucaguccagacaaugccc

SEQ ID NO: 2293924 - RNA, 19 nt, Artificial Sequence
  Description of Artificial Sequence: Synthetic oligonucleotide
  Sense strand starting at position 1371 of SEQ ID NO: 1884813
cauugucuggacugaagga

SEQ ID NO: 2293925 - RNA, 19 nt, Artificial Sequence
  Description of Artificial Sequence: Synthetic oligonucleotide
  Antisense strand to SEQ ID NO: 2293924
uccuucaguccagacaaug

SEQ ID NO: 2293926 - RNA, 19 nt, Artificial Sequence
  Description of Artificial Sequence: Synthetic oligonucleotide
  Sense strand starting at position 1387 of SEQ ID NO: 1884813
ggacaagggucaguugaau

SEQ ID NO: 2293927 - RNA, 19 nt, Artificial Sequence
  Description of Artificial Sequence: Synthetic oligonucleotide
  Antisense strand to SEQ ID NO: 2293926
auucaacugacccuugucc

SEQ ID NO: 2293928 - RNA, 19 nt, Artificial Sequence
  Description of Artificial Sequence: Synthetic oligonucleotide
  Sense strand starting at position 1396 of SEQ ID NO: 1884813
ucaguugaauugccaaaga

SEQ ID NO: 2293929 - RNA, 19 nt, Artificial Sequence
  Description of Artificial Sequence: Synthetic oligonucleotide
  Antisense strand to SEQ ID NO: 2293928
ucuuuggcaauucaacuga

SEQ ID NO: 2293930 - RNA, 19 nt, Artificial Sequence
  Description of Artificial Sequence: Synthetic oligonucleotide
  Sense strand starting at position 1407 of SEQ ID NO: 1884813
gccaaagagcucugagacu

SEQ ID NO: 2293931 - RNA, 19 nt, Artificial Sequence
  Description of Artificial Sequence: Synthetic oligonucleotide
  Antisense strand to SEQ ID NO: 2293930
agucucagagcucuuuggc

SEQ ID NO: 2293932 - RNA, 19 nt, Artificial Sequence
  Description of Artificial Sequence: Synthetic oligonucleotide
  Sense strand starting at position 1520 of SEQ ID NO: 1884813
guaggagagaauugugaua

SEQ ID NO: 2293933 - RNA, 19 nt, Artificial Sequence
  Description of Artificial Sequence: Synthetic oligonucleotide
  Antisense strand to SEQ ID NO: 2293932
uaucacaauucucuccuac

SEQ ID NO: 2293934 - RNA, 19 nt, Artificial Sequence
  Description of Artificial Sequence: Synthetic oligonucleotide
  Sense strand starting at position 1648 of SEQ ID NO: 1884813
cuaccagcucaggauaguu

SEQ ID NO: 2293935 - RNA, 19 nt, Artificial Sequence
  Description of Artificial Sequence: Synthetic oligonucleotide
  Antisense strand to SEQ ID NO: 2293934
aacuauccugagcugguag

SEQ ID NO: 2293936 - RNA, 19 nt, Artificial Sequence
  Description of Artificial Sequence: Synthetic oligonucleotide
  Sense strand starting at position 1650 of SEQ ID NO: 1884813
accagcucaggauaguuaa

SEQ ID NO: 2293937 - RNA, 19 nt, Artificial Sequence
  Description of Artificial Sequence: Synthetic oligonucleotide
  Antisense strand to SEQ ID NO: 2293936
uuaacuauccugagcuggu

SEQ ID NO: 2293938 - RNA, 19 nt, Artificial Sequence
  Description of Artificial Sequence: Synthetic oligonucleotide
  Sense strand starting at position 1653 of SEQ ID NO: 1884813
agcucaggauaguuaaauu

SEQ ID NO: 2293939 - RNA, 19 nt, Artificial Sequence
  Description of Artificial Sequence: Synthetic oligonucleotide
  Antisense strand to SEQ ID NO: 2293938
aauuuaacuauccugagcu

SEQ ID NO: 2293940 - RNA, 19 nt, Artificial Sequence
  Description of Artificial Sequence: Synthetic oligonucleotide
  Sense strand starting at position 1734 of SEQ ID NO: 1884813
ggcaguugucaugauuaaa

SEQ ID NO: 2293941 - RNA, 19 nt, Artificial Sequence
  Description of Artificial Sequence: Synthetic oligonucleotide
  Antisense strand to SEQ ID NO: 2293940
uuuaaucaugacaacugcc

SEQ ID NO: 2293942 - RNA, 19 nt, Artificial Sequence
  Description of Artificial Sequence: Synthetic oligonucleotide
  Sense strand starting at position 1767 of SEQ ID NO: 1884813
agaaguuauuguguaacag

SEQ ID NO: 2293943 - RNA, 19 nt, Artificial Sequence
  Description of Artificial Sequence: Synthetic oligonucleotide
  Antisense strand to SEQ ID NO: 2293942
cuguuacacaauaacuucu

SEQ ID NO: 2293944 - RNA, 19 nt, Artificial Sequence
  Description of Artificial Sequence: Synthetic oligonucleotide
  Sense strand starting at position 1768 of SEQ ID NO: 1884813
gaaguuauuguguaacagg

SEQ ID NO: 2293945 - RNA, 19 nt, Artificial Sequence
  Description of Artificial Sequence: Synthetic oligonucleotide
  Antisense strand to SEQ ID NO: 2293944
ccuguuacacaauaacuuc

SEQ ID NO: 2293946 - RNA, 19 nt, Artificial Sequence
  Description of Artificial Sequence: Synthetic oligonucleotide
  Sense strand starting at position 1795 of SEQ ID NO: 1884813
uuagauagcguccaaucua

SEQ ID NO: 2293947 - RNA, 19 nt, Artificial Sequence
  Description of Artificial Sequence: Synthetic oligonucleotide
  Antisense strand to SEQ ID NO: 2293946
uagauuggacgcuaucuaa

SEQ ID NO: 2293948 - RNA, 19 nt, Artificial Sequence
  Description of Artificial Sequence: Synthetic oligonucleotide
  Sense strand starting at position 1864 of SEQ ID NO: 1884813
uuaguacauccauacgaga

SEQ ID NO: 2293949 - RNA, 19 nt, Artificial Sequence
  Description of Artificial Sequence: Synthetic oligonucleotide
  Antisense strand to SEQ ID NO: 2293948
ucucguauggauguacuaa

SEQ ID NO: 2293950 - RNA, 19 nt, Artificial Sequence
  Description of Artificial Sequence: Synthetic oligonucleotide
  Sense strand starting at position 1866 of SEQ ID NO: 1884813
aguacauccauacgagaag

SEQ ID NO: 2293951 - RNA, 19 nt, Artificial Sequence
  Description of Artificial Sequence: Synthetic oligonucleotide
  Antisense strand to SEQ ID NO: 2293950
cuucucguauggauguacu

SEQ ID NO: 2293952 - RNA, 19 nt, Artificial Sequence
  Description of Artificial Sequence: Synthetic oligonucleotide
  Sense strand starting at position 2046 of SEQ ID NO: 1884813
gacggauuguuacucuauc

SEQ ID NO: 2293953 - RNA, 19 nt, Artificial Sequence
  Description of Artificial Sequence: Synthetic oligonucleotide
  Antisense strand to SEQ ID NO: 2293952
gauagaguaacaauccguc

SEQ ID NO: 2293954 - RNA, 19 nt, Artificial Sequence
  Description of Artificial Sequence: Synthetic oligonucleotide
  Sense strand starting at position 2478 of SEQ ID NO: 1884813
gauuauaggugcccacuga

SEQ ID NO: 2293955 - RNA, 19 nt, Artificial Sequence
  Description of Artificial Sequence: Synthetic oligonucleotide
  Antisense strand to SEQ ID NO: 2293954
ucagugggcaccuauaauc

SEQ ID NO: 2293956 - RNA, 19 nt, Artificial Sequence
  Description of Artificial Sequence: Synthetic oligonucleotide
  Sense strand starting at position 2708 of SEQ ID NO: 1884813
ucuuauuugcagugacucu

SEQ ID NO: 2293957 - RNA, 19 nt, Artificial Sequence
  Description of Artificial Sequence: Synthetic oligonucleotide
  Antisense strand to SEQ ID NO: 2293956
agagucacugcaaauaaga

SEQ ID NO: 2293958 - RNA, 19 nt, Artificial Sequence
  Description of Artificial Sequence: Synthetic oligonucleotide
  Sense strand starting at position 2749 of SEQ ID NO: 1884813
auuccugaccucgaguuaa

SEQ ID NO: 2293959 - RNA, 19 nt, Artificial Sequence
  Description of Artificial Sequence: Synthetic oligonucleotide
  Antisense strand to SEQ ID NO: 2293958
uuaacucgaggucaggaau

SEQ ID NO: 2293960 - RNA, 19 nt, Artificial Sequence
  Description of Artificial Sequence: Synthetic oligonucleotide
  Sense strand starting at position 2827 of SEQ ID NO: 1884813
guguaccuaucucuuuaga

SEQ ID NO: 2293961 - RNA, 19 nt, Artificial Sequence
  Description of Artificial Sequence: Synthetic oligonucleotide
  Antisense strand to SEQ ID NO: 2293960
ucuaaagagauagguacac

SEQ ID NO: 2293962 - RNA, 19 nt, Artificial Sequence
  Description of Artificial Sequence: Synthetic oligonucleotide
  Sense strand starting at position 2829 of SEQ ID NO: 1884813
guaccuaucucuuuagacu

SEQ ID NO: 2293963 - RNA, 19 nt, Artificial Sequence
  Description of Artificial Sequence: Synthetic oligonucleotide
  Antisense strand to SEQ ID NO: 2293962
agucuaaagagauagguac

SEQ ID NO: 2293964 - RNA, 19 nt, Artificial Sequence
  Description of Artificial Sequence: Synthetic oligonucleotide
  Sense strand starting at position 2945 of SEQ ID NO: 1884813
agcaguuaaugaguuuaca

SEQ ID NO: 2293965 - RNA, 19 nt, Artificial Sequence
  Description of Artificial Sequence: Synthetic oligonucleotide
  Antisense strand to SEQ ID NO: 2293964
uguaaacucauuaacugcu

SEQ ID NO: 2293966 - RNA, 19 nt, Artificial Sequence
  Description of Artificial Sequence: Synthetic oligonucleotide
  Sense strand starting at position 3112 of SEQ ID NO: 1884813
uuagccuggacuugagaau

SEQ ID NO: 2293967 - RNA, 19 nt, Artificial Sequence
  Description of Artificial Sequence: Synthetic oligonucleotide
  Antisense strand to SEQ ID NO: 2293966
auucucaaguccaggcuaa

SEQ ID NO: 2293968 - RNA, 19 nt, Artificial Sequence
  Description of Artificial Sequence: Synthetic oligonucleotide
  Sense strand starting at position 3692 of SEQ ID NO: 1884813
uuguucuuggagugaaaua

SEQ ID NO: 2293969 - RNA, 19 nt, Artificial Sequence
  Description of Artificial Sequence: Synthetic oligonucleotide
  Antisense strand to SEQ ID NO: 2293968
uauuucacuccaagaacaa

SEQ ID NO: 2293970 - RNA, 19 nt, Artificial Sequence
  Description of Artificial Sequence: Synthetic oligonucleotide
  Sense strand starting at position 3693 of SEQ ID NO: 1884813
uguucuuggagugaaauac

SEQ ID NO: 2293971 - RNA, 19 nt, Artificial Sequence
  Description of Artificial Sequence: Synthetic oligonucleotide
  Antisense strand to SEQ ID NO: 2293970
guauuucacuccaagaaca

SEQ ID NO: 2293972 - RNA, 19 nt, Artificial Sequence
  Description of Artificial Sequence: Synthetic oligonucleotide
  Sense strand starting at position 3711 of SEQ ID NO: 1884813
cauuacuggccaggugaga

SEQ ID NO: 2293973 - RNA, 19 nt, Artificial Sequence
  Description of Artificial Sequence: Synthetic oligonucleotide
  Antisense strand to SEQ ID NO: 2293972
ucucaccuggccaguaaug

SEQ ID NO: 2293974 - RNA, 19 nt, Artificial Sequence
  Description of Artificial Sequence: Synthetic oligonucleotide
  Sense strand starting at position 252 of SEQ ID NO: 1884814
gggauaucugcggaggacu

SEQ ID NO: 2293975 - RNA, 19 nt, Artificial Sequence
  Description of Artificial Sequence: Synthetic oligonucleotide
  Antisense strand to SEQ ID NO: 2293974
aguccuccgcagauauccc

SEQ ID NO: 2293976 - RNA, 19 nt, Artificial Sequence
  Description of Artificial Sequence: Synthetic oligonucleotide
  Sense strand starting at position 254 of SEQ ID NO: 1884814
gauaucugcggaggacuua

SEQ ID NO: 2293977 - RNA, 19 nt, Artificial Sequence
  Description of Artificial Sequence: Synthetic oligonucleotide
  Antisense strand to SEQ ID NO: 2293976
uaaguccuccgcagauauc

SEQ ID NO: 2293978 - RNA, 19 nt, Artificial Sequence
  Description of Artificial Sequence: Synthetic oligonucleotide
  Sense strand starting at position 509 of SEQ ID NO: 1884814
uuaccuuucugauugagag

SEQ ID NO: 2293979 - RNA, 19 nt, Artificial Sequence
  Description of Artificial Sequence: Synthetic oligonucleotide
  Antisense strand to SEQ ID NO: 2293978
cucucaaucagaaagguaa

SEQ ID NO: 2293980 - RNA, 19 nt, Artificial Sequence
  Description of Artificial Sequence: Synthetic oligonucleotide
  Sense strand starting at position 524 of SEQ ID NO: 1884814
agagcaccuccgggauauu

SEQ ID NO: 2293981 - RNA, 19 nt, Artificial Sequence
  Description of Artificial Sequence: Synthetic oligonucleotide
  Antisense strand to SEQ ID NO: 2293980
aauaucccggaggugcucu

SEQ ID NO: 2293982 - RNA, 19 nt, Artificial Sequence
  Description of Artificial Sequence: Synthetic oligonucleotide
  Sense strand starting at position 525 of SEQ ID NO: 1884814
gagcaccuccgggauauua

SEQ ID NO: 2293983 - RNA, 19 nt, Artificial Sequence
  Description of Artificial Sequence: Synthetic oligonucleotide
  Antisense strand to SEQ ID NO: 2293982
uaauaucccggaggugcuc

SEQ ID NO: 2293984 - RNA, 19 nt, Artificial Sequence
  Description of Artificial Sequence: Synthetic oligonucleotide
  Sense strand starting at position 664 of SEQ ID NO: 1884814
ggaagaggauuugauuauu

SEQ ID NO: 2293985 - RNA, 19 nt, Artificial Sequence
  Description of Artificial Sequence: Synthetic oligonucleotide
  Antisense strand to SEQ ID NO: 2293984
aauaaucaaauccucuucc

SEQ ID NO: 2293986 - RNA, 19 nt, Artificial Sequence
  Description of Artificial Sequence: Synthetic oligonucleotide
  Sense strand starting at position 686 of SEQ ID NO: 1884814
ggugauguuaaaugauccu

SEQ ID NO: 2293987 - RNA, 19 nt, Artificial Sequence
  Description of Artificial Sequence: Synthetic oligonucleotide
  Antisense strand to SEQ ID NO: 2293986
aggaucauuuaacaucacc

SEQ ID NO: 2293988 - RNA, 19 nt, Artificial Sequence
  Description of Artificial Sequence: Synthetic oligonucleotide
  Sense strand starting at position 754 of SEQ ID NO: 1884814
gccauagacguuuaaucug

SEQ ID NO: 2293989 - RNA, 19 nt, Artificial Sequence
  Description of Artificial Sequence: Synthetic oligonucleotide
  Antisense strand to SEQ ID NO: 2293988
cagauuaaacgucuauggc

SEQ ID NO: 2293990 - RNA, 19 nt, Artificial Sequence
  Description of Artificial Sequence: Synthetic oligonucleotide
  Sense strand starting at position 763 of SEQ ID NO: 1884814
guuuaaucugggcaaagug

SEQ ID NO: 2293991 - RNA, 19 nt, Artificial Sequence
  Description of Artificial Sequence: Synthetic oligonucleotide
  Antisense strand to SEQ ID NO: 2293990
cacuuugcccagauuaaac

SEQ ID NO: 2293992 - RNA, 19 nt, Artificial Sequence
  Description of Artificial Sequence: Synthetic oligonucleotide
  Sense strand starting at position 862 of SEQ ID NO: 1884814
uuuggcaguaucuagaguu

SEQ ID NO: 2293993 - RNA, 19 nt, Artificial Sequence
  Description of Artificial Sequence: Synthetic oligonucleotide
  Antisense strand to SEQ ID NO: 2293992
aacucuagauacugccaaa

SEQ ID NO: 2293994 - RNA, 19 nt, Artificial Sequence
  Description of Artificial Sequence: Synthetic oligonucleotide
  Sense strand starting at position 872 of SEQ ID NO: 1884814
ucuagaguucgguggauag

SEQ ID NO: 2293995 - RNA, 19 nt, Artificial Sequence
  Description of Artificial Sequence: Synthetic oligonucleotide
  Antisense strand to SEQ ID NO: 2293994
cuauccaccgaacucuaga

SEQ ID NO: 2293996 - RNA, 19 nt, Artificial Sequence
  Description of Artificial Sequence: Synthetic oligonucleotide
  Sense strand starting at position 874 of SEQ ID NO: 1884814
uagaguucgguggauagua

SEQ ID NO: 2293997 - RNA, 19 nt, Artificial Sequence
  Description of Artificial Sequence: Synthetic oligonucleotide
  Antisense strand to SEQ ID NO: 2293996
uacuauccaccgaacucua

SEQ ID NO: 2293998 - RNA, 19 nt, Artificial Sequence
  Description of Artificial Sequence: Synthetic oligonucleotide
  Sense strand starting at position 876 of SEQ ID NO: 1884814
gaguucgguggauaguauu

SEQ ID NO: 2293999 - RNA, 19 nt, Artificial Sequence
  Description of Artificial Sequence: Synthetic oligonucleotide
  Antisense strand to SEQ ID NO: 2293998
aauacuauccaccgaacuc

SEQ ID NO: 2294000 - RNA, 19 nt, Artificial Sequence
  Description of Artificial Sequence: Synthetic oligonucleotide
  Sense strand starting at position 1114 of SEQ ID NO: 1884814
gccagacaaccuggugaaa

SEQ ID NO: 2294001 - RNA, 19 nt, Artificial Sequence
  Description of Artificial Sequence: Synthetic oligonucleotide
  Antisense strand to SEQ ID NO: 2294000
uuucaccagguugucuggc

SEQ ID NO: 2294002 - RNA, 19 nt, Artificial Sequence
  Description of Artificial Sequence: Synthetic oligonucleotide
  Sense strand starting at position 1136 of SEQ ID NO: 1884814
gaggcugaggugugauuca

SEQ ID NO: 2294003 - RNA, 19 nt, Artificial Sequence
  Description of Artificial Sequence: Synthetic oligonucleotide
  Antisense strand to SEQ ID NO: 2294002
ugaaucacaccucagccuc

SEQ ID NO: 2294004 - RNA, 19 nt, Artificial Sequence
  Description of Artificial Sequence: Synthetic oligonucleotide
  Sense strand starting at position 1176 of SEQ ID NO: 1884814
ggaguaagccugggaaggu

SEQ ID NO: 2294005 - RNA, 19 nt, Artificial Sequence
  Description of Artificial Sequence: Synthetic oligonucleotide
  Antisense strand to SEQ ID NO: 2294004
accuucccaggcuuacucc

SEQ ID NO: 2294006 - RNA, 19 nt, Artificial Sequence
  Description of Artificial Sequence: Synthetic oligonucleotide
  Sense strand starting at position 1258 of SEQ ID NO: 1884814
accagaugaucugcuugga

SEQ ID NO: 2294007 - RNA, 19 nt, Artificial Sequence
  Description of Artificial Sequence: Synthetic oligonucleotide
  Antisense strand to SEQ ID NO: 2294006
uccaagcagaucaucuggu

SEQ ID NO: 2294008 - RNA, 19 nt, Artificial Sequence
  Description of Artificial Sequence: Synthetic oligonucleotide
  Sense strand starting at position 1267 of SEQ ID NO: 1884814
ucugcuuggaagggauaua

SEQ ID NO: 2294009 - RNA, 19 nt, Artificial Sequence
  Description of Artificial Sequence: Synthetic oligonucleotide
  Antisense strand to SEQ ID NO: 2294008
uauaucccuuccaagcaga

SEQ ID NO: 2294010 - RNA, 19 nt, Artificial Sequence
  Description of Artificial Sequence: Synthetic oligonucleotide
  Sense strand starting at position 1296 of SEQ ID NO: 1884814
gcggaugcaaguuaauaaa

SEQ ID NO: 2294011 - RNA, 19 nt, Artificial Sequence
  Description of Artificial Sequence: Synthetic oligonucleotide
  Antisense strand to SEQ ID NO: 2294010
uuuauuaacuugcauccgc

SEQ ID NO: 2294012 - RNA, 19 nt, Artificial Sequence
  Description of Artificial Sequence: Synthetic oligonucleotide
  Sense strand starting at position 1485 of SEQ ID NO: 1884814
gcuccaagaguguacacaa

SEQ ID NO: 2294013 - RNA, 19 nt, Artificial Sequence
  Description of Artificial Sequence: Synthetic oligonucleotide
  Antisense strand to SEQ ID NO: 2294012
uuguguacacucuuggagc

SEQ ID NO: 2294014 - RNA, 19 nt, Artificial Sequence
  Description of Artificial Sequence: Synthetic oligonucleotide
  Sense strand starting at position 1618 of SEQ ID NO: 1884814
cgauccauacccggagaua

SEQ ID NO: 2294015 - RNA, 19 nt, Artificial Sequence
  Description of Artificial Sequence: Synthetic oligonucleotide
  Antisense strand to SEQ ID NO: 2294014
uaucuccggguauggaucg

SEQ ID NO: 2294016 - RNA, 19 nt, Artificial Sequence
  Description of Artificial Sequence: Synthetic oligonucleotide
  Sense strand starting at position 1645 of SEQ ID NO: 1884814
gacaauagauggcuguuua

SEQ ID NO: 2294017 - RNA, 19 nt, Artificial Sequence
  Description of Artificial Sequence: Synthetic oligonucleotide
  Antisense strand to SEQ ID NO: 2294016
uaaacagccaucuauuguc

SEQ ID NO: 2294018 - RNA, 19 nt, Artificial Sequence
  Description of Artificial Sequence: Synthetic oligonucleotide
  Sense strand starting at position 1646 of SEQ ID NO: 1884814
acaauagauggcuguuuau

SEQ ID NO: 2294019 - RNA, 19 nt, Artificial Sequence
  Description of Artificial Sequence: Synthetic oligonucleotide
  Antisense strand to SEQ ID NO: 2294018
auaaacagccaucuauugu

SEQ ID NO: 2294020 - RNA, 19 nt, Artificial Sequence
  Description of Artificial Sequence: Synthetic oligonucleotide
  Sense strand starting at position 1710 of SEQ ID NO: 1884814
cgaaucuuccuguaacuca

SEQ ID NO: 2294021 - RNA, 19 nt, Artificial Sequence
  Description of Artificial Sequence: Synthetic oligonucleotide
  Antisense strand to SEQ ID NO: 2294020
ugaguuacaggaagauucg

SEQ ID NO: 2294022 - RNA, 19 nt, Artificial Sequence
  Description of Artificial Sequence: Synthetic oligonucleotide
  Sense strand starting at position 1795 of SEQ ID NO: 1884814
cuuguaaauccugagcaga

SEQ ID NO: 2294023 - RNA, 19 nt, Artificial Sequence
  Description of Artificial Sequence: Synthetic oligonucleotide
  Antisense strand to SEQ ID NO: 2294022
ucugcucaggauuuacaag

SEQ ID NO: 2294024 - RNA, 19 nt, Artificial Sequence
  Description of Artificial Sequence: Synthetic oligonucleotide
  Sense strand starting at position 1797 of SEQ ID NO: 1884814
uguaaauccugagcagaag

SEQ ID NO: 2294025 - RNA, 19 nt, Artificial Sequence
  Description of Artificial Sequence: Synthetic oligonucleotide
  Antisense strand to SEQ ID NO: 2294024
cuucugcucaggauuuaca

SEQ ID NO: 2294026 - RNA, 19 nt, Artificial Sequence
  Description of Artificial Sequence: Synthetic oligonucleotide
  Sense strand starting at position 1954 of SEQ ID NO: 1884814
uccggaaaucagggcagaa

SEQ ID NO: 2294027 - RNA, 19 nt, Artificial Sequence
  Description of Artificial Sequence: Synthetic oligonucleotide
  Antisense strand to SEQ ID NO: 2294026
uucugcccugauuuccgga

SEQ ID NO: 2294028 - RNA, 19 nt, Artificial Sequence
  Description of Artificial Sequence: Synthetic oligonucleotide
  Sense strand starting at position 2190 of SEQ ID NO: 1884814
gcaucugaucgcuaauaaa

SEQ ID NO: 2294029 - RNA, 19 nt, Artificial Sequence
  Description of Artificial Sequence: Synthetic oligonucleotide
  Antisense strand to SEQ ID NO: 2294028
uuuauuagcgaucagaugc

SEQ ID NO: 2294030 - RNA, 19 nt, Artificial Sequence
  Description of Artificial Sequence: Synthetic oligonucleotide
  Sense strand starting at position 2203 of SEQ ID NO: 1884814
aauaaagaguugcugaagu

SEQ ID NO: 2294031 - RNA, 19 nt, Artificial Sequence
  Description of Artificial Sequence: Synthetic oligonucleotide
  Antisense strand to SEQ ID NO: 2294030
acuucagcaacucuuuauu

SEQ ID NO: 2294032 - RNA, 19 nt, Artificial Sequence
  Description of Artificial Sequence: Synthetic oligonucleotide
  Sense strand starting at position 2205 of SEQ ID NO: 1884814
uaaagaguugcugaaguug

SEQ ID NO: 2294033 - RNA, 19 nt, Artificial Sequence
  Description of Artificial Sequence: Synthetic oligonucleotide
  Antisense strand to SEQ ID NO: 2294032
caacuucagcaacucuuua

SEQ ID NO: 2294034 - RNA, 19 nt, Artificial Sequence
  Description of Artificial Sequence: Synthetic oligonucleotide
  Sense strand starting at position 2213 of SEQ ID NO: 1884814
ugcugaaguugaucucaua

SEQ ID NO: 2294035 - RNA, 19 nt, Artificial Sequence
  Description of Artificial Sequence: Synthetic oligonucleotide
  Antisense strand to SEQ ID NO: 2294034
uaugagaucaacuucagca

SEQ ID NO: 2294036 - RNA, 19 nt, Artificial Sequence
  Description of Artificial Sequence: Synthetic oligonucleotide
  Sense strand starting at position 2238 of SEQ ID NO: 1884814
ccgcgagcucacuuugauc

SEQ ID NO: 2294037 - RNA, 19 nt, Artificial Sequence
  Description of Artificial Sequence: Synthetic oligonucleotide
  Antisense strand to SEQ ID NO: 2294036
gaucaaagugagcucgcgg

SEQ ID NO: 2294038 - RNA, 19 nt, Artificial Sequence
  Description of Artificial Sequence: Synthetic oligonucleotide
  Sense strand starting at position 2554 of SEQ ID NO: 1884814
gcuagcauccugggacaau

SEQ ID NO: 2294039 - RNA, 19 nt, Artificial Sequence
  Description of Artificial Sequence: Synthetic oligonucleotide
  Antisense strand to SEQ ID NO: 2294038
auugucccaggaugcuagc

SEQ ID NO: 2294040 - RNA, 19 nt, Artificial Sequence
  Description of Artificial Sequence: Synthetic oligonucleotide
  Sense strand starting at position 2854 of SEQ ID NO: 1884814
auugcaggcagugauauua

SEQ ID NO: 2294041 - RNA, 19 nt, Artificial Sequence
  Description of Artificial Sequence: Synthetic oligonucleotide
  Antisense strand to SEQ ID NO: 2294040
uaauaucacugccugcaau

SEQ ID NO: 2294042 - RNA, 19 nt, Artificial Sequence
  Description of Artificial Sequence: Synthetic oligonucleotide
  Sense strand starting at position 3214 of SEQ ID NO: 1884814
gguagaauuuaggagacac

SEQ ID NO: 2294043 - RNA, 19 nt, Artificial Sequence
  Description of Artificial Sequence: Synthetic oligonucleotide
  Antisense strand to SEQ ID NO: 2294042
gugucuccuaaauucuacc

SEQ ID NO: 2294044 - RNA, 19 nt, Artificial Sequence
  Description of Artificial Sequence: Synthetic oligonucleotide
  Sense strand starting at position 3284 of SEQ ID NO: 1884814
uggagucugccuuaacuuu

SEQ ID NO: 2294045 - RNA, 19 nt, Artificial Sequence
  Description of Artificial Sequence: Synthetic oligonucleotide
  Antisense strand to SEQ ID NO: 2294044
aaaguuaaggcagacucca

SEQ ID NO: 2294046 - RNA, 19 nt, Artificial Sequence
  Description of Artificial Sequence: Synthetic oligonucleotide
  Sense strand starting at position 3416 of SEQ ID NO: 1884814
ugcagagaauuucagguga

SEQ ID NO: 2294047 - RNA, 19 nt, Artificial Sequence
  Description of Artificial Sequence: Synthetic oligonucleotide
  Antisense strand to SEQ ID NO: 2294046
ucaccugaaauucucugca

SEQ ID NO: 2294048 - RNA, 19 nt, Artificial Sequence
  Description of Artificial Sequence: Synthetic oligonucleotide
  Sense strand starting at position 3688 of SEQ ID NO: 1884814
ccaguaaaugucuagcuga

SEQ ID NO: 2294049 - RNA, 19 nt, Artificial Sequence
  Description of Artificial Sequence: Synthetic oligonucleotide
  Antisense strand to SEQ ID NO: 2294048
ucagcuagacauuuacugg

SEQ ID NO: 2294050 - RNA, 19 nt, Artificial Sequence
  Description of Artificial Sequence: Synthetic oligonucleotide
  Sense strand starting at position 3855 of SEQ ID NO: 1884814
ccagaagucucuguuggga

SEQ ID NO: 2294051 - RNA, 19 nt, Artificial Sequence
  Description of Artificial Sequence: Synthetic oligonucleotide
  Antisense strand to SEQ ID NO: 2294050
ucccaacagagacuucugg

SEQ ID NO: 2294052 - RNA, 19 nt, Artificial Sequence
  Description of Artificial Sequence: Synthetic oligonucleotide
  Sense strand starting at position 3879 of SEQ ID NO: 1884814
cagcguuuccuagacauca

SEQ ID NO: 2294053 - RNA, 19 nt, Artificial Sequence
  Description of Artificial Sequence: Synthetic oligonucleotide
  Antisense strand to SEQ ID NO: 2294052
ugaugucuaggaaacgcug

SEQ ID NO: 2294054 - RNA, 19 nt, Artificial Sequence
  Description of Artificial Sequence: Synthetic oligonucleotide
  Sense strand starting at position 68 of SEQ ID NO: 1884816
aaaccaaucgccugaacgu

SEQ ID NO: 2294055 - RNA, 19 nt, Artificial Sequence
  Description of Artificial Sequence: Synthetic oligonucleotide
  Antisense strand to SEQ ID NO: 2294054
acguucaggcgauugguuu

SEQ ID NO: 2294056 - RNA, 19 nt, Artificial Sequence
  Description of Artificial Sequence: Synthetic oligonucleotide
  Sense strand starting at position 122 of SEQ ID NO: 1884816
cugcgaagugcuccgaacu

SEQ ID NO: 2294057 - RNA, 19 nt, Artificial Sequence
  Description of Artificial Sequence: Synthetic oligonucleotide
  Antisense strand to SEQ ID NO: 2294056
aguucggagcacuucgcag

SEQ ID NO: 2294058 - RNA, 19 nt, Artificial Sequence
  Description of Artificial Sequence: Synthetic oligonucleotide
  Sense strand starting at position 128 of SEQ ID NO: 1884816
agugcuccgaacugauaua

SEQ ID NO: 2294059 - RNA, 19 nt, Artificial Sequence
  Description of Artificial Sequence: Synthetic oligonucleotide
  Antisense strand to SEQ ID NO: 2294058
uauaucaguucggagcacu

SEQ ID NO: 2294060 - RNA, 19 nt, Artificial Sequence
  Description of Artificial Sequence: Synthetic oligonucleotide
  Sense strand starting at position 129 of SEQ ID NO: 1884816
gugcuccgaacugauauau

SEQ ID NO: 2294061 - RNA, 19 nt, Artificial Sequence
  Description of Artificial Sequence: Synthetic oligonucleotide
  Antisense strand to SEQ ID NO: 2294060
auauaucaguucggagcac

SEQ ID NO: 2294062 - RNA, 19 nt, Artificial Sequence
  Description of Artificial Sequence: Synthetic oligonucleotide
  Sense strand starting at position 162 of SEQ ID NO: 1884816
uggaucacgugcucagaga

SEQ ID NO: 2294063 - RNA, 19 nt, Artificial Sequence
  Description of Artificial Sequence: Synthetic oligonucleotide
  Antisense strand to SEQ ID NO: 2294062
ucucugagcacgugaucca

SEQ ID NO: 2294064 - RNA, 19 nt, Artificial Sequence
  Description of Artificial Sequence: Synthetic oligonucleotide
  Sense strand starting at position 1237 of SEQ ID NO: 1884816
ucucccucggucugugaaa

SEQ ID NO: 2294065 - RNA, 19 nt, Artificial Sequence
  Description of Artificial Sequence: Synthetic oligonucleotide
  Antisense strand to SEQ ID NO: 2294064
uuucacagaccgagggaga

SEQ ID NO: 2294066 - RNA, 19 nt, Artificial Sequence
  Description of Artificial Sequence: Synthetic oligonucleotide
  Sense strand starting at position 1238 of SEQ ID NO: 1884816
cucccucggucugugaaau

SEQ ID NO: 2294067 - RNA, 19 nt, Artificial Sequence
  Description of Artificial Sequence: Synthetic oligonucleotide
  Antisense strand to SEQ ID NO: 2294066
auuucacagaccgagggag

SEQ ID NO: 2294068 - RNA, 19 nt, Artificial Sequence
  Description of Artificial Sequence: Synthetic oligonucleotide
  Sense strand starting at position 1239 of SEQ ID NO: 1884816
ucccucggucugugaaauu

SEQ ID NO: 2294069 - RNA, 19 nt, Artificial Sequence
  Description of Artificial Sequence: Synthetic oligonucleotide
  Antisense strand to SEQ ID NO: 2294068
aauuucacagaccgaggga

SEQ ID NO: 2294070 - RNA, 19 nt, Artificial Sequence
  Description of Artificial Sequence: Synthetic oligonucleotide
  Sense strand starting at position 1267 of SEQ ID NO: 1884816
gcaaccauugcgggcgaua

SEQ ID NO: 2294071 - RNA, 19 nt, Artificial Sequence
  Description of Artificial Sequence: Synthetic oligonucleotide
  Antisense strand to SEQ ID NO: 2294070
uaucgcccgcaaugguugc

SEQ ID NO: 2294072 - RNA, 19 nt, Artificial Sequence
  Description of Artificial Sequence: Synthetic oligonucleotide
  Sense strand starting at position 1269 of SEQ ID NO: 1884816
aaccauugcgggcgauauu

SEQ ID NO: 2294073 - RNA, 19 nt, Artificial Sequence
  Description of Artificial Sequence: Synthetic oligonucleotide
  Antisense strand to SEQ ID NO: 2294072
aauaucgcccgcaaugguu

SEQ ID NO: 2294074 - RNA, 19 nt, Artificial Sequence
  Description of Artificial Sequence: Synthetic oligonucleotide
  Sense strand starting at position 1270 of SEQ ID NO: 1884816
accauugcgggcgauauua

SEQ ID NO: 2294075 - RNA, 19 nt, Artificial Sequence
  Description of Artificial Sequence: Synthetic oligonucleotide
  Antisense strand to SEQ ID NO: 2294074
uaauaucgcccgcaauggu

SEQ ID NO: 2294076 - RNA, 19 nt, Artificial Sequence
  Description of Artificial Sequence: Synthetic oligonucleotide
  Sense strand starting at position 1278 of SEQ ID NO: 1884816
gggcgauauuaacuuugau

SEQ ID NO: 2294077 - RNA, 19 nt, Artificial Sequence
  Description of Artificial Sequence: Synthetic oligonucleotide
  Antisense strand to SEQ ID NO: 2294076
aucaaaguuaauaucgccc

SEQ ID NO: 2294078 - RNA, 19 nt, Artificial Sequence
  Description of Artificial Sequence: Synthetic oligonucleotide
  Sense strand starting at position 1281 of SEQ ID NO: 1884816
cgauauuaacuuugaucgu

SEQ ID NO: 2294079 - RNA, 19 nt, Artificial Sequence
  Description of Artificial Sequence: Synthetic oligonucleotide
  Antisense strand to SEQ ID NO: 2294078
acgaucaaaguuaauaucg

SEQ ID NO: 2294080 - RNA, 19 nt, Artificial Sequence
  Description of Artificial Sequence: Synthetic oligonucleotide
  Sense strand starting at position 1284 of SEQ ID NO: 1884816
uauuaacuuugaucgugaa

SEQ ID NO: 2294081 - RNA, 19 nt, Artificial Sequence
  Description of Artificial Sequence: Synthetic oligonucleotide
  Antisense strand to SEQ ID NO: 2294080
uucacgaucaaaguuaaua

SEQ ID NO: 2294082 - RNA, 19 nt, Artificial Sequence
  Description of Artificial Sequence: Synthetic oligonucleotide
  Sense strand starting at position 1285 of SEQ ID NO: 1884816
auuaacuuugaucgugaac

SEQ ID NO: 2294083 - RNA, 19 nt, Artificial Sequence
  Description of Artificial Sequence: Synthetic oligonucleotide
  Antisense strand to SEQ ID NO: 2294082
guucacgaucaaaguuaau

SEQ ID NO: 2294084 - RNA, 19 nt, Artificial Sequence
  Description of Artificial Sequence: Synthetic oligonucleotide
  Sense strand starting at position 1288 of SEQ ID NO: 1884816
aacuuugaucgugaacuua

SEQ ID NO: 2294085 - RNA, 19 nt, Artificial Sequence
  Description of Artificial Sequence: Synthetic oligonucleotide
  Antisense strand to SEQ ID NO: 2294084
uaaguucacgaucaaaguu

SEQ ID NO: 2294086 - RNA, 19 nt, Artificial Sequence
  Description of Artificial Sequence: Synthetic oligonucleotide
  Sense strand starting at position 1308 of SEQ ID NO: 1884816
aggagcauuuaaggaagua

SEQ ID NO: 2294087 - RNA, 19 nt, Artificial Sequence
  Description of Artificial Sequence: Synthetic oligonucleotide
  Antisense strand to SEQ ID NO: 2294086
uacuuccuuaaaugcuccu

SEQ ID NO: 2294088 - RNA, 19 nt, Artificial Sequence
  Description of Artificial Sequence: Synthetic oligonucleotide
  Sense strand starting at position 1481 of SEQ ID NO: 1884816
ccgcuaugauccuucuuaa

SEQ ID NO: 2294089 - RNA, 19 nt, Artificial Sequence
  Description of Artificial Sequence: Synthetic oligonucleotide
  Antisense strand to SEQ ID NO: 2294088
uuaagaaggaucauagcgg

SEQ ID NO: 2294090 - RNA, 19 nt, Artificial Sequence
  Description of Artificial Sequence: Synthetic oligonucleotide
  Sense strand starting at position 1655 of SEQ ID NO: 1884816
gccuuagugcuugccuaga

SEQ ID NO: 2294091 - RNA, 19 nt, Artificial Sequence
  Description of Artificial Sequence: Synthetic oligonucleotide
  Antisense strand to SEQ ID NO: 2294090
ucuaggcaagcacuaaggc

SEQ ID NO: 2294092 - RNA, 19 nt, Artificial Sequence
  Description of Artificial Sequence: Synthetic oligonucleotide
  Sense strand starting at position 1657 of SEQ ID NO: 1884816
cuuagugcuugccuagaac

SEQ ID NO: 2294093 - RNA, 19 nt, Artificial Sequence
  Description of Artificial Sequence: Synthetic oligonucleotide
  Antisense strand to SEQ ID NO: 2294092
guucuaggcaagcacuaag

SEQ ID NO: 2294094 - RNA, 19 nt, Artificial Sequence
  Description of Artificial Sequence: Synthetic oligonucleotide
  Sense strand starting at position 1779 of SEQ ID NO: 1884816
ccgacugcucucgccagau

SEQ ID NO: 2294095 - RNA, 19 nt, Artificial Sequence
  Description of Artificial Sequence: Synthetic oligonucleotide
  Antisense strand to SEQ ID NO: 2294094
aucuggcgagagcagucgg

SEQ ID NO: 2294096 - RNA, 19 nt, Artificial Sequence
  Description of Artificial Sequence: Synthetic oligonucleotide
  Sense strand starting at position 1781 of SEQ ID NO: 1884816
gacugcucucgccagauuu

SEQ ID NO: 2294097 - RNA, 19 nt, Artificial Sequence
  Description of Artificial Sequence: Synthetic oligonucleotide
  Antisense strand to SEQ ID NO: 2294096
aaaucuggcgagagcaguc

SEQ ID NO: 2294098 - RNA, 19 nt, Artificial Sequence
  Description of Artificial Sequence: Synthetic oligonucleotide
  Sense strand starting at position 1978 of SEQ ID NO: 1884816
cgcggcucucgccugagaa

SEQ ID NO: 2294099 - RNA, 19 nt, Artificial Sequence
  Description of Artificial Sequence: Synthetic oligonucleotide
  Antisense strand to SEQ ID NO: 2294098
uucucaggcgagagccgcg

SEQ ID NO: 2294100 - RNA, 19 nt, Artificial Sequence
  Description of Artificial Sequence: Synthetic oligonucleotide
  Sense strand starting at position 1979 of SEQ ID NO: 1884816
gcggcucucgccugagaac

SEQ ID NO: 2294101 - RNA, 19 nt, Artificial Sequence
  Description of Artificial Sequence: Synthetic oligonucleotide
  Antisense strand to SEQ ID NO: 2294100
guucucaggcgagagccgc

SEQ ID NO: 2294102 - RNA, 19 nt, Artificial Sequence
  Description of Artificial Sequence: Synthetic oligonucleotide
  Sense strand starting at position 1980 of SEQ ID NO: 1884816
cggcucucgccugagaacu

SEQ ID NO: 2294103 - RNA, 19 nt, Artificial Sequence
  Description of Artificial Sequence: Synthetic oligonucleotide
  Antisense strand to SEQ ID NO: 2294102
aguucucaggcgagagccg

SEQ ID NO: 2294104 - RNA, 19 nt, Artificial Sequence
  Description of Artificial Sequence: Synthetic oligonucleotide
  Sense strand starting at position 3591 of SEQ ID NO: 1884816
gugagauaggccggugcua

SEQ ID NO: 2294105 - RNA, 19 nt, Artificial Sequence
  Description of Artificial Sequence: Synthetic oligonucleotide
  Antisense strand to SEQ ID NO: 2294104
uagcaccggccuaucucac

SEQ ID NO: 2294106 - RNA, 19 nt, Artificial Sequence
  Description of Artificial Sequence: Synthetic oligonucleotide
  Sense strand starting at position 3652 of SEQ ID NO: 1884816
gccguagucuccucacauu

SEQ ID NO: 2294107 - RNA, 19 nt, Artificial Sequence
  Description of Artificial Sequence: Synthetic oligonucleotide
  Antisense strand to SEQ ID NO: 2294106
aaugugaggagacuacggc

SEQ ID NO: 2294108 - RNA, 19 nt, Artificial Sequence
  Description of Artificial Sequence: Synthetic oligonucleotide
  Sense strand starting at position 3724 of SEQ ID NO: 1884816
gcucgagcuguguccaaac

SEQ ID NO: 2294109 - RNA, 19 nt, Artificial Sequence
  Description of Artificial Sequence: Synthetic oligonucleotide
  Antisense strand to SEQ ID NO: 2294108
guuuggacacagcucgagc

SEQ ID NO: 2294110 - RNA, 19 nt, Artificial Sequence
  Description of Artificial Sequence: Synthetic oligonucleotide
  Sense strand starting at position 3751 of SEQ ID NO: 1884816
acggcuuucuguuuaagua

SEQ ID NO: 2294111 - RNA, 19 nt, Artificial Sequence
  Description of Artificial Sequence: Synthetic oligonucleotide
  Antisense strand to SEQ ID NO: 2294110
uacuuaaacagaaagccgu

SEQ ID NO: 2294112 - RNA, 19 nt, Artificial Sequence
  Description of Artificial Sequence: Synthetic oligonucleotide
  Sense strand starting at position 3752 of SEQ ID NO: 1884816
cggcuuucuguuuaaguac

SEQ ID NO: 2294113 - RNA, 19 nt, Artificial Sequence
  Description of Artificial Sequence: Synthetic oligonucleotide
  Antisense strand to SEQ ID NO: 2294112
guacuuaaacagaaagccg

SEQ ID NO: 2294114 - RNA, 19 nt, Artificial Sequence
  Description of Artificial Sequence: Synthetic oligonucleotide
  Sense strand starting at position 3771 of SEQ ID NO: 1884816
acguuuguuguggaguuaa

SEQ ID NO: 2294115 - RNA, 19 nt, Artificial Sequence
  Description of Artificial Sequence: Synthetic oligonucleotide
  Antisense strand to SEQ ID NO: 2294114
uuaacuccacaacaaacgu

SEQ ID NO: 2294116 - RNA, 19 nt, Artificial Sequence
  Description of Artificial Sequence: Synthetic oligonucleotide
  Sense strand starting at position 3781 of SEQ ID NO: 1884816
uggaguuaauuguaaccau

SEQ ID NO: 2294117 - RNA, 19 nt, Artificial Sequence
  Description of Artificial Sequence: Synthetic oligonucleotide
  Antisense strand to SEQ ID NO: 2294116
augguuacaauuaacucca

SEQ ID NO: 2294118 - RNA, 19 nt, Artificial Sequence
  Description of Artificial Sequence: Synthetic oligonucleotide
  Sense strand starting at position 3790 of SEQ ID NO: 1884816
uuguaaccaucaucgaauu

SEQ ID NO: 2294119 - RNA, 19 nt, Artificial Sequence
  Description of Artificial Sequence: Synthetic oligonucleotide
  Antisense strand to SEQ ID NO: 2294118
aauucgaugaugguuacaa

SEQ ID NO: 2294120 - RNA, 19 nt, Artificial Sequence
  Description of Artificial Sequence: Synthetic oligonucleotide
  Sense strand starting at position 3847 of SEQ ID NO: 1884816
gccagaugucuccgucugu

SEQ ID NO: 2294121 - RNA, 19 nt, Artificial Sequence
  Description of Artificial Sequence: Synthetic oligonucleotide
  Antisense strand to SEQ ID NO: 2294120
acagacggagacaucuggc

SEQ ID NO: 2294122 - RNA, 19 nt, Artificial Sequence
  Description of Artificial Sequence: Synthetic oligonucleotide
  Sense strand starting at position 3858 of SEQ ID NO: 1884816
ccgucugucgcaguuaaau

SEQ ID NO: 2294123 - RNA, 19 nt, Artificial Sequence
  Description of Artificial Sequence: Synthetic oligonucleotide
  Antisense strand to SEQ ID NO: 2294122
auuuaacugcgacagacgg

SEQ ID NO: 2294124 - RNA, 19 nt, Artificial Sequence
  Description of Artificial Sequence: Synthetic oligonucleotide
  Sense strand starting at position 3860 of SEQ ID NO: 1884816
gucugucgcaguuaaaugu

SEQ ID NO: 2294125 - RNA, 19 nt, Artificial Sequence
  Description of Artificial Sequence: Synthetic oligonucleotide
  Antisense strand to SEQ ID NO: 2294124
acauuuaacugcgacagac

SEQ ID NO: 2294126 - RNA, 19 nt, Artificial Sequence
  Description of Artificial Sequence: Synthetic oligonucleotide
  Sense strand starting at position 3867 of SEQ ID NO: 1884816
gcaguuaaauguguagugu

SEQ ID NO: 2294127 - RNA, 19 nt, Artificial Sequence
  Description of Artificial Sequence: Synthetic oligonucleotide
  Antisense strand to SEQ ID NO: 2294126
acacuacacauuuaacugc

SEQ ID NO: 2294128 - RNA, 19 nt, Artificial Sequence
  Description of Artificial Sequence: Synthetic oligonucleotide
  Sense strand starting at position 3875 of SEQ ID NO: 1884816
auguguaguguggagguua

SEQ ID NO: 2294129 - RNA, 19 nt, Artificial Sequence
  Description of Artificial Sequence: Synthetic oligonucleotide
  Antisense strand to SEQ ID NO: 2294128
uaaccuccacacuacacau

SEQ ID NO: 2294130 - RNA, 19 nt, Artificial Sequence
  Description of Artificial Sequence: Synthetic oligonucleotide
  Sense strand starting at position 3914 of SEQ ID NO: 1884816
cuaggagaaaucuguauug

SEQ ID NO: 2294131 - RNA, 19 nt, Artificial Sequence
  Description of Artificial Sequence: Synthetic oligonucleotide
  Antisense strand to SEQ ID NO: 2294130
caauacagauuucuccuag

SEQ ID NO: 2294132 - RNA, 19 nt, Artificial Sequence
  Description of Artificial Sequence: Synthetic oligonucleotide
  Sense strand starting at position 3919 of SEQ ID NO: 1884816
agaaaucuguauuggaauu

SEQ ID NO: 2294133 - RNA, 19 nt, Artificial Sequence
  Description of Artificial Sequence: Synthetic oligonucleotide
  Antisense strand to SEQ ID NO: 2294132
aauuccaauacagauuucu

SEQ ID NO: 2294134 - RNA, 19 nt, Artificial Sequence
  Description of Artificial Sequence: Synthetic oligonucleotide
  Sense strand starting at position 94 of SEQ ID NO: 1884815
gggauaucugcggaggacu

SEQ ID NO: 2294135 - RNA, 19 nt, Artificial Sequence
  Description of Artificial Sequence: Synthetic oligonucleotide
  Antisense strand to SEQ ID NO: 2294134
aguccuccgcagauauccc

SEQ ID NO: 2294136 - RNA, 19 nt, Artificial Sequence
  Description of Artificial Sequence: Synthetic oligonucleotide
  Sense strand starting at position 96 of SEQ ID NO: 1884815
gauaucugcggaggacuua

SEQ ID NO: 2294137 - RNA, 19 nt, Artificial Sequence
  Description of Artificial Sequence: Synthetic oligonucleotide
  Antisense strand to SEQ ID NO: 2294136
uaaguccuccgcagauauc

SEQ ID NO: 2294138 - RNA, 19 nt, Artificial Sequence
  Description of Artificial Sequence: Synthetic oligonucleotide
  Sense strand starting at position 351 of SEQ ID NO: 1884815
uuaccuuucugauugagag

SEQ ID NO: 2294139 - RNA, 19 nt, Artificial Sequence
  Description of Artificial Sequence: Synthetic oligonucleotide
  Antisense strand to SEQ ID NO: 2294138
cucucaaucagaaagguaa

SEQ ID NO: 2294140 - RNA, 19 nt, Artificial Sequence
  Description of Artificial Sequence: Synthetic oligonucleotide
  Sense strand starting at position 366 of SEQ ID NO: 1884815
agagcaccuccgggauauu

SEQ ID NO: 2294141 - RNA, 19 nt, Artificial Sequence
  Description of Artificial Sequence: Synthetic oligonucleotide
  Antisense strand to SEQ ID NO: 2294140
aauaucccggaggugcucu

SEQ ID NO: 2294142 - RNA, 19 nt, Artificial Sequence
  Description of Artificial Sequence: Synthetic oligonucleotide
  Sense strand starting at position 367 of SEQ ID NO: 1884815
gagcaccuccgggauauua

SEQ ID NO: 2294143 - RNA, 19 nt, Artificial Sequence
  Description of Artificial Sequence: Synthetic oligonucleotide
  Antisense strand to SEQ ID NO: 2294142
uaauaucccggaggugcuc

SEQ ID NO: 2294144 - RNA, 19 nt, Artificial Sequence
  Description of Artificial Sequence: Synthetic oligonucleotide
  Sense strand starting at position 506 of SEQ ID NO: 1884815
ggaagaggauuugauuauu

SEQ ID NO: 2294145 - RNA, 19 nt, Artificial Sequence
  Description of Artificial Sequence: Synthetic oligonucleotide
  Antisense strand to SEQ ID NO: 2294144
aauaaucaaauccucuucc

SEQ ID NO: 2294146 - RNA, 19 nt, Artificial Sequence
  Description of Artificial Sequence: Synthetic oligonucleotide
  Sense strand starting at position 528 of SEQ ID NO: 1884815
ggugauguuaaaugauccu

SEQ ID NO: 2294147 - RNA, 19 nt, Artificial Sequence
  Description of Artificial Sequence: Synthetic oligonucleotide
  Antisense strand to SEQ ID NO: 2294146
aggaucauuuaacaucacc

SEQ ID NO: 2294148 - RNA, 19 nt, Artificial Sequence
  Description of Artificial Sequence: Synthetic oligonucleotide
  Sense strand starting at position 596 of SEQ ID NO: 1884815
gccauagacguuuaaucug

SEQ ID NO: 2294149 - RNA, 19 nt, Artificial Sequence
  Description of Artificial Sequence: Synthetic oligonucleotide
  Antisense strand to SEQ ID NO: 2294148
cagauuaaacgucuauggc

SEQ ID NO: 2294150 - RNA, 19 nt, Artificial Sequence
  Description of Artificial Sequence: Synthetic oligonucleotide
  Sense strand starting at position 605 of SEQ ID NO: 1884815
guuuaaucugggcaaagug

SEQ ID NO: 2294151 - RNA, 19 nt, Artificial Sequence
  Description of Artificial Sequence: Synthetic oligonucleotide
  Antisense strand to SEQ ID NO: 2294150
cacuuugcccagauuaaac

SEQ ID NO: 2294152 - RNA, 19 nt, Artificial Sequence
  Description of Artificial Sequence: Synthetic oligonucleotide
  Sense strand starting at position 704 of SEQ ID NO: 1884815
uuuggcaguaucuagaguu

SEQ ID NO: 2294153 - RNA, 19 nt, Artificial Sequence
  Description of Artificial Sequence: Synthetic oligonucleotide
  Antisense strand to SEQ ID NO: 2294152
aacucuagauacugccaaa

SEQ ID NO: 2294154 - RNA, 19 nt, Artificial Sequence
  Description of Artificial Sequence: Synthetic oligonucleotide
  Sense strand starting at position 716 of SEQ ID NO: 1884815
uagaguucgguggauagua

SEQ ID NO: 2294155 - RNA, 19 nt, Artificial Sequence
  Description of Artificial Sequence: Synthetic oligonucleotide
  Antisense strand to SEQ ID NO: 2294154
uacuauccaccgaacucua

SEQ ID NO: 2294156 - RNA, 19 nt, Artificial Sequence
  Description of Artificial Sequence: Synthetic oligonucleotide
  Sense strand starting at position 718 of SEQ ID NO: 1884815
gaguucgguggauaguauu

SEQ ID NO: 2294157 - RNA, 19 nt, Artificial Sequence
  Description of Artificial Sequence: Synthetic oligonucleotide
  Antisense strand to SEQ ID NO: 2294156
aauacuauccaccgaacuc

SEQ ID NO: 2294158 - RNA, 19 nt, Artificial Sequence
  Description of Artificial Sequence: Synthetic oligonucleotide
  Sense strand starting at position 956 of SEQ ID NO: 1884815
gccagacaaccuggugaaa

SEQ ID NO: 2294159 - RNA, 19 nt, Artificial Sequence
  Description of Artificial Sequence: Synthetic oligonucleotide
  Antisense strand to SEQ ID NO: 2294158
uuucaccagguugucuggc

SEQ ID NO: 2294160 - RNA, 19 nt, Artificial Sequence
  Description of Artificial Sequence: Synthetic oligonucleotide
  Sense strand starting at position 1018 of SEQ ID NO: 1884815
ggaguaagccugggaaggu

SEQ ID NO: 2294161 - RNA, 19 nt, Artificial Sequence
  Description of Artificial Sequence: Synthetic oligonucleotide
  Antisense strand to SEQ ID NO: 2294160
accuucccaggcuuacucc

SEQ ID NO: 2294162 - RNA, 19 nt, Artificial Sequence
  Description of Artificial Sequence: Synthetic oligonucleotide
  Sense strand starting at position 1100 of SEQ ID NO: 1884815
accagaugaucugcuugga

SEQ ID NO: 2294163 - RNA, 19 nt, Artificial Sequence
  Description of Artificial Sequence: Synthetic oligonucleotide
  Antisense strand to SEQ ID NO: 2294162
uccaagcagaucaucuggu

SEQ ID NO: 2294164 - RNA, 19 nt, Artificial Sequence
  Description of Artificial Sequence: Synthetic oligonucleotide
  Sense strand starting at position 1109 of SEQ ID NO: 1884815
ucugcuuggaagggauaua

SEQ ID NO: 2294165 - RNA, 19 nt, Artificial Sequence
  Description of Artificial Sequence: Synthetic oligonucleotide
  Antisense strand to SEQ ID NO: 2294164
uauaucccuuccaagcaga

SEQ ID NO: 2294166 - RNA, 19 nt, Artificial Sequence
  Description of Artificial Sequence: Synthetic oligonucleotide
  Sense strand starting at position 1138 of SEQ ID NO: 1884815
gcggaugcaaguuaauaaa

SEQ ID NO: 2294167 - RNA, 19 nt, Artificial Sequence
  Description of Artificial Sequence: Synthetic oligonucleotide
  Antisense strand to SEQ ID NO: 2294166
uuuauuaacuugcauccgc

SEQ ID NO: 2294168 - RNA, 19 nt, Artificial Sequence
  Description of Artificial Sequence: Synthetic oligonucleotide
  Sense strand starting at position 1327 of SEQ ID NO: 1884815
gcuccaagaguguacacaa

SEQ ID NO: 2294169 - RNA, 19 nt, Artificial Sequence
  Description of Artificial Sequence: Synthetic oligonucleotide
  Antisense strand to SEQ ID NO: 2294168
uuguguacacucuuggagc

SEQ ID NO: 2294170 - RNA, 19 nt, Artificial Sequence
  Description of Artificial Sequence: Synthetic oligonucleotide
  Sense strand starting at position 1460 of SEQ ID NO: 1884815
cgauccauacccggagaua

SEQ ID NO: 2294171 - RNA, 19 nt, Artificial Sequence
  Description of Artificial Sequence: Synthetic oligonucleotide
  Antisense strand to SEQ ID NO: 2294170
uaucuccggguauggaucg

SEQ ID NO: 2294172 - RNA, 19 nt, Artificial Sequence
  Description of Artificial Sequence: Synthetic oligonucleotide
  Sense strand starting at position 1487 of SEQ ID NO: 1884815
gacaauagauggcuguuua

SEQ ID NO: 2294173 - RNA, 19 nt, Artificial Sequence
  Description of Artificial Sequence: Synthetic oligonucleotide
  Antisense strand to SEQ ID NO: 2294172
uaaacagccaucuauuguc

SEQ ID NO: 2294174 - RNA, 19 nt, Artificial Sequence
  Description of Artificial Sequence: Synthetic oligonucleotide
  Sense strand starting at position 1488 of SEQ ID NO: 1884815
acaauagauggcuguuuau

SEQ ID NO: 2294175 - RNA, 19 nt, Artificial Sequence
  Description of Artificial Sequence: Synthetic oligonucleotide
  Antisense strand to SEQ ID NO: 2294174
auaaacagccaucuauugu

SEQ ID NO: 2294176 - RNA, 19 nt, Artificial Sequence
  Description of Artificial Sequence: Synthetic oligonucleotide
  Sense strand starting at position 1552 of SEQ ID NO: 1884815
cgaaucuuccuguaacuca

SEQ ID NO: 2294177 - RNA, 19 nt, Artificial Sequence
  Description of Artificial Sequence: Synthetic oligonucleotide
  Antisense strand to SEQ ID NO: 2294176
ugaguuacaggaagauucg

SEQ ID NO: 2294178 - RNA, 19 nt, Artificial Sequence
  Description of Artificial Sequence: Synthetic oligonucleotide
  Sense strand starting at position 1637 of SEQ ID NO: 1884815
cuuguaaauccugagcaga

SEQ ID NO: 2294179 - RNA, 19 nt, Artificial Sequence
  Description of Artificial Sequence: Synthetic oligonucleotide
  Antisense strand to SEQ ID NO: 2294178
ucugcucaggauuuacaag

SEQ ID NO: 2294180 - RNA, 19 nt, Artificial Sequence
  Description of Artificial Sequence: Synthetic oligonucleotide
  Sense strand starting at position 1639 of SEQ ID NO: 1884815
uguaaauccugagcagaag

SEQ ID NO: 2294181 - RNA, 19 nt, Artificial Sequence
  Description of Artificial Sequence: Synthetic oligonucleotide
  Antisense strand to SEQ ID NO: 2294180
cuucugcucaggauuuaca

SEQ ID NO: 2294182 - RNA, 19 nt, Artificial Sequence
  Description of Artificial Sequence: Synthetic oligonucleotide
  Sense strand starting at position 1796 of SEQ ID NO: 1884815
uccggaaaucagggcagaa

SEQ ID NO: 2294183 - RNA, 19 nt, Artificial Sequence
  Description of Artificial Sequence: Synthetic oligonucleotide
  Antisense strand to SEQ ID NO: 2294182
uucugcccugauuuccgga

SEQ ID NO: 2294184 - RNA, 19 nt, Artificial Sequence
  Description of Artificial Sequence: Synthetic oligonucleotide
  Sense strand starting at position 2032 of SEQ ID NO: 1884815
gcaucugaucgcuaauaaa

SEQ ID NO: 2294185 - RNA, 19 nt, Artificial Sequence
  Description of Artificial Sequence: Synthetic oligonucleotide
  Antisense strand to SEQ ID NO: 2294184
uuuauuagcgaucagaugc

SEQ ID NO: 2294186 - RNA, 19 nt, Artificial Sequence
  Description of Artificial Sequence: Synthetic oligonucleotide
  Sense strand starting at position 2045 of SEQ ID NO: 1884815
aauaaagaguugcugaagu

SEQ ID NO: 2294187 - RNA, 19 nt, Artificial Sequence
  Description of Artificial Sequence: Synthetic oligonucleotide
  Antisense strand to SEQ ID NO: 2294186
acuucagcaacucuuuauu

SEQ ID NO: 2294188 - RNA, 19 nt, Artificial Sequence
  Description of Artificial Sequence: Synthetic oligonucleotide
  Sense strand starting at position 2047 of SEQ ID NO: 1884815
uaaagaguugcugaaguug

SEQ ID NO: 2294189 - RNA, 19 nt, Artificial Sequence
  Description of Artificial Sequence: Synthetic oligonucleotide
  Antisense strand to SEQ ID NO: 2294188
caacuucagcaacucuuua

SEQ ID NO: 2294190 - RNA, 19 nt, Artificial Sequence
  Description of Artificial Sequence: Synthetic oligonucleotide
  Sense strand starting at position 2055 of SEQ ID NO: 1884815
ugcugaaguugaucucaua

SEQ ID NO: 2294191 - RNA, 19 nt, Artificial Sequence
  Description of Artificial Sequence: Synthetic oligonucleotide
  Antisense strand to SEQ ID NO: 2294190
uaugagaucaacuucagca

SEQ ID NO: 2294192 - RNA, 19 nt, Artificial Sequence
  Description of Artificial Sequence: Synthetic oligonucleotide
  Sense strand starting at position 2080 of SEQ ID NO: 1884815
ccgcgagcucacuuugauc

SEQ ID NO: 2294193 - RNA, 19 nt, Artificial Sequence
  Description of Artificial Sequence: Synthetic oligonucleotide
  Antisense strand to SEQ ID NO: 2294192
gaucaaagugagcucgcgg

SEQ ID NO: 2294194 - RNA, 19 nt, Artificial Sequence
  Description of Artificial Sequence: Synthetic oligonucleotide
  Sense strand starting at position 2696 of SEQ ID NO: 1884815
auugcaggcagugauauua

SEQ ID NO: 2294195 - RNA, 19 nt, Artificial Sequence
  Description of Artificial Sequence: Synthetic oligonucleotide
  Antisense strand to SEQ ID NO: 2294194
uaauaucacugccugcaau

SEQ ID NO: 2294196 - RNA, 19 nt, Artificial Sequence
  Description of Artificial Sequence: Synthetic oligonucleotide
  Sense strand starting at position 3056 of SEQ ID NO: 1884815
gguagaauuuaggagacac

SEQ ID NO: 2294197 - RNA, 19 nt, Artificial Sequence
  Description of Artificial Sequence: Synthetic oligonucleotide
  Antisense strand to SEQ ID NO: 2294196
gugucuccuaaauucuacc

SEQ ID NO: 2294198 - RNA, 19 nt, Artificial Sequence
  Description of Artificial Sequence: Synthetic oligonucleotide
  Sense strand starting at position 3126 of SEQ ID NO: 1884815
uggagucugccuuaacuuu

SEQ ID NO: 2294199 - RNA, 19 nt, Artificial Sequence
  Description of Artificial Sequence: Synthetic oligonucleotide
  Antisense strand to SEQ ID NO: 2294198
aaaguuaaggcagacucca

SEQ ID NO: 2294200 - RNA, 19 nt, Artificial Sequence
  Description of Artificial Sequence: Synthetic oligonucleotide
  Sense strand starting at position 3258 of SEQ ID NO: 1884815
ugcagagaauuucagguga

SEQ ID NO: 2294201 - RNA, 19 nt, Artificial Sequence
  Description of Artificial Sequence: Synthetic oligonucleotide
  Antisense strand to SEQ ID NO: 2294200
ucaccugaaauucucugca

SEQ ID NO: 2294202 - RNA, 19 nt, Artificial Sequence
  Description of Artificial Sequence: Synthetic oligonucleotide
  Sense strand starting at position 3530 of SEQ ID NO: 1884815
ccaguaaaugucuagcuga

SEQ ID NO: 2294203 - RNA, 19 nt, Artificial Sequence
  Description of Artificial Sequence: Synthetic oligonucleotide
  Antisense strand to SEQ ID NO: 2294202
ucagcuagacauuuacugg

SEQ ID NO: 2294204 - RNA, 19 nt, Artificial Sequence
  Description of Artificial Sequence: Synthetic oligonucleotide
  Sense strand starting at position 3697 of SEQ ID NO: 1884815
ccagaagucucuguuggga

SEQ ID NO: 2294205 - RNA, 19 nt, Artificial Sequence
  Description of Artificial Sequence: Synthetic oligonucleotide
  Antisense strand to SEQ ID NO: 2294204
ucccaacagagacuucugg

SEQ ID NO: 2294206 - RNA, 19 nt, Artificial Sequence
  Description of Artificial Sequence: Synthetic oligonucleotide
  Sense strand starting at position 3826 of SEQ ID NO: 1884815
uaugguggcccaggaauaa

SEQ ID NO: 2294207 - RNA, 19 nt, Artificial Sequence
  Description of Artificial Sequence: Synthetic oligonucleotide
  Antisense strand to SEQ ID NO: 2294206
uuauuccugggccaccaua

SEQ ID NO: 2294208 - RNA, 19 nt, Artificial Sequence
  Description of Artificial Sequence: Synthetic oligonucleotide
  Sense strand starting at position 3839 of SEQ ID NO: 1884815
gaauaaacuuuggugguca

SEQ ID NO: 2294209 - RNA, 19 nt, Artificial Sequence
  Description of Artificial Sequence: Synthetic oligonucleotide
  Antisense strand to SEQ ID NO: 2294208
ugaccaccaaaguuuauuc

SEQ ID NO: 2294210 - RNA, 19 nt, Artificial Sequence
  Description of Artificial Sequence: Synthetic oligonucleotide
  Sense strand starting at position 3841 of SEQ ID NO: 1884815
auaaacuuugguggucaaa

SEQ ID NO: 2294211 - RNA, 19 nt, Artificial Sequence
  Description of Artificial Sequence: Synthetic oligonucleotide
  Antisense strand to SEQ ID NO: 2294210
uuugaccaccaaaguuuau

SEQ ID NO: 2294212 - RNA, 19 nt, Artificial Sequence
  Description of Artificial Sequence: Synthetic oligonucleotide
  Sense strand starting at position 3843 of SEQ ID NO: 1884815
aaacuuugguggucaaauu

SEQ ID NO: 2294213 - RNA, 19 nt, Artificial Sequence
  Description of Artificial Sequence: Synthetic oligonucleotide
  Antisense strand to SEQ ID NO: 2294212
aauuugaccaccaaaguuu

SEQ ID NO: 2294214 - RNA, 19 nt, Artificial Sequence
  Description of Artificial Sequence: Synthetic oligonucleotide
  Sense strand starting at position 221 of SEQ ID NO: 1884817
uuagcuuucccaggcugaa

SEQ ID NO: 2294215 - RNA, 19 nt, Artificial Sequence
  Description of Artificial Sequence: Synthetic oligonucleotide
  Antisense strand to SEQ ID NO: 2294214
uucagccugggaaagcuaa

SEQ ID NO: 2294216 - RNA, 19 nt, Artificial Sequence
  Description of Artificial Sequence: Synthetic oligonucleotide
  Sense strand starting at position 358 of SEQ ID NO: 1884817
cuccauuuauugccgagua

SEQ ID NO: 2294217 - RNA, 19 nt, Artificial Sequence
  Description of Artificial Sequence: Synthetic oligonucleotide
  Antisense strand to SEQ ID NO: 2294216
uacucggcaauaaauggag

SEQ ID NO: 2294218 - RNA, 19 nt, Artificial Sequence
  Description of Artificial Sequence: Synthetic oligonucleotide
  Sense strand starting at position 363 of SEQ ID NO: 1884817
uuuauugccgaguauauuc

SEQ ID NO: 2294219 - RNA, 19 nt, Artificial Sequence
  Description of Artificial Sequence: Synthetic oligonucleotide
  Antisense strand to SEQ ID NO: 2294218
gaauauacucggcaauaaa

SEQ ID NO: 2294220 - RNA, 19 nt, Artificial Sequence
  Description of Artificial Sequence: Synthetic oligonucleotide
  Sense strand starting at position 507 of SEQ ID NO: 1884817
gggaauguggcugaaggua

SEQ ID NO: 2294221 - RNA, 19 nt, Artificial Sequence
  Description of Artificial Sequence: Synthetic oligonucleotide
  Antisense strand to SEQ ID NO: 2294220
uaccuucagccacauuccc

SEQ ID NO: 2294222 - RNA, 19 nt, Artificial Sequence
  Description of Artificial Sequence: Synthetic oligonucleotide
  Sense strand starting at position 536 of SEQ ID NO: 1884817
acacaaucccggcaucaaa

SEQ ID NO: 2294223 - RNA, 19 nt, Artificial Sequence
  Description of Artificial Sequence: Synthetic oligonucleotide
  Antisense strand to SEQ ID NO: 2294222
uuugaugccgggauugugu

SEQ ID NO: 2294224 - RNA, 19 nt, Artificial Sequence
  Description of Artificial Sequence: Synthetic oligonucleotide
  Sense strand starting at position 877 of SEQ ID NO: 1884817
gucucccugucccuuuaaa

SEQ ID NO: 2294225 - RNA, 19 nt, Artificial Sequence
  Description of Artificial Sequence: Synthetic oligonucleotide
  Antisense strand to SEQ ID NO: 2294224
uuuaaagggacagggagac

SEQ ID NO: 2294226 - RNA, 19 nt, Artificial Sequence
  Description of Artificial Sequence: Synthetic oligonucleotide
  Sense strand starting at position 2137 of SEQ ID NO: 1884817
gcgagcugcacugaggaau

SEQ ID NO: 2294227 - RNA, 19 nt, Artificial Sequence
  Description of Artificial Sequence: Synthetic oligonucleotide
  Antisense strand to SEQ ID NO: 2294226
auuccucagugcagcucgc

SEQ ID NO: 2294228 - RNA, 19 nt, Artificial Sequence
  Description of Artificial Sequence: Synthetic oligonucleotide
  Sense strand starting at position 2164 of SEQ ID NO: 1884817
gaagaaaucugcuccgaca

SEQ ID NO: 2294229 - RNA, 19 nt, Artificial Sequence
  Description of Artificial Sequence: Synthetic oligonucleotide
  Antisense strand to SEQ ID NO: 2294228
ugucggagcagauuucuuc

SEQ ID NO: 2294230 - RNA, 19 nt, Artificial Sequence
  Description of Artificial Sequence: Synthetic oligonucleotide
  Sense strand starting at position 2353 of SEQ ID NO: 1884817
ggccuauagugccuuggaa

SEQ ID NO: 2294231 - RNA, 19 nt, Artificial Sequence
  Description of Artificial Sequence: Synthetic oligonucleotide
  Antisense strand to SEQ ID NO: 2294230
uuccaaggcacuauaggcc

SEQ ID NO: 2294232 - RNA, 19 nt, Artificial Sequence
  Description of Artificial Sequence: Synthetic oligonucleotide
  Sense strand starting at position 2355 of SEQ ID NO: 1884817
ccuauagugccuuggaauc

SEQ ID NO: 2294233 - RNA, 19 nt, Artificial Sequence
  Description of Artificial Sequence: Synthetic oligonucleotide
  Antisense strand to SEQ ID NO: 2294232
gauuccaaggcacuauagg

SEQ ID NO: 2294234 - RNA, 19 nt, Artificial Sequence
  Description of Artificial Sequence: Synthetic oligonucleotide
  Sense strand starting at position 2438 of SEQ ID NO: 1884817
uugacagaauucgcaggau

SEQ ID NO: 2294235 - RNA, 19 nt, Artificial Sequence
  Description of Artificial Sequence: Synthetic oligonucleotide
  Antisense strand to SEQ ID NO: 2294234
auccugcgaauucugucaa

SEQ ID NO: 2294236 - RNA, 19 nt, Artificial Sequence
  Description of Artificial Sequence: Synthetic oligonucleotide
  Sense strand starting at position 2441 of SEQ ID NO: 1884817
acagaauucgcaggaucgu

SEQ ID NO: 2294237 - RNA, 19 nt, Artificial Sequence
  Description of Artificial Sequence: Synthetic oligonucleotide
  Antisense strand to SEQ ID NO: 2294236
acgauccugcgaauucugu

SEQ ID NO: 2294238 - RNA, 19 nt, Artificial Sequence
  Description of Artificial Sequence: Synthetic oligonucleotide
  Sense strand starting at position 2442 of SEQ ID NO: 1884817
cagaauucgcaggaucguu

SEQ ID NO: 2294239 - RNA, 19 nt, Artificial Sequence
  Description of Artificial Sequence: Synthetic oligonucleotide
  Antisense strand to SEQ ID NO: 2294238
aacgauccugcgaauucug

SEQ ID NO: 2294240 - RNA, 19 nt, Artificial Sequence
  Description of Artificial Sequence: Synthetic oligonucleotide
  Sense strand starting at position 2505 of SEQ ID NO: 1884817
ggucuacagaaaugugaga

SEQ ID NO: 2294241 - RNA, 19 nt, Artificial Sequence
  Description of Artificial Sequence: Synthetic oligonucleotide
  Antisense strand to SEQ ID NO: 2294240
ucucacauuucuguagacc

SEQ ID NO: 2294242 - RNA, 19 nt, Artificial Sequence
  Description of Artificial Sequence: Synthetic oligonucleotide
  Sense strand starting at position 2510 of SEQ ID NO: 1884817
acagaaaugugagauuuau

SEQ ID NO: 2294243 - RNA, 19 nt, Artificial Sequence
  Description of Artificial Sequence: Synthetic oligonucleotide
  Antisense strand to SEQ ID NO: 2294242
auaaaucucacauuucugu

SEQ ID NO: 2294244 - RNA, 19 nt, Artificial Sequence
  Description of Artificial Sequence: Synthetic oligonucleotide
  Sense strand starting at position 2671 of SEQ ID NO: 1884817
uugguauauugagcucaaa

SEQ ID NO: 2294245 - RNA, 19 nt, Artificial Sequence
  Description of Artificial Sequence: Synthetic oligonucleotide
  Antisense strand to SEQ ID NO: 2294244
uuugagcucaauauaccaa

SEQ ID NO: 2294246 - RNA, 19 nt, Artificial Sequence
  Description of Artificial Sequence: Synthetic oligonucleotide
  Sense strand starting at position 2674 of SEQ ID NO: 1884817
guauauugagcucaaaccu

SEQ ID NO: 2294247 - RNA, 19 nt, Artificial Sequence
  Description of Artificial Sequence: Synthetic oligonucleotide
  Antisense strand to SEQ ID NO: 2294246
agguuugagcucaauauac

SEQ ID NO: 2294248 - RNA, 19 nt, Artificial Sequence
  Description of Artificial Sequence: Synthetic oligonucleotide
  Sense strand starting at position 2717 of SEQ ID NO: 1884817
cccauauguggucgagaaa

SEQ ID NO: 2294249 - RNA, 19 nt, Artificial Sequence
  Description of Artificial Sequence: Synthetic oligonucleotide
  Antisense strand to SEQ ID NO: 2294248
uuucucgaccacauauggg

SEQ ID NO: 2294250 - RNA, 19 nt, Artificial Sequence
  Description of Artificial Sequence: Synthetic oligonucleotide
  Sense strand starting at position 2718 of SEQ ID NO: 1884817
ccauauguggucgagaaag

SEQ ID NO: 2294251 - RNA, 19 nt, Artificial Sequence
  Description of Artificial Sequence: Synthetic oligonucleotide
  Antisense strand to SEQ ID NO: 2294250
cuuucucgaccacauaugg

SEQ ID NO: 2294252 - RNA, 19 nt, Artificial Sequence
  Description of Artificial Sequence: Synthetic oligonucleotide
  Sense strand starting at position 2732 of SEQ ID NO: 1884817
gaaagagaguuaguuauug

SEQ ID NO: 2294253 - RNA, 19 nt, Artificial Sequence
  Description of Artificial Sequence: Synthetic oligonucleotide
  Antisense strand to SEQ ID NO: 2294252
caauaacuaacucucuuuc

SEQ ID NO: 2294254 - RNA, 19 nt, Artificial Sequence
  Description of Artificial Sequence: Synthetic oligonucleotide
  Sense strand starting at position 2734 of SEQ ID NO: 1884817
aagagaguuaguuauuggu

SEQ ID NO: 2294255 - RNA, 19 nt, Artificial Sequence
  Description of Artificial Sequence: Synthetic oligonucleotide
  Antisense strand to SEQ ID NO: 2294254
accaauaacuaacucucuu

SEQ ID NO: 2294256 - RNA, 19 nt, Artificial Sequence
  Description of Artificial Sequence: Synthetic oligonucleotide
  Sense strand starting at position 2860 of SEQ ID NO: 1884817
ggucuugucuggcuaagga

SEQ ID NO: 2294257 - RNA, 19 nt, Artificial Sequence
  Description of Artificial Sequence: Synthetic oligonucleotide
  Antisense strand to SEQ ID NO: 2294256
uccuuagccagacaagacc

SEQ ID NO: 2294258 - RNA, 19 nt, Artificial Sequence
  Description of Artificial Sequence: Synthetic oligonucleotide
  Sense strand starting at position 3012 of SEQ ID NO: 1884817
cugccuugugcugagaaau

SEQ ID NO: 2294259 - RNA, 19 nt, Artificial Sequence
  Description of Artificial Sequence: Synthetic oligonucleotide
  Antisense strand to SEQ ID NO: 2294258
auuucucagcacaaggcag

SEQ ID NO: 2294260 - RNA, 19 nt, Artificial Sequence
  Description of Artificial Sequence: Synthetic oligonucleotide
  Sense strand starting at position 3258 of SEQ ID NO: 1884817
gccugaaauuccucugcau

SEQ ID NO: 2294261 - RNA, 19 nt, Artificial Sequence
  Description of Artificial Sequence: Synthetic oligonucleotide
  Antisense strand to SEQ ID NO: 2294260
augcagaggaauuucaggc

SEQ ID NO: 2294262 - RNA, 19 nt, Artificial Sequence
  Description of Artificial Sequence: Synthetic oligonucleotide
  Sense strand starting at position 3288 of SEQ ID NO: 1884817
agaagagguaggugguuua

SEQ ID NO: 2294263 - RNA, 19 nt, Artificial Sequence
  Description of Artificial Sequence: Synthetic oligonucleotide
  Antisense strand to SEQ ID NO: 2294262
uaaaccaccuaccucuucu

SEQ ID NO: 2294264 - RNA, 19 nt, Artificial Sequence
  Description of Artificial Sequence: Synthetic oligonucleotide
  Sense strand starting at position 3320 of SEQ ID NO: 1884817
agugauauuagagagugua

SEQ ID NO: 2294265 - RNA, 19 nt, Artificial Sequence
  Description of Artificial Sequence: Synthetic oligonucleotide
  Antisense strand to SEQ ID NO: 2294264
uacacucucuaauaucacu

SEQ ID NO: 2294266 - RNA, 19 nt, Artificial Sequence
  Description of Artificial Sequence: Synthetic oligonucleotide
  Sense strand starting at position 3323 of SEQ ID NO: 1884817
gauauuagagaguguagca

SEQ ID NO: 2294267 - RNA, 19 nt, Artificial Sequence
  Description of Artificial Sequence: Synthetic oligonucleotide
  Antisense strand to SEQ ID NO: 2294266
ugcuacacucucuaauauc

SEQ ID NO: 2294268 - RNA, 19 nt, Artificial Sequence
  Description of Artificial Sequence: Synthetic oligonucleotide
  Sense strand starting at position 3386 of SEQ ID NO: 1884817
acucaauaccaggguauga

SEQ ID NO: 2294269 - RNA, 19 nt, Artificial Sequence
  Description of Artificial Sequence: Synthetic oligonucleotide
  Antisense strand to SEQ ID NO: 2294268
ucauacccugguauugagu

SEQ ID NO: 2294270 - RNA, 19 nt, Artificial Sequence
  Description of Artificial Sequence: Synthetic oligonucleotide
  Sense strand starting at position 3420 of SEQ ID NO: 1884817
cugacuucugauugccaga

SEQ ID NO: 2294271 - RNA, 19 nt, Artificial Sequence
  Description of Artificial Sequence: Synthetic oligonucleotide
  Antisense strand to SEQ ID NO: 2294270
ucuggcaaucagaagucag

SEQ ID NO: 2294272 - RNA, 19 nt, Artificial Sequence
  Description of Artificial Sequence: Synthetic oligonucleotide
  Sense strand starting at position 3425 of SEQ ID NO: 1884817
uucugauugccagaauuaa

SEQ ID NO: 2294273 - RNA, 19 nt, Artificial Sequence
  Description of Artificial Sequence: Synthetic oligonucleotide
  Antisense strand to SEQ ID NO: 2294272
uuaauucuggcaaucagaa

SEQ ID NO: 2294274 - RNA, 19 nt, Artificial Sequence
  Description of Artificial Sequence: Synthetic oligonucleotide
  Sense strand starting at position 3436 of SEQ ID NO: 1884817
agaauuaaggauggugcaa

SEQ ID NO: 2294275 - RNA, 19 nt, Artificial Sequence
  Description of Artificial Sequence: Synthetic oligonucleotide
  Antisense strand to SEQ ID NO: 2294274
uugcaccauccuuaauucu

SEQ ID NO: 2294276 - RNA, 19 nt, Artificial Sequence
  Description of Artificial Sequence: Synthetic oligonucleotide
  Sense strand starting at position 3466 of SEQ ID NO: 1884817
gguauuaugcaucaccuac

SEQ ID NO: 2294277 - RNA, 19 nt, Artificial Sequence
  Description of Artificial Sequence: Synthetic oligonucleotide
  Antisense strand to SEQ ID NO: 2294276
guaggugaugcauaauacc

SEQ ID NO: 2294278 - RNA, 19 nt, Artificial Sequence
  Description of Artificial Sequence: Synthetic oligonucleotide
  Sense strand starting at position 3486 of SEQ ID NO: 1884817
cuguauuggcuguaauauu

SEQ ID NO: 2294279 - RNA, 19 nt, Artificial Sequence
  Description of Artificial Sequence: Synthetic oligonucleotide
  Antisense strand to SEQ ID NO: 2294278
aauauuacagccaauacag

SEQ ID NO: 2294280 - RNA, 19 nt, Artificial Sequence
  Description of Artificial Sequence: Synthetic oligonucleotide
  Sense strand starting at position 3788 of SEQ ID NO: 1884817
auggguuuagugugaagag

SEQ ID NO: 2294281 - RNA, 19 nt, Artificial Sequence
  Description of Artificial Sequence: Synthetic oligonucleotide
  Antisense strand to SEQ ID NO: 2294280
cucuucacacuaaacccau

SEQ ID NO: 2294282 - RNA, 19 nt, Artificial Sequence
  Description of Artificial Sequence: Synthetic oligonucleotide
  Sense strand starting at position 3818 of SEQ ID NO: 1884817
ggagcuguucuauguauga

SEQ ID NO: 2294283 - RNA, 19 nt, Artificial Sequence
  Description of Artificial Sequence: Synthetic oligonucleotide
  Antisense strand to SEQ ID NO: 2294282
ucauacauagaacagcucc

SEQ ID NO: 2294284 - RNA, 19 nt, Artificial Sequence
  Description of Artificial Sequence: Synthetic oligonucleotide
  Sense strand starting at position 3822 of SEQ ID NO: 1884817
cuguucuauguaugaaugu

SEQ ID NO: 2294285 - RNA, 19 nt, Artificial Sequence
  Description of Artificial Sequence: Synthetic oligonucleotide
  Antisense strand to SEQ ID NO: 2294284
acauucauacauagaacag

SEQ ID NO: 2294286 - RNA, 19 nt, Artificial Sequence
  Description of Artificial Sequence: Synthetic oligonucleotide
  Sense strand starting at position 3833 of SEQ ID NO: 1884817
augaaugugguguggagua

SEQ ID NO: 2294287 - RNA, 19 nt, Artificial Sequence
  Description of Artificial Sequence: Synthetic oligonucleotide
  Antisense strand to SEQ ID NO: 2294286
uacuccacaccacauucau

SEQ ID NO: 2294288 - RNA, 19 nt, Artificial Sequence
  Description of Artificial Sequence: Synthetic oligonucleotide
  Sense strand starting at position 3854 of SEQ ID NO: 1884817
ggugaaggauuggagagaa

SEQ ID NO: 2294289 - RNA, 19 nt, Artificial Sequence
  Description of Artificial Sequence: Synthetic oligonucleotide
  Antisense strand to SEQ ID NO: 2294288
uucucuccaauccuucacc

SEQ ID NO: 2294290 - RNA, 19 nt, Artificial Sequence
  Description of Artificial Sequence: Synthetic oligonucleotide
  Sense strand starting at position 3866 of SEQ ID NO: 1884817
gagagaagcugagaaauau

SEQ ID NO: 2294291 - RNA, 19 nt, Artificial Sequence
  Description of Artificial Sequence: Synthetic oligonucleotide
  Antisense strand to SEQ ID NO: 2294290
auauuucucagcuucucuc

SEQ ID NO: 2294292 - RNA, 19 nt, Artificial Sequence
  Description of Artificial Sequence: Synthetic oligonucleotide
  Sense strand starting at position 3875 of SEQ ID NO: 1884817
ugagaaauaucuuugagca

SEQ ID NO: 2294293 - RNA, 19 nt, Artificial Sequence
  Description of Artificial Sequence: Synthetic oligonucleotide
  Antisense strand to SEQ ID NO: 2294292
ugcucaaagauauuucuca

SEQ ID NO: 2294294 - RNA, 19 nt, Artificial Sequence
  Description of Artificial Sequence: Synthetic oligonucleotide
  Sense strand starting at position 19 of SEQ ID NO: 1884818
ggugucuuggcuuagauua

SEQ ID NO: 2294295 - RNA, 19 nt, Artificial Sequence
  Description of Artificial Sequence: Synthetic oligonucleotide
  Antisense strand to SEQ ID NO: 2294294
uaaucuaagccaagacacc

SEQ ID NO: 2294296 - RNA, 19 nt, Artificial Sequence
  Description of Artificial Sequence: Synthetic oligonucleotide
  Sense strand starting at position 21 of SEQ ID NO: 1884818
ugucuuggcuuagauuaag

SEQ ID NO: 2294297 - RNA, 19 nt, Artificial Sequence
  Description of Artificial Sequence: Synthetic oligonucleotide
  Antisense strand to SEQ ID NO: 2294296
cuuaaucuaagccaagaca

SEQ ID NO: 2294298 - RNA, 19 nt, Artificial Sequence
  Description of Artificial Sequence: Synthetic oligonucleotide
  Sense strand starting at position 24 of SEQ ID NO: 1884818
cuuggcuuagauuaaggua

SEQ ID NO: 2294299 - RNA, 19 nt, Artificial Sequence
  Description of Artificial Sequence: Synthetic oligonucleotide
  Antisense strand to SEQ ID NO: 2294298
uaccuuaaucuaagccaag

SEQ ID NO: 2294300 - RNA, 19 nt, Artificial Sequence
  Description of Artificial Sequence: Synthetic oligonucleotide
  Sense strand starting at position 63 of SEQ ID NO: 1884818
ucggaccucgucuggaaua

SEQ ID NO: 2294301 - RNA, 19 nt, Artificial Sequence
  Description of Artificial Sequence: Synthetic oligonucleotide
  Antisense strand to SEQ ID NO: 2294300
uauuccagacgagguccga

SEQ ID NO: 2294302 - RNA, 19 nt, Artificial Sequence
  Description of Artificial Sequence: Synthetic oligonucleotide
  Sense strand starting at position 65 of SEQ ID NO: 1884818
ggaccucgucuggaauaug

SEQ ID NO: 2294303 - RNA, 19 nt, Artificial Sequence
  Description of Artificial Sequence: Synthetic oligonucleotide
  Antisense strand to SEQ ID NO: 2294302
cauauuccagacgaggucc

SEQ ID NO: 2294304 - RNA, 19 nt, Artificial Sequence
  Description of Artificial Sequence: Synthetic oligonucleotide
  Sense strand starting at position 131 of SEQ ID NO: 1884818
gugugcgucgccguuuaua

SEQ ID NO: 2294305 - RNA, 19 nt, Artificial Sequence
  Description of Artificial Sequence: Synthetic oligonucleotide
  Antisense strand to SEQ ID NO: 2294304
uauaaacggcgacgcacac

SEQ ID NO: 2294306 - RNA, 19 nt, Artificial Sequence
  Description of Artificial Sequence: Synthetic oligonucleotide
  Sense strand starting at position 133 of SEQ ID NO: 1884818
gugcgucgccguuuauaaa

SEQ ID NO: 2294307 - RNA, 19 nt, Artificial Sequence
  Description of Artificial Sequence: Synthetic oligonucleotide
  Antisense strand to SEQ ID NO: 2294306
uuuauaaacggcgacgcac

SEQ ID NO: 2294308 - RNA, 19 nt, Artificial Sequence
  Description of Artificial Sequence: Synthetic oligonucleotide
  Sense strand starting at position 244 of SEQ ID NO: 1884818
ccacguacauuuggaagaa

SEQ ID NO: 2294309 - RNA, 19 nt, Artificial Sequence
  Description of Artificial Sequence: Synthetic oligonucleotide
  Antisense strand to SEQ ID NO: 2294308
uucuuccaaauguacgugg

SEQ ID NO: 2294310 - RNA, 19 nt, Artificial Sequence
  Description of Artificial Sequence: Synthetic oligonucleotide
  Sense strand starting at position 245 of SEQ ID NO: 1884818
cacguacauuuggaagaaa

SEQ ID NO: 2294311 - RNA, 19 nt, Artificial Sequence
  Description of Artificial Sequence: Synthetic oligonucleotide
  Antisense strand to SEQ ID NO: 2294310
uuucuuccaaauguacgug

SEQ ID NO: 2294312 - RNA, 19 nt, Artificial Sequence
  Description of Artificial Sequence: Synthetic oligonucleotide
  Sense strand starting at position 266 of SEQ ID NO: 1884818
aagccacuguguuaugaaa

SEQ ID NO: 2294313 - RNA, 19 nt, Artificial Sequence
  Description of Artificial Sequence: Synthetic oligonucleotide
  Antisense strand to SEQ ID NO: 2294312
uuucauaacacaguggcuu

SEQ ID NO: 2294314 - RNA, 19 nt, Artificial Sequence
  Description of Artificial Sequence: Synthetic oligonucleotide
  Sense strand starting at position 283 of SEQ ID NO: 1884818
aaccauaugcgucggguua

SEQ ID NO: 2294315 - RNA, 19 nt, Artificial Sequence
  Description of Artificial Sequence: Synthetic oligonucleotide
  Antisense strand to SEQ ID NO: 2294314
uaacccgacgcauaugguu

SEQ ID NO: 2294316 - RNA, 19 nt, Artificial Sequence
  Description of Artificial Sequence: Synthetic oligonucleotide
  Sense strand starting at position 284 of SEQ ID NO: 1884818
accauaugcgucggguuaa

SEQ ID NO: 2294317 - RNA, 19 nt, Artificial Sequence
  Description of Artificial Sequence: Synthetic oligonucleotide
  Antisense strand to SEQ ID NO: 2294316
uuaacccgacgcauauggu

SEQ ID NO: 2294318 - RNA, 19 nt, Artificial Sequence
  Description of Artificial Sequence: Synthetic oligonucleotide
  Sense strand starting at position 315 of SEQ ID NO: 1884818
ggccauuagcaccaauuau

SEQ ID NO: 2294319 - RNA, 19 nt, Artificial Sequence
  Description of Artificial Sequence: Synthetic oligonucleotide
  Antisense strand to SEQ ID NO: 2294318
auaauuggugcuaauggcc

SEQ ID NO: 2294320 - RNA, 19 nt, Artificial Sequence
  Description of Artificial Sequence: Synthetic oligonucleotide
  Sense strand starting at position 903 of SEQ ID NO: 1884818
gcaugugugagcucuagca

SEQ ID NO: 2294321 - RNA, 19 nt, Artificial Sequence
  Description of Artificial Sequence: Synthetic oligonucleotide
  Antisense strand to SEQ ID NO: 2294320
ugcuagagcucacacaugc

SEQ ID NO: 2294322 - RNA, 19 nt, Artificial Sequence
  Description of Artificial Sequence: Synthetic oligonucleotide
  Sense strand starting at position 905 of SEQ ID NO: 1884818
augugugagcucuagcagu

SEQ ID NO: 2294323 - RNA, 19 nt, Artificial Sequence
  Description of Artificial Sequence: Synthetic oligonucleotide
  Antisense strand to SEQ ID NO: 2294322
acugcuagagcucacacau

SEQ ID NO: 2294324 - RNA, 19 nt, Artificial Sequence
  Description of Artificial Sequence: Synthetic oligonucleotide
  Sense strand starting at position 1104 of SEQ ID NO: 1884818
gaucuauaauaagcaggua

SEQ ID NO: 2294325 - RNA, 19 nt, Artificial Sequence
  Description of Artificial Sequence: Synthetic oligonucleotide
  Antisense strand to SEQ ID NO: 2294324
uaccugcuuauuauagauc

SEQ ID NO: 2294326 - RNA, 19 nt, Artificial Sequence
  Description of Artificial Sequence: Synthetic oligonucleotide
  Sense strand starting at position 1250 of SEQ ID NO: 1884818
accaguuaccgguauucca

SEQ ID NO: 2294327 - RNA, 19 nt, Artificial Sequence
  Description of Artificial Sequence: Synthetic oligonucleotide
  Antisense strand to SEQ ID NO: 2294326
uggaauaccgguaacuggu

SEQ ID NO: 2294328 - RNA, 19 nt, Artificial Sequence
  Description of Artificial Sequence: Synthetic oligonucleotide
  Sense strand starting at position 1372 of SEQ ID NO: 1884818
gcuguccuauucuugaaac

SEQ ID NO: 2294329 - RNA, 19 nt, Artificial Sequence
  Description of Artificial Sequence: Synthetic oligonucleotide
  Antisense strand to SEQ ID NO: 2294328
guuucaagaauaggacagc

SEQ ID NO: 2294330 - RNA, 19 nt, Artificial Sequence
  Description of Artificial Sequence: Synthetic oligonucleotide
  Sense strand starting at position 1395 of SEQ ID NO: 1884818
acggaccauuaguuacaua

SEQ ID NO: 2294331 - RNA, 19 nt, Artificial Sequence
  Description of Artificial Sequence: Synthetic oligonucleotide
  Antisense strand to SEQ ID NO: 2294330
uauguaacuaaugguccgu

SEQ ID NO: 2294332 - RNA, 19 nt, Artificial Sequence
  Description of Artificial Sequence: Synthetic oligonucleotide
  Sense strand starting at position 2048 of SEQ ID NO: 1884818
uugugagucgaucguaaac

SEQ ID NO: 2294333 - RNA, 19 nt, Artificial Sequence
  Description of Artificial Sequence: Synthetic oligonucleotide
  Antisense strand to SEQ ID NO: 2294332
guuuacgaucgacucacaa

SEQ ID NO: 2294334 - RNA, 19 nt, Artificial Sequence
  Description of Artificial Sequence: Synthetic oligonucleotide
  Sense strand starting at position 2101 of SEQ ID NO: 1884818
ccgggaaugcgaugcauuu

SEQ ID NO: 2294335 - RNA, 19 nt, Artificial Sequence
  Description of Artificial Sequence: Synthetic oligonucleotide
  Antisense strand to SEQ ID NO: 2294334
aaaugcaucgcauucccgg

SEQ ID NO: 2294336 - RNA, 19 nt, Artificial Sequence
  Description of Artificial Sequence: Synthetic oligonucleotide
  Sense strand starting at position 2107 of SEQ ID NO: 1884818
augcgaugcauuuguguag

SEQ ID NO: 2294337 - RNA, 19 nt, Artificial Sequence
  Description of Artificial Sequence: Synthetic oligonucleotide
  Antisense strand to SEQ ID NO: 2294336
cuacacaaaugcaucgcau

SEQ ID NO: 2294338 - RNA, 19 nt, Artificial Sequence
  Description of Artificial Sequence: Synthetic oligonucleotide
  Sense strand starting at position 2116 of SEQ ID NO: 1884818
auuuguguagcgugugcaa

SEQ ID NO: 2294339 - RNA, 19 nt, Artificial Sequence
  Description of Artificial Sequence: Synthetic oligonucleotide
  Antisense strand to SEQ ID NO: 2294338
uugcacacgcuacacaaau

SEQ ID NO: 2294340 - RNA, 19 nt, Artificial Sequence
  Description of Artificial Sequence: Synthetic oligonucleotide
  Sense strand starting at position 2148 of SEQ ID NO: 1884818
ucgccauguuuacccaauu

SEQ ID NO: 2294341 - RNA, 19 nt, Artificial Sequence
  Description of Artificial Sequence: Synthetic oligonucleotide
  Antisense strand to SEQ ID NO: 2294340
aauuggguaaacauggcga

SEQ ID NO: 2294342 - RNA, 19 nt, Artificial Sequence
  Description of Artificial Sequence: Synthetic oligonucleotide
  Sense strand starting at position 2364 of SEQ ID NO: 1884818
gggcauuaagguuggauca

SEQ ID NO: 2294343 - RNA, 19 nt, Artificial Sequence
  Description of Artificial Sequence: Synthetic oligonucleotide
  Antisense strand to SEQ ID NO: 2294342
ugauccaaccuuaaugccc

SEQ ID NO: 2294344 - RNA, 19 nt, Artificial Sequence
  Description of Artificial Sequence: Synthetic oligonucleotide
  Sense strand starting at position 2400 of SEQ ID NO: 1884818
ugcaaagauuuguggccuu

SEQ ID NO: 2294345 - RNA, 19 nt, Artificial Sequence
  Description of Artificial Sequence: Synthetic oligonucleotide
  Antisense strand to SEQ ID NO: 2294344
aaggccacaaaucuuugca

SEQ ID NO: 2294346 - RNA, 19 nt, Artificial Sequence
  Description of Artificial Sequence: Synthetic oligonucleotide
  Sense strand starting at position 2421 of SEQ ID NO: 1884818
ggcagugauggcuggugaa

SEQ ID NO: 2294347 - RNA, 19 nt, Artificial Sequence
  Description of Artificial Sequence: Synthetic oligonucleotide
  Antisense strand to SEQ ID NO: 2294346
uucaccagccaucacugcc

SEQ ID NO: 2294348 - RNA, 19 nt, Artificial Sequence
  Description of Artificial Sequence: Synthetic oligonucleotide
  Sense strand starting at position 2434 of SEQ ID NO: 1884818
ggugaauugcagggauuga

SEQ ID NO: 2294349 - RNA, 19 nt, Artificial Sequence
  Description of Artificial Sequence: Synthetic oligonucleotide
  Antisense strand to SEQ ID NO: 2294348
ucaaucccugcaauucacc

SEQ ID NO: 2294350 - RNA, 19 nt, Artificial Sequence
  Description of Artificial Sequence: Synthetic oligonucleotide
  Sense strand starting at position 2604 of SEQ ID NO: 1884818
ccuggaguggucugaagaa

SEQ ID NO: 2294351 - RNA, 19 nt, Artificial Sequence
  Description of Artificial Sequence: Synthetic oligonucleotide
  Antisense strand to SEQ ID NO: 2294350
uucuucagaccacuccagg

SEQ ID NO: 2294352 - RNA, 19 nt, Artificial Sequence
  Description of Artificial Sequence: Synthetic oligonucleotide
  Sense strand starting at position 2724 of SEQ ID NO: 1884818
gucccuuucuuagagagaa

SEQ ID NO: 2294353 - RNA, 19 nt, Artificial Sequence
  Description of Artificial Sequence: Synthetic oligonucleotide
  Antisense strand to SEQ ID NO: 2294352
uucucucuaagaaagggac

SEQ ID NO: 2294354 - RNA, 19 nt, Artificial Sequence
  Description of Artificial Sequence: Synthetic oligonucleotide
  Sense strand starting at position 2791 of SEQ ID NO: 1884818
gguggcuuauuugaaaucu

SEQ ID NO: 2294355 - RNA, 19 nt, Artificial Sequence
  Description of Artificial Sequence: Synthetic oligonucleotide
  Antisense strand to SEQ ID NO: 2294354
agauuucaaauaagccacc

SEQ ID NO: 2294356 - RNA, 19 nt, Artificial Sequence
  Description of Artificial Sequence: Synthetic oligonucleotide
  Sense strand starting at position 2837 of SEQ ID NO: 1884818
ccaagaucuuggucucuac

SEQ ID NO: 2294357 - RNA, 19 nt, Artificial Sequence
  Description of Artificial Sequence: Synthetic oligonucleotide
  Antisense strand to SEQ ID NO: 2294356
guagagaccaagaucuugg

SEQ ID NO: 2294358 - RNA, 19 nt, Artificial Sequence
  Description of Artificial Sequence: Synthetic oligonucleotide
  Sense strand starting at position 3429 of SEQ ID NO: 1884818
cgggcagcucaccggaaau

SEQ ID NO: 2294359 - RNA, 19 nt, Artificial Sequence
  Description of Artificial Sequence: Synthetic oligonucleotide
  Antisense strand to SEQ ID NO: 2294358
auuuccggugagcugcccg

SEQ ID NO: 2294360 - RNA, 19 nt, Artificial Sequence
  Description of Artificial Sequence: Synthetic oligonucleotide
  Sense strand starting at position 3464 of SEQ ID NO: 1884818
ggcacaaccuguccugaau

SEQ ID NO: 2294361 - RNA, 19 nt, Artificial Sequence
  Description of Artificial Sequence: Synthetic oligonucleotide
  Antisense strand to SEQ ID NO: 2294360
auucaggacagguugugcc

SEQ ID NO: 2294362 - RNA, 19 nt, Artificial Sequence
  Description of Artificial Sequence: Synthetic oligonucleotide
  Sense strand starting at position 3522 of SEQ ID NO: 1884818
cagucauuagggcaucuua

SEQ ID NO: 2294363 - RNA, 19 nt, Artificial Sequence
  Description of Artificial Sequence: Synthetic oligonucleotide
  Antisense strand to SEQ ID NO: 2294362
uaagaugcccuaaugacug

SEQ ID NO: 2294364 - RNA, 19 nt, Artificial Sequence
  Description of Artificial Sequence: Synthetic oligonucleotide
  Sense strand starting at position 3752 of SEQ ID NO: 1884818
cagcucuacgguugagauu

SEQ ID NO: 2294365 - RNA, 19 nt, Artificial Sequence
  Description of Artificial Sequence: Synthetic oligonucleotide
  Antisense strand to SEQ ID NO: 2294364
aaucucaaccguagagcug

SEQ ID NO: 2294366 - RNA, 19 nt, Artificial Sequence
  Description of Artificial Sequence: Synthetic oligonucleotide
  Sense strand starting at position 3753 of SEQ ID NO: 1884818
agcucuacgguugagauua

SEQ ID NO: 2294367 - RNA, 19 nt, Artificial Sequence
  Description of Artificial Sequence: Synthetic oligonucleotide
  Antisense strand to SEQ ID NO: 2294366
uaaucucaaccguagagcu

SEQ ID NO: 2294368 - RNA, 19 nt, Artificial Sequence
  Description of Artificial Sequence: Synthetic oligonucleotide
  Sense strand starting at position 3789 of SEQ ID NO: 1884818
agcaaugagcgagaugcuu

SEQ ID NO: 2294369 - RNA, 19 nt, Artificial Sequence
  Description of Artificial Sequence: Synthetic oligonucleotide
  Antisense strand to SEQ ID NO: 2294368
aagcaucucgcucauugcu

SEQ ID NO: 2294370 - RNA, 19 nt, Artificial Sequence
  Description of Artificial Sequence: Synthetic oligonucleotide
  Sense strand starting at position 3862 of SEQ ID NO: 1884818
agccacuuugauuggcuaa

SEQ ID NO: 2294371 - RNA, 19 nt, Artificial Sequence
  Description of Artificial Sequence: Synthetic oligonucleotide
  Antisense strand to SEQ ID NO: 2294370
uuagccaaucaaaguggcu

SEQ ID NO: 2294372 - RNA, 19 nt, Artificial Sequence
  Description of Artificial Sequence: Synthetic oligonucleotide
  Sense strand starting at position 3864 of SEQ ID NO: 1884818
ccacuuugauuggcuaaua

SEQ ID NO: 2294373 - RNA, 19 nt, Artificial Sequence
  Description of Artificial Sequence: Synthetic oligonucleotide
  Antisense strand to SEQ ID NO: 2294372
uauuagccaaucaaagugg

SEQ ID NO: 2294374 - RNA, 19 nt, Artificial Sequence
  Description of Artificial Sequence: Synthetic oligonucleotide
  Sense strand starting at position 46 of SEQ ID NO: 1884819
gagauauucuguuucuugu

SEQ ID NO: 2294375 - RNA, 19 nt, Artificial Sequence
  Description of Artificial Sequence: Synthetic oligonucleotide
  Antisense strand to SEQ ID NO: 2294374
acaagaaacagaauaucuc

SEQ ID NO: 2294376 - RNA, 19 nt, Artificial Sequence
  Description of Artificial Sequence: Synthetic oligonucleotide
  Sense strand starting at position 50 of SEQ ID NO: 1884819
uauucuguuucuuguugua

SEQ ID NO: 2294377 - RNA, 19 nt, Artificial Sequence
  Description of Artificial Sequence: Synthetic oligonucleotide
  Antisense strand to SEQ ID NO: 2294376
uacaacaagaaacagaaua

SEQ ID NO: 2294378 - RNA, 19 nt, Artificial Sequence
  Description of Artificial Sequence: Synthetic oligonucleotide
  Sense strand starting at position 52 of SEQ ID NO: 1884819
uucuguuucuuguuguaag

SEQ ID NO: 2294379 - RNA, 19 nt, Artificial Sequence
  Description of Artificial Sequence: Synthetic oligonucleotide
  Antisense strand to SEQ ID NO: 2294378
cuuacaacaagaaacagaa

SEQ ID NO: 2294380 - RNA, 19 nt, Artificial Sequence
  Description of Artificial Sequence: Synthetic oligonucleotide
  Sense strand starting at position 53 of SEQ ID NO: 1884819
ucuguuucuuguuguaagu

SEQ ID NO: 2294381 - RNA, 19 nt, Artificial Sequence
  Description of Artificial Sequence: Synthetic oligonucleotide
  Antisense strand to SEQ ID NO: 2294380
acuuacaacaagaaacaga

SEQ ID NO: 2294382 - RNA, 19 nt, Artificial Sequence
  Description of Artificial Sequence: Synthetic oligonucleotide
  Sense strand starting at position 763 of SEQ ID NO: 1884819
augggacagucugaugcaa

SEQ ID NO: 2294383 - RNA, 19 nt, Artificial Sequence
  Description of Artificial Sequence: Synthetic oligonucleotide
  Antisense strand to SEQ ID NO: 2294382
uugcaucagacugucccau

SEQ ID NO: 2294384 - RNA, 19 nt, Artificial Sequence
  Description of Artificial Sequence: Synthetic oligonucleotide
  Sense strand starting at position 765 of SEQ ID NO: 1884819
gggacagucugaugcaaag

SEQ ID NO: 2294385 - RNA, 19 nt, Artificial Sequence
  Description of Artificial Sequence: Synthetic oligonucleotide
  Antisense strand to SEQ ID NO: 2294384
cuuugcaucagacuguccc

SEQ ID NO: 2294386 - RNA, 19 nt, Artificial Sequence
  Description of Artificial Sequence: Synthetic oligonucleotide
  Sense strand starting at position 847 of SEQ ID NO: 1884819
gaauccaaguugucugaua

SEQ ID NO: 2294387 - RNA, 19 nt, Artificial Sequence
  Description of Artificial Sequence: Synthetic oligonucleotide
  Antisense strand to SEQ ID NO: 2294386
uaucagacaacuuggauuc

SEQ ID NO: 2294388 - RNA, 19 nt, Artificial Sequence
  Description of Artificial Sequence: Synthetic oligonucleotide
  Sense strand starting at position 849 of SEQ ID NO: 1884819
auccaaguugucugauauu

SEQ ID NO: 2294389 - RNA, 19 nt, Artificial Sequence
  Description of Artificial Sequence: Synthetic oligonucleotide
  Antisense strand to SEQ ID NO: 2294388
aauaucagacaacuuggau

SEQ ID NO: 2294390 - RNA, 19 nt, Artificial Sequence
  Description of Artificial Sequence: Synthetic oligonucleotide
  Sense strand starting at position 858 of SEQ ID NO: 1884819
gucugauauuccucugcaa

SEQ ID NO: 2294391 - RNA, 19 nt, Artificial Sequence
  Description of Artificial Sequence: Synthetic oligonucleotide
  Antisense strand to SEQ ID NO: 2294390
uugcagaggaauaucagac

SEQ ID NO: 2294392 - RNA, 19 nt, Artificial Sequence
  Description of Artificial Sequence: Synthetic oligonucleotide
  Sense strand starting at position 891 of SEQ ID NO: 1884819
cuggaauuccugcauccga

SEQ ID NO: 2294393 - RNA, 19 nt, Artificial Sequence
  Description of Artificial Sequence: Synthetic oligonucleotide
  Antisense strand to SEQ ID NO: 2294392
ucggaugcaggaauuccag

SEQ ID NO: 2294394 - RNA, 19 nt, Artificial Sequence
  Description of Artificial Sequence: Synthetic oligonucleotide
  Sense strand starting at position 1219 of SEQ ID NO: 1884819
ccacuuaaguuguguagau

SEQ ID NO: 2294395 - RNA, 19 nt, Artificial Sequence
  Description of Artificial Sequence: Synthetic oligonucleotide
  Antisense strand to SEQ ID NO: 2294394
aucuacacaacuuaagugg

SEQ ID NO: 2294396 - RNA, 19 nt, Artificial Sequence
  Description of Artificial Sequence: Synthetic oligonucleotide
  Sense strand starting at position 1220 of SEQ ID NO: 1884819
cacuuaaguuguguagauc

SEQ ID NO: 2294397 - RNA, 19 nt, Artificial Sequence
  Description of Artificial Sequence: Synthetic oligonucleotide
  Antisense strand to SEQ ID NO: 2294396
gaucuacacaacuuaagug

SEQ ID NO: 2294398 - RNA, 19 nt, Artificial Sequence
  Description of Artificial Sequence: Synthetic oligonucleotide
  Sense strand starting at position 1221 of SEQ ID NO: 1884819
acuuaaguuguguagaucu

SEQ ID NO: 2294399 - RNA, 19 nt, Artificial Sequence
  Description of Artificial Sequence: Synthetic oligonucleotide
  Antisense strand to SEQ ID NO: 2294398
agaucuacacaacuuaagu

SEQ ID NO: 2294400 - RNA, 19 nt, Artificial Sequence
  Description of Artificial Sequence: Synthetic oligonucleotide
  Sense strand starting at position 1232 of SEQ ID NO: 1884819
guagaucucuccuacacuu

SEQ ID NO: 2294401 - RNA, 19 nt, Artificial Sequence
  Description of Artificial Sequence: Synthetic oligonucleotide
  Antisense strand to SEQ ID NO: 2294400
aaguguaggagagaucuac

SEQ ID NO: 2294402 - RNA, 19 nt, Artificial Sequence
  Description of Artificial Sequence: Synthetic oligonucleotide
  Sense strand starting at position 1298 of SEQ ID NO: 1884819
aauaaaggcgccuguauau

SEQ ID NO: 2294403 - RNA, 19 nt, Artificial Sequence
  Description of Artificial Sequence: Synthetic oligonucleotide
  Antisense strand to SEQ ID NO: 2294402
auauacaggcgccuuuauu

SEQ ID NO: 2294404 - RNA, 19 nt, Artificial Sequence
  Description of Artificial Sequence: Synthetic oligonucleotide
  Sense strand starting at position 1307 of SEQ ID NO: 1884819
gccuguauaucugugccaa

SEQ ID NO: 2294405 - RNA, 19 nt, Artificial Sequence
  Description of Artificial Sequence: Synthetic oligonucleotide
  Antisense strand to SEQ ID NO: 2294404
uuggcacagauauacaggc

SEQ ID NO: 2294406 - RNA, 19 nt, Artificial Sequence
  Description of Artificial Sequence: Synthetic oligonucleotide
  Sense strand starting at position 1308 of SEQ ID NO: 1884819
ccuguauaucugugccaaa

SEQ ID NO: 2294407 - RNA, 19 nt, Artificial Sequence
  Description of Artificial Sequence: Synthetic oligonucleotide
  Antisense strand to SEQ ID NO: 2294406
uuuggcacagauauacagg

SEQ ID NO: 2294408 - RNA, 19 nt, Artificial Sequence
  Description of Artificial Sequence: Synthetic oligonucleotide
  Sense strand starting at position 1309 of SEQ ID NO: 1884819
cuguauaucugugccaaag

SEQ ID NO: 2294409 - RNA, 19 nt, Artificial Sequence
  Description of Artificial Sequence: Synthetic oligonucleotide
  Antisense strand to SEQ ID NO: 2294408
cuuuggcacagauauacag

SEQ ID NO: 2294410 - RNA, 19 nt, Artificial Sequence
  Description of Artificial Sequence: Synthetic oligonucleotide
  Sense strand starting at position 1311 of SEQ ID NO: 1884819
guauaucugugccaaagca

SEQ ID NO: 2294411 - RNA, 19 nt, Artificial Sequence
  Description of Artificial Sequence: Synthetic oligonucleotide
  Antisense strand to SEQ ID NO: 2294410
ugcuuuggcacagauauac

SEQ ID NO: 2294412 - RNA, 19 nt, Artificial Sequence
  Description of Artificial Sequence: Synthetic oligonucleotide
  Sense strand starting at position 1340 of SEQ ID NO: 1884819
uucugaggcugcugauaaa

SEQ ID NO: 2294413 - RNA, 19 nt, Artificial Sequence
  Description of Artificial Sequence: Synthetic oligonucleotide
  Antisense strand to SEQ ID NO: 2294412
uuuaucagcagccucagaa

SEQ ID NO: 2294414 - RNA, 19 nt, Artificial Sequence
  Description of Artificial Sequence: Synthetic oligonucleotide
  Sense strand starting at position 1349 of SEQ ID NO: 1884819
ugcugauaaagguguauga

SEQ ID NO: 2294415 - RNA, 19 nt, Artificial Sequence
  Description of Artificial Sequence: Synthetic oligonucleotide
  Antisense strand to SEQ ID NO: 2294414
ucauacaccuuuaucagca

SEQ ID NO: 2294416 - RNA, 19 nt, Artificial Sequence
  Description of Artificial Sequence: Synthetic oligonucleotide
  Sense strand starting at position 1353 of SEQ ID NO: 1884819
gauaaagguguaugagauc

SEQ ID NO: 2294417 - RNA, 19 nt, Artificial Sequence
  Description of Artificial Sequence: Synthetic oligonucleotide
  Antisense strand to SEQ ID NO: 2294416
gaucucauacaccuuuauc

SEQ ID NO: 2294418 - RNA, 19 nt, Artificial Sequence
  Description of Artificial Sequence: Synthetic oligonucleotide
  Sense strand starting at position 1362 of SEQ ID NO: 1884819
guaugagauccugagguuc

SEQ ID NO: 2294419 - RNA, 19 nt, Artificial Sequence
  Description of Artificial Sequence: Synthetic oligonucleotide
  Antisense strand to SEQ ID NO: 2294418
gaaccucaggaucucauac

SEQ ID NO: 2294420 - RNA, 19 nt, Artificial Sequence
  Description of Artificial Sequence: Synthetic oligonucleotide
  Sense strand starting at position 1364 of SEQ ID NO: 1884819
augagauccugagguucua

SEQ ID NO: 2294421 - RNA, 19 nt, Artificial Sequence
  Description of Artificial Sequence: Synthetic oligonucleotide
  Antisense strand to SEQ ID NO: 2294420
uagaaccucaggaucucau

SEQ ID NO: 2294422 - RNA, 19 nt, Artificial Sequence
  Description of Artificial Sequence: Synthetic oligonucleotide
  Sense strand starting at position 1440 of SEQ ID NO: 1884819
agaguuggccaguggcaga

SEQ ID NO: 2294423 - RNA, 19 nt, Artificial Sequence
  Description of Artificial Sequence: Synthetic oligonucleotide
  Antisense strand to SEQ ID NO: 2294422
ucugccacuggccaacucu

SEQ ID NO: 2294424 - RNA, 19 nt, Artificial Sequence
  Description of Artificial Sequence: Synthetic oligonucleotide
  Sense strand starting at position 1535 of SEQ ID NO: 1884819
cccugcugcuccugaaaga

SEQ ID NO: 2294425 - RNA, 19 nt, Artificial Sequence
  Description of Artificial Sequence: Synthetic oligonucleotide
  Antisense strand to SEQ ID NO: 2294424
ucuuucaggagcagcaggg

SEQ ID NO: 2294426 - RNA, 19 nt, Artificial Sequence
  Description of Artificial Sequence: Synthetic oligonucleotide
  Sense strand starting at position 1536 of SEQ ID NO: 1884819
ccugcugcuccugaaagaa

SEQ ID NO: 2294427 - RNA, 19 nt, Artificial Sequence
  Description of Artificial Sequence: Synthetic oligonucleotide
  Antisense strand to SEQ ID NO: 2294426
uucuuucaggagcagcagg

SEQ ID NO: 2294428 - RNA, 19 nt, Artificial Sequence
  Description of Artificial Sequence: Synthetic oligonucleotide
  Sense strand starting at position 1825 of SEQ ID NO: 1884819
ucugcuuauggguggacau

SEQ ID NO: 2294429 - RNA, 19 nt, Artificial Sequence
  Description of Artificial Sequence: Synthetic oligonucleotide
  Antisense strand to SEQ ID NO: 2294428
auguccacccauaagcaga

SEQ ID NO: 2294430 - RNA, 19 nt, Artificial Sequence
  Description of Artificial Sequence: Synthetic oligonucleotide
  Sense strand starting at position 1852 of SEQ ID NO: 1884819
gggcuucucagaugagcua

SEQ ID NO: 2294431 - RNA, 19 nt, Artificial Sequence
  Description of Artificial Sequence: Synthetic oligonucleotide
  Antisense strand to SEQ ID NO: 2294430
uagcucaucugagaagccc

SEQ ID NO: 2294432 - RNA, 19 nt, Artificial Sequence
  Description of Artificial Sequence: Synthetic oligonucleotide
  Sense strand starting at position 2005 of SEQ ID NO: 1884819
cgcauugauccgcgccgua

SEQ ID NO: 2294433 - RNA, 19 nt, Artificial Sequence
  Description of Artificial Sequence: Synthetic oligonucleotide
  Antisense strand to SEQ ID NO: 2294432
uacggcgcggaucaaugcg

SEQ ID NO: 2294434 - RNA, 19 nt, Artificial Sequence
  Description of Artificial Sequence: Synthetic oligonucleotide
  Sense strand starting at position 2007 of SEQ ID NO: 1884819
cauugauccgcgccguauu

SEQ ID NO: 2294435 - RNA, 19 nt, Artificial Sequence
  Description of Artificial Sequence: Synthetic oligonucleotide
  Antisense strand to SEQ ID NO: 2294434
aauacggcgcggaucaaug

SEQ ID NO: 2294436 - RNA, 19 nt, Artificial Sequence
  Description of Artificial Sequence: Synthetic oligonucleotide
  Sense strand starting at position 2714 of SEQ ID NO: 1884819
ccaguaaguugggagcaau

SEQ ID NO: 2294437 - RNA, 19 nt, Artificial Sequence
  Description of Artificial Sequence: Synthetic oligonucleotide
  Antisense strand to SEQ ID NO: 2294436
auugcucccaacuuacugg

SEQ ID NO: 2294438 - RNA, 19 nt, Artificial Sequence
  Description of Artificial Sequence: Synthetic oligonucleotide
  Sense strand starting at position 2946 of SEQ ID NO: 1884819
ggagcuggcuuugaugaga

SEQ ID NO: 2294439 - RNA, 19 nt, Artificial Sequence
  Description of Artificial Sequence: Synthetic oligonucleotide
  Antisense strand to SEQ ID NO: 2294438
ucucaucaaagccagcucc

SEQ ID NO: 2294440 - RNA, 19 nt, Artificial Sequence
  Description of Artificial Sequence: Synthetic oligonucleotide
  Sense strand starting at position 3005 of SEQ ID NO: 1884819
gucaccacuuucgaagaaa

SEQ ID NO: 2294441 - RNA, 19 nt, Artificial Sequence
  Description of Artificial Sequence: Synthetic oligonucleotide
  Antisense strand to SEQ ID NO: 2294440
uuucuucgaaaguggugac

SEQ ID NO: 2294442 - RNA, 19 nt, Artificial Sequence
  Description of Artificial Sequence: Synthetic oligonucleotide
  Sense strand starting at position 3052 of SEQ ID NO: 1884819
gggcgaaguucaguuuaug

SEQ ID NO: 2294443 - RNA, 19 nt, Artificial Sequence
  Description of Artificial Sequence: Synthetic oligonucleotide
  Antisense strand to SEQ ID NO: 2294442
cauaaacugaacuucgccc

SEQ ID NO: 2294444 - RNA, 19 nt, Artificial Sequence
  Description of Artificial Sequence: Synthetic oligonucleotide
  Sense strand starting at position 3194 of SEQ ID NO: 1884819
acagaagguccauggacuu

SEQ ID NO: 2294445 - RNA, 19 nt, Artificial Sequence
  Description of Artificial Sequence: Synthetic oligonucleotide
  Antisense strand to SEQ ID NO: 2294444
aaguccauggaccuucugu

SEQ ID NO: 2294446 - RNA, 19 nt, Artificial Sequence
  Description of Artificial Sequence: Synthetic oligonucleotide
  Sense strand starting at position 3255 of SEQ ID NO: 1884819
gccugagaacuuggagaga

SEQ ID NO: 2294447 - RNA, 19 nt, Artificial Sequence
  Description of Artificial Sequence: Synthetic oligonucleotide
  Antisense strand to SEQ ID NO: 2294446
ucucuccaaguucucaggc

SEQ ID NO: 2294448 - RNA, 19 nt, Artificial Sequence
  Description of Artificial Sequence: Synthetic oligonucleotide
  Sense strand starting at position 3310 of SEQ ID NO: 1884819
gucugagccuccuuaaacu

SEQ ID NO: 2294449 - RNA, 19 nt, Artificial Sequence
  Description of Artificial Sequence: Synthetic oligonucleotide
  Antisense strand to SEQ ID NO: 2294448
aguuuaaggaggcucagac

SEQ ID NO: 2294450 - RNA, 19 nt, Artificial Sequence
  Description of Artificial Sequence: Synthetic oligonucleotide
  Sense strand starting at position 3481 of SEQ ID NO: 1884819
gcgccuucugaggauugca

SEQ ID NO: 2294451 - RNA, 19 nt, Artificial Sequence
  Description of Artificial Sequence: Synthetic oligonucleotide
  Antisense strand to SEQ ID NO: 2294450
ugcaauccucagaaggcgc

SEQ ID NO: 2294452 - RNA, 19 nt, Artificial Sequence
  Description of Artificial Sequence: Synthetic oligonucleotide
  Sense strand starting at position 3872 of SEQ ID NO: 1884819
ucagcaucacccugagaau

SEQ ID NO: 2294453 - RNA, 19 nt, Artificial Sequence
  Description of Artificial Sequence: Synthetic oligonucleotide
  Antisense strand to SEQ ID NO: 2294452
auucucagggugaugcuga

SEQ ID NO: 2294454 - RNA, 19 nt, Artificial Sequence
  Description of Artificial Sequence: Synthetic oligonucleotide
  Sense strand starting at position 99 of SEQ ID NO: 1884820
ccgccuguccuguaucuau

SEQ ID NO: 2294455 - RNA, 19 nt, Artificial Sequence
  Description of Artificial Sequence: Synthetic oligonucleotide
  Antisense strand to SEQ ID NO: 2294454
auagauacaggacaggcgg

SEQ ID NO: 2294456 - RNA, 19 nt, Artificial Sequence
  Description of Artificial Sequence: Synthetic oligonucleotide
  Sense strand starting at position 182 of SEQ ID NO: 1884820
gggacagagucuucugggu

SEQ ID NO: 2294457 - RNA, 19 nt, Artificial Sequence
  Description of Artificial Sequence: Synthetic oligonucleotide
  Antisense strand to SEQ ID NO: 2294456
acccagaagacucuguccc

SEQ ID NO: 2294458 - RNA, 19 nt, Artificial Sequence
  Description of Artificial Sequence: Synthetic oligonucleotide
  Sense strand starting at position 184 of SEQ ID NO: 1884820
gacagagucuucugggucu

SEQ ID NO: 2294459 - RNA, 19 nt, Artificial Sequence
  Description of Artificial Sequence: Synthetic oligonucleotide
  Antisense strand to SEQ ID NO: 2294458
agacccagaagacucuguc

SEQ ID NO: 2294460 - RNA, 19 nt, Artificial Sequence
  Description of Artificial Sequence: Synthetic oligonucleotide
  Sense strand starting at position 261 of SEQ ID NO: 1884820
caaagaggccucgggaaau

SEQ ID NO: 2294461 - RNA, 19 nt, Artificial Sequence
  Description of Artificial Sequence: Synthetic oligonucleotide
  Antisense strand to SEQ ID NO: 2294460
auuucccgaggccucuuug

SEQ ID NO: 2294462 - RNA, 19 nt, Artificial Sequence
  Description of Artificial Sequence: Synthetic oligonucleotide
  Sense strand starting at position 280 of SEQ ID NO: 1884820
guugaaccuguaugugauc

SEQ ID NO: 2294463 - RNA, 19 nt, Artificial Sequence
  Description of Artificial Sequence: Synthetic oligonucleotide
  Antisense strand to SEQ ID NO: 2294462
gaucacauacagguucaac

SEQ ID NO: 2294464 - RNA, 19 nt, Artificial Sequence
  Description of Artificial Sequence: Synthetic oligonucleotide
  Sense strand starting at position 283 of SEQ ID NO: 1884820
gaaccuguaugugaucuca

SEQ ID NO: 2294465 - RNA, 19 nt, Artificial Sequence
  Description of Artificial Sequence: Synthetic oligonucleotide
  Antisense strand to SEQ ID NO: 2294464
ugagaucacauacagguuc

SEQ ID NO: 2294466 - RNA, 19 nt, Artificial Sequence
  Description of Artificial Sequence: Synthetic oligonucleotide
  Sense strand starting at position 322 of SEQ ID NO: 1884820
gucugucugccucaggaga

SEQ ID NO: 2294467 - RNA, 19 nt, Artificial Sequence
  Description of Artificial Sequence: Synthetic oligonucleotide
  Antisense strand to SEQ ID NO: 2294466
ucuccugaggcagacagac

SEQ ID NO: 2294468 - RNA, 19 nt, Artificial Sequence
  Description of Artificial Sequence: Synthetic oligonucleotide
  Sense strand starting at position 442 of SEQ ID NO: 1884820
uuggguuaucugcaacuga

SEQ ID NO: 2294469 - RNA, 19 nt, Artificial Sequence
  Description of Artificial Sequence: Synthetic oligonucleotide
  Antisense strand to SEQ ID NO: 2294468
ucaguugcagauaacccaa

SEQ ID NO: 2294470 - RNA, 19 nt, Artificial Sequence
  Description of Artificial Sequence: Synthetic oligonucleotide
  Sense strand starting at position 516 of SEQ ID NO: 1884820
gaugcagaguccucugacu

SEQ ID NO: 2294471 - RNA, 19 nt, Artificial Sequence
  Description of Artificial Sequence: Synthetic oligonucleotide
  Antisense strand to SEQ ID NO: 2294470
agucagaggacucugcauc

SEQ ID NO: 2294472 - RNA, 19 nt, Artificial Sequence
  Description of Artificial Sequence: Synthetic oligonucleotide
  Sense strand starting at position 547 of SEQ ID NO: 1884820
ggcugaguuuccggcucca

SEQ ID NO: 2294473 - RNA, 19 nt, Artificial Sequence
  Description of Artificial Sequence: Synthetic oligonucleotide
  Antisense strand to SEQ ID NO: 2294472
uggagccggaaacucagcc

SEQ ID NO: 2294474 - RNA, 19 nt, Artificial Sequence
  Description of Artificial Sequence: Synthetic oligonucleotide
  Sense strand starting at position 571 of SEQ ID NO: 1884820
gcgugucgcccugagguuu

SEQ ID NO: 2294475 - RNA, 19 nt, Artificial Sequence
  Description of Artificial Sequence: Synthetic oligonucleotide
  Antisense strand to SEQ ID NO: 2294474
aaaccucagggcgacacgc

SEQ ID NO: 2294476 - RNA, 19 nt, Artificial Sequence
  Description of Artificial Sequence: Synthetic oligonucleotide
  Sense strand starting at position 667 of SEQ ID NO: 1884820
cucguauugucucuccuuu

SEQ ID NO: 2294477 - RNA, 19 nt, Artificial Sequence
  Description of Artificial Sequence: Synthetic oligonucleotide
  Antisense strand to SEQ ID NO: 2294476
aaaggagagacaauacgag

SEQ ID NO: 2294478 - RNA, 19 nt, Artificial Sequence
  Description of Artificial Sequence: Synthetic oligonucleotide
  Sense strand starting at position 711 of SEQ ID NO: 1884820
gcuccaaagucacugcaaa

SEQ ID NO: 2294479 - RNA, 19 nt, Artificial Sequence
  Description of Artificial Sequence: Synthetic oligonucleotide
  Antisense strand to SEQ ID NO: 2294478
uuugcagugacuuuggagc

SEQ ID NO: 2294480 - RNA, 19 nt, Artificial Sequence
  Description of Artificial Sequence: Synthetic oligonucleotide
  Sense strand starting at position 723 of SEQ ID NO: 1884820
cugcaaauuuccuugcgac

SEQ ID NO: 2294481 - RNA, 19 nt, Artificial Sequence
  Description of Artificial Sequence: Synthetic oligonucleotide
  Antisense strand to SEQ ID NO: 2294480
gucgcaaggaaauuugcag

SEQ ID NO: 2294482 - RNA, 19 nt, Artificial Sequence
  Description of Artificial Sequence: Synthetic oligonucleotide
  Sense strand starting at position 724 of SEQ ID NO: 1884820
ugcaaauuuccuugcgaca

SEQ ID NO: 2294483 - RNA, 19 nt, Artificial Sequence
  Description of Artificial Sequence: Synthetic oligonucleotide
  Antisense strand to SEQ ID NO: 2294482
ugucgcaaggaaauuugca

SEQ ID NO: 2294484 - RNA, 19 nt, Artificial Sequence
  Description of Artificial Sequence: Synthetic oligonucleotide
  Sense strand starting at position 2143 of SEQ ID NO: 1884820
gccucugagugggaagagu

SEQ ID NO: 2294485 - RNA, 19 nt, Artificial Sequence
  Description of Artificial Sequence: Synthetic oligonucleotide
  Antisense strand to SEQ ID NO: 2294484
acucuucccacucagaggc

SEQ ID NO: 2294486 - RNA, 19 nt, Artificial Sequence
  Description of Artificial Sequence: Synthetic oligonucleotide
  Sense strand starting at position 2153 of SEQ ID NO: 1884820
gggaagaguucggagguca

SEQ ID NO: 2294487 - RNA, 19 nt, Artificial Sequence
  Description of Artificial Sequence: Synthetic oligonucleotide
  Antisense strand to SEQ ID NO: 2294486
ugaccuccgaacucuuccc

SEQ ID NO: 2294488 - RNA, 19 nt, Artificial Sequence
  Description of Artificial Sequence: Synthetic oligonucleotide
  Sense strand starting at position 2204 of SEQ ID NO: 1884820
gcgacaaucuccuugguuu

SEQ ID NO: 2294489 - RNA, 19 nt, Artificial Sequence
  Description of Artificial Sequence: Synthetic oligonucleotide
  Antisense strand to SEQ ID NO: 2294488
aaaccaaggagauugucgc

SEQ ID NO: 2294490 - RNA, 19 nt, Artificial Sequence
  Description of Artificial Sequence: Synthetic oligonucleotide
  Sense strand starting at position 2205 of SEQ ID NO: 1884820
cgacaaucuccuugguuuc

SEQ ID NO: 2294491 - RNA, 19 nt, Artificial Sequence
  Description of Artificial Sequence: Synthetic oligonucleotide
  Antisense strand to SEQ ID NO: 2294490
gaaaccaaggagauugucg

SEQ ID NO: 2294492 - RNA, 19 nt, Artificial Sequence
  Description of Artificial Sequence: Synthetic oligonucleotide
  Sense strand starting at position 2442 of SEQ ID NO: 1884820
gggacucuuuccuccagga

SEQ ID NO: 2294493 - RNA, 19 nt, Artificial Sequence
  Description of Artificial Sequence: Synthetic oligonucleotide
  Antisense strand to SEQ ID NO: 2294492
uccuggaggaaagaguccc

SEQ ID NO: 2294494 - RNA, 19 nt, Artificial Sequence
  Description of Artificial Sequence: Synthetic oligonucleotide
  Sense strand starting at position 2481 of SEQ ID NO: 1884820
ggccuugucgcuuggagaa

SEQ ID NO: 2294495 - RNA, 19 nt, Artificial Sequence
  Description of Artificial Sequence: Synthetic oligonucleotide
  Antisense strand to SEQ ID NO: 2294494
uucuccaagcgacaaggcc

SEQ ID NO: 2294496 - RNA, 19 nt, Artificial Sequence
  Description of Artificial Sequence: Synthetic oligonucleotide
  Sense strand starting at position 2483 of SEQ ID NO: 1884820
ccuugucgcuuggagaaga

SEQ ID NO: 2294497 - RNA, 19 nt, Artificial Sequence
  Description of Artificial Sequence: Synthetic oligonucleotide
  Antisense strand to SEQ ID NO: 2294496
ucuucuccaagcgacaagg

SEQ ID NO: 2294498 - RNA, 19 nt, Artificial Sequence
  Description of Artificial Sequence: Synthetic oligonucleotide
  Sense strand starting at position 2519 of SEQ ID NO: 1884820
ggugaaaccucuuuccucu

SEQ ID NO: 2294499 - RNA, 19 nt, Artificial Sequence
  Description of Artificial Sequence: Synthetic oligonucleotide
  Antisense strand to SEQ ID NO: 2294498
agaggaaagagguuucacc

SEQ ID NO: 2294500 - RNA, 19 nt, Artificial Sequence
  Description of Artificial Sequence: Synthetic oligonucleotide
  Sense strand starting at position 2539 of SEQ ID NO: 1884820
cuguuucuucgcuccuuga

SEQ ID NO: 2294501 - RNA, 19 nt, Artificial Sequence
  Description of Artificial Sequence: Synthetic oligonucleotide
  Antisense strand to SEQ ID NO: 2294500
ucaaggagcgaagaaacag

SEQ ID NO: 2294502 - RNA, 19 nt, Artificial Sequence
  Description of Artificial Sequence: Synthetic oligonucleotide
  Sense strand starting at position 2542 of SEQ ID NO: 1884820
uuucuucgcuccuugaaua

SEQ ID NO: 2294503 - RNA, 19 nt, Artificial Sequence
  Description of Artificial Sequence: Synthetic oligonucleotide
  Antisense strand to SEQ ID NO: 2294502
uauucaaggagcgaagaaa

SEQ ID NO: 2294504 - RNA, 19 nt, Artificial Sequence
  Description of Artificial Sequence: Synthetic oligonucleotide
  Sense strand starting at position 2619 of SEQ ID NO: 1884820
aucccugaggccuagagua

SEQ ID NO: 2294505 - RNA, 19 nt, Artificial Sequence
  Description of Artificial Sequence: Synthetic oligonucleotide
  Antisense strand to SEQ ID NO: 2294504
uacucuaggccucagggau

SEQ ID NO: 2294506 - RNA, 19 nt, Artificial Sequence
  Description of Artificial Sequence: Synthetic oligonucleotide
  Sense strand starting at position 2684 of SEQ ID NO: 1884820
ccgccuuuguguccagaca

SEQ ID NO: 2294507 - RNA, 19 nt, Artificial Sequence
  Description of Artificial Sequence: Synthetic oligonucleotide
  Antisense strand to SEQ ID NO: 2294506
ugucuggacacaaaggcgg

SEQ ID NO: 2294508 - RNA, 19 nt, Artificial Sequence
  Description of Artificial Sequence: Synthetic oligonucleotide
  Sense strand starting at position 3069 of SEQ ID NO: 1884820
ggcuaaacgucucugcuca

SEQ ID NO: 2294509 - RNA, 19 nt, Artificial Sequence
  Description of Artificial Sequence: Synthetic oligonucleotide
  Antisense strand to SEQ ID NO: 2294508
ugagcagagacguuuagcc

SEQ ID NO: 2294510 - RNA, 19 nt, Artificial Sequence
  Description of Artificial Sequence: Synthetic oligonucleotide
  Sense strand starting at position 3070 of SEQ ID NO: 1884820
gcuaaacgucucugcucau

SEQ ID NO: 2294511 - RNA, 19 nt, Artificial Sequence
  Description of Artificial Sequence: Synthetic oligonucleotide
  Antisense strand to SEQ ID NO: 2294510
augagcagagacguuuagc

SEQ ID NO: 2294512 - RNA, 19 nt, Artificial Sequence
  Description of Artificial Sequence: Synthetic oligonucleotide
  Sense strand starting at position 3271 of SEQ ID NO: 1884820
gagauauucuguuucuugu

SEQ ID NO: 2294513 - RNA, 19 nt, Artificial Sequence
  Description of Artificial Sequence: Synthetic oligonucleotide
  Antisense strand to SEQ ID NO: 2294512
acaagaaacagaauaucuc

SEQ ID NO: 2294514 - RNA, 19 nt, Artificial Sequence
  Description of Artificial Sequence: Synthetic oligonucleotide
  Sense strand starting at position 3275 of SEQ ID NO: 1884820
uauucuguuucuuguugua

SEQ ID NO: 2294515 - RNA, 19 nt, Artificial Sequence
  Description of Artificial Sequence: Synthetic oligonucleotide
  Antisense strand to SEQ ID NO: 2294514
uacaacaagaaacagaaua

SEQ ID NO: 2294516 - RNA, 19 nt, Artificial Sequence
  Description of Artificial Sequence: Synthetic oligonucleotide
  Sense strand starting at position 3277 of SEQ ID NO: 1884820
uucuguuucuuguuguaag

SEQ ID NO: 2294517 - RNA, 19 nt, Artificial Sequence
  Description of Artificial Sequence: Synthetic oligonucleotide
  Antisense strand to SEQ ID NO: 2294516
cuuacaacaagaaacagaa

SEQ ID NO: 2294518 - RNA, 19 nt, Artificial Sequence
  Description of Artificial Sequence: Synthetic oligonucleotide
  Sense strand starting at position 3278 of SEQ ID NO: 1884820
ucuguuucuuguuguaagu

SEQ ID NO: 2294519 - RNA, 19 nt, Artificial Sequence
  Description of Artificial Sequence: Synthetic oligonucleotide
  Antisense strand to SEQ ID NO: 2294518
acuuacaacaagaaacaga

SEQ ID NO: 2294520 - RNA, 19 nt, Artificial Sequence
  Description of Artificial Sequence: Synthetic oligonucleotide
  Sense strand starting at position 320 of SEQ ID NO: 1884821
acaaguuguucuccagauu

SEQ ID NO: 2294521 - RNA, 19 nt, Artificial Sequence
  Description of Artificial Sequence: Synthetic oligonucleotide
  Antisense strand to SEQ ID NO: 2294520
aaucuggagaacaacuugu

SEQ ID NO: 2294522 - RNA, 19 nt, Artificial Sequence
  Description of Artificial Sequence: Synthetic oligonucleotide
  Sense strand starting at position 358 of SEQ ID NO: 1884821
uggagaguuuaguucgcuu

SEQ ID NO: 2294523 - RNA, 19 nt, Artificial Sequence
  Description of Artificial Sequence: Synthetic oligonucleotide
  Antisense strand to SEQ ID NO: 2294522
aagcgaacuaaacucucca

SEQ ID NO: 2294524 - RNA, 19 nt, Artificial Sequence
  Description of Artificial Sequence: Synthetic oligonucleotide
  Sense strand starting at position 360 of SEQ ID NO: 1884821
gagaguuuaguucgcuuug

SEQ ID NO: 2294525 - RNA, 19 nt, Artificial Sequence
  Description of Artificial Sequence: Synthetic oligonucleotide
  Antisense strand to SEQ ID NO: 2294524
caaagcgaacuaaacucuc

SEQ ID NO: 2294526 - RNA, 19 nt, Artificial Sequence
  Description of Artificial Sequence: Synthetic oligonucleotide
  Sense strand starting at position 362 of SEQ ID NO: 1884821
gaguuuaguucgcuuugga

SEQ ID NO: 2294527 - RNA, 19 nt, Artificial Sequence
  Description of Artificial Sequence: Synthetic oligonucleotide
  Antisense strand to SEQ ID NO: 2294526
uccaaagcgaacuaaacuc

SEQ ID NO: 2294528 - RNA, 19 nt, Artificial Sequence
  Description of Artificial Sequence: Synthetic oligonucleotide
  Sense strand starting at position 365 of SEQ ID NO: 1884821
uuuaguucgcuuuggaaga

SEQ ID NO: 2294529 - RNA, 19 nt, Artificial Sequence
  Description of Artificial Sequence: Synthetic oligonucleotide
  Antisense strand to SEQ ID NO: 2294528
ucuuccaaagcgaacuaaa

SEQ ID NO: 2294530 - RNA, 19 nt, Artificial Sequence
  Description of Artificial Sequence: Synthetic oligonucleotide
  Sense strand starting at position 407 of SEQ ID NO: 1884821
cuguuugaaacauacgguu

SEQ ID NO: 2294531 - RNA, 19 nt, Artificial Sequence
  Description of Artificial Sequence: Synthetic oligonucleotide
  Antisense strand to SEQ ID NO: 2294530
aaccguauguuucaaacag

SEQ ID NO: 2294532 - RNA, 19 nt, Artificial Sequence
  Description of Artificial Sequence: Synthetic oligonucleotide
  Sense strand starting at position 502 of SEQ ID NO: 1884821
ccgugcgcucuguaaagga

SEQ ID NO: 2294533 - RNA, 19 nt, Artificial Sequence
  Description of Artificial Sequence: Synthetic oligonucleotide
  Antisense strand to SEQ ID NO: 2294532
uccuuuacagagcgcacgg

SEQ ID NO: 2294534 - RNA, 19 nt, Artificial Sequence
  Description of Artificial Sequence: Synthetic oligonucleotide
  Sense strand starting at position 572 of SEQ ID NO: 1884821
auacgugacuccuccaaac

SEQ ID NO: 2294535 - RNA, 19 nt, Artificial Sequence
  Description of Artificial Sequence: Synthetic oligonucleotide
  Antisense strand to SEQ ID NO: 2294534
guuuggaggagucacguau

SEQ ID NO: 2294536 - RNA, 19 nt, Artificial Sequence
  Description of Artificial Sequence: Synthetic oligonucleotide
  Sense strand starting at position 612 of SEQ ID NO: 1884821
ccucuuucuuucccggaau

SEQ ID NO: 2294537 - RNA, 19 nt, Artificial Sequence
  Description of Artificial Sequence: Synthetic oligonucleotide
  Antisense strand to SEQ ID NO: 2294536
auuccgggaaagaaagagg

SEQ ID NO: 2294538 - RNA, 19 nt, Artificial Sequence
  Description of Artificial Sequence: Synthetic oligonucleotide
  Sense strand starting at position 614 of SEQ ID NO: 1884821
ucuuucuuucccggaauau

SEQ ID NO: 2294539 - RNA, 19 nt, Artificial Sequence
  Description of Artificial Sequence: Synthetic oligonucleotide
  Antisense strand to SEQ ID NO: 2294538
auauuccgggaaagaaaga

SEQ ID NO: 2294540 - RNA, 19 nt, Artificial Sequence
  Description of Artificial Sequence: Synthetic oligonucleotide
  Sense strand starting at position 615 of SEQ ID NO: 1884821
cuuucuuucccggaauauu

SEQ ID NO: 2294541 - RNA, 19 nt, Artificial Sequence
  Description of Artificial Sequence: Synthetic oligonucleotide
  Antisense strand to SEQ ID NO: 2294540
aauauuccgggaaagaaag

SEQ ID NO: 2294542 - RNA, 19 nt, Artificial Sequence
  Description of Artificial Sequence: Synthetic oligonucleotide
  Sense strand starting at position 623 of SEQ ID NO: 1884821
cccggaauauucccuguuu

SEQ ID NO: 2294543 - RNA, 19 nt, Artificial Sequence
  Description of Artificial Sequence: Synthetic oligonucleotide
  Antisense strand to SEQ ID NO: 2294542
aaacagggaauauuccggg

SEQ ID NO: 2294544 - RNA, 19 nt, Artificial Sequence
  Description of Artificial Sequence: Synthetic oligonucleotide
  Sense strand starting at position 1017 of SEQ ID NO: 1884821
gcagaaacuuuaguccugu

SEQ ID NO: 2294545 - RNA, 19 nt, Artificial Sequence
  Description of Artificial Sequence: Synthetic oligonucleotide
  Antisense strand to SEQ ID NO: 2294544
acaggacuaaaguuucugc

SEQ ID NO: 2294546 - RNA, 19 nt, Artificial Sequence
  Description of Artificial Sequence: Synthetic oligonucleotide
  Sense strand starting at position 1025 of SEQ ID NO: 1884821
uuuaguccuguuugguauu

SEQ ID NO: 2294547 - RNA, 19 nt, Artificial Sequence
  Description of Artificial Sequence: Synthetic oligonucleotide
  Antisense strand to SEQ ID NO: 2294546
aauaccaaacaggacuaaa

SEQ ID NO: 2294548 - RNA, 19 nt, Artificial Sequence
  Description of Artificial Sequence: Synthetic oligonucleotide
  Sense strand starting at position 1031 of SEQ ID NO: 1884821
ccuguuugguauuccuuaa

SEQ ID NO: 2294549 - RNA, 19 nt, Artificial Sequence
  Description of Artificial Sequence: Synthetic oligonucleotide
  Antisense strand to SEQ ID NO: 2294548
uuaaggaauaccaaacagg

SEQ ID NO: 2294550 - RNA, 19 nt, Artificial Sequence
  Description of Artificial Sequence: Synthetic oligonucleotide
  Sense strand starting at position 1181 of SEQ ID NO: 1884821
ggagaaguaccugauucgu

SEQ ID NO: 2294551 - RNA, 19 nt, Artificial Sequence
  Description of Artificial Sequence: Synthetic oligonucleotide
  Antisense strand to SEQ ID NO: 2294550
acgaaucagguacuucucc

SEQ ID NO: 2294552 - RNA, 19 nt, Artificial Sequence
  Description of Artificial Sequence: Synthetic oligonucleotide
  Sense strand starting at position 1183 of SEQ ID NO: 1884821
agaaguaccugauucgugu

SEQ ID NO: 2294553 - RNA, 19 nt, Artificial Sequence
  Description of Artificial Sequence: Synthetic oligonucleotide
  Antisense strand to SEQ ID NO: 2294552
acacgaaucagguacuucu

SEQ ID NO: 2294554 - RNA, 19 nt, Artificial Sequence
  Description of Artificial Sequence: Synthetic oligonucleotide
  Sense strand starting at position 1517 of SEQ ID NO: 1884821
acgucacggccgucugaau

SEQ ID NO: 2294555 - RNA, 19 nt, Artificial Sequence
  Description of Artificial Sequence: Synthetic oligonucleotide
  Antisense strand to SEQ ID NO: 2294554
auucagacggccgugacgu

SEQ ID NO: 2294556 - RNA, 19 nt, Artificial Sequence
  Description of Artificial Sequence: Synthetic oligonucleotide
  Sense strand starting at position 1530 of SEQ ID NO: 1884821
cugaaucaucaaggccauu

SEQ ID NO: 2294557 - RNA, 19 nt, Artificial Sequence
  Description of Artificial Sequence: Synthetic oligonucleotide
  Antisense strand to SEQ ID NO: 2294556
aauggccuugaugauucag

SEQ ID NO: 2294558 - RNA, 19 nt, Artificial Sequence
  Description of Artificial Sequence: Synthetic oligonucleotide
  Sense strand starting at position 1584 of SEQ ID NO: 1884821
aaccgaaugcgcggauaau

SEQ ID NO: 2294559 - RNA, 19 nt, Artificial Sequence
  Description of Artificial Sequence: Synthetic oligonucleotide
  Antisense strand to SEQ ID NO: 2294558
auuauccgcgcauucgguu

SEQ ID NO: 2294560 - RNA, 19 nt, Artificial Sequence
  Description of Artificial Sequence: Synthetic oligonucleotide
  Sense strand starting at position 1585 of SEQ ID NO: 1884821
accgaaugcgcggauaauu

SEQ ID NO: 2294561 - RNA, 19 nt, Artificial Sequence
  Description of Artificial Sequence: Synthetic oligonucleotide
  Antisense strand to SEQ ID NO: 2294560
aauuauccgcgcauucggu

SEQ ID NO: 2294562 - RNA, 19 nt, Artificial Sequence
  Description of Artificial Sequence: Synthetic oligonucleotide
  Sense strand starting at position 1595 of SEQ ID NO: 1884821
cggauaauuacggagcuga

SEQ ID NO: 2294563 - RNA, 19 nt, Artificial Sequence
  Description of Artificial Sequence: Synthetic oligonucleotide
  Antisense strand to SEQ ID NO: 2294562
ucagcuccguaauuauccg

SEQ ID NO: 2294564 - RNA, 19 nt, Artificial Sequence
  Description of Artificial Sequence: Synthetic oligonucleotide
  Sense strand starting at position 2589 of SEQ ID NO: 1884821
cccagaccauuucgggaau

SEQ ID NO: 2294565 - RNA, 19 nt, Artificial Sequence
  Description of Artificial Sequence: Synthetic oligonucleotide
  Antisense strand to SEQ ID NO: 2294564
auucccgaaauggucuggg

SEQ ID NO: 2294566 - RNA, 19 nt, Artificial Sequence
  Description of Artificial Sequence: Synthetic oligonucleotide
  Sense strand starting at position 2808 of SEQ ID NO: 1884821
gugguuugcuuucucaaug

SEQ ID NO: 2294567 - RNA, 19 nt, Artificial Sequence
  Description of Artificial Sequence: Synthetic oligonucleotide
  Antisense strand to SEQ ID NO: 2294566
cauugagaaagcaaaccac

SEQ ID NO: 2294568 - RNA, 19 nt, Artificial Sequence
  Description of Artificial Sequence: Synthetic oligonucleotide
  Sense strand starting at position 2964 of SEQ ID NO: 1884821
aauuguuuccugcgaaacg

SEQ ID NO: 2294569 - RNA, 19 nt, Artificial Sequence
  Description of Artificial Sequence: Synthetic oligonucleotide
  Antisense strand to SEQ ID NO: 2294568
cguuucgcaggaaacaauu

SEQ ID NO: 2294570 - RNA, 19 nt, Artificial Sequence
  Description of Artificial Sequence: Synthetic oligonucleotide
  Sense strand starting at position 2983 of SEQ ID NO: 1884821
cgauuuguuguuugugggu

SEQ ID NO: 2294571 - RNA, 19 nt, Artificial Sequence
  Description of Artificial Sequence: Synthetic oligonucleotide
  Antisense strand to SEQ ID NO: 2294570
acccacaaacaacaaaucg

SEQ ID NO: 2294572 - RNA, 19 nt, Artificial Sequence
  Description of Artificial Sequence: Synthetic oligonucleotide
  Sense strand starting at position 3133 of SEQ ID NO: 1884821
cuuggauggcguuggaaca

SEQ ID NO: 2294573 - RNA, 19 nt, Artificial Sequence
  Description of Artificial Sequence: Synthetic oligonucleotide
  Antisense strand to SEQ ID NO: 2294572
uguuccaacgccauccaag

SEQ ID NO: 2294574 - RNA, 19 nt, Artificial Sequence
  Description of Artificial Sequence: Synthetic oligonucleotide
  Sense strand starting at position 3258 of SEQ ID NO: 1884821
aaaugagugguugggaaau

SEQ ID NO: 2294575 - RNA, 19 nt, Artificial Sequence
  Description of Artificial Sequence: Synthetic oligonucleotide
  Antisense strand to SEQ ID NO: 2294574
auuucccaaccacucauuu

SEQ ID NO: 2294576 - RNA, 19 nt, Artificial Sequence
  Description of Artificial Sequence: Synthetic oligonucleotide
  Sense strand starting at position 3270 of SEQ ID NO: 1884821
gggaaauuucugugugcgu

SEQ ID NO: 2294577 - RNA, 19 nt, Artificial Sequence
  Description of Artificial Sequence: Synthetic oligonucleotide
  Antisense strand to SEQ ID NO: 2294576
acgcacacagaaauuuccc

SEQ ID NO: 2294578 - RNA, 19 nt, Artificial Sequence
  Description of Artificial Sequence: Synthetic oligonucleotide
  Sense strand starting at position 3271 of SEQ ID NO: 1884821
ggaaauuucugugugcgug

SEQ ID NO: 2294579 - RNA, 19 nt, Artificial Sequence
  Description of Artificial Sequence: Synthetic oligonucleotide
  Antisense strand to SEQ ID NO: 2294578
cacgcacacagaaauuucc

SEQ ID NO: 2294580 - RNA, 19 nt, Artificial Sequence
  Description of Artificial Sequence: Synthetic oligonucleotide
  Sense strand starting at position 3420 of SEQ ID NO: 1884821
ucgggaucuuucucugaua

SEQ ID NO: 2294581 - RNA, 19 nt, Artificial Sequence
  Description of Artificial Sequence: Synthetic oligonucleotide
  Antisense strand to SEQ ID NO: 2294580
uaucagagaaagaucccga

SEQ ID NO: 2294582 - RNA, 19 nt, Artificial Sequence
  Description of Artificial Sequence: Synthetic oligonucleotide
  Sense strand starting at position 3421 of SEQ ID NO: 1884821
cgggaucuuucucugauac

SEQ ID NO: 2294583 - RNA, 19 nt, Artificial Sequence
  Description of Artificial Sequence: Synthetic oligonucleotide
  Antisense strand to SEQ ID NO: 2294582
guaucagagaaagaucccg

SEQ ID NO: 2294584 - RNA, 19 nt, Artificial Sequence
  Description of Artificial Sequence: Synthetic oligonucleotide
  Sense strand starting at position 3422 of SEQ ID NO: 1884821
gggaucuuucucugauacu

SEQ ID NO: 2294585 - RNA, 19 nt, Artificial Sequence
  Description of Artificial Sequence: Synthetic oligonucleotide
  Antisense strand to SEQ ID NO: 2294584
aguaucagagaaagauccc

SEQ ID NO: 2294586 - RNA, 19 nt, Artificial Sequence
  Description of Artificial Sequence: Synthetic oligonucleotide
  Sense strand starting at position 3601 of SEQ ID NO: 1884821
gcucauuggguguagagga

SEQ ID NO: 2294587 - RNA, 19 nt, Artificial Sequence
  Description of Artificial Sequence: Synthetic oligonucleotide
  Antisense strand to SEQ ID NO: 2294586
uccucuacacccaaugagc

SEQ ID NO: 2294588 - RNA, 19 nt, Artificial Sequence
  Description of Artificial Sequence: Synthetic oligonucleotide
  Sense strand starting at position 3667 of SEQ ID NO: 1884821
uggugcuuuguauauggau

SEQ ID NO: 2294589 - RNA, 19 nt, Artificial Sequence
  Description of Artificial Sequence: Synthetic oligonucleotide
  Antisense strand to SEQ ID NO: 2294588
auccauauacaaagcacca

SEQ ID NO: 2294590 - RNA, 19 nt, Artificial Sequence
  Description of Artificial Sequence: Synthetic oligonucleotide
  Sense strand starting at position 3739 of SEQ ID NO: 1884821
auugcaugauccuugcaca

SEQ ID NO: 2294591 - RNA, 19 nt, Artificial Sequence
  Description of Artificial Sequence: Synthetic oligonucleotide
  Antisense strand to SEQ ID NO: 2294590
ugugcaaggaucaugcaau

SEQ ID NO: 2294592 - RNA, 19 nt, Artificial Sequence
  Description of Artificial Sequence: Synthetic oligonucleotide
  Sense strand starting at position 3834 of SEQ ID NO: 1884821
aaagguggucuugguaaau

SEQ ID NO: 2294593 - RNA, 19 nt, Artificial Sequence
  Description of Artificial Sequence: Synthetic oligonucleotide
  Antisense strand to SEQ ID NO: 2294592
auuuaccaagaccaccuuu

SEQ ID NO: 2294594 - RNA, 19 nt, Artificial Sequence
  Description of Artificial Sequence: Synthetic oligonucleotide
  Sense strand starting at position 3888 of SEQ ID NO: 1884821
ugguguguucaugaggaua

SEQ ID NO: 2294595 - RNA, 19 nt, Artificial Sequence
  Description of Artificial Sequence: Synthetic oligonucleotide
  Antisense strand to SEQ ID NO: 2294594
uauccucaugaacacacca

SEQ ID NO: 2294596 - RNA, 19 nt, Artificial Sequence
  Description of Artificial Sequence: Synthetic oligonucleotide
  Sense strand starting at position 3930 of SEQ ID NO: 1884821
gccucaaagccuuucguuu

SEQ ID NO: 2294597 - RNA, 19 nt, Artificial Sequence
  Description of Artificial Sequence: Synthetic oligonucleotide
  Antisense strand to SEQ ID NO: 2294596
aaacgaaaggcuuugaggc

SEQ ID NO: 2294598 - RNA, 19 nt, Artificial Sequence
  Description of Artificial Sequence: Synthetic oligonucleotide
  Sense strand starting at position 3954 of SEQ ID NO: 1884821
gugugcagugugaagguuu

SEQ ID NO: 2294599 - RNA, 19 nt, Artificial Sequence
  Description of Artificial Sequence: Synthetic oligonucleotide
  Antisense strand to SEQ ID NO: 2294598
aaaccuucacacugcacac

SEQ ID NO: 2294600 - RNA, 19 nt, Artificial Sequence
  Description of Artificial Sequence: Synthetic oligonucleotide
  Sense strand starting at position 59 of SEQ ID NO: 1884822
ucuuccugucccugggauu

SEQ ID NO: 2294601 - RNA, 19 nt, Artificial Sequence
  Description of Artificial Sequence: Synthetic oligonucleotide
  Antisense strand to SEQ ID NO: 2294600
aaucccagggacaggaaga

SEQ ID NO: 2294602 - RNA, 19 nt, Artificial Sequence
  Description of Artificial Sequence: Synthetic oligonucleotide
  Sense strand starting at position 557 of SEQ ID NO: 1884822
guaguaagacgaugcuuac

SEQ ID NO: 2294603 - RNA, 19 nt, Artificial Sequence
  Description of Artificial Sequence: Synthetic oligonucleotide
  Antisense strand to SEQ ID NO: 2294602
guaagcaucgucuuacuac

SEQ ID NO: 2294604 - RNA, 19 nt, Artificial Sequence
  Description of Artificial Sequence: Synthetic oligonucleotide
  Sense strand starting at position 575 of SEQ ID NO: 1884822
cgcugugugcuuccucaaa

SEQ ID NO: 2294605 - RNA, 19 nt, Artificial Sequence
  Description of Artificial Sequence: Synthetic oligonucleotide
  Antisense strand to SEQ ID NO: 2294604
uuugaggaagcacacagcg

SEQ ID NO: 2294606 - RNA, 19 nt, Artificial Sequence
  Description of Artificial Sequence: Synthetic oligonucleotide
  Sense strand starting at position 785 of SEQ ID NO: 1884822
aaggcuucccauuggaguu

SEQ ID NO: 2294607 - RNA, 19 nt, Artificial Sequence
  Description of Artificial Sequence: Synthetic oligonucleotide
  Antisense strand to SEQ ID NO: 2294606
aacuccaaugggaagccuu

SEQ ID NO: 2294608 - RNA, 19 nt, Artificial Sequence
  Description of Artificial Sequence: Synthetic oligonucleotide
  Sense strand starting at position 795 of SEQ ID NO: 1884822
auuggaguuucccugaaag

SEQ ID NO: 2294609 - RNA, 19 nt, Artificial Sequence
  Description of Artificial Sequence: Synthetic oligonucleotide
  Antisense strand to SEQ ID NO: 2294608
cuuucagggaaacuccaau

SEQ ID NO: 2294610 - RNA, 19 nt, Artificial Sequence
  Description of Artificial Sequence: Synthetic oligonucleotide
  Sense strand starting at position 1149 of SEQ ID NO: 1884822
cuuucuuggaagugcgaua

SEQ ID NO: 2294611 - RNA, 19 nt, Artificial Sequence
  Description of Artificial Sequence: Synthetic oligonucleotide
  Antisense strand to SEQ ID NO: 2294610
uaucgcacuuccaagaaag

SEQ ID NO: 2294612 - RNA, 19 nt, Artificial Sequence
  Description of Artificial Sequence: Synthetic oligonucleotide
  Sense strand starting at position 1174 of SEQ ID NO: 1884822
aaguauuuggcguggcuua

SEQ ID NO: 2294613 - RNA, 19 nt, Artificial Sequence
  Description of Artificial Sequence: Synthetic oligonucleotide
  Antisense strand to SEQ ID NO: 2294612
uaagccacgccaaauacuu

SEQ ID NO: 2294614 - RNA, 19 nt, Artificial Sequence
  Description of Artificial Sequence: Synthetic oligonucleotide
  Sense strand starting at position 1286 of SEQ ID NO: 1884822
gccacugagcuauaaguga

SEQ ID NO: 2294615 - RNA, 19 nt, Artificial Sequence
  Description of Artificial Sequence: Synthetic oligonucleotide
  Antisense strand to SEQ ID NO: 2294614
ucacuuauagcucaguggc

SEQ ID NO: 2294616 - RNA, 19 nt, Artificial Sequence
  Description of Artificial Sequence: Synthetic oligonucleotide
  Sense strand starting at position 1293 of SEQ ID NO: 1884822
agcuauaagugaguagcaa

SEQ ID NO: 2294617 - RNA, 19 nt, Artificial Sequence
  Description of Artificial Sequence: Synthetic oligonucleotide
  Antisense strand to SEQ ID NO: 2294616
uugcuacucacuuauagcu

SEQ ID NO: 2294618 - RNA, 19 nt, Artificial Sequence
  Description of Artificial Sequence: Synthetic oligonucleotide
  Sense strand starting at position 1294 of SEQ ID NO: 1884822
gcuauaagugaguagcaag

SEQ ID NO: 2294619 - RNA, 19 nt, Artificial Sequence
  Description of Artificial Sequence: Synthetic oligonucleotide
  Antisense strand to SEQ ID NO: 2294618
cuugcuacucacuuauagc

SEQ ID NO: 2294620 - RNA, 19 nt, Artificial Sequence
  Description of Artificial Sequence: Synthetic oligonucleotide
  Sense strand starting at position 1308 of SEQ ID NO: 1884822
gcaagaugcgcuuaaggac

SEQ ID NO: 2294621 - RNA, 19 nt, Artificial Sequence
  Description of Artificial Sequence: Synthetic oligonucleotide
  Antisense strand to SEQ ID NO: 2294620
guccuuaagcgcaucuugc

SEQ ID NO: 2294622 - RNA, 19 nt, Artificial Sequence
  Description of Artificial Sequence: Synthetic oligonucleotide
  Sense strand starting at position 1400 of SEQ ID NO: 1884822
gguggagaugcuugcaaga

SEQ ID NO: 2294623 - RNA, 19 nt, Artificial Sequence
  Description of Artificial Sequence: Synthetic oligonucleotide
  Antisense strand to SEQ ID NO: 2294622
ucuugcaagcaucuccacc

SEQ ID NO: 2294624 - RNA, 19 nt, Artificial Sequence
  Description of Artificial Sequence: Synthetic oligonucleotide
  Sense strand starting at position 2045 of SEQ ID NO: 1884822
uaaagugucacauggugga

SEQ ID NO: 2294625 - RNA, 19 nt, Artificial Sequence
  Description of Artificial Sequence: Synthetic oligonucleotide
  Antisense strand to SEQ ID NO: 2294624
uccaccaugugacacuuua

SEQ ID NO: 2294626 - RNA, 19 nt, Artificial Sequence
  Description of Artificial Sequence: Synthetic oligonucleotide
  Sense strand starting at position 2385 of SEQ ID NO: 1884822
ugcugaauucggcugcauu

SEQ ID NO: 2294627 - RNA, 19 nt, Artificial Sequence
  Description of Artificial Sequence: Synthetic oligonucleotide
  Antisense strand to SEQ ID NO: 2294626
aaugcagccgaauucagca

SEQ ID NO: 2294628 - RNA, 19 nt, Artificial Sequence
  Description of Artificial Sequence: Synthetic oligonucleotide
  Sense strand starting at position 2388 of SEQ ID NO: 1884822
ugaauucggcugcauuauu

SEQ ID NO: 2294629 - RNA, 19 nt, Artificial Sequence
  Description of Artificial Sequence: Synthetic oligonucleotide
  Antisense strand to SEQ ID NO: 2294628
aauaaugcagccgaauuca

SEQ ID NO: 2294630 - RNA, 19 nt, Artificial Sequence
  Description of Artificial Sequence: Synthetic oligonucleotide
  Sense strand starting at position 2688 of SEQ ID NO: 1884822
gggcuuucuaaagggaaac

SEQ ID NO: 2294631 - RNA, 19 nt, Artificial Sequence
  Description of Artificial Sequence: Synthetic oligonucleotide
  Antisense strand to SEQ ID NO: 2294630
guuucccuuuagaaagccc

SEQ ID NO: 2294632 - RNA, 19 nt, Artificial Sequence
  Description of Artificial Sequence: Synthetic oligonucleotide
  Sense strand starting at position 2701 of SEQ ID NO: 1884822
ggaaacuucuugucugcuu

SEQ ID NO: 2294633 - RNA, 19 nt, Artificial Sequence
  Description of Artificial Sequence: Synthetic oligonucleotide
  Antisense strand to SEQ ID NO: 2294632
aagcagacaagaaguuucc

SEQ ID NO: 2294634 - RNA, 19 nt, Artificial Sequence
  Description of Artificial Sequence: Synthetic oligonucleotide
  Sense strand starting at position 2771 of SEQ ID NO: 1884822
cgauuuaaugcgcagugga

SEQ ID NO: 2294635 - RNA, 19 nt, Artificial Sequence
  Description of Artificial Sequence: Synthetic oligonucleotide
  Antisense strand to SEQ ID NO: 2294634
uccacugcgcauuaaaucg

SEQ ID NO: 2294636 - RNA, 19 nt, Artificial Sequence
  Description of Artificial Sequence: Synthetic oligonucleotide
  Sense strand starting at position 2882 of SEQ ID NO: 1884822
gcgucugcaguugucacaa

SEQ ID NO: 2294637 - RNA, 19 nt, Artificial Sequence
  Description of Artificial Sequence: Synthetic oligonucleotide
  Antisense strand to SEQ ID NO: 2294636
uugugacaacugcagacgc

SEQ ID NO: 2294638 - RNA, 19 nt, Artificial Sequence
  Description of Artificial Sequence: Synthetic oligonucleotide
  Sense strand starting at position 2950 of SEQ ID NO: 1884822
gaaugaaaccugugaucuu

SEQ ID NO: 2294639 - RNA, 19 nt, Artificial Sequence
  Description of Artificial Sequence: Synthetic oligonucleotide
  Antisense strand to SEQ ID NO: 2294638
aagaucacagguuucauuc

SEQ ID NO: 2294640 - RNA, 19 nt, Artificial Sequence
  Description of Artificial Sequence: Synthetic oligonucleotide
  Sense strand starting at position 2953 of SEQ ID NO: 1884822
ugaaaccugugaucuuaaa

SEQ ID NO: 2294641 - RNA, 19 nt, Artificial Sequence
  Description of Artificial Sequence: Synthetic oligonucleotide
  Antisense strand to SEQ ID NO: 2294640
uuuaagaucacagguuuca

SEQ ID NO: 2294642 - RNA, 19 nt, Artificial Sequence
  Description of Artificial Sequence: Synthetic oligonucleotide
  Sense strand starting at position 2965 of SEQ ID NO: 1884822
ucuuaaaucgacugggauu

SEQ ID NO: 2294643 - RNA, 19 nt, Artificial Sequence
  Description of Artificial Sequence: Synthetic oligonucleotide
  Antisense strand to SEQ ID NO: 2294642
aaucccagucgauuuaaga

SEQ ID NO: 2294644 - RNA, 19 nt, Artificial Sequence
  Description of Artificial Sequence: Synthetic oligonucleotide
  Sense strand starting at position 2966 of SEQ ID NO: 1884822
cuuaaaucgacugggauuc

SEQ ID NO: 2294645 - RNA, 19 nt, Artificial Sequence
  Description of Artificial Sequence: Synthetic oligonucleotide
  Antisense strand to SEQ ID NO: 2294644
gaaucccagucgauuuaag

SEQ ID NO: 2294646 - RNA, 19 nt, Artificial Sequence
  Description of Artificial Sequence: Synthetic oligonucleotide
  Sense strand starting at position 3009 of SEQ ID NO: 1884822
cgggaugaguccagagaug

SEQ ID NO: 2294647 - RNA, 19 nt, Artificial Sequence
  Description of Artificial Sequence: Synthetic oligonucleotide
  Antisense strand to SEQ ID NO: 2294646
caucucuggacucaucccg

SEQ ID NO: 2294648 - RNA, 19 nt, Artificial Sequence
  Description of Artificial Sequence: Synthetic oligonucleotide
  Sense strand starting at position 3020 of SEQ ID NO: 1884822
cagagauggcuccaaguug

SEQ ID NO: 2294649 - RNA, 19 nt, Artificial Sequence
  Description of Artificial Sequence: Synthetic oligonucleotide
  Antisense strand to SEQ ID NO: 2294648
caacuuggagccaucucug

SEQ ID NO: 2294650 - RNA, 19 nt, Artificial Sequence
  Description of Artificial Sequence: Synthetic oligonucleotide
  Sense strand starting at position 3084 of SEQ ID NO: 1884822
cgcagaguauaaccaagau

SEQ ID NO: 2294651 - RNA, 19 nt, Artificial Sequence
  Description of Artificial Sequence: Synthetic oligonucleotide
  Antisense strand to SEQ ID NO: 2294650
aucuugguuauacucugcg

SEQ ID NO: 2294652 - RNA, 19 nt, Artificial Sequence
  Description of Artificial Sequence: Synthetic oligonucleotide
  Sense strand starting at position 3093 of SEQ ID NO: 1884822
uaaccaagauucuucgagu

SEQ ID NO: 2294653 - RNA, 19 nt, Artificial Sequence
  Description of Artificial Sequence: Synthetic oligonucleotide
  Antisense strand to SEQ ID NO: 2294652
acucgaagaaucuugguua

SEQ ID NO: 2294654 - RNA, 19 nt, Artificial Sequence
  Description of Artificial Sequence: Synthetic oligonucleotide
  Sense strand starting at position 3094 of SEQ ID NO: 1884822
aaccaagauucuucgaguc

SEQ ID NO: 2294655 - RNA, 19 nt, Artificial Sequence
  Description of Artificial Sequence: Synthetic oligonucleotide
  Antisense strand to SEQ ID NO: 2294654
gacucgaagaaucuugguu

SEQ ID NO: 2294656 - RNA, 19 nt, Artificial Sequence
  Description of Artificial Sequence: Synthetic oligonucleotide
  Sense strand starting at position 3101 of SEQ ID NO: 1884822
auucuucgagucugugaac

SEQ ID NO: 2294657 - RNA, 19 nt, Artificial Sequence
  Description of Artificial Sequence: Synthetic oligonucleotide
  Antisense strand to SEQ ID NO: 2294656
guucacagacucgaagaau

SEQ ID NO: 2294658 - RNA, 19 nt, Artificial Sequence
  Description of Artificial Sequence: Synthetic oligonucleotide
  Sense strand starting at position 3206 of SEQ ID NO: 1884822
cccacaacacugugugauu

SEQ ID NO: 2294659 - RNA, 19 nt, Artificial Sequence
  Description of Artificial Sequence: Synthetic oligonucleotide
  Antisense strand to SEQ ID NO: 2294658
aaucacacaguguuguggg

SEQ ID NO: 2294660 - RNA, 19 nt, Artificial Sequence
  Description of Artificial Sequence: Synthetic oligonucleotide
  Sense strand starting at position 3456 of SEQ ID NO: 1884822
augaaaccgucaucugaac

SEQ ID NO: 2294661 - RNA, 19 nt, Artificial Sequence
  Description of Artificial Sequence: Synthetic oligonucleotide
  Antisense strand to SEQ ID NO: 2294660
guucagaugacgguuucau

SEQ ID NO: 2294662 - RNA, 19 nt, Artificial Sequence
  Description of Artificial Sequence: Synthetic oligonucleotide
  Sense strand starting at position 3526 of SEQ ID NO: 1884822
cccuguaaucugggaauaa

SEQ ID NO: 2294663 - RNA, 19 nt, Artificial Sequence
  Description of Artificial Sequence: Synthetic oligonucleotide
  Antisense strand to SEQ ID NO: 2294662
uuauucccagauuacaggg

SEQ ID NO: 2294664 - RNA, 19 nt, Artificial Sequence
  Description of Artificial Sequence: Synthetic oligonucleotide
  Sense strand starting at position 3572 of SEQ ID NO: 1884822
gagauuaaaugagagaaau

SEQ ID NO: 2294665 - RNA, 19 nt, Artificial Sequence
  Description of Artificial Sequence: Synthetic oligonucleotide
  Antisense strand to SEQ ID NO: 2294664
auuucucucauuuaaucuc

SEQ ID NO: 2294666 - RNA, 19 nt, Artificial Sequence
  Description of Artificial Sequence: Synthetic oligonucleotide
  Sense strand starting at position 3582 of SEQ ID NO: 1884822
gagagaaaugugugccaag

SEQ ID NO: 2294667 - RNA, 19 nt, Artificial Sequence
  Description of Artificial Sequence: Synthetic oligonucleotide
  Antisense strand to SEQ ID NO: 2294666
cuuggcacacauuucucuc

SEQ ID NO: 2294668 - RNA, 19 nt, Artificial Sequence
  Description of Artificial Sequence: Synthetic oligonucleotide
  Sense strand starting at position 3730 of SEQ ID NO: 1884822
cggguguagcguuccaaga

SEQ ID NO: 2294669 - RNA, 19 nt, Artificial Sequence
  Description of Artificial Sequence: Synthetic oligonucleotide
  Antisense strand to SEQ ID NO: 2294668
ucuuggaacgcuacacccg

SEQ ID NO: 2294670 - RNA, 19 nt, Artificial Sequence
  Description of Artificial Sequence: Synthetic oligonucleotide
  Sense strand starting at position 3864 of SEQ ID NO: 1884822
ggacgauuauuacccuguu

SEQ ID NO: 2294671 - RNA, 19 nt, Artificial Sequence
  Description of Artificial Sequence: Synthetic oligonucleotide
  Antisense strand to SEQ ID NO: 2294670
aacaggguaauaaucgucc

SEQ ID NO: 2294672 - RNA, 19 nt, Artificial Sequence
  Description of Artificial Sequence: Synthetic oligonucleotide
  Sense strand starting at position 3865 of SEQ ID NO: 1884822
gacgauuauuacccuguuu

SEQ ID NO: 2294673 - RNA, 19 nt, Artificial Sequence
  Description of Artificial Sequence: Synthetic oligonucleotide
  Antisense strand to SEQ ID NO: 2294672
aaacaggguaauaaucguc

SEQ ID NO: 2294674 - RNA, 19 nt, Artificial Sequence
  Description of Artificial Sequence: Synthetic oligonucleotide
  Sense strand starting at position 3943 of SEQ ID NO: 1884822
cuuggauguugucuguaga

SEQ ID NO: 2294675 - RNA, 19 nt, Artificial Sequence
  Description of Artificial Sequence: Synthetic oligonucleotide
  Antisense strand to SEQ ID NO: 2294674
ucuacagacaacauccaag

SEQ ID NO: 2294676 - RNA, 19 nt, Artificial Sequence
  Description of Artificial Sequence: Synthetic oligonucleotide
  Sense strand starting at position 3944 of SEQ ID NO: 1884822
uuggauguugucuguagaa

SEQ ID NO: 2294677 - RNA, 19 nt, Artificial Sequence
  Description of Artificial Sequence: Synthetic oligonucleotide
  Antisense strand to SEQ ID NO: 2294676
uucuacagacaacauccaa

SEQ ID NO: 2294678 - RNA, 19 nt, Artificial Sequence
  Description of Artificial Sequence: Synthetic oligonucleotide
  Sense strand starting at position 3946 of SEQ ID NO: 1884822
ggauguugucuguagaaga

SEQ ID NO: 2294679 - RNA, 19 nt, Artificial Sequence
  Description of Artificial Sequence: Synthetic oligonucleotide
  Antisense strand to SEQ ID NO: 2294678
ucuucuacagacaacaucc

SEQ ID NO: 2294680 - RNA, 19 nt, Artificial Sequence
  Description of Artificial Sequence: Synthetic oligonucleotide
  Sense strand starting at position 2327 of SEQ ID NO: 1884823
acauguugggcaugaucaa

SEQ ID NO: 2294681 - RNA, 19 nt, Artificial Sequence
  Description of Artificial Sequence: Synthetic oligonucleotide
  Antisense strand to SEQ ID NO: 2294680
uugaucaugcccaacaugu

SEQ ID NO: 2294682 - RNA, 19 nt, Artificial Sequence
  Description of Artificial Sequence: Synthetic oligonucleotide
  Sense strand starting at position 2339 of SEQ ID NO: 1884823
ugaucaagaacucgcuguu

SEQ ID NO: 2294683 - RNA, 19 nt, Artificial Sequence
  Description of Artificial Sequence: Synthetic oligonucleotide
  Antisense strand to SEQ ID NO: 2294682
aacagcgaguucuugauca

SEQ ID NO: 2294684 - RNA, 19 nt, Artificial Sequence
  Description of Artificial Sequence: Synthetic oligonucleotide
  Sense strand starting at position 2349 of SEQ ID NO: 1884823
cucgcuguucggaagcgua

SEQ ID NO: 2294685 - RNA, 19 nt, Artificial Sequence
  Description of Artificial Sequence: Synthetic oligonucleotide
  Antisense strand to SEQ ID NO: 2294684
uacgcuuccgaacagcgag

SEQ ID NO: 2294686 - RNA, 19 nt, Artificial Sequence
  Description of Artificial Sequence: Synthetic oligonucleotide
  Sense strand starting at position 2499 of SEQ ID NO: 1884823
gcaggaaugugcuaucgaa

SEQ ID NO: 2294687 - RNA, 19 nt, Artificial Sequence
  Description of Artificial Sequence: Synthetic oligonucleotide
  Antisense strand to SEQ ID NO: 2294686
uucgauagcacauuccugc

SEQ ID NO: 2294688 - RNA, 19 nt, Artificial Sequence
  Description of Artificial Sequence: Synthetic oligonucleotide
  Sense strand starting at position 2689 of SEQ ID NO: 1884823
augcauucuuucguuuaaa

SEQ ID NO: 2294689 - RNA, 19 nt, Artificial Sequence
  Description of Artificial Sequence: Synthetic oligonucleotide
  Antisense strand to SEQ ID NO: 2294688
uuuaaacgaaagaaugcau

SEQ ID NO: 2294690 - RNA, 19 nt, Artificial Sequence
  Description of Artificial Sequence: Synthetic oligonucleotide
  Sense strand starting at position 2712 of SEQ ID NO: 1884823
uccaaacauuccgaacagu

SEQ ID NO: 2294691 - RNA, 19 nt, Artificial Sequence
  Description of Artificial Sequence: Synthetic oligonucleotide
  Antisense strand to SEQ ID NO: 2294690
acuguucggaauguuugga

SEQ ID NO: 2294692 - RNA, 19 nt, Artificial Sequence
  Description of Artificial Sequence: Synthetic oligonucleotide
  Sense strand starting at position 2731 of SEQ ID NO: 1884823
uugauuuguugagagacac

SEQ ID NO: 2294693 - RNA, 19 nt, Artificial Sequence
  Description of Artificial Sequence: Synthetic oligonucleotide
  Antisense strand to SEQ ID NO: 2294692
gugucucucaacaaaucaa

SEQ ID NO: 2294694 - RNA, 19 nt, Artificial Sequence
  Description of Artificial Sequence: Synthetic oligonucleotide
  Sense strand starting at position 2743 of SEQ ID NO: 1884823
gagacacucgguugcagaa

SEQ ID NO: 2294695 - RNA, 19 nt, Artificial Sequence
  Description of Artificial Sequence: Synthetic oligonucleotide
  Antisense strand to SEQ ID NO: 2294694
uucugcaaccgagugucuc

SEQ ID NO: 2294696 - RNA, 19 nt, Artificial Sequence
  Description of Artificial Sequence: Synthetic oligonucleotide
  Sense strand starting at position 2745 of SEQ ID NO: 1884823
gacacucgguugcagaaau

SEQ ID NO: 2294697 - RNA, 19 nt, Artificial Sequence
  Description of Artificial Sequence: Synthetic oligonucleotide
  Antisense strand to SEQ ID NO: 2294696
auuucugcaaccgaguguc

SEQ ID NO: 2294698 - RNA, 19 nt, Artificial Sequence
  Description of Artificial Sequence: Synthetic oligonucleotide
  Sense strand starting at position 2755 of SEQ ID NO: 1884823
ugcagaaaugagugucgca

SEQ ID NO: 2294699 - RNA, 19 nt, Artificial Sequence
  Description of Artificial Sequence: Synthetic oligonucleotide
  Antisense strand to SEQ ID NO: 2294698
ugcgacacucauuucugca

SEQ ID NO: 2294700 - RNA, 19 nt, Artificial Sequence
  Description of Artificial Sequence: Synthetic oligonucleotide
  Sense strand starting at position 2758 of SEQ ID NO: 1884823
agaaaugagugucgcaaga

SEQ ID NO: 2294701 - RNA, 19 nt, Artificial Sequence
  Description of Artificial Sequence: Synthetic oligonucleotide
  Antisense strand to SEQ ID NO: 2294700
ucuugcgacacucauuucu

SEQ ID NO: 2294702 - RNA, 19 nt, Artificial Sequence
  Description of Artificial Sequence: Synthetic oligonucleotide
  Sense strand starting at position 2760 of SEQ ID NO: 1884823
aaaugagugucgcaagaaa

SEQ ID NO: 2294703 - RNA, 19 nt, Artificial Sequence
  Description of Artificial Sequence: Synthetic oligonucleotide
  Antisense strand to SEQ ID NO: 2294702
uuucuugcgacacucauuu

SEQ ID NO: 2294704 - RNA, 19 nt, Artificial Sequence
  Description of Artificial Sequence: Synthetic oligonucleotide
  Sense strand starting at position 2786 of SEQ ID NO: 1884823
guacuagagaacugcggau

SEQ ID NO: 2294705 - RNA, 19 nt, Artificial Sequence
  Description of Artificial Sequence: Synthetic oligonucleotide
  Antisense strand to SEQ ID NO: 2294704
auccgcaguucucuaguac

SEQ ID NO: 2294706 - RNA, 19 nt, Artificial Sequence
  Description of Artificial Sequence: Synthetic oligonucleotide
  Sense strand starting at position 2790 of SEQ ID NO: 1884823
uagagaacugcggauagua

SEQ ID NO: 2294707 - RNA, 19 nt, Artificial Sequence
  Description of Artificial Sequence: Synthetic oligonucleotide
  Antisense strand to SEQ ID NO: 2294706
uacuauccgcaguucucua

SEQ ID NO: 2294708 - RNA, 19 nt, Artificial Sequence
  Description of Artificial Sequence: Synthetic oligonucleotide
  Sense strand starting at position 2838 of SEQ ID NO: 1884823
guggucagcucuuguccau

SEQ ID NO: 2294709 - RNA, 19 nt, Artificial Sequence
  Description of Artificial Sequence: Synthetic oligonucleotide
  Antisense strand to SEQ ID NO: 2294708
auggacaagagcugaccac

SEQ ID NO: 2294710 - RNA, 19 nt, Artificial Sequence
  Description of Artificial Sequence: Synthetic oligonucleotide
  Sense strand starting at position 2995 of SEQ ID NO: 1884823
cgcccuuagucacuuagua

SEQ ID NO: 2294711 - RNA, 19 nt, Artificial Sequence
  Description of Artificial Sequence: Synthetic oligonucleotide
  Antisense strand to SEQ ID NO: 2294710
uacuaagugacuaagggcg

SEQ ID NO: 2294712 - RNA, 19 nt, Artificial Sequence
  Description of Artificial Sequence: Synthetic oligonucleotide
  Sense strand starting at position 3155 of SEQ ID NO: 1884823
gugccuaauugauaaaguu

SEQ ID NO: 2294713 - RNA, 19 nt, Artificial Sequence
  Description of Artificial Sequence: Synthetic oligonucleotide
  Antisense strand to SEQ ID NO: 2294712
aacuuuaucaauuaggcac

SEQ ID NO: 2294714 - RNA, 19 nt, Artificial Sequence
  Description of Artificial Sequence: Synthetic oligonucleotide
  Sense strand starting at position 3263 of SEQ ID NO: 1884823
cuuggaagguaucuacuau

SEQ ID NO: 2294715 - RNA, 19 nt, Artificial Sequence
  Description of Artificial Sequence: Synthetic oligonucleotide
  Antisense strand to SEQ ID NO: 2294714
auaguagauaccuuccaag

SEQ ID NO: 2294716 - RNA, 19 nt, Artificial Sequence
  Description of Artificial Sequence: Synthetic oligonucleotide
  Sense strand starting at position 3267 of SEQ ID NO: 1884823
gaagguaucuacuauagau

SEQ ID NO: 2294717 - RNA, 19 nt, Artificial Sequence
  Description of Artificial Sequence: Synthetic oligonucleotide
  Antisense strand to SEQ ID NO: 2294716
aucuauaguagauaccuuc

SEQ ID NO: 2294718 - RNA, 19 nt, Artificial Sequence
  Description of Artificial Sequence: Synthetic oligonucleotide
  Sense strand starting at position 3306 of SEQ ID NO: 1884823
agaacaagaucugugcaga

SEQ ID NO: 2294719 - RNA, 19 nt, Artificial Sequence
  Description of Artificial Sequence: Synthetic oligonucleotide
  Antisense strand to SEQ ID NO: 2294718
ucugcacagaucuuguucu

SEQ ID NO: 2294720 - RNA, 19 nt, Artificial Sequence
  Description of Artificial Sequence: Synthetic oligonucleotide
  Sense strand starting at position 3307 of SEQ ID NO: 1884823
gaacaagaucugugcagaa

SEQ ID NO: 2294721 - RNA, 19 nt, Artificial Sequence
  Description of Artificial Sequence: Synthetic oligonucleotide
  Antisense strand to SEQ ID NO: 2294720
uucugcacagaucuuguuc

SEQ ID NO: 2294722 - RNA, 19 nt, Artificial Sequence
  Description of Artificial Sequence: Synthetic oligonucleotide
  Sense strand starting at position 3466 of SEQ ID NO: 1884823
ggcccagagcuguaccauu

SEQ ID NO: 2294723 - RNA, 19 nt, Artificial Sequence
  Description of Artificial Sequence: Synthetic oligonucleotide
  Antisense strand to SEQ ID NO: 2294722
aaugguacagcucugggcc

SEQ ID NO: 2294724 - RNA, 19 nt, Artificial Sequence
  Description of Artificial Sequence: Synthetic oligonucleotide
  Sense strand starting at position 3493 of SEQ ID NO: 1884823
ccaguuagauccucuggag

SEQ ID NO: 2294725 - RNA, 19 nt, Artificial Sequence
  Description of Artificial Sequence: Synthetic oligonucleotide
  Antisense strand to SEQ ID NO: 2294724
cuccagaggaucuaacugg

SEQ ID NO: 2294726 - RNA, 19 nt, Artificial Sequence
  Description of Artificial Sequence: Synthetic oligonucleotide
  Sense strand starting at position 3496 of SEQ ID NO: 1884823
guuagauccucuggaguug

SEQ ID NO: 2294727 - RNA, 19 nt, Artificial Sequence
  Description of Artificial Sequence: Synthetic oligonucleotide
  Antisense strand to SEQ ID NO: 2294726
caacuccagaggaucuaac

SEQ ID NO: 2294728 - RNA, 19 nt, Artificial Sequence
  Description of Artificial Sequence: Synthetic oligonucleotide
  Sense strand starting at position 3508 of SEQ ID NO: 1884823
ggaguuggguaccuagaau

SEQ ID NO: 2294729 - RNA, 19 nt, Artificial Sequence
  Description of Artificial Sequence: Synthetic oligonucleotide
  Antisense strand to SEQ ID NO: 2294728
auucuagguacccaacucc

SEQ ID NO: 2294730 - RNA, 19 nt, Artificial Sequence
  Description of Artificial Sequence: Synthetic oligonucleotide
  Sense strand starting at position 3543 of SEQ ID NO: 1884823
gagcauaauugcugucuuc

SEQ ID NO: 2294731 - RNA, 19 nt, Artificial Sequence
  Description of Artificial Sequence: Synthetic oligonucleotide
  Antisense strand to SEQ ID NO: 2294730
gaagacagcaauuaugcuc

SEQ ID NO: 2294732 - RNA, 19 nt, Artificial Sequence
  Description of Artificial Sequence: Synthetic oligonucleotide
  Sense strand starting at position 3570 of SEQ ID NO: 1884823
uuauaucagugcuaacaug

SEQ ID NO: 2294733 - RNA, 19 nt, Artificial Sequence
  Description of Artificial Sequence: Synthetic oligonucleotide
  Antisense strand to SEQ ID NO: 2294732
cauguuagcacugauauaa

SEQ ID NO: 2294734 - RNA, 19 nt, Artificial Sequence
  Description of Artificial Sequence: Synthetic oligonucleotide
  Sense strand starting at position 3615 of SEQ ID NO: 1884823
caaggagagugcugcuaga

SEQ ID NO: 2294735 - RNA, 19 nt, Artificial Sequence
  Description of Artificial Sequence: Synthetic oligonucleotide
  Antisense strand to SEQ ID NO: 2294734
ucuagcagcacucuccuug

SEQ ID NO: 2294736 - RNA, 19 nt, Artificial Sequence
  Description of Artificial Sequence: Synthetic oligonucleotide
  Sense strand starting at position 3633 of SEQ ID NO: 1884823
auuauaaucuccuggugga

SEQ ID NO: 2294737 - RNA, 19 nt, Artificial Sequence
  Description of Artificial Sequence: Synthetic oligonucleotide
  Antisense strand to SEQ ID NO: 2294736
uccaccaggagauuauaau

SEQ ID NO: 2294738 - RNA, 19 nt, Artificial Sequence
  Description of Artificial Sequence: Synthetic oligonucleotide
  Sense strand starting at position 3692 of SEQ ID NO: 1884823
uacgaugccucauuuguga

SEQ ID NO: 2294739 - RNA, 19 nt, Artificial Sequence
  Description of Artificial Sequence: Synthetic oligonucleotide
  Antisense strand to SEQ ID NO: 2294738
ucacaaaugaggcaucgua

SEQ ID NO: 2294740 - RNA, 19 nt, Artificial Sequence
  Description of Artificial Sequence: Synthetic oligonucleotide
  Sense strand starting at position 3694 of SEQ ID NO: 1884823
cgaugccucauuugugaaa

SEQ ID NO: 2294741 - RNA, 19 nt, Artificial Sequence
  Description of Artificial Sequence: Synthetic oligonucleotide
  Antisense strand to SEQ ID NO: 2294740
uuucacaaaugaggcaucg

SEQ ID NO: 2294742 - RNA, 19 nt, Artificial Sequence
  Description of Artificial Sequence: Synthetic oligonucleotide
  Sense strand starting at position 3729 of SEQ ID NO: 1884823
gggccaaguucugauaccu

SEQ ID NO: 2294743 - RNA, 19 nt, Artificial Sequence
  Description of Artificial Sequence: Synthetic oligonucleotide
  Antisense strand to SEQ ID NO: 2294742
agguaucagaacuuggccc

SEQ ID NO: 2294744 - RNA, 19 nt, Artificial Sequence
  Description of Artificial Sequence: Synthetic oligonucleotide
  Sense strand starting at position 3738 of SEQ ID NO: 1884823
ucugauaccuaguacaaug

SEQ ID NO: 2294745 - RNA, 19 nt, Artificial Sequence
  Description of Artificial Sequence: Synthetic oligonucleotide
  Antisense strand to SEQ ID NO: 2294744
cauuguacuagguaucaga

SEQ ID NO: 2294746 - RNA, 19 nt, Artificial Sequence
  Description of Artificial Sequence: Synthetic oligonucleotide
  Sense strand starting at position 3846 of SEQ ID NO: 1884823
cagcucuauguagaaugaa

SEQ ID NO: 2294747 - RNA, 19 nt, Artificial Sequence
  Description of Artificial Sequence: Synthetic oligonucleotide
  Antisense strand to SEQ ID NO: 2294746
uucauucuacauagagcug

SEQ ID NO: 2294748 - RNA, 19 nt, Artificial Sequence
  Description of Artificial Sequence: Synthetic oligonucleotide
  Sense strand starting at position 3861 of SEQ ID NO: 1884823
ugaacaguuuagcccugau

SEQ ID NO: 2294749 - RNA, 19 nt, Artificial Sequence
  Description of Artificial Sequence: Synthetic oligonucleotide
  Antisense strand to SEQ ID NO: 2294748
aucagggcuaaacuguuca

SEQ ID NO: 2294750 - RNA, 19 nt, Artificial Sequence
  Description of Artificial Sequence: Synthetic oligonucleotide
  Sense strand starting at position 3864 of SEQ ID NO: 1884823
acaguuuagcccugaucag

SEQ ID NO: 2294751 - RNA, 19 nt, Artificial Sequence
  Description of Artificial Sequence: Synthetic oligonucleotide
  Antisense strand to SEQ ID NO: 2294750
cugaucagggcuaaacugu

SEQ ID NO: 2294752 - RNA, 19 nt, Artificial Sequence
  Description of Artificial Sequence: Synthetic oligonucleotide
  Sense strand starting at position 3865 of SEQ ID NO: 1884823
caguuuagcccugaucaga

SEQ ID NO: 2294753 - RNA, 19 nt, Artificial Sequence
  Description of Artificial Sequence: Synthetic oligonucleotide
  Antisense strand to SEQ ID NO: 2294752
ucugaucagggcuaaacug

SEQ ID NO: 2294754 - RNA, 19 nt, Artificial Sequence
  Description of Artificial Sequence: Synthetic oligonucleotide
  Sense strand starting at position 23 of SEQ ID NO: 1884824
gcugaucugugaucuggua

SEQ ID NO: 2294755 - RNA, 19 nt, Artificial Sequence
  Description of Artificial Sequence: Synthetic oligonucleotide
  Antisense strand to SEQ ID NO: 2294754
uaccagaucacagaucagc

SEQ ID NO: 2294756 - RNA, 19 nt, Artificial Sequence
  Description of Artificial Sequence: Synthetic oligonucleotide
  Sense strand starting at position 25 of SEQ ID NO: 1884824
ugaucugugaucugguaaa

SEQ ID NO: 2294757 - RNA, 19 nt, Artificial Sequence
  Description of Artificial Sequence: Synthetic oligonucleotide
  Antisense strand to SEQ ID NO: 2294756
uuuaccagaucacagauca

SEQ ID NO: 2294758 - RNA, 19 nt, Artificial Sequence
  Description of Artificial Sequence: Synthetic oligonucleotide
  Sense strand starting at position 53 of SEQ ID NO: 1884824
gguggagaucccugaaggu

SEQ ID NO: 2294759 - RNA, 19 nt, Artificial Sequence
  Description of Artificial Sequence: Synthetic oligonucleotide
  Antisense strand to SEQ ID NO: 2294758
accuucagggaucuccacc

SEQ ID NO: 2294760 - RNA, 19 nt, Artificial Sequence
  Description of Artificial Sequence: Synthetic oligonucleotide
  Sense strand starting at position 86 of SEQ ID NO: 1884824
gcggucauuuccuagaaca

SEQ ID NO: 2294761 - RNA, 19 nt, Artificial Sequence
  Description of Artificial Sequence: Synthetic oligonucleotide
  Antisense strand to SEQ ID NO: 2294760
uguucuaggaaaugaccgc

SEQ ID NO: 2294762 - RNA, 19 nt, Artificial Sequence
  Description of Artificial Sequence: Synthetic oligonucleotide
  Sense strand starting at position 99 of SEQ ID NO: 1884824
agaacauucggccaauccu

SEQ ID NO: 2294763 - RNA, 19 nt, Artificial Sequence
  Description of Artificial Sequence: Synthetic oligonucleotide
  Antisense strand to SEQ ID NO: 2294762
aggauuggccgaauguucu

SEQ ID NO: 2294764 - RNA, 19 nt, Artificial Sequence
  Description of Artificial Sequence: Synthetic oligonucleotide
  Sense strand starting at position 180 of SEQ ID NO: 1884824
gggucauaauagcugagau

SEQ ID NO: 2294765 - RNA, 19 nt, Artificial Sequence
  Description of Artificial Sequence: Synthetic oligonucleotide
  Antisense strand to SEQ ID NO: 2294764
aucucagcuauuaugaccc

SEQ ID NO: 2294766 - RNA, 19 nt, Artificial Sequence
  Description of Artificial Sequence: Synthetic oligonucleotide
  Sense strand starting at position 181 of SEQ ID NO: 1884824
ggucauaauagcugagaug

SEQ ID NO: 2294767 - RNA, 19 nt, Artificial Sequence
  Description of Artificial Sequence: Synthetic oligonucleotide
  Antisense strand to SEQ ID NO: 2294766
caucucagcuauuaugacc

SEQ ID NO: 2294768 - RNA, 19 nt, Artificial Sequence
  Description of Artificial Sequence: Synthetic oligonucleotide
  Sense strand starting at position 184 of SEQ ID NO: 1884824
cauaauagcugagaugaga

SEQ ID NO: 2294769 - RNA, 19 nt, Artificial Sequence
  Description of Artificial Sequence: Synthetic oligonucleotide
  Antisense strand to SEQ ID NO: 2294768
ucucaucucagcuauuaug

SEQ ID NO: 2294770 - RNA, 19 nt, Artificial Sequence
  Description of Artificial Sequence: Synthetic oligonucleotide
  Sense strand starting at position 255 of SEQ ID NO: 1884824
uggguuggagucugcaaga

SEQ ID NO: 2294771 - RNA, 19 nt, Artificial Sequence
  Description of Artificial Sequence: Synthetic oligonucleotide
  Antisense strand to SEQ ID NO: 2294770
ucuugcagacuccaaccca

SEQ ID NO: 2294772 - RNA, 19 nt, Artificial Sequence
  Description of Artificial Sequence: Synthetic oligonucleotide
  Sense strand starting at position 260 of SEQ ID NO: 1884824
uggagucugcaagacacua

SEQ ID NO: 2294773 - RNA, 19 nt, Artificial Sequence
  Description of Artificial Sequence: Synthetic oligonucleotide
  Antisense strand to SEQ ID NO: 2294772
uagugucuugcagacucca

SEQ ID NO: 2294774 - RNA, 19 nt, Artificial Sequence
  Description of Artificial Sequence: Synthetic oligonucleotide
  Sense strand starting at position 326 of SEQ ID NO: 1884824
ggaauccacuugguauaca

SEQ ID NO: 2294775 - RNA, 19 nt, Artificial Sequence
  Description of Artificial Sequence: Synthetic oligonucleotide
  Antisense strand to SEQ ID NO: 2294774
uguauaccaaguggauucc

SEQ ID NO: 2294776 - RNA, 19 nt, Artificial Sequence
  Description of Artificial Sequence: Synthetic oligonucleotide
  Sense strand starting at position 672 of SEQ ID NO: 1884824
gcagguaccugguuuccau

SEQ ID NO: 2294777 - RNA, 19 nt, Artificial Sequence
  Description of Artificial Sequence: Synthetic oligonucleotide
  Antisense strand to SEQ ID NO: 2294776
auggaaaccagguaccugc

SEQ ID NO: 2294778 - RNA, 19 nt, Artificial Sequence
  Description of Artificial Sequence: Synthetic oligonucleotide
  Sense strand starting at position 687 of SEQ ID NO: 1884824
ccaucaauauucuuuggga

SEQ ID NO: 2294779 - RNA, 19 nt, Artificial Sequence
  Description of Artificial Sequence: Synthetic oligonucleotide
  Antisense strand to SEQ ID NO: 2294778
ucccaaagaauauugaugg

SEQ ID NO: 2294780 - RNA, 19 nt, Artificial Sequence
  Description of Artificial Sequence: Synthetic oligonucleotide
  Sense strand starting at position 721 of SEQ ID NO: 1884824
aagaaucacucguugcaag

SEQ ID NO: 2294781 - RNA, 19 nt, Artificial Sequence
  Description of Artificial Sequence: Synthetic oligonucleotide
  Antisense strand to SEQ ID NO: 2294780
cuugcaacgagugauucuu

SEQ ID NO: 2294782 - RNA, 19 nt, Artificial Sequence
  Description of Artificial Sequence: Synthetic oligonucleotide
  Sense strand starting at position 999 of SEQ ID NO: 1884824
gcauucucugcggauucua

SEQ ID NO: 2294783 - RNA, 19 nt, Artificial Sequence
  Description of Artificial Sequence: Synthetic oligonucleotide
  Antisense strand to SEQ ID NO: 2294782
uagaauccgcagagaaugc

SEQ ID NO: 2294784 - RNA, 19 nt, Artificial Sequence
  Description of Artificial Sequence: Synthetic oligonucleotide
  Sense strand starting at position 1120 of SEQ ID NO: 1884824
cccguugugagugguauga

SEQ ID NO: 2294785 - RNA, 19 nt, Artificial Sequence
  Description of Artificial Sequence: Synthetic oligonucleotide
  Antisense strand to SEQ ID NO: 2294784
ucauaccacucacaacggg

SEQ ID NO: 2294786 - RNA, 19 nt, Artificial Sequence
  Description of Artificial Sequence: Synthetic oligonucleotide
  Sense strand starting at position 1124 of SEQ ID NO: 1884824
uugugagugguaugacaca

SEQ ID NO: 2294787 - RNA, 19 nt, Artificial Sequence
  Description of Artificial Sequence: Synthetic oligonucleotide
  Antisense strand to SEQ ID NO: 2294786
ugugucauaccacucacaa

SEQ ID NO: 2294788 - RNA, 19 nt, Artificial Sequence
  Description of Artificial Sequence: Synthetic oligonucleotide
  Sense strand starting at position 1229 of SEQ ID NO: 1884824
cgcggaucucgggcgugau

SEQ ID NO: 2294789 - RNA, 19 nt, Artificial Sequence
  Description of Artificial Sequence: Synthetic oligonucleotide
  Antisense strand to SEQ ID NO: 2294788
aucacgcccgagauccgcg

SEQ ID NO: 2294790 - RNA, 19 nt, Artificial Sequence
  Description of Artificial Sequence: Synthetic oligonucleotide
  Sense strand starting at position 1628 of SEQ ID NO: 1884824
gcugcaguugcuucuccaa

SEQ ID NO: 2294791 - RNA, 19 nt, Artificial Sequence
  Description of Artificial Sequence: Synthetic oligonucleotide
  Antisense strand to SEQ ID NO: 2294790
uuggagaagcaacugcagc

SEQ ID NO: 2294792 - RNA, 19 nt, Artificial Sequence
  Description of Artificial Sequence: Synthetic oligonucleotide
  Sense strand starting at position 1630 of SEQ ID NO: 1884824
ugcaguugcuucuccaaca

SEQ ID NO: 2294793 - RNA, 19 nt, Artificial Sequence
  Description of Artificial Sequence: Synthetic oligonucleotide
  Antisense strand to SEQ ID NO: 2294792
uguuggagaagcaacugca

SEQ ID NO: 2294794 - RNA, 19 nt, Artificial Sequence
  Description of Artificial Sequence: Synthetic oligonucleotide
  Sense strand starting at position 1709 of SEQ ID NO: 1884824
gggucuugagcacguugau

SEQ ID NO: 2294795 - RNA, 19 nt, Artificial Sequence
  Description of Artificial Sequence: Synthetic oligonucleotide
  Antisense strand to SEQ ID NO: 2294794
aucaacgugcucaagaccc

SEQ ID NO: 2294796 - RNA, 19 nt, Artificial Sequence
  Description of Artificial Sequence: Synthetic oligonucleotide
  Sense strand starting at position 2819 of SEQ ID NO: 1884824
ggguaugcacaguagagaa

SEQ ID NO: 2294797 - RNA, 19 nt, Artificial Sequence
  Description of Artificial Sequence: Synthetic oligonucleotide
  Antisense strand to SEQ ID NO: 2294796
uucucuacugugcauaccc

SEQ ID NO: 2294798 - RNA, 19 nt, Artificial Sequence
  Description of Artificial Sequence: Synthetic oligonucleotide
  Sense strand starting at position 3022 of SEQ ID NO: 1884824
guaucauucuguuucugga

SEQ ID NO: 2294799 - RNA, 19 nt, Artificial Sequence
  Description of Artificial Sequence: Synthetic oligonucleotide
  Antisense strand to SEQ ID NO: 2294798
uccagaaacagaaugauac

SEQ ID NO: 2294800 - RNA, 19 nt, Artificial Sequence
  Description of Artificial Sequence: Synthetic oligonucleotide
  Sense strand starting at position 3109 of SEQ ID NO: 1884824
ugaugaugguccuuagguu

SEQ ID NO: 2294801 - RNA, 19 nt, Artificial Sequence
  Description of Artificial Sequence: Synthetic oligonucleotide
  Antisense strand to SEQ ID NO: 2294800
aaccuaaggaccaucauca

SEQ ID NO: 2294802 - RNA, 19 nt, Artificial Sequence
  Description of Artificial Sequence: Synthetic oligonucleotide
  Sense strand starting at position 3110 of SEQ ID NO: 1884824
gaugaugguccuuagguuu

SEQ ID NO: 2294803 - RNA, 19 nt, Artificial Sequence
  Description of Artificial Sequence: Synthetic oligonucleotide
  Antisense strand to SEQ ID NO: 2294802
aaaccuaaggaccaucauc

SEQ ID NO: 2294804 - RNA, 19 nt, Artificial Sequence
  Description of Artificial Sequence: Synthetic oligonucleotide
  Sense strand starting at position 3194 of SEQ ID NO: 1884824
gggcauucugccugaggaa

SEQ ID NO: 2294805 - RNA, 19 nt, Artificial Sequence
  Description of Artificial Sequence: Synthetic oligonucleotide
  Antisense strand to SEQ ID NO: 2294804
uuccucaggcagaaugccc

SEQ ID NO: 2294806 - RNA, 19 nt, Artificial Sequence
  Description of Artificial Sequence: Synthetic oligonucleotide
  Sense strand starting at position 3195 of SEQ ID NO: 1884824
ggcauucugccugaggaaa

SEQ ID NO: 2294807 - RNA, 19 nt, Artificial Sequence
  Description of Artificial Sequence: Synthetic oligonucleotide
  Antisense strand to SEQ ID NO: 2294806
uuuccucaggcagaaugcc

SEQ ID NO: 2294808 - RNA, 19 nt, Artificial Sequence
  Description of Artificial Sequence: Synthetic oligonucleotide
  Sense strand starting at position 3229 of SEQ ID NO: 1884824
gacuguaauuuaggugauc

SEQ ID NO: 2294809 - RNA, 19 nt, Artificial Sequence
  Description of Artificial Sequence: Synthetic oligonucleotide
  Antisense strand to SEQ ID NO: 2294808
gaucaccuaaauuacaguc

SEQ ID NO: 2294810 - RNA, 19 nt, Artificial Sequence
  Description of Artificial Sequence: Synthetic oligonucleotide
  Sense strand starting at position 3231 of SEQ ID NO: 1884824
cuguaauuuaggugaucgu

SEQ ID NO: 2294811 - RNA, 19 nt, Artificial Sequence
  Description of Artificial Sequence: Synthetic oligonucleotide
  Antisense strand to SEQ ID NO: 2294810
acgaucaccuaaauuacag

SEQ ID NO: 2294812 - RNA, 19 nt, Artificial Sequence
  Description of Artificial Sequence: Synthetic oligonucleotide
  Sense strand starting at position 3242 of SEQ ID NO: 1884824
gugaucguugcuuuagcuu

SEQ ID NO: 2294813 - RNA, 19 nt, Artificial Sequence
  Description of Artificial Sequence: Synthetic oligonucleotide
  Antisense strand to SEQ ID NO: 2294812
aagcuaaagcaacgaucac

SEQ ID NO: 2294814 - RNA, 19 nt, Artificial Sequence
  Description of Artificial Sequence: Synthetic oligonucleotide
  Sense strand starting at position 3305 of SEQ ID NO: 1884824
gcugacugcuauccuggaa

SEQ ID NO: 2294815 - RNA, 19 nt, Artificial Sequence
  Description of Artificial Sequence: Synthetic oligonucleotide
  Antisense strand to SEQ ID NO: 2294814
uuccaggauagcagucagc

SEQ ID NO: 2294816 - RNA, 19 nt, Artificial Sequence
  Description of Artificial Sequence: Synthetic oligonucleotide
  Sense strand starting at position 3308 of SEQ ID NO: 1884824
gacugcuauccuggaagcu

SEQ ID NO: 2294817 - RNA, 19 nt, Artificial Sequence
  Description of Artificial Sequence: Synthetic oligonucleotide
  Antisense strand to SEQ ID NO: 2294816
agcuuccaggauagcaguc

SEQ ID NO: 2294818 - RNA, 19 nt, Artificial Sequence
  Description of Artificial Sequence: Synthetic oligonucleotide
  Sense strand starting at position 3340 of SEQ ID NO: 1884824
gucuuugugacagaaggua

SEQ ID NO: 2294819 - RNA, 19 nt, Artificial Sequence
  Description of Artificial Sequence: Synthetic oligonucleotide
  Antisense strand to SEQ ID NO: 2294818
uaccuucugucacaaagac

SEQ ID NO: 2294820 - RNA, 19 nt, Artificial Sequence
  Description of Artificial Sequence: Synthetic oligonucleotide
  Sense strand starting at position 3537 of SEQ ID NO: 1884824
agguguggcuguuucagaa

SEQ ID NO: 2294821 - RNA, 19 nt, Artificial Sequence
  Description of Artificial Sequence: Synthetic oligonucleotide
  Antisense strand to SEQ ID NO: 2294820
uucugaaacagccacaccu

SEQ ID NO: 2294822 - RNA, 19 nt, Artificial Sequence
  Description of Artificial Sequence: Synthetic oligonucleotide
  Sense strand starting at position 3594 of SEQ ID NO: 1884824
ugggccuuaucaccauauu

SEQ ID NO: 2294823 - RNA, 19 nt, Artificial Sequence
  Description of Artificial Sequence: Synthetic oligonucleotide
  Antisense strand to SEQ ID NO: 2294822
aauauggugauaaggccca

SEQ ID NO: 2294824 - RNA, 19 nt, Artificial Sequence
  Description of Artificial Sequence: Synthetic oligonucleotide
  Sense strand starting at position 3655 of SEQ ID NO: 1884824
gcaggagcuccacacaauu

SEQ ID NO: 2294825 - RNA, 19 nt, Artificial Sequence
  Description of Artificial Sequence: Synthetic oligonucleotide
  Antisense strand to SEQ ID NO: 2294824
aauuguguggagcuccugc

SEQ ID NO: 2294826 - RNA, 19 nt, Artificial Sequence
  Description of Artificial Sequence: Synthetic oligonucleotide
  Sense strand starting at position 3668 of SEQ ID NO: 1884824
acaauuaggucagugccua

SEQ ID NO: 2294827 - RNA, 19 nt, Artificial Sequence
  Description of Artificial Sequence: Synthetic oligonucleotide
  Antisense strand to SEQ ID NO: 2294826
uaggcacugaccuaauugu

SEQ ID NO: 2294828 - RNA, 19 nt, Artificial Sequence
  Description of Artificial Sequence: Synthetic oligonucleotide
  Sense strand starting at position 3669 of SEQ ID NO: 1884824
caauuaggucagugccuaa

SEQ ID NO: 2294829 - RNA, 19 nt, Artificial Sequence
  Description of Artificial Sequence: Synthetic oligonucleotide
  Antisense strand to SEQ ID NO: 2294828
uuaggcacugaccuaauug

SEQ ID NO: 2294830 - RNA, 19 nt, Artificial Sequence
  Description of Artificial Sequence: Synthetic oligonucleotide
  Sense strand starting at position 3687 of SEQ ID NO: 1884824
agagcagauuaccuaaauu

SEQ ID NO: 2294831 - RNA, 19 nt, Artificial Sequence
  Description of Artificial Sequence: Synthetic oligonucleotide
  Antisense strand to SEQ ID NO: 2294830
aauuuagguaaucugcucu

SEQ ID NO: 2294832 - RNA, 19 nt, Artificial Sequence
  Description of Artificial Sequence: Synthetic oligonucleotide
  Sense strand starting at position 3742 of SEQ ID NO: 1884824
cuaguugaaccuuguauua

SEQ ID NO: 2294833 - RNA, 19 nt, Artificial Sequence
  Description of Artificial Sequence: Synthetic oligonucleotide
  Antisense strand to SEQ ID NO: 2294832
uaauacaagguucaacuag

SEQ ID NO: 2294834 - RNA, 19 nt, Artificial Sequence
  Description of Artificial Sequence: Synthetic oligonucleotide
  Sense strand starting at position 403 of SEQ ID NO: 1884825
gacagcaacuuguuugaaa

SEQ ID NO: 2294835 - RNA, 19 nt, Artificial Sequence
  Description of Artificial Sequence: Synthetic oligonucleotide
  Antisense strand to SEQ ID NO: 2294834
uuucaaacaaguugcuguc

SEQ ID NO: 2294836 - RNA, 19 nt, Artificial Sequence
  Description of Artificial Sequence: Synthetic oligonucleotide
  Sense strand starting at position 404 of SEQ ID NO: 1884825
acagcaacuuguuugaaac

SEQ ID NO: 2294837 - RNA, 19 nt, Artificial Sequence
  Description of Artificial Sequence: Synthetic oligonucleotide
  Antisense strand to SEQ ID NO: 2294836
guuucaaacaaguugcugu

SEQ ID NO: 2294838 - RNA, 19 nt, Artificial Sequence
  Description of Artificial Sequence: Synthetic oligonucleotide
  Sense strand starting at position 517 of SEQ ID NO: 1884825
ucuuguguagaacagaguu

SEQ ID NO: 2294839 - RNA, 19 nt, Artificial Sequence
  Description of Artificial Sequence: Synthetic oligonucleotide
  Antisense strand to SEQ ID NO: 2294838
aacucuguucuacacaaga

SEQ ID NO: 2294840 - RNA, 19 nt, Artificial Sequence
  Description of Artificial Sequence: Synthetic oligonucleotide
  Sense strand starting at position 519 of SEQ ID NO: 1884825
uuguguagaacagaguuua

SEQ ID NO: 2294841 - RNA, 19 nt, Artificial Sequence
  Description of Artificial Sequence: Synthetic oligonucleotide
  Antisense strand to SEQ ID NO: 2294840
uaaacucuguucuacacaa

SEQ ID NO: 2294842 - RNA, 19 nt, Artificial Sequence
  Description of Artificial Sequence: Synthetic oligonucleotide
  Sense strand starting at position 866 of SEQ ID NO: 1884825
cccuuagguguauaaaguu

SEQ ID NO: 2294843 - RNA, 19 nt, Artificial Sequence
  Description of Artificial Sequence: Synthetic oligonucleotide
  Antisense strand to SEQ ID NO: 2294842
aacuuuauacaccuaaggg

SEQ ID NO: 2294844 - RNA, 19 nt, Artificial Sequence
  Description of Artificial Sequence: Synthetic oligonucleotide
  Sense strand starting at position 907 of SEQ ID NO: 1884825
gcuucuauuggucauauaa

SEQ ID NO: 2294845 - RNA, 19 nt, Artificial Sequence
  Description of Artificial Sequence: Synthetic oligonucleotide
  Antisense strand to SEQ ID NO: 2294844
uuauaugaccaauagaagc

SEQ ID NO: 2294846 - RNA, 19 nt, Artificial Sequence
  Description of Artificial Sequence: Synthetic oligonucleotide
  Sense strand starting at position 1036 of SEQ ID NO: 1884825
accaguucugaccauugua

SEQ ID NO: 2294847 - RNA, 19 nt, Artificial Sequence
  Description of Artificial Sequence: Synthetic oligonucleotide
  Antisense strand to SEQ ID NO: 2294846
uacaauggucagaacuggu

SEQ ID NO: 2294848 - RNA, 19 nt, Artificial Sequence
  Description of Artificial Sequence: Synthetic oligonucleotide
  Sense strand starting at position 1043 of SEQ ID NO: 1884825
cugaccauuguagguuaaa

SEQ ID NO: 2294849 - RNA, 19 nt, Artificial Sequence
  Description of Artificial Sequence: Synthetic oligonucleotide
  Antisense strand to SEQ ID NO: 2294848
uuuaaccuacaauggucag

SEQ ID NO: 2294850 - RNA, 19 nt, Artificial Sequence
  Description of Artificial Sequence: Synthetic oligonucleotide
  Sense strand starting at position 1044 of SEQ ID NO: 1884825
ugaccauuguagguuaaag

SEQ ID NO: 2294851 - RNA, 19 nt, Artificial Sequence
  Description of Artificial Sequence: Synthetic oligonucleotide
  Antisense strand to SEQ ID NO: 2294850
cuuuaaccuacaaugguca

SEQ ID NO: 2294852 - RNA, 19 nt, Artificial Sequence
  Description of Artificial Sequence: Synthetic oligonucleotide
  Sense strand starting at position 1115 of SEQ ID NO: 1884825
aguuaaguugaauaagcuu

SEQ ID NO: 2294853 - RNA, 19 nt, Artificial Sequence
  Description of Artificial Sequence: Synthetic oligonucleotide
  Antisense strand to SEQ ID NO: 2294852
aagcuuauucaacuuaacu

SEQ ID NO: 2294854 - RNA, 19 nt, Artificial Sequence
  Description of Artificial Sequence: Synthetic oligonucleotide
  Sense strand starting at position 1370 of SEQ ID NO: 1884825
gaccuaugauaugugacau

SEQ ID NO: 2294855 - RNA, 19 nt, Artificial Sequence
  Description of Artificial Sequence: Synthetic oligonucleotide
  Antisense strand to SEQ ID NO: 2294854
augucacauaucauagguc

SEQ ID NO: 2294856 - RNA, 19 nt, Artificial Sequence
  Description of Artificial Sequence: Synthetic oligonucleotide
  Sense strand starting at position 2076 of SEQ ID NO: 1884825
acaggaagcaccugugaau

SEQ ID NO: 2294857 - RNA, 19 nt, Artificial Sequence
  Description of Artificial Sequence: Synthetic oligonucleotide
  Antisense strand to SEQ ID NO: 2294856
auucacaggugcuuccugu

SEQ ID NO: 2294858 - RNA, 19 nt, Artificial Sequence
  Description of Artificial Sequence: Synthetic oligonucleotide
  Sense strand starting at position 2118 of SEQ ID NO: 1884825
gaaggcucccucugagaug

SEQ ID NO: 2294859 - RNA, 19 nt, Artificial Sequence
  Description of Artificial Sequence: Synthetic oligonucleotide
  Antisense strand to SEQ ID NO: 2294858
caucucagagggagccuuc

SEQ ID NO: 2294860 - RNA, 19 nt, Artificial Sequence
  Description of Artificial Sequence: Synthetic oligonucleotide
  Sense strand starting at position 2213 of SEQ ID NO: 1884825
uccgaauggcaggauuauu

SEQ ID NO: 2294861 - RNA, 19 nt, Artificial Sequence
  Description of Artificial Sequence: Synthetic oligonucleotide
  Antisense strand to SEQ ID NO: 2294860
aauaauccugccauucgga

SEQ ID NO: 2294862 - RNA, 19 nt, Artificial Sequence
  Description of Artificial Sequence: Synthetic oligonucleotide
  Sense strand starting at position 2334 of SEQ ID NO: 1884825
uugauaugcguggaaauga

SEQ ID NO: 2294863 - RNA, 19 nt, Artificial Sequence
  Description of Artificial Sequence: Synthetic oligonucleotide
  Antisense strand to SEQ ID NO: 2294862
ucauuuccacgcauaucaa

SEQ ID NO: 2294864 - RNA, 19 nt, Artificial Sequence
  Description of Artificial Sequence: Synthetic oligonucleotide
  Sense strand starting at position 2393 of SEQ ID NO: 1884825
gagaauuagagauguaugu

SEQ ID NO: 2294865 - RNA, 19 nt, Artificial Sequence
  Description of Artificial Sequence: Synthetic oligonucleotide
  Antisense strand to SEQ ID NO: 2294864
acauacaucucuaauucuc

SEQ ID NO: 2294866 - RNA, 19 nt, Artificial Sequence
  Description of Artificial Sequence: Synthetic oligonucleotide
  Sense strand starting at position 2410 of SEQ ID NO: 1884825
guagcuuuauaagugauuu

SEQ ID NO: 2294867 - RNA, 19 nt, Artificial Sequence
  Description of Artificial Sequence: Synthetic oligonucleotide
  Antisense strand to SEQ ID NO: 2294866
aaaucacuuauaaagcuac

SEQ ID NO: 2294868 - RNA, 19 nt, Artificial Sequence
  Description of Artificial Sequence: Synthetic oligonucleotide
  Sense strand starting at position 2436 of SEQ ID NO: 1884825
auaagaucauguuuguacu

SEQ ID NO: 2294869 - RNA, 19 nt, Artificial Sequence
  Description of Artificial Sequence: Synthetic oligonucleotide
  Antisense strand to SEQ ID NO: 2294868
aguacaaacaugaucuuau

SEQ ID NO: 2294870 - RNA, 19 nt, Artificial Sequence
  Description of Artificial Sequence: Synthetic oligonucleotide
  Sense strand starting at position 2612 of SEQ ID NO: 1884825
uuuauauuugcaugugucu

SEQ ID NO: 2294871 - RNA, 19 nt, Artificial Sequence
  Description of Artificial Sequence: Synthetic oligonucleotide
  Antisense strand to SEQ ID NO: 2294870
agacacaugcaaauauaaa

SEQ ID NO: 2294872 - RNA, 19 nt, Artificial Sequence
  Description of Artificial Sequence: Synthetic oligonucleotide
  Sense strand starting at position 2625 of SEQ ID NO: 1884825
gugucuguaugauuuagug

SEQ ID NO: 2294873 - RNA, 19 nt, Artificial Sequence
  Description of Artificial Sequence: Synthetic oligonucleotide
  Antisense strand to SEQ ID NO: 2294872
cacuaaaucauacagacac

SEQ ID NO: 2294874 - RNA, 19 nt, Artificial Sequence
  Description of Artificial Sequence: Synthetic oligonucleotide
  Sense strand starting at position 2639 of SEQ ID NO: 1884825
uagugauguguuuaauuga

SEQ ID NO: 2294875 - RNA, 19 nt, Artificial Sequence
  Description of Artificial Sequence: Synthetic oligonucleotide
  Antisense strand to SEQ ID NO: 2294874
ucaauuaaacacaucacua

SEQ ID NO: 2294876 - RNA, 19 nt, Artificial Sequence
  Description of Artificial Sequence: Synthetic oligonucleotide
  Sense strand starting at position 2771 of SEQ ID NO: 1884825
gacauuaguggcuaauuag

SEQ ID NO: 2294877 - RNA, 19 nt, Artificial Sequence
  Description of Artificial Sequence: Synthetic oligonucleotide
  Antisense strand to SEQ ID NO: 2294876
cuaauuagccacuaauguc

SEQ ID NO: 2294878 - RNA, 19 nt, Artificial Sequence
  Description of Artificial Sequence: Synthetic oligonucleotide
  Sense strand starting at position 2780 of SEQ ID NO: 1884825
ggcuaauuagguuaauccu

SEQ ID NO: 2294879 - RNA, 19 nt, Artificial Sequence
  Description of Artificial Sequence: Synthetic oligonucleotide
  Antisense strand to SEQ ID NO: 2294878
aggauuaaccuaauuagcc

SEQ ID NO: 2294880 - RNA, 19 nt, Artificial Sequence
  Description of Artificial Sequence: Synthetic oligonucleotide
  Sense strand starting at position 2844 of SEQ ID NO: 1884825
cacucuuggcuguagauaa

SEQ ID NO: 2294881 - RNA, 19 nt, Artificial Sequence
  Description of Artificial Sequence: Synthetic oligonucleotide
  Antisense strand to SEQ ID NO: 2294880
uuaucuacagccaagagug

SEQ ID NO: 2294882 - RNA, 19 nt, Artificial Sequence
  Description of Artificial Sequence: Synthetic oligonucleotide
  Sense strand starting at position 2878 of SEQ ID NO: 1884825
gugucuggauucuugaaga

SEQ ID NO: 2294883 - RNA, 19 nt, Artificial Sequence
  Description of Artificial Sequence: Synthetic oligonucleotide
  Antisense strand to SEQ ID NO: 2294882
ucuucaagaauccagacac

SEQ ID NO: 2294884 - RNA, 19 nt, Artificial Sequence
  Description of Artificial Sequence: Synthetic oligonucleotide
  Sense strand starting at position 2900 of SEQ ID NO: 1884825
auuaccagucuuugaggaa

SEQ ID NO: 2294885 - RNA, 19 nt, Artificial Sequence
  Description of Artificial Sequence: Synthetic oligonucleotide
  Antisense strand to SEQ ID NO: 2294884
uuccucaaagacugguaau

SEQ ID NO: 2294886 - RNA, 19 nt, Artificial Sequence
  Description of Artificial Sequence: Synthetic oligonucleotide
  Sense strand starting at position 3079 of SEQ ID NO: 1884825
ugcugauuuguugguagac

SEQ ID NO: 2294887 - RNA, 19 nt, Artificial Sequence
  Description of Artificial Sequence: Synthetic oligonucleotide
  Antisense strand to SEQ ID NO: 2294886
gucuaccaacaaaucagca

SEQ ID NO: 2294888 - RNA, 19 nt, Artificial Sequence
  Description of Artificial Sequence: Synthetic oligonucleotide
  Sense strand starting at position 3080 of SEQ ID NO: 1884825
gcugauuuguugguagacu

SEQ ID NO: 2294889 - RNA, 19 nt, Artificial Sequence
  Description of Artificial Sequence: Synthetic oligonucleotide
  Antisense strand to SEQ ID NO: 2294888
agucuaccaacaaaucagc

SEQ ID NO: 2294890 - RNA, 19 nt, Artificial Sequence
  Description of Artificial Sequence: Synthetic oligonucleotide
  Sense strand starting at position 3092 of SEQ ID NO: 1884825
guagacuacgcuggagaaa

SEQ ID NO: 2294891 - RNA, 19 nt, Artificial Sequence
  Description of Artificial Sequence: Synthetic oligonucleotide
  Antisense strand to SEQ ID NO: 2294890
uuucuccagcguagucuac

SEQ ID NO: 2294892 - RNA, 19 nt, Artificial Sequence
  Description of Artificial Sequence: Synthetic oligonucleotide
  Sense strand starting at position 3461 of SEQ ID NO: 1884825
cauauaugguagucacuga

SEQ ID NO: 2294893 - RNA, 19 nt, Artificial Sequence
  Description of Artificial Sequence: Synthetic oligonucleotide
  Antisense strand to SEQ ID NO: 2294892
ucagugacuaccauauaug

SEQ ID NO: 2294894 - RNA, 19 nt, Artificial Sequence
  Description of Artificial Sequence: Synthetic oligonucleotide
  Sense strand starting at position 3472 of SEQ ID NO: 1884825
gucacugagccagagacua

SEQ ID NO: 2294895 - RNA, 19 nt, Artificial Sequence
  Description of Artificial Sequence: Synthetic oligonucleotide
  Antisense strand to SEQ ID NO: 2294894
uagucucuggcucagugac

SEQ ID NO: 2294896 - RNA, 19 nt, Artificial Sequence
  Description of Artificial Sequence: Synthetic oligonucleotide
  Sense strand starting at position 3512 of SEQ ID NO: 1884825
gguuccuguccucaacaca

SEQ ID NO: 2294897 - RNA, 19 nt, Artificial Sequence
  Description of Artificial Sequence: Synthetic oligonucleotide
  Antisense strand to SEQ ID NO: 2294896
uguguugaggacaggaacc

SEQ ID NO: 2294898 - RNA, 19 nt, Artificial Sequence
  Description of Artificial Sequence: Synthetic oligonucleotide
  Sense strand starting at position 3548 of SEQ ID NO: 1884825
uuauauccguuauuggaaa

SEQ ID NO: 2294899 - RNA, 19 nt, Artificial Sequence
  Description of Artificial Sequence: Synthetic oligonucleotide
  Antisense strand to SEQ ID NO: 2294898
uuuccaauaacggauauaa

SEQ ID NO: 2294900 - RNA, 19 nt, Artificial Sequence
  Description of Artificial Sequence: Synthetic oligonucleotide
  Sense strand starting at position 3608 of SEQ ID NO: 1884825
guaauuaacugacugccaa

SEQ ID NO: 2294901 - RNA, 19 nt, Artificial Sequence
  Description of Artificial Sequence: Synthetic oligonucleotide
  Antisense strand to SEQ ID NO: 2294900
uuggcagucaguuaauuac

SEQ ID NO: 2294902 - RNA, 19 nt, Artificial Sequence
  Description of Artificial Sequence: Synthetic oligonucleotide
  Sense strand starting at position 3648 of SEQ ID NO: 1884825
cauauuguguuaucaagag

SEQ ID NO: 2294903 - RNA, 19 nt, Artificial Sequence
  Description of Artificial Sequence: Synthetic oligonucleotide
  Antisense strand to SEQ ID NO: 2294902
cucuugauaacacaauaug

SEQ ID NO: 2294904 - RNA, 19 nt, Artificial Sequence
  Description of Artificial Sequence: Synthetic oligonucleotide
  Sense strand starting at position 3708 of SEQ ID NO: 1884825
ccacuucuuagauggguga

SEQ ID NO: 2294905 - RNA, 19 nt, Artificial Sequence
  Description of Artificial Sequence: Synthetic oligonucleotide
  Antisense strand to SEQ ID NO: 2294904
ucacccaucuaagaagugg

SEQ ID NO: 2294906 - RNA, 19 nt, Artificial Sequence
  Description of Artificial Sequence: Synthetic oligonucleotide
  Sense strand starting at position 3710 of SEQ ID NO: 1884825
acuucuuagaugggugacu

SEQ ID NO: 2294907 - RNA, 19 nt, Artificial Sequence
  Description of Artificial Sequence: Synthetic oligonucleotide
  Antisense strand to SEQ ID NO: 2294906
agucacccaucuaagaagu

SEQ ID NO: 2294908 - RNA, 19 nt, Artificial Sequence
  Description of Artificial Sequence: Synthetic oligonucleotide
  Sense strand starting at position 3711 of SEQ ID NO: 1884825
cuucuuagaugggugacuu

SEQ ID NO: 2294909 - RNA, 19 nt, Artificial Sequence
  Description of Artificial Sequence: Synthetic oligonucleotide
  Antisense strand to SEQ ID NO: 2294908
aagucacccaucuaagaag

SEQ ID NO: 2294910 - RNA, 19 nt, Artificial Sequence
  Description of Artificial Sequence: Synthetic oligonucleotide
  Sense strand starting at position 3798 of SEQ ID NO: 1884825
cucacuugguucuugagaa

SEQ ID NO: 2294911 - RNA, 19 nt, Artificial Sequence
  Description of Artificial Sequence: Synthetic oligonucleotide
  Antisense strand to SEQ ID NO: 2294910
uucucaagaaccaagugag

SEQ ID NO: 2294912 - RNA, 19 nt, Artificial Sequence
  Description of Artificial Sequence: Synthetic oligonucleotide
  Sense strand starting at position 3908 of SEQ ID NO: 1884825
uuugcauauguugauacau

SEQ ID NO: 2294913 - RNA, 19 nt, Artificial Sequence
  Description of Artificial Sequence: Synthetic oligonucleotide
  Antisense strand to SEQ ID NO: 2294912
auguaucaacauaugcaaa

SEQ ID NO: 2294914 - RNA, 19 nt, Artificial Sequence
  Description of Artificial Sequence: Synthetic oligonucleotide
  Sense strand starting at position 213 of SEQ ID NO: 1884826
gcaacugaaucuguaggau

SEQ ID NO: 2294915 - RNA, 19 nt, Artificial Sequence
  Description of Artificial Sequence: Synthetic oligonucleotide
  Antisense strand to SEQ ID NO: 2294914
auccuacagauucaguugc

SEQ ID NO: 2294916 - RNA, 19 nt, Artificial Sequence
  Description of Artificial Sequence: Synthetic oligonucleotide
  Sense strand starting at position 249 of SEQ ID NO: 1884826
cgugcaggauaacuagaua

SEQ ID NO: 2294917 - RNA, 19 nt, Artificial Sequence
  Description of Artificial Sequence: Synthetic oligonucleotide
  Antisense strand to SEQ ID NO: 2294916
uaucuaguuauccugcacg

SEQ ID NO: 2294918 - RNA, 19 nt, Artificial Sequence
  Description of Artificial Sequence: Synthetic oligonucleotide
  Sense strand starting at position 261 of SEQ ID NO: 1884826
cuagauagguaucauuugu

SEQ ID NO: 2294919 - RNA, 19 nt, Artificial Sequence
  Description of Artificial Sequence: Synthetic oligonucleotide
  Antisense strand to SEQ ID NO: 2294918
acaaaugauaccuaucuag

SEQ ID NO: 2294920 - RNA, 19 nt, Artificial Sequence
  Description of Artificial Sequence: Synthetic oligonucleotide
  Sense strand starting at position 267 of SEQ ID NO: 1884826
agguaucauuuguaauacu

SEQ ID NO: 2294921 - RNA, 19 nt, Artificial Sequence
  Description of Artificial Sequence: Synthetic oligonucleotide
  Antisense strand to SEQ ID NO: 2294920
aguauuacaaaugauaccu

SEQ ID NO: 2294922 - RNA, 19 nt, Artificial Sequence
  Description of Artificial Sequence: Synthetic oligonucleotide
  Sense strand starting at position 278 of SEQ ID NO: 1884826
guaauacugguguguauuu

SEQ ID NO: 2294923 - RNA, 19 nt, Artificial Sequence
  Description of Artificial Sequence: Synthetic oligonucleotide
  Antisense strand to SEQ ID NO: 2294922
aaauacacaccaguauuac

SEQ ID NO: 2294924 - RNA, 19 nt, Artificial Sequence
  Description of Artificial Sequence: Synthetic oligonucleotide
  Sense strand starting at position 336 of SEQ ID NO: 1884826
ggguauugccaacauaaac

SEQ ID NO: 2294925 - RNA, 19 nt, Artificial Sequence
  Description of Artificial Sequence: Synthetic oligonucleotide
  Antisense strand to SEQ ID NO: 2294924
guuuauguuggcaauaccc

SEQ ID NO: 2294926 - RNA, 19 nt, Artificial Sequence
  Description of Artificial Sequence: Synthetic oligonucleotide
  Sense strand starting at position 385 of SEQ ID NO: 1884826
aucagcaauguaugagaaa

SEQ ID NO: 2294927 - RNA, 19 nt, Artificial Sequence
  Description of Artificial Sequence: Synthetic oligonucleotide
  Antisense strand to SEQ ID NO: 2294926
uuucucauacauugcugau

SEQ ID NO: 2294928 - RNA, 19 nt, Artificial Sequence
  Description of Artificial Sequence: Synthetic oligonucleotide
  Sense strand starting at position 465 of SEQ ID NO: 1884826
uccagauacucugcacaga

SEQ ID NO: 2294929 - RNA, 19 nt, Artificial Sequence
  Description of Artificial Sequence: Synthetic oligonucleotide
  Antisense strand to SEQ ID NO: 2294928
ucugugcagaguaucugga

SEQ ID NO: 2294930 - RNA, 19 nt, Artificial Sequence
  Description of Artificial Sequence: Synthetic oligonucleotide
  Sense strand starting at position 501 of SEQ ID NO: 1884826
gguguugaguccuugaaug

SEQ ID NO: 2294931 - RNA, 19 nt, Artificial Sequence
  Description of Artificial Sequence: Synthetic oligonucleotide
  Antisense strand to SEQ ID NO: 2294930
cauucaaggacucaacacc

SEQ ID NO: 2294932 - RNA, 19 nt, Artificial Sequence
  Description of Artificial Sequence: Synthetic oligonucleotide
  Sense strand starting at position 503 of SEQ ID NO: 1884826
uguugaguccuugaauguc

SEQ ID NO: 2294933 - RNA, 19 nt, Artificial Sequence
  Description of Artificial Sequence: Synthetic oligonucleotide
  Antisense strand to SEQ ID NO: 2294932
gacauucaaggacucaaca

SEQ ID NO: 2294934 - RNA, 19 nt, Artificial Sequence
  Description of Artificial Sequence: Synthetic oligonucleotide
  Sense strand starting at position 546 of SEQ ID NO: 1884826
gaccucaggcgccauauau

SEQ ID NO: 2294935 - RNA, 19 nt, Artificial Sequence
  Description of Artificial Sequence: Synthetic oligonucleotide
  Antisense strand to SEQ ID NO: 2294934
auauauggcgccugagguc

SEQ ID NO: 2294936 - RNA, 19 nt, Artificial Sequence
  Description of Artificial Sequence: Synthetic oligonucleotide
  Sense strand starting at position 839 of SEQ ID NO: 1884826
gagaauacauguucugcca

SEQ ID NO: 2294937 - RNA, 19 nt, Artificial Sequence
  Description of Artificial Sequence: Synthetic oligonucleotide
  Antisense strand to SEQ ID NO: 2294936
uggcagaacauguauucuc

SEQ ID NO: 2294938 - RNA, 19 nt, Artificial Sequence
  Description of Artificial Sequence: Synthetic oligonucleotide
  Sense strand starting at position 1062 of SEQ ID NO: 1884826
agggucacccagugaacua

SEQ ID NO: 2294939 - RNA, 19 nt, Artificial Sequence
  Description of Artificial Sequence: Synthetic oligonucleotide
  Antisense strand to SEQ ID NO: 2294938
uaguucacugggugacccu

SEQ ID NO: 2294940 - RNA, 19 nt, Artificial Sequence
  Description of Artificial Sequence: Synthetic oligonucleotide
  Sense strand starting at position 1255 of SEQ ID NO: 1884826
cugggaccaagugguuauu

SEQ ID NO: 2294941 - RNA, 19 nt, Artificial Sequence
  Description of Artificial Sequence: Synthetic oligonucleotide
  Antisense strand to SEQ ID NO: 2294940
aauaaccacuuggucccag

SEQ ID NO: 2294942 - RNA, 19 nt, Artificial Sequence
  Description of Artificial Sequence: Synthetic oligonucleotide
  Sense strand starting at position 1485 of SEQ ID NO: 1884826
gaagaagucugagcugaag

SEQ ID NO: 2294943 - RNA, 19 nt, Artificial Sequence
  Description of Artificial Sequence: Synthetic oligonucleotide
  Antisense strand to SEQ ID NO: 2294942
cuucagcucagacuucuuc

SEQ ID NO: 2294944 - RNA, 19 nt, Artificial Sequence
  Description of Artificial Sequence: Synthetic oligonucleotide
  Sense strand starting at position 1550 of SEQ ID NO: 1884826
cccucaguauaaucgguau

SEQ ID NO: 2294945 - RNA, 19 nt, Artificial Sequence
  Description of Artificial Sequence: Synthetic oligonucleotide
  Antisense strand to SEQ ID NO: 2294944
auaccgauuauacugaggg

SEQ ID NO: 2294946 - RNA, 19 nt, Artificial Sequence
  Description of Artificial Sequence: Synthetic oligonucleotide
  Sense strand starting at position 1554 of SEQ ID NO: 1884826
caguauaaucgguauaccu

SEQ ID NO: 2294947 - RNA, 19 nt, Artificial Sequence
  Description of Artificial Sequence: Synthetic oligonucleotide
  Antisense strand to SEQ ID NO: 2294946
agguauaccgauuauacug

SEQ ID NO: 2294948 - RNA, 19 nt, Artificial Sequence
  Description of Artificial Sequence: Synthetic oligonucleotide
  Sense strand starting at position 1668 of SEQ ID NO: 1884826
gcaggagagauugggcuuu

SEQ ID NO: 2294949 - RNA, 19 nt, Artificial Sequence
  Description of Artificial Sequence: Synthetic oligonucleotide
  Antisense strand to SEQ ID NO: 2294948
aaagcccaaucucuccugc

SEQ ID NO: 2294950 - RNA, 19 nt, Artificial Sequence
  Description of Artificial Sequence: Synthetic oligonucleotide
  Sense strand starting at position 1940 of SEQ ID NO: 1884826
uguguacugaucugggaga

SEQ ID NO: 2294951 - RNA, 19 nt, Artificial Sequence
  Description of Artificial Sequence: Synthetic oligonucleotide
  Antisense strand to SEQ ID NO: 2294950
ucucccagaucaguacaca

SEQ ID NO: 2294952 - RNA, 19 nt, Artificial Sequence
  Description of Artificial Sequence: Synthetic oligonucleotide
  Sense strand starting at position 2116 of SEQ ID NO: 1884826
auguguugaacguaacaua

SEQ ID NO: 2294953 - RNA, 19 nt, Artificial Sequence
  Description of Artificial Sequence: Synthetic oligonucleotide
  Antisense strand to SEQ ID NO: 2294952
uauguuacguucaacacau

SEQ ID NO: 2294954 - RNA, 19 nt, Artificial Sequence
  Description of Artificial Sequence: Synthetic oligonucleotide
  Sense strand starting at position 2260 of SEQ ID NO: 1884826
cuaguaaguagcuagucua

SEQ ID NO: 2294955 - RNA, 19 nt, Artificial Sequence
  Description of Artificial Sequence: Synthetic oligonucleotide
  Antisense strand to SEQ ID NO: 2294954
uagacuagcuacuuacuag

SEQ ID NO: 2294956 - RNA, 19 nt, Artificial Sequence
  Description of Artificial Sequence: Synthetic oligonucleotide
  Sense strand starting at position 2263 of SEQ ID NO: 1884826
guaaguagcuagucuagga

SEQ ID NO: 2294957 - RNA, 19 nt, Artificial Sequence
  Description of Artificial Sequence: Synthetic oligonucleotide
  Antisense strand to SEQ ID NO: 2294956
uccuagacuagcuacuuac

SEQ ID NO: 2294958 - RNA, 19 nt, Artificial Sequence
  Description of Artificial Sequence: Synthetic oligonucleotide
  Sense strand starting at position 2268 of SEQ ID NO: 1884826
uagcuagucuaggauuuaa

SEQ ID NO: 2294959 - RNA, 19 nt, Artificial Sequence
  Description of Artificial Sequence: Synthetic oligonucleotide
  Antisense strand to SEQ ID NO: 2294958
uuaaauccuagacuagcua

SEQ ID NO: 2294960 - RNA, 19 nt, Artificial Sequence
  Description of Artificial Sequence: Synthetic oligonucleotide
  Sense strand starting at position 2377 of SEQ ID NO: 1884826
cucuguuucccaggcacaa

SEQ ID NO: 2294961 - RNA, 19 nt, Artificial Sequence
  Description of Artificial Sequence: Synthetic oligonucleotide
  Antisense strand to SEQ ID NO: 2294960
uugugccugggaaacagag

SEQ ID NO: 2294962 - RNA, 19 nt, Artificial Sequence
  Description of Artificial Sequence: Synthetic oligonucleotide
  Sense strand starting at position 2771 of SEQ ID NO: 1884826
ucggcuggucugggauuua

SEQ ID NO: 2294963 - RNA, 19 nt, Artificial Sequence
  Description of Artificial Sequence: Synthetic oligonucleotide
  Antisense strand to SEQ ID NO: 2294962
uaaaucccagaccagccga

SEQ ID NO: 2294964 - RNA, 19 nt, Artificial Sequence
  Description of Artificial Sequence: Synthetic oligonucleotide
  Sense strand starting at position 2831 of SEQ ID NO: 1884826
uuacuuauauaggaaggaa

SEQ ID NO: 2294965 - RNA, 19 nt, Artificial Sequence
  Description of Artificial Sequence: Synthetic oligonucleotide
  Antisense strand to SEQ ID NO: 2294964
uuccuuccuauauaaguaa

SEQ ID NO: 2294966 - RNA, 19 nt, Artificial Sequence
  Description of Artificial Sequence: Synthetic oligonucleotide
  Sense strand starting at position 2932 of SEQ ID NO: 1884826
auuauauaagugugcuuga

SEQ ID NO: 2294967 - RNA, 19 nt, Artificial Sequence
  Description of Artificial Sequence: Synthetic oligonucleotide
  Antisense strand to SEQ ID NO: 2294966
ucaagcacacuuauauaau

SEQ ID NO: 2294968 - RNA, 19 nt, Artificial Sequence
  Description of Artificial Sequence: Synthetic oligonucleotide
  Sense strand starting at position 2935 of SEQ ID NO: 1884826
auauaagugugcuugacua

SEQ ID NO: 2294969 - RNA, 19 nt, Artificial Sequence
  Description of Artificial Sequence: Synthetic oligonucleotide
  Antisense strand to SEQ ID NO: 2294968
uagucaagcacacuuauau

SEQ ID NO: 2294970 - RNA, 19 nt, Artificial Sequence
  Description of Artificial Sequence: Synthetic oligonucleotide
  Sense strand starting at position 2937 of SEQ ID NO: 1884826
auaagugugcuugacuaca

SEQ ID NO: 2294971 - RNA, 19 nt, Artificial Sequence
  Description of Artificial Sequence: Synthetic oligonucleotide
  Antisense strand to SEQ ID NO: 2294970
uguagucaagcacacuuau

SEQ ID NO: 2294972 - RNA, 19 nt, Artificial Sequence
  Description of Artificial Sequence: Synthetic oligonucleotide
  Sense strand starting at position 2939 of SEQ ID NO: 1884826
aagugugcuugacuacaua

SEQ ID NO: 2294973 - RNA, 19 nt, Artificial Sequence
  Description of Artificial Sequence: Synthetic oligonucleotide
  Antisense strand to SEQ ID NO: 2294972
uauguagucaagcacacuu

SEQ ID NO: 2294974 - RNA, 19 nt, Artificial Sequence
  Description of Artificial Sequence: Synthetic oligonucleotide
  Sense strand starting at position 3005 of SEQ ID NO: 1884826
acuaguaguaaggagcuua

SEQ ID NO: 2294975 - RNA, 19 nt, Artificial Sequence
  Description of Artificial Sequence: Synthetic oligonucleotide
  Antisense strand to SEQ ID NO: 2294974
uaagcuccuuacuacuagu

SEQ ID NO: 2294976 - RNA, 19 nt, Artificial Sequence
  Description of Artificial Sequence: Synthetic oligonucleotide
  Sense strand starting at position 3069 of SEQ ID NO: 1884826
gcaagacucacaggauugu

SEQ ID NO: 2294977 - RNA, 19 nt, Artificial Sequence
  Description of Artificial Sequence: Synthetic oligonucleotide
  Antisense strand to SEQ ID NO: 2294976
acaauccugugagucuugc

SEQ ID NO: 2294978 - RNA, 19 nt, Artificial Sequence
  Description of Artificial Sequence: Synthetic oligonucleotide
  Sense strand starting at position 3079 of SEQ ID NO: 1884826
caggauugucgugagaauu

SEQ ID NO: 2294979 - RNA, 19 nt, Artificial Sequence
  Description of Artificial Sequence: Synthetic oligonucleotide
  Antisense strand to SEQ ID NO: 2294978
aauucucacgacaauccug

SEQ ID NO: 2294980 - RNA, 19 nt, Artificial Sequence
  Description of Artificial Sequence: Synthetic oligonucleotide
  Sense strand starting at position 3146 of SEQ ID NO: 1884826
uaaguaagggcuugauaag

SEQ ID NO: 2294981 - RNA, 19 nt, Artificial Sequence
  Description of Artificial Sequence: Synthetic oligonucleotide
  Antisense strand to SEQ ID NO: 2294980
cuuaucaagcccuuacuua

SEQ ID NO: 2294982 - RNA, 19 nt, Artificial Sequence
  Description of Artificial Sequence: Synthetic oligonucleotide
  Sense strand starting at position 3267 of SEQ ID NO: 1884826
aggcucagagcaugugauu

SEQ ID NO: 2294983 - RNA, 19 nt, Artificial Sequence
  Description of Artificial Sequence: Synthetic oligonucleotide
  Antisense strand to SEQ ID NO: 2294982
aaucacaugcucugagccu

SEQ ID NO: 2294984 - RNA, 19 nt, Artificial Sequence
  Description of Artificial Sequence: Synthetic oligonucleotide
  Sense strand starting at position 3431 of SEQ ID NO: 1884826
gcuccuggcccauacagau

SEQ ID NO: 2294985 - RNA, 19 nt, Artificial Sequence
  Description of Artificial Sequence: Synthetic oligonucleotide
  Antisense strand to SEQ ID NO: 2294984
aucuguaugggccaggagc

SEQ ID NO: 2294986 - RNA, 19 nt, Artificial Sequence
  Description of Artificial Sequence: Synthetic oligonucleotide
  Sense strand starting at position 3455 of SEQ ID NO: 1884826
agagcuuugagagggaacu

SEQ ID NO: 2294987 - RNA, 19 nt, Artificial Sequence
  Description of Artificial Sequence: Synthetic oligonucleotide
  Antisense strand to SEQ ID NO: 2294986
aguucccucucaaagcucu

SEQ ID NO: 2294988 - RNA, 19 nt, Artificial Sequence
  Description of Artificial Sequence: Synthetic oligonucleotide
  Sense strand starting at position 3456 of SEQ ID NO: 1884826
gagcuuugagagggaacua

SEQ ID NO: 2294989 - RNA, 19 nt, Artificial Sequence
  Description of Artificial Sequence: Synthetic oligonucleotide
  Antisense strand to SEQ ID NO: 2294988
uaguucccucucaaagcuc

SEQ ID NO: 2294990 - RNA, 19 nt, Artificial Sequence
  Description of Artificial Sequence: Synthetic oligonucleotide
  Sense strand starting at position 3695 of SEQ ID NO: 1884826
ggccucaggcuaugggaua

SEQ ID NO: 2294991 - RNA, 19 nt, Artificial Sequence
  Description of Artificial Sequence: Synthetic oligonucleotide
  Antisense strand to SEQ ID NO: 2294990
uaucccauagccugaggcc

SEQ ID NO: 2294992 - RNA, 19 nt, Artificial Sequence
  Description of Artificial Sequence: Synthetic oligonucleotide
  Sense strand starting at position 3783 of SEQ ID NO: 1884826
ugugguuuccucuagagcu

SEQ ID NO: 2294993 - RNA, 19 nt, Artificial Sequence
  Description of Artificial Sequence: Synthetic oligonucleotide
  Antisense strand to SEQ ID NO: 2294992
agcucuagaggaaaccaca

SEQ ID NO: 2294994 - RNA, 19 nt, Artificial Sequence
  Description of Artificial Sequence: Synthetic oligonucleotide
  Sense strand starting at position 360 of SEQ ID NO: 1884827
gaaauaggaugguuucugu

SEQ ID NO: 2294995 - RNA, 19 nt, Artificial Sequence
  Description of Artificial Sequence: Synthetic oligonucleotide
  Antisense strand to SEQ ID NO: 2294994
acagaaaccauccuauuuc

SEQ ID NO: 2294996 - RNA, 19 nt, Artificial Sequence
  Description of Artificial Sequence: Synthetic oligonucleotide
  Sense strand starting at position 363 of SEQ ID NO: 1884827
auaggaugguuucuguuga

SEQ ID NO: 2294997 - RNA, 19 nt, Artificial Sequence
  Description of Artificial Sequence: Synthetic oligonucleotide
  Antisense strand to SEQ ID NO: 2294996
ucaacagaaaccauccuau

SEQ ID NO: 2294998 - RNA, 19 nt, Artificial Sequence
  Description of Artificial Sequence: Synthetic oligonucleotide
  Sense strand starting at position 458 of SEQ ID NO: 1884827
gucuauuggcguguguuua

SEQ ID NO: 2294999 - RNA, 19 nt, Artificial Sequence
  Description of Artificial Sequence: Synthetic oligonucleotide
  Antisense strand to SEQ ID NO: 2294998
uaaacacacgccaauagac

SEQ ID NO: 2295000 - RNA, 19 nt, Artificial Sequence
  Description of Artificial Sequence: Synthetic oligonucleotide
  Sense strand starting at position 571 of SEQ ID NO: 1884827
ugaucacagccaugauaau

SEQ ID NO: 2295001 - RNA, 19 nt, Artificial Sequence
  Description of Artificial Sequence: Synthetic oligonucleotide
  Antisense strand to SEQ ID NO: 2295000
auuaucauggcugugauca

SEQ ID NO: 2295002 - RNA, 19 nt, Artificial Sequence
  Description of Artificial Sequence: Synthetic oligonucleotide
  Sense strand starting at position 907 of SEQ ID NO: 1884827
aaagaauuauuugaggguu

SEQ ID NO: 2295003 - RNA, 19 nt, Artificial Sequence
  Description of Artificial Sequence: Synthetic oligonucleotide
  Antisense strand to SEQ ID NO: 2295002
aacccucaaauaauucuuu

SEQ ID NO: 2295004 - RNA, 19 nt, Artificial Sequence
  Description of Artificial Sequence: Synthetic oligonucleotide
  Sense strand starting at position 929 of SEQ ID NO: 1884827
auugcaaauugguuaacau

SEQ ID NO: 2295005 - RNA, 19 nt, Artificial Sequence
  Description of Artificial Sequence: Synthetic oligonucleotide
  Antisense strand to SEQ ID NO: 2295004
auguuaaccaauuugcaau

SEQ ID NO: 2295006 - RNA, 19 nt, Artificial Sequence
  Description of Artificial Sequence: Synthetic oligonucleotide
  Sense strand starting at position 930 of SEQ ID NO: 1884827
uugcaaauugguuaacaug

SEQ ID NO: 2295007 - RNA, 19 nt, Artificial Sequence
  Description of Artificial Sequence: Synthetic oligonucleotide
  Antisense strand to SEQ ID NO: 2295006
cauguuaaccaauuugcaa

SEQ ID NO: 2295008 - RNA, 19 nt, Artificial Sequence
  Description of Artificial Sequence: Synthetic oligonucleotide
  Sense strand starting at position 993 of SEQ ID NO: 1884827
ucgguuggagcccagauaa

SEQ ID NO: 2295009 - RNA, 19 nt, Artificial Sequence
  Description of Artificial Sequence: Synthetic oligonucleotide
  Antisense strand to SEQ ID NO: 2295008
uuaucugggcuccaaccga

SEQ ID NO: 2295010 - RNA, 19 nt, Artificial Sequence
  Description of Artificial Sequence: Synthetic oligonucleotide
  Sense strand starting at position 1054 of SEQ ID NO: 1884827
uagaaauaaucuuccggua

SEQ ID NO: 2295011 - RNA, 19 nt, Artificial Sequence
  Description of Artificial Sequence: Synthetic oligonucleotide
  Antisense strand to SEQ ID NO: 2295010
uaccggaagauuauuucua

SEQ ID NO: 2295012 - RNA, 19 nt, Artificial Sequence
  Description of Artificial Sequence: Synthetic oligonucleotide
  Sense strand starting at position 1059 of SEQ ID NO: 1884827
auaaucuuccgguauauug

SEQ ID NO: 2295013 - RNA, 19 nt, Artificial Sequence
  Description of Artificial Sequence: Synthetic oligonucleotide
  Antisense strand to SEQ ID NO: 2295012
caauauaccggaagauuau

SEQ ID NO: 2295014 - RNA, 19 nt, Artificial Sequence
  Description of Artificial Sequence: Synthetic oligonucleotide
  Sense strand starting at position 1069 of SEQ ID NO: 1884827
gguauauugccagagaagc

SEQ ID NO: 2295015 - RNA, 19 nt, Artificial Sequence
  Description of Artificial Sequence: Synthetic oligonucleotide
  Antisense strand to SEQ ID NO: 2295014
gcuucucuggcaauauacc

SEQ ID NO: 2295016 - RNA, 19 nt, Artificial Sequence
  Description of Artificial Sequence: Synthetic oligonucleotide
  Sense strand starting at position 1077 of SEQ ID NO: 1884827
gccagagaagccuauguga

SEQ ID NO: 2295017 - RNA, 19 nt, Artificial Sequence
  Description of Artificial Sequence: Synthetic oligonucleotide
  Antisense strand to SEQ ID NO: 2295016
ucacauaggcuucucuggc

SEQ ID NO: 2295018 - RNA, 19 nt, Artificial Sequence
  Description of Artificial Sequence: Synthetic oligonucleotide
  Sense strand starting at position 1079 of SEQ ID NO: 1884827
cagagaagccuaugugaaa

SEQ ID NO: 2295019 - RNA, 19 nt, Artificial Sequence
  Description of Artificial Sequence: Synthetic oligonucleotide
  Antisense strand to SEQ ID NO: 2295018
uuucacauaggcuucucug

SEQ ID NO: 2295020 - RNA, 19 nt, Artificial Sequence
  Description of Artificial Sequence: Synthetic oligonucleotide
  Sense strand starting at position 1117 of SEQ ID NO: 1884827
agucauuaauguccauaaa

SEQ ID NO: 2295021 - RNA, 19 nt, Artificial Sequence
  Description of Artificial Sequence: Synthetic oligonucleotide
  Antisense strand to SEQ ID NO: 2295020
uuuauggacauuaaugacu

SEQ ID NO: 2295022 - RNA, 19 nt, Artificial Sequence
  Description of Artificial Sequence: Synthetic oligonucleotide
  Sense strand starting at position 1591 of SEQ ID NO: 1884827
ugcuaagucauuuguaguu

SEQ ID NO: 2295023 - RNA, 19 nt, Artificial Sequence
  Description of Artificial Sequence: Synthetic oligonucleotide
  Antisense strand to SEQ ID NO: 2295022
aacuacaaaugacuuagca

SEQ ID NO: 2295024 - RNA, 19 nt, Artificial Sequence
  Description of Artificial Sequence: Synthetic oligonucleotide
  Sense strand starting at position 1606 of SEQ ID NO: 1884827
aguuaaaugccguauuucu

SEQ ID NO: 2295025 - RNA, 19 nt, Artificial Sequence
  Description of Artificial Sequence: Synthetic oligonucleotide
  Antisense strand to SEQ ID NO: 2295024
agaaauacggcauuuaacu

SEQ ID NO: 2295026 - RNA, 19 nt, Artificial Sequence
  Description of Artificial Sequence: Synthetic oligonucleotide
  Sense strand starting at position 1678 of SEQ ID NO: 1884827
ggauauuaccuguaucugu

SEQ ID NO: 2295027 - RNA, 19 nt, Artificial Sequence
  Description of Artificial Sequence: Synthetic oligonucleotide
  Antisense strand to SEQ ID NO: 2295026
acagauacagguaauaucc

SEQ ID NO: 2295028 - RNA, 19 nt, Artificial Sequence
  Description of Artificial Sequence: Synthetic oligonucleotide
  Sense strand starting at position 1686 of SEQ ID NO: 1884827
ccuguaucugugcuaugca

SEQ ID NO: 2295029 - RNA, 19 nt, Artificial Sequence
  Description of Artificial Sequence: Synthetic oligonucleotide
  Antisense strand to SEQ ID NO: 2295028
ugcauagcacagauacagg

SEQ ID NO: 2295030 - RNA, 19 nt, Artificial Sequence
  Description of Artificial Sequence: Synthetic oligonucleotide
  Sense strand starting at position 1794 of SEQ ID NO: 1884827
agaaauaaauucucuucga

SEQ ID NO: 2295031 - RNA, 19 nt, Artificial Sequence
  Description of Artificial Sequence: Synthetic oligonucleotide
  Antisense strand to SEQ ID NO: 2295030
ucgaagagaauuuauuucu

SEQ ID NO: 2295032 - RNA, 19 nt, Artificial Sequence
  Description of Artificial Sequence: Synthetic oligonucleotide
  Sense strand starting at position 1798 of SEQ ID NO: 1884827
auaaauucucuucgaauga

SEQ ID NO: 2295033 - RNA, 19 nt, Artificial Sequence
  Description of Artificial Sequence: Synthetic oligonucleotide
  Antisense strand to SEQ ID NO: 2295032
ucauucgaagagaauuuau

SEQ ID NO: 2295034 - RNA, 19 nt, Artificial Sequence
  Description of Artificial Sequence: Synthetic oligonucleotide
  Sense strand starting at position 1802 of SEQ ID NO: 1884827
auucucuucgaaugauacu

SEQ ID NO: 2295035 - RNA, 19 nt, Artificial Sequence
  Description of Artificial Sequence: Synthetic oligonucleotide
  Antisense strand to SEQ ID NO: 2295034
aguaucauucgaagagaau

SEQ ID NO: 2295036 - RNA, 19 nt, Artificial Sequence
  Description of Artificial Sequence: Synthetic oligonucleotide
  Sense strand starting at position 2012 of SEQ ID NO: 1884827
uuguacacaucuuuggaga

SEQ ID NO: 2295037 - RNA, 19 nt, Artificial Sequence
  Description of Artificial Sequence: Synthetic oligonucleotide
  Antisense strand to SEQ ID NO: 2295036
ucuccaaagauguguacaa

SEQ ID NO: 2295038 - RNA, 19 nt, Artificial Sequence
  Description of Artificial Sequence: Synthetic oligonucleotide
  Sense strand starting at position 2013 of SEQ ID NO: 1884827
uguacacaucuuuggagaa

SEQ ID NO: 2295039 - RNA, 19 nt, Artificial Sequence
  Description of Artificial Sequence: Synthetic oligonucleotide
  Antisense strand to SEQ ID NO: 2295038
uucuccaaagauguguaca

SEQ ID NO: 2295040 - RNA, 19 nt, Artificial Sequence
  Description of Artificial Sequence: Synthetic oligonucleotide
  Sense strand starting at position 2097 of SEQ ID NO: 1884827
cugaaaugucuauguauaa

SEQ ID NO: 2295041 - RNA, 19 nt, Artificial Sequence
  Description of Artificial Sequence: Synthetic oligonucleotide
  Antisense strand to SEQ ID NO: 2295040
uuauacauagacauuucag

SEQ ID NO: 2295042 - RNA, 19 nt, Artificial Sequence
  Description of Artificial Sequence: Synthetic oligonucleotide
  Sense strand starting at position 2135 of SEQ ID NO: 1884827
aaguguaaugauugaacua

SEQ ID NO: 2295043 - RNA, 19 nt, Artificial Sequence
  Description of Artificial Sequence: Synthetic oligonucleotide
  Antisense strand to SEQ ID NO: 2295042
uaguucaaucauuacacuu

SEQ ID NO: 2295044 - RNA, 19 nt, Artificial Sequence
  Description of Artificial Sequence: Synthetic oligonucleotide
  Sense strand starting at position 2186 of SEQ ID NO: 1884827
uuggaaauguucuccuaua

SEQ ID NO: 2295045 - RNA, 19 nt, Artificial Sequence
  Description of Artificial Sequence: Synthetic oligonucleotide
  Antisense strand to SEQ ID NO: 2295044
uauaggagaacauuuccaa

SEQ ID NO: 2295046 - RNA, 19 nt, Artificial Sequence
  Description of Artificial Sequence: Synthetic oligonucleotide
  Sense strand starting at position 2187 of SEQ ID NO: 1884827
uggaaauguucuccuauau

SEQ ID NO: 2295047 - RNA, 19 nt, Artificial Sequence
  Description of Artificial Sequence: Synthetic oligonucleotide
  Antisense strand to SEQ ID NO: 2295046
auauaggagaacauuucca

SEQ ID NO: 2295048 - RNA, 19 nt, Artificial Sequence
  Description of Artificial Sequence: Synthetic oligonucleotide
  Sense strand starting at position 2358 of SEQ ID NO: 1884827
ugguaucauuccuuacaca

SEQ ID NO: 2295049 - RNA, 19 nt, Artificial Sequence
  Description of Artificial Sequence: Synthetic oligonucleotide
  Antisense strand to SEQ ID NO: 2295048
uguguaaggaaugauacca

SEQ ID NO: 2295050 - RNA, 19 nt, Artificial Sequence
  Description of Artificial Sequence: Synthetic oligonucleotide
  Sense strand starting at position 2359 of SEQ ID NO: 1884827
gguaucauuccuuacacag

SEQ ID NO: 2295051 - RNA, 19 nt, Artificial Sequence
  Description of Artificial Sequence: Synthetic oligonucleotide
  Antisense strand to SEQ ID NO: 2295050
cuguguaaggaaugauacc

SEQ ID NO: 2295052 - RNA, 19 nt, Artificial Sequence
  Description of Artificial Sequence: Synthetic oligonucleotide
  Sense strand starting at position 2602 of SEQ ID NO: 1884827
ugucaaaggguauauguau

SEQ ID NO: 2295053 - RNA, 19 nt, Artificial Sequence
  Description of Artificial Sequence: Synthetic oligonucleotide
  Antisense strand to SEQ ID NO: 2295052
auacauauacccuuugaca

SEQ ID NO: 2295054 - RNA, 19 nt, Artificial Sequence
  Description of Artificial Sequence: Synthetic oligonucleotide
  Sense strand starting at position 2986 of SEQ ID NO: 1884827
aggugauagugguuaauaa

SEQ ID NO: 2295055 - RNA, 19 nt, Artificial Sequence
  Description of Artificial Sequence: Synthetic oligonucleotide
  Antisense strand to SEQ ID NO: 2295054
uuauuaaccacuaucaccu

SEQ ID NO: 2295056 - RNA, 19 nt, Artificial Sequence
  Description of Artificial Sequence: Synthetic oligonucleotide
  Sense strand starting at position 2987 of SEQ ID NO: 1884827
ggugauagugguuaauaag

SEQ ID NO: 2295057 - RNA, 19 nt, Artificial Sequence
  Description of Artificial Sequence: Synthetic oligonucleotide
  Antisense strand to SEQ ID NO: 2295056
cuuauuaaccacuaucacc

SEQ ID NO: 2295058 - RNA, 19 nt, Artificial Sequence
  Description of Artificial Sequence: Synthetic oligonucleotide
  Sense strand starting at position 2997 of SEQ ID NO: 1884827
guuaauaaggaguguggga

SEQ ID NO: 2295059 - RNA, 19 nt, Artificial Sequence
  Description of Artificial Sequence: Synthetic oligonucleotide
  Antisense strand to SEQ ID NO: 2295058
ucccacacuccuuauuaac

SEQ ID NO: 2295060 - RNA, 19 nt, Artificial Sequence
  Description of Artificial Sequence: Synthetic oligonucleotide
  Sense strand starting at position 2999 of SEQ ID NO: 1884827
uaauaaggagugugggaua

SEQ ID NO: 2295061 - RNA, 19 nt, Artificial Sequence
  Description of Artificial Sequence: Synthetic oligonucleotide
  Antisense strand to SEQ ID NO: 2295060
uaucccacacuccuuauua

SEQ ID NO: 2295062 - RNA, 19 nt, Artificial Sequence
  Description of Artificial Sequence: Synthetic oligonucleotide
  Sense strand starting at position 3036 of SEQ ID NO: 1884827
ggcgaaauugcugauacag

SEQ ID NO: 2295063 - RNA, 19 nt, Artificial Sequence
  Description of Artificial Sequence: Synthetic oligonucleotide
  Antisense strand to SEQ ID NO: 2295062
cuguaucagcaauuucgcc

SEQ ID NO: 2295064 - RNA, 19 nt, Artificial Sequence
  Description of Artificial Sequence: Synthetic oligonucleotide
  Sense strand starting at position 3133 of SEQ ID NO: 1884827
ucaauaauguaggcaaagu

SEQ ID NO: 2295065 - RNA, 19 nt, Artificial Sequence
  Description of Artificial Sequence: Synthetic oligonucleotide
  Antisense strand to SEQ ID NO: 2295064
acuuugccuacauuauuga

SEQ ID NO: 2295066 - RNA, 19 nt, Artificial Sequence
  Description of Artificial Sequence: Synthetic oligonucleotide
  Sense strand starting at position 3386 of SEQ ID NO: 1884827
gauacugucacguauugga

SEQ ID NO: 2295067 - RNA, 19 nt, Artificial Sequence
  Description of Artificial Sequence: Synthetic oligonucleotide
  Antisense strand to SEQ ID NO: 2295066
uccaauacgugacaguauc

SEQ ID NO: 2295068 - RNA, 19 nt, Artificial Sequence
  Description of Artificial Sequence: Synthetic oligonucleotide
  Sense strand starting at position 3574 of SEQ ID NO: 1884827
cacaauggaccgugaauuc

SEQ ID NO: 2295069 - RNA, 19 nt, Artificial Sequence
  Description of Artificial Sequence: Synthetic oligonucleotide
  Antisense strand to SEQ ID NO: 2295068
gaauucacgguccauugug

SEQ ID NO: 2295070 - RNA, 19 nt, Artificial Sequence
  Description of Artificial Sequence: Synthetic oligonucleotide
  Sense strand starting at position 3648 of SEQ ID NO: 1884827
aggcaaaucuggcuugaaa

SEQ ID NO: 2295071 - RNA, 19 nt, Artificial Sequence
  Description of Artificial Sequence: Synthetic oligonucleotide
  Antisense strand to SEQ ID NO: 2295070
uuucaagccagauuugccu

SEQ ID NO: 2295072 - RNA, 19 nt, Artificial Sequence
  Description of Artificial Sequence: Synthetic oligonucleotide
  Sense strand starting at position 3799 of SEQ ID NO: 1884827
aucucaaagugucuaacua

SEQ ID NO: 2295073 - RNA, 19 nt, Artificial Sequence
  Description of Artificial Sequence: Synthetic oligonucleotide
  Antisense strand to SEQ ID NO: 2295072
uaguuagacacuuugagau

SEQ ID NO: 2295074 - RNA, 19 nt, Artificial Sequence
  Description of Artificial Sequence: Synthetic oligonucleotide
  Sense strand starting at position 112 of SEQ ID NO: 1884828
gaaucuaacuagguauugu

SEQ ID NO: 2295075 - RNA, 19 nt, Artificial Sequence
  Description of Artificial Sequence: Synthetic oligonucleotide
  Antisense strand to SEQ ID NO: 2295074
acaauaccuaguuagauuc

SEQ ID NO: 2295076 - RNA, 19 nt, Artificial Sequence
  Description of Artificial Sequence: Synthetic oligonucleotide
  Sense strand starting at position 187 of SEQ ID NO: 1884828
gugcaugcucaauggaaua

SEQ ID NO: 2295077 - RNA, 19 nt, Artificial Sequence
  Description of Artificial Sequence: Synthetic oligonucleotide
  Antisense strand to SEQ ID NO: 2295076
uauuccauugagcaugcac

SEQ ID NO: 2295078 - RNA, 19 nt, Artificial Sequence
  Description of Artificial Sequence: Synthetic oligonucleotide
  Sense strand starting at position 199 of SEQ ID NO: 1884828
uggaauauaucuuaaggau

SEQ ID NO: 2295079 - RNA, 19 nt, Artificial Sequence
  Description of Artificial Sequence: Synthetic oligonucleotide
  Antisense strand to SEQ ID NO: 2295078
auccuuaagauauauucca

SEQ ID NO: 2295080 - RNA, 19 nt, Artificial Sequence
  Description of Artificial Sequence: Synthetic oligonucleotide
  Sense strand starting at position 274 of SEQ ID NO: 1884828
uuucuauagugauucugaa

SEQ ID NO: 2295081 - RNA, 19 nt, Artificial Sequence
  Description of Artificial Sequence: Synthetic oligonucleotide
  Antisense strand to SEQ ID NO: 2295080
uucagaaucacuauagaaa

SEQ ID NO: 2295082 - RNA, 19 nt, Artificial Sequence
  Description of Artificial Sequence: Synthetic oligonucleotide
  Sense strand starting at position 301 of SEQ ID NO: 1884828
auauguauagugggauaga

SEQ ID NO: 2295083 - RNA, 19 nt, Artificial Sequence
  Description of Artificial Sequence: Synthetic oligonucleotide
  Antisense strand to SEQ ID NO: 2295082
ucuaucccacuauacauau

SEQ ID NO: 2295084 - RNA, 19 nt, Artificial Sequence
  Description of Artificial Sequence: Synthetic oligonucleotide
  Sense strand starting at position 517 of SEQ ID NO: 1884828
auauuaguaugugucacuu

SEQ ID NO: 2295085 - RNA, 19 nt, Artificial Sequence
  Description of Artificial Sequence: Synthetic oligonucleotide
  Antisense strand to SEQ ID NO: 2295084
aagugacacauacuaauau

SEQ ID NO: 2295086 - RNA, 19 nt, Artificial Sequence
  Description of Artificial Sequence: Synthetic oligonucleotide
  Sense strand starting at position 575 of SEQ ID NO: 1884828
gagagacauuuaugaacag

SEQ ID NO: 2295087 - RNA, 19 nt, Artificial Sequence
  Description of Artificial Sequence: Synthetic oligonucleotide
  Antisense strand to SEQ ID NO: 2295086
cuguucauaaaugucucuc

SEQ ID NO: 2295088 - RNA, 19 nt, Artificial Sequence
  Description of Artificial Sequence: Synthetic oligonucleotide
  Sense strand starting at position 899 of SEQ ID NO: 1884828
cugugauuauuugugucuu

SEQ ID NO: 2295089 - RNA, 19 nt, Artificial Sequence
  Description of Artificial Sequence: Synthetic oligonucleotide
  Antisense strand to SEQ ID NO: 2295088
aagacacaaauaaucacag

SEQ ID NO: 2295090 - RNA, 19 nt, Artificial Sequence
  Description of Artificial Sequence: Synthetic oligonucleotide
  Sense strand starting at position 901 of SEQ ID NO: 1884828
gugauuauuugugucuuua

SEQ ID NO: 2295091 - RNA, 19 nt, Artificial Sequence
  Description of Artificial Sequence: Synthetic oligonucleotide
  Antisense strand to SEQ ID NO: 2295090
uaaagacacaaauaaucac

SEQ ID NO: 2295092 - RNA, 19 nt, Artificial Sequence
  Description of Artificial Sequence: Synthetic oligonucleotide
  Sense strand starting at position 963 of SEQ ID NO: 1884828
auggaauugcauuguguau

SEQ ID NO: 2295093 - RNA, 19 nt, Artificial Sequence
  Description of Artificial Sequence: Synthetic oligonucleotide
  Antisense strand to SEQ ID NO: 2295092
auacacaaugcaauuccau

SEQ ID NO: 2295094 - RNA, 19 nt, Artificial Sequence
  Description of Artificial Sequence: Synthetic oligonucleotide
  Sense strand starting at position 983 of SEQ ID NO: 1884828
gaggguaugcuugaaguag

SEQ ID NO: 2295095 - RNA, 19 nt, Artificial Sequence
  Description of Artificial Sequence: Synthetic oligonucleotide
  Antisense strand to SEQ ID NO: 2295094
cuacuucaagcauacccuc

SEQ ID NO: 2295096 - RNA, 19 nt, Artificial Sequence
  Description of Artificial Sequence: Synthetic oligonucleotide
  Sense strand starting at position 987 of SEQ ID NO: 1884828
guaugcuugaaguagcaaa

SEQ ID NO: 2295097 - RNA, 19 nt, Artificial Sequence
  Description of Artificial Sequence: Synthetic oligonucleotide
  Antisense strand to SEQ ID NO: 2295096
uuugcuacuucaagcauac

SEQ ID NO: 2295098 - RNA, 19 nt, Artificial Sequence
  Description of Artificial Sequence: Synthetic oligonucleotide
  Sense strand starting at position 1040 of SEQ ID NO: 1884828
uugagucaacuuggugaaa

SEQ ID NO: 2295099 - RNA, 19 nt, Artificial Sequence
  Description of Artificial Sequence: Synthetic oligonucleotide
  Antisense strand to SEQ ID NO: 2295098
uuucaccaaguugacucaa

SEQ ID NO: 2295100 - RNA, 19 nt, Artificial Sequence
  Description of Artificial Sequence: Synthetic oligonucleotide
  Sense strand starting at position 1434 of SEQ ID NO: 1884828
ggugaauggcagcaaauau

SEQ ID NO: 2295101 - RNA, 19 nt, Artificial Sequence
  Description of Artificial Sequence: Synthetic oligonucleotide
  Antisense strand to SEQ ID NO: 2295100
auauuugcugccauucacc

SEQ ID NO: 2295102 - RNA, 19 nt, Artificial Sequence
  Description of Artificial Sequence: Synthetic oligonucleotide
  Sense strand starting at position 1497 of SEQ ID NO: 1884828
cucagagaauguccuuaag

SEQ ID NO: 2295103 - RNA, 19 nt, Artificial Sequence
  Description of Artificial Sequence: Synthetic oligonucleotide
  Antisense strand to SEQ ID NO: 2295102
cuuaaggacauucucugag

SEQ ID NO: 2295104 - RNA, 19 nt, Artificial Sequence
  Description of Artificial Sequence: Synthetic oligonucleotide
  Sense strand starting at position 1535 of SEQ ID NO: 1884828
auuacaaguaaguguuagu

SEQ ID NO: 2295105 - RNA, 19 nt, Artificial Sequence
  Description of Artificial Sequence: Synthetic oligonucleotide
  Antisense strand to SEQ ID NO: 2295104
acuaacacuuacuuguaau

SEQ ID NO: 2295106 - RNA, 19 nt, Artificial Sequence
  Description of Artificial Sequence: Synthetic oligonucleotide
  Sense strand starting at position 1546 of SEQ ID NO: 1884828
guguuaguuccacauugau

SEQ ID NO: 2295107 - RNA, 19 nt, Artificial Sequence
  Description of Artificial Sequence: Synthetic oligonucleotide
  Antisense strand to SEQ ID NO: 2295106
aucaauguggaacuaacac

SEQ ID NO: 2295108 - RNA, 19 nt, Artificial Sequence
  Description of Artificial Sequence: Synthetic oligonucleotide
  Sense strand starting at position 1636 of SEQ ID NO: 1884828
uguauagugccggaaacug

SEQ ID NO: 2295109 - RNA, 19 nt, Artificial Sequence
  Description of Artificial Sequence: Synthetic oligonucleotide
  Antisense strand to SEQ ID NO: 2295108
caguuuccggcacuauaca

SEQ ID NO: 2295110 - RNA, 19 nt, Artificial Sequence
  Description of Artificial Sequence: Synthetic oligonucleotide
  Sense strand starting at position 1647 of SEQ ID NO: 1884828
ggaaacugguguuucuuaa

SEQ ID NO: 2295111 - RNA, 19 nt, Artificial Sequence
  Description of Artificial Sequence: Synthetic oligonucleotide
  Antisense strand to SEQ ID NO: 2295110
uuaagaaacaccaguuucc

SEQ ID NO: 2295112 - RNA, 19 nt, Artificial Sequence
  Description of Artificial Sequence: Synthetic oligonucleotide
  Sense strand starting at position 1798 of SEQ ID NO: 1884828
gggaaacuaccauguuaau

SEQ ID NO: 2295113 - RNA, 19 nt, Artificial Sequence
  Description of Artificial Sequence: Synthetic oligonucleotide
  Antisense strand to SEQ ID NO: 2295112
auuaacaugguaguuuccc

SEQ ID NO: 2295114 - RNA, 19 nt, Artificial Sequence
  Description of Artificial Sequence: Synthetic oligonucleotide
  Sense strand starting at position 2018 of SEQ ID NO: 1884828
aucugcugcuaaucagaga

SEQ ID NO: 2295115 - RNA, 19 nt, Artificial Sequence
  Description of Artificial Sequence: Synthetic oligonucleotide
  Antisense strand to SEQ ID NO: 2295114
ucucugauuagcagcagau

SEQ ID NO: 2295116 - RNA, 19 nt, Artificial Sequence
  Description of Artificial Sequence: Synthetic oligonucleotide
  Sense strand starting at position 2128 of SEQ ID NO: 1884828
guugcuuucccaugacaua

SEQ ID NO: 2295117 - RNA, 19 nt, Artificial Sequence
  Description of Artificial Sequence: Synthetic oligonucleotide
  Antisense strand to SEQ ID NO: 2295116
uaugucaugggaaagcaac

SEQ ID NO: 2295118 - RNA, 19 nt, Artificial Sequence
  Description of Artificial Sequence: Synthetic oligonucleotide
  Sense strand starting at position 2553 of SEQ ID NO: 1884828
agacuaguacuacauaguu

SEQ ID NO: 2295119 - RNA, 19 nt, Artificial Sequence
  Description of Artificial Sequence: Synthetic oligonucleotide
  Antisense strand to SEQ ID NO: 2295118
aacuauguaguacuagucu

SEQ ID NO: 2295120 - RNA, 19 nt, Artificial Sequence
  Description of Artificial Sequence: Synthetic oligonucleotide
  Sense strand starting at position 2631 of SEQ ID NO: 1884828
gucauucuccucuaugugu

SEQ ID NO: 2295121 - RNA, 19 nt, Artificial Sequence
  Description of Artificial Sequence: Synthetic oligonucleotide
  Antisense strand to SEQ ID NO: 2295120
acacauagaggagaaugac

SEQ ID NO: 2295122 - RNA, 19 nt, Artificial Sequence
  Description of Artificial Sequence: Synthetic oligonucleotide
  Sense strand starting at position 2714 of SEQ ID NO: 1884828
ccuccauuaguuuguuaag

SEQ ID NO: 2295123 - RNA, 19 nt, Artificial Sequence
  Description of Artificial Sequence: Synthetic oligonucleotide
  Antisense strand to SEQ ID NO: 2295122
cuuaacaaacuaauggagg

SEQ ID NO: 2295124 - RNA, 19 nt, Artificial Sequence
  Description of Artificial Sequence: Synthetic oligonucleotide
  Sense strand starting at position 2809 of SEQ ID NO: 1884828
uuuguauauguguaucaca

SEQ ID NO: 2295125 - RNA, 19 nt, Artificial Sequence
  Description of Artificial Sequence: Synthetic oligonucleotide
  Antisense strand to SEQ ID NO: 2295124
ugugauacacauauacaaa

SEQ ID NO: 2295126 - RNA, 19 nt, Artificial Sequence
  Description of Artificial Sequence: Synthetic oligonucleotide
  Sense strand starting at position 2892 of SEQ ID NO: 1884828
cagugcugccaugaacaga

SEQ ID NO: 2295127 - RNA, 19 nt, Artificial Sequence
  Description of Artificial Sequence: Synthetic oligonucleotide
  Antisense strand to SEQ ID NO: 2295126
ucuguucauggcagcacug

SEQ ID NO: 2295128 - RNA, 19 nt, Artificial Sequence
  Description of Artificial Sequence: Synthetic oligonucleotide
  Sense strand starting at position 2920 of SEQ ID NO: 1884828
gugucuuuaugauagauuu

SEQ ID NO: 2295129 - RNA, 19 nt, Artificial Sequence
  Description of Artificial Sequence: Synthetic oligonucleotide
  Antisense strand to SEQ ID NO: 2295128
aaaucuaucauaaagacac

SEQ ID NO: 2295130 - RNA, 19 nt, Artificial Sequence
  Description of Artificial Sequence: Synthetic oligonucleotide
  Sense strand starting at position 3050 of SEQ ID NO: 1884828
ccaucaaagguguauaagu

SEQ ID NO: 2295131 - RNA, 19 nt, Artificial Sequence
  Description of Artificial Sequence: Synthetic oligonucleotide
  Antisense strand to SEQ ID NO: 2295130
acuuauacaccuuugaugg

SEQ ID NO: 2295132 - RNA, 19 nt, Artificial Sequence
  Description of Artificial Sequence: Synthetic oligonucleotide
  Sense strand starting at position 3124 of SEQ ID NO: 1884828
uagccauucgacugguaug

SEQ ID NO: 2295133 - RNA, 19 nt, Artificial Sequence
  Description of Artificial Sequence: Synthetic oligonucleotide
  Antisense strand to SEQ ID NO: 2295132
cauaccagucgaauggcua

SEQ ID NO: 2295134 - RNA, 19 nt, Artificial Sequence
  Description of Artificial Sequence: Synthetic oligonucleotide
  Sense strand starting at position 3125 of SEQ ID NO: 1884828
agccauucgacugguauga

SEQ ID NO: 2295135 - RNA, 19 nt, Artificial Sequence
  Description of Artificial Sequence: Synthetic oligonucleotide
  Antisense strand to SEQ ID NO: 2295134
ucauaccagucgaauggcu

SEQ ID NO: 2295136 - RNA, 19 nt, Artificial Sequence
  Description of Artificial Sequence: Synthetic oligonucleotide
  Sense strand starting at position 3129 of SEQ ID NO: 1884828
auucgacugguaugagaug

SEQ ID NO: 2295137 - RNA, 19 nt, Artificial Sequence
  Description of Artificial Sequence: Synthetic oligonucleotide
  Antisense strand to SEQ ID NO: 2295136
caucucauaccagucgaau

SEQ ID NO: 2295138 - RNA, 19 nt, Artificial Sequence
  Description of Artificial Sequence: Synthetic oligonucleotide
  Sense strand starting at position 3182 of SEQ ID NO: 1884828
augauuagugccuacugga

SEQ ID NO: 2295139 - RNA, 19 nt, Artificial Sequence
  Description of Artificial Sequence: Synthetic oligonucleotide
  Antisense strand to SEQ ID NO: 2295138
uccaguaggcacuaaucau

SEQ ID NO: 2295140 - RNA, 19 nt, Artificial Sequence
  Description of Artificial Sequence: Synthetic oligonucleotide
  Sense strand starting at position 3254 of SEQ ID NO: 1884828
ggguuaauaccugggugaa

SEQ ID NO: 2295141 - RNA, 19 nt, Artificial Sequence
  Description of Artificial Sequence: Synthetic oligonucleotide
  Antisense strand to SEQ ID NO: 2295140
uucacccagguauuaaccc

SEQ ID NO: 2295142 - RNA, 19 nt, Artificial Sequence
  Description of Artificial Sequence: Synthetic oligonucleotide
  Sense strand starting at position 3255 of SEQ ID NO: 1884828
gguuaauaccugggugaag

SEQ ID NO: 2295143 - RNA, 19 nt, Artificial Sequence
  Description of Artificial Sequence: Synthetic oligonucleotide
  Antisense strand to SEQ ID NO: 2295142
cuucacccagguauuaacc

SEQ ID NO: 2295144 - RNA, 19 nt, Artificial Sequence
  Description of Artificial Sequence: Synthetic oligonucleotide
  Sense strand starting at position 3256 of SEQ ID NO: 1884828
guuaauaccugggugaaga

SEQ ID NO: 2295145 - RNA, 19 nt, Artificial Sequence
  Description of Artificial Sequence: Synthetic oligonucleotide
  Antisense strand to SEQ ID NO: 2295144
ucuucacccagguauuaac

SEQ ID NO: 2295146 - RNA, 19 nt, Artificial Sequence
  Description of Artificial Sequence: Synthetic oligonucleotide
  Sense strand starting at position 3887 of SEQ ID NO: 1884828
cuguguccaggaugguaau

SEQ ID NO: 2295147 - RNA, 19 nt, Artificial Sequence
  Description of Artificial Sequence: Synthetic oligonucleotide
  Antisense strand to SEQ ID NO: 2295146
auuaccauccuggacacag

SEQ ID NO: 2295148 - RNA, 19 nt, Artificial Sequence
  Description of Artificial Sequence: Synthetic oligonucleotide
  Sense strand starting at position 3900 of SEQ ID NO: 1884828
gguaauuccuagguuaucu

SEQ ID NO: 2295149 - RNA, 19 nt, Artificial Sequence
  Description of Artificial Sequence: Synthetic oligonucleotide
  Antisense strand to SEQ ID NO: 2295148
agauaaccuaggaauuacc

SEQ ID NO: 2295150 - RNA, 19 nt, Artificial Sequence
  Description of Artificial Sequence: Synthetic oligonucleotide
  Sense strand starting at position 3970 of SEQ ID NO: 1884828
ugaguugagcuuuguauau

SEQ ID NO: 2295151 - RNA, 19 nt, Artificial Sequence
  Description of Artificial Sequence: Synthetic oligonucleotide
  Antisense strand to SEQ ID NO: 2295150
auauacaaagcucaacuca

SEQ ID NO: 2295152 - RNA, 19 nt, Artificial Sequence
  Description of Artificial Sequence: Synthetic oligonucleotide
  Sense strand starting at position 3974 of SEQ ID NO: 1884828
uugagcuuuguauauggua

SEQ ID NO: 2295153 - RNA, 19 nt, Artificial Sequence
  Description of Artificial Sequence: Synthetic oligonucleotide
  Antisense strand to SEQ ID NO: 2295152
uaccauauacaaagcucaa

SEQ ID NO: 2295154 - RNA, 19 nt, Artificial Sequence
  Description of Artificial Sequence: Synthetic oligonucleotide
  Sense strand starting at position 143 of SEQ ID NO: 1884829
uggccaaaccuaugucuuu

SEQ ID NO: 2295155 - RNA, 19 nt, Artificial Sequence
  Description of Artificial Sequence: Synthetic oligonucleotide
  Antisense strand to SEQ ID NO: 2295154
aaagacauagguuuggcca

SEQ ID NO: 2295156 - RNA, 19 nt, Artificial Sequence
  Description of Artificial Sequence: Synthetic oligonucleotide
  Sense strand starting at position 188 of SEQ ID NO: 1884829
ugaccucccuguuuaguga

SEQ ID NO: 2295157 - RNA, 19 nt, Artificial Sequence
  Description of Artificial Sequence: Synthetic oligonucleotide
  Antisense strand to SEQ ID NO: 2295156
ucacuaaacagggagguca

SEQ ID NO: 2295158 - RNA, 19 nt, Artificial Sequence
  Description of Artificial Sequence: Synthetic oligonucleotide
  Sense strand starting at position 191 of SEQ ID NO: 1884829
ccucccuguuuagugagaa

SEQ ID NO: 2295159 - RNA, 19 nt, Artificial Sequence
  Description of Artificial Sequence: Synthetic oligonucleotide
  Antisense strand to SEQ ID NO: 2295158
uucucacuaaacagggagg

SEQ ID NO: 2295160 - RNA, 19 nt, Artificial Sequence
  Description of Artificial Sequence: Synthetic oligonucleotide
  Sense strand starting at position 199 of SEQ ID NO: 1884829
uuuagugagaaccgaguua

SEQ ID NO: 2295161 - RNA, 19 nt, Artificial Sequence
  Description of Artificial Sequence: Synthetic oligonucleotide
  Antisense strand to SEQ ID NO: 2295160
uaacucgguucucacuaaa

SEQ ID NO: 2295162 - RNA, 19 nt, Artificial Sequence
  Description of Artificial Sequence: Synthetic oligonucleotide
  Sense strand starting at position 204 of SEQ ID NO: 1884829
ugagaaccgaguuauucuu

SEQ ID NO: 2295163 - RNA, 19 nt, Artificial Sequence
  Description of Artificial Sequence: Synthetic oligonucleotide
  Antisense strand to SEQ ID NO: 2295162
aagaauaacucgguucuca

SEQ ID NO: 2295164 - RNA, 19 nt, Artificial Sequence
  Description of Artificial Sequence: Synthetic oligonucleotide
  Sense strand starting at position 227 of SEQ ID NO: 1884829
uugacuugucacuggccaa

SEQ ID NO: 2295165 - RNA, 19 nt, Artificial Sequence
  Description of Artificial Sequence: Synthetic oligonucleotide
  Antisense strand to SEQ ID NO: 2295164
uuggccagugacaagucaa

SEQ ID NO: 2295166 - RNA, 19 nt, Artificial Sequence
  Description of Artificial Sequence: Synthetic oligonucleotide
  Sense strand starting at position 230 of SEQ ID NO: 1884829
acuugucacuggccaaaga

SEQ ID NO: 2295167 - RNA, 19 nt, Artificial Sequence
  Description of Artificial Sequence: Synthetic oligonucleotide
  Antisense strand to SEQ ID NO: 2295166
ucuuuggccagugacaagu

SEQ ID NO: 2295168 - RNA, 19 nt, Artificial Sequence
  Description of Artificial Sequence: Synthetic oligonucleotide
  Sense strand starting at position 291 of SEQ ID NO: 1884829
acuuucugaggcugagaga

SEQ ID NO: 2295169 - RNA, 19 nt, Artificial Sequence
  Description of Artificial Sequence: Synthetic oligonucleotide
  Antisense strand to SEQ ID NO: 2295168
ucucucagccucagaaagu

SEQ ID NO: 2295170 - RNA, 19 nt, Artificial Sequence
  Description of Artificial Sequence: Synthetic oligonucleotide
  Sense strand starting at position 322 of SEQ ID NO: 1884829
cccucagauugggcucaaa

SEQ ID NO: 2295171 - RNA, 19 nt, Artificial Sequence
  Description of Artificial Sequence: Synthetic oligonucleotide
  Antisense strand to SEQ ID NO: 2295170
uuugagcccaaucugaggg

SEQ ID NO: 2295172 - RNA, 19 nt, Artificial Sequence
  Description of Artificial Sequence: Synthetic oligonucleotide
  Sense strand starting at position 386 of SEQ ID NO: 1884829
gauguagacuucuuaggaa

SEQ ID NO: 2295173 - RNA, 19 nt, Artificial Sequence
  Description of Artificial Sequence: Synthetic oligonucleotide
  Antisense strand to SEQ ID NO: 2295172
uuccuaagaagucuacauc

SEQ ID NO: 2295174 - RNA, 19 nt, Artificial Sequence
  Description of Artificial Sequence: Synthetic oligonucleotide
  Sense strand starting at position 466 of SEQ ID NO: 1884829
gguuaauguacuggccaaa

SEQ ID NO: 2295175 - RNA, 19 nt, Artificial Sequence
  Description of Artificial Sequence: Synthetic oligonucleotide
  Antisense strand to SEQ ID NO: 2295174
uuuggccaguacauuaacc

SEQ ID NO: 2295176 - RNA, 19 nt, Artificial Sequence
  Description of Artificial Sequence: Synthetic oligonucleotide
  Sense strand starting at position 521 of SEQ ID NO: 1884829
caaggagugugguuccaga

SEQ ID NO: 2295177 - RNA, 19 nt, Artificial Sequence
  Description of Artificial Sequence: Synthetic oligonucleotide
  Antisense strand to SEQ ID NO: 2295176
ucuggaaccacacuccuug

SEQ ID NO: 2295178 - RNA, 19 nt, Artificial Sequence
  Description of Artificial Sequence: Synthetic oligonucleotide
  Sense strand starting at position 532 of SEQ ID NO: 1884829
guuccagagucuguagaca

SEQ ID NO: 2295179 - RNA, 19 nt, Artificial Sequence
  Description of Artificial Sequence: Synthetic oligonucleotide
  Antisense strand to SEQ ID NO: 2295178
ugucuacagacucuggaac

SEQ ID NO: 2295180 - RNA, 19 nt, Artificial Sequence
  Description of Artificial Sequence: Synthetic oligonucleotide
  Sense strand starting at position 1016 of SEQ ID NO: 1884829
auaguugucccuuaggcaa

SEQ ID NO: 2295181 - RNA, 19 nt, Artificial Sequence
  Description of Artificial Sequence: Synthetic oligonucleotide
  Antisense strand to SEQ ID NO: 2295180
uugccuaagggacaacuau

SEQ ID NO: 2295182 - RNA, 19 nt, Artificial Sequence
  Description of Artificial Sequence: Synthetic oligonucleotide
  Sense strand starting at position 1063 of SEQ ID NO: 1884829
cguaauuugacuuggccuu

SEQ ID NO: 2295183 - RNA, 19 nt, Artificial Sequence
  Description of Artificial Sequence: Synthetic oligonucleotide
  Antisense strand to SEQ ID NO: 2295182
aaggccaagucaaauuacg

SEQ ID NO: 2295184 - RNA, 19 nt, Artificial Sequence
  Description of Artificial Sequence: Synthetic oligonucleotide
  Sense strand starting at position 1259 of SEQ ID NO: 1884829
gugcuuugaggagagcaga

SEQ ID NO: 2295185 - RNA, 19 nt, Artificial Sequence
  Description of Artificial Sequence: Synthetic oligonucleotide
  Antisense strand to SEQ ID NO: 2295184
ucugcucuccucaaagcac

SEQ ID NO: 2295186 - RNA, 19 nt, Artificial Sequence
  Description of Artificial Sequence: Synthetic oligonucleotide
  Sense strand starting at position 2159 of SEQ ID NO: 1884829
caggcaguuguugagguua

SEQ ID NO: 2295187 - RNA, 19 nt, Artificial Sequence
  Description of Artificial Sequence: Synthetic oligonucleotide
  Antisense strand to SEQ ID NO: 2295186
uaaccucaacaacugccug

SEQ ID NO: 2295188 - RNA, 19 nt, Artificial Sequence
  Description of Artificial Sequence: Synthetic oligonucleotide
  Sense strand starting at position 2164 of SEQ ID NO: 1884829
aguuguugagguuaugcau

SEQ ID NO: 2295189 - RNA, 19 nt, Artificial Sequence
  Description of Artificial Sequence: Synthetic oligonucleotide
  Antisense strand to SEQ ID NO: 2295188
augcauaaccucaacaacu

SEQ ID NO: 2295190 - RNA, 19 nt, Artificial Sequence
  Description of Artificial Sequence: Synthetic oligonucleotide
  Sense strand starting at position 2372 of SEQ ID NO: 1884829
cagccauuaggauaguuau

SEQ ID NO: 2295191 - RNA, 19 nt, Artificial Sequence
  Description of Artificial Sequence: Synthetic oligonucleotide
  Antisense strand to SEQ ID NO: 2295190
auaacuauccuaauggcug

SEQ ID NO: 2295192 - RNA, 19 nt, Artificial Sequence
  Description of Artificial Sequence: Synthetic oligonucleotide
  Sense strand starting at position 2400 of SEQ ID NO: 1884829
cuggcucugucacuacaaa

SEQ ID NO: 2295193 - RNA, 19 nt, Artificial Sequence
  Description of Artificial Sequence: Synthetic oligonucleotide
  Antisense strand to SEQ ID NO: 2295192
uuuguagugacagagccag

SEQ ID NO: 2295194 - RNA, 19 nt, Artificial Sequence
  Description of Artificial Sequence: Synthetic oligonucleotide
  Sense strand starting at position 2440 of SEQ ID NO: 1884829
ucccgaaucagauggucuu

SEQ ID NO: 2295195 - RNA, 19 nt, Artificial Sequence
  Description of Artificial Sequence: Synthetic oligonucleotide
  Antisense strand to SEQ ID NO: 2295194
aagaccaucugauucggga

SEQ ID NO: 2295196 - RNA, 19 nt, Artificial Sequence
  Description of Artificial Sequence: Synthetic oligonucleotide
  Sense strand starting at position 2441 of SEQ ID NO: 1884829
cccgaaucagauggucuua

SEQ ID NO: 2295197 - RNA, 19 nt, Artificial Sequence
  Description of Artificial Sequence: Synthetic oligonucleotide
  Antisense strand to SEQ ID NO: 2295196
uaagaccaucugauucggg

SEQ ID NO: 2295198 - RNA, 19 nt, Artificial Sequence
  Description of Artificial Sequence: Synthetic oligonucleotide
  Sense strand starting at position 2443 of SEQ ID NO: 1884829
cgaaucagauggucuuaag

SEQ ID NO: 2295199 - RNA, 19 nt, Artificial Sequence
  Description of Artificial Sequence: Synthetic oligonucleotide
  Antisense strand to SEQ ID NO: 2295198
cuuaagaccaucugauucg

SEQ ID NO: 2295200 - RNA, 19 nt, Artificial Sequence
  Description of Artificial Sequence: Synthetic oligonucleotide
  Sense strand starting at position 2454 of SEQ ID NO: 1884829
gucuuaagacaguguauca

SEQ ID NO: 2295201 - RNA, 19 nt, Artificial Sequence
  Description of Artificial Sequence: Synthetic oligonucleotide
  Antisense strand to SEQ ID NO: 2295200
ugauacacugucuuaagac

SEQ ID NO: 2295202 - RNA, 19 nt, Artificial Sequence
  Description of Artificial Sequence: Synthetic oligonucleotide
  Sense strand starting at position 2480 of SEQ ID NO: 1884829
ugacuuugaugggcacaga

SEQ ID NO: 2295203 - RNA, 19 nt, Artificial Sequence
  Description of Artificial Sequence: Synthetic oligonucleotide
  Antisense strand to SEQ ID NO: 2295202
ucugugcccaucaaaguca

SEQ ID NO: 2295204 - RNA, 19 nt, Artificial Sequence
  Description of Artificial Sequence: Synthetic oligonucleotide
  Sense strand starting at position 2573 of SEQ ID NO: 1884829
ccuuaacaugcuugucaga

SEQ ID NO: 2295205 - RNA, 19 nt, Artificial Sequence
  Description of Artificial Sequence: Synthetic oligonucleotide
  Antisense strand to SEQ ID NO: 2295204
ucugacaagcauguuaagg

SEQ ID NO: 2295206 - RNA, 19 nt, Artificial Sequence
  Description of Artificial Sequence: Synthetic oligonucleotide
  Sense strand starting at position 2580 of SEQ ID NO: 1884829
augcuugucagaggaaagu

SEQ ID NO: 2295207 - RNA, 19 nt, Artificial Sequence
  Description of Artificial Sequence: Synthetic oligonucleotide
  Antisense strand to SEQ ID NO: 2295206
acuuuccucugacaagcau

SEQ ID NO: 2295208 - RNA, 19 nt, Artificial Sequence
  Description of Artificial Sequence: Synthetic oligonucleotide
  Sense strand starting at position 2832 of SEQ ID NO: 1884829
gugucagucagugaucuca

SEQ ID NO: 2295209 - RNA, 19 nt, Artificial Sequence
  Description of Artificial Sequence: Synthetic oligonucleotide
  Antisense strand to SEQ ID NO: 2295208
ugagaucacugacugacac

SEQ ID NO: 2295210 - RNA, 19 nt, Artificial Sequence
  Description of Artificial Sequence: Synthetic oligonucleotide
  Sense strand starting at position 2834 of SEQ ID NO: 1884829
gucagucagugaucucaga

SEQ ID NO: 2295211 - RNA, 19 nt, Artificial Sequence
  Description of Artificial Sequence: Synthetic oligonucleotide
  Antisense strand to SEQ ID NO: 2295210
ucugagaucacugacugac

SEQ ID NO: 2295212 - RNA, 19 nt, Artificial Sequence
  Description of Artificial Sequence: Synthetic oligonucleotide
  Sense strand starting at position 2857 of SEQ ID NO: 1884829
gcagaucuauuucucgcau

SEQ ID NO: 2295213 - RNA, 19 nt, Artificial Sequence
  Description of Artificial Sequence: Synthetic oligonucleotide
  Antisense strand to SEQ ID NO: 2295212
augcgagaaauagaucugc

SEQ ID NO: 2295214 - RNA, 19 nt, Artificial Sequence
  Description of Artificial Sequence: Synthetic oligonucleotide
  Sense strand starting at position 3049 of SEQ ID NO: 1884829
gacugaucuucuguuccag

SEQ ID NO: 2295215 - RNA, 19 nt, Artificial Sequence
  Description of Artificial Sequence: Synthetic oligonucleotide
  Antisense strand to SEQ ID NO: 2295214
cuggaacagaagaucaguc

SEQ ID NO: 2295216 - RNA, 19 nt, Artificial Sequence
  Description of Artificial Sequence: Synthetic oligonucleotide
  Sense strand starting at position 3057 of SEQ ID NO: 1884829
uucuguuccagccagggaa

SEQ ID NO: 2295217 - RNA, 19 nt, Artificial Sequence
  Description of Artificial Sequence: Synthetic oligonucleotide
  Antisense strand to SEQ ID NO: 2295216
uucccuggcuggaacagaa

SEQ ID NO: 2295218 - RNA, 19 nt, Artificial Sequence
  Description of Artificial Sequence: Synthetic oligonucleotide
  Sense strand starting at position 3092 of SEQ ID NO: 1884829
agaggcuugcuccaggauu

SEQ ID NO: 2295219 - RNA, 19 nt, Artificial Sequence
  Description of Artificial Sequence: Synthetic oligonucleotide
  Antisense strand to SEQ ID NO: 2295218
aauccuggagcaagccucu

SEQ ID NO: 2295220 - RNA, 19 nt, Artificial Sequence
  Description of Artificial Sequence: Synthetic oligonucleotide
  Sense strand starting at position 3267 of SEQ ID NO: 1884829
cuuguucucuucccagaca

SEQ ID NO: 2295221 - RNA, 19 nt, Artificial Sequence
  Description of Artificial Sequence: Synthetic oligonucleotide
  Antisense strand to SEQ ID NO: 2295220
ugucugggaagagaacaag

SEQ ID NO: 2295222 - RNA, 19 nt, Artificial Sequence
  Description of Artificial Sequence: Synthetic oligonucleotide
  Sense strand starting at position 3300 of SEQ ID NO: 1884829
uuggcugucugaguaaaca

SEQ ID NO: 2295223 - RNA, 19 nt, Artificial Sequence
  Description of Artificial Sequence: Synthetic oligonucleotide
  Antisense strand to SEQ ID NO: 2295222
uguuuacucagacagccaa

SEQ ID NO: 2295224 - RNA, 19 nt, Artificial Sequence
  Description of Artificial Sequence: Synthetic oligonucleotide
  Sense strand starting at position 3332 of SEQ ID NO: 1884829
uugggauucuaccuaauag

SEQ ID NO: 2295225 - RNA, 19 nt, Artificial Sequence
  Description of Artificial Sequence: Synthetic oligonucleotide
  Antisense strand to SEQ ID NO: 2295224
cuauuagguagaaucccaa

SEQ ID NO: 2295226 - RNA, 19 nt, Artificial Sequence
  Description of Artificial Sequence: Synthetic oligonucleotide
  Sense strand starting at position 3377 of SEQ ID NO: 1884829
gguaucaaguuucuucuuu

SEQ ID NO: 2295227 - RNA, 19 nt, Artificial Sequence
  Description of Artificial Sequence: Synthetic oligonucleotide
  Antisense strand to SEQ ID NO: 2295226
aaagaagaaacuugauacc

SEQ ID NO: 2295228 - RNA, 19 nt, Artificial Sequence
  Description of Artificial Sequence: Synthetic oligonucleotide
  Sense strand starting at position 3893 of SEQ ID NO: 1884829
auauacauguggguaugaa

SEQ ID NO: 2295229 - RNA, 19 nt, Artificial Sequence
  Description of Artificial Sequence: Synthetic oligonucleotide
  Antisense strand to SEQ ID NO: 2295228
uucauacccacauguauau

SEQ ID NO: 2295230 - RNA, 19 nt, Artificial Sequence
  Description of Artificial Sequence: Synthetic oligonucleotide
  Sense strand starting at position 3926 of SEQ ID NO: 1884829
ggagccauacuguaccuaa

SEQ ID NO: 2295231 - RNA, 19 nt, Artificial Sequence
  Description of Artificial Sequence: Synthetic oligonucleotide
  Antisense strand to SEQ ID NO: 2295230
uuagguacaguauggcucc

SEQ ID NO: 2295232 - RNA, 19 nt, Artificial Sequence
  Description of Artificial Sequence: Synthetic oligonucleotide
  Sense strand starting at position 3936 of SEQ ID NO: 1884829
uguaccuaaugguuuauaa

SEQ ID NO: 2295233 - RNA, 19 nt, Artificial Sequence
  Description of Artificial Sequence: Synthetic oligonucleotide
  Antisense strand to SEQ ID NO: 2295232
uuauaaaccauuagguaca

SEQ ID NO: 2295234 - RNA, 19 nt, Artificial Sequence
  Description of Artificial Sequence: Synthetic oligonucleotide
  Sense strand starting at position 69 of SEQ ID NO: 1884830
ggcaaagacucagagacaa

SEQ ID NO: 2295235 - RNA, 19 nt, Artificial Sequence
  Description of Artificial Sequence: Synthetic oligonucleotide
  Antisense strand to SEQ ID NO: 2295234
uugucucugagucuuugcc

SEQ ID NO: 2295236 - RNA, 19 nt, Artificial Sequence
  Description of Artificial Sequence: Synthetic oligonucleotide
  Sense strand starting at position 138 of SEQ ID NO: 1884830
gggagucagauagguguua

SEQ ID NO: 2295237 - RNA, 19 nt, Artificial Sequence
  Description of Artificial Sequence: Synthetic oligonucleotide
  Antisense strand to SEQ ID NO: 2295236
uaacaccuaucugacuccc

SEQ ID NO: 2295238 - RNA, 19 nt, Artificial Sequence
  Description of Artificial Sequence: Synthetic oligonucleotide
  Sense strand starting at position 249 of SEQ ID NO: 1884830
auuggaguaguguguuaua

SEQ ID NO: 2295239 - RNA, 19 nt, Artificial Sequence
  Description of Artificial Sequence: Synthetic oligonucleotide
  Antisense strand to SEQ ID NO: 2295238
uauaacacacuacuccaau

SEQ ID NO: 2295240 - RNA, 19 nt, Artificial Sequence
  Description of Artificial Sequence: Synthetic oligonucleotide
  Sense strand starting at position 260 of SEQ ID NO: 1884830
guguuauaaaguugccaua

SEQ ID NO: 2295241 - RNA, 19 nt, Artificial Sequence
  Description of Artificial Sequence: Synthetic oligonucleotide
  Antisense strand to SEQ ID NO: 2295240
uauggcaacuuuauaacac

SEQ ID NO: 2295242 - RNA, 19 nt, Artificial Sequence
  Description of Artificial Sequence: Synthetic oligonucleotide
  Sense strand starting at position 262 of SEQ ID NO: 1884830
guuauaaaguugccauaug

SEQ ID NO: 2295243 - RNA, 19 nt, Artificial Sequence
  Description of Artificial Sequence: Synthetic oligonucleotide
  Antisense strand to SEQ ID NO: 2295242
cauauggcaacuuuauaac

SEQ ID NO: 2295244 - RNA, 19 nt, Artificial Sequence
  Description of Artificial Sequence: Synthetic oligonucleotide
  Sense strand starting at position 329 of SEQ ID NO: 1884830
ugagaucagcugugcuuaa

SEQ ID NO: 2295245 - RNA, 19 nt, Artificial Sequence
  Description of Artificial Sequence: Synthetic oligonucleotide
  Antisense strand to SEQ ID NO: 2295244
uuaagcacagcugaucuca

SEQ ID NO: 2295246 - RNA, 19 nt, Artificial Sequence
  Description of Artificial Sequence: Synthetic oligonucleotide
  Sense strand starting at position 794 of SEQ ID NO: 1884830
ccaucugaaguuuggaaca

SEQ ID NO: 2295247 - RNA, 19 nt, Artificial Sequence
  Description of Artificial Sequence: Synthetic oligonucleotide
  Antisense strand to SEQ ID NO: 2295246
uguuccaaacuucagaugg

SEQ ID NO: 2295248 - RNA, 19 nt, Artificial Sequence
  Description of Artificial Sequence: Synthetic oligonucleotide
  Sense strand starting at position 936 of SEQ ID NO: 1884830
ggcucaaccauugagagca

SEQ ID NO: 2295249 - RNA, 19 nt, Artificial Sequence
  Description of Artificial Sequence: Synthetic oligonucleotide
  Antisense strand to SEQ ID NO: 2295248
ugcucucaaugguugagcc

SEQ ID NO: 2295250 - RNA, 19 nt, Artificial Sequence
  Description of Artificial Sequence: Synthetic oligonucleotide
  Sense strand starting at position 1148 of SEQ ID NO: 1884830
gcgcgaguaccaagagcuu

SEQ ID NO: 2295251 - RNA, 19 nt, Artificial Sequence
  Description of Artificial Sequence: Synthetic oligonucleotide
  Antisense strand to SEQ ID NO: 2295250
aagcucuugguacucgcgc

SEQ ID NO: 2295252 - RNA, 19 nt, Artificial Sequence
  Description of Artificial Sequence: Synthetic oligonucleotide
  Sense strand starting at position 1174 of SEQ ID NO: 1884830
ugaagcugucccuggauau

SEQ ID NO: 2295253 - RNA, 19 nt, Artificial Sequence
  Description of Artificial Sequence: Synthetic oligonucleotide
  Antisense strand to SEQ ID NO: 2295252
auauccagggacagcuuca

SEQ ID NO: 2295254 - RNA, 19 nt, Artificial Sequence
  Description of Artificial Sequence: Synthetic oligonucleotide
  Sense strand starting at position 1175 of SEQ ID NO: 1884830
gaagcugucccuggauauu

SEQ ID NO: 2295255 - RNA, 19 nt, Artificial Sequence
  Description of Artificial Sequence: Synthetic oligonucleotide
  Antisense strand to SEQ ID NO: 2295254
aauauccagggacagcuuc

SEQ ID NO: 2295256 - RNA, 19 nt, Artificial Sequence
  Description of Artificial Sequence: Synthetic oligonucleotide
  Sense strand starting at position 1279 of SEQ ID NO: 1884830
ccuuaaaguuucccagagu

SEQ ID NO: 2295257 - RNA, 19 nt, Artificial Sequence
  Description of Artificial Sequence: Synthetic oligonucleotide
  Antisense strand to SEQ ID NO: 2295256
acucugggaaacuuuaagg

SEQ ID NO: 2295258 - RNA, 19 nt, Artificial Sequence
  Description of Artificial Sequence: Synthetic oligonucleotide
  Sense strand starting at position 1282 of SEQ ID NO: 1884830
uaaaguuucccagagugug

SEQ ID NO: 2295259 - RNA, 19 nt, Artificial Sequence
  Description of Artificial Sequence: Synthetic oligonucleotide
  Antisense strand to SEQ ID NO: 2295258
cacacucugggaaacuuua

SEQ ID NO: 2295260 - RNA, 19 nt, Artificial Sequence
  Description of Artificial Sequence: Synthetic oligonucleotide
  Sense strand starting at position 1326 of SEQ ID NO: 1884830
cgagcuggcgauguguuua

SEQ ID NO: 2295261 - RNA, 19 nt, Artificial Sequence
  Description of Artificial Sequence: Synthetic oligonucleotide
  Antisense strand to SEQ ID NO: 2295260
uaaacacaucgccagcucg

SEQ ID NO: 2295262 - RNA, 19 nt, Artificial Sequence
  Description of Artificial Sequence: Synthetic oligonucleotide
  Sense strand starting at position 1331 of SEQ ID NO: 1884830
uggcgauguguuuacuuca

SEQ ID NO: 2295263 - RNA, 19 nt, Artificial Sequence
  Description of Artificial Sequence: Synthetic oligonucleotide
  Antisense strand to SEQ ID NO: 2295262
ugaaguaaacacaucgcca

SEQ ID NO: 2295264 - RNA, 19 nt, Artificial Sequence
  Description of Artificial Sequence: Synthetic oligonucleotide
  Sense strand starting at position 1429 of SEQ ID NO: 1884830
gagaaagucuuagcugggu

SEQ ID NO: 2295265 - RNA, 19 nt, Artificial Sequence
  Description of Artificial Sequence: Synthetic oligonucleotide
  Antisense strand to SEQ ID NO: 2295264
acccagcuaagacuuucuc

SEQ ID NO: 2295266 - RNA, 19 nt, Artificial Sequence
  Description of Artificial Sequence: Synthetic oligonucleotide
  Sense strand starting at position 1445 of SEQ ID NO: 1884830
ggugcuguugugucuuuaa

SEQ ID NO: 2295267 - RNA, 19 nt, Artificial Sequence
  Description of Artificial Sequence: Synthetic oligonucleotide
  Antisense strand to SEQ ID NO: 2295266
uuaaagacacaacagcacc

SEQ ID NO: 2295268 - RNA, 19 nt, Artificial Sequence
  Description of Artificial Sequence: Synthetic oligonucleotide
  Sense strand starting at position 2239 of SEQ ID NO: 1884830
cugaucuuuccacauaugu

SEQ ID NO: 2295269 - RNA, 19 nt, Artificial Sequence
  Description of Artificial Sequence: Synthetic oligonucleotide
  Antisense strand to SEQ ID NO: 2295268
acauauguggaaagaucag

SEQ ID NO: 2295270 - RNA, 19 nt, Artificial Sequence
  Description of Artificial Sequence: Synthetic oligonucleotide
  Sense strand starting at position 2270 of SEQ ID NO: 1884830
agcugcucacaguaguaaa

SEQ ID NO: 2295271 - RNA, 19 nt, Artificial Sequence
  Description of Artificial Sequence: Synthetic oligonucleotide
  Antisense strand to SEQ ID NO: 2295270
uuuacuacugugagcagcu

SEQ ID NO: 2295272 - RNA, 19 nt, Artificial Sequence
  Description of Artificial Sequence: Synthetic oligonucleotide
  Sense strand starting at position 2567 of SEQ ID NO: 1884830
gcaggauguccggagaaua

SEQ ID NO: 2295273 - RNA, 19 nt, Artificial Sequence
  Description of Artificial Sequence: Synthetic oligonucleotide
  Antisense strand to SEQ ID NO: 2295272
uauucuccggacauccugc

SEQ ID NO: 2295274 - RNA, 19 nt, Artificial Sequence
  Description of Artificial Sequence: Synthetic oligonucleotide
  Sense strand starting at position 2585 of SEQ ID NO: 1884830
auaccaacuccgugagcau

SEQ ID NO: 2295275 - RNA, 19 nt, Artificial Sequence
  Description of Artificial Sequence: Synthetic oligonucleotide
  Antisense strand to SEQ ID NO: 2295274
augcucacggaguugguau

SEQ ID NO: 2295276 - RNA, 19 nt, Artificial Sequence
  Description of Artificial Sequence: Synthetic oligonucleotide
  Sense strand starting at position 2586 of SEQ ID NO: 1884830
uaccaacuccgugagcauu

SEQ ID NO: 2295277 - RNA, 19 nt, Artificial Sequence
  Description of Artificial Sequence: Synthetic oligonucleotide
  Antisense strand to SEQ ID NO: 2295276
aaugcucacggaguuggua

SEQ ID NO: 2295278 - RNA, 19 nt, Artificial Sequence
  Description of Artificial Sequence: Synthetic oligonucleotide
  Sense strand starting at position 2594 of SEQ ID NO: 1884830
ccgugagcauuugugagua

SEQ ID NO: 2295279 - RNA, 19 nt, Artificial Sequence
  Description of Artificial Sequence: Synthetic oligonucleotide
  Antisense strand to SEQ ID NO: 2295278
uacucacaaaugcucacgg

SEQ ID NO: 2295280 - RNA, 19 nt, Artificial Sequence
  Description of Artificial Sequence: Synthetic oligonucleotide
  Sense strand starting at position 2711 of SEQ ID NO: 1884830
uugaccacuuggucacaua

SEQ ID NO: 2295281 - RNA, 19 nt, Artificial Sequence
  Description of Artificial Sequence: Synthetic oligonucleotide
  Antisense strand to SEQ ID NO: 2295280
uaugugaccaaguggucaa

SEQ ID NO: 2295282 - RNA, 19 nt, Artificial Sequence
  Description of Artificial Sequence: Synthetic oligonucleotide
  Sense strand starting at position 2897 of SEQ ID NO: 1884830
ggcucuccugcaugaagga

SEQ ID NO: 2295283 - RNA, 19 nt, Artificial Sequence
  Description of Artificial Sequence: Synthetic oligonucleotide
  Antisense strand to SEQ ID NO: 2295282
uccuucaugcaggagagcc

SEQ ID NO: 2295284 - RNA, 19 nt, Artificial Sequence
  Description of Artificial Sequence: Synthetic oligonucleotide
  Sense strand starting at position 3008 of SEQ ID NO: 1884830
ggcagucucuuucuuauag

SEQ ID NO: 2295285 - RNA, 19 nt, Artificial Sequence
  Description of Artificial Sequence: Synthetic oligonucleotide
  Antisense strand to SEQ ID NO: 2295284
cuauaagaaagagacugcc

SEQ ID NO: 2295286 - RNA, 19 nt, Artificial Sequence
  Description of Artificial Sequence: Synthetic oligonucleotide
  Sense strand starting at position 3123 of SEQ ID NO: 1884830
uuaucugaugcucaagcau

SEQ ID NO: 2295287 - RNA, 19 nt, Artificial Sequence
  Description of Artificial Sequence: Synthetic oligonucleotide
  Antisense strand to SEQ ID NO: 2295286
augcuugagcaucagauaa

SEQ ID NO: 2295288 - RNA, 19 nt, Artificial Sequence
  Description of Artificial Sequence: Synthetic oligonucleotide
  Sense strand starting at position 3239 of SEQ ID NO: 1884830
cgcgcuugaguugcucaaa

SEQ ID NO: 2295289 - RNA, 19 nt, Artificial Sequence
  Description of Artificial Sequence: Synthetic oligonucleotide
  Antisense strand to SEQ ID NO: 2295288
uuugagcaacucaagcgcg

SEQ ID NO: 2295290 - RNA, 19 nt, Artificial Sequence
  Description of Artificial Sequence: Synthetic oligonucleotide
  Sense strand starting at position 3242 of SEQ ID NO: 1884830
gcuugaguugcucaaauga

SEQ ID NO: 2295291 - RNA, 19 nt, Artificial Sequence
  Description of Artificial Sequence: Synthetic oligonucleotide
  Antisense strand to SEQ ID NO: 2295290
ucauuugagcaacucaagc

SEQ ID NO: 2295292 - RNA, 19 nt, Artificial Sequence
  Description of Artificial Sequence: Synthetic oligonucleotide
  Sense strand starting at position 3278 of SEQ ID NO: 1884830
augggaaguguuugcuuaa

SEQ ID NO: 2295293 - RNA, 19 nt, Artificial Sequence
  Description of Artificial Sequence: Synthetic oligonucleotide
  Antisense strand to SEQ ID NO: 2295292
uuaagcaaacacuucccau

SEQ ID NO: 2295294 - RNA, 19 nt, Artificial Sequence
  Description of Artificial Sequence: Synthetic oligonucleotide
  Sense strand starting at position 3279 of SEQ ID NO: 1884830
ugggaaguguuugcuuaag

SEQ ID NO: 2295295 - RNA, 19 nt, Artificial Sequence
  Description of Artificial Sequence: Synthetic oligonucleotide
  Antisense strand to SEQ ID NO: 2295294
cuuaagcaaacacuuccca

SEQ ID NO: 2295296 - RNA, 19 nt, Artificial Sequence
  Description of Artificial Sequence: Synthetic oligonucleotide
  Sense strand starting at position 3281 of SEQ ID NO: 1884830
ggaaguguuugcuuaagaa

SEQ ID NO: 2295297 - RNA, 19 nt, Artificial Sequence
  Description of Artificial Sequence: Synthetic oligonucleotide
  Antisense strand to SEQ ID NO: 2295296
uucuuaagcaaacacuucc

SEQ ID NO: 2295298 - RNA, 19 nt, Artificial Sequence
  Description of Artificial Sequence: Synthetic oligonucleotide
  Sense strand starting at position 3349 of SEQ ID NO: 1884830
caccucuguccugggauau

SEQ ID NO: 2295299 - RNA, 19 nt, Artificial Sequence
  Description of Artificial Sequence: Synthetic oligonucleotide
  Antisense strand to SEQ ID NO: 2295298
auaucccaggacagaggug

SEQ ID NO: 2295300 - RNA, 19 nt, Artificial Sequence
  Description of Artificial Sequence: Synthetic oligonucleotide
  Sense strand starting at position 3350 of SEQ ID NO: 1884830
accucuguccugggauaua

SEQ ID NO: 2295301 - RNA, 19 nt, Artificial Sequence
  Description of Artificial Sequence: Synthetic oligonucleotide
  Antisense strand to SEQ ID NO: 2295300
uauaucccaggacagaggu

SEQ ID NO: 2295302 - RNA, 19 nt, Artificial Sequence
  Description of Artificial Sequence: Synthetic oligonucleotide
  Sense strand starting at position 3710 of SEQ ID NO: 1884830
cggacucuucuaggaaauu

SEQ ID NO: 2295303 - RNA, 19 nt, Artificial Sequence
  Description of Artificial Sequence: Synthetic oligonucleotide
  Antisense strand to SEQ ID NO: 2295302
aauuuccuagaagaguccg

SEQ ID NO: 2295304 - RNA, 19 nt, Artificial Sequence
  Description of Artificial Sequence: Synthetic oligonucleotide
  Sense strand starting at position 3719 of SEQ ID NO: 1884830
cuaggaaauuccucugucu

SEQ ID NO: 2295305 - RNA, 19 nt, Artificial Sequence
  Description of Artificial Sequence: Synthetic oligonucleotide
  Antisense strand to SEQ ID NO: 2295304
agacagaggaauuuccuag

SEQ ID NO: 2295306 - RNA, 19 nt, Artificial Sequence
  Description of Artificial Sequence: Synthetic oligonucleotide
  Sense strand starting at position 3721 of SEQ ID NO: 1884830
aggaaauuccucugucuca

SEQ ID NO: 2295307 - RNA, 19 nt, Artificial Sequence
  Description of Artificial Sequence: Synthetic oligonucleotide
  Antisense strand to SEQ ID NO: 2295306
ugagacagaggaauuuccu

SEQ ID NO: 2295308 - RNA, 19 nt, Artificial Sequence
  Description of Artificial Sequence: Synthetic oligonucleotide
  Sense strand starting at position 3722 of SEQ ID NO: 1884830
ggaaauuccucugucucau

SEQ ID NO: 2295309 - RNA, 19 nt, Artificial Sequence
  Description of Artificial Sequence: Synthetic oligonucleotide
  Antisense strand to SEQ ID NO: 2295308
augagacagaggaauuucc

SEQ ID NO: 2295310 - RNA, 19 nt, Artificial Sequence
  Description of Artificial Sequence: Synthetic oligonucleotide
  Sense strand starting at position 3901 of SEQ ID NO: 1884830
ggaagaagacuuggccuuu

SEQ ID NO: 2295311 - RNA, 19 nt, Artificial Sequence
  Description of Artificial Sequence: Synthetic oligonucleotide
  Antisense strand to SEQ ID NO: 2295310
aaaggccaagucuucuucc

SEQ ID NO: 2295312 - RNA, 19 nt, Artificial Sequence
  Description of Artificial Sequence: Synthetic oligonucleotide
  Sense strand starting at position 3944 of SEQ ID NO: 1884830
gaggaaggcugucucucaa

SEQ ID NO: 2295313 - RNA, 19 nt, Artificial Sequence
  Description of Artificial Sequence: Synthetic oligonucleotide
  Antisense strand to SEQ ID NO: 2295312
uugagagacagccuuccuc

SEQ ID NO: 2295314 - RNA, 19 nt, Artificial Sequence
  Description of Artificial Sequence: Synthetic oligonucleotide
  Sense strand starting at position 87 of SEQ ID NO: 1884831
aaugcauacugguugaauu

SEQ ID NO: 2295315 - RNA, 19 nt, Artificial Sequence
  Description of Artificial Sequence: Synthetic oligonucleotide
  Antisense strand to SEQ ID NO: 2295314
aauucaaccaguaugcauu

SEQ ID NO: 2295316 - RNA, 19 nt, Artificial Sequence
  Description of Artificial Sequence: Synthetic oligonucleotide
  Sense strand starting at position 102 of SEQ ID NO: 1884831
aauuguaaaugcucaggau

SEQ ID NO: 2295317 - RNA, 19 nt, Artificial Sequence
  Description of Artificial Sequence: Synthetic oligonucleotide
  Antisense strand to SEQ ID NO: 2295316
auccugagcauuuacaauu

SEQ ID NO: 2295318 - RNA, 19 nt, Artificial Sequence
  Description of Artificial Sequence: Synthetic oligonucleotide
  Sense strand starting at position 148 of SEQ ID NO: 1884831
gauauaccggugugcagaa

SEQ ID NO: 2295319 - RNA, 19 nt, Artificial Sequence
  Description of Artificial Sequence: Synthetic oligonucleotide
  Antisense strand to SEQ ID NO: 2295318
uucugcacaccgguauauc

SEQ ID NO: 2295320 - RNA, 19 nt, Artificial Sequence
  Description of Artificial Sequence: Synthetic oligonucleotide
  Sense strand starting at position 160 of SEQ ID NO: 1884831
ugcagaagucaggaugcau

SEQ ID NO: 2295321 - RNA, 19 nt, Artificial Sequence
  Description of Artificial Sequence: Synthetic oligonucleotide
  Antisense strand to SEQ ID NO: 2295320
augcauccugacuucugca

SEQ ID NO: 2295322 - RNA, 19 nt, Artificial Sequence
  Description of Artificial Sequence: Synthetic oligonucleotide
  Sense strand starting at position 171 of SEQ ID NO: 1884831
ggaugcauucccuguccaa

SEQ ID NO: 2295323 - RNA, 19 nt, Artificial Sequence
  Description of Artificial Sequence: Synthetic oligonucleotide
  Antisense strand to SEQ ID NO: 2295322
uuggacagggaaugcaucc

SEQ ID NO: 2295324 - RNA, 19 nt, Artificial Sequence
  Description of Artificial Sequence: Synthetic oligonucleotide
  Sense strand starting at position 185 of SEQ ID NO: 1884831
uccaaaucacaguguucca

SEQ ID NO: 2295325 - RNA, 19 nt, Artificial Sequence
  Description of Artificial Sequence: Synthetic oligonucleotide
  Antisense strand to SEQ ID NO: 2295324
uggaacacugugauuugga

SEQ ID NO: 2295326 - RNA, 19 nt, Artificial Sequence
  Description of Artificial Sequence: Synthetic oligonucleotide
  Sense strand starting at position 292 of SEQ ID NO: 1884831
cuauuugcugagugaaugu

SEQ ID NO: 2295327 - RNA, 19 nt, Artificial Sequence
  Description of Artificial Sequence: Synthetic oligonucleotide
  Antisense strand to SEQ ID NO: 2295326
acauucacucagcaaauag

SEQ ID NO: 2295328 - RNA, 19 nt, Artificial Sequence
  Description of Artificial Sequence: Synthetic oligonucleotide
  Sense strand starting at position 328 of SEQ ID NO: 1884831
agagcacaccucuguauga

SEQ ID NO: 2295329 - RNA, 19 nt, Artificial Sequence
  Description of Artificial Sequence: Synthetic oligonucleotide
  Antisense strand to SEQ ID NO: 2295328
ucauacagaggugugcucu

SEQ ID NO: 2295330 - RNA, 19 nt, Artificial Sequence
  Description of Artificial Sequence: Synthetic oligonucleotide
  Sense strand starting at position 329 of SEQ ID NO: 1884831
gagcacaccucuguaugau

SEQ ID NO: 2295331 - RNA, 19 nt, Artificial Sequence
  Description of Artificial Sequence: Synthetic oligonucleotide
  Antisense strand to SEQ ID NO: 2295330
aucauacagaggugugcuc

SEQ ID NO: 2295332 - RNA, 19 nt, Artificial Sequence
  Description of Artificial Sequence: Synthetic oligonucleotide
  Sense strand starting at position 330 of SEQ ID NO: 1884831
agcacaccucuguaugauu

SEQ ID NO: 2295333 - RNA, 19 nt, Artificial Sequence
  Description of Artificial Sequence: Synthetic oligonucleotide
  Antisense strand to SEQ ID NO: 2295332
aaucauacagaggugugcu

SEQ ID NO: 2295334 - RNA, 19 nt, Artificial Sequence
  Description of Artificial Sequence: Synthetic oligonucleotide
  Sense strand starting at position 920 of SEQ ID NO: 1884831
ggucaagacucccaaauuu

SEQ ID NO: 2295335 - RNA, 19 nt, Artificial Sequence
  Description of Artificial Sequence: Synthetic oligonucleotide
  Antisense strand to SEQ ID NO: 2295334
aaauuugggagucuugacc

SEQ ID NO: 2295336 - RNA, 19 nt, Artificial Sequence
  Description of Artificial Sequence: Synthetic oligonucleotide
  Sense strand starting at position 986 of SEQ ID NO: 1884831
gucauuuccugcccugaaa

SEQ ID NO: 2295337 - RNA, 19 nt, Artificial Sequence
  Description of Artificial Sequence: Synthetic oligonucleotide
  Antisense strand to SEQ ID NO: 2295336
uuucagggcaggaaaugac

SEQ ID NO: 2295338 - RNA, 19 nt, Artificial Sequence
  Description of Artificial Sequence: Synthetic oligonucleotide
  Sense strand starting at position 1789 of SEQ ID NO: 1884831
cucuuuccgucauuccaua

SEQ ID NO: 2295339 - RNA, 19 nt, Artificial Sequence
  Description of Artificial Sequence: Synthetic oligonucleotide
  Antisense strand to SEQ ID NO: 2295338
uauggaaugacggaaagag

SEQ ID NO: 2295340 - RNA, 19 nt, Artificial Sequence
  Description of Artificial Sequence: Synthetic oligonucleotide
  Sense strand starting at position 1910 of SEQ ID NO: 1884831
ggcucuuucccaggagaga

SEQ ID NO: 2295341 - RNA, 19 nt, Artificial Sequence
  Description of Artificial Sequence: Synthetic oligonucleotide
  Antisense strand to SEQ ID NO: 2295340
ucucuccugggaaagagcc

SEQ ID NO: 2295342 - RNA, 19 nt, Artificial Sequence
  Description of Artificial Sequence: Synthetic oligonucleotide
  Sense strand starting at position 1911 of SEQ ID NO: 1884831
gcucuuucccaggagagag

SEQ ID NO: 2295343 - RNA, 19 nt, Artificial Sequence
  Description of Artificial Sequence: Synthetic oligonucleotide
  Antisense strand to SEQ ID NO: 2295342
cucucuccugggaaagagc

SEQ ID NO: 2295344 - RNA, 19 nt, Artificial Sequence
  Description of Artificial Sequence: Synthetic oligonucleotide
  Sense strand starting at position 1944 of SEQ ID NO: 1884831
gguugagagcuuuacagag

SEQ ID NO: 2295345 - RNA, 19 nt, Artificial Sequence
  Description of Artificial Sequence: Synthetic oligonucleotide
  Antisense strand to SEQ ID NO: 2295344
cucuguaaagcucucaacc

SEQ ID NO: 2295346 - RNA, 19 nt, Artificial Sequence
  Description of Artificial Sequence: Synthetic oligonucleotide
  Sense strand starting at position 1986 of SEQ ID NO: 1884831
uaaggaaaggccuguaaag

SEQ ID NO: 2295347 - RNA, 19 nt, Artificial Sequence
  Description of Artificial Sequence: Synthetic oligonucleotide
  Antisense strand to SEQ ID NO: 2295346
cuuuacaggccuuuccuua

SEQ ID NO: 2295348 - RNA, 19 nt, Artificial Sequence
  Description of Artificial Sequence: Synthetic oligonucleotide
  Sense strand starting at position 2064 of SEQ ID NO: 1884831
aaggcugagucaucuagga

SEQ ID NO: 2295349 - RNA, 19 nt, Artificial Sequence
  Description of Artificial Sequence: Synthetic oligonucleotide
  Antisense strand to SEQ ID NO: 2295348
uccuagaugacucagccuu

SEQ ID NO: 2295350 - RNA, 19 nt, Artificial Sequence
  Description of Artificial Sequence: Synthetic oligonucleotide
  Sense strand starting at position 2066 of SEQ ID NO: 1884831
ggcugagucaucuaggagu

SEQ ID NO: 2295351 - RNA, 19 nt, Artificial Sequence
  Description of Artificial Sequence: Synthetic oligonucleotide
  Antisense strand to SEQ ID NO: 2295350
acuccuagaugacucagcc

SEQ ID NO: 2295352 - RNA, 19 nt, Artificial Sequence
  Description of Artificial Sequence: Synthetic oligonucleotide
  Sense strand starting at position 2068 of SEQ ID NO: 1884831
cugagucaucuaggaguaa

SEQ ID NO: 2295353 - RNA, 19 nt, Artificial Sequence
  Description of Artificial Sequence: Synthetic oligonucleotide
  Antisense strand to SEQ ID NO: 2295352
uuacuccuagaugacucag

SEQ ID NO: 2295354 - RNA, 19 nt, Artificial Sequence
  Description of Artificial Sequence: Synthetic oligonucleotide
  Sense strand starting at position 2183 of SEQ ID NO: 1884831
gaggacuuguuaguagcga

SEQ ID NO: 2295355 - RNA, 19 nt, Artificial Sequence
  Description of Artificial Sequence: Synthetic oligonucleotide
  Antisense strand to SEQ ID NO: 2295354
ucgcuacuaacaaguccuc

SEQ ID NO: 2295356 - RNA, 19 nt, Artificial Sequence
  Description of Artificial Sequence: Synthetic oligonucleotide
  Sense strand starting at position 2265 of SEQ ID NO: 1884831
agugcugggaucugggaau

SEQ ID NO: 2295357 - RNA, 19 nt, Artificial Sequence
  Description of Artificial Sequence: Synthetic oligonucleotide
  Antisense strand to SEQ ID NO: 2295356
auucccagaucccagcacu

SEQ ID NO: 2295358 - RNA, 19 nt, Artificial Sequence
  Description of Artificial Sequence: Synthetic oligonucleotide
  Sense strand starting at position 2345 of SEQ ID NO: 1884831
cuggcuauuccugggacca

SEQ ID NO: 2295359 - RNA, 19 nt, Artificial Sequence
  Description of Artificial Sequence: Synthetic oligonucleotide
  Antisense strand to SEQ ID NO: 2295358
uggucccaggaauagccag

SEQ ID NO: 2295360 - RNA, 19 nt, Artificial Sequence
  Description of Artificial Sequence: Synthetic oligonucleotide
  Sense strand starting at position 2346 of SEQ ID NO: 1884831
uggcuauuccugggaccag

SEQ ID NO: 2295361 - RNA, 19 nt, Artificial Sequence
  Description of Artificial Sequence: Synthetic oligonucleotide
  Antisense strand to SEQ ID NO: 2295360
cuggucccaggaauagcca

SEQ ID NO: 2295362 - RNA, 19 nt, Artificial Sequence
  Description of Artificial Sequence: Synthetic oligonucleotide
  Sense strand starting at position 2454 of SEQ ID NO: 1884831
cccuccagaucuucgcaaa

SEQ ID NO: 2295363 - RNA, 19 nt, Artificial Sequence
  Description of Artificial Sequence: Synthetic oligonucleotide
  Antisense strand to SEQ ID NO: 2295362
uuugcgaagaucuggaggg

SEQ ID NO: 2295364 - RNA, 19 nt, Artificial Sequence
  Description of Artificial Sequence: Synthetic oligonucleotide
  Sense strand starting at position 2455 of SEQ ID NO: 1884831
ccuccagaucuucgcaaau

SEQ ID NO: 2295365 - RNA, 19 nt, Artificial Sequence
  Description of Artificial Sequence: Synthetic oligonucleotide
  Antisense strand to SEQ ID NO: 2295364
auuugcgaagaucuggagg

SEQ ID NO: 2295366 - RNA, 19 nt, Artificial Sequence
  Description of Artificial Sequence: Synthetic oligonucleotide
  Sense strand starting at position 2664 of SEQ ID NO: 1884831
caggguccaucaguguauu

SEQ ID NO: 2295367 - RNA, 19 nt, Artificial Sequence
  Description of Artificial Sequence: Synthetic oligonucleotide
  Antisense strand to SEQ ID NO: 2295366
aauacacugauggacccug

SEQ ID NO: 2295368 - RNA, 19 nt, Artificial Sequence
  Description of Artificial Sequence: Synthetic oligonucleotide
  Sense strand starting at position 2715 of SEQ ID NO: 1884831
agaauacuguccuccaagu

SEQ ID NO: 2295369 - RNA, 19 nt, Artificial Sequence
  Description of Artificial Sequence: Synthetic oligonucleotide
  Antisense strand to SEQ ID NO: 2295368
acuuggaggacaguauucu

SEQ ID NO: 2295370 - RNA, 19 nt, Artificial Sequence
  Description of Artificial Sequence: Synthetic oligonucleotide
  Sense strand starting at position 2762 of SEQ ID NO: 1884831
ccuaauugcugacucaagu

SEQ ID NO: 2295371 - RNA, 19 nt, Artificial Sequence
  Description of Artificial Sequence: Synthetic oligonucleotide
  Antisense strand to SEQ ID NO: 2295370
acuugagucagcaauuagg

SEQ ID NO: 2295372 - RNA, 19 nt, Artificial Sequence
  Description of Artificial Sequence: Synthetic oligonucleotide
  Sense strand starting at position 2819 of SEQ ID NO: 1884831
uggcaugaguugagaaggu

SEQ ID NO: 2295373 - RNA, 19 nt, Artificial Sequence
  Description of Artificial Sequence: Synthetic oligonucleotide
  Antisense strand to SEQ ID NO: 2295372
accuucucaacucaugcca

SEQ ID NO: 2295374 - RNA, 19 nt, Artificial Sequence
  Description of Artificial Sequence: Synthetic oligonucleotide
  Sense strand starting at position 2869 of SEQ ID NO: 1884831
ccuccacuccuauagguau

SEQ ID NO: 2295375 - RNA, 19 nt, Artificial Sequence
  Description of Artificial Sequence: Synthetic oligonucleotide
  Antisense strand to SEQ ID NO: 2295374
auaccuauaggaguggagg

SEQ ID NO: 2295376 - RNA, 19 nt, Artificial Sequence
  Description of Artificial Sequence: Synthetic oligonucleotide
  Sense strand starting at position 2875 of SEQ ID NO: 1884831
cuccuauagguaugagaca

SEQ ID NO: 2295377 - RNA, 19 nt, Artificial Sequence
  Description of Artificial Sequence: Synthetic oligonucleotide
  Antisense strand to SEQ ID NO: 2295376
ugucucauaccuauaggag

SEQ ID NO: 2295378 - RNA, 19 nt, Artificial Sequence
  Description of Artificial Sequence: Synthetic oligonucleotide
  Sense strand starting at position 3081 of SEQ ID NO: 1884831
aagagaagucugggucgga

SEQ ID NO: 2295379 - RNA, 19 nt, Artificial Sequence
  Description of Artificial Sequence: Synthetic oligonucleotide
  Antisense strand to SEQ ID NO: 2295378
uccgacccagacuucucuu

SEQ ID NO: 2295380 - RNA, 19 nt, Artificial Sequence
  Description of Artificial Sequence: Synthetic oligonucleotide
  Sense strand starting at position 3084 of SEQ ID NO: 1884831
agaagucugggucggagaa

SEQ ID NO: 2295381 - RNA, 19 nt, Artificial Sequence
  Description of Artificial Sequence: Synthetic oligonucleotide
  Antisense strand to SEQ ID NO: 2295380
uucuccgacccagacuucu

SEQ ID NO: 2295382 - RNA, 19 nt, Artificial Sequence
  Description of Artificial Sequence: Synthetic oligonucleotide
  Sense strand starting at position 3085 of SEQ ID NO: 1884831
gaagucugggucggagaau

SEQ ID NO: 2295383 - RNA, 19 nt, Artificial Sequence
  Description of Artificial Sequence: Synthetic oligonucleotide
  Antisense strand to SEQ ID NO: 2295382
auucuccgacccagacuuc

SEQ ID NO: 2295384 - RNA, 19 nt, Artificial Sequence
  Description of Artificial Sequence: Synthetic oligonucleotide
  Sense strand starting at position 3088 of SEQ ID NO: 1884831
gucugggucggagaauaga

SEQ ID NO: 2295385 - RNA, 19 nt, Artificial Sequence
  Description of Artificial Sequence: Synthetic oligonucleotide
  Antisense strand to SEQ ID NO: 2295384
ucuauucuccgacccagac

SEQ ID NO: 2295386 - RNA, 19 nt, Artificial Sequence
  Description of Artificial Sequence: Synthetic oligonucleotide
  Sense strand starting at position 3133 of SEQ ID NO: 1884831
ugcuaagacguuuagaaau

SEQ ID NO: 2295387 - RNA, 19 nt, Artificial Sequence
  Description of Artificial Sequence: Synthetic oligonucleotide
  Antisense strand to SEQ ID NO: 2295386
auuucuaaacgucuuagca

SEQ ID NO: 2295388 - RNA, 19 nt, Artificial Sequence
  Description of Artificial Sequence: Synthetic oligonucleotide
  Sense strand starting at position 3180 of SEQ ID NO: 1884831
cguucugaugaagagcauu

SEQ ID NO: 2295389 - RNA, 19 nt, Artificial Sequence
  Description of Artificial Sequence: Synthetic oligonucleotide
  Antisense strand to SEQ ID NO: 2295388
aaugcucuucaucagaacg

SEQ ID NO: 2295390 - RNA, 19 nt, Artificial Sequence
  Description of Artificial Sequence: Synthetic oligonucleotide
  Sense strand starting at position 3334 of SEQ ID NO: 1884831
guuggcagcgcuuccuaaa

SEQ ID NO: 2295391 - RNA, 19 nt, Artificial Sequence
  Description of Artificial Sequence: Synthetic oligonucleotide
  Antisense strand to SEQ ID NO: 2295390
uuuaggaagcgcugccaac

SEQ ID NO: 2295392 - RNA, 19 nt, Artificial Sequence
  Description of Artificial Sequence: Synthetic oligonucleotide
  Sense strand starting at position 3551 of SEQ ID NO: 1884831
gaagaaaggccuuguugga

SEQ ID NO: 2295393 - RNA, 19 nt, Artificial Sequence
  Description of Artificial Sequence: Synthetic oligonucleotide
  Antisense strand to SEQ ID NO: 2295392
uccaacaaggccuuucuuc

SEQ ID NO: 2295394 - RNA, 19 nt, Artificial Sequence
  Description of Artificial Sequence: Synthetic oligonucleotide
  Sense strand starting at position 11 of SEQ ID NO: 1884832
aggccugaauugcuaacau

SEQ ID NO: 2295395 - RNA, 19 nt, Artificial Sequence
  Description of Artificial Sequence: Synthetic oligonucleotide
  Antisense strand to SEQ ID NO: 2295394
auguuagcaauucaggccu

SEQ ID NO: 2295396 - RNA, 19 nt, Artificial Sequence
  Description of Artificial Sequence: Synthetic oligonucleotide
  Sense strand starting at position 48 of SEQ ID NO: 1884832
ucagcaugaccuggaucua

SEQ ID NO: 2295397 - RNA, 19 nt, Artificial Sequence
  Description of Artificial Sequence: Synthetic oligonucleotide
  Antisense strand to SEQ ID NO: 2295396
uagauccaggucaugcuga

SEQ ID NO: 2295398 - RNA, 19 nt, Artificial Sequence
  Description of Artificial Sequence: Synthetic oligonucleotide
  Sense strand starting at position 146 of SEQ ID NO: 1884832
uauuaaguaucgcuuuaga

SEQ ID NO: 2295399 - RNA, 19 nt, Artificial Sequence
  Description of Artificial Sequence: Synthetic oligonucleotide
  Antisense strand to SEQ ID NO: 2295398
ucuaaagcgauacuuaaua

SEQ ID NO: 2295400 - RNA, 19 nt, Artificial Sequence
  Description of Artificial Sequence: Synthetic oligonucleotide
  Sense strand starting at position 149 of SEQ ID NO: 1884832
uaaguaucgcuuuagagac

SEQ ID NO: 2295401 - RNA, 19 nt, Artificial Sequence
  Description of Artificial Sequence: Synthetic oligonucleotide
  Antisense strand to SEQ ID NO: 2295400
gucucuaaagcgauacuua

SEQ ID NO: 2295402 - RNA, 19 nt, Artificial Sequence
  Description of Artificial Sequence: Synthetic oligonucleotide
  Sense strand starting at position 234 of SEQ ID NO: 1884832
ggaaucaauuuggaaguca

SEQ ID NO: 2295403 - RNA, 19 nt, Artificial Sequence
  Description of Artificial Sequence: Synthetic oligonucleotide
  Antisense strand to SEQ ID NO: 2295402
ugacuuccaaauugauucc

SEQ ID NO: 2295404 - RNA, 19 nt, Artificial Sequence
  Description of Artificial Sequence: Synthetic oligonucleotide
  Sense strand starting at position 267 of SEQ ID NO: 1884832
aguuccugucaauauaaac

SEQ ID NO: 2295405 - RNA, 19 nt, Artificial Sequence
  Description of Artificial Sequence: Synthetic oligonucleotide
  Antisense strand to SEQ ID NO: 2295404
guuuauauugacaggaacu

SEQ ID NO: 2295406 - RNA, 19 nt, Artificial Sequence
  Description of Artificial Sequence: Synthetic oligonucleotide
  Sense strand starting at position 397 of SEQ ID NO: 1884832
uucuuauucugccuaagga

SEQ ID NO: 2295407 - RNA, 19 nt, Artificial Sequence
  Description of Artificial Sequence: Synthetic oligonucleotide
  Antisense strand to SEQ ID NO: 2295406
uccuuaggcagaauaagaa

SEQ ID NO: 2295408 - RNA, 19 nt, Artificial Sequence
  Description of Artificial Sequence: Synthetic oligonucleotide
  Sense strand starting at position 398 of SEQ ID NO: 1884832
ucuuauucugccuaaggaa

SEQ ID NO: 2295409 - RNA, 19 nt, Artificial Sequence
  Description of Artificial Sequence: Synthetic oligonucleotide
  Antisense strand to SEQ ID NO: 2295408
uuccuuaggcagaauaaga

SEQ ID NO: 2295410 - RNA, 19 nt, Artificial Sequence
  Description of Artificial Sequence: Synthetic oligonucleotide
  Sense strand starting at position 491 of SEQ ID NO: 1884832
uguuccaaugaauguuuau

SEQ ID NO: 2295411 - RNA, 19 nt, Artificial Sequence
  Description of Artificial Sequence: Synthetic oligonucleotide
  Antisense strand to SEQ ID NO: 2295410
auaaacauucauuggaaca

SEQ ID NO: 2295412 - RNA, 19 nt, Artificial Sequence
  Description of Artificial Sequence: Synthetic oligonucleotide
  Sense strand starting at position 569 of SEQ ID NO: 1884832
aagcuuaucggcgacacaa

SEQ ID NO: 2295413 - RNA, 19 nt, Artificial Sequence
  Description of Artificial Sequence: Synthetic oligonucleotide
  Antisense strand to SEQ ID NO: 2295412
uugugucgccgauaagcuu

SEQ ID NO: 2295414 - RNA, 19 nt, Artificial Sequence
  Description of Artificial Sequence: Synthetic oligonucleotide
  Sense strand starting at position 571 of SEQ ID NO: 1884832
gcuuaucggcgacacaaua

SEQ ID NO: 2295415 - RNA, 19 nt, Artificial Sequence
  Description of Artificial Sequence: Synthetic oligonucleotide
  Antisense strand to SEQ ID NO: 2295414
uauugugucgccgauaagc

SEQ ID NO: 2295416 - RNA, 19 nt, Artificial Sequence
  Description of Artificial Sequence: Synthetic oligonucleotide
  Sense strand starting at position 632 of SEQ ID NO: 1884832
uuacuuuaugcuggaauau

SEQ ID NO: 2295417 - RNA, 19 nt, Artificial Sequence
  Description of Artificial Sequence: Synthetic oligonucleotide
  Antisense strand to SEQ ID NO: 2295416
auauuccagcauaaaguaa

SEQ ID NO: 2295418 - RNA, 19 nt, Artificial Sequence
  Description of Artificial Sequence: Synthetic oligonucleotide
  Sense strand starting at position 761 of SEQ ID NO: 1884832
uucuuaugggcauaguuaa

SEQ ID NO: 2295419 - RNA, 19 nt, Artificial Sequence
  Description of Artificial Sequence: Synthetic oligonucleotide
  Antisense strand to SEQ ID NO: 2295418
uuaacuaugcccauaagaa

SEQ ID NO: 2295420 - RNA, 19 nt, Artificial Sequence
  Description of Artificial Sequence: Synthetic oligonucleotide
  Sense strand starting at position 928 of SEQ ID NO: 1884832
uucguauuucuguaaggca

SEQ ID NO: 2295421 - RNA, 19 nt, Artificial Sequence
  Description of Artificial Sequence: Synthetic oligonucleotide
  Antisense strand to SEQ ID NO: 2295420
ugccuuacagaaauacgaa

SEQ ID NO: 2295422 - RNA, 19 nt, Artificial Sequence
  Description of Artificial Sequence: Synthetic oligonucleotide
  Sense strand starting at position 937 of SEQ ID NO: 1884832
cuguaaggcagguauccaa

SEQ ID NO: 2295423 - RNA, 19 nt, Artificial Sequence
  Description of Artificial Sequence: Synthetic oligonucleotide
  Antisense strand to SEQ ID NO: 2295422
uuggauaccugccuuacag

SEQ ID NO: 2295424 - RNA, 19 nt, Artificial Sequence
  Description of Artificial Sequence: Synthetic oligonucleotide
  Sense strand starting at position 989 of SEQ ID NO: 1884832
gacguucuaguuuaaguaa

SEQ ID NO: 2295425 - RNA, 19 nt, Artificial Sequence
  Description of Artificial Sequence: Synthetic oligonucleotide
  Antisense strand to SEQ ID NO: 2295424
uuacuuaaacuagaacguc

SEQ ID NO: 2295426 - RNA, 19 nt, Artificial Sequence
  Description of Artificial Sequence: Synthetic oligonucleotide
  Sense strand starting at position 1055 of SEQ ID NO: 1884832
cggaauaaguuucccucau

SEQ ID NO: 2295427 - RNA, 19 nt, Artificial Sequence
  Description of Artificial Sequence: Synthetic oligonucleotide
  Antisense strand to SEQ ID NO: 2295426
augagggaaacuuauuccg

SEQ ID NO: 2295428 - RNA, 19 nt, Artificial Sequence
  Description of Artificial Sequence: Synthetic oligonucleotide
  Sense strand starting at position 1056 of SEQ ID NO: 1884832
ggaauaaguuucccucauu

SEQ ID NO: 2295429 - RNA, 19 nt, Artificial Sequence
  Description of Artificial Sequence: Synthetic oligonucleotide
  Antisense strand to SEQ ID NO: 2295428
aaugagggaaacuuauucc

SEQ ID NO: 2295430 - RNA, 19 nt, Artificial Sequence
  Description of Artificial Sequence: Synthetic oligonucleotide
  Sense strand starting at position 1590 of SEQ ID NO: 1884832
ucccauagcuuccuagagu

SEQ ID NO: 2295431 - RNA, 19 nt, Artificial Sequence
  Description of Artificial Sequence: Synthetic oligonucleotide
  Antisense strand to SEQ ID NO: 2295430
acucuaggaagcuauggga

SEQ ID NO: 2295432 - RNA, 19 nt, Artificial Sequence
  Description of Artificial Sequence: Synthetic oligonucleotide
  Sense strand starting at position 1593 of SEQ ID NO: 1884832
cauagcuuccuagaguguu

SEQ ID NO: 2295433 - RNA, 19 nt, Artificial Sequence
  Description of Artificial Sequence: Synthetic oligonucleotide
  Antisense strand to SEQ ID NO: 2295432
aacacucuaggaagcuaug

SEQ ID NO: 2295434 - RNA, 19 nt, Artificial Sequence
  Description of Artificial Sequence: Synthetic oligonucleotide
  Sense strand starting at position 2184 of SEQ ID NO: 1884832
gcuacacagcacugauaau

SEQ ID NO: 2295435 - RNA, 19 nt, Artificial Sequence
  Description of Artificial Sequence: Synthetic oligonucleotide
  Antisense strand to SEQ ID NO: 2295434
auuaucagugcuguguagc

SEQ ID NO: 2295436 - RNA, 19 nt, Artificial Sequence
  Description of Artificial Sequence: Synthetic oligonucleotide
  Sense strand starting at position 2363 of SEQ ID NO: 1884832
gcagcuaauguauauuaaa

SEQ ID NO: 2295437 - RNA, 19 nt, Artificial Sequence
  Description of Artificial Sequence: Synthetic oligonucleotide
  Antisense strand to SEQ ID NO: 2295436
uuuaauauacauuagcugc

SEQ ID NO: 2295438 - RNA, 19 nt, Artificial Sequence
  Description of Artificial Sequence: Synthetic oligonucleotide
  Sense strand starting at position 2391 of SEQ ID NO: 1884832
uguguuuggcacuauacua

SEQ ID NO: 2295439 - RNA, 19 nt, Artificial Sequence
  Description of Artificial Sequence: Synthetic oligonucleotide
  Antisense strand to SEQ ID NO: 2295438
uaguauagugccaaacaca

SEQ ID NO: 2295440 - RNA, 19 nt, Artificial Sequence
  Description of Artificial Sequence: Synthetic oligonucleotide
  Sense strand starting at position 2504 of SEQ ID NO: 1884832
cggguuucccuuuaaagaa

SEQ ID NO: 2295441 - RNA, 19 nt, Artificial Sequence
  Description of Artificial Sequence: Synthetic oligonucleotide
  Antisense strand to SEQ ID NO: 2295440
uucuuuaaagggaaacccg

SEQ ID NO: 2295442 - RNA, 19 nt, Artificial Sequence
  Description of Artificial Sequence: Synthetic oligonucleotide
  Sense strand starting at position 2530 of SEQ ID NO: 1884832
ccaggcucauuugaauuaa

SEQ ID NO: 2295443 - RNA, 19 nt, Artificial Sequence
  Description of Artificial Sequence: Synthetic oligonucleotide
  Antisense strand to SEQ ID NO: 2295442
uuaauucaaaugagccugg

SEQ ID NO: 2295444 - RNA, 19 nt, Artificial Sequence
  Description of Artificial Sequence: Synthetic oligonucleotide
  Sense strand starting at position 2592 of SEQ ID NO: 1884832
uggacagugucuucuuuga

SEQ ID NO: 2295445 - RNA, 19 nt, Artificial Sequence
  Description of Artificial Sequence: Synthetic oligonucleotide
  Antisense strand to SEQ ID NO: 2295444
ucaaagaagacacugucca

SEQ ID NO: 2295446 - RNA, 19 nt, Artificial Sequence
  Description of Artificial Sequence: Synthetic oligonucleotide
  Sense strand starting at position 2673 of SEQ ID NO: 1884832
uuuguuagaugguccaaau

SEQ ID NO: 2295447 - RNA, 19 nt, Artificial Sequence
  Description of Artificial Sequence: Synthetic oligonucleotide
  Antisense strand to SEQ ID NO: 2295446
auuuggaccaucuaacaaa

SEQ ID NO: 2295448 - RNA, 19 nt, Artificial Sequence
  Description of Artificial Sequence: Synthetic oligonucleotide
  Sense strand starting at position 2683 of SEQ ID NO: 1884832
gguccaaauuccuuauugu

SEQ ID NO: 2295449 - RNA, 19 nt, Artificial Sequence
  Description of Artificial Sequence: Synthetic oligonucleotide
  Antisense strand to SEQ ID NO: 2295448
acaauaaggaauuuggacc

SEQ ID NO: 2295450 - RNA, 19 nt, Artificial Sequence
  Description of Artificial Sequence: Synthetic oligonucleotide
  Sense strand starting at position 2684 of SEQ ID NO: 1884832
guccaaauuccuuauuguc

SEQ ID NO: 2295451 - RNA, 19 nt, Artificial Sequence
  Description of Artificial Sequence: Synthetic oligonucleotide
  Antisense strand to SEQ ID NO: 2295450
gacaauaaggaauuuggac

SEQ ID NO: 2295452 - RNA, 19 nt, Artificial Sequence
  Description of Artificial Sequence: Synthetic oligonucleotide
  Sense strand starting at position 2699 of SEQ ID NO: 1884832
ugucuuuagcaauauguag

SEQ ID NO: 2295453 - RNA, 19 nt, Artificial Sequence
  Description of Artificial Sequence: Synthetic oligonucleotide
  Antisense strand to SEQ ID NO: 2295452
cuacauauugcuaaagaca

SEQ ID NO: 2295454 - RNA, 19 nt, Artificial Sequence
  Description of Artificial Sequence: Synthetic oligonucleotide
  Sense strand starting at position 2708 of SEQ ID NO: 1884832
caauauguaguaggauaga

SEQ ID NO: 2295455 - RNA, 19 nt, Artificial Sequence
  Description of Artificial Sequence: Synthetic oligonucleotide
  Antisense strand to SEQ ID NO: 2295454
ucuauccuacuacauauug

SEQ ID NO: 2295456 - RNA, 19 nt, Artificial Sequence
  Description of Artificial Sequence: Synthetic oligonucleotide
  Sense strand starting at position 2998 of SEQ ID NO: 1884832
ggaguuaauagugagccaa

SEQ ID NO: 2295457 - RNA, 19 nt, Artificial Sequence
  Description of Artificial Sequence: Synthetic oligonucleotide
  Antisense strand to SEQ ID NO: 2295456
uuggcucacuauuaacucc

SEQ ID NO: 2295458 - RNA, 19 nt, Artificial Sequence
  Description of Artificial Sequence: Synthetic oligonucleotide
  Sense strand starting at position 3000 of SEQ ID NO: 1884832
aguuaauagugagccaaca

SEQ ID NO: 2295459 - RNA, 19 nt, Artificial Sequence
  Description of Artificial Sequence: Synthetic oligonucleotide
  Antisense strand to SEQ ID NO: 2295458
uguuggcucacuauuaacu

SEQ ID NO: 2295460 - RNA, 19 nt, Artificial Sequence
  Description of Artificial Sequence: Synthetic oligonucleotide
  Sense strand starting at position 3524 of SEQ ID NO: 1884832
uugccauucugaucucaug

SEQ ID NO: 2295461 - RNA, 19 nt, Artificial Sequence
  Description of Artificial Sequence: Synthetic oligonucleotide
  Antisense strand to SEQ ID NO: 2295460
caugagaucagaauggcaa

SEQ ID NO: 2295462 - RNA, 19 nt, Artificial Sequence
  Description of Artificial Sequence: Synthetic oligonucleotide
  Sense strand starting at position 3636 of SEQ ID NO: 1884832
uaaugugguccucaguaaa

SEQ ID NO: 2295463 - RNA, 19 nt, Artificial Sequence
  Description of Artificial Sequence: Synthetic oligonucleotide
  Antisense strand to SEQ ID NO: 2295462
uuuacugaggaccacauua

SEQ ID NO: 2295464 - RNA, 19 nt, Artificial Sequence
  Description of Artificial Sequence: Synthetic oligonucleotide
  Sense strand starting at position 3639 of SEQ ID NO: 1884832
ugugguccucaguaaauuc

SEQ ID NO: 2295465 - RNA, 19 nt, Artificial Sequence
  Description of Artificial Sequence: Synthetic oligonucleotide
  Antisense strand to SEQ ID NO: 2295464
gaauuuacugaggaccaca

SEQ ID NO: 2295466 - RNA, 19 nt, Artificial Sequence
  Description of Artificial Sequence: Synthetic oligonucleotide
  Sense strand starting at position 3646 of SEQ ID NO: 1884832
cucaguaaauucccgugaa

SEQ ID NO: 2295467 - RNA, 19 nt, Artificial Sequence
  Description of Artificial Sequence: Synthetic oligonucleotide
  Antisense strand to SEQ ID NO: 2295466
uucacgggaauuuacugag

SEQ ID NO: 2295468 - RNA, 19 nt, Artificial Sequence
  Description of Artificial Sequence: Synthetic oligonucleotide
  Sense strand starting at position 3650 of SEQ ID NO: 1884832
guaaauucccgugaaguca

SEQ ID NO: 2295469 - RNA, 19 nt, Artificial Sequence
  Description of Artificial Sequence: Synthetic oligonucleotide
  Antisense strand to SEQ ID NO: 2295468
ugacuucacgggaauuuac

SEQ ID NO: 2295470 - RNA, 19 nt, Artificial Sequence
  Description of Artificial Sequence: Synthetic oligonucleotide
  Sense strand starting at position 3662 of SEQ ID NO: 1884832
gaagucaucucagugauua

SEQ ID NO: 2295471 - RNA, 19 nt, Artificial Sequence
  Description of Artificial Sequence: Synthetic oligonucleotide
  Antisense strand to SEQ ID NO: 2295470
uaaucacugagaugacuuc

SEQ ID NO: 2295472 - RNA, 19 nt, Artificial Sequence
  Description of Artificial Sequence: Synthetic oligonucleotide
  Sense strand starting at position 3967 of SEQ ID NO: 1884832
ucaacaaaugcuugucgaa

SEQ ID NO: 2295473 - RNA, 19 nt, Artificial Sequence
  Description of Artificial Sequence: Synthetic oligonucleotide
  Antisense strand to SEQ ID NO: 2295472
uucgacaagcauuuguuga

SEQ ID NO: 2295474 - RNA, 19 nt, Artificial Sequence
  Description of Artificial Sequence: Synthetic oligonucleotide
  Sense strand starting at position 390 of SEQ ID NO: 1884834
agguaacauuuagaugaaa

SEQ ID NO: 2295475 - RNA, 19 nt, Artificial Sequence
  Description of Artificial Sequence: Synthetic oligonucleotide
  Antisense strand to SEQ ID NO: 2295474
uuucaucuaaauguuaccu

SEQ ID NO: 2295476 - RNA, 19 nt, Artificial Sequence
  Description of Artificial Sequence: Synthetic oligonucleotide
  Sense strand starting at position 438 of SEQ ID NO: 1884834
gggaucaggaccuguucua

SEQ ID NO: 2295477 - RNA, 19 nt, Artificial Sequence
  Description of Artificial Sequence: Synthetic oligonucleotide
  Antisense strand to SEQ ID NO: 2295476
uagaacagguccugauccc

SEQ ID NO: 2295478 - RNA, 19 nt, Artificial Sequence
  Description of Artificial Sequence: Synthetic oligonucleotide
  Sense strand starting at position 445 of SEQ ID NO: 1884834
ggaccuguucuagguacuu

SEQ ID NO: 2295479 - RNA, 19 nt, Artificial Sequence
  Description of Artificial Sequence: Synthetic oligonucleotide
  Antisense strand to SEQ ID NO: 2295478
aaguaccuagaacaggucc

SEQ ID NO: 2295480 - RNA, 19 nt, Artificial Sequence
  Description of Artificial Sequence: Synthetic oligonucleotide
  Sense strand starting at position 497 of SEQ ID NO: 1884834
ugugauaaauagguagguu

SEQ ID NO: 2295481 - RNA, 19 nt, Artificial Sequence
  Description of Artificial Sequence: Synthetic oligonucleotide
  Antisense strand to SEQ ID NO: 2295480
aaccuaccuauuuaucaca

SEQ ID NO: 2295482 - RNA, 19 nt, Artificial Sequence
  Description of Artificial Sequence: Synthetic oligonucleotide
  Sense strand starting at position 595 of SEQ ID NO: 1884834
ggauuugaaucaggcaauc

SEQ ID NO: 2295483 - RNA, 19 nt, Artificial Sequence
  Description of Artificial Sequence: Synthetic oligonucleotide
  Antisense strand to SEQ ID NO: 2295482
gauugccugauucaaaucc

SEQ ID NO: 2295484 - RNA, 19 nt, Artificial Sequence
  Description of Artificial Sequence: Synthetic oligonucleotide
  Sense strand starting at position 699 of SEQ ID NO: 1884834
aaguauuauguagggcuau

SEQ ID NO: 2295485 - RNA, 19 nt, Artificial Sequence
  Description of Artificial Sequence: Synthetic oligonucleotide
  Antisense strand to SEQ ID NO: 2295484
auagcccuacauaauacuu

SEQ ID NO: 2295486 - RNA, 19 nt, Artificial Sequence
  Description of Artificial Sequence: Synthetic oligonucleotide
  Sense strand starting at position 712 of SEQ ID NO: 1884834
ggcuauugccacuacaaca

SEQ ID NO: 2295487 - RNA, 19 nt, Artificial Sequence
  Description of Artificial Sequence: Synthetic oligonucleotide
  Antisense strand to SEQ ID NO: 2295486
uguuguaguggcaauagcc

SEQ ID NO: 2295488 - RNA, 19 nt, Artificial Sequence
  Description of Artificial Sequence: Synthetic oligonucleotide
  Sense strand starting at position 779 of SEQ ID NO: 1884834
ggguaagucaacugauaca

SEQ ID NO: 2295489 - RNA, 19 nt, Artificial Sequence
  Description of Artificial Sequence: Synthetic oligonucleotide
  Antisense strand to SEQ ID NO: 2295488
uguaucaguugacuuaccc

SEQ ID NO: 2295490 - RNA, 19 nt, Artificial Sequence
  Description of Artificial Sequence: Synthetic oligonucleotide
  Sense strand starting at position 863 of SEQ ID NO: 1884834
ccaggugugugguuaagaa

SEQ ID NO: 2295491 - RNA, 19 nt, Artificial Sequence
  Description of Artificial Sequence: Synthetic oligonucleotide
  Antisense strand to SEQ ID NO: 2295490
uucuuaaccacacaccugg

SEQ ID NO: 2295492 - RNA, 19 nt, Artificial Sequence
  Description of Artificial Sequence: Synthetic oligonucleotide
  Sense strand starting at position 885 of SEQ ID NO: 1884834
acgagaacauaccuauauu

SEQ ID NO: 2295493 - RNA, 19 nt, Artificial Sequence
  Description of Artificial Sequence: Synthetic oligonucleotide
  Antisense strand to SEQ ID NO: 2295492
aauauagguauguucucgu

SEQ ID NO: 2295494 - RNA, 19 nt, Artificial Sequence
  Description of Artificial Sequence: Synthetic oligonucleotide
  Sense strand starting at position 926 of SEQ ID NO: 1884834
auaaguuguuucucauaac

SEQ ID NO: 2295495 - RNA, 19 nt, Artificial Sequence
  Description of Artificial Sequence: Synthetic oligonucleotide
  Antisense strand to SEQ ID NO: 2295494
guuaugagaaacaacuuau

SEQ ID NO: 2295496 - RNA, 19 nt, Artificial Sequence
  Description of Artificial Sequence: Synthetic oligonucleotide
  Sense strand starting at position 969 of SEQ ID NO: 1884834
agugcuaauuuauaggaau

SEQ ID NO: 2295497 - RNA, 19 nt, Artificial Sequence
  Description of Artificial Sequence: Synthetic oligonucleotide
  Antisense strand to SEQ ID NO: 2295496
auuccuauaaauuagcacu

SEQ ID NO: 2295498 - RNA, 19 nt, Artificial Sequence
  Description of Artificial Sequence: Synthetic oligonucleotide
  Sense strand starting at position 972 of SEQ ID NO: 1884834
gcuaauuuauaggaauuag

SEQ ID NO: 2295499 - RNA, 19 nt, Artificial Sequence
  Description of Artificial Sequence: Synthetic oligonucleotide
  Antisense strand to SEQ ID NO: 2295498
cuaauuccuauaaauuagc

SEQ ID NO: 2295500 - RNA, 19 nt, Artificial Sequence
  Description of Artificial Sequence: Synthetic oligonucleotide
  Sense strand starting at position 999 of SEQ ID NO: 1884834
gcaggcauuuaugaaauau

SEQ ID NO: 2295501 - RNA, 19 nt, Artificial Sequence
  Description of Artificial Sequence: Synthetic oligonucleotide
  Antisense strand to SEQ ID NO: 2295500
auauuucauaaaugccugc

SEQ ID NO: 2295502 - RNA, 19 nt, Artificial Sequence
  Description of Artificial Sequence: Synthetic oligonucleotide
  Sense strand starting at position 1302 of SEQ ID NO: 1884834
gagacuaucugggaaucag

SEQ ID NO: 2295503 - RNA, 19 nt, Artificial Sequence
  Description of Artificial Sequence: Synthetic oligonucleotide
  Antisense strand to SEQ ID NO: 2295502
cugauucccagauagucuc

SEQ ID NO: 2295504 - RNA, 19 nt, Artificial Sequence
  Description of Artificial Sequence: Synthetic oligonucleotide
  Sense strand starting at position 1314 of SEQ ID NO: 1884834
gaaucaguccuagaagcuc

SEQ ID NO: 2295505 - RNA, 19 nt, Artificial Sequence
  Description of Artificial Sequence: Synthetic oligonucleotide
  Antisense strand to SEQ ID NO: 2295504
gagcuucuaggacugauuc

SEQ ID NO: 2295506 - RNA, 19 nt, Artificial Sequence
  Description of Artificial Sequence: Synthetic oligonucleotide
  Sense strand starting at position 1362 of SEQ ID NO: 1884834
aggagucucggagauugua

SEQ ID NO: 2295507 - RNA, 19 nt, Artificial Sequence
  Description of Artificial Sequence: Synthetic oligonucleotide
  Antisense strand to SEQ ID NO: 2295506
uacaaucuccgagacuccu

SEQ ID NO: 2295508 - RNA, 19 nt, Artificial Sequence
  Description of Artificial Sequence: Synthetic oligonucleotide
  Sense strand starting at position 1436 of SEQ ID NO: 1884834
aggcaaucagacugugaaa

SEQ ID NO: 2295509 - RNA, 19 nt, Artificial Sequence
  Description of Artificial Sequence: Synthetic oligonucleotide
  Antisense strand to SEQ ID NO: 2295508
uuucacagucugauugccu

SEQ ID NO: 2295510 - RNA, 19 nt, Artificial Sequence
  Description of Artificial Sequence: Synthetic oligonucleotide
  Sense strand starting at position 1438 of SEQ ID NO: 1884834
gcaaucagacugugaaaca

SEQ ID NO: 2295511 - RNA, 19 nt, Artificial Sequence
  Description of Artificial Sequence: Synthetic oligonucleotide
  Antisense strand to SEQ ID NO: 2295510
uguuucacagucugauugc

SEQ ID NO: 2295512 - RNA, 19 nt, Artificial Sequence
  Description of Artificial Sequence: Synthetic oligonucleotide
  Sense strand starting at position 1491 of SEQ ID NO: 1884834
aggguaugccucuggagag

SEQ ID NO: 2295513 - RNA, 19 nt, Artificial Sequence
  Description of Artificial Sequence: Synthetic oligonucleotide
  Antisense strand to SEQ ID NO: 2295512
cucuccagaggcauacccu

SEQ ID NO: 2295514 - RNA, 19 nt, Artificial Sequence
  Description of Artificial Sequence: Synthetic oligonucleotide
  Sense strand starting at position 2339 of SEQ ID NO: 1884834
gucggagccucgacuguua

SEQ ID NO: 2295515 - RNA, 19 nt, Artificial Sequence
  Description of Artificial Sequence: Synthetic oligonucleotide
  Antisense strand to SEQ ID NO: 2295514
uaacagucgaggcuccgac

SEQ ID NO: 2295516 - RNA, 19 nt, Artificial Sequence
  Description of Artificial Sequence: Synthetic oligonucleotide
  Sense strand starting at position 2348 of SEQ ID NO: 1884834
ucgacuguuagguagcaga

SEQ ID NO: 2295517 - RNA, 19 nt, Artificial Sequence
  Description of Artificial Sequence: Synthetic oligonucleotide
  Antisense strand to SEQ ID NO: 2295516
ucugcuaccuaacagucga

SEQ ID NO: 2295518 - RNA, 19 nt, Artificial Sequence
  Description of Artificial Sequence: Synthetic oligonucleotide
  Sense strand starting at position 2538 of SEQ ID NO: 1884834
agaacuaaguuugugggaa

SEQ ID NO: 2295519 - RNA, 19 nt, Artificial Sequence
  Description of Artificial Sequence: Synthetic oligonucleotide
  Antisense strand to SEQ ID NO: 2295518
uucccacaaacuuaguucu

SEQ ID NO: 2295520 - RNA, 19 nt, Artificial Sequence
  Description of Artificial Sequence: Synthetic oligonucleotide
  Sense strand starting at position 2583 of SEQ ID NO: 1884834
agaccaagcucugucucaa

SEQ ID NO: 2295521 - RNA, 19 nt, Artificial Sequence
  Description of Artificial Sequence: Synthetic oligonucleotide
  Antisense strand to SEQ ID NO: 2295520
uugagacagagcuuggucu

SEQ ID NO: 2295522 - RNA, 19 nt, Artificial Sequence
  Description of Artificial Sequence: Synthetic oligonucleotide
  Sense strand starting at position 3032 of SEQ ID NO: 1884834
cacuuacaguguuuaugua

SEQ ID NO: 2295523 - RNA, 19 nt, Artificial Sequence
  Description of Artificial Sequence: Synthetic oligonucleotide
  Antisense strand to SEQ ID NO: 2295522
uacauaaacacuguaagug

SEQ ID NO: 2295524 - RNA, 19 nt, Artificial Sequence
  Description of Artificial Sequence: Synthetic oligonucleotide
  Sense strand starting at position 3046 of SEQ ID NO: 1884834
auguauuuguguccuuguu

SEQ ID NO: 2295525 - RNA, 19 nt, Artificial Sequence
  Description of Artificial Sequence: Synthetic oligonucleotide
  Antisense strand to SEQ ID NO: 2295524
aacaaggacacaaauacau

SEQ ID NO: 2295526 - RNA, 19 nt, Artificial Sequence
  Description of Artificial Sequence: Synthetic oligonucleotide
  Sense strand starting at position 3048 of SEQ ID NO: 1884834
guauuuguguccuuguuug

SEQ ID NO: 2295527 - RNA, 19 nt, Artificial Sequence
  Description of Artificial Sequence: Synthetic oligonucleotide
  Antisense strand to SEQ ID NO: 2295526
caaacaaggacacaaauac

SEQ ID NO: 2295528 - RNA, 19 nt, Artificial Sequence
  Description of Artificial Sequence: Synthetic oligonucleotide
  Sense strand starting at position 3064 of SEQ ID NO: 1884834
uugacagcucccugaacua

SEQ ID NO: 2295529 - RNA, 19 nt, Artificial Sequence
  Description of Artificial Sequence: Synthetic oligonucleotide
  Antisense strand to SEQ ID NO: 2295528
uaguucagggagcugucaa

SEQ ID NO: 2295530 - RNA, 19 nt, Artificial Sequence
  Description of Artificial Sequence: Synthetic oligonucleotide
  Sense strand starting at position 3166 of SEQ ID NO: 1884834
aguaaacauguuugaauag

SEQ ID NO: 2295531 - RNA, 19 nt, Artificial Sequence
  Description of Artificial Sequence: Synthetic oligonucleotide
  Antisense strand to SEQ ID NO: 2295530
cuauucaaacauguuuacu

SEQ ID NO: 2295532 - RNA, 19 nt, Artificial Sequence
  Description of Artificial Sequence: Synthetic oligonucleotide
  Sense strand starting at position 3191 of SEQ ID NO: 1884834
acuugaaacuaagaaggau

SEQ ID NO: 2295533 - RNA, 19 nt, Artificial Sequence
  Description of Artificial Sequence: Synthetic oligonucleotide
  Antisense strand to SEQ ID NO: 2295532
auccuucuuaguuucaagu

SEQ ID NO: 2295534 - RNA, 19 nt, Artificial Sequence
  Description of Artificial Sequence: Synthetic oligonucleotide
  Sense strand starting at position 3305 of SEQ ID NO: 1884834
guggguucccuggauauag

SEQ ID NO: 2295535 - RNA, 19 nt, Artificial Sequence
  Description of Artificial Sequence: Synthetic oligonucleotide
  Antisense strand to SEQ ID NO: 2295534
cuauauccagggaacccac

SEQ ID NO: 2295536 - RNA, 19 nt, Artificial Sequence
  Description of Artificial Sequence: Synthetic oligonucleotide
  Sense strand starting at position 3351 of SEQ ID NO: 1884834
uagugaauguuaccuugga

SEQ ID NO: 2295537 - RNA, 19 nt, Artificial Sequence
  Description of Artificial Sequence: Synthetic oligonucleotide
  Antisense strand to SEQ ID NO: 2295536
uccaagguaacauucacua

SEQ ID NO: 2295538 - RNA, 19 nt, Artificial Sequence
  Description of Artificial Sequence: Synthetic oligonucleotide
  Sense strand starting at position 3352 of SEQ ID NO: 1884834
agugaauguuaccuuggau

SEQ ID NO: 2295539 - RNA, 19 nt, Artificial Sequence
  Description of Artificial Sequence: Synthetic oligonucleotide
  Antisense strand to SEQ ID NO: 2295538
auccaagguaacauucacu

SEQ ID NO: 2295540 - RNA, 19 nt, Artificial Sequence
  Description of Artificial Sequence: Synthetic oligonucleotide
  Sense strand starting at position 3355 of SEQ ID NO: 1884834
gaauguuaccuuggauaug

SEQ ID NO: 2295541 - RNA, 19 nt, Artificial Sequence
  Description of Artificial Sequence: Synthetic oligonucleotide
  Antisense strand to SEQ ID NO: 2295540
cauauccaagguaacauuc

SEQ ID NO: 2295542 - RNA, 19 nt, Artificial Sequence
  Description of Artificial Sequence: Synthetic oligonucleotide
  Sense strand starting at position 3479 of SEQ ID NO: 1884834
ugcuuuaugggucacagag

SEQ ID NO: 2295543 - RNA, 19 nt, Artificial Sequence
  Description of Artificial Sequence: Synthetic oligonucleotide
  Antisense strand to SEQ ID NO: 2295542
cucugugacccauaaagca

SEQ ID NO: 2295544 - RNA, 19 nt, Artificial Sequence
  Description of Artificial Sequence: Synthetic oligonucleotide
  Sense strand starting at position 3499 of SEQ ID NO: 1884834
uuuauauuagcacagguua

SEQ ID NO: 2295545 - RNA, 19 nt, Artificial Sequence
  Description of Artificial Sequence: Synthetic oligonucleotide
  Antisense strand to SEQ ID NO: 2295544
uaaccugugcuaauauaaa

SEQ ID NO: 2295546 - RNA, 19 nt, Artificial Sequence
  Description of Artificial Sequence: Synthetic oligonucleotide
  Sense strand starting at position 3504 of SEQ ID NO: 1884834
auuagcacagguuauuaau

SEQ ID NO: 2295547 - RNA, 19 nt, Artificial Sequence
  Description of Artificial Sequence: Synthetic oligonucleotide
  Antisense strand to SEQ ID NO: 2295546
auuaauaaccugugcuaau

SEQ ID NO: 2295548 - RNA, 19 nt, Artificial Sequence
  Description of Artificial Sequence: Synthetic oligonucleotide
  Sense strand starting at position 3514 of SEQ ID NO: 1884834
guuauuaaugacuguacca

SEQ ID NO: 2295549 - RNA, 19 nt, Artificial Sequence
  Description of Artificial Sequence: Synthetic oligonucleotide
  Antisense strand to SEQ ID NO: 2295548
ugguacagucauuaauaac

SEQ ID NO: 2295550 - RNA, 19 nt, Artificial Sequence
  Description of Artificial Sequence: Synthetic oligonucleotide
  Sense strand starting at position 3576 of SEQ ID NO: 1884834
uucacaaguguuggguaga

SEQ ID NO: 2295551 - RNA, 19 nt, Artificial Sequence
  Description of Artificial Sequence: Synthetic oligonucleotide
  Antisense strand to SEQ ID NO: 2295550
ucuacccaacacuugugaa

SEQ ID NO: 2295552 - RNA, 19 nt, Artificial Sequence
  Description of Artificial Sequence: Synthetic oligonucleotide
  Sense strand starting at position 3681 of SEQ ID NO: 1884834
ggcugauuacccgagguca

SEQ ID NO: 2295553 - RNA, 19 nt, Artificial Sequence
  Description of Artificial Sequence: Synthetic oligonucleotide
  Antisense strand to SEQ ID NO: 2295552
ugaccucggguaaucagcc

SEQ ID NO: 2295554 - RNA, 19 nt, Artificial Sequence
  Description of Artificial Sequence: Synthetic oligonucleotide
  Sense strand starting at position 372 of SEQ ID NO: 1884833
agguaacauuuagaugaaa

SEQ ID NO: 2295555 - RNA, 19 nt, Artificial Sequence
  Description of Artificial Sequence: Synthetic oligonucleotide
  Antisense strand to SEQ ID NO: 2295554
uuucaucuaaauguuaccu

SEQ ID NO: 2295556 - RNA, 19 nt, Artificial Sequence
  Description of Artificial Sequence: Synthetic oligonucleotide
  Sense strand starting at position 420 of SEQ ID NO: 1884833
gggaucaggaccuguucua

SEQ ID NO: 2295557 - RNA, 19 nt, Artificial Sequence
  Description of Artificial Sequence: Synthetic oligonucleotide
  Antisense strand to SEQ ID NO: 2295556
uagaacagguccugauccc

SEQ ID NO: 2295558 - RNA, 19 nt, Artificial Sequence
  Description of Artificial Sequence: Synthetic oligonucleotide
  Sense strand starting at position 427 of SEQ ID NO: 1884833
ggaccuguucuagguacuu

SEQ ID NO: 2295559 - RNA, 19 nt, Artificial Sequence
  Description of Artificial Sequence: Synthetic oligonucleotide
  Antisense strand to SEQ ID NO: 2295558
aaguaccuagaacaggucc

SEQ ID NO: 2295560 - RNA, 19 nt, Artificial Sequence
  Description of Artificial Sequence: Synthetic oligonucleotide
  Sense strand starting at position 479 of SEQ ID NO: 1884833
ugugauaaauagguagguu

SEQ ID NO: 2295561 - RNA, 19 nt, Artificial Sequence
  Description of Artificial Sequence: Synthetic oligonucleotide
  Antisense strand to SEQ ID NO: 2295560
aaccuaccuauuuaucaca

SEQ ID NO: 2295562 - RNA, 19 nt, Artificial Sequence
  Description of Artificial Sequence: Synthetic oligonucleotide
  Sense strand starting at position 577 of SEQ ID NO: 1884833
ggauuugaaucaggcaauc

SEQ ID NO: 2295563 - RNA, 19 nt, Artificial Sequence
  Description of Artificial Sequence: Synthetic oligonucleotide
  Antisense strand to SEQ ID NO: 2295562
gauugccugauucaaaucc

SEQ ID NO: 2295564 - RNA, 19 nt, Artificial Sequence
  Description of Artificial Sequence: Synthetic oligonucleotide
  Sense strand starting at position 681 of SEQ ID NO: 1884833
aaguauuauguagggcuau

SEQ ID NO: 2295565 - RNA, 19 nt, Artificial Sequence
  Description of Artificial Sequence: Synthetic oligonucleotide
  Antisense strand to SEQ ID NO: 2295564
auagcccuacauaauacuu

SEQ ID NO: 2295566 - RNA, 19 nt, Artificial Sequence
  Description of Artificial Sequence: Synthetic oligonucleotide
  Sense strand starting at position 694 of SEQ ID NO: 1884833
ggcuauugccacuacaaca

SEQ ID NO: 2295567 - RNA, 19 nt, Artificial Sequence
  Description of Artificial Sequence: Synthetic oligonucleotide
  Antisense strand to SEQ ID NO: 2295566
uguuguaguggcaauagcc

SEQ ID NO: 2295568 - RNA, 19 nt, Artificial Sequence
  Description of Artificial Sequence: Synthetic oligonucleotide
  Sense strand starting at position 761 of SEQ ID NO: 1884833
ggguaagucaacugauaca

SEQ ID NO: 2295569 - RNA, 19 nt, Artificial Sequence
  Description of Artificial Sequence: Synthetic oligonucleotide
  Antisense strand to SEQ ID NO: 2295568
uguaucaguugacuuaccc

SEQ ID NO: 2295570 - RNA, 19 nt, Artificial Sequence
  Description of Artificial Sequence: Synthetic oligonucleotide
  Sense strand starting at position 845 of SEQ ID NO: 1884833
ccaggugugugguuaagaa

SEQ ID NO: 2295571 - RNA, 19 nt, Artificial Sequence
  Description of Artificial Sequence: Synthetic oligonucleotide
  Antisense strand to SEQ ID NO: 2295570
uucuuaaccacacaccugg

SEQ ID NO: 2295572 - RNA, 19 nt, Artificial Sequence
  Description of Artificial Sequence: Synthetic oligonucleotide
  Sense strand starting at position 867 of SEQ ID NO: 1884833
acgagaacauaccuauauu

SEQ ID NO: 2295573 - RNA, 19 nt, Artificial Sequence
  Description of Artificial Sequence: Synthetic oligonucleotide
  Antisense strand to SEQ ID NO: 2295572
aauauagguauguucucgu

SEQ ID NO: 2295574 - RNA, 19 nt, Artificial Sequence
  Description of Artificial Sequence: Synthetic oligonucleotide
  Sense strand starting at position 908 of SEQ ID NO: 1884833
auaaguuguuucucauaac

SEQ ID NO: 2295575 - RNA, 19 nt, Artificial Sequence
  Description of Artificial Sequence: Synthetic oligonucleotide
  Antisense strand to SEQ ID NO: 2295574
guuaugagaaacaacuuau

SEQ ID NO: 2295576 - RNA, 19 nt, Artificial Sequence
  Description of Artificial Sequence: Synthetic oligonucleotide
  Sense strand starting at position 951 of SEQ ID NO: 1884833
agugcuaauuuauaggaau

SEQ ID NO: 2295577 - RNA, 19 nt, Artificial Sequence
  Description of Artificial Sequence: Synthetic oligonucleotide
  Antisense strand to SEQ ID NO: 2295576
auuccuauaaauuagcacu

SEQ ID NO: 2295578 - RNA, 19 nt, Artificial Sequence
  Description of Artificial Sequence: Synthetic oligonucleotide
  Sense strand starting at position 954 of SEQ ID NO: 1884833
gcuaauuuauaggaauuag

SEQ ID NO: 2295579 - RNA, 19 nt, Artificial Sequence
  Description of Artificial Sequence: Synthetic oligonucleotide
  Antisense strand to SEQ ID NO: 2295578
cuaauuccuauaaauuagc

SEQ ID NO: 2295580 - RNA, 19 nt, Artificial Sequence
  Description of Artificial Sequence: Synthetic oligonucleotide
  Sense strand starting at position 981 of SEQ ID NO: 1884833
gcaggcauuuaugaaauau

SEQ ID NO: 2295581 - RNA, 19 nt, Artificial Sequence
  Description of Artificial Sequence: Synthetic oligonucleotide
  Antisense strand to SEQ ID NO: 2295580
auauuucauaaaugccugc

SEQ ID NO: 2295582 - RNA, 19 nt, Artificial Sequence
  Description of Artificial Sequence: Synthetic oligonucleotide
  Sense strand starting at position 1284 of SEQ ID NO: 1884833
gagacuaucugggaaucag

SEQ ID NO: 2295583 - RNA, 19 nt, Artificial Sequence
  Description of Artificial Sequence: Synthetic oligonucleotide
  Antisense strand to SEQ ID NO: 2295582
cugauucccagauagucuc

SEQ ID NO: 2295584 - RNA, 19 nt, Artificial Sequence
  Description of Artificial Sequence: Synthetic oligonucleotide
  Sense strand starting at position 1296 of SEQ ID NO: 1884833
gaaucaguccuagaagcuc

SEQ ID NO: 2295585 - RNA, 19 nt, Artificial Sequence
  Description of Artificial Sequence: Synthetic oligonucleotide
  Antisense strand to SEQ ID NO: 2295584
gagcuucuaggacugauuc

SEQ ID NO: 2295586 - RNA, 19 nt, Artificial Sequence
  Description of Artificial Sequence: Synthetic oligonucleotide
  Sense strand starting at position 1344 of SEQ ID NO: 1884833
aggagucucggagauugua

SEQ ID NO: 2295587 - RNA, 19 nt, Artificial Sequence
  Description of Artificial Sequence: Synthetic oligonucleotide
  Antisense strand to SEQ ID NO: 2295586
uacaaucuccgagacuccu

SEQ ID NO: 2295588 - RNA, 19 nt, Artificial Sequence
  Description of Artificial Sequence: Synthetic oligonucleotide
  Sense strand starting at position 1418 of SEQ ID NO: 1884833
aggcaaucagacugugaaa

SEQ ID NO: 2295589 - RNA, 19 nt, Artificial Sequence
  Description of Artificial Sequence: Synthetic oligonucleotide
  Antisense strand to SEQ ID NO: 2295588
uuucacagucugauugccu

SEQ ID NO: 2295590 - RNA, 19 nt, Artificial Sequence
  Description of Artificial Sequence: Synthetic oligonucleotide
  Sense strand starting at position 1420 of SEQ ID NO: 1884833
gcaaucagacugugaaaca

SEQ ID NO: 2295591 - RNA, 19 nt, Artificial Sequence
  Description of Artificial Sequence: Synthetic oligonucleotide
  Antisense strand to SEQ ID NO: 2295590
uguuucacagucugauugc

SEQ ID NO: 2295592 - RNA, 19 nt, Artificial Sequence
  Description of Artificial Sequence: Synthetic oligonucleotide
  Sense strand starting at position 1473 of SEQ ID NO: 1884833
aggguaugccucuggagag

SEQ ID NO: 2295593 - RNA, 19 nt, Artificial Sequence
  Description of Artificial Sequence: Synthetic oligonucleotide
  Antisense strand to SEQ ID NO: 2295592
cucuccagaggcauacccu

SEQ ID NO: 2295594 - RNA, 19 nt, Artificial Sequence
  Description of Artificial Sequence: Synthetic oligonucleotide
  Sense strand starting at position 2321 of SEQ ID NO: 1884833
gucggagccucgacuguua

SEQ ID NO: 2295595 - RNA, 19 nt, Artificial Sequence
  Description of Artificial Sequence: Synthetic oligonucleotide
  Antisense strand to SEQ ID NO: 2295594
uaacagucgaggcuccgac

SEQ ID NO: 2295596 - RNA, 19 nt, Artificial Sequence
  Description of Artificial Sequence: Synthetic oligonucleotide
  Sense strand starting at position 2330 of SEQ ID NO: 1884833
ucgacuguuagguagcaga

SEQ ID NO: 2295597 - RNA, 19 nt, Artificial Sequence
  Description of Artificial Sequence: Synthetic oligonucleotide
  Antisense strand to SEQ ID NO: 2295596
ucugcuaccuaacagucga

SEQ ID NO: 2295598 - RNA, 19 nt, Artificial Sequence
  Description of Artificial Sequence: Synthetic oligonucleotide
  Sense strand starting at position 2520 of SEQ ID NO: 1884833
agaacuaaguuugugggaa

SEQ ID NO: 2295599 - RNA, 19 nt, Artificial Sequence
  Description of Artificial Sequence: Synthetic oligonucleotide
  Antisense strand to SEQ ID NO: 2295598
uucccacaaacuuaguucu

SEQ ID NO: 2295600 - RNA, 19 nt, Artificial Sequence
  Description of Artificial Sequence: Synthetic oligonucleotide
  Sense strand starting at position 2565 of SEQ ID NO: 1884833
agaccaagcucugucucaa

SEQ ID NO: 2295601 - RNA, 19 nt, Artificial Sequence
  Description of Artificial Sequence: Synthetic oligonucleotide
  Antisense strand to SEQ ID NO: 2295600
uugagacagagcuuggucu

SEQ ID NO: 2295602 - RNA, 19 nt, Artificial Sequence
  Description of Artificial Sequence: Synthetic oligonucleotide
  Sense strand starting at position 3014 of SEQ ID NO: 1884833
cacuuacaguguuuaugua

SEQ ID NO: 2295603 - RNA, 19 nt, Artificial Sequence
  Description of Artificial Sequence: Synthetic oligonucleotide
  Antisense strand to SEQ ID NO: 2295602
uacauaaacacuguaagug

SEQ ID NO: 2295604 - RNA, 19 nt, Artificial Sequence
  Description of Artificial Sequence: Synthetic oligonucleotide
  Sense strand starting at position 3028 of SEQ ID NO: 1884833
auguauuuguguccuuguu

SEQ ID NO: 2295605 - RNA, 19 nt, Artificial Sequence
  Description of Artificial Sequence: Synthetic oligonucleotide
  Antisense strand to SEQ ID NO: 2295604
aacaaggacacaaauacau

SEQ ID NO: 2295606 - RNA, 19 nt, Artificial Sequence
  Description of Artificial Sequence: Synthetic oligonucleotide
  Sense strand starting at position 3030 of SEQ ID NO: 1884833
guauuuguguccuuguuug

SEQ ID NO: 2295607 - RNA, 19 nt, Artificial Sequence
  Description of Artificial Sequence: Synthetic oligonucleotide
  Antisense strand to SEQ ID NO: 2295606
caaacaaggacacaaauac

SEQ ID NO: 2295608 - RNA, 19 nt, Artificial Sequence
  Description of Artificial Sequence: Synthetic oligonucleotide
  Sense strand starting at position 3046 of SEQ ID NO: 1884833
uugacagcucccugaacua

SEQ ID NO: 2295609 - RNA, 19 nt, Artificial Sequence
  Description of Artificial Sequence: Synthetic oligonucleotide
  Antisense strand to SEQ ID NO: 2295608
uaguucagggagcugucaa

SEQ ID NO: 2295610 - RNA, 19 nt, Artificial Sequence
  Description of Artificial Sequence: Synthetic oligonucleotide
  Sense strand starting at position 3148 of SEQ ID NO: 1884833
aguaaacauguuugaauag

SEQ ID NO: 2295611 - RNA, 19 nt, Artificial Sequence
  Description of Artificial Sequence: Synthetic oligonucleotide
  Antisense strand to SEQ ID NO: 2295610
cuauucaaacauguuuacu

SEQ ID NO: 2295612 - RNA, 19 nt, Artificial Sequence
  Description of Artificial Sequence: Synthetic oligonucleotide
  Sense strand starting at position 3173 of SEQ ID NO: 1884833
acuugaaacuaagaaggau

SEQ ID NO: 2295613 - RNA, 19 nt, Artificial Sequence
  Description of Artificial Sequence: Synthetic oligonucleotide
  Antisense strand to SEQ ID NO: 2295612
auccuucuuaguuucaagu

SEQ ID NO: 2295614 - RNA, 19 nt, Artificial Sequence
  Description of Artificial Sequence: Synthetic oligonucleotide
  Sense strand starting at position 3287 of SEQ ID NO: 1884833
guggguucccuggauauag

SEQ ID NO: 2295615 - RNA, 19 nt, Artificial Sequence
  Description of Artificial Sequence: Synthetic oligonucleotide
  Antisense strand to SEQ ID NO: 2295614
cuauauccagggaacccac

SEQ ID NO: 2295616 - RNA, 19 nt, Artificial Sequence
  Description of Artificial Sequence: Synthetic oligonucleotide
  Sense strand starting at position 3333 of SEQ ID NO: 1884833
uagugaauguuaccuugga

SEQ ID NO: 2295617 - RNA, 19 nt, Artificial Sequence
  Description of Artificial Sequence: Synthetic oligonucleotide
  Antisense strand to SEQ ID NO: 2295616
uccaagguaacauucacua

SEQ ID NO: 2295618 - RNA, 19 nt, Artificial Sequence
  Description of Artificial Sequence: Synthetic oligonucleotide
  Sense strand starting at position 3334 of SEQ ID NO: 1884833
agugaauguuaccuuggau

SEQ ID NO: 2295619 - RNA, 19 nt, Artificial Sequence
  Description of Artificial Sequence: Synthetic oligonucleotide
  Antisense strand to SEQ ID NO: 2295618
auccaagguaacauucacu

SEQ ID NO: 2295620 - RNA, 19 nt, Artificial Sequence
  Description of Artificial Sequence: Synthetic oligonucleotide
  Sense strand starting at position 3337 of SEQ ID NO: 1884833
gaauguuaccuuggauaug

SEQ ID NO: 2295621 - RNA, 19 nt, Artificial Sequence
  Description of Artificial Sequence: Synthetic oligonucleotide
  Antisense strand to SEQ ID NO: 2295620
cauauccaagguaacauuc

SEQ ID NO: 2295622 - RNA, 19 nt, Artificial Sequence
  Description of Artificial Sequence: Synthetic oligonucleotide
  Sense strand starting at position 3461 of SEQ ID NO: 1884833
ugcuuuaugggucacagag

SEQ ID NO: 2295623 - RNA, 19 nt, Artificial Sequence
  Description of Artificial Sequence: Synthetic oligonucleotide
  Antisense strand to SEQ ID NO: 2295622
cucugugacccauaaagca

SEQ ID NO: 2295624 - RNA, 19 nt, Artificial Sequence
  Description of Artificial Sequence: Synthetic oligonucleotide
  Sense strand starting at position 3481 of SEQ ID NO: 1884833
uuuauauuagcacagguua

SEQ ID NO: 2295625 - RNA, 19 nt, Artificial Sequence
  Description of Artificial Sequence: Synthetic oligonucleotide
  Antisense strand to SEQ ID NO: 2295624
uaaccugugcuaauauaaa

SEQ ID NO: 2295626 - RNA, 19 nt, Artificial Sequence
  Description of Artificial Sequence: Synthetic oligonucleotide
  Sense strand starting at position 3486 of SEQ ID NO: 1884833
auuagcacagguuauuaau

SEQ ID NO: 2295627 - RNA, 19 nt, Artificial Sequence
  Description of Artificial Sequence: Synthetic oligonucleotide
  Antisense strand to SEQ ID NO: 2295626
auuaauaaccugugcuaau

SEQ ID NO: 2295628 - RNA, 19 nt, Artificial Sequence
  Description of Artificial Sequence: Synthetic oligonucleotide
  Sense strand starting at position 3496 of SEQ ID NO: 1884833
guuauuaaugacuguacca

SEQ ID NO: 2295629 - RNA, 19 nt, Artificial Sequence
  Description of Artificial Sequence: Synthetic oligonucleotide
  Antisense strand to SEQ ID NO: 2295628
ugguacagucauuaauaac

SEQ ID NO: 2295630 - RNA, 19 nt, Artificial Sequence
  Description of Artificial Sequence: Synthetic oligonucleotide
  Sense strand starting at position 3558 of SEQ ID NO: 1884833
uucacaaguguuggguaga

SEQ ID NO: 2295631 - RNA, 19 nt, Artificial Sequence
  Description of Artificial Sequence: Synthetic oligonucleotide
  Antisense strand to SEQ ID NO: 2295630
ucuacccaacacuugugaa

SEQ ID NO: 2295632 - RNA, 19 nt, Artificial Sequence
  Description of Artificial Sequence: Synthetic oligonucleotide
  Sense strand starting at position 3663 of SEQ ID NO: 1884833
ggcugauuacccgagguca

SEQ ID NO: 2295633 - RNA, 19 nt, Artificial Sequence
  Description of Artificial Sequence: Synthetic oligonucleotide
  Antisense strand to SEQ ID NO: 2295632
ugaccucggguaaucagcc

SEQ ID NO: 2295634 - RNA, 19 nt, Artificial Sequence
  Description of Artificial Sequence: Synthetic oligonucleotide
  Sense strand starting at position 57 of SEQ ID NO: 1884835
gcuuuaugguagaggagga

SEQ ID NO: 2295635 - RNA, 19 nt, Artificial Sequence
  Description of Artificial Sequence: Synthetic oligonucleotide
  Antisense strand to SEQ ID NO: 2295634
uccuccucuaccauaaagc

SEQ ID NO: 2295636 - RNA, 19 nt, Artificial Sequence
  Description of Artificial Sequence: Synthetic oligonucleotide
  Sense strand starting at position 108 of SEQ ID NO: 1884835
gcagaaugguaccuuucuu

SEQ ID NO: 2295637 - RNA, 19 nt, Artificial Sequence
  Description of Artificial Sequence: Synthetic oligonucleotide
  Antisense strand to SEQ ID NO: 2295636
aagaaagguaccauucugc

SEQ ID NO: 2295638 - RNA, 19 nt, Artificial Sequence
  Description of Artificial Sequence: Synthetic oligonucleotide
  Sense strand starting at position 114 of SEQ ID NO: 1884835
ugguaccuuucuuuaaaga

SEQ ID NO: 2295639 - RNA, 19 nt, Artificial Sequence
  Description of Artificial Sequence: Synthetic oligonucleotide
  Antisense strand to SEQ ID NO: 2295638
ucuuuaaagaaagguacca

SEQ ID NO: 2295640 - RNA, 19 nt, Artificial Sequence
  Description of Artificial Sequence: Synthetic oligonucleotide
  Sense strand starting at position 115 of SEQ ID NO: 1884835
gguaccuuucuuuaaagac

SEQ ID NO: 2295641 - RNA, 19 nt, Artificial Sequence
  Description of Artificial Sequence: Synthetic oligonucleotide
  Antisense strand to SEQ ID NO: 2295640
gucuuuaaagaaagguacc

SEQ ID NO: 2295642 - RNA, 19 nt, Artificial Sequence
  Description of Artificial Sequence: Synthetic oligonucleotide
  Sense strand starting at position 355 of SEQ ID NO: 1884835
cugcaaugucuugaucuaa

SEQ ID NO: 2295643 - RNA, 19 nt, Artificial Sequence
  Description of Artificial Sequence: Synthetic oligonucleotide
  Antisense strand to SEQ ID NO: 2295642
uuagaucaagacauugcag

SEQ ID NO: 2295644 - RNA, 19 nt, Artificial Sequence
  Description of Artificial Sequence: Synthetic oligonucleotide
  Sense strand starting at position 434 of SEQ ID NO: 1884835
gccucucugcuggaaggaa

SEQ ID NO: 2295645 - RNA, 19 nt, Artificial Sequence
  Description of Artificial Sequence: Synthetic oligonucleotide
  Antisense strand to SEQ ID NO: 2295644
uuccuuccagcagagaggc

SEQ ID NO: 2295646 - RNA, 19 nt, Artificial Sequence
  Description of Artificial Sequence: Synthetic oligonucleotide
  Sense strand starting at position 492 of SEQ ID NO: 1884835
ucgccuuggucuccgagaa

SEQ ID NO: 2295647 - RNA, 19 nt, Artificial Sequence
  Description of Artificial Sequence: Synthetic oligonucleotide
  Antisense strand to SEQ ID NO: 2295646
uucucggagaccaaggcga

SEQ ID NO: 2295648 - RNA, 19 nt, Artificial Sequence
  Description of Artificial Sequence: Synthetic oligonucleotide
  Sense strand starting at position 493 of SEQ ID NO: 1884835
cgccuuggucuccgagaau

SEQ ID NO: 2295649 - RNA, 19 nt, Artificial Sequence
  Description of Artificial Sequence: Synthetic oligonucleotide
  Antisense strand to SEQ ID NO: 2295648
auucucggagaccaaggcg

SEQ ID NO: 2295650 - RNA, 19 nt, Artificial Sequence
  Description of Artificial Sequence: Synthetic oligonucleotide
  Sense strand starting at position 1135 of SEQ ID NO: 1884835
caggcucugggucacaaau

SEQ ID NO: 2295651 - RNA, 19 nt, Artificial Sequence
  Description of Artificial Sequence: Synthetic oligonucleotide
  Antisense strand to SEQ ID NO: 2295650
auuugugacccagagccug

SEQ ID NO: 2295652 - RNA, 19 nt, Artificial Sequence
  Description of Artificial Sequence: Synthetic oligonucleotide
  Sense strand starting at position 1183 of SEQ ID NO: 1884835
gcaggaauucgcccugcga

SEQ ID NO: 2295653 - RNA, 19 nt, Artificial Sequence
  Description of Artificial Sequence: Synthetic oligonucleotide
  Antisense strand to SEQ ID NO: 2295652
ucgcagggcgaauuccugc

SEQ ID NO: 2295654 - RNA, 19 nt, Artificial Sequence
  Description of Artificial Sequence: Synthetic oligonucleotide
  Sense strand starting at position 1185 of SEQ ID NO: 1884835
aggaauucgcccugcgaug

SEQ ID NO: 2295655 - RNA, 19 nt, Artificial Sequence
  Description of Artificial Sequence: Synthetic oligonucleotide
  Antisense strand to SEQ ID NO: 2295654
caucgcagggcgaauuccu

SEQ ID NO: 2295656 - RNA, 19 nt, Artificial Sequence
  Description of Artificial Sequence: Synthetic oligonucleotide
  Sense strand starting at position 1186 of SEQ ID NO: 1884835
ggaauucgcccugcgaugu

SEQ ID NO: 2295657 - RNA, 19 nt, Artificial Sequence
  Description of Artificial Sequence: Synthetic oligonucleotide
  Antisense strand to SEQ ID NO: 2295656
acaucgcagggcgaauucc

SEQ ID NO: 2295658 - RNA, 19 nt, Artificial Sequence
  Description of Artificial Sequence: Synthetic oligonucleotide
  Sense strand starting at position 1346 of SEQ ID NO: 1884835
ccaggaugcccuugacaaa

SEQ ID NO: 2295659 - RNA, 19 nt, Artificial Sequence
  Description of Artificial Sequence: Synthetic oligonucleotide
  Antisense strand to SEQ ID NO: 2295658
uuugucaagggcauccugg

SEQ ID NO: 2295660 - RNA, 19 nt, Artificial Sequence
  Description of Artificial Sequence: Synthetic oligonucleotide
  Sense strand starting at position 2440 of SEQ ID NO: 1884835
agaaauaguuacguuauca

SEQ ID NO: 2295661 - RNA, 19 nt, Artificial Sequence
  Description of Artificial Sequence: Synthetic oligonucleotide
  Antisense strand to SEQ ID NO: 2295660
ugauaacguaacuauuucu

SEQ ID NO: 2295662 - RNA, 19 nt, Artificial Sequence
  Description of Artificial Sequence: Synthetic oligonucleotide
  Sense strand starting at position 2482 of SEQ ID NO: 1884835
gcgaaugauagguggccuu

SEQ ID NO: 2295663 - RNA, 19 nt, Artificial Sequence
  Description of Artificial Sequence: Synthetic oligonucleotide
  Antisense strand to SEQ ID NO: 2295662
aaggccaccuaucauucgc

SEQ ID NO: 2295664 - RNA, 19 nt, Artificial Sequence
  Description of Artificial Sequence: Synthetic oligonucleotide
  Sense strand starting at position 2548 of SEQ ID NO: 1884835
aucaaagcucuaggcuaau

SEQ ID NO: 2295665 - RNA, 19 nt, Artificial Sequence
  Description of Artificial Sequence: Synthetic oligonucleotide
  Antisense strand to SEQ ID NO: 2295664
auuagccuagagcuuugau

SEQ ID NO: 2295666 - RNA, 19 nt, Artificial Sequence
  Description of Artificial Sequence: Synthetic oligonucleotide
  Sense strand starting at position 2554 of SEQ ID NO: 1884835
gcucuaggcuaaucgcuaa

SEQ ID NO: 2295667 - RNA, 19 nt, Artificial Sequence
  Description of Artificial Sequence: Synthetic oligonucleotide
  Antisense strand to SEQ ID NO: 2295666
uuagcgauuagccuagagc

SEQ ID NO: 2295668 - RNA, 19 nt, Artificial Sequence
  Description of Artificial Sequence: Synthetic oligonucleotide
  Sense strand starting at position 2557 of SEQ ID NO: 1884835
cuaggcuaaucgcuaaaca

SEQ ID NO: 2295669 - RNA, 19 nt, Artificial Sequence
  Description of Artificial Sequence: Synthetic oligonucleotide
  Antisense strand to SEQ ID NO: 2295668
uguuuagcgauuagccuag

SEQ ID NO: 2295670 - RNA, 19 nt, Artificial Sequence
  Description of Artificial Sequence: Synthetic oligonucleotide
  Sense strand starting at position 2637 of SEQ ID NO: 1884835
cgaagugacucauuuguuu

SEQ ID NO: 2295671 - RNA, 19 nt, Artificial Sequence
  Description of Artificial Sequence: Synthetic oligonucleotide
  Antisense strand to SEQ ID NO: 2295670
aaacaaaugagucacuucg

SEQ ID NO: 2295672 - RNA, 19 nt, Artificial Sequence
  Description of Artificial Sequence: Synthetic oligonucleotide
  Sense strand starting at position 2662 of SEQ ID NO: 1884835
agugguuuagaauacccua

SEQ ID NO: 2295673 - RNA, 19 nt, Artificial Sequence
  Description of Artificial Sequence: Synthetic oligonucleotide
  Antisense strand to SEQ ID NO: 2295672
uaggguauucuaaaccacu

SEQ ID NO: 2295674 - RNA, 19 nt, Artificial Sequence
  Description of Artificial Sequence: Synthetic oligonucleotide
  Sense strand starting at position 2665 of SEQ ID NO: 1884835
gguuuagaauacccuagaa

SEQ ID NO: 2295675 - RNA, 19 nt, Artificial Sequence
  Description of Artificial Sequence: Synthetic oligonucleotide
  Antisense strand to SEQ ID NO: 2295674
uucuaggguauucuaaacc

SEQ ID NO: 2295676 - RNA, 19 nt, Artificial Sequence
  Description of Artificial Sequence: Synthetic oligonucleotide
  Sense strand starting at position 2691 of SEQ ID NO: 1884835
uuaguaaaucgaugccaga

SEQ ID NO: 2295677 - RNA, 19 nt, Artificial Sequence
  Description of Artificial Sequence: Synthetic oligonucleotide
  Antisense strand to SEQ ID NO: 2295676
ucuggcaucgauuuacuaa

SEQ ID NO: 2295678 - RNA, 19 nt, Artificial Sequence
  Description of Artificial Sequence: Synthetic oligonucleotide
  Sense strand starting at position 2713 of SEQ ID NO: 1884835
acagauggcuguuugcuaa

SEQ ID NO: 2295679 - RNA, 19 nt, Artificial Sequence
  Description of Artificial Sequence: Synthetic oligonucleotide
  Antisense strand to SEQ ID NO: 2295678
uuagcaaacagccaucugu

SEQ ID NO: 2295680 - RNA, 19 nt, Artificial Sequence
  Description of Artificial Sequence: Synthetic oligonucleotide
  Sense strand starting at position 2716 of SEQ ID NO: 1884835
gauggcuguuugcuaacuu

SEQ ID NO: 2295681 - RNA, 19 nt, Artificial Sequence
  Description of Artificial Sequence: Synthetic oligonucleotide
  Antisense strand to SEQ ID NO: 2295680
aaguuagcaaacagccauc

SEQ ID NO: 2295682 - RNA, 19 nt, Artificial Sequence
  Description of Artificial Sequence: Synthetic oligonucleotide
  Sense strand starting at position 2726 of SEQ ID NO: 1884835
ugcuaacuuccagggacuu

SEQ ID NO: 2295683 - RNA, 19 nt, Artificial Sequence
  Description of Artificial Sequence: Synthetic oligonucleotide
  Antisense strand to SEQ ID NO: 2295682
aagucccuggaaguuagca

SEQ ID NO: 2295684 - RNA, 19 nt, Artificial Sequence
  Description of Artificial Sequence: Synthetic oligonucleotide
  Sense strand starting at position 2727 of SEQ ID NO: 1884835
gcuaacuuccagggacuuu

SEQ ID NO: 2295685 - RNA, 19 nt, Artificial Sequence
  Description of Artificial Sequence: Synthetic oligonucleotide
  Antisense strand to SEQ ID NO: 2295684
aaagucccuggaaguuagc

SEQ ID NO: 2295686 - RNA, 19 nt, Artificial Sequence
  Description of Artificial Sequence: Synthetic oligonucleotide
  Sense strand starting at position 2788 of SEQ ID NO: 1884835
caccuaugugagugacacu

SEQ ID NO: 2295687 - RNA, 19 nt, Artificial Sequence
  Description of Artificial Sequence: Synthetic oligonucleotide
  Antisense strand to SEQ ID NO: 2295686
agugucacucacauaggug

SEQ ID NO: 2295688 - RNA, 19 nt, Artificial Sequence
  Description of Artificial Sequence: Synthetic oligonucleotide
  Sense strand starting at position 2871 of SEQ ID NO: 1884835
uauagugaaucugcaggaa

SEQ ID NO: 2295689 - RNA, 19 nt, Artificial Sequence
  Description of Artificial Sequence: Synthetic oligonucleotide
  Antisense strand to SEQ ID NO: 2295688
uuccugcagauucacuaua

SEQ ID NO: 2295690 - RNA, 19 nt, Artificial Sequence
  Description of Artificial Sequence: Synthetic oligonucleotide
  Sense strand starting at position 2907 of SEQ ID NO: 1884835
cagggcuuucuuggagaga

SEQ ID NO: 2295691 - RNA, 19 nt, Artificial Sequence
  Description of Artificial Sequence: Synthetic oligonucleotide
  Antisense strand to SEQ ID NO: 2295690
ucucuccaagaaagcccug

SEQ ID NO: 2295692 - RNA, 19 nt, Artificial Sequence
  Description of Artificial Sequence: Synthetic oligonucleotide
  Sense strand starting at position 2908 of SEQ ID NO: 1884835
agggcuuucuuggagagaa

SEQ ID NO: 2295693 - RNA, 19 nt, Artificial Sequence
  Description of Artificial Sequence: Synthetic oligonucleotide
  Antisense strand to SEQ ID NO: 2295692
uucucuccaagaaagcccu

SEQ ID NO: 2295694 - RNA, 19 nt, Artificial Sequence
  Description of Artificial Sequence: Synthetic oligonucleotide
  Sense strand starting at position 2920 of SEQ ID NO: 1884835
gagagaagcccucguugag

SEQ ID NO: 2295695 - RNA, 19 nt, Artificial Sequence
  Description of Artificial Sequence: Synthetic oligonucleotide
  Antisense strand to SEQ ID NO: 2295694
cucaacgagggcuucucuc

SEQ ID NO: 2295696 - RNA, 19 nt, Artificial Sequence
  Description of Artificial Sequence: Synthetic oligonucleotide
  Sense strand starting at position 2941 of SEQ ID NO: 1884835
acaaauagcccucgccaga

SEQ ID NO: 2295697 - RNA, 19 nt, Artificial Sequence
  Description of Artificial Sequence: Synthetic oligonucleotide
  Antisense strand to SEQ ID NO: 2295696
ucuggcgagggcuauuugu

SEQ ID NO: 2295698 - RNA, 19 nt, Artificial Sequence
  Description of Artificial Sequence: Synthetic oligonucleotide
  Sense strand starting at position 2971 of SEQ ID NO: 1884835
ugcugaaagaggugguauu

SEQ ID NO: 2295699 - RNA, 19 nt, Artificial Sequence
  Description of Artificial Sequence: Synthetic oligonucleotide
  Antisense strand to SEQ ID NO: 2295698
aauaccaccucuuucagca

SEQ ID NO: 2295700 - RNA, 19 nt, Artificial Sequence
  Description of Artificial Sequence: Synthetic oligonucleotide
  Sense strand starting at position 3267 of SEQ ID NO: 1884835
ucuuccuuucuugggugaa

SEQ ID NO: 2295701 - RNA, 19 nt, Artificial Sequence
  Description of Artificial Sequence: Synthetic oligonucleotide
  Antisense strand to SEQ ID NO: 2295700
uucacccaagaaaggaaga

SEQ ID NO: 2295702 - RNA, 19 nt, Artificial Sequence
  Description of Artificial Sequence: Synthetic oligonucleotide
  Sense strand starting at position 3336 of SEQ ID NO: 1884835
gugaguuaacuccgguuuc

SEQ ID NO: 2295703 - RNA, 19 nt, Artificial Sequence
  Description of Artificial Sequence: Synthetic oligonucleotide
  Antisense strand to SEQ ID NO: 2295702
gaaaccggaguuaacucac

SEQ ID NO: 2295704 - RNA, 19 nt, Artificial Sequence
  Description of Artificial Sequence: Synthetic oligonucleotide
  Sense strand starting at position 3428 of SEQ ID NO: 1884835
acugcuacucugugcuuau

SEQ ID NO: 2295705 - RNA, 19 nt, Artificial Sequence
  Description of Artificial Sequence: Synthetic oligonucleotide
  Antisense strand to SEQ ID NO: 2295704
auaagcacagaguagcagu

SEQ ID NO: 2295706 - RNA, 19 nt, Artificial Sequence
  Description of Artificial Sequence: Synthetic oligonucleotide
  Sense strand starting at position 3584 of SEQ ID NO: 1884835
ggaugaauuauacagcggu

SEQ ID NO: 2295707 - RNA, 19 nt, Artificial Sequence
  Description of Artificial Sequence: Synthetic oligonucleotide
  Antisense strand to SEQ ID NO: 2295706
accgcuguauaauucaucc

SEQ ID NO: 2295708 - RNA, 19 nt, Artificial Sequence
  Description of Artificial Sequence: Synthetic oligonucleotide
  Sense strand starting at position 3587 of SEQ ID NO: 1884835
ugaauuauacagcggugaa

SEQ ID NO: 2295709 - RNA, 19 nt, Artificial Sequence
  Description of Artificial Sequence: Synthetic oligonucleotide
  Antisense strand to SEQ ID NO: 2295708
uucaccgcuguauaauuca

SEQ ID NO: 2295710 - RNA, 19 nt, Artificial Sequence
  Description of Artificial Sequence: Synthetic oligonucleotide
  Sense strand starting at position 3727 of SEQ ID NO: 1884835
cuguaugcuuaugcauauu

SEQ ID NO: 2295711 - RNA, 19 nt, Artificial Sequence
  Description of Artificial Sequence: Synthetic oligonucleotide
  Antisense strand to SEQ ID NO: 2295710
aauaugcauaagcauacag

SEQ ID NO: 2295712 - RNA, 19 nt, Artificial Sequence
  Description of Artificial Sequence: Synthetic oligonucleotide
  Sense strand starting at position 3971 of SEQ ID NO: 1884835
ugugaacugagaugcaaua

SEQ ID NO: 2295713 - RNA, 19 nt, Artificial Sequence
  Description of Artificial Sequence: Synthetic oligonucleotide
  Antisense strand to SEQ ID NO: 2295712
uauugcaucucaguucaca

SEQ ID NO: 2295714 - RNA, 19 nt, Artificial Sequence
  Description of Artificial Sequence: Synthetic oligonucleotide
  Sense strand starting at position 316 of SEQ ID NO: 1884836
gccuacaggaguugcauaa

SEQ ID NO: 2295715 - RNA, 19 nt, Artificial Sequence
  Description of Artificial Sequence: Synthetic oligonucleotide
  Antisense strand to SEQ ID NO: 2295714
uuaugcaacuccuguaggc

SEQ ID NO: 2295716 - RNA, 19 nt, Artificial Sequence
  Description of Artificial Sequence: Synthetic oligonucleotide
  Sense strand starting at position 562 of SEQ ID NO: 1884836
acacucuuacgugaaugca

SEQ ID NO: 2295717 - RNA, 19 nt, Artificial Sequence
  Description of Artificial Sequence: Synthetic oligonucleotide
  Antisense strand to SEQ ID NO: 2295716
ugcauucacguaagagugu

SEQ ID NO: 2295718 - RNA, 19 nt, Artificial Sequence
  Description of Artificial Sequence: Synthetic oligonucleotide
  Sense strand starting at position 660 of SEQ ID NO: 1884836
aagugcacacagugauaaa

SEQ ID NO: 2295719 - RNA, 19 nt, Artificial Sequence
  Description of Artificial Sequence: Synthetic oligonucleotide
  Antisense strand to SEQ ID NO: 2295718
uuuaucacugugugcacuu

SEQ ID NO: 2295720 - RNA, 19 nt, Artificial Sequence
  Description of Artificial Sequence: Synthetic oligonucleotide
  Sense strand starting at position 759 of SEQ ID NO: 1884836
caggauugaugguacuaac

SEQ ID NO: 2295721 - RNA, 19 nt, Artificial Sequence
  Description of Artificial Sequence: Synthetic oligonucleotide
  Antisense strand to SEQ ID NO: 2295720
guuaguaccaucaauccug

SEQ ID NO: 2295722 - RNA, 19 nt, Artificial Sequence
  Description of Artificial Sequence: Synthetic oligonucleotide
  Sense strand starting at position 762 of SEQ ID NO: 1884836
gauugaugguacuaacaca

SEQ ID NO: 2295723 - RNA, 19 nt, Artificial Sequence
  Description of Artificial Sequence: Synthetic oligonucleotide
  Antisense strand to SEQ ID NO: 2295722
uguguuaguaccaucaauc

SEQ ID NO: 2295724 - RNA, 19 nt, Artificial Sequence
  Description of Artificial Sequence: Synthetic oligonucleotide
  Sense strand starting at position 813 of SEQ ID NO: 1884836
gcgaguauacacuaacaag

SEQ ID NO: 2295725 - RNA, 19 nt, Artificial Sequence
  Description of Artificial Sequence: Synthetic oligonucleotide
  Antisense strand to SEQ ID NO: 2295724
cuuguuaguguauacucgc

SEQ ID NO: 2295726 - RNA, 19 nt, Artificial Sequence
  Description of Artificial Sequence: Synthetic oligonucleotide
  Sense strand starting at position 1349 of SEQ ID NO: 1884836
cgagcugucugcgggaaga

SEQ ID NO: 2295727 - RNA, 19 nt, Artificial Sequence
  Description of Artificial Sequence: Synthetic oligonucleotide
  Antisense strand to SEQ ID NO: 2295726
ucuucccgcagacagcucg

SEQ ID NO: 2295728 - RNA, 19 nt, Artificial Sequence
  Description of Artificial Sequence: Synthetic oligonucleotide
  Sense strand starting at position 1432 of SEQ ID NO: 1884836
gccugaaacucuggaguuc

SEQ ID NO: 2295729 - RNA, 19 nt, Artificial Sequence
  Description of Artificial Sequence: Synthetic oligonucleotide
  Antisense strand to SEQ ID NO: 2295728
gaacuccagaguuucaggc

SEQ ID NO: 2295730 - RNA, 19 nt, Artificial Sequence
  Description of Artificial Sequence: Synthetic oligonucleotide
  Sense strand starting at position 1558 of SEQ ID NO: 1884836
acuagcucucuccaugaga

SEQ ID NO: 2295731 - RNA, 19 nt, Artificial Sequence
  Description of Artificial Sequence: Synthetic oligonucleotide
  Antisense strand to SEQ ID NO: 2295730
ucucauggagagagcuagu

SEQ ID NO: 2295732 - RNA, 19 nt, Artificial Sequence
  Description of Artificial Sequence: Synthetic oligonucleotide
  Sense strand starting at position 1822 of SEQ ID NO: 1884836
cccaaauauuugugaggag

SEQ ID NO: 2295733 - RNA, 19 nt, Artificial Sequence
  Description of Artificial Sequence: Synthetic oligonucleotide
  Antisense strand to SEQ ID NO: 2295732
cuccucacaaauauuuggg

SEQ ID NO: 2295734 - RNA, 19 nt, Artificial Sequence
  Description of Artificial Sequence: Synthetic oligonucleotide
  Sense strand starting at position 1823 of SEQ ID NO: 1884836
ccaaauauuugugaggaga

SEQ ID NO: 2295735 - RNA, 19 nt, Artificial Sequence
  Description of Artificial Sequence: Synthetic oligonucleotide
  Antisense strand to SEQ ID NO: 2295734
ucuccucacaaauauuugg

SEQ ID NO: 2295736 - RNA, 19 nt, Artificial Sequence
  Description of Artificial Sequence: Synthetic oligonucleotide
  Sense strand starting at position 1937 of SEQ ID NO: 1884836
gguacaagcuaauacucaa

SEQ ID NO: 2295737 - RNA, 19 nt, Artificial Sequence
  Description of Artificial Sequence: Synthetic oligonucleotide
  Antisense strand to SEQ ID NO: 2295736
uugaguauuagcuuguacc

SEQ ID NO: 2295738 - RNA, 19 nt, Artificial Sequence
  Description of Artificial Sequence: Synthetic oligonucleotide
  Sense strand starting at position 2102 of SEQ ID NO: 1884836
ugaauaaggaugcgcgaau

SEQ ID NO: 2295739 - RNA, 19 nt, Artificial Sequence
  Description of Artificial Sequence: Synthetic oligonucleotide
  Antisense strand to SEQ ID NO: 2295738
auucgcgcauccuuauuca

SEQ ID NO: 2295740 - RNA, 19 nt, Artificial Sequence
  Description of Artificial Sequence: Synthetic oligonucleotide
  Sense strand starting at position 2103 of SEQ ID NO: 1884836
gaauaaggaugcgcgaauu

SEQ ID NO: 2295741 - RNA, 19 nt, Artificial Sequence
  Description of Artificial Sequence: Synthetic oligonucleotide
  Antisense strand to SEQ ID NO: 2295740
aauucgcgcauccuuauuc

SEQ ID NO: 2295742 - RNA, 19 nt, Artificial Sequence
  Description of Artificial Sequence: Synthetic oligonucleotide
  Sense strand starting at position 2279 of SEQ ID NO: 1884836
guggcaugagguugugaac

SEQ ID NO: 2295743 - RNA, 19 nt, Artificial Sequence
  Description of Artificial Sequence: Synthetic oligonucleotide
  Antisense strand to SEQ ID NO: 2295742
guucacaaccucaugccac

SEQ ID NO: 2295744 - RNA, 19 nt, Artificial Sequence
  Description of Artificial Sequence: Synthetic oligonucleotide
  Sense strand starting at position 2342 of SEQ ID NO: 1884836
gccagagauugcccaagga

SEQ ID NO: 2295745 - RNA, 19 nt, Artificial Sequence
  Description of Artificial Sequence: Synthetic oligonucleotide
  Antisense strand to SEQ ID NO: 2295744
uccuugggcaaucucuggc

SEQ ID NO: 2295746 - RNA, 19 nt, Artificial Sequence
  Description of Artificial Sequence: Synthetic oligonucleotide
  Sense strand starting at position 2368 of SEQ ID NO: 1884836
ggcugagucuugguccgga

SEQ ID NO: 2295747 - RNA, 19 nt, Artificial Sequence
  Description of Artificial Sequence: Synthetic oligonucleotide
  Antisense strand to SEQ ID NO: 2295746
uccggaccaagacucagcc

SEQ ID NO: 2295748 - RNA, 19 nt, Artificial Sequence
  Description of Artificial Sequence: Synthetic oligonucleotide
  Sense strand starting at position 2373 of SEQ ID NO: 1884836
agucuugguccggaccaga

SEQ ID NO: 2295749 - RNA, 19 nt, Artificial Sequence
  Description of Artificial Sequence: Synthetic oligonucleotide
  Antisense strand to SEQ ID NO: 2295748
ucugguccggaccaagacu

SEQ ID NO: 2295750 - RNA, 19 nt, Artificial Sequence
  Description of Artificial Sequence: Synthetic oligonucleotide
  Sense strand starting at position 2824 of SEQ ID NO: 1884836
cuguccuugguccaggaaa

SEQ ID NO: 2295751 - RNA, 19 nt, Artificial Sequence
  Description of Artificial Sequence: Synthetic oligonucleotide
  Antisense strand to SEQ ID NO: 2295750
uuuccuggaccaaggacag

SEQ ID NO: 2295752 - RNA, 19 nt, Artificial Sequence
  Description of Artificial Sequence: Synthetic oligonucleotide
  Sense strand starting at position 3235 of SEQ ID NO: 1884836
cgaaaucgaggcugagaau

SEQ ID NO: 2295753 - RNA, 19 nt, Artificial Sequence
  Description of Artificial Sequence: Synthetic oligonucleotide
  Antisense strand to SEQ ID NO: 2295752
auucucagccucgauuucg

SEQ ID NO: 2295754 - RNA, 19 nt, Artificial Sequence
  Description of Artificial Sequence: Synthetic oligonucleotide
  Sense strand starting at position 3426 of SEQ ID NO: 1884836
cggcuuugugaacaggaau

SEQ ID NO: 2295755 - RNA, 19 nt, Artificial Sequence
  Description of Artificial Sequence: Synthetic oligonucleotide
  Antisense strand to SEQ ID NO: 2295754
auuccuguucacaaagccg

SEQ ID NO: 2295756 - RNA, 19 nt, Artificial Sequence
  Description of Artificial Sequence: Synthetic oligonucleotide
  Sense strand starting at position 3507 of SEQ ID NO: 1884836
gcgacuccgcacugagaau

SEQ ID NO: 2295757 - RNA, 19 nt, Artificial Sequence
  Description of Artificial Sequence: Synthetic oligonucleotide
  Antisense strand to SEQ ID NO: 2295756
auucucagugcggagucgc

SEQ ID NO: 2295758 - RNA, 19 nt, Artificial Sequence
  Description of Artificial Sequence: Synthetic oligonucleotide
  Sense strand starting at position 3508 of SEQ ID NO: 1884836
cgacuccgcacugagaauu

SEQ ID NO: 2295759 - RNA, 19 nt, Artificial Sequence
  Description of Artificial Sequence: Synthetic oligonucleotide
  Antisense strand to SEQ ID NO: 2295758
aauucucagugcggagucg

SEQ ID NO: 2295760 - RNA, 19 nt, Artificial Sequence
  Description of Artificial Sequence: Synthetic oligonucleotide
  Sense strand starting at position 3548 of SEQ ID NO: 1884836
cgcuccuuuacacguguua

SEQ ID NO: 2295761 - RNA, 19 nt, Artificial Sequence
  Description of Artificial Sequence: Synthetic oligonucleotide
  Antisense strand to SEQ ID NO: 2295760
uaacacguguaaaggagcg

SEQ ID NO: 2295762 - RNA, 19 nt, Artificial Sequence
  Description of Artificial Sequence: Synthetic oligonucleotide
  Sense strand starting at position 3600 of SEQ ID NO: 1884836
guagcagugcuugcaaagu

SEQ ID NO: 2295763 - RNA, 19 nt, Artificial Sequence
  Description of Artificial Sequence: Synthetic oligonucleotide
  Antisense strand to SEQ ID NO: 2295762
acuuugcaagcacugcuac

SEQ ID NO: 2295764 - RNA, 19 nt, Artificial Sequence
  Description of Artificial Sequence: Synthetic oligonucleotide
  Sense strand starting at position 3610 of SEQ ID NO: 1884836
uugcaaagugccuaaugau

SEQ ID NO: 2295765 - RNA, 19 nt, Artificial Sequence
  Description of Artificial Sequence: Synthetic oligonucleotide
  Antisense strand to SEQ ID NO: 2295764
aucauuaggcacuuugcaa

SEQ ID NO: 2295766 - RNA, 19 nt, Artificial Sequence
  Description of Artificial Sequence: Synthetic oligonucleotide
  Sense strand starting at position 3650 of SEQ ID NO: 1884836
caauuacgcugccggauaa

SEQ ID NO: 2295767 - RNA, 19 nt, Artificial Sequence
  Description of Artificial Sequence: Synthetic oligonucleotide
  Antisense strand to SEQ ID NO: 2295766
uuauccggcagcguaauug

SEQ ID NO: 2295768 - RNA, 19 nt, Artificial Sequence
  Description of Artificial Sequence: Synthetic oligonucleotide
  Sense strand starting at position 3676 of SEQ ID NO: 1884836
agugacuuauggcuucuaa

SEQ ID NO: 2295769 - RNA, 19 nt, Artificial Sequence
  Description of Artificial Sequence: Synthetic oligonucleotide
  Antisense strand to SEQ ID NO: 2295768
uuagaagccauaagucacu

SEQ ID NO: 2295770 - RNA, 19 nt, Artificial Sequence
  Description of Artificial Sequence: Synthetic oligonucleotide
  Sense strand starting at position 3718 of SEQ ID NO: 1884836
ccaaauucgcccuguuuag

SEQ ID NO: 2295771 - RNA, 19 nt, Artificial Sequence
  Description of Artificial Sequence: Synthetic oligonucleotide
  Antisense strand to SEQ ID NO: 2295770
cuaaacagggcgaauuugg

SEQ ID NO: 2295772 - RNA, 19 nt, Artificial Sequence
  Description of Artificial Sequence: Synthetic oligonucleotide
  Sense strand starting at position 3730 of SEQ ID NO: 1884836
uguuuagagacaugggugu

SEQ ID NO: 2295773 - RNA, 19 nt, Artificial Sequence
  Description of Artificial Sequence: Synthetic oligonucleotide
  Antisense strand to SEQ ID NO: 2295772
acacccaugucucuaaaca

SEQ ID NO: 2295774 - RNA, 19 nt, Artificial Sequence
  Description of Artificial Sequence: Synthetic oligonucleotide
  Sense strand starting at position 3734 of SEQ ID NO: 1884836
uagagacaugggugugagu

SEQ ID NO: 2295775 - RNA, 19 nt, Artificial Sequence
  Description of Artificial Sequence: Synthetic oligonucleotide
  Antisense strand to SEQ ID NO: 2295774
acucacacccaugucucua

SEQ ID NO: 2295776 - RNA, 19 nt, Artificial Sequence
  Description of Artificial Sequence: Synthetic oligonucleotide
  Sense strand starting at position 3737 of SEQ ID NO: 1884836
agacaugggugugaguaga

SEQ ID NO: 2295777 - RNA, 19 nt, Artificial Sequence
  Description of Artificial Sequence: Synthetic oligonucleotide
  Antisense strand to SEQ ID NO: 2295776
ucuacucacacccaugucu

SEQ ID NO: 2295778 - RNA, 19 nt, Artificial Sequence
  Description of Artificial Sequence: Synthetic oligonucleotide
  Sense strand starting at position 3837 of SEQ ID NO: 1884836
ggcuuucucccugagcuca

SEQ ID NO: 2295779 - RNA, 19 nt, Artificial Sequence
  Description of Artificial Sequence: Synthetic oligonucleotide
  Antisense strand to SEQ ID NO: 2295778
ugagcucagggagaaagcc

SEQ ID NO: 2295780 - RNA, 19 nt, Artificial Sequence
  Description of Artificial Sequence: Synthetic oligonucleotide
  Sense strand starting at position 3903 of SEQ ID NO: 1884836
uugagagauuccuguccug

SEQ ID NO: 2295781 - RNA, 19 nt, Artificial Sequence
  Description of Artificial Sequence: Synthetic oligonucleotide
  Antisense strand to SEQ ID NO: 2295780
caggacaggaaucucucaa

SEQ ID NO: 2295782 - RNA, 19 nt, Artificial Sequence
  Description of Artificial Sequence: Synthetic oligonucleotide
  Sense strand starting at position 3932 of SEQ ID NO: 1884836
aucuaugauuguccucuau

SEQ ID NO: 2295783 - RNA, 19 nt, Artificial Sequence
  Description of Artificial Sequence: Synthetic oligonucleotide
  Antisense strand to SEQ ID NO: 2295782
auagaggacaaucauagau

SEQ ID NO: 2295784 - RNA, 19 nt, Artificial Sequence
  Description of Artificial Sequence: Synthetic oligonucleotide
  Sense strand starting at position 3934 of SEQ ID NO: 1884836
cuaugauuguccucuauuc

SEQ ID NO: 2295785 - RNA, 19 nt, Artificial Sequence
  Description of Artificial Sequence: Synthetic oligonucleotide
  Antisense strand to SEQ ID NO: 2295784
gaauagaggacaaucauag

SEQ ID NO: 2295786 - RNA, 19 nt, Artificial Sequence
  Description of Artificial Sequence: Synthetic oligonucleotide
  Sense strand starting at position 1506 of SEQ ID NO: 1884837
ccaaguuggcaucagaugu

SEQ ID NO: 2295787 - RNA, 19 nt, Artificial Sequence
  Description of Artificial Sequence: Synthetic oligonucleotide
  Antisense strand to SEQ ID NO: 2295786
acaucugaugccaacuugg

SEQ ID NO: 2295788 - RNA, 19 nt, Artificial Sequence
  Description of Artificial Sequence: Synthetic oligonucleotide
  Sense strand starting at position 1510 of SEQ ID NO: 1884837
guuggcaucagaugugguu

SEQ ID NO: 2295789 - RNA, 19 nt, Artificial Sequence
  Description of Artificial Sequence: Synthetic oligonucleotide
  Antisense strand to SEQ ID NO: 2295788
aaccacaucugaugccaac

SEQ ID NO: 2295790 - RNA, 19 nt, Artificial Sequence
  Description of Artificial Sequence: Synthetic oligonucleotide
  Sense strand starting at position 1526 of SEQ ID NO: 1884837
guuccacaagccugucaua

SEQ ID NO: 2295791 - RNA, 19 nt, Artificial Sequence
  Description of Artificial Sequence: Synthetic oligonucleotide
  Antisense strand to SEQ ID NO: 2295790
uaugacaggcuuguggaac

SEQ ID NO: 2295792 - RNA, 19 nt, Artificial Sequence
  Description of Artificial Sequence: Synthetic oligonucleotide
  Sense strand starting at position 1539 of SEQ ID NO: 1884837
gucauauggugcucucauu

SEQ ID NO: 2295793 - RNA, 19 nt, Artificial Sequence
  Description of Artificial Sequence: Synthetic oligonucleotide
  Antisense strand to SEQ ID NO: 2295792
aaugagagcaccauaugac

SEQ ID NO: 2295794 - RNA, 19 nt, Artificial Sequence
  Description of Artificial Sequence: Synthetic oligonucleotide
  Sense strand starting at position 1787 of SEQ ID NO: 1884837
cgcauuaaauaaguacuua

SEQ ID NO: 2295795 - RNA, 19 nt, Artificial Sequence
  Description of Artificial Sequence: Synthetic oligonucleotide
  Antisense strand to SEQ ID NO: 2295794
uaaguacuuauuuaaugcg

SEQ ID NO: 2295796 - RNA, 19 nt, Artificial Sequence
  Description of Artificial Sequence: Synthetic oligonucleotide
  Sense strand starting at position 2140 of SEQ ID NO: 1884837
cgcugcuucccagagucuu

SEQ ID NO: 2295797 - RNA, 19 nt, Artificial Sequence
  Description of Artificial Sequence: Synthetic oligonucleotide
  Antisense strand to SEQ ID NO: 2295796
aagacucugggaagcagcg

SEQ ID NO: 2295798 - RNA, 19 nt, Artificial Sequence
  Description of Artificial Sequence: Synthetic oligonucleotide
  Sense strand starting at position 2146 of SEQ ID NO: 1884837
uucccagagucuucugcua

SEQ ID NO: 2295799 - RNA, 19 nt, Artificial Sequence
  Description of Artificial Sequence: Synthetic oligonucleotide
  Antisense strand to SEQ ID NO: 2295798
uagcagaagacucugggaa

SEQ ID NO: 2295800 - RNA, 19 nt, Artificial Sequence
  Description of Artificial Sequence: Synthetic oligonucleotide
  Sense strand starting at position 2190 of SEQ ID NO: 1884837
aucugucgccuucgagaug

SEQ ID NO: 2295801 - RNA, 19 nt, Artificial Sequence
  Description of Artificial Sequence: Synthetic oligonucleotide
  Antisense strand to SEQ ID NO: 2295800
caucucgaaggcgacagau

SEQ ID NO: 2295802 - RNA, 19 nt, Artificial Sequence
  Description of Artificial Sequence: Synthetic oligonucleotide
  Sense strand starting at position 2213 of SEQ ID NO: 1884837
uaaagucacugcuuuggga

SEQ ID NO: 2295803 - RNA, 19 nt, Artificial Sequence
  Description of Artificial Sequence: Synthetic oligonucleotide
  Antisense strand to SEQ ID NO: 2295802
ucccaaagcagugacuuua

SEQ ID NO: 2295804 - RNA, 19 nt, Artificial Sequence
  Description of Artificial Sequence: Synthetic oligonucleotide
  Sense strand starting at position 2215 of SEQ ID NO: 1884837
aagucacugcuuugggaga

SEQ ID NO: 2295805 - RNA, 19 nt, Artificial Sequence
  Description of Artificial Sequence: Synthetic oligonucleotide
  Antisense strand to SEQ ID NO: 2295804
ucucccaaagcagugacuu

SEQ ID NO: 2295806 - RNA, 19 nt, Artificial Sequence
  Description of Artificial Sequence: Synthetic oligonucleotide
  Sense strand starting at position 2282 of SEQ ID NO: 1884837
acgugaucuguguuguccu

SEQ ID NO: 2295807 - RNA, 19 nt, Artificial Sequence
  Description of Artificial Sequence: Synthetic oligonucleotide
  Antisense strand to SEQ ID NO: 2295806
aggacaacacagaucacgu

SEQ ID NO: 2295808 - RNA, 19 nt, Artificial Sequence
  Description of Artificial Sequence: Synthetic oligonucleotide
  Sense strand starting at position 2285 of SEQ ID NO: 1884837
ugaucuguguuguccuuga

SEQ ID NO: 2295809 - RNA, 19 nt, Artificial Sequence
  Description of Artificial Sequence: Synthetic oligonucleotide
  Antisense strand to SEQ ID NO: 2295808
ucaaggacaacacagauca

SEQ ID NO: 2295810 - RNA, 19 nt, Artificial Sequence
  Description of Artificial Sequence: Synthetic oligonucleotide
  Sense strand starting at position 2289 of SEQ ID NO: 1884837
cuguguuguccuugaagga

SEQ ID NO: 2295811 - RNA, 19 nt, Artificial Sequence
  Description of Artificial Sequence: Synthetic oligonucleotide
  Antisense strand to SEQ ID NO: 2295810
uccuucaaggacaacacag

SEQ ID NO: 2295812 - RNA, 19 nt, Artificial Sequence
  Description of Artificial Sequence: Synthetic oligonucleotide
  Sense strand starting at position 2290 of SEQ ID NO: 1884837
uguguuguccuugaaggau

SEQ ID NO: 2295813 - RNA, 19 nt, Artificial Sequence
  Description of Artificial Sequence: Synthetic oligonucleotide
  Antisense strand to SEQ ID NO: 2295812
auccuucaaggacaacaca

SEQ ID NO: 2295814 - RNA, 19 nt, Artificial Sequence
  Description of Artificial Sequence: Synthetic oligonucleotide
  Sense strand starting at position 2293 of SEQ ID NO: 1884837
guuguccuugaaggauuaa

SEQ ID NO: 2295815 - RNA, 19 nt, Artificial Sequence
  Description of Artificial Sequence: Synthetic oligonucleotide
  Antisense strand to SEQ ID NO: 2295814
uuaauccuucaaggacaac

SEQ ID NO: 2295816 - RNA, 19 nt, Artificial Sequence
  Description of Artificial Sequence: Synthetic oligonucleotide
  Sense strand starting at position 2444 of SEQ ID NO: 1884837
cgaaguuacucucucggga

SEQ ID NO: 2295817 - RNA, 19 nt, Artificial Sequence
  Description of Artificial Sequence: Synthetic oligonucleotide
  Antisense strand to SEQ ID NO: 2295816
ucccgagagaguaacuucg

SEQ ID NO: 2295818 - RNA, 19 nt, Artificial Sequence
  Description of Artificial Sequence: Synthetic oligonucleotide
  Sense strand starting at position 2515 of SEQ ID NO: 1884837
ucagcaucccuaugagaac

SEQ ID NO: 2295819 - RNA, 19 nt, Artificial Sequence
  Description of Artificial Sequence: Synthetic oligonucleotide
  Antisense strand to SEQ ID NO: 2295818
guucucauagggaugcuga

SEQ ID NO: 2295820 - RNA, 19 nt, Artificial Sequence
  Description of Artificial Sequence: Synthetic oligonucleotide
  Sense strand starting at position 2518 of SEQ ID NO: 1884837
gcaucccuaugagaacaua

SEQ ID NO: 2295821 - RNA, 19 nt, Artificial Sequence
  Description of Artificial Sequence: Synthetic oligonucleotide
  Antisense strand to SEQ ID NO: 2295820
uauguucucauagggaugc

SEQ ID NO: 2295822 - RNA, 19 nt, Artificial Sequence
  Description of Artificial Sequence: Synthetic oligonucleotide
  Sense strand starting at position 2600 of SEQ ID NO: 1884837
cagaguugagucuauauug

SEQ ID NO: 2295823 - RNA, 19 nt, Artificial Sequence
  Description of Artificial Sequence: Synthetic oligonucleotide
  Antisense strand to SEQ ID NO: 2295822
caauauagacucaacucug

SEQ ID NO: 2295824 - RNA, 19 nt, Artificial Sequence
  Description of Artificial Sequence: Synthetic oligonucleotide
  Sense strand starting at position 2605 of SEQ ID NO: 1884837
uugagucuauauugaauga

SEQ ID NO: 2295825 - RNA, 19 nt, Artificial Sequence
  Description of Artificial Sequence: Synthetic oligonucleotide
  Antisense strand to SEQ ID NO: 2295824
ucauucaauauagacucaa

SEQ ID NO: 2295826 - RNA, 19 nt, Artificial Sequence
  Description of Artificial Sequence: Synthetic oligonucleotide
  Sense strand starting at position 2609 of SEQ ID NO: 1884837
gucuauauugaaugauugu

SEQ ID NO: 2295827 - RNA, 19 nt, Artificial Sequence
  Description of Artificial Sequence: Synthetic oligonucleotide
  Antisense strand to SEQ ID NO: 2295826
acaaucauucaauauagac

SEQ ID NO: 2295828 - RNA, 19 nt, Artificial Sequence
  Description of Artificial Sequence: Synthetic oligonucleotide
  Sense strand starting at position 2616 of SEQ ID NO: 1884837
uugaaugauugugcaucca

SEQ ID NO: 2295829 - RNA, 19 nt, Artificial Sequence
  Description of Artificial Sequence: Synthetic oligonucleotide
  Antisense strand to SEQ ID NO: 2295828
uggaugcacaaucauucaa

SEQ ID NO: 2295830 - RNA, 19 nt, Artificial Sequence
  Description of Artificial Sequence: Synthetic oligonucleotide
  Sense strand starting at position 2801 of SEQ ID NO: 1884837
gaucaaugauggucaccau

SEQ ID NO: 2295831 - RNA, 19 nt, Artificial Sequence
  Description of Artificial Sequence: Synthetic oligonucleotide
  Antisense strand to SEQ ID NO: 2295830
auggugaccaucauugauc

SEQ ID NO: 2295832 - RNA, 19 nt, Artificial Sequence
  Description of Artificial Sequence: Synthetic oligonucleotide
  Sense strand starting at position 2943 of SEQ ID NO: 1884837
agccuugaauuccuggaca

SEQ ID NO: 2295833 - RNA, 19 nt, Artificial Sequence
  Description of Artificial Sequence: Synthetic oligonucleotide
  Antisense strand to SEQ ID NO: 2295832
uguccaggaauucaaggcu

SEQ ID NO: 2295834 - RNA, 19 nt, Artificial Sequence
  Description of Artificial Sequence: Synthetic oligonucleotide
  Sense strand starting at position 2945 of SEQ ID NO: 1884837
ccuugaauuccuggacaca

SEQ ID NO: 2295835 - RNA, 19 nt, Artificial Sequence
  Description of Artificial Sequence: Synthetic oligonucleotide
  Antisense strand to SEQ ID NO: 2295834
uguguccaggaauucaagg

SEQ ID NO: 2295836 - RNA, 19 nt, Artificial Sequence
  Description of Artificial Sequence: Synthetic oligonucleotide
  Sense strand starting at position 3516 of SEQ ID NO: 1884837
uggccagguccagaaguuu

SEQ ID NO: 2295837 - RNA, 19 nt, Artificial Sequence
  Description of Artificial Sequence: Synthetic oligonucleotide
  Antisense strand to SEQ ID NO: 2295836
aaacuucuggaccuggcca

SEQ ID NO: 2295838 - RNA, 19 nt, Artificial Sequence
  Description of Artificial Sequence: Synthetic oligonucleotide
  Sense strand starting at position 3548 of SEQ ID NO: 1884837
acagaaucucgguacccau

SEQ ID NO: 2295839 - RNA, 19 nt, Artificial Sequence
  Description of Artificial Sequence: Synthetic oligonucleotide
  Antisense strand to SEQ ID NO: 2295838
auggguaccgagauucugu

SEQ ID NO: 2295840 - RNA, 19 nt, Artificial Sequence
  Description of Artificial Sequence: Synthetic oligonucleotide
  Sense strand starting at position 3634 of SEQ ID NO: 1884837
uggauugccuguucuggau

SEQ ID NO: 2295841 - RNA, 19 nt, Artificial Sequence
  Description of Artificial Sequence: Synthetic oligonucleotide
  Antisense strand to SEQ ID NO: 2295840
auccagaacaggcaaucca

SEQ ID NO: 2295842 - RNA, 19 nt, Artificial Sequence
  Description of Artificial Sequence: Synthetic oligonucleotide
  Sense strand starting at position 3663 of SEQ ID NO: 1884837
aguggaauccuacgauaua

SEQ ID NO: 2295843 - RNA, 19 nt, Artificial Sequence
  Description of Artificial Sequence: Synthetic oligonucleotide
  Antisense strand to SEQ ID NO: 2295842
uauaucguaggauuccacu

SEQ ID NO: 2295844 - RNA, 19 nt, Artificial Sequence
  Description of Artificial Sequence: Synthetic oligonucleotide
  Sense strand starting at position 3664 of SEQ ID NO: 1884837
guggaauccuacgauauau

SEQ ID NO: 2295845 - RNA, 19 nt, Artificial Sequence
  Description of Artificial Sequence: Synthetic oligonucleotide
  Antisense strand to SEQ ID NO: 2295844
auauaucguaggauuccac

SEQ ID NO: 2295846 - RNA, 19 nt, Artificial Sequence
  Description of Artificial Sequence: Synthetic oligonucleotide
  Sense strand starting at position 3751 of SEQ ID NO: 1884837
agugcuuccuuucuucuua

SEQ ID NO: 2295847 - RNA, 19 nt, Artificial Sequence
  Description of Artificial Sequence: Synthetic oligonucleotide
  Antisense strand to SEQ ID NO: 2295846
uaagaagaaaggaagcacu

SEQ ID NO: 2295848 - RNA, 19 nt, Artificial Sequence
  Description of Artificial Sequence: Synthetic oligonucleotide
  Sense strand starting at position 3771 of SEQ ID NO: 1884837
ggcucagugcuguuccauu

SEQ ID NO: 2295849 - RNA, 19 nt, Artificial Sequence
  Description of Artificial Sequence: Synthetic oligonucleotide
  Antisense strand to SEQ ID NO: 2295848
aauggaacagcacugagcc

SEQ ID NO: 2295850 - RNA, 19 nt, Artificial Sequence
  Description of Artificial Sequence: Synthetic oligonucleotide
  Sense strand starting at position 3782 of SEQ ID NO: 1884837
guuccauugccuggaugga

SEQ ID NO: 2295851 - RNA, 19 nt, Artificial Sequence
  Description of Artificial Sequence: Synthetic oligonucleotide
  Antisense strand to SEQ ID NO: 2295850
uccauccaggcaauggaac

SEQ ID NO: 2295852 - RNA, 19 nt, Artificial Sequence
  Description of Artificial Sequence: Synthetic oligonucleotide
  Sense strand starting at position 3864 of SEQ ID NO: 1884837
ugugaauagugcucuauga

SEQ ID NO: 2295853 - RNA, 19 nt, Artificial Sequence
  Description of Artificial Sequence: Synthetic oligonucleotide
  Antisense strand to SEQ ID NO: 2295852
ucauagagcacuauucaca

SEQ ID NO: 2295854 - RNA, 19 nt, Artificial Sequence
  Description of Artificial Sequence: Synthetic oligonucleotide
  Sense strand starting at position 3866 of SEQ ID NO: 1884837
ugaauagugcucuaugaac

SEQ ID NO: 2295855 - RNA, 19 nt, Artificial Sequence
  Description of Artificial Sequence: Synthetic oligonucleotide
  Antisense strand to SEQ ID NO: 2295854
guucauagagcacuauuca

SEQ ID NO: 2295856 - RNA, 19 nt, Artificial Sequence
  Description of Artificial Sequence: Synthetic oligonucleotide
  Sense strand starting at position 3872 of SEQ ID NO: 1884837
gugcucuaugaacaauugu

SEQ ID NO: 2295857 - RNA, 19 nt, Artificial Sequence
  Description of Artificial Sequence: Synthetic oligonucleotide
  Antisense strand to SEQ ID NO: 2295856
acaauuguucauagagcac

SEQ ID NO: 2295858 - RNA, 19 nt, Artificial Sequence
  Description of Artificial Sequence: Synthetic oligonucleotide
  Sense strand starting at position 3878 of SEQ ID NO: 1884837
uaugaacaauuguggguaa

SEQ ID NO: 2295859 - RNA, 19 nt, Artificial Sequence
  Description of Artificial Sequence: Synthetic oligonucleotide
  Antisense strand to SEQ ID NO: 2295858
uuacccacaauuguucaua

SEQ ID NO: 2295860 - RNA, 19 nt, Artificial Sequence
  Description of Artificial Sequence: Synthetic oligonucleotide
  Sense strand starting at position 3880 of SEQ ID NO: 1884837
ugaacaauuguggguaagu

SEQ ID NO: 2295861 - RNA, 19 nt, Artificial Sequence
  Description of Artificial Sequence: Synthetic oligonucleotide
  Antisense strand to SEQ ID NO: 2295860
acuuacccacaauuguuca

SEQ ID NO: 2295862 - RNA, 19 nt, Artificial Sequence
  Description of Artificial Sequence: Synthetic oligonucleotide
  Sense strand starting at position 3881 of SEQ ID NO: 1884837
gaacaauuguggguaaguu

SEQ ID NO: 2295863 - RNA, 19 nt, Artificial Sequence
  Description of Artificial Sequence: Synthetic oligonucleotide
  Antisense strand to SEQ ID NO: 2295862
aacuuacccacaauuguuc

SEQ ID NO: 2295864 - RNA, 19 nt, Artificial Sequence
  Description of Artificial Sequence: Synthetic oligonucleotide
  Sense strand starting at position 3882 of SEQ ID NO: 1884837
aacaauuguggguaaguuu

SEQ ID NO: 2295865 - RNA, 19 nt, Artificial Sequence
  Description of Artificial Sequence: Synthetic oligonucleotide
  Antisense strand to SEQ ID NO: 2295864
aaacuuacccacaauuguu

SEQ ID NO: 2295866 - RNA, 19 nt, Artificial Sequence
  Description of Artificial Sequence: Synthetic oligonucleotide
  Sense strand starting at position 1519 of SEQ ID NO: 1884838
ccaaguuggcaucagaugu

SEQ ID NO: 2295867 - RNA, 19 nt, Artificial Sequence
  Description of Artificial Sequence: Synthetic oligonucleotide
  Antisense strand to SEQ ID NO: 2295866
acaucugaugccaacuugg

SEQ ID NO: 2295868 - RNA, 19 nt, Artificial Sequence
  Description of Artificial Sequence: Synthetic oligonucleotide
  Sense strand starting at position 1523 of SEQ ID NO: 1884838
guuggcaucagaugugguu

SEQ ID NO: 2295869 - RNA, 19 nt, Artificial Sequence
  Description of Artificial Sequence: Synthetic oligonucleotide
  Antisense strand to SEQ ID NO: 2295868
aaccacaucugaugccaac

SEQ ID NO: 2295870 - RNA, 19 nt, Artificial Sequence
  Description of Artificial Sequence: Synthetic oligonucleotide
  Sense strand starting at position 1539 of SEQ ID NO: 1884838
guuccacaagccugucaua

SEQ ID NO: 2295871 - RNA, 19 nt, Artificial Sequence
  Description of Artificial Sequence: Synthetic oligonucleotide
  Antisense strand to SEQ ID NO: 2295870
uaugacaggcuuguggaac

SEQ ID NO: 2295872 - RNA, 19 nt, Artificial Sequence
  Description of Artificial Sequence: Synthetic oligonucleotide
  Sense strand starting at position 1552 of SEQ ID NO: 1884838
gucauauggugcucucauu

SEQ ID NO: 2295873 - RNA, 19 nt, Artificial Sequence
  Description of Artificial Sequence: Synthetic oligonucleotide
  Antisense strand to SEQ ID NO: 2295872
aaugagagcaccauaugac

SEQ ID NO: 2295874 - RNA, 19 nt, Artificial Sequence
  Description of Artificial Sequence: Synthetic oligonucleotide
  Sense strand starting at position 1800 of SEQ ID NO: 1884838
cgcauuaaauaaguacuua

SEQ ID NO: 2295875 - RNA, 19 nt, Artificial Sequence
  Description of Artificial Sequence: Synthetic oligonucleotide
  Antisense strand to SEQ ID NO: 2295874
uaaguacuuauuuaaugcg

SEQ ID NO: 2295876 - RNA, 19 nt, Artificial Sequence
  Description of Artificial Sequence: Synthetic oligonucleotide
  Sense strand starting at position 2153 of SEQ ID NO: 1884838
cgcugcuucccagagucuu

SEQ ID NO: 2295877 - RNA, 19 nt, Artificial Sequence
  Description of Artificial Sequence: Synthetic oligonucleotide
  Antisense strand to SEQ ID NO: 2295876
aagacucugggaagcagcg

SEQ ID NO: 2295878 - RNA, 19 nt, Artificial Sequence
  Description of Artificial Sequence: Synthetic oligonucleotide
  Sense strand starting at position 2159 of SEQ ID NO: 1884838
uucccagagucuucugcua

SEQ ID NO: 2295879 - RNA, 19 nt, Artificial Sequence
  Description of Artificial Sequence: Synthetic oligonucleotide
  Antisense strand to SEQ ID NO: 2295878
uagcagaagacucugggaa

SEQ ID NO: 2295880 - RNA, 19 nt, Artificial Sequence
  Description of Artificial Sequence: Synthetic oligonucleotide
  Sense strand starting at position 2203 of SEQ ID NO: 1884838
aucugucgccuucgagaug

SEQ ID NO: 2295881 - RNA, 19 nt, Artificial Sequence
  Description of Artificial Sequence: Synthetic oligonucleotide
  Antisense strand to SEQ ID NO: 2295880
caucucgaaggcgacagau

SEQ ID NO: 2295882 - RNA, 19 nt, Artificial Sequence
  Description of Artificial Sequence: Synthetic oligonucleotide
  Sense strand starting at position 2226 of SEQ ID NO: 1884838
uaaagucacugcuuuggga

SEQ ID NO: 2295883 - RNA, 19 nt, Artificial Sequence
  Description of Artificial Sequence: Synthetic oligonucleotide
  Antisense strand to SEQ ID NO: 2295882
ucccaaagcagugacuuua

SEQ ID NO: 2295884 - RNA, 19 nt, Artificial Sequence
  Description of Artificial Sequence: Synthetic oligonucleotide
  Sense strand starting at position 2228 of SEQ ID NO: 1884838
aagucacugcuuugggaga

SEQ ID NO: 2295885 - RNA, 19 nt, Artificial Sequence
  Description of Artificial Sequence: Synthetic oligonucleotide
  Antisense strand to SEQ ID NO: 2295884
ucucccaaagcagugacuu

SEQ ID NO: 2295886 - RNA, 19 nt, Artificial Sequence
  Description of Artificial Sequence: Synthetic oligonucleotide
  Sense strand starting at position 2295 of SEQ ID NO: 1884838
acgugaucuguguuguccu

SEQ ID NO: 2295887 - RNA, 19 nt, Artificial Sequence
  Description of Artificial Sequence: Synthetic oligonucleotide
  Antisense strand to SEQ ID NO: 2295886
aggacaacacagaucacgu

SEQ ID NO: 2295888 - RNA, 19 nt, Artificial Sequence
  Description of Artificial Sequence: Synthetic oligonucleotide
  Sense strand starting at position 2298 of SEQ ID NO: 1884838
ugaucuguguuguccuuga

SEQ ID NO: 2295889 - RNA, 19 nt, Artificial Sequence
  Description of Artificial Sequence: Synthetic oligonucleotide
  Antisense strand to SEQ ID NO: 2295888
ucaaggacaacacagauca

SEQ ID NO: 2295890 - RNA, 19 nt, Artificial Sequence
  Description of Artificial Sequence: Synthetic oligonucleotide
  Sense strand starting at position 2302 of SEQ ID NO: 1884838
cuguguuguccuugaagga

SEQ ID NO: 2295891 - RNA, 19 nt, Artificial Sequence
  Description of Artificial Sequence: Synthetic oligonucleotide
  Antisense strand to SEQ ID NO: 2295890
uccuucaaggacaacacag

SEQ ID NO: 2295892 - RNA, 19 nt, Artificial Sequence
  Description of Artificial Sequence: Synthetic oligonucleotide
  Sense strand starting at position 2303 of SEQ ID NO: 1884838
uguguuguccuugaaggau

SEQ ID NO: 2295893 - RNA, 19 nt, Artificial Sequence
  Description of Artificial Sequence: Synthetic oligonucleotide
  Antisense strand to SEQ ID NO: 2295892
auccuucaaggacaacaca

SEQ ID NO: 2295894 - RNA, 19 nt, Artificial Sequence
  Description of Artificial Sequence: Synthetic oligonucleotide
  Sense strand starting at position 2306 of SEQ ID NO: 1884838
guuguccuugaaggauuaa

SEQ ID NO: 2295895 - RNA, 19 nt, Artificial Sequence
  Description of Artificial Sequence: Synthetic oligonucleotide
  Antisense strand to SEQ ID NO: 2295894
uuaauccuucaaggacaac

SEQ ID NO: 2295896 - RNA, 19 nt, Artificial Sequence
  Description of Artificial Sequence: Synthetic oligonucleotide
  Sense strand starting at position 2457 of SEQ ID NO: 1884838
cgaaguuacucucucggga

SEQ ID NO: 2295897 - RNA, 19 nt, Artificial Sequence
  Description of Artificial Sequence: Synthetic oligonucleotide
  Antisense strand to SEQ ID NO: 2295896
ucccgagagaguaacuucg

SEQ ID NO: 2295898 - RNA, 19 nt, Artificial Sequence
  Description of Artificial Sequence: Synthetic oligonucleotide
  Sense strand starting at position 2528 of SEQ ID NO: 1884838
ucagcaucccuaugagaac

SEQ ID NO: 2295899 - RNA, 19 nt, Artificial Sequence
  Description of Artificial Sequence: Synthetic oligonucleotide
  Antisense strand to SEQ ID NO: 2295898
guucucauagggaugcuga

SEQ ID NO: 2295900 - RNA, 19 nt, Artificial Sequence
  Description of Artificial Sequence: Synthetic oligonucleotide
  Sense strand starting at position 2531 of SEQ ID NO: 1884838
gcaucccuaugagaacaua

SEQ ID NO: 2295901 - RNA, 19 nt, Artificial Sequence
  Description of Artificial Sequence: Synthetic oligonucleotide
  Antisense strand to SEQ ID NO: 2295900
uauguucucauagggaugc

SEQ ID NO: 2295902 - RNA, 19 nt, Artificial Sequence
  Description of Artificial Sequence: Synthetic oligonucleotide
  Sense strand starting at position 2613 of SEQ ID NO: 1884838
cagaguugagucuauauug

SEQ ID NO: 2295903 - RNA, 19 nt, Artificial Sequence
  Description of Artificial Sequence: Synthetic oligonucleotide
  Antisense strand to SEQ ID NO: 2295902
caauauagacucaacucug

SEQ ID NO: 2295904 - RNA, 19 nt, Artificial Sequence
  Description of Artificial Sequence: Synthetic oligonucleotide
  Sense strand starting at position 2618 of SEQ ID NO: 1884838
uugagucuauauugaauga

SEQ ID NO: 2295905 - RNA, 19 nt, Artificial Sequence
  Description of Artificial Sequence: Synthetic oligonucleotide
  Antisense strand to SEQ ID NO: 2295904
ucauucaauauagacucaa

SEQ ID NO: 2295906 - RNA, 19 nt, Artificial Sequence
  Description of Artificial Sequence: Synthetic oligonucleotide
  Sense strand starting at position 2622 of SEQ ID NO: 1884838
gucuauauugaaugauugu

SEQ ID NO: 2295907 - RNA, 19 nt, Artificial Sequence
  Description of Artificial Sequence: Synthetic oligonucleotide
  Antisense strand to SEQ ID NO: 2295906
acaaucauucaauauagac

SEQ ID NO: 2295908 - RNA, 19 nt, Artificial Sequence
  Description of Artificial Sequence: Synthetic oligonucleotide
  Sense strand starting at position 2629 of SEQ ID NO: 1884838
uugaaugauugugcaucca

SEQ ID NO: 2295909 - RNA, 19 nt, Artificial Sequence
  Description of Artificial Sequence: Synthetic oligonucleotide
  Antisense strand to SEQ ID NO: 2295908
uggaugcacaaucauucaa

SEQ ID NO: 2295910 - RNA, 19 nt, Artificial Sequence
  Description of Artificial Sequence: Synthetic oligonucleotide
  Sense strand starting at position 2814 of SEQ ID NO: 1884838
gaucaaugauggucaccau

SEQ ID NO: 2295911 - RNA, 19 nt, Artificial Sequence
  Description of Artificial Sequence: Synthetic oligonucleotide
  Antisense strand to SEQ ID NO: 2295910
auggugaccaucauugauc

SEQ ID NO: 2295912 - RNA, 19 nt, Artificial Sequence
  Description of Artificial Sequence: Synthetic oligonucleotide
  Sense strand starting at position 2956 of SEQ ID NO: 1884838
agccuugaauuccuggaca

SEQ ID NO: 2295913 - RNA, 19 nt, Artificial Sequence
  Description of Artificial Sequence: Synthetic oligonucleotide
  Antisense strand to SEQ ID NO: 2295912
uguccaggaauucaaggcu

SEQ ID NO: 2295914 - RNA, 19 nt, Artificial Sequence
  Description of Artificial Sequence: Synthetic oligonucleotide
  Sense strand starting at position 2958 of SEQ ID NO: 1884838
ccuugaauuccuggacaca

SEQ ID NO: 2295915 - RNA, 19 nt, Artificial Sequence
  Description of Artificial Sequence: Synthetic oligonucleotide
  Antisense strand to SEQ ID NO: 2295914
uguguccaggaauucaagg

SEQ ID NO: 2295916 - RNA, 19 nt, Artificial Sequence
  Description of Artificial Sequence: Synthetic oligonucleotide
  Sense strand starting at position 3529 of SEQ ID NO: 1884838
uggccagguccagaaguuu

SEQ ID NO: 2295917 - RNA, 19 nt, Artificial Sequence
  Description of Artificial Sequence: Synthetic oligonucleotide
  Antisense strand to SEQ ID NO: 2295916
aaacuucuggaccuggcca

SEQ ID NO: 2295918 - RNA, 19 nt, Artificial Sequence
  Description of Artificial Sequence: Synthetic oligonucleotide
  Sense strand starting at position 3561 of SEQ ID NO: 1884838
acagaaucucgguacccau

SEQ ID NO: 2295919 - RNA, 19 nt, Artificial Sequence
  Description of Artificial Sequence: Synthetic oligonucleotide
  Antisense strand to SEQ ID NO: 2295918
auggguaccgagauucugu

SEQ ID NO: 2295920 - RNA, 19 nt, Artificial Sequence
  Description of Artificial Sequence: Synthetic oligonucleotide
  Sense strand starting at position 3647 of SEQ ID NO: 1884838
uggauugccuguucuggau

SEQ ID NO: 2295921 - RNA, 19 nt, Artificial Sequence
  Description of Artificial Sequence: Synthetic oligonucleotide
  Antisense strand to SEQ ID NO: 2295920
auccagaacaggcaaucca

SEQ ID NO: 2295922 - RNA, 19 nt, Artificial Sequence
  Description of Artificial Sequence: Synthetic oligonucleotide
  Sense strand starting at position 3676 of SEQ ID NO: 1884838
aguggaauccuacgauaua

SEQ ID NO: 2295923 - RNA, 19 nt, Artificial Sequence
  Description of Artificial Sequence: Synthetic oligonucleotide
  Antisense strand to SEQ ID NO: 2295922
uauaucguaggauuccacu

SEQ ID NO: 2295924 - RNA, 19 nt, Artificial Sequence
  Description of Artificial Sequence: Synthetic oligonucleotide
  Sense strand starting at position 3677 of SEQ ID NO: 1884838
guggaauccuacgauauau

SEQ ID NO: 2295925 - RNA, 19 nt, Artificial Sequence
  Description of Artificial Sequence: Synthetic oligonucleotide
  Antisense strand to SEQ ID NO: 2295924
auauaucguaggauuccac

SEQ ID NO: 2295926 - RNA, 19 nt, Artificial Sequence
  Description of Artificial Sequence: Synthetic oligonucleotide
  Sense strand starting at position 3764 of SEQ ID NO: 1884838
agugcuuccuuucuucuua

SEQ ID NO: 2295927 - RNA, 19 nt, Artificial Sequence
  Description of Artificial Sequence: Synthetic oligonucleotide
  Antisense strand to SEQ ID NO: 2295926
uaagaagaaaggaagcacu

SEQ ID NO: 2295928 - RNA, 19 nt, Artificial Sequence
  Description of Artificial Sequence: Synthetic oligonucleotide
  Sense strand starting at position 3784 of SEQ ID NO: 1884838
ggcucagugcuguuccauu

SEQ ID NO: 2295929 - RNA, 19 nt, Artificial Sequence
  Description of Artificial Sequence: Synthetic oligonucleotide
  Antisense strand to SEQ ID NO: 2295928
aauggaacagcacugagcc

SEQ ID NO: 2295930 - RNA, 19 nt, Artificial Sequence
  Description of Artificial Sequence: Synthetic oligonucleotide
  Sense strand starting at position 3795 of SEQ ID NO: 1884838
guuccauugccuggaugga

SEQ ID NO: 2295931 - RNA, 19 nt, Artificial Sequence
  Description of Artificial Sequence: Synthetic oligonucleotide
  Antisense strand to SEQ ID NO: 2295930
uccauccaggcaauggaac

SEQ ID NO: 2295932 - RNA, 19 nt, Artificial Sequence
  Description of Artificial Sequence: Synthetic oligonucleotide
  Sense strand starting at position 3877 of SEQ ID NO: 1884838
ugugaauagugcucuauga

SEQ ID NO: 2295933 - RNA, 19 nt, Artificial Sequence
  Description of Artificial Sequence: Synthetic oligonucleotide
  Antisense strand to SEQ ID NO: 2295932
ucauagagcacuauucaca

SEQ ID NO: 2295934 - RNA, 19 nt, Artificial Sequence
  Description of Artificial Sequence: Synthetic oligonucleotide
  Sense strand starting at position 3879 of SEQ ID NO: 1884838
ugaauagugcucuaugaac

SEQ ID NO: 2295935 - RNA, 19 nt, Artificial Sequence
  Description of Artificial Sequence: Synthetic oligonucleotide
  Antisense strand to SEQ ID NO: 2295934
guucauagagcacuauuca

SEQ ID NO: 2295936 - RNA, 19 nt, Artificial Sequence
  Description of Artificial Sequence: Synthetic oligonucleotide
  Sense strand starting at position 3885 of SEQ ID NO: 1884838
gugcucuaugaacaauugu

SEQ ID NO: 2295937 - RNA, 19 nt, Artificial Sequence
  Description of Artificial Sequence: Synthetic oligonucleotide
  Antisense strand to SEQ ID NO: 2295936
acaauuguucauagagcac

SEQ ID NO: 2295938 - RNA, 19 nt, Artificial Sequence
  Description of Artificial Sequence: Synthetic oligonucleotide
  Sense strand starting at position 3891 of SEQ ID NO: 1884838
uaugaacaauuguggguaa

SEQ ID NO: 2295939 - RNA, 19 nt, Artificial Sequence
  Description of Artificial Sequence: Synthetic oligonucleotide
  Antisense strand to SEQ ID NO: 2295938
uuacccacaauuguucaua

SEQ ID NO: 2295940 - RNA, 19 nt, Artificial Sequence
  Description of Artificial Sequence: Synthetic oligonucleotide
  Sense strand starting at position 3893 of SEQ ID NO: 1884838
ugaacaauuguggguaagu

SEQ ID NO: 2295941 - RNA, 19 nt, Artificial Sequence
  Description of Artificial Sequence: Synthetic oligonucleotide
  Antisense strand to SEQ ID NO: 2295940
acuuacccacaauuguuca

SEQ ID NO: 2295942 - RNA, 19 nt, Artificial Sequence
  Description of Artificial Sequence: Synthetic oligonucleotide
  Sense strand starting at position 3894 of SEQ ID NO: 1884838
gaacaauuguggguaaguu

SEQ ID NO: 2295943 - RNA, 19 nt, Artificial Sequence
  Description of Artificial Sequence: Synthetic oligonucleotide
  Antisense strand to SEQ ID NO: 2295942
aacuuacccacaauuguuc

SEQ ID NO: 2295944 - RNA, 19 nt, Artificial Sequence
  Description of Artificial Sequence: Synthetic oligonucleotide
  Sense strand starting at position 3895 of SEQ ID NO: 1884838
aacaauuguggguaaguuu

SEQ ID NO: 2295945 - RNA, 19 nt, Artificial Sequence
  Description of Artificial Sequence: Synthetic oligonucleotide
  Antisense strand to SEQ ID NO: 2295944
aaacuuacccacaauuguu

SEQ ID NO: 2295946 - RNA, 19 nt, Artificial Sequence
  Description of Artificial Sequence: Synthetic oligonucleotide
  Sense strand starting at position 634 of SEQ ID NO: 1884839
ccuacuguugacuggaauu

SEQ ID NO: 2295947 - RNA, 19 nt, Artificial Sequence
  Description of Artificial Sequence: Synthetic oligonucleotide
  Antisense strand to SEQ ID NO: 2295946
aauuccagucaacaguagg

SEQ ID NO: 2295948 - RNA, 19 nt, Artificial Sequence
  Description of Artificial Sequence: Synthetic oligonucleotide
  Sense strand starting at position 709 of SEQ ID NO: 1884839
auuggauucuuacaauaag

SEQ ID NO: 2295949 - RNA, 19 nt, Artificial Sequence
  Description of Artificial Sequence: Synthetic oligonucleotide
  Antisense strand to SEQ ID NO: 2295948
cuuauuguaagaauccaau

SEQ ID NO: 2295950 - RNA, 19 nt, Artificial Sequence
  Description of Artificial Sequence: Synthetic oligonucleotide
  Sense strand starting at position 880 of SEQ ID NO: 1884839
cagucuugcugucucagga

SEQ ID NO: 2295951 - RNA, 19 nt, Artificial Sequence
  Description of Artificial Sequence: Synthetic oligonucleotide
  Antisense strand to SEQ ID NO: 2295950
uccugagacagcaagacug

SEQ ID NO: 2295952 - RNA, 19 nt, Artificial Sequence
  Description of Artificial Sequence: Synthetic oligonucleotide
  Sense strand starting at position 1000 of SEQ ID NO: 1884839
ggaaguuuggcccaccgga

SEQ ID NO: 2295953 - RNA, 19 nt, Artificial Sequence
  Description of Artificial Sequence: Synthetic oligonucleotide
  Antisense strand to SEQ ID NO: 2295952
uccggugggccaaacuucc

SEQ ID NO: 2295954 - RNA, 19 nt, Artificial Sequence
  Description of Artificial Sequence: Synthetic oligonucleotide
  Sense strand starting at position 1107 of SEQ ID NO: 1884839
ugaugauuacuuugcccau

SEQ ID NO: 2295955 - RNA, 19 nt, Artificial Sequence
  Description of Artificial Sequence: Synthetic oligonucleotide
  Antisense strand to SEQ ID NO: 2295954
augggcaaaguaaucauca

SEQ ID NO: 2295956 - RNA, 19 nt, Artificial Sequence
  Description of Artificial Sequence: Synthetic oligonucleotide
  Sense strand starting at position 1110 of SEQ ID NO: 1884839
ugauuacuuugcccauguu

SEQ ID NO: 2295957 - RNA, 19 nt, Artificial Sequence
  Description of Artificial Sequence: Synthetic oligonucleotide
  Antisense strand to SEQ ID NO: 2295956
aacaugggcaaaguaauca

SEQ ID NO: 2295958 - RNA, 19 nt, Artificial Sequence
  Description of Artificial Sequence: Synthetic oligonucleotide
  Sense strand starting at position 1119 of SEQ ID NO: 1884839
ugcccauguuucuccuaua

SEQ ID NO: 2295959 - RNA, 19 nt, Artificial Sequence
  Description of Artificial Sequence: Synthetic oligonucleotide
  Antisense strand to SEQ ID NO: 2295958
uauaggagaaacaugggca

SEQ ID NO: 2295960 - RNA, 19 nt, Artificial Sequence
  Description of Artificial Sequence: Synthetic oligonucleotide
  Sense strand starting at position 1349 of SEQ ID NO: 1884839
ggaagucaucucuggccau

SEQ ID NO: 2295961 - RNA, 19 nt, Artificial Sequence
  Description of Artificial Sequence: Synthetic oligonucleotide
  Antisense strand to SEQ ID NO: 2295960
auggccagagaugacuucc

SEQ ID NO: 2295962 - RNA, 19 nt, Artificial Sequence
  Description of Artificial Sequence: Synthetic oligonucleotide
  Sense strand starting at position 2191 of SEQ ID NO: 1884839
gcccgauugcaagguccaa

SEQ ID NO: 2295963 - RNA, 19 nt, Artificial Sequence
  Description of Artificial Sequence: Synthetic oligonucleotide
  Antisense strand to SEQ ID NO: 2295962
uuggaccuugcaaucgggc

SEQ ID NO: 2295964 - RNA, 19 nt, Artificial Sequence
  Description of Artificial Sequence: Synthetic oligonucleotide
  Sense strand starting at position 2260 of SEQ ID NO: 1884839
gggaauauggccuggccau

SEQ ID NO: 2295965 - RNA, 19 nt, Artificial Sequence
  Description of Artificial Sequence: Synthetic oligonucleotide
  Antisense strand to SEQ ID NO: 2295964
auggccaggccauauuccc

SEQ ID NO: 2295966 - RNA, 19 nt, Artificial Sequence
  Description of Artificial Sequence: Synthetic oligonucleotide
  Sense strand starting at position 2272 of SEQ ID NO: 1884839
uggccaugagcugaaagua

SEQ ID NO: 2295967 - RNA, 19 nt, Artificial Sequence
  Description of Artificial Sequence: Synthetic oligonucleotide
  Antisense strand to SEQ ID NO: 2295966
uacuuucagcucauggcca

SEQ ID NO: 2295968 - RNA, 19 nt, Artificial Sequence
  Description of Artificial Sequence: Synthetic oligonucleotide
  Sense strand starting at position 2461 of SEQ ID NO: 1884839
aagucagaucuugguaaug

SEQ ID NO: 2295969 - RNA, 19 nt, Artificial Sequence
  Description of Artificial Sequence: Synthetic oligonucleotide
  Antisense strand to SEQ ID NO: 2295968
cauuaccaagaucugacuu

SEQ ID NO: 2295970 - RNA, 19 nt, Artificial Sequence
  Description of Artificial Sequence: Synthetic oligonucleotide
  Sense strand starting at position 2472 of SEQ ID NO: 1884839
ugguaaugaccuugaacag

SEQ ID NO: 2295971 - RNA, 19 nt, Artificial Sequence
  Description of Artificial Sequence: Synthetic oligonucleotide
  Antisense strand to SEQ ID NO: 2295970
cuguucaaggucauuacca

SEQ ID NO: 2295972 - RNA, 19 nt, Artificial Sequence
  Description of Artificial Sequence: Synthetic oligonucleotide
  Sense strand starting at position 2565 of SEQ ID NO: 1884839
gaagaugaaugccaucuga

SEQ ID NO: 2295973 - RNA, 19 nt, Artificial Sequence
  Description of Artificial Sequence: Synthetic oligonucleotide
  Antisense strand to SEQ ID NO: 2295972
ucagauggcauucaucuuc

SEQ ID NO: 2295974 - RNA, 19 nt, Artificial Sequence
  Description of Artificial Sequence: Synthetic oligonucleotide
  Sense strand starting at position 2633 of SEQ ID NO: 1884839
ucuugaugggcuuggacaa

SEQ ID NO: 2295975 - RNA, 19 nt, Artificial Sequence
  Description of Artificial Sequence: Synthetic oligonucleotide
  Antisense strand to SEQ ID NO: 2295974
uuguccaagcccaucaaga

SEQ ID NO: 2295976 - RNA, 19 nt, Artificial Sequence
  Description of Artificial Sequence: Synthetic oligonucleotide
  Sense strand starting at position 2634 of SEQ ID NO: 1884839
cuugaugggcuuggacaaa

SEQ ID NO: 2295977 - RNA, 19 nt, Artificial Sequence
  Description of Artificial Sequence: Synthetic oligonucleotide
  Antisense strand to SEQ ID NO: 2295976
uuuguccaagcccaucaag

SEQ ID NO: 2295978 - RNA, 19 nt, Artificial Sequence
  Description of Artificial Sequence: Synthetic oligonucleotide
  Sense strand starting at position 2729 of SEQ ID NO: 1884839
uuccgucccugucugagau

SEQ ID NO: 2295979 - RNA, 19 nt, Artificial Sequence
  Description of Artificial Sequence: Synthetic oligonucleotide
  Antisense strand to SEQ ID NO: 2295978
aucucagacagggacggaa

SEQ ID NO: 2295980 - RNA, 19 nt, Artificial Sequence
  Description of Artificial Sequence: Synthetic oligonucleotide
  Sense strand starting at position 2730 of SEQ ID NO: 1884839
uccgucccugucugagaua

SEQ ID NO: 2295981 - RNA, 19 nt, Artificial Sequence
  Description of Artificial Sequence: Synthetic oligonucleotide
  Antisense strand to SEQ ID NO: 2295980
uaucucagacagggacgga

SEQ ID NO: 2295982 - RNA, 19 nt, Artificial Sequence
  Description of Artificial Sequence: Synthetic oligonucleotide
  Sense strand starting at position 2758 of SEQ ID NO: 1884839
acagauaaccuuuguugag

SEQ ID NO: 2295983 - RNA, 19 nt, Artificial Sequence
  Description of Artificial Sequence: Synthetic oligonucleotide
  Antisense strand to SEQ ID NO: 2295982
cucaacaaagguuaucugu

SEQ ID NO: 2295984 - RNA, 19 nt, Artificial Sequence
  Description of Artificial Sequence: Synthetic oligonucleotide
  Sense strand starting at position 2759 of SEQ ID NO: 1884839
cagauaaccuuuguugagu

SEQ ID NO: 2295985 - RNA, 19 nt, Artificial Sequence
  Description of Artificial Sequence: Synthetic oligonucleotide
  Antisense strand to SEQ ID NO: 2295984
acucaacaaagguuaucug

SEQ ID NO: 2295986 - RNA, 19 nt, Artificial Sequence
  Description of Artificial Sequence: Synthetic oligonucleotide
  Sense strand starting at position 2774 of SEQ ID NO: 1884839
gaguguuuaccaggugcua

SEQ ID NO: 2295987 - RNA, 19 nt, Artificial Sequence
  Description of Artificial Sequence: Synthetic oligonucleotide
  Antisense strand to SEQ ID NO: 2295986
uagcaccugguaaacacuc

SEQ ID NO: 2295988 - RNA, 19 nt, Artificial Sequence
  Description of Artificial Sequence: Synthetic oligonucleotide
  Sense strand starting at position 2980 of SEQ ID NO: 1884839
augucaacuguguaucaau

SEQ ID NO: 2295989 - RNA, 19 nt, Artificial Sequence
  Description of Artificial Sequence: Synthetic oligonucleotide
  Antisense strand to SEQ ID NO: 2295988
auugauacacaguugacau

SEQ ID NO: 2295990 - RNA, 19 nt, Artificial Sequence
  Description of Artificial Sequence: Synthetic oligonucleotide
  Sense strand starting at position 2989 of SEQ ID NO: 1884839
guguaucaauaauuccuua

SEQ ID NO: 2295991 - RNA, 19 nt, Artificial Sequence
  Description of Artificial Sequence: Synthetic oligonucleotide
  Antisense strand to SEQ ID NO: 2295990
uaaggaauuauugauacac

SEQ ID NO: 2295992 - RNA, 19 nt, Artificial Sequence
  Description of Artificial Sequence: Synthetic oligonucleotide
  Sense strand starting at position 3007 of SEQ ID NO: 1884839
aaaugugaaucgucuaaau

SEQ ID NO: 2295993 - RNA, 19 nt, Artificial Sequence
  Description of Artificial Sequence: Synthetic oligonucleotide
  Antisense strand to SEQ ID NO: 2295992
auuuagacgauucacauuu

SEQ ID NO: 2295994 - RNA, 19 nt, Artificial Sequence
  Description of Artificial Sequence: Synthetic oligonucleotide
  Sense strand starting at position 3009 of SEQ ID NO: 1884839
augugaaucgucuaaauac

SEQ ID NO: 2295995 - RNA, 19 nt, Artificial Sequence
  Description of Artificial Sequence: Synthetic oligonucleotide
  Antisense strand to SEQ ID NO: 2295994
guauuuagacgauucacau

SEQ ID NO: 2295996 - RNA, 19 nt, Artificial Sequence
  Description of Artificial Sequence: Synthetic oligonucleotide
  Sense strand starting at position 3052 of SEQ ID NO: 1884839
aguggauaaugacaagaua

SEQ ID NO: 2295997 - RNA, 19 nt, Artificial Sequence
  Description of Artificial Sequence: Synthetic oligonucleotide
  Antisense strand to SEQ ID NO: 2295996
uaucuugucauuauccacu

SEQ ID NO: 2295998 - RNA, 19 nt, Artificial Sequence
  Description of Artificial Sequence: Synthetic oligonucleotide
  Sense strand starting at position 3281 of SEQ ID NO: 1884839
agacaacaaucguaaacau

SEQ ID NO: 2295999 - RNA, 19 nt, Artificial Sequence
  Description of Artificial Sequence: Synthetic oligonucleotide
  Antisense strand to SEQ ID NO: 2295998
auguuuacgauuguugucu

SEQ ID NO: 2296000 - RNA, 19 nt, Artificial Sequence
  Description of Artificial Sequence: Synthetic oligonucleotide
  Sense strand starting at position 3289 of SEQ ID NO: 1884839
aucguaaacauggaagcau

SEQ ID NO: 2296001 - RNA, 19 nt, Artificial Sequence
  Description of Artificial Sequence: Synthetic oligonucleotide
  Antisense strand to SEQ ID NO: 2296000
augcuuccauguuuacgau

SEQ ID NO: 2296002 - RNA, 19 nt, Artificial Sequence
  Description of Artificial Sequence: Synthetic oligonucleotide
  Sense strand starting at position 3390 of SEQ ID NO: 1884839
ucaccaucccugugucaau

SEQ ID NO: 2296003 - RNA, 19 nt, Artificial Sequence
  Description of Artificial Sequence: Synthetic oligonucleotide
  Antisense strand to SEQ ID NO: 2296002
auugacacagggaugguga

SEQ ID NO: 2296004 - RNA, 19 nt, Artificial Sequence
  Description of Artificial Sequence: Synthetic oligonucleotide
  Sense strand starting at position 3405 of SEQ ID NO: 1884839
caauguuauggguggagac

SEQ ID NO: 2296005 - RNA, 19 nt, Artificial Sequence
  Description of Artificial Sequence: Synthetic oligonucleotide
  Antisense strand to SEQ ID NO: 2296004
gucuccacccauaacauug

SEQ ID NO: 2296006 - RNA, 19 nt, Artificial Sequence
  Description of Artificial Sequence: Synthetic oligonucleotide
  Sense strand starting at position 3406 of SEQ ID NO: 1884839
aauguuauggguggagacu

SEQ ID NO: 2296007 - RNA, 19 nt, Artificial Sequence
  Description of Artificial Sequence: Synthetic oligonucleotide
  Antisense strand to SEQ ID NO: 2296006
agucuccacccauaacauu

SEQ ID NO: 2296008 - RNA, 19 nt, Artificial Sequence
  Description of Artificial Sequence: Synthetic oligonucleotide
  Sense strand starting at position 3407 of SEQ ID NO: 1884839
auguuauggguggagacuu

SEQ ID NO: 2296009 - RNA, 19 nt, Artificial Sequence
  Description of Artificial Sequence: Synthetic oligonucleotide
  Antisense strand to SEQ ID NO: 2296008
aagucuccacccauaacau

SEQ ID NO: 2296010 - RNA, 19 nt, Artificial Sequence
  Description of Artificial Sequence: Synthetic oligonucleotide
  Sense strand starting at position 3468 of SEQ ID NO: 1884839
uauagaugaccugagcagu

SEQ ID NO: 2296011 - RNA, 19 nt, Artificial Sequence
  Description of Artificial Sequence: Synthetic oligonucleotide
  Antisense strand to SEQ ID NO: 2296010
acugcucaggucaucuaua

SEQ ID NO: 2296012 - RNA, 19 nt, Artificial Sequence
  Description of Artificial Sequence: Synthetic oligonucleotide
  Sense strand starting at position 3471 of SEQ ID NO: 1884839
agaugaccugagcaguauu

SEQ ID NO: 2296013 - RNA, 19 nt, Artificial Sequence
  Description of Artificial Sequence: Synthetic oligonucleotide
  Antisense strand to SEQ ID NO: 2296012
aauacugcucaggucaucu

SEQ ID NO: 2296014 - RNA, 19 nt, Artificial Sequence
  Description of Artificial Sequence: Synthetic oligonucleotide
  Sense strand starting at position 3474 of SEQ ID NO: 1884839
ugaccugagcaguauuauc

SEQ ID NO: 2296015 - RNA, 19 nt, Artificial Sequence
  Description of Artificial Sequence: Synthetic oligonucleotide
  Antisense strand to SEQ ID NO: 2296014
gauaauacugcucagguca

SEQ ID NO: 2296016 - RNA, 19 nt, Artificial Sequence
  Description of Artificial Sequence: Synthetic oligonucleotide
  Sense strand starting at position 3479 of SEQ ID NO: 1884839
ugagcaguauuaucaauca

SEQ ID NO: 2296017 - RNA, 19 nt, Artificial Sequence
  Description of Artificial Sequence: Synthetic oligonucleotide
  Antisense strand to SEQ ID NO: 2296016
ugauugauaauacugcuca

SEQ ID NO: 2296018 - RNA, 19 nt, Artificial Sequence
  Description of Artificial Sequence: Synthetic oligonucleotide
  Sense strand starting at position 3653 of SEQ ID NO: 1884839
ccaaccacgguuuaauuaa

SEQ ID NO: 2296019 - RNA, 19 nt, Artificial Sequence
  Description of Artificial Sequence: Synthetic oligonucleotide
  Antisense strand to SEQ ID NO: 2296018
uuaauuaaaccgugguugg

SEQ ID NO: 2296020 - RNA, 19 nt, Artificial Sequence
  Description of Artificial Sequence: Synthetic oligonucleotide
  Sense strand starting at position 3675 of SEQ ID NO: 1884839
agaaaucaauaggaaagau

SEQ ID NO: 2296021 - RNA, 19 nt, Artificial Sequence
  Description of Artificial Sequence: Synthetic oligonucleotide
  Antisense strand to SEQ ID NO: 2296020
aucuuuccuauugauuucu

SEQ ID NO: 2296022 - RNA, 19 nt, Artificial Sequence
  Description of Artificial Sequence: Synthetic oligonucleotide
  Sense strand starting at position 3840 of SEQ ID NO: 1884839
ggguguagcaaagaaaugu

SEQ ID NO: 2296023 - RNA, 19 nt, Artificial Sequence
  Description of Artificial Sequence: Synthetic oligonucleotide
  Antisense strand to SEQ ID NO: 2296022
acauuucuuugcuacaccc

SEQ ID NO: 2296024 - RNA, 19 nt, Artificial Sequence
  Description of Artificial Sequence: Synthetic oligonucleotide
  Sense strand starting at position 3876 of SEQ ID NO: 1884839
gcauuaaaugcguauguug

SEQ ID NO: 2296025 - RNA, 19 nt, Artificial Sequence
  Description of Artificial Sequence: Synthetic oligonucleotide
  Antisense strand to SEQ ID NO: 2296024
caacauacgcauuuaaugc

SEQ ID NO: 2296026 - RNA, 19 nt, Artificial Sequence
  Description of Artificial Sequence: Synthetic oligonucleotide
  Sense strand starting at position 15 of SEQ ID NO: 1884840
cugucuccuuaguuagaaa

SEQ ID NO: 2296027 - RNA, 19 nt, Artificial Sequence
  Description of Artificial Sequence: Synthetic oligonucleotide
  Antisense strand to SEQ ID NO: 2296026
uuucuaacuaaggagacag

SEQ ID NO: 2296028 - RNA, 19 nt, Artificial Sequence
  Description of Artificial Sequence: Synthetic oligonucleotide
  Sense strand starting at position 26 of SEQ ID NO: 1884840
guuagaaaggcuugaaaua

SEQ ID NO: 2296029 - RNA, 19 nt, Artificial Sequence
  Description of Artificial Sequence: Synthetic oligonucleotide
  Antisense strand to SEQ ID NO: 2296028
uauuucaagccuuucuaac

SEQ ID NO: 2296030 - RNA, 19 nt, Artificial Sequence
  Description of Artificial Sequence: Synthetic oligonucleotide
  Sense strand starting at position 98 of SEQ ID NO: 1884840
guggaacagguuuguaauc

SEQ ID NO: 2296031 - RNA, 19 nt, Artificial Sequence
  Description of Artificial Sequence: Synthetic oligonucleotide
  Antisense strand to SEQ ID NO: 2296030
gauuacaaaccuguuccac

SEQ ID NO: 2296032 - RNA, 19 nt, Artificial Sequence
  Description of Artificial Sequence: Synthetic oligonucleotide
  Sense strand starting at position 117 of SEQ ID NO: 1884840
auagccaauccagggaaau

SEQ ID NO: 2296033 - RNA, 19 nt, Artificial Sequence
  Description of Artificial Sequence: Synthetic oligonucleotide
  Antisense strand to SEQ ID NO: 2296032
auuucccuggauuggcuau

SEQ ID NO: 2296034 - RNA, 19 nt, Artificial Sequence
  Description of Artificial Sequence: Synthetic oligonucleotide
  Sense strand starting at position 136 of SEQ ID NO: 1884840
ggcagaacuuuaucuccau

SEQ ID NO: 2296035 - RNA, 19 nt, Artificial Sequence
  Description of Artificial Sequence: Synthetic oligonucleotide
  Antisense strand to SEQ ID NO: 2296034
auggagauaaaguucugcc

SEQ ID NO: 2296036 - RNA, 19 nt, Artificial Sequence
  Description of Artificial Sequence: Synthetic oligonucleotide
  Sense strand starting at position 148 of SEQ ID NO: 1884840
ucuccauccucaguuuaga

SEQ ID NO: 2296037 - RNA, 19 nt, Artificial Sequence
  Description of Artificial Sequence: Synthetic oligonucleotide
  Antisense strand to SEQ ID NO: 2296036
ucuaaacugaggauggaga

SEQ ID NO: 2296038 - RNA, 19 nt, Artificial Sequence
  Description of Artificial Sequence: Synthetic oligonucleotide
  Sense strand starting at position 272 of SEQ ID NO: 1884840
uggacuuagaaguguuaca

SEQ ID NO: 2296039 - RNA, 19 nt, Artificial Sequence
  Description of Artificial Sequence: Synthetic oligonucleotide
  Antisense strand to SEQ ID NO: 2296038
uguaacacuucuaagucca

SEQ ID NO: 2296040 - RNA, 19 nt, Artificial Sequence
  Description of Artificial Sequence: Synthetic oligonucleotide
  Sense strand starting at position 559 of SEQ ID NO: 1884840
aagagcagucuuugaccau

SEQ ID NO: 2296041 - RNA, 19 nt, Artificial Sequence
  Description of Artificial Sequence: Synthetic oligonucleotide
  Antisense strand to SEQ ID NO: 2296040
auggucaaagacugcucuu

SEQ ID NO: 2296042 - RNA, 19 nt, Artificial Sequence
  Description of Artificial Sequence: Synthetic oligonucleotide
  Sense strand starting at position 563 of SEQ ID NO: 1884840
gcagucuuugaccaucauu

SEQ ID NO: 2296043 - RNA, 19 nt, Artificial Sequence
  Description of Artificial Sequence: Synthetic oligonucleotide
  Antisense strand to SEQ ID NO: 2296042
aaugauggucaaagacugc

SEQ ID NO: 2296044 - RNA, 19 nt, Artificial Sequence
  Description of Artificial Sequence: Synthetic oligonucleotide
  Sense strand starting at position 632 of SEQ ID NO: 1884840
auccucugugaucaugcaa

SEQ ID NO: 2296045 - RNA, 19 nt, Artificial Sequence
  Description of Artificial Sequence: Synthetic oligonucleotide
  Antisense strand to SEQ ID NO: 2296044
uugcaugaucacagaggau

SEQ ID NO: 2296046 - RNA, 19 nt, Artificial Sequence
  Description of Artificial Sequence: Synthetic oligonucleotide
  Sense strand starting at position 749 of SEQ ID NO: 1884840
agacuucccuaggucauua

SEQ ID NO: 2296047 - RNA, 19 nt, Artificial Sequence
  Description of Artificial Sequence: Synthetic oligonucleotide
  Antisense strand to SEQ ID NO: 2296046
uaaugaccuagggaagucu

SEQ ID NO: 2296048 - RNA, 19 nt, Artificial Sequence
  Description of Artificial Sequence: Synthetic oligonucleotide
  Sense strand starting at position 799 of SEQ ID NO: 1884840
cuugaacaauguucuguua

SEQ ID NO: 2296049 - RNA, 19 nt, Artificial Sequence
  Description of Artificial Sequence: Synthetic oligonucleotide
  Antisense strand to SEQ ID NO: 2296048
uaacagaacauuguucaag

SEQ ID NO: 2296050 - RNA, 19 nt, Artificial Sequence
  Description of Artificial Sequence: Synthetic oligonucleotide
  Sense strand starting at position 885 of SEQ ID NO: 1884840
agagaucauguugguguau

SEQ ID NO: 2296051 - RNA, 19 nt, Artificial Sequence
  Description of Artificial Sequence: Synthetic oligonucleotide
  Antisense strand to SEQ ID NO: 2296050
auacaccaacaugaucucu

SEQ ID NO: 2296052 - RNA, 19 nt, Artificial Sequence
  Description of Artificial Sequence: Synthetic oligonucleotide
  Sense strand starting at position 954 of SEQ ID NO: 1884840
gaagauaucaggugguugu

SEQ ID NO: 2296053 - RNA, 19 nt, Artificial Sequence
  Description of Artificial Sequence: Synthetic oligonucleotide
  Antisense strand to SEQ ID NO: 2296052
acaaccaccugauaucuuc

SEQ ID NO: 2296054 - RNA, 19 nt, Artificial Sequence
  Description of Artificial Sequence: Synthetic oligonucleotide
  Sense strand starting at position 955 of SEQ ID NO: 1884840
aagauaucaggugguuguu

SEQ ID NO: 2296055 - RNA, 19 nt, Artificial Sequence
  Description of Artificial Sequence: Synthetic oligonucleotide
  Antisense strand to SEQ ID NO: 2296054
aacaaccaccugauaucuu

SEQ ID NO: 2296056 - RNA, 19 nt, Artificial Sequence
  Description of Artificial Sequence: Synthetic oligonucleotide
  Sense strand starting at position 993 of SEQ ID NO: 1884840
guagguaaagccuaacuga

SEQ ID NO: 2296057 - RNA, 19 nt, Artificial Sequence
  Description of Artificial Sequence: Synthetic oligonucleotide
  Antisense strand to SEQ ID NO: 2296056
ucaguuaggcuuuaccuac

SEQ ID NO: 2296058 - RNA, 19 nt, Artificial Sequence
  Description of Artificial Sequence: Synthetic oligonucleotide
  Sense strand starting at position 996 of SEQ ID NO: 1884840
gguaaagccuaacugaaua

SEQ ID NO: 2296059 - RNA, 19 nt, Artificial Sequence
  Description of Artificial Sequence: Synthetic oligonucleotide
  Antisense strand to SEQ ID NO: 2296058
uauucaguuaggcuuuacc

SEQ ID NO: 2296060 - RNA, 19 nt, Artificial Sequence
  Description of Artificial Sequence: Synthetic oligonucleotide
  Sense strand starting at position 1280 of SEQ ID NO: 1884840
cuuggaagccauugaucaa

SEQ ID NO: 2296061 - RNA, 19 nt, Artificial Sequence
  Description of Artificial Sequence: Synthetic oligonucleotide
  Antisense strand to SEQ ID NO: 2296060
uugaucaauggcuuccaag

SEQ ID NO: 2296062 - RNA, 19 nt, Artificial Sequence
  Description of Artificial Sequence: Synthetic oligonucleotide
  Sense strand starting at position 1283 of SEQ ID NO: 1884840
ggaagccauugaucaaaug

SEQ ID NO: 2296063 - RNA, 19 nt, Artificial Sequence
  Description of Artificial Sequence: Synthetic oligonucleotide
  Antisense strand to SEQ ID NO: 2296062
cauuugaucaauggcuucc

SEQ ID NO: 2296064 - RNA, 19 nt, Artificial Sequence
  Description of Artificial Sequence: Synthetic oligonucleotide
  Sense strand starting at position 1370 of SEQ ID NO: 1884840
agguccaacucuuugaaca

SEQ ID NO: 2296065 - RNA, 19 nt, Artificial Sequence
  Description of Artificial Sequence: Synthetic oligonucleotide
  Antisense strand to SEQ ID NO: 2296064
uguucaaagaguuggaccu

SEQ ID NO: 2296066 - RNA, 19 nt, Artificial Sequence
  Description of Artificial Sequence: Synthetic oligonucleotide
  Sense strand starting at position 1371 of SEQ ID NO: 1884840
gguccaacucuuugaacaa

SEQ ID NO: 2296067 - RNA, 19 nt, Artificial Sequence
  Description of Artificial Sequence: Synthetic oligonucleotide
  Antisense strand to SEQ ID NO: 2296066
uuguucaaagaguuggacc

SEQ ID NO: 2296068 - RNA, 19 nt, Artificial Sequence
  Description of Artificial Sequence: Synthetic oligonucleotide
  Sense strand starting at position 1680 of SEQ ID NO: 1884840
gcgcgauggaugagugagu

SEQ ID NO: 2296069 - RNA, 19 nt, Artificial Sequence
  Description of Artificial Sequence: Synthetic oligonucleotide
  Antisense strand to SEQ ID NO: 2296068
acucacucauccaucgcgc

SEQ ID NO: 2296070 - RNA, 19 nt, Artificial Sequence
  Description of Artificial Sequence: Synthetic oligonucleotide
  Sense strand starting at position 1713 of SEQ ID NO: 1884840
accucuuuccucgaagaac

SEQ ID NO: 2296071 - RNA, 19 nt, Artificial Sequence
  Description of Artificial Sequence: Synthetic oligonucleotide
  Antisense strand to SEQ ID NO: 2296070
guucuucgaggaaagaggu

SEQ ID NO: 2296072 - RNA, 19 nt, Artificial Sequence
  Description of Artificial Sequence: Synthetic oligonucleotide
  Sense strand starting at position 1874 of SEQ ID NO: 1884840
agaguucucaaaggaagug

SEQ ID NO: 2296073 - RNA, 19 nt, Artificial Sequence
  Description of Artificial Sequence: Synthetic oligonucleotide
  Antisense strand to SEQ ID NO: 2296072
cacuuccuuugagaacucu

SEQ ID NO: 2296074 - RNA, 19 nt, Artificial Sequence
  Description of Artificial Sequence: Synthetic oligonucleotide
  Sense strand starting at position 1886 of SEQ ID NO: 1884840
ggaagugguaccugaacga

SEQ ID NO: 2296075 - RNA, 19 nt, Artificial Sequence
  Description of Artificial Sequence: Synthetic oligonucleotide
  Antisense strand to SEQ ID NO: 2296074
ucguucagguaccacuucc

SEQ ID NO: 2296076 - RNA, 19 nt, Artificial Sequence
  Description of Artificial Sequence: Synthetic oligonucleotide
  Sense strand starting at position 1895 of SEQ ID NO: 1884840
accugaacgacgugggaua

SEQ ID NO: 2296077 - RNA, 19 nt, Artificial Sequence
  Description of Artificial Sequence: Synthetic oligonucleotide
  Antisense strand to SEQ ID NO: 2296076
uaucccacgucguucaggu

SEQ ID NO: 2296078 - RNA, 19 nt, Artificial Sequence
  Description of Artificial Sequence: Synthetic oligonucleotide
  Sense strand starting at position 2432 of SEQ ID NO: 1884840
ugagaaucugaagguuucu

SEQ ID NO: 2296079 - RNA, 19 nt, Artificial Sequence
  Description of Artificial Sequence: Synthetic oligonucleotide
  Antisense strand to SEQ ID NO: 2296078
agaaaccuucagauucuca

SEQ ID NO: 2296080 - RNA, 19 nt, Artificial Sequence
  Description of Artificial Sequence: Synthetic oligonucleotide
  Sense strand starting at position 2476 of SEQ ID NO: 1884840
ucucuuugaggacguagaa

SEQ ID NO: 2296081 - RNA, 19 nt, Artificial Sequence
  Description of Artificial Sequence: Synthetic oligonucleotide
  Antisense strand to SEQ ID NO: 2296080
uucuacguccucaaagaga

SEQ ID NO: 2296082 - RNA, 19 nt, Artificial Sequence
  Description of Artificial Sequence: Synthetic oligonucleotide
  Sense strand starting at position 2741 of SEQ ID NO: 1884840
gccuguauguugacgggau

SEQ ID NO: 2296083 - RNA, 19 nt, Artificial Sequence
  Description of Artificial Sequence: Synthetic oligonucleotide
  Antisense strand to SEQ ID NO: 2296082
aucccgucaacauacaggc

SEQ ID NO: 2296084 - RNA, 19 nt, Artificial Sequence
  Description of Artificial Sequence: Synthetic oligonucleotide
  Sense strand starting at position 2745 of SEQ ID NO: 1884840
guauguugacgggaugcca

SEQ ID NO: 2296085 - RNA, 19 nt, Artificial Sequence
  Description of Artificial Sequence: Synthetic oligonucleotide
  Antisense strand to SEQ ID NO: 2296084
uggcaucccgucaacauac

SEQ ID NO: 2296086 - RNA, 19 nt, Artificial Sequence
  Description of Artificial Sequence: Synthetic oligonucleotide
  Sense strand starting at position 2805 of SEQ ID NO: 1884840
aggguugaaucucuugaaa

SEQ ID NO: 2296087 - RNA, 19 nt, Artificial Sequence
  Description of Artificial Sequence: Synthetic oligonucleotide
  Antisense strand to SEQ ID NO: 2296086
uuucaagagauucaacccu

SEQ ID NO: 2296088 - RNA, 19 nt, Artificial Sequence
  Description of Artificial Sequence: Synthetic oligonucleotide
  Sense strand starting at position 2816 of SEQ ID NO: 1884840
ucuugaaaugaauggagca

SEQ ID NO: 2296089 - RNA, 19 nt, Artificial Sequence
  Description of Artificial Sequence: Synthetic oligonucleotide
  Antisense strand to SEQ ID NO: 2296088
ugcuccauucauuucaaga

SEQ ID NO: 2296090 - RNA, 19 nt, Artificial Sequence
  Description of Artificial Sequence: Synthetic oligonucleotide
  Sense strand starting at position 2857 of SEQ ID NO: 1884840
gguucuaagccaggacuga

SEQ ID NO: 2296091 - RNA, 19 nt, Artificial Sequence
  Description of Artificial Sequence: Synthetic oligonucleotide
  Antisense strand to SEQ ID NO: 2296090
ucaguccuggcuuagaacc

SEQ ID NO: 2296092 - RNA, 19 nt, Artificial Sequence
  Description of Artificial Sequence: Synthetic oligonucleotide
  Sense strand starting at position 2858 of SEQ ID NO: 1884840
guucuaagccaggacugau

SEQ ID NO: 2296093 - RNA, 19 nt, Artificial Sequence
  Description of Artificial Sequence: Synthetic oligonucleotide
  Antisense strand to SEQ ID NO: 2296092
aucaguccuggcuuagaac

SEQ ID NO: 2296094 - RNA, 19 nt, Artificial Sequence
  Description of Artificial Sequence: Synthetic oligonucleotide
  Sense strand starting at position 3247 of SEQ ID NO: 1884840
gcaguauuccuggagcaau

SEQ ID NO: 2296095 - RNA, 19 nt, Artificial Sequence
  Description of Artificial Sequence: Synthetic oligonucleotide
  Antisense strand to SEQ ID NO: 2296094
auugcuccaggaauacugc

SEQ ID NO: 2296096 - RNA, 19 nt, Artificial Sequence
  Description of Artificial Sequence: Synthetic oligonucleotide
  Sense strand starting at position 3435 of SEQ ID NO: 1884840
cuuccugcuccuggaaaca

SEQ ID NO: 2296097 - RNA, 19 nt, Artificial Sequence
  Description of Artificial Sequence: Synthetic oligonucleotide
  Antisense strand to SEQ ID NO: 2296096
uguuuccaggagcaggaag

SEQ ID NO: 2296098 - RNA, 19 nt, Artificial Sequence
  Description of Artificial Sequence: Synthetic oligonucleotide
  Sense strand starting at position 3549 of SEQ ID NO: 1884840
ucuguagcaugaucuauuu

SEQ ID NO: 2296099 - RNA, 19 nt, Artificial Sequence
  Description of Artificial Sequence: Synthetic oligonucleotide
  Antisense strand to SEQ ID NO: 2296098
aaauagaucaugcuacaga

SEQ ID NO: 2296100 - RNA, 19 nt, Artificial Sequence
  Description of Artificial Sequence: Synthetic oligonucleotide
  Sense strand starting at position 3637 of SEQ ID NO: 1884840
agcugaaagaagugucuua

SEQ ID NO: 2296101 - RNA, 19 nt, Artificial Sequence
  Description of Artificial Sequence: Synthetic oligonucleotide
  Antisense strand to SEQ ID NO: 2296100
uaagacacuucuuucagcu

SEQ ID NO: 2296102 - RNA, 19 nt, Artificial Sequence
  Description of Artificial Sequence: Synthetic oligonucleotide
  Sense strand starting at position 3654 of SEQ ID NO: 1884840
uaaucuguucucgcugcua

SEQ ID NO: 2296103 - RNA, 19 nt, Artificial Sequence
  Description of Artificial Sequence: Synthetic oligonucleotide
  Antisense strand to SEQ ID NO: 2296102
uagcagcgagaacagauua

SEQ ID NO: 2296104 - RNA, 19 nt, Artificial Sequence
  Description of Artificial Sequence: Synthetic oligonucleotide
  Sense strand starting at position 3673 of SEQ ID NO: 1884840
aaaggaacugccugagacu

SEQ ID NO: 2296105 - RNA, 19 nt, Artificial Sequence
  Description of Artificial Sequence: Synthetic oligonucleotide
  Antisense strand to SEQ ID NO: 2296104
agucucaggcaguuccuuu

SEQ ID NO: 2296106 - RNA, 19 nt, Artificial Sequence
  Description of Artificial Sequence: Synthetic oligonucleotide
  Sense strand starting at position 8 of SEQ ID NO: 1884841
acacuucuugccgaagaag

SEQ ID NO: 2296107 - RNA, 19 nt, Artificial Sequence
  Description of Artificial Sequence: Synthetic oligonucleotide
  Antisense strand to SEQ ID NO: 2296106
cuucuucggcaagaagugu

SEQ ID NO: 2296108 - RNA, 19 nt, Artificial Sequence
  Description of Artificial Sequence: Synthetic oligonucleotide
  Sense strand starting at position 11 of SEQ ID NO: 1884841
cuucuugccgaagaagaau

SEQ ID NO: 2296109 - RNA, 19 nt, Artificial Sequence
  Description of Artificial Sequence: Synthetic oligonucleotide
  Antisense strand to SEQ ID NO: 2296108
auucuucuucggcaagaag

SEQ ID NO: 2296110 - RNA, 19 nt, Artificial Sequence
  Description of Artificial Sequence: Synthetic oligonucleotide
  Sense strand starting at position 251 of SEQ ID NO: 1884841
cuguguuugauggaacaga

SEQ ID NO: 2296111 - RNA, 19 nt, Artificial Sequence
  Description of Artificial Sequence: Synthetic oligonucleotide
  Antisense strand to SEQ ID NO: 2296110
ucuguuccaucaaacacag

SEQ ID NO: 2296112 - RNA, 19 nt, Artificial Sequence
  Description of Artificial Sequence: Synthetic oligonucleotide
  Sense strand starting at position 276 of SEQ ID NO: 1884841
cuuucucauugaguugaua

SEQ ID NO: 2296113 - RNA, 19 nt, Artificial Sequence
  Description of Artificial Sequence: Synthetic oligonucleotide
  Antisense strand to SEQ ID NO: 2296112
uaucaacucaaugagaaag

SEQ ID NO: 2296114 - RNA, 19 nt, Artificial Sequence
  Description of Artificial Sequence: Synthetic oligonucleotide
  Sense strand starting at position 556 of SEQ ID NO: 1884841
agacuuuaacuaugaagcu

SEQ ID NO: 2296115 - RNA, 19 nt, Artificial Sequence
  Description of Artificial Sequence: Synthetic oligonucleotide
  Antisense strand to SEQ ID NO: 2296114
agcuucauaguuaaagucu

SEQ ID NO: 2296116 - RNA, 19 nt, Artificial Sequence
  Description of Artificial Sequence: Synthetic oligonucleotide
  Sense strand starting at position 599 of SEQ ID NO: 1884841
ugggauauguaccucauga

SEQ ID NO: 2296117 - RNA, 19 nt, Artificial Sequence
  Description of Artificial Sequence: Synthetic oligonucleotide
  Antisense strand to SEQ ID NO: 2296116
ucaugagguacauauccca

SEQ ID NO: 2296118 - RNA, 19 nt, Artificial Sequence
  Description of Artificial Sequence: Synthetic oligonucleotide
  Sense strand starting at position 847 of SEQ ID NO: 1884841
cuaauaaggauauguguga

SEQ ID NO: 2296119 - RNA, 19 nt, Artificial Sequence
  Description of Artificial Sequence: Synthetic oligonucleotide
  Antisense strand to SEQ ID NO: 2296118
ucacacauauccuuauuag

SEQ ID NO: 2296120 - RNA, 19 nt, Artificial Sequence
  Description of Artificial Sequence: Synthetic oligonucleotide
  Sense strand starting at position 848 of SEQ ID NO: 1884841
uaauaaggauaugugugau

SEQ ID NO: 2296121 - RNA, 19 nt, Artificial Sequence
  Description of Artificial Sequence: Synthetic oligonucleotide
  Antisense strand to SEQ ID NO: 2296120
aucacacauauccuuauua

SEQ ID NO: 2296122 - RNA, 19 nt, Artificial Sequence
  Description of Artificial Sequence: Synthetic oligonucleotide
  Sense strand starting at position 854 of SEQ ID NO: 1884841
ggauaugugugauuccaau

SEQ ID NO: 2296123 - RNA, 19 nt, Artificial Sequence
  Description of Artificial Sequence: Synthetic oligonucleotide
  Antisense strand to SEQ ID NO: 2296122
auuggaaucacacauaucc

SEQ ID NO: 2296124 - RNA, 19 nt, Artificial Sequence
  Description of Artificial Sequence: Synthetic oligonucleotide
  Sense strand starting at position 992 of SEQ ID NO: 1884841
auuagaacaucuucgaaau

SEQ ID NO: 2296125 - RNA, 19 nt, Artificial Sequence
  Description of Artificial Sequence: Synthetic oligonucleotide
  Antisense strand to SEQ ID NO: 2296124
auuucgaagauguucuaau

SEQ ID NO: 2296126 - RNA, 19 nt, Artificial Sequence
  Description of Artificial Sequence: Synthetic oligonucleotide
  Sense strand starting at position 993 of SEQ ID NO: 1884841
uuagaacaucuucgaaaug

SEQ ID NO: 2296127 - RNA, 19 nt, Artificial Sequence
  Description of Artificial Sequence: Synthetic oligonucleotide
  Antisense strand to SEQ ID NO: 2296126
cauuucgaagauguucuaa

SEQ ID NO: 2296128 - RNA, 19 nt, Artificial Sequence
  Description of Artificial Sequence: Synthetic oligonucleotide
  Sense strand starting at position 1002 of SEQ ID NO: 1884841
cuucgaaauguuuggagaa

SEQ ID NO: 2296129 - RNA, 19 nt, Artificial Sequence
  Description of Artificial Sequence: Synthetic oligonucleotide
  Antisense strand to SEQ ID NO: 2296128
uucuccaaacauuucgaag

SEQ ID NO: 2296130 - RNA, 19 nt, Artificial Sequence
  Description of Artificial Sequence: Synthetic oligonucleotide
  Sense strand starting at position 1045 of SEQ ID NO: 1884841
ggcaucuuugagggaauca

SEQ ID NO: 2296131 - RNA, 19 nt, Artificial Sequence
  Description of Artificial Sequence: Synthetic oligonucleotide
  Antisense strand to SEQ ID NO: 2296130
ugauucccucaaagaugcc

SEQ ID NO: 2296132 - RNA, 19 nt, Artificial Sequence
  Description of Artificial Sequence: Synthetic oligonucleotide
  Sense strand starting at position 1304 of SEQ ID NO: 1884841
augaauaauguaugucaca

SEQ ID NO: 2296133 - RNA, 19 nt, Artificial Sequence
  Description of Artificial Sequence: Synthetic oligonucleotide
  Antisense strand to SEQ ID NO: 2296132
ugugacauacauuauucau

SEQ ID NO: 2296134 - RNA, 19 nt, Artificial Sequence
  Description of Artificial Sequence: Synthetic oligonucleotide
  Sense strand starting at position 1322 of SEQ ID NO: 1884841
acauacuaugcauauguau

SEQ ID NO: 2296135 - RNA, 19 nt, Artificial Sequence
  Description of Artificial Sequence: Synthetic oligonucleotide
  Antisense strand to SEQ ID NO: 2296134
auacauaugcauaguaugu

SEQ ID NO: 2296136 - RNA, 19 nt, Artificial Sequence
  Description of Artificial Sequence: Synthetic oligonucleotide
  Sense strand starting at position 1508 of SEQ ID NO: 1884841
auuuccugcugccuugaaa

SEQ ID NO: 2296137 - RNA, 19 nt, Artificial Sequence
  Description of Artificial Sequence: Synthetic oligonucleotide
  Antisense strand to SEQ ID NO: 2296136
uuucaaggcagcaggaaau

SEQ ID NO: 2296138 - RNA, 19 nt, Artificial Sequence
  Description of Artificial Sequence: Synthetic oligonucleotide
  Sense strand starting at position 1565 of SEQ ID NO: 1884841
gagacaguugacuguauga

SEQ ID NO: 2296139 - RNA, 19 nt, Artificial Sequence
  Description of Artificial Sequence: Synthetic oligonucleotide
  Antisense strand to SEQ ID NO: 2296138
ucauacagucaacugucuc

SEQ ID NO: 2296140 - RNA, 19 nt, Artificial Sequence
  Description of Artificial Sequence: Synthetic oligonucleotide
  Sense strand starting at position 1567 of SEQ ID NO: 1884841
gacaguugacuguaugagu

SEQ ID NO: 2296141 - RNA, 19 nt, Artificial Sequence
  Description of Artificial Sequence: Synthetic oligonucleotide
  Antisense strand to SEQ ID NO: 2296140
acucauacagucaacuguc

SEQ ID NO: 2296142 - RNA, 19 nt, Artificial Sequence
  Description of Artificial Sequence: Synthetic oligonucleotide
  Sense strand starting at position 1657 of SEQ ID NO: 1884841
ucucuaguggcuuauggaa

SEQ ID NO: 2296143 - RNA, 19 nt, Artificial Sequence
  Description of Artificial Sequence: Synthetic oligonucleotide
  Antisense strand to SEQ ID NO: 2296142
uuccauaagccacuagaga

SEQ ID NO: 2296144 - RNA, 19 nt, Artificial Sequence
  Description of Artificial Sequence: Synthetic oligonucleotide
  Sense strand starting at position 1677 of SEQ ID NO: 1884841
uugagauugugacucuuga

SEQ ID NO: 2296145 - RNA, 19 nt, Artificial Sequence
  Description of Artificial Sequence: Synthetic oligonucleotide
  Antisense strand to SEQ ID NO: 2296144
ucaagagucacaaucucaa

SEQ ID NO: 2296146 - RNA, 19 nt, Artificial Sequence
  Description of Artificial Sequence: Synthetic oligonucleotide
  Sense strand starting at position 1685 of SEQ ID NO: 1884841
gugacucuugaguaaagua

SEQ ID NO: 2296147 - RNA, 19 nt, Artificial Sequence
  Description of Artificial Sequence: Synthetic oligonucleotide
  Antisense strand to SEQ ID NO: 2296146
uacuuuacucaagagucac

SEQ ID NO: 2296148 - RNA, 19 nt, Artificial Sequence
  Description of Artificial Sequence: Synthetic oligonucleotide
  Sense strand starting at position 2003 of SEQ ID NO: 1884841
cuaagagaauuguugccua

SEQ ID NO: 2296149 - RNA, 19 nt, Artificial Sequence
  Description of Artificial Sequence: Synthetic oligonucleotide
  Antisense strand to SEQ ID NO: 2296148
uaggcaacaauucucuuag

SEQ ID NO: 2296150 - RNA, 19 nt, Artificial Sequence
  Description of Artificial Sequence: Synthetic oligonucleotide
  Sense strand starting at position 2006 of SEQ ID NO: 1884841
agagaauuguugccuaaga

SEQ ID NO: 2296151 - RNA, 19 nt, Artificial Sequence
  Description of Artificial Sequence: Synthetic oligonucleotide
  Antisense strand to SEQ ID NO: 2296150
ucuuaggcaacaauucucu

SEQ ID NO: 2296152 - RNA, 19 nt, Artificial Sequence
  Description of Artificial Sequence: Synthetic oligonucleotide
  Sense strand starting at position 2007 of SEQ ID NO: 1884841
gagaauuguugccuaagau

SEQ ID NO: 2296153 - RNA, 19 nt, Artificial Sequence
  Description of Artificial Sequence: Synthetic oligonucleotide
  Antisense strand to SEQ ID NO: 2296152
aucuuaggcaacaauucuc

SEQ ID NO: 2296154 - RNA, 19 nt, Artificial Sequence
  Description of Artificial Sequence: Synthetic oligonucleotide
  Sense strand starting at position 2008 of SEQ ID NO: 1884841
agaauuguugccuaagauc

SEQ ID NO: 2296155 - RNA, 19 nt, Artificial Sequence
  Description of Artificial Sequence: Synthetic oligonucleotide
  Antisense strand to SEQ ID NO: 2296154
gaucuuaggcaacaauucu

SEQ ID NO: 2296156 - RNA, 19 nt, Artificial Sequence
  Description of Artificial Sequence: Synthetic oligonucleotide
  Sense strand starting at position 2017 of SEQ ID NO: 1884841
gccuaagaucuagacaagu

SEQ ID NO: 2296157 - RNA, 19 nt, Artificial Sequence
  Description of Artificial Sequence: Synthetic oligonucleotide
  Antisense strand to SEQ ID NO: 2296156
acuugucuagaucuuaggc

SEQ ID NO: 2296158 - RNA, 19 nt, Artificial Sequence
  Description of Artificial Sequence: Synthetic oligonucleotide
  Sense strand starting at position 2042 of SEQ ID NO: 1884841
aguuauugugugggaggga

SEQ ID NO: 2296159 - RNA, 19 nt, Artificial Sequence
  Description of Artificial Sequence: Synthetic oligonucleotide
  Antisense strand to SEQ ID NO: 2296158
ucccucccacacaauaacu

SEQ ID NO: 2296160 - RNA, 19 nt, Artificial Sequence
  Description of Artificial Sequence: Synthetic oligonucleotide
  Sense strand starting at position 2109 of SEQ ID NO: 1884841
uguggcuaagaauaaugua

SEQ ID NO: 2296161 - RNA, 19 nt, Artificial Sequence
  Description of Artificial Sequence: Synthetic oligonucleotide
  Antisense strand to SEQ ID NO: 2296160
uacauuauucuuagccaca

SEQ ID NO: 2296162 - RNA, 19 nt, Artificial Sequence
  Description of Artificial Sequence: Synthetic oligonucleotide
  Sense strand starting at position 2132 of SEQ ID NO: 1884841
cugguauuauaacuuuaag

SEQ ID NO: 2296163 - RNA, 19 nt, Artificial Sequence
  Description of Artificial Sequence: Synthetic oligonucleotide
  Antisense strand to SEQ ID NO: 2296162
cuuaaaguuauaauaccag

SEQ ID NO: 2296164 - RNA, 19 nt, Artificial Sequence
  Description of Artificial Sequence: Synthetic oligonucleotide
  Sense strand starting at position 2218 of SEQ ID NO: 1884841
auucuagucuacuugacau

SEQ ID NO: 2296165 - RNA, 19 nt, Artificial Sequence
  Description of Artificial Sequence: Synthetic oligonucleotide
  Antisense strand to SEQ ID NO: 2296164
augucaaguagacuagaau

SEQ ID NO: 2296166 - RNA, 19 nt, Artificial Sequence
  Description of Artificial Sequence: Synthetic oligonucleotide
  Sense strand starting at position 2488 of SEQ ID NO: 1884841
uuggaacuguaaccaaauu

SEQ ID NO: 2296167 - RNA, 19 nt, Artificial Sequence
  Description of Artificial Sequence: Synthetic oligonucleotide
  Antisense strand to SEQ ID NO: 2296166
aauuugguuacaguuccaa

SEQ ID NO: 2296168 - RNA, 19 nt, Artificial Sequence
  Description of Artificial Sequence: Synthetic oligonucleotide
  Sense strand starting at position 2754 of SEQ ID NO: 1884841
aucgaaauccuuugaugau

SEQ ID NO: 2296169 - RNA, 19 nt, Artificial Sequence
  Description of Artificial Sequence: Synthetic oligonucleotide
  Antisense strand to SEQ ID NO: 2296168
aucaucaaaggauuucgau

SEQ ID NO: 2296170 - RNA, 19 nt, Artificial Sequence
  Description of Artificial Sequence: Synthetic oligonucleotide
  Sense strand starting at position 3031 of SEQ ID NO: 1884841
cuaguaccaugucuuaaga

SEQ ID NO: 2296171 - RNA, 19 nt, Artificial Sequence
  Description of Artificial Sequence: Synthetic oligonucleotide
  Antisense strand to SEQ ID NO: 2296170
ucuuaagacaugguacuag

SEQ ID NO: 2296172 - RNA, 19 nt, Artificial Sequence
  Description of Artificial Sequence: Synthetic oligonucleotide
  Sense strand starting at position 3113 of SEQ ID NO: 1884841
cccagucuugcagauaaga

SEQ ID NO: 2296173 - RNA, 19 nt, Artificial Sequence
  Description of Artificial Sequence: Synthetic oligonucleotide
  Antisense strand to SEQ ID NO: 2296172
ucuuaucugcaagacuggg

SEQ ID NO: 2296174 - RNA, 19 nt, Artificial Sequence
  Description of Artificial Sequence: Synthetic oligonucleotide
  Sense strand starting at position 3352 of SEQ ID NO: 1884841
aaccaucagucuguaggaa

SEQ ID NO: 2296175 - RNA, 19 nt, Artificial Sequence
  Description of Artificial Sequence: Synthetic oligonucleotide
  Antisense strand to SEQ ID NO: 2296174
uuccuacagacugaugguu

SEQ ID NO: 2296176 - RNA, 19 nt, Artificial Sequence
  Description of Artificial Sequence: Synthetic oligonucleotide
  Sense strand starting at position 3353 of SEQ ID NO: 1884841
accaucagucuguaggaau

SEQ ID NO: 2296177 - RNA, 19 nt, Artificial Sequence
  Description of Artificial Sequence: Synthetic oligonucleotide
  Antisense strand to SEQ ID NO: 2296176
auuccuacagacugauggu

SEQ ID NO: 2296178 - RNA, 19 nt, Artificial Sequence
  Description of Artificial Sequence: Synthetic oligonucleotide
  Sense strand starting at position 3545 of SEQ ID NO: 1884841
gcuuaaugagaacagcaca

SEQ ID NO: 2296179 - RNA, 19 nt, Artificial Sequence
  Description of Artificial Sequence: Synthetic oligonucleotide
  Antisense strand to SEQ ID NO: 2296178
ugugcuguucucauuaagc

SEQ ID NO: 2296180 - RNA, 19 nt, Artificial Sequence
  Description of Artificial Sequence: Synthetic oligonucleotide
  Sense strand starting at position 3652 of SEQ ID NO: 1884841
uaggauauguuuccaauag

SEQ ID NO: 2296181 - RNA, 19 nt, Artificial Sequence
  Description of Artificial Sequence: Synthetic oligonucleotide
  Antisense strand to SEQ ID NO: 2296180
cuauuggaaacauauccua

SEQ ID NO: 2296182 - RNA, 19 nt, Artificial Sequence
  Description of Artificial Sequence: Synthetic oligonucleotide
  Sense strand starting at position 3777 of SEQ ID NO: 1884841
cuuaguggcucugugauuu

SEQ ID NO: 2296183 - RNA, 19 nt, Artificial Sequence
  Description of Artificial Sequence: Synthetic oligonucleotide
  Antisense strand to SEQ ID NO: 2296182
aaaucacagagccacuaag

SEQ ID NO: 2296184 - RNA, 19 nt, Artificial Sequence
  Description of Artificial Sequence: Synthetic oligonucleotide
  Sense strand starting at position 3849 of SEQ ID NO: 1884841
cgucaaaugcuagauaaca

SEQ ID NO: 2296185 - RNA, 19 nt, Artificial Sequence
  Description of Artificial Sequence: Synthetic oligonucleotide
  Antisense strand to SEQ ID NO: 2296184
uguuaucuagcauuugacg

SEQ ID NO: 2296186 - RNA, 19 nt, Artificial Sequence
  Description of Artificial Sequence: Synthetic oligonucleotide
  Sense strand starting at position 16 of SEQ ID NO: 1884842
gagagaaagucacuuugcu

SEQ ID NO: 2296187 - RNA, 19 nt, Artificial Sequence
  Description of Artificial Sequence: Synthetic oligonucleotide
  Antisense strand to SEQ ID NO: 2296186
agcaaagugacuuucucuc

SEQ ID NO: 2296188 - RNA, 19 nt, Artificial Sequence
  Description of Artificial Sequence: Synthetic oligonucleotide
  Sense strand starting at position 20 of SEQ ID NO: 1884842
gaaagucacuuugcugaaa

SEQ ID NO: 2296189 - RNA, 19 nt, Artificial Sequence
  Description of Artificial Sequence: Synthetic oligonucleotide
  Antisense strand to SEQ ID NO: 2296188
uuucagcaaagugacuuuc

SEQ ID NO: 2296190 - RNA, 19 nt, Artificial Sequence
  Description of Artificial Sequence: Synthetic oligonucleotide
  Sense strand starting at position 23 of SEQ ID NO: 1884842
agucacuuugcugaaaugu

SEQ ID NO: 2296191 - RNA, 19 nt, Artificial Sequence
  Description of Artificial Sequence: Synthetic oligonucleotide
  Antisense strand to SEQ ID NO: 2296190
acauuucagcaaagugacu

SEQ ID NO: 2296192 - RNA, 19 nt, Artificial Sequence
  Description of Artificial Sequence: Synthetic oligonucleotide
  Sense strand starting at position 88 of SEQ ID NO: 1884842
cuuaaucauguagguaguu

SEQ ID NO: 2296193 - RNA, 19 nt, Artificial Sequence
  Description of Artificial Sequence: Synthetic oligonucleotide
  Antisense strand to SEQ ID NO: 2296192
aacuaccuacaugauuaag

SEQ ID NO: 2296194 - RNA, 19 nt, Artificial Sequence
  Description of Artificial Sequence: Synthetic oligonucleotide
  Sense strand starting at position 89 of SEQ ID NO: 1884842
uuaaucauguagguaguuu

SEQ ID NO: 2296195 - RNA, 19 nt, Artificial Sequence
  Description of Artificial Sequence: Synthetic oligonucleotide
  Antisense strand to SEQ ID NO: 2296194
aaacuaccuacaugauuaa

SEQ ID NO: 2296196 - RNA, 19 nt, Artificial Sequence
  Description of Artificial Sequence: Synthetic oligonucleotide
  Sense strand starting at position 93 of SEQ ID NO: 1884842
ucauguagguaguuuguaa

SEQ ID NO: 2296197 - RNA, 19 nt, Artificial Sequence
  Description of Artificial Sequence: Synthetic oligonucleotide
  Antisense strand to SEQ ID NO: 2296196
uuacaaacuaccuacauga

SEQ ID NO: 2296198 - RNA, 19 nt, Artificial Sequence
  Description of Artificial Sequence: Synthetic oligonucleotide
  Sense strand starting at position 230 of SEQ ID NO: 1884842
agaucuucuccugagguuu

SEQ ID NO: 2296199 - RNA, 19 nt, Artificial Sequence
  Description of Artificial Sequence: Synthetic oligonucleotide
  Antisense strand to SEQ ID NO: 2296198
aaaccucaggagaagaucu

SEQ ID NO: 2296200 - RNA, 19 nt, Artificial Sequence
  Description of Artificial Sequence: Synthetic oligonucleotide
  Sense strand starting at position 318 of SEQ ID NO: 1884842
aucauacugcaugguuauu

SEQ ID NO: 2296201 - RNA, 19 nt, Artificial Sequence
  Description of Artificial Sequence: Synthetic oligonucleotide
  Antisense strand to SEQ ID NO: 2296200
aauaaccaugcaguaugau

SEQ ID NO: 2296202 - RNA, 19 nt, Artificial Sequence
  Description of Artificial Sequence: Synthetic oligonucleotide
  Sense strand starting at position 784 of SEQ ID NO: 1884842
aaugauagacacugguuau

SEQ ID NO: 2296203 - RNA, 19 nt, Artificial Sequence
  Description of Artificial Sequence: Synthetic oligonucleotide
  Antisense strand to SEQ ID NO: 2296202
auaaccagugucuaucauu

SEQ ID NO: 2296204 - RNA, 19 nt, Artificial Sequence
  Description of Artificial Sequence: Synthetic oligonucleotide
  Sense strand starting at position 846 of SEQ ID NO: 1884842
gggucucuccguuauacau

SEQ ID NO: 2296205 - RNA, 19 nt, Artificial Sequence
  Description of Artificial Sequence: Synthetic oligonucleotide
  Antisense strand to SEQ ID NO: 2296204
auguauaacggagagaccc

SEQ ID NO: 2296206 - RNA, 19 nt, Artificial Sequence
  Description of Artificial Sequence: Synthetic oligonucleotide
  Sense strand starting at position 877 of SEQ ID NO: 1884842
uucucaagguauuagaaga

SEQ ID NO: 2296207 - RNA, 19 nt, Artificial Sequence
  Description of Artificial Sequence: Synthetic oligonucleotide
  Antisense strand to SEQ ID NO: 2296206
ucuucuaauaccuugagaa

SEQ ID NO: 2296208 - RNA, 19 nt, Artificial Sequence
  Description of Artificial Sequence: Synthetic oligonucleotide
  Sense strand starting at position 915 of SEQ ID NO: 1884842
agggcuuacuuauuaaaua

SEQ ID NO: 2296209 - RNA, 19 nt, Artificial Sequence
  Description of Artificial Sequence: Synthetic oligonucleotide
  Antisense strand to SEQ ID NO: 2296208
uauuuaauaaguaagcccu

SEQ ID NO: 2296210 - RNA, 19 nt, Artificial Sequence
  Description of Artificial Sequence: Synthetic oligonucleotide
  Sense strand starting at position 1075 of SEQ ID NO: 1884842
uguuaacuguuagugaaug

SEQ ID NO: 2296211 - RNA, 19 nt, Artificial Sequence
  Description of Artificial Sequence: Synthetic oligonucleotide
  Antisense strand to SEQ ID NO: 2296210
cauucacuaacaguuaaca

SEQ ID NO: 2296212 - RNA, 19 nt, Artificial Sequence
  Description of Artificial Sequence: Synthetic oligonucleotide
  Sense strand starting at position 1080 of SEQ ID NO: 1884842
acuguuagugaauguauua

SEQ ID NO: 2296213 - RNA, 19 nt, Artificial Sequence
  Description of Artificial Sequence: Synthetic oligonucleotide
  Antisense strand to SEQ ID NO: 2296212
uaauacauucacuaacagu

SEQ ID NO: 2296214 - RNA, 19 nt, Artificial Sequence
  Description of Artificial Sequence: Synthetic oligonucleotide
  Sense strand starting at position 1215 of SEQ ID NO: 1884842
gggcgaaagucacuucuua

SEQ ID NO: 2296215 - RNA, 19 nt, Artificial Sequence
  Description of Artificial Sequence: Synthetic oligonucleotide
  Antisense strand to SEQ ID NO: 2296214
uaagaagugacuuucgccc

SEQ ID NO: 2296216 - RNA, 19 nt, Artificial Sequence
  Description of Artificial Sequence: Synthetic oligonucleotide
  Sense strand starting at position 1228 of SEQ ID NO: 1884842
uucuuaucugguggcgaca

SEQ ID NO: 2296217 - RNA, 19 nt, Artificial Sequence
  Description of Artificial Sequence: Synthetic oligonucleotide
  Antisense strand to SEQ ID NO: 2296216
ugucgccaccagauaagaa

SEQ ID NO: 2296218 - RNA, 19 nt, Artificial Sequence
  Description of Artificial Sequence: Synthetic oligonucleotide
  Sense strand starting at position 2222 of SEQ ID NO: 1884842
ccaaucggcucuccuuaaa

SEQ ID NO: 2296219 - RNA, 19 nt, Artificial Sequence
  Description of Artificial Sequence: Synthetic oligonucleotide
  Antisense strand to SEQ ID NO: 2296218
uuuaaggagagccgauugg

SEQ ID NO: 2296220 - RNA, 19 nt, Artificial Sequence
  Description of Artificial Sequence: Synthetic oligonucleotide
  Sense strand starting at position 2555 of SEQ ID NO: 1884842
ccaugagggucugcaacuu

SEQ ID NO: 2296221 - RNA, 19 nt, Artificial Sequence
  Description of Artificial Sequence: Synthetic oligonucleotide
  Antisense strand to SEQ ID NO: 2296220
aaguugcagacccucaugg

SEQ ID NO: 2296222 - RNA, 19 nt, Artificial Sequence
  Description of Artificial Sequence: Synthetic oligonucleotide
  Sense strand starting at position 2808 of SEQ ID NO: 1884842
gcaugucuguuucuauaaa

SEQ ID NO: 2296223 - RNA, 19 nt, Artificial Sequence
  Description of Artificial Sequence: Synthetic oligonucleotide
  Antisense strand to SEQ ID NO: 2296222
uuuauagaaacagacaugc

SEQ ID NO: 2296224 - RNA, 19 nt, Artificial Sequence
  Description of Artificial Sequence: Synthetic oligonucleotide
  Sense strand starting at position 2820 of SEQ ID NO: 1884842
cuauaaauugcugguacau

SEQ ID NO: 2296225 - RNA, 19 nt, Artificial Sequence
  Description of Artificial Sequence: Synthetic oligonucleotide
  Antisense strand to SEQ ID NO: 2296224
auguaccagcaauuuauag

SEQ ID NO: 2296226 - RNA, 19 nt, Artificial Sequence
  Description of Artificial Sequence: Synthetic oligonucleotide
  Sense strand starting at position 2848 of SEQ ID NO: 1884842
ccguaacaguuaucaaacu

SEQ ID NO: 2296227 - RNA, 19 nt, Artificial Sequence
  Description of Artificial Sequence: Synthetic oligonucleotide
  Antisense strand to SEQ ID NO: 2296226
aguuugauaacuguuacgg

SEQ ID NO: 2296228 - RNA, 19 nt, Artificial Sequence
  Description of Artificial Sequence: Synthetic oligonucleotide
  Sense strand starting at position 2875 of SEQ ID NO: 1884842
aguauuauccuagggucag

SEQ ID NO: 2296229 - RNA, 19 nt, Artificial Sequence
  Description of Artificial Sequence: Synthetic oligonucleotide
  Antisense strand to SEQ ID NO: 2296228
cugacccuaggauaauacu

SEQ ID NO: 2296230 - RNA, 19 nt, Artificial Sequence
  Description of Artificial Sequence: Synthetic oligonucleotide
  Sense strand starting at position 2923 of SEQ ID NO: 1884842
cuaugugagaaauggucuu

SEQ ID NO: 2296231 - RNA, 19 nt, Artificial Sequence
  Description of Artificial Sequence: Synthetic oligonucleotide
  Antisense strand to SEQ ID NO: 2296230
aagaccauuucucacauag

SEQ ID NO: 2296232 - RNA, 19 nt, Artificial Sequence
  Description of Artificial Sequence: Synthetic oligonucleotide
  Sense strand starting at position 2930 of SEQ ID NO: 1884842
agaaauggucuuuguggga

SEQ ID NO: 2296233 - RNA, 19 nt, Artificial Sequence
  Description of Artificial Sequence: Synthetic oligonucleotide
  Antisense strand to SEQ ID NO: 2296232
ucccacaaagaccauuucu

SEQ ID NO: 2296234 - RNA, 19 nt, Artificial Sequence
  Description of Artificial Sequence: Synthetic oligonucleotide
  Sense strand starting at position 2950 of SEQ ID NO: 1884842
gcaguaagaagaugucaug

SEQ ID NO: 2296235 - RNA, 19 nt, Artificial Sequence
  Description of Artificial Sequence: Synthetic oligonucleotide
  Antisense strand to SEQ ID NO: 2296234
caugacaucuucuuacugc

SEQ ID NO: 2296236 - RNA, 19 nt, Artificial Sequence
  Description of Artificial Sequence: Synthetic oligonucleotide
  Sense strand starting at position 2974 of SEQ ID NO: 1884842
ucauauuugaugggcguuu

SEQ ID NO: 2296237 - RNA, 19 nt, Artificial Sequence
  Description of Artificial Sequence: Synthetic oligonucleotide
  Antisense strand to SEQ ID NO: 2296236
aaacgcccaucaaauauga

SEQ ID NO: 2296238 - RNA, 19 nt, Artificial Sequence
  Description of Artificial Sequence: Synthetic oligonucleotide
  Sense strand starting at position 2989 of SEQ ID NO: 1884842
guuuguuauguguggaaca

SEQ ID NO: 2296239 - RNA, 19 nt, Artificial Sequence
  Description of Artificial Sequence: Synthetic oligonucleotide
  Antisense strand to SEQ ID NO: 2296238
uguuccacacauaacaaac

SEQ ID NO: 2296240 - RNA, 19 nt, Artificial Sequence
  Description of Artificial Sequence: Synthetic oligonucleotide
  Sense strand starting at position 2991 of SEQ ID NO: 1884842
uuguuauguguggaacauu

SEQ ID NO: 2296241 - RNA, 19 nt, Artificial Sequence
  Description of Artificial Sequence: Synthetic oligonucleotide
  Antisense strand to SEQ ID NO: 2296240
aauguuccacacauaacaa

SEQ ID NO: 2296242 - RNA, 19 nt, Artificial Sequence
  Description of Artificial Sequence: Synthetic oligonucleotide
  Sense strand starting at position 3000 of SEQ ID NO: 1884842
guggaacauucugcaaacu

SEQ ID NO: 2296243 - RNA, 19 nt, Artificial Sequence
  Description of Artificial Sequence: Synthetic oligonucleotide
  Antisense strand to SEQ ID NO: 2296242
aguuugcagaauguuccac

SEQ ID NO: 2296244 - RNA, 19 nt, Artificial Sequence
  Description of Artificial Sequence: Synthetic oligonucleotide
  Sense strand starting at position 3030 of SEQ ID NO: 1884842
gugggucccuacgugaauu

SEQ ID NO: 2296245 - RNA, 19 nt, Artificial Sequence
  Description of Artificial Sequence: Synthetic oligonucleotide
  Antisense strand to SEQ ID NO: 2296244
aauucacguagggacccac

SEQ ID NO: 2296246 - RNA, 19 nt, Artificial Sequence
  Description of Artificial Sequence: Synthetic oligonucleotide
  Sense strand starting at position 3117 of SEQ ID NO: 1884842
auguaaaccuacuugucua

SEQ ID NO: 2296247 - RNA, 19 nt, Artificial Sequence
  Description of Artificial Sequence: Synthetic oligonucleotide
  Antisense strand to SEQ ID NO: 2296246
uagacaaguagguuuacau

SEQ ID NO: 2296248 - RNA, 19 nt, Artificial Sequence
  Description of Artificial Sequence: Synthetic oligonucleotide
  Sense strand starting at position 3400 of SEQ ID NO: 1884842
agaucaucccgcugcacua

SEQ ID NO: 2296249 - RNA, 19 nt, Artificial Sequence
  Description of Artificial Sequence: Synthetic oligonucleotide
  Antisense strand to SEQ ID NO: 2296248
uagugcagcgggaugaucu

SEQ ID NO: 2296250 - RNA, 19 nt, Artificial Sequence
  Description of Artificial Sequence: Synthetic oligonucleotide
  Sense strand starting at position 3416 of SEQ ID NO: 1884842
cuacaaacugguugacaca

SEQ ID NO: 2296251 - RNA, 19 nt, Artificial Sequence
  Description of Artificial Sequence: Synthetic oligonucleotide
  Antisense strand to SEQ ID NO: 2296250
ugugucaaccaguuuguag

SEQ ID NO: 2296252 - RNA, 19 nt, Artificial Sequence
  Description of Artificial Sequence: Synthetic oligonucleotide
  Sense strand starting at position 3512 of SEQ ID NO: 1884842
aguugcacgcuuuauuaua

SEQ ID NO: 2296253 - RNA, 19 nt, Artificial Sequence
  Description of Artificial Sequence: Synthetic oligonucleotide
  Antisense strand to SEQ ID NO: 2296252
uauaauaaagcgugcaacu

SEQ ID NO: 2296254 - RNA, 19 nt, Artificial Sequence
  Description of Artificial Sequence: Synthetic oligonucleotide
  Sense strand starting at position 3514 of SEQ ID NO: 1884842
uugcacgcuuuauuauaaa

SEQ ID NO: 2296255 - RNA, 19 nt, Artificial Sequence
  Description of Artificial Sequence: Synthetic oligonucleotide
  Antisense strand to SEQ ID NO: 2296254
uuuauaauaaagcgugcaa

SEQ ID NO: 2296256 - RNA, 19 nt, Artificial Sequence
  Description of Artificial Sequence: Synthetic oligonucleotide
  Sense strand starting at position 3675 of SEQ ID NO: 1884842
uuguuuaaucguuagauuc

SEQ ID NO: 2296257 - RNA, 19 nt, Artificial Sequence
  Description of Artificial Sequence: Synthetic oligonucleotide
  Antisense strand to SEQ ID NO: 2296256
gaaucuaacgauuaaacaa

SEQ ID NO: 2296258 - RNA, 19 nt, Artificial Sequence
  Description of Artificial Sequence: Synthetic oligonucleotide
  Sense strand starting at position 3843 of SEQ ID NO: 1884842
auguuaccacucugaagua

SEQ ID NO: 2296259 - RNA, 19 nt, Artificial Sequence
  Description of Artificial Sequence: Synthetic oligonucleotide
  Antisense strand to SEQ ID NO: 2296258
uacuucagagugguaacau

SEQ ID NO: 2296260 - RNA, 19 nt, Artificial Sequence
  Description of Artificial Sequence: Synthetic oligonucleotide
  Sense strand starting at position 3855 of SEQ ID NO: 1884842
ugaaguaauuaccauagag

SEQ ID NO: 2296261 - RNA, 19 nt, Artificial Sequence
  Description of Artificial Sequence: Synthetic oligonucleotide
  Antisense strand to SEQ ID NO: 2296260
cucuaugguaauuacuuca

SEQ ID NO: 2296262 - RNA, 19 nt, Artificial Sequence
  Description of Artificial Sequence: Synthetic oligonucleotide
  Sense strand starting at position 3882 of SEQ ID NO: 1884842
auggauaauugacacauua

SEQ ID NO: 2296263 - RNA, 19 nt, Artificial Sequence
  Description of Artificial Sequence: Synthetic oligonucleotide
  Antisense strand to SEQ ID NO: 2296262
uaaugugucaauuauccau

SEQ ID NO: 2296264 - RNA, 19 nt, Artificial Sequence
  Description of Artificial Sequence: Synthetic oligonucleotide
  Sense strand starting at position 3981 of SEQ ID NO: 1884842
gguugccugauguaacuua

SEQ ID NO: 2296265 - RNA, 19 nt, Artificial Sequence
  Description of Artificial Sequence: Synthetic oligonucleotide
  Antisense strand to SEQ ID NO: 2296264
uaaguuacaucaggcaacc

SEQ ID NO: 2296266 - RNA, 19 nt, Artificial Sequence
  Description of Artificial Sequence: Synthetic oligonucleotide
  Sense strand starting at position 567 of SEQ ID NO: 1884843
ucuuguuugcggcucuuua

SEQ ID NO: 2296267 - RNA, 19 nt, Artificial Sequence
  Description of Artificial Sequence: Synthetic oligonucleotide
  Antisense strand to SEQ ID NO: 2296266
uaaagagccgcaaacaaga

SEQ ID NO: 2296268 - RNA, 19 nt, Artificial Sequence
  Description of Artificial Sequence: Synthetic oligonucleotide
  Sense strand starting at position 568 of SEQ ID NO: 1884843
cuuguuugcggcucuuuau

SEQ ID NO: 2296269 - RNA, 19 nt, Artificial Sequence
  Description of Artificial Sequence: Synthetic oligonucleotide
  Antisense strand to SEQ ID NO: 2296268
auaaagagccgcaaacaag

SEQ ID NO: 2296270 - RNA, 19 nt, Artificial Sequence
  Description of Artificial Sequence: Synthetic oligonucleotide
  Sense strand starting at position 578 of SEQ ID NO: 1884843
gcucuuuaucauggacaca

SEQ ID NO: 2296271 - RNA, 19 nt, Artificial Sequence
  Description of Artificial Sequence: Synthetic oligonucleotide
  Antisense strand to SEQ ID NO: 2296270
uguguccaugauaaagagc

SEQ ID NO: 2296272 - RNA, 19 nt, Artificial Sequence
  Description of Artificial Sequence: Synthetic oligonucleotide
  Sense strand starting at position 710 of SEQ ID NO: 1884843
gggcuugccucucccauaa

SEQ ID NO: 2296273 - RNA, 19 nt, Artificial Sequence
  Description of Artificial Sequence: Synthetic oligonucleotide
  Antisense strand to SEQ ID NO: 2296272
uuaugggagaggcaagccc

SEQ ID NO: 2296274 - RNA, 19 nt, Artificial Sequence
  Description of Artificial Sequence: Synthetic oligonucleotide
  Sense strand starting at position 1228 of SEQ ID NO: 1884843
cccagcuucccuuggaaca

SEQ ID NO: 2296275 - RNA, 19 nt, Artificial Sequence
  Description of Artificial Sequence: Synthetic oligonucleotide
  Antisense strand to SEQ ID NO: 2296274
uguuccaagggaagcuggg

SEQ ID NO: 2296276 - RNA, 19 nt, Artificial Sequence
  Description of Artificial Sequence: Synthetic oligonucleotide
  Sense strand starting at position 1355 of SEQ ID NO: 1884843
cuggucugcuuuccaaaca

SEQ ID NO: 2296277 - RNA, 19 nt, Artificial Sequence
  Description of Artificial Sequence: Synthetic oligonucleotide
  Antisense strand to SEQ ID NO: 2296276
uguuuggaaagcagaccag

SEQ ID NO: 2296278 - RNA, 19 nt, Artificial Sequence
  Description of Artificial Sequence: Synthetic oligonucleotide
  Sense strand starting at position 1652 of SEQ ID NO: 1884843
gucuaacauuaggcucuaa

SEQ ID NO: 2296279 - RNA, 19 nt, Artificial Sequence
  Description of Artificial Sequence: Synthetic oligonucleotide
  Antisense strand to SEQ ID NO: 2296278
uuagagccuaauguuagac

SEQ ID NO: 2296280 - RNA, 19 nt, Artificial Sequence
  Description of Artificial Sequence: Synthetic oligonucleotide
  Sense strand starting at position 1864 of SEQ ID NO: 1884843
agggacugucccugggaga

SEQ ID NO: 2296281 - RNA, 19 nt, Artificial Sequence
  Description of Artificial Sequence: Synthetic oligonucleotide
  Antisense strand to SEQ ID NO: 2296280
ucucccagggacagucccu

SEQ ID NO: 2296282 - RNA, 19 nt, Artificial Sequence
  Description of Artificial Sequence: Synthetic oligonucleotide
  Sense strand starting at position 1865 of SEQ ID NO: 1884843
gggacugucccugggagaa

SEQ ID NO: 2296283 - RNA, 19 nt, Artificial Sequence
  Description of Artificial Sequence: Synthetic oligonucleotide
  Antisense strand to SEQ ID NO: 2296282
uucucccagggacaguccc

SEQ ID NO: 2296284 - RNA, 19 nt, Artificial Sequence
  Description of Artificial Sequence: Synthetic oligonucleotide
  Sense strand starting at position 2139 of SEQ ID NO: 1884843
aagcuuccagguugggaaa

SEQ ID NO: 2296285 - RNA, 19 nt, Artificial Sequence
  Description of Artificial Sequence: Synthetic oligonucleotide
  Antisense strand to SEQ ID NO: 2296284
uuucccaaccuggaagcuu

SEQ ID NO: 2296286 - RNA, 19 nt, Artificial Sequence
  Description of Artificial Sequence: Synthetic oligonucleotide
  Sense strand starting at position 2239 of SEQ ID NO: 1884843
ugacgacagcaccaguaau

SEQ ID NO: 2296287 - RNA, 19 nt, Artificial Sequence
  Description of Artificial Sequence: Synthetic oligonucleotide
  Antisense strand to SEQ ID NO: 2296286
auuacuggugcugucguca

SEQ ID NO: 2296288 - RNA, 19 nt, Artificial Sequence
  Description of Artificial Sequence: Synthetic oligonucleotide
  Sense strand starting at position 2249 of SEQ ID NO: 1884843
accaguaaucacggcuacu

SEQ ID NO: 2296289 - RNA, 19 nt, Artificial Sequence
  Description of Artificial Sequence: Synthetic oligonucleotide
  Antisense strand to SEQ ID NO: 2296288
aguagccgugauuacuggu

SEQ ID NO: 2296290 - RNA, 19 nt, Artificial Sequence
  Description of Artificial Sequence: Synthetic oligonucleotide
  Sense strand starting at position 2265 of SEQ ID NO: 1884843
acuccuuguuaaguacuua

SEQ ID NO: 2296291 - RNA, 19 nt, Artificial Sequence
  Description of Artificial Sequence: Synthetic oligonucleotide
  Antisense strand to SEQ ID NO: 2296290
uaaguacuuaacaaggagu

SEQ ID NO: 2296292 - RNA, 19 nt, Artificial Sequence
  Description of Artificial Sequence: Synthetic oligonucleotide
  Sense strand starting at position 2269 of SEQ ID NO: 1884843
cuuguuaaguacuuacuaa

SEQ ID NO: 2296293 - RNA, 19 nt, Artificial Sequence
  Description of Artificial Sequence: Synthetic oligonucleotide
  Antisense strand to SEQ ID NO: 2296292
uuaguaaguacuuaacaag

SEQ ID NO: 2296294 - RNA, 19 nt, Artificial Sequence
  Description of Artificial Sequence: Synthetic oligonucleotide
  Sense strand starting at position 2344 of SEQ ID NO: 1884843
aauuccauagggugaguau

SEQ ID NO: 2296295 - RNA, 19 nt, Artificial Sequence
  Description of Artificial Sequence: Synthetic oligonucleotide
  Antisense strand to SEQ ID NO: 2296294
auacucacccuauggaauu

SEQ ID NO: 2296296 - RNA, 19 nt, Artificial Sequence
  Description of Artificial Sequence: Synthetic oligonucleotide
  Sense strand starting at position 2347 of SEQ ID NO: 1884843
uccauagggugaguauaau

SEQ ID NO: 2296297 - RNA, 19 nt, Artificial Sequence
  Description of Artificial Sequence: Synthetic oligonucleotide
  Antisense strand to SEQ ID NO: 2296296
auuauacucacccuaugga

SEQ ID NO: 2296298 - RNA, 19 nt, Artificial Sequence
  Description of Artificial Sequence: Synthetic oligonucleotide
  Sense strand starting at position 2353 of SEQ ID NO: 1884843
gggugaguauaauccuuau

SEQ ID NO: 2296299 - RNA, 19 nt, Artificial Sequence
  Description of Artificial Sequence: Synthetic oligonucleotide
  Antisense strand to SEQ ID NO: 2296298
auaaggauuauacucaccc

SEQ ID NO: 2296300 - RNA, 19 nt, Artificial Sequence
  Description of Artificial Sequence: Synthetic oligonucleotide
  Sense strand starting at position 2718 of SEQ ID NO: 1884843
ggcuucugcuauuuacuca

SEQ ID NO: 2296301 - RNA, 19 nt, Artificial Sequence
  Description of Artificial Sequence: Synthetic oligonucleotide
  Antisense strand to SEQ ID NO: 2296300
ugaguaaauagcagaagcc

SEQ ID NO: 2296302 - RNA, 19 nt, Artificial Sequence
  Description of Artificial Sequence: Synthetic oligonucleotide
  Sense strand starting at position 2781 of SEQ ID NO: 1884843
uaagaacguuaaguaagua

SEQ ID NO: 2296303 - RNA, 19 nt, Artificial Sequence
  Description of Artificial Sequence: Synthetic oligonucleotide
  Antisense strand to SEQ ID NO: 2296302
uacuuacuuaacguucuua

SEQ ID NO: 2296304 - RNA, 19 nt, Artificial Sequence
  Description of Artificial Sequence: Synthetic oligonucleotide
  Sense strand starting at position 2849 of SEQ ID NO: 1884843
ucauuagagcaucaaguaa

SEQ ID NO: 2296305 - RNA, 19 nt, Artificial Sequence
  Description of Artificial Sequence: Synthetic oligonucleotide
  Antisense strand to SEQ ID NO: 2296304
uuacuugaugcucuaauga

SEQ ID NO: 2296306 - RNA, 19 nt, Artificial Sequence
  Description of Artificial Sequence: Synthetic oligonucleotide
  Sense strand starting at position 2872 of SEQ ID NO: 1884843
gcauuaauuuguguuacag

SEQ ID NO: 2296307 - RNA, 19 nt, Artificial Sequence
  Description of Artificial Sequence: Synthetic oligonucleotide
  Antisense strand to SEQ ID NO: 2296306
cuguaacacaaauuaaugc

SEQ ID NO: 2296308 - RNA, 19 nt, Artificial Sequence
  Description of Artificial Sequence: Synthetic oligonucleotide
  Sense strand starting at position 2874 of SEQ ID NO: 1884843
auuaauuuguguuacagac

SEQ ID NO: 2296309 - RNA, 19 nt, Artificial Sequence
  Description of Artificial Sequence: Synthetic oligonucleotide
  Antisense strand to SEQ ID NO: 2296308
gucuguaacacaaauuaau

SEQ ID NO: 2296310 - RNA, 19 nt, Artificial Sequence
  Description of Artificial Sequence: Synthetic oligonucleotide
  Sense strand starting at position 2903 of SEQ ID NO: 1884843
ugagaauuagcaggacuug

SEQ ID NO: 2296311 - RNA, 19 nt, Artificial Sequence
  Description of Artificial Sequence: Synthetic oligonucleotide
  Antisense strand to SEQ ID NO: 2296310
caaguccugcuaauucuca

SEQ ID NO: 2296312 - RNA, 19 nt, Artificial Sequence
  Description of Artificial Sequence: Synthetic oligonucleotide
  Sense strand starting at position 2914 of SEQ ID NO: 1884843
aggacuugucacuaauggu

SEQ ID NO: 2296313 - RNA, 19 nt, Artificial Sequence
  Description of Artificial Sequence: Synthetic oligonucleotide
  Antisense strand to SEQ ID NO: 2296312
accauuagugacaaguccu

SEQ ID NO: 2296314 - RNA, 19 nt, Artificial Sequence
  Description of Artificial Sequence: Synthetic oligonucleotide
  Sense strand starting at position 3113 of SEQ ID NO: 1884843
ggugaagagagcugugacu

SEQ ID NO: 2296315 - RNA, 19 nt, Artificial Sequence
  Description of Artificial Sequence: Synthetic oligonucleotide
  Antisense strand to SEQ ID NO: 2296314
agucacagcucucuucacc

SEQ ID NO: 2296316 - RNA, 19 nt, Artificial Sequence
  Description of Artificial Sequence: Synthetic oligonucleotide
  Sense strand starting at position 3119 of SEQ ID NO: 1884843
gagagcugugacuaggagu

SEQ ID NO: 2296317 - RNA, 19 nt, Artificial Sequence
  Description of Artificial Sequence: Synthetic oligonucleotide
  Antisense strand to SEQ ID NO: 2296316
acuccuagucacagcucuc

SEQ ID NO: 2296318 - RNA, 19 nt, Artificial Sequence
  Description of Artificial Sequence: Synthetic oligonucleotide
  Sense strand starting at position 3159 of SEQ ID NO: 1884843
cucaacuuccugugugaua

SEQ ID NO: 2296319 - RNA, 19 nt, Artificial Sequence
  Description of Artificial Sequence: Synthetic oligonucleotide
  Antisense strand to SEQ ID NO: 2296318
uaucacacaggaaguugag

SEQ ID NO: 2296320 - RNA, 19 nt, Artificial Sequence
  Description of Artificial Sequence: Synthetic oligonucleotide
  Sense strand starting at position 3160 of SEQ ID NO: 1884843
ucaacuuccugugugauau

SEQ ID NO: 2296321 - RNA, 19 nt, Artificial Sequence
  Description of Artificial Sequence: Synthetic oligonucleotide
  Antisense strand to SEQ ID NO: 2296320
auaucacacaggaaguuga

SEQ ID NO: 2296322 - RNA, 19 nt, Artificial Sequence
  Description of Artificial Sequence: Synthetic oligonucleotide
  Sense strand starting at position 3170 of SEQ ID NO: 1884843
gugugauauugggcaagga

SEQ ID NO: 2296323 - RNA, 19 nt, Artificial Sequence
  Description of Artificial Sequence: Synthetic oligonucleotide
  Antisense strand to SEQ ID NO: 2296322
uccuugcccaauaucacac

SEQ ID NO: 2296324 - RNA, 19 nt, Artificial Sequence
  Description of Artificial Sequence: Synthetic oligonucleotide
  Sense strand starting at position 3208 of SEQ ID NO: 1884843
gggugccuuguauaucaau

SEQ ID NO: 2296325 - RNA, 19 nt, Artificial Sequence
  Description of Artificial Sequence: Synthetic oligonucleotide
  Antisense strand to SEQ ID NO: 2296324
auugauauacaaggcaccc

SEQ ID NO: 2296326 - RNA, 19 nt, Artificial Sequence
  Description of Artificial Sequence: Synthetic oligonucleotide
  Sense strand starting at position 3214 of SEQ ID NO: 1884843
cuuguauaucaaugaagga

SEQ ID NO: 2296327 - RNA, 19 nt, Artificial Sequence
  Description of Artificial Sequence: Synthetic oligonucleotide
  Antisense strand to SEQ ID NO: 2296326
uccuucauugauauacaag

SEQ ID NO: 2296328 - RNA, 19 nt, Artificial Sequence
  Description of Artificial Sequence: Synthetic oligonucleotide
  Sense strand starting at position 3461 of SEQ ID NO: 1884843
cccugcauccgugcuacua

SEQ ID NO: 2296329 - RNA, 19 nt, Artificial Sequence
  Description of Artificial Sequence: Synthetic oligonucleotide
  Antisense strand to SEQ ID NO: 2296328
uaguagcacggaugcaggg

SEQ ID NO: 2296330 - RNA, 19 nt, Artificial Sequence
  Description of Artificial Sequence: Synthetic oligonucleotide
  Sense strand starting at position 3536 of SEQ ID NO: 1884843
ggacgaacgagucauauca

SEQ ID NO: 2296331 - RNA, 19 nt, Artificial Sequence
  Description of Artificial Sequence: Synthetic oligonucleotide
  Antisense strand to SEQ ID NO: 2296330
ugauaugacucguucgucc

SEQ ID NO: 2296332 - RNA, 19 nt, Artificial Sequence
  Description of Artificial Sequence: Synthetic oligonucleotide
  Sense strand starting at position 3560 of SEQ ID NO: 1884843
aggcguuuauccucaagga

SEQ ID NO: 2296333 - RNA, 19 nt, Artificial Sequence
  Description of Artificial Sequence: Synthetic oligonucleotide
  Antisense strand to SEQ ID NO: 2296332
uccuugaggauaaacgccu

SEQ ID NO: 2296334 - RNA, 19 nt, Artificial Sequence
  Description of Artificial Sequence: Synthetic oligonucleotide
  Sense strand starting at position 3561 of SEQ ID NO: 1884843
ggcguuuauccucaaggaa

SEQ ID NO: 2296335 - RNA, 19 nt, Artificial Sequence
  Description of Artificial Sequence: Synthetic oligonucleotide
  Antisense strand to SEQ ID NO: 2296334
uuccuugaggauaaacgcc

SEQ ID NO: 2296336 - RNA, 19 nt, Artificial Sequence
  Description of Artificial Sequence: Synthetic oligonucleotide
  Sense strand starting at position 3628 of SEQ ID NO: 1884843
gaaaguaaggguggaguuu

SEQ ID NO: 2296337 - RNA, 19 nt, Artificial Sequence
  Description of Artificial Sequence: Synthetic oligonucleotide
  Antisense strand to SEQ ID NO: 2296336
aaacuccacccuuacuuuc

SEQ ID NO: 2296338 - RNA, 19 nt, Artificial Sequence
  Description of Artificial Sequence: Synthetic oligonucleotide
  Sense strand starting at position 3656 of SEQ ID NO: 1884843
gaauacauggucugccaaa

SEQ ID NO: 2296339 - RNA, 19 nt, Artificial Sequence
  Description of Artificial Sequence: Synthetic oligonucleotide
  Antisense strand to SEQ ID NO: 2296338
uuuggcagaccauguauuc

SEQ ID NO: 2296340 - RNA, 19 nt, Artificial Sequence
  Description of Artificial Sequence: Synthetic oligonucleotide
  Sense strand starting at position 3668 of SEQ ID NO: 1884843
ugccaaauuggaggacauu

SEQ ID NO: 2296341 - RNA, 19 nt, Artificial Sequence
  Description of Artificial Sequence: Synthetic oligonucleotide
  Antisense strand to SEQ ID NO: 2296340
aauguccuccaauuuggca

SEQ ID NO: 2296342 - RNA, 19 nt, Artificial Sequence
  Description of Artificial Sequence: Synthetic oligonucleotide
  Sense strand starting at position 3785 of SEQ ID NO: 1884843
cugugcucgcaauaacaga

SEQ ID NO: 2296343 - RNA, 19 nt, Artificial Sequence
  Description of Artificial Sequence: Synthetic oligonucleotide
  Antisense strand to SEQ ID NO: 2296342
ucuguuauugcgagcacag

SEQ ID NO: 2296344 - RNA, 19 nt, Artificial Sequence
  Description of Artificial Sequence: Synthetic oligonucleotide
  Sense strand starting at position 3832 of SEQ ID NO: 1884843
ggcagaagaugccucacua

SEQ ID NO: 2296345 - RNA, 19 nt, Artificial Sequence
  Description of Artificial Sequence: Synthetic oligonucleotide
  Antisense strand to SEQ ID NO: 2296344
uagugaggcaucuucugcc

SEQ ID NO: 2296346 - RNA, 19 nt, Artificial Sequence
  Description of Artificial Sequence: Synthetic oligonucleotide
  Sense strand starting at position 219 of SEQ ID NO: 1884844
cccaguauucucugaggca

SEQ ID NO: 2296347 - RNA, 19 nt, Artificial Sequence
  Description of Artificial Sequence: Synthetic oligonucleotide
  Antisense strand to SEQ ID NO: 2296346
ugccucagagaauacuggg

SEQ ID NO: 2296348 - RNA, 19 nt, Artificial Sequence
  Description of Artificial Sequence: Synthetic oligonucleotide
  Sense strand starting at position 232 of SEQ ID NO: 1884844
gaggcaaauggaugcuuau

SEQ ID NO: 2296349 - RNA, 19 nt, Artificial Sequence
  Description of Artificial Sequence: Synthetic oligonucleotide
  Antisense strand to SEQ ID NO: 2296348
auaagcauccauuugccuc

SEQ ID NO: 2296350 - RNA, 19 nt, Artificial Sequence
  Description of Artificial Sequence: Synthetic oligonucleotide
  Sense strand starting at position 315 of SEQ ID NO: 1884844
agaauagcaguguaucaua

SEQ ID NO: 2296351 - RNA, 19 nt, Artificial Sequence
  Description of Artificial Sequence: Synthetic oligonucleotide
  Antisense strand to SEQ ID NO: 2296350
uaugauacacugcuauucu

SEQ ID NO: 2296352 - RNA, 19 nt, Artificial Sequence
  Description of Artificial Sequence: Synthetic oligonucleotide
  Sense strand starting at position 404 of SEQ ID NO: 1884844
ucuauaugcuuuccuggaa

SEQ ID NO: 2296353 - RNA, 19 nt, Artificial Sequence
  Description of Artificial Sequence: Synthetic oligonucleotide
  Antisense strand to SEQ ID NO: 2296352
uuccaggaaagcauauaga

SEQ ID NO: 2296354 - RNA, 19 nt, Artificial Sequence
  Description of Artificial Sequence: Synthetic oligonucleotide
  Sense strand starting at position 405 of SEQ ID NO: 1884844
cuauaugcuuuccuggaaa

SEQ ID NO: 2296355 - RNA, 19 nt, Artificial Sequence
  Description of Artificial Sequence: Synthetic oligonucleotide
  Antisense strand to SEQ ID NO: 2296354
uuuccaggaaagcauauag

SEQ ID NO: 2296356 - RNA, 19 nt, Artificial Sequence
  Description of Artificial Sequence: Synthetic oligonucleotide
  Sense strand starting at position 566 of SEQ ID NO: 1884844
acauaugaauuugagugua

SEQ ID NO: 2296357 - RNA, 19 nt, Artificial Sequence
  Description of Artificial Sequence: Synthetic oligonucleotide
  Antisense strand to SEQ ID NO: 2296356
uacacucaaauucauaugu

SEQ ID NO: 2296358 - RNA, 19 nt, Artificial Sequence
  Description of Artificial Sequence: Synthetic oligonucleotide
  Sense strand starting at position 595 of SEQ ID NO: 1884844
acuugagaaggccauugua

SEQ ID NO: 2296359 - RNA, 19 nt, Artificial Sequence
  Description of Artificial Sequence: Synthetic oligonucleotide
  Antisense strand to SEQ ID NO: 2296358
uacaauggccuucucaagu

SEQ ID NO: 2296360 - RNA, 19 nt, Artificial Sequence
  Description of Artificial Sequence: Synthetic oligonucleotide
  Sense strand starting at position 598 of SEQ ID NO: 1884844
ugagaaggccauuguaucu

SEQ ID NO: 2296361 - RNA, 19 nt, Artificial Sequence
  Description of Artificial Sequence: Synthetic oligonucleotide
  Antisense strand to SEQ ID NO: 2296360
agauacaauggccuucuca

SEQ ID NO: 2296362 - RNA, 19 nt, Artificial Sequence
  Description of Artificial Sequence: Synthetic oligonucleotide
  Sense strand starting at position 640 of SEQ ID NO: 1884844
gcuugagcaccugaucauu

SEQ ID NO: 2296363 - RNA, 19 nt, Artificial Sequence
  Description of Artificial Sequence: Synthetic oligonucleotide
  Antisense strand to SEQ ID NO: 2296362
aaugaucaggugcucaagc

SEQ ID NO: 2296364 - RNA, 19 nt, Artificial Sequence
  Description of Artificial Sequence: Synthetic oligonucleotide
  Sense strand starting at position 642 of SEQ ID NO: 1884844
uugagcaccugaucauuau

SEQ ID NO: 2296365 - RNA, 19 nt, Artificial Sequence
  Description of Artificial Sequence: Synthetic oligonucleotide
  Antisense strand to SEQ ID NO: 2296364
auaaugaucaggugcucaa

SEQ ID NO: 2296366 - RNA, 19 nt, Artificial Sequence
  Description of Artificial Sequence: Synthetic oligonucleotide
  Sense strand starting at position 643 of SEQ ID NO: 1884844
ugagcaccugaucauuaua

SEQ ID NO: 2296367 - RNA, 19 nt, Artificial Sequence
  Description of Artificial Sequence: Synthetic oligonucleotide
  Antisense strand to SEQ ID NO: 2296366
uauaaugaucaggugcuca

SEQ ID NO: 2296368 - RNA, 19 nt, Artificial Sequence
  Description of Artificial Sequence: Synthetic oligonucleotide
  Sense strand starting at position 646 of SEQ ID NO: 1884844
gcaccugaucauuauaaug

SEQ ID NO: 2296369 - RNA, 19 nt, Artificial Sequence
  Description of Artificial Sequence: Synthetic oligonucleotide
  Antisense strand to SEQ ID NO: 2296368
cauuauaaugaucaggugc

SEQ ID NO: 2296370 - RNA, 19 nt, Artificial Sequence
  Description of Artificial Sequence: Synthetic oligonucleotide
  Sense strand starting at position 658 of SEQ ID NO: 1884844
uauaaugacccagaugugu

SEQ ID NO: 2296371 - RNA, 19 nt, Artificial Sequence
  Description of Artificial Sequence: Synthetic oligonucleotide
  Antisense strand to SEQ ID NO: 2296370
acacaucugggucauuaua

SEQ ID NO: 2296372 - RNA, 19 nt, Artificial Sequence
  Description of Artificial Sequence: Synthetic oligonucleotide
  Sense strand starting at position 664 of SEQ ID NO: 1884844
gacccagauguguaucuuu

SEQ ID NO: 2296373 - RNA, 19 nt, Artificial Sequence
  Description of Artificial Sequence: Synthetic oligonucleotide
  Antisense strand to SEQ ID NO: 2296372
aaagauacacaucuggguc

SEQ ID NO: 2296374 - RNA, 19 nt, Artificial Sequence
  Description of Artificial Sequence: Synthetic oligonucleotide
  Sense strand starting at position 738 of SEQ ID NO: 1884844
uguauuauagcaugggaua

SEQ ID NO: 2296375 - RNA, 19 nt, Artificial Sequence
  Description of Artificial Sequence: Synthetic oligonucleotide
  Antisense strand to SEQ ID NO: 2296374
uaucccaugcuauaauaca

SEQ ID NO: 2296376 - RNA, 19 nt, Artificial Sequence
  Description of Artificial Sequence: Synthetic oligonucleotide
  Sense strand starting at position 739 of SEQ ID NO: 1884844
guauuauagcaugggauau

SEQ ID NO: 2296377 - RNA, 19 nt, Artificial Sequence
  Description of Artificial Sequence: Synthetic oligonucleotide
  Antisense strand to SEQ ID NO: 2296376
auaucccaugcuauaauac

SEQ ID NO: 2296378 - RNA, 19 nt, Artificial Sequence
  Description of Artificial Sequence: Synthetic oligonucleotide
  Sense strand starting at position 751 of SEQ ID NO: 1884844
gggauauugugccuggcag

SEQ ID NO: 2296379 - RNA, 19 nt, Artificial Sequence
  Description of Artificial Sequence: Synthetic oligonucleotide
  Antisense strand to SEQ ID NO: 2296378
cugccaggcacaauauccc

SEQ ID NO: 2296380 - RNA, 19 nt, Artificial Sequence
  Description of Artificial Sequence: Synthetic oligonucleotide
  Sense strand starting at position 752 of SEQ ID NO: 1884844
ggauauugugccuggcaga

SEQ ID NO: 2296381 - RNA, 19 nt, Artificial Sequence
  Description of Artificial Sequence: Synthetic oligonucleotide
  Antisense strand to SEQ ID NO: 2296380
ucugccaggcacaauaucc

SEQ ID NO: 2296382 - RNA, 19 nt, Artificial Sequence
  Description of Artificial Sequence: Synthetic oligonucleotide
  Sense strand starting at position 753 of SEQ ID NO: 1884844
gauauugugccuggcagau

SEQ ID NO: 2296383 - RNA, 19 nt, Artificial Sequence
  Description of Artificial Sequence: Synthetic oligonucleotide
  Antisense strand to SEQ ID NO: 2296382
aucugccaggcacaauauc

SEQ ID NO: 2296384 - RNA, 19 nt, Artificial Sequence
  Description of Artificial Sequence: Synthetic oligonucleotide
  Sense strand starting at position 801 of SEQ ID NO: 1884844
aaacacucuuggucaguga

SEQ ID NO: 2296385 - RNA, 19 nt, Artificial Sequence
  Description of Artificial Sequence: Synthetic oligonucleotide
  Antisense strand to SEQ ID NO: 2296384
ucacugaccaagaguguuu

SEQ ID NO: 2296386 - RNA, 19 nt, Artificial Sequence
  Description of Artificial Sequence: Synthetic oligonucleotide
  Sense strand starting at position 802 of SEQ ID NO: 1884844
aacacucuuggucagugau

SEQ ID NO: 2296387 - RNA, 19 nt, Artificial Sequence
  Description of Artificial Sequence: Synthetic oligonucleotide
  Antisense strand to SEQ ID NO: 2296386
aucacugaccaagaguguu

SEQ ID NO: 2296388 - RNA, 19 nt, Artificial Sequence
  Description of Artificial Sequence: Synthetic oligonucleotide
  Sense strand starting at position 804 of SEQ ID NO: 1884844
cacucuuggucagugauac

SEQ ID NO: 2296389 - RNA, 19 nt, Artificial Sequence
  Description of Artificial Sequence: Synthetic oligonucleotide
  Antisense strand to SEQ ID NO: 2296388
guaucacugaccaagagug

SEQ ID NO: 2296390 - RNA, 19 nt, Artificial Sequence
  Description of Artificial Sequence: Synthetic oligonucleotide
  Sense strand starting at position 805 of SEQ ID NO: 1884844
acucuuggucagugauaca

SEQ ID NO: 2296391 - RNA, 19 nt, Artificial Sequence
  Description of Artificial Sequence: Synthetic oligonucleotide
  Antisense strand to SEQ ID NO: 2296390
uguaucacugaccaagagu

SEQ ID NO: 2296392 - RNA, 19 nt, Artificial Sequence
  Description of Artificial Sequence: Synthetic oligonucleotide
  Sense strand starting at position 810 of SEQ ID NO: 1884844
uggucagugauacagcuaa

SEQ ID NO: 2296393 - RNA, 19 nt, Artificial Sequence
  Description of Artificial Sequence: Synthetic oligonucleotide
  Antisense strand to SEQ ID NO: 2296392
uuagcuguaucacugacca

SEQ ID NO: 2296394 - RNA, 19 nt, Artificial Sequence
  Description of Artificial Sequence: Synthetic oligonucleotide
  Sense strand starting at position 824 of SEQ ID NO: 1884844
gcuaaugauuugcaacaag

SEQ ID NO: 2296395 - RNA, 19 nt, Artificial Sequence
  Description of Artificial Sequence: Synthetic oligonucleotide
  Antisense strand to SEQ ID NO: 2296394
cuuguugcaaaucauuagc

SEQ ID NO: 2296396 - RNA, 19 nt, Artificial Sequence
  Description of Artificial Sequence: Synthetic oligonucleotide
  Sense strand starting at position 865 of SEQ ID NO: 1884844
aguaacgauuuccauauga

SEQ ID NO: 2296397 - RNA, 19 nt, Artificial Sequence
  Description of Artificial Sequence: Synthetic oligonucleotide
  Antisense strand to SEQ ID NO: 2296396
ucauauggaaaucguuacu

SEQ ID NO: 2296398 - RNA, 19 nt, Artificial Sequence
  Description of Artificial Sequence: Synthetic oligonucleotide
  Sense strand starting at position 870 of SEQ ID NO: 1884844
cgauuuccauaugaacaaa

SEQ ID NO: 2296399 - RNA, 19 nt, Artificial Sequence
  Description of Artificial Sequence: Synthetic oligonucleotide
  Antisense strand to SEQ ID NO: 2296398
uuuguucauauggaaaucg

SEQ ID NO: 2296400 - RNA, 19 nt, Artificial Sequence
  Description of Artificial Sequence: Synthetic oligonucleotide
  Sense strand starting at position 1050 of SEQ ID NO: 1884844
gucugaaguuguuugaggu

SEQ ID NO: 2296401 - RNA, 19 nt, Artificial Sequence
  Description of Artificial Sequence: Synthetic oligonucleotide
  Antisense strand to SEQ ID NO: 2296400
accucaaacaacuucagac

SEQ ID NO: 2296402 - RNA, 19 nt, Artificial Sequence
  Description of Artificial Sequence: Synthetic oligonucleotide
  Sense strand starting at position 1100 of SEQ ID NO: 1884844
gcuagacuucuuggucuug

SEQ ID NO: 2296403 - RNA, 19 nt, Artificial Sequence
  Description of Artificial Sequence: Synthetic oligonucleotide
  Antisense strand to SEQ ID NO: 2296402
caagaccaagaagucuagc

SEQ ID NO: 2296404 - RNA, 19 nt, Artificial Sequence
  Description of Artificial Sequence: Synthetic oligonucleotide
  Sense strand starting at position 1101 of SEQ ID NO: 1884844
cuagacuucuuggucuuga

SEQ ID NO: 2296405 - RNA, 19 nt, Artificial Sequence
  Description of Artificial Sequence: Synthetic oligonucleotide
  Antisense strand to SEQ ID NO: 2296404
ucaagaccaagaagucuag

SEQ ID NO: 2296406 - RNA, 19 nt, Artificial Sequence
  Description of Artificial Sequence: Synthetic oligonucleotide
  Sense strand starting at position 1102 of SEQ ID NO: 1884844
uagacuucuuggucuugaa

SEQ ID NO: 2296407 - RNA, 19 nt, Artificial Sequence
  Description of Artificial Sequence: Synthetic oligonucleotide
  Antisense strand to SEQ ID NO: 2296406
uucaagaccaagaagucua

SEQ ID NO: 2296408 - RNA, 19 nt, Artificial Sequence
  Description of Artificial Sequence: Synthetic oligonucleotide
  Sense strand starting at position 1115 of SEQ ID NO: 1884844
cuugaauucuagcuuuguc

SEQ ID NO: 2296409 - RNA, 19 nt, Artificial Sequence
  Description of Artificial Sequence: Synthetic oligonucleotide
  Antisense strand to SEQ ID NO: 2296408
gacaaagcuagaauucaag

SEQ ID NO: 2296410 - RNA, 19 nt, Artificial Sequence
  Description of Artificial Sequence: Synthetic oligonucleotide
  Sense strand starting at position 1127 of SEQ ID NO: 1884844
cuuugucacuaacuuagua

SEQ ID NO: 2296411 - RNA, 19 nt, Artificial Sequence
  Description of Artificial Sequence: Synthetic oligonucleotide
  Antisense strand to SEQ ID NO: 2296410
uacuaaguuagugacaaag

SEQ ID NO: 2296412 - RNA, 19 nt, Artificial Sequence
  Description of Artificial Sequence: Synthetic oligonucleotide
  Sense strand starting at position 1131 of SEQ ID NO: 1884844
gucacuaacuuaguaacuu

SEQ ID NO: 2296413 - RNA, 19 nt, Artificial Sequence
  Description of Artificial Sequence: Synthetic oligonucleotide
  Antisense strand to SEQ ID NO: 2296412
aaguuacuaaguuagugac

SEQ ID NO: 2296414 - RNA, 19 nt, Artificial Sequence
  Description of Artificial Sequence: Synthetic oligonucleotide
  Sense strand starting at position 1141 of SEQ ID NO: 1884844
uaguaacuuugggcaaauu

SEQ ID NO: 2296415 - RNA, 19 nt, Artificial Sequence
  Description of Artificial Sequence: Synthetic oligonucleotide
  Antisense strand to SEQ ID NO: 2296414
aauuugcccaaaguuacua

SEQ ID NO: 2296416 - RNA, 19 nt, Artificial Sequence
  Description of Artificial Sequence: Synthetic oligonucleotide
  Sense strand starting at position 1142 of SEQ ID NO: 1884844
aguaacuuugggcaaauua

SEQ ID NO: 2296417 - RNA, 19 nt, Artificial Sequence
  Description of Artificial Sequence: Synthetic oligonucleotide
  Antisense strand to SEQ ID NO: 2296416
uaauuugcccaaaguuacu

SEQ ID NO: 2296418 - RNA, 19 nt, Artificial Sequence
  Description of Artificial Sequence: Synthetic oligonucleotide
  Sense strand starting at position 1532 of SEQ ID NO: 1884844
gggaguacucccggagccu

SEQ ID NO: 2296419 - RNA, 19 nt, Artificial Sequence
  Description of Artificial Sequence: Synthetic oligonucleotide
  Antisense strand to SEQ ID NO: 2296418
aggcuccgggaguacuccc

SEQ ID NO: 2296420 - RNA, 19 nt, Artificial Sequence
  Description of Artificial Sequence: Synthetic oligonucleotide
  Sense strand starting at position 3022 of SEQ ID NO: 1884844
uguuccauugcucaguaau

SEQ ID NO: 2296421 - RNA, 19 nt, Artificial Sequence
  Description of Artificial Sequence: Synthetic oligonucleotide
  Antisense strand to SEQ ID NO: 2296420
auuacugagcaauggaaca

SEQ ID NO: 2296422 - RNA, 19 nt, Artificial Sequence
  Description of Artificial Sequence: Synthetic oligonucleotide
  Sense strand starting at position 3025 of SEQ ID NO: 1884844
uccauugcucaguaaugcu

SEQ ID NO: 2296423 - RNA, 19 nt, Artificial Sequence
  Description of Artificial Sequence: Synthetic oligonucleotide
  Antisense strand to SEQ ID NO: 2296422
agcauuacugagcaaugga

SEQ ID NO: 2296424 - RNA, 19 nt, Artificial Sequence
  Description of Artificial Sequence: Synthetic oligonucleotide
  Sense strand starting at position 3063 of SEQ ID NO: 1884844
cuccacuugucugcuugau

SEQ ID NO: 2296425 - RNA, 19 nt, Artificial Sequence
  Description of Artificial Sequence: Synthetic oligonucleotide
  Antisense strand to SEQ ID NO: 2296424
aucaagcagacaaguggag

SEQ ID NO: 2296426 - RNA, 19 nt, Artificial Sequence
  Description of Artificial Sequence: Synthetic oligonucleotide
  Sense strand starting at position 14 of SEQ ID NO: 1884845
gcagcuaggcugggaaaua

SEQ ID NO: 2296427 - RNA, 19 nt, Artificial Sequence
  Description of Artificial Sequence: Synthetic oligonucleotide
  Antisense strand to SEQ ID NO: 2296426
uauuucccagccuagcugc

SEQ ID NO: 2296428 - RNA, 19 nt, Artificial Sequence
  Description of Artificial Sequence: Synthetic oligonucleotide
  Sense strand starting at position 24 of SEQ ID NO: 1884845
ugggaaauaugugcuuuga

SEQ ID NO: 2296429 - RNA, 19 nt, Artificial Sequence
  Description of Artificial Sequence: Synthetic oligonucleotide
  Antisense strand to SEQ ID NO: 2296428
ucaaagcacauauuuccca

SEQ ID NO: 2296430 - RNA, 19 nt, Artificial Sequence
  Description of Artificial Sequence: Synthetic oligonucleotide
  Sense strand starting at position 26 of SEQ ID NO: 1884845
ggaaauaugugcuuugagg

SEQ ID NO: 2296431 - RNA, 19 nt, Artificial Sequence
  Description of Artificial Sequence: Synthetic oligonucleotide
  Antisense strand to SEQ ID NO: 2296430
ccucaaagcacauauuucc

SEQ ID NO: 2296432 - RNA, 19 nt, Artificial Sequence
  Description of Artificial Sequence: Synthetic oligonucleotide
  Sense strand starting at position 104 of SEQ ID NO: 1884845
cacgucucugugcuaguau

SEQ ID NO: 2296433 - RNA, 19 nt, Artificial Sequence
  Description of Artificial Sequence: Synthetic oligonucleotide
  Antisense strand to SEQ ID NO: 2296432
auacuagcacagagacgug

SEQ ID NO: 2296434 - RNA, 19 nt, Artificial Sequence
  Description of Artificial Sequence: Synthetic oligonucleotide
  Sense strand starting at position 401 of SEQ ID NO: 1884845
ccaguuuggcuuuauuaua

SEQ ID NO: 2296435 - RNA, 19 nt, Artificial Sequence
  Description of Artificial Sequence: Synthetic oligonucleotide
  Antisense strand to SEQ ID NO: 2296434
uauaauaaagccaaacugg

SEQ ID NO: 2296436 - RNA, 19 nt, Artificial Sequence
  Description of Artificial Sequence: Synthetic oligonucleotide
  Sense strand starting at position 504 of SEQ ID NO: 1884845
gggacuaauuaugaggaga

SEQ ID NO: 2296437 - RNA, 19 nt, Artificial Sequence
  Description of Artificial Sequence: Synthetic oligonucleotide
  Antisense strand to SEQ ID NO: 2296436
ucuccucauaauuaguccc

SEQ ID NO: 2296438 - RNA, 19 nt, Artificial Sequence
  Description of Artificial Sequence: Synthetic oligonucleotide
  Sense strand starting at position 620 of SEQ ID NO: 1884845
cuauauaauggugguggau

SEQ ID NO: 2296439 - RNA, 19 nt, Artificial Sequence
  Description of Artificial Sequence: Synthetic oligonucleotide
  Antisense strand to SEQ ID NO: 2296438
auccaccaccauuauauag

SEQ ID NO: 2296440 - RNA, 19 nt, Artificial Sequence
  Description of Artificial Sequence: Synthetic oligonucleotide
  Sense strand starting at position 699 of SEQ ID NO: 1884845
gaccuuccagucugaguua

SEQ ID NO: 2296441 - RNA, 19 nt, Artificial Sequence
  Description of Artificial Sequence: Synthetic oligonucleotide
  Antisense strand to SEQ ID NO: 2296440
uaacucagacuggaagguc

SEQ ID NO: 2296442 - RNA, 19 nt, Artificial Sequence
  Description of Artificial Sequence: Synthetic oligonucleotide
  Sense strand starting at position 759 of SEQ ID NO: 1884845
gaagcaacugacugaguuu

SEQ ID NO: 2296443 - RNA, 19 nt, Artificial Sequence
  Description of Artificial Sequence: Synthetic oligonucleotide
  Antisense strand to SEQ ID NO: 2296442
aaacucagucaguugcuuc

SEQ ID NO: 2296444 - RNA, 19 nt, Artificial Sequence
  Description of Artificial Sequence: Synthetic oligonucleotide
  Sense strand starting at position 838 of SEQ ID NO: 1884845
agaguugguaaauauguau

SEQ ID NO: 2296445 - RNA, 19 nt, Artificial Sequence
  Description of Artificial Sequence: Synthetic oligonucleotide
  Antisense strand to SEQ ID NO: 2296444
auacauauuuaccaacucu

SEQ ID NO: 2296446 - RNA, 19 nt, Artificial Sequence
  Description of Artificial Sequence: Synthetic oligonucleotide
  Sense strand starting at position 841 of SEQ ID NO: 1884845
guugguaaauauguaucau

SEQ ID NO: 2296447 - RNA, 19 nt, Artificial Sequence
  Description of Artificial Sequence: Synthetic oligonucleotide
  Antisense strand to SEQ ID NO: 2296446
augauacauauuuaccaac

SEQ ID NO: 2296448 - RNA, 19 nt, Artificial Sequence
  Description of Artificial Sequence: Synthetic oligonucleotide
  Sense strand starting at position 856 of SEQ ID NO: 1884845
ucaugagagugguuggaau

SEQ ID NO: 2296449 - RNA, 19 nt, Artificial Sequence
  Description of Artificial Sequence: Synthetic oligonucleotide
  Antisense strand to SEQ ID NO: 2296448
auuccaaccacucucauga

SEQ ID NO: 2296450 - RNA, 19 nt, Artificial Sequence
  Description of Artificial Sequence: Synthetic oligonucleotide
  Sense strand starting at position 860 of SEQ ID NO: 1884845
gagagugguuggaauggga

SEQ ID NO: 2296451 - RNA, 19 nt, Artificial Sequence
  Description of Artificial Sequence: Synthetic oligonucleotide
  Antisense strand to SEQ ID NO: 2296450
ucccauuccaaccacucuc

SEQ ID NO: 2296452 - RNA, 19 nt, Artificial Sequence
  Description of Artificial Sequence: Synthetic oligonucleotide
  Sense strand starting at position 864 of SEQ ID NO: 1884845
gugguuggaaugggauuau

SEQ ID NO: 2296453 - RNA, 19 nt, Artificial Sequence
  Description of Artificial Sequence: Synthetic oligonucleotide
  Antisense strand to SEQ ID NO: 2296452
auaaucccauuccaaccac

SEQ ID NO: 2296454 - RNA, 19 nt, Artificial Sequence
  Description of Artificial Sequence: Synthetic oligonucleotide
  Sense strand starting at position 930 of SEQ ID NO: 1884845
gcaacugaacuguauguua

SEQ ID NO: 2296455 - RNA, 19 nt, Artificial Sequence
  Description of Artificial Sequence: Synthetic oligonucleotide
  Antisense strand to SEQ ID NO: 2296454
uaacauacaguucaguugc

SEQ ID NO: 2296456 - RNA, 19 nt, Artificial Sequence
  Description of Artificial Sequence: Synthetic oligonucleotide
  Sense strand starting at position 933 of SEQ ID NO: 1884845
acugaacuguauguuauau

SEQ ID NO: 2296457 - RNA, 19 nt, Artificial Sequence
  Description of Artificial Sequence: Synthetic oligonucleotide
  Antisense strand to SEQ ID NO: 2296456
auauaacauacaguucagu

SEQ ID NO: 2296458 - RNA, 19 nt, Artificial Sequence
  Description of Artificial Sequence: Synthetic oligonucleotide
  Sense strand starting at position 1268 of SEQ ID NO: 1884845
auaggauucuaacuggcuu

SEQ ID NO: 2296459 - RNA, 19 nt, Artificial Sequence
  Description of Artificial Sequence: Synthetic oligonucleotide
  Antisense strand to SEQ ID NO: 2296458
aagccaguuagaauccuau

SEQ ID NO: 2296460 - RNA, 19 nt, Artificial Sequence
  Description of Artificial Sequence: Synthetic oligonucleotide
  Sense strand starting at position 1485 of SEQ ID NO: 1884845
uuaccaaaguauguuuaga

SEQ ID NO: 2296461 - RNA, 19 nt, Artificial Sequence
  Description of Artificial Sequence: Synthetic oligonucleotide
  Antisense strand to SEQ ID NO: 2296460
ucuaaacauacuuugguaa

SEQ ID NO: 2296462 - RNA, 19 nt, Artificial Sequence
  Description of Artificial Sequence: Synthetic oligonucleotide
  Sense strand starting at position 1496 of SEQ ID NO: 1884845
uguuuagaccuguggaaau

SEQ ID NO: 2296463 - RNA, 19 nt, Artificial Sequence
  Description of Artificial Sequence: Synthetic oligonucleotide
  Antisense strand to SEQ ID NO: 2296462
auuuccacaggucuaaaca

SEQ ID NO: 2296464 - RNA, 19 nt, Artificial Sequence
  Description of Artificial Sequence: Synthetic oligonucleotide
  Sense strand starting at position 1606 of SEQ ID NO: 1884845
cugagaaccuuugcucauc

SEQ ID NO: 2296465 - RNA, 19 nt, Artificial Sequence
  Description of Artificial Sequence: Synthetic oligonucleotide
  Antisense strand to SEQ ID NO: 2296464
gaugagcaaagguucucag

SEQ ID NO: 2296466 - RNA, 19 nt, Artificial Sequence
  Description of Artificial Sequence: Synthetic oligonucleotide
  Sense strand starting at position 1745 of SEQ ID NO: 1884845
gccuaacaugaaugagaua

SEQ ID NO: 2296467 - RNA, 19 nt, Artificial Sequence
  Description of Artificial Sequence: Synthetic oligonucleotide
  Antisense strand to SEQ ID NO: 2296466
uaucucauucauguuaggc

SEQ ID NO: 2296468 - RNA, 19 nt, Artificial Sequence
  Description of Artificial Sequence: Synthetic oligonucleotide
  Sense strand starting at position 1757 of SEQ ID NO: 1884845
ugagauaacuguuuccauu

SEQ ID NO: 2296469 - RNA, 19 nt, Artificial Sequence
  Description of Artificial Sequence: Synthetic oligonucleotide
  Antisense strand to SEQ ID NO: 2296468
aauggaaacaguuaucuca

SEQ ID NO: 2296470 - RNA, 19 nt, Artificial Sequence
  Description of Artificial Sequence: Synthetic oligonucleotide
  Sense strand starting at position 1792 of SEQ ID NO: 1884845
aaguauuagcguuagagua

SEQ ID NO: 2296471 - RNA, 19 nt, Artificial Sequence
  Description of Artificial Sequence: Synthetic oligonucleotide
  Antisense strand to SEQ ID NO: 2296470
uacucuaacgcuaauacuu

SEQ ID NO: 2296472 - RNA, 19 nt, Artificial Sequence
  Description of Artificial Sequence: Synthetic oligonucleotide
  Sense strand starting at position 1811 of SEQ ID NO: 1884845
ggcagauagauauacguga

SEQ ID NO: 2296473 - RNA, 19 nt, Artificial Sequence
  Description of Artificial Sequence: Synthetic oligonucleotide
  Antisense strand to SEQ ID NO: 2296472
ucacguauaucuaucugcc

SEQ ID NO: 2296474 - RNA, 19 nt, Artificial Sequence
  Description of Artificial Sequence: Synthetic oligonucleotide
  Sense strand starting at position 1815 of SEQ ID NO: 1884845
gauagauauacgugagcag

SEQ ID NO: 2296475 - RNA, 19 nt, Artificial Sequence
  Description of Artificial Sequence: Synthetic oligonucleotide
  Antisense strand to SEQ ID NO: 2296474
cugcucacguauaucuauc

SEQ ID NO: 2296476 - RNA, 19 nt, Artificial Sequence
  Description of Artificial Sequence: Synthetic oligonucleotide
  Sense strand starting at position 1939 of SEQ ID NO: 1884845
auuagucaaguguaagcaa

SEQ ID NO: 2296477 - RNA, 19 nt, Artificial Sequence
  Description of Artificial Sequence: Synthetic oligonucleotide
  Antisense strand to SEQ ID NO: 2296476
uugcuuacacuugacuaau

SEQ ID NO: 2296478 - RNA, 19 nt, Artificial Sequence
  Description of Artificial Sequence: Synthetic oligonucleotide
  Sense strand starting at position 2082 of SEQ ID NO: 1884845
agaauuuccuaagaaaugc

SEQ ID NO: 2296479 - RNA, 19 nt, Artificial Sequence
  Description of Artificial Sequence: Synthetic oligonucleotide
  Antisense strand to SEQ ID NO: 2296478
gcauuucuuaggaaauucu

SEQ ID NO: 2296480 - RNA, 19 nt, Artificial Sequence
  Description of Artificial Sequence: Synthetic oligonucleotide
  Sense strand starting at position 2099 of SEQ ID NO: 1884845
gcacaugugcaacaaguau

SEQ ID NO: 2296481 - RNA, 19 nt, Artificial Sequence
  Description of Artificial Sequence: Synthetic oligonucleotide
  Antisense strand to SEQ ID NO: 2296480
auacuuguugcacaugugc

SEQ ID NO: 2296482 - RNA, 19 nt, Artificial Sequence
  Description of Artificial Sequence: Synthetic oligonucleotide
  Sense strand starting at position 2131 of SEQ ID NO: 1884845
auauaaccuuccuugggua

SEQ ID NO: 2296483 - RNA, 19 nt, Artificial Sequence
  Description of Artificial Sequence: Synthetic oligonucleotide
  Antisense strand to SEQ ID NO: 2296482
uacccaaggaagguuauau

SEQ ID NO: 2296484 - RNA, 19 nt, Artificial Sequence
  Description of Artificial Sequence: Synthetic oligonucleotide
  Sense strand starting at position 2419 of SEQ ID NO: 1884845
aggguacuguaucuuuaaa

SEQ ID NO: 2296485 - RNA, 19 nt, Artificial Sequence
  Description of Artificial Sequence: Synthetic oligonucleotide
  Antisense strand to SEQ ID NO: 2296484
uuuaaagauacaguacccu

SEQ ID NO: 2296486 - RNA, 19 nt, Artificial Sequence
  Description of Artificial Sequence: Synthetic oligonucleotide
  Sense strand starting at position 2421 of SEQ ID NO: 1884845
gguacuguaucuuuaaaua

SEQ ID NO: 2296487 - RNA, 19 nt, Artificial Sequence
  Description of Artificial Sequence: Synthetic oligonucleotide
  Antisense strand to SEQ ID NO: 2296486
uauuuaaagauacaguacc

SEQ ID NO: 2296488 - RNA, 19 nt, Artificial Sequence
  Description of Artificial Sequence: Synthetic oligonucleotide
  Sense strand starting at position 2568 of SEQ ID NO: 1884845
gaaauuugaagucgugucu

SEQ ID NO: 2296489 - RNA, 19 nt, Artificial Sequence
  Description of Artificial Sequence: Synthetic oligonucleotide
  Antisense strand to SEQ ID NO: 2296488
agacacgacuucaaauuuc

SEQ ID NO: 2296490 - RNA, 19 nt, Artificial Sequence
  Description of Artificial Sequence: Synthetic oligonucleotide
  Sense strand starting at position 2588 of SEQ ID NO: 1884845
uguuaauaccaucagagua

SEQ ID NO: 2296491 - RNA, 19 nt, Artificial Sequence
  Description of Artificial Sequence: Synthetic oligonucleotide
  Antisense strand to SEQ ID NO: 2296490
uacucugaugguauuaaca

SEQ ID NO: 2296492 - RNA, 19 nt, Artificial Sequence
  Description of Artificial Sequence: Synthetic oligonucleotide
  Sense strand starting at position 2714 of SEQ ID NO: 1884845
gaauguuagcaucagcaca

SEQ ID NO: 2296493 - RNA, 19 nt, Artificial Sequence
  Description of Artificial Sequence: Synthetic oligonucleotide
  Antisense strand to SEQ ID NO: 2296492
ugugcugaugcuaacauuc

SEQ ID NO: 2296494 - RNA, 19 nt, Artificial Sequence
  Description of Artificial Sequence: Synthetic oligonucleotide
  Sense strand starting at position 2716 of SEQ ID NO: 1884845
auguuagcaucagcacaaa

SEQ ID NO: 2296495 - RNA, 19 nt, Artificial Sequence
  Description of Artificial Sequence: Synthetic oligonucleotide
  Antisense strand to SEQ ID NO: 2296494
uuugugcugaugcuaacau

SEQ ID NO: 2296496 - RNA, 19 nt, Artificial Sequence
  Description of Artificial Sequence: Synthetic oligonucleotide
  Sense strand starting at position 2928 of SEQ ID NO: 1884845
ugugacaaggcuuaauaug

SEQ ID NO: 2296497 - RNA, 19 nt, Artificial Sequence
  Description of Artificial Sequence: Synthetic oligonucleotide
  Antisense strand to SEQ ID NO: 2296496
cauauuaagccuugucaca

SEQ ID NO: 2296498 - RNA, 19 nt, Artificial Sequence
  Description of Artificial Sequence: Synthetic oligonucleotide
  Sense strand starting at position 2989 of SEQ ID NO: 1884845
agguaugaacccugagcaa

SEQ ID NO: 2296499 - RNA, 19 nt, Artificial Sequence
  Description of Artificial Sequence: Synthetic oligonucleotide
  Antisense strand to SEQ ID NO: 2296498
uugcucaggguucauaccu

SEQ ID NO: 2296500 - RNA, 19 nt, Artificial Sequence
  Description of Artificial Sequence: Synthetic oligonucleotide
  Sense strand starting at position 3010 of SEQ ID NO: 1884845
ugguuaacugccuaccaau

SEQ ID NO: 2296501 - RNA, 19 nt, Artificial Sequence
  Description of Artificial Sequence: Synthetic oligonucleotide
  Antisense strand to SEQ ID NO: 2296500
auugguaggcaguuaacca

SEQ ID NO: 2296502 - RNA, 19 nt, Artificial Sequence
  Description of Artificial Sequence: Synthetic oligonucleotide
  Sense strand starting at position 3332 of SEQ ID NO: 1884845
gaugaaguagauuguuguu

SEQ ID NO: 2296503 - RNA, 19 nt, Artificial Sequence
  Description of Artificial Sequence: Synthetic oligonucleotide
  Antisense strand to SEQ ID NO: 2296502
aacaacaaucuacuucauc

SEQ ID NO: 2296504 - RNA, 19 nt, Artificial Sequence
  Description of Artificial Sequence: Synthetic oligonucleotide
  Sense strand starting at position 3461 of SEQ ID NO: 1884845
gcacaaguucugcauuaga

SEQ ID NO: 2296505 - RNA, 19 nt, Artificial Sequence
  Description of Artificial Sequence: Synthetic oligonucleotide
  Antisense strand to SEQ ID NO: 2296504
ucuaaugcagaacuugugc

SEQ ID NO: 2296506 - RNA, 19 nt, Artificial Sequence
  Description of Artificial Sequence: Synthetic oligonucleotide
  Sense strand starting at position 896 of SEQ ID NO: 1884846
ugguaucuguuauuguuau

SEQ ID NO: 2296507 - RNA, 19 nt, Artificial Sequence
  Description of Artificial Sequence: Synthetic oligonucleotide
  Antisense strand to SEQ ID NO: 2296506
auaacaauaacagauacca

SEQ ID NO: 2296508 - RNA, 19 nt, Artificial Sequence
  Description of Artificial Sequence: Synthetic oligonucleotide
  Sense strand starting at position 910 of SEQ ID NO: 1884846
guuauuauuuguguucugu

SEQ ID NO: 2296509 - RNA, 19 nt, Artificial Sequence
  Description of Artificial Sequence: Synthetic oligonucleotide
  Antisense strand to SEQ ID NO: 2296508
acagaacacaaauaauaac

SEQ ID NO: 2296510 - RNA, 19 nt, Artificial Sequence
  Description of Artificial Sequence: Synthetic oligonucleotide
  Sense strand starting at position 912 of SEQ ID NO: 1884846
uauuauuuguguucugugu

SEQ ID NO: 2296511 - RNA, 19 nt, Artificial Sequence
  Description of Artificial Sequence: Synthetic oligonucleotide
  Antisense strand to SEQ ID NO: 2296510
acacagaacacaaauaaua

SEQ ID NO: 2296512 - RNA, 19 nt, Artificial Sequence
  Description of Artificial Sequence: Synthetic oligonucleotide
  Sense strand starting at position 956 of SEQ ID NO: 1884846
uguuauaagccaggaucau

SEQ ID NO: 2296513 - RNA, 19 nt, Artificial Sequence
  Description of Artificial Sequence: Synthetic oligonucleotide
  Antisense strand to SEQ ID NO: 2296512
augauccuggcuuauaaca

SEQ ID NO: 2296514 - RNA, 19 nt, Artificial Sequence
  Description of Artificial Sequence: Synthetic oligonucleotide
  Sense strand starting at position 957 of SEQ ID NO: 1884846
guuauaagccaggaucauc

SEQ ID NO: 2296515 - RNA, 19 nt, Artificial Sequence
  Description of Artificial Sequence: Synthetic oligonucleotide
  Antisense strand to SEQ ID NO: 2296514
gaugauccuggcuuauaac

SEQ ID NO: 2296516 - RNA, 19 nt, Artificial Sequence
  Description of Artificial Sequence: Synthetic oligonucleotide
  Sense strand starting at position 986 of SEQ ID NO: 1884846
gaaggauucuguuugcucu

SEQ ID NO: 2296517 - RNA, 19 nt, Artificial Sequence
  Description of Artificial Sequence: Synthetic oligonucleotide
  Antisense strand to SEQ ID NO: 2296516
agagcaaacagaauccuuc

SEQ ID NO: 2296518 - RNA, 19 nt, Artificial Sequence
  Description of Artificial Sequence: Synthetic oligonucleotide
  Sense strand starting at position 987 of SEQ ID NO: 1884846
aaggauucuguuugcucua

SEQ ID NO: 2296519 - RNA, 19 nt, Artificial Sequence
  Description of Artificial Sequence: Synthetic oligonucleotide
  Antisense strand to SEQ ID NO: 2296518
uagagcaaacagaauccuu

SEQ ID NO: 2296520 - RNA, 19 nt, Artificial Sequence
  Description of Artificial Sequence: Synthetic oligonucleotide
  Sense strand starting at position 988 of SEQ ID NO: 1884846
aggauucuguuugcucuau

SEQ ID NO: 2296521 - RNA, 19 nt, Artificial Sequence
  Description of Artificial Sequence: Synthetic oligonucleotide
  Antisense strand to SEQ ID NO: 2296520
auagagcaaacagaauccu

SEQ ID NO: 2296522 - RNA, 19 nt, Artificial Sequence
  Description of Artificial Sequence: Synthetic oligonucleotide
  Sense strand starting at position 989 of SEQ ID NO: 1884846
ggauucuguuugcucuauu

SEQ ID NO: 2296523 - RNA, 19 nt, Artificial Sequence
  Description of Artificial Sequence: Synthetic oligonucleotide
  Antisense strand to SEQ ID NO: 2296522
aauagagcaaacagaaucc

SEQ ID NO: 2296524 - RNA, 19 nt, Artificial Sequence
  Description of Artificial Sequence: Synthetic oligonucleotide
  Sense strand starting at position 1061 of SEQ ID NO: 1884846
gacccuucugccuggagau

SEQ ID NO: 2296525 - RNA, 19 nt, Artificial Sequence
  Description of Artificial Sequence: Synthetic oligonucleotide
  Antisense strand to SEQ ID NO: 2296524
aucuccaggcagaaggguc

SEQ ID NO: 2296526 - RNA, 19 nt, Artificial Sequence
  Description of Artificial Sequence: Synthetic oligonucleotide
  Sense strand starting at position 1062 of SEQ ID NO: 1884846
acccuucugccuggagauu

SEQ ID NO: 2296527 - RNA, 19 nt, Artificial Sequence
  Description of Artificial Sequence: Synthetic oligonucleotide
  Antisense strand to SEQ ID NO: 2296526
aaucuccaggcagaagggu

SEQ ID NO: 2296528 - RNA, 19 nt, Artificial Sequence
  Description of Artificial Sequence: Synthetic oligonucleotide
  Sense strand starting at position 1074 of SEQ ID NO: 1884846
ggagauucuugacaugagg

SEQ ID NO: 2296529 - RNA, 19 nt, Artificial Sequence
  Description of Artificial Sequence: Synthetic oligonucleotide
  Antisense strand to SEQ ID NO: 2296528
ccucaugucaagaaucucc

SEQ ID NO: 2296530 - RNA, 19 nt, Artificial Sequence
  Description of Artificial Sequence: Synthetic oligonucleotide
  Sense strand starting at position 1076 of SEQ ID NO: 1884846
agauucuugacaugaggua

SEQ ID NO: 2296531 - RNA, 19 nt, Artificial Sequence
  Description of Artificial Sequence: Synthetic oligonucleotide
  Antisense strand to SEQ ID NO: 2296530
uaccucaugucaagaaucu

SEQ ID NO: 2296532 - RNA, 19 nt, Artificial Sequence
  Description of Artificial Sequence: Synthetic oligonucleotide
  Sense strand starting at position 1167 of SEQ ID NO: 1884846
ucagccugugcucauugau

SEQ ID NO: 2296533 - RNA, 19 nt, Artificial Sequence
  Description of Artificial Sequence: Synthetic oligonucleotide
  Antisense strand to SEQ ID NO: 2296532
aucaaugagcacaggcuga

SEQ ID NO: 2296534 - RNA, 19 nt, Artificial Sequence
  Description of Artificial Sequence: Synthetic oligonucleotide
  Sense strand starting at position 1174 of SEQ ID NO: 1884846
gugcucauugauuacgcua

SEQ ID NO: 2296535 - RNA, 19 nt, Artificial Sequence
  Description of Artificial Sequence: Synthetic oligonucleotide
  Antisense strand to SEQ ID NO: 2296534
uagcguaaucaaugagcac

SEQ ID NO: 2296536 - RNA, 19 nt, Artificial Sequence
  Description of Artificial Sequence: Synthetic oligonucleotide
  Sense strand starting at position 1303 of SEQ ID NO: 1884846
ucuuucuuacuccauguga

SEQ ID NO: 2296537 - RNA, 19 nt, Artificial Sequence
  Description of Artificial Sequence: Synthetic oligonucleotide
  Antisense strand to SEQ ID NO: 2296536
ucacauggaguaagaaaga

SEQ ID NO: 2296538 - RNA, 19 nt, Artificial Sequence
  Description of Artificial Sequence: Synthetic oligonucleotide
  Sense strand starting at position 1386 of SEQ ID NO: 1884846
agugcugagaguugaauaa

SEQ ID NO: 2296539 - RNA, 19 nt, Artificial Sequence
  Description of Artificial Sequence: Synthetic oligonucleotide
  Antisense strand to SEQ ID NO: 2296538
uuauucaacucucagcacu

SEQ ID NO: 2296540 - RNA, 19 nt, Artificial Sequence
  Description of Artificial Sequence: Synthetic oligonucleotide
  Sense strand starting at position 1393 of SEQ ID NO: 1884846
agaguugaauaacacagaa

SEQ ID NO: 2296541 - RNA, 19 nt, Artificial Sequence
  Description of Artificial Sequence: Synthetic oligonucleotide
  Antisense strand to SEQ ID NO: 2296540
uucuguguuauucaacucu

SEQ ID NO: 2296542 - RNA, 19 nt, Artificial Sequence
  Description of Artificial Sequence: Synthetic oligonucleotide
  Sense strand starting at position 1444 of SEQ ID NO: 1884846
acaagauuaucagaaacag

SEQ ID NO: 2296543 - RNA, 19 nt, Artificial Sequence
  Description of Artificial Sequence: Synthetic oligonucleotide
  Antisense strand to SEQ ID NO: 2296542
cuguuucugauaaucuugu

SEQ ID NO: 2296544 - RNA, 19 nt, Artificial Sequence
  Description of Artificial Sequence: Synthetic oligonucleotide
  Sense strand starting at position 1474 of SEQ ID NO: 1884846
cccuuagcuccugggagaa

SEQ ID NO: 2296545 - RNA, 19 nt, Artificial Sequence
  Description of Artificial Sequence: Synthetic oligonucleotide
  Antisense strand to SEQ ID NO: 2296544
uucucccaggagcuaaggg

SEQ ID NO: 2296546 - RNA, 19 nt, Artificial Sequence
  Description of Artificial Sequence: Synthetic oligonucleotide
  Sense strand starting at position 1610 of SEQ ID NO: 1884846
ggcucucauuggccaauua

SEQ ID NO: 2296547 - RNA, 19 nt, Artificial Sequence
  Description of Artificial Sequence: Synthetic oligonucleotide
  Antisense strand to SEQ ID NO: 2296546
uaauuggccaaugagagcc

SEQ ID NO: 2296548 - RNA, 19 nt, Artificial Sequence
  Description of Artificial Sequence: Synthetic oligonucleotide
  Sense strand starting at position 1771 of SEQ ID NO: 1884846
gcauaauuacauugauuag

SEQ ID NO: 2296549 - RNA, 19 nt, Artificial Sequence
  Description of Artificial Sequence: Synthetic oligonucleotide
  Antisense strand to SEQ ID NO: 2296548
cuaaucaauguaauuaugc

SEQ ID NO: 2296550 - RNA, 19 nt, Artificial Sequence
  Description of Artificial Sequence: Synthetic oligonucleotide
  Sense strand starting at position 1785 of SEQ ID NO: 1884846
auuagaacacuuuggguua

SEQ ID NO: 2296551 - RNA, 19 nt, Artificial Sequence
  Description of Artificial Sequence: Synthetic oligonucleotide
  Antisense strand to SEQ ID NO: 2296550
uaacccaaaguguucuaau

SEQ ID NO: 2296552 - RNA, 19 nt, Artificial Sequence
  Description of Artificial Sequence: Synthetic oligonucleotide
  Sense strand starting at position 1788 of SEQ ID NO: 1884846
agaacacuuuggguuacaa

SEQ ID NO: 2296553 - RNA, 19 nt, Artificial Sequence
  Description of Artificial Sequence: Synthetic oligonucleotide
  Antisense strand to SEQ ID NO: 2296552
uuguaacccaaaguguucu

SEQ ID NO: 2296554 - RNA, 19 nt, Artificial Sequence
  Description of Artificial Sequence: Synthetic oligonucleotide
  Sense strand starting at position 1823 of SEQ ID NO: 1884846
ucgaaauggcauuaaacca

SEQ ID NO: 2296555 - RNA, 19 nt, Artificial Sequence
  Description of Artificial Sequence: Synthetic oligonucleotide
  Antisense strand to SEQ ID NO: 2296554
ugguuuaaugccauuucga

SEQ ID NO: 2296556 - RNA, 19 nt, Artificial Sequence
  Description of Artificial Sequence: Synthetic oligonucleotide
  Sense strand starting at position 2093 of SEQ ID NO: 1884846
guggcuggaggaugaaaua

SEQ ID NO: 2296557 - RNA, 19 nt, Artificial Sequence
  Description of Artificial Sequence: Synthetic oligonucleotide
  Antisense strand to SEQ ID NO: 2296556
uauuucauccuccagccac

SEQ ID NO: 2296558 - RNA, 19 nt, Artificial Sequence
  Description of Artificial Sequence: Synthetic oligonucleotide
  Sense strand starting at position 2119 of SEQ ID NO: 1884846
uggcuagaccugggucaua

SEQ ID NO: 2296559 - RNA, 19 nt, Artificial Sequence
  Description of Artificial Sequence: Synthetic oligonucleotide
  Antisense strand to SEQ ID NO: 2296558
uaugacccaggucuagcca

SEQ ID NO: 2296560 - RNA, 19 nt, Artificial Sequence
  Description of Artificial Sequence: Synthetic oligonucleotide
  Sense strand starting at position 2287 of SEQ ID NO: 1884846
aguagcugcgauuaaaugu

SEQ ID NO: 2296561 - RNA, 19 nt, Artificial Sequence
  Description of Artificial Sequence: Synthetic oligonucleotide
  Antisense strand to SEQ ID NO: 2296560
acauuuaaucgcagcuacu

SEQ ID NO: 2296562 - RNA, 19 nt, Artificial Sequence
  Description of Artificial Sequence: Synthetic oligonucleotide
  Sense strand starting at position 2362 of SEQ ID NO: 1884846
ccaaguuggccagauuggu

SEQ ID NO: 2296563 - RNA, 19 nt, Artificial Sequence
  Description of Artificial Sequence: Synthetic oligonucleotide
  Antisense strand to SEQ ID NO: 2296562
accaaucuggccaacuugg

SEQ ID NO: 2296564 - RNA, 19 nt, Artificial Sequence
  Description of Artificial Sequence: Synthetic oligonucleotide
  Sense strand starting at position 2368 of SEQ ID NO: 1884846
uggccagauuggucuggau

SEQ ID NO: 2296565 - RNA, 19 nt, Artificial Sequence
  Description of Artificial Sequence: Synthetic oligonucleotide
  Antisense strand to SEQ ID NO: 2296564
auccagaccaaucuggcca

SEQ ID NO: 2296566 - RNA, 19 nt, Artificial Sequence
  Description of Artificial Sequence: Synthetic oligonucleotide
  Sense strand starting at position 2370 of SEQ ID NO: 1884846
gccagauuggucuggaucu

SEQ ID NO: 2296567 - RNA, 19 nt, Artificial Sequence
  Description of Artificial Sequence: Synthetic oligonucleotide
  Antisense strand to SEQ ID NO: 2296566
agauccagaccaaucuggc

SEQ ID NO: 2296568 - RNA, 19 nt, Artificial Sequence
  Description of Artificial Sequence: Synthetic oligonucleotide
  Sense strand starting at position 2463 of SEQ ID NO: 1884846
agcauacccuaucuuguau

SEQ ID NO: 2296569 - RNA, 19 nt, Artificial Sequence
  Description of Artificial Sequence: Synthetic oligonucleotide
  Antisense strand to SEQ ID NO: 2296568
auacaagauaggguaugcu

SEQ ID NO: 2296570 - RNA, 19 nt, Artificial Sequence
  Description of Artificial Sequence: Synthetic oligonucleotide
  Sense strand starting at position 2578 of SEQ ID NO: 1884846
gacggaugcugagcagaua

SEQ ID NO: 2296571 - RNA, 19 nt, Artificial Sequence
  Description of Artificial Sequence: Synthetic oligonucleotide
  Antisense strand to SEQ ID NO: 2296570
uaucugcucagcauccguc

SEQ ID NO: 2296572 - RNA, 19 nt, Artificial Sequence
  Description of Artificial Sequence: Synthetic oligonucleotide
  Sense strand starting at position 2618 of SEQ ID NO: 1884846
uuuaucuauccaugauagu

SEQ ID NO: 2296573 - RNA, 19 nt, Artificial Sequence
  Description of Artificial Sequence: Synthetic oligonucleotide
  Antisense strand to SEQ ID NO: 2296572
acuaucauggauagauaaa

SEQ ID NO: 2296574 - RNA, 19 nt, Artificial Sequence
  Description of Artificial Sequence: Synthetic oligonucleotide
  Sense strand starting at position 2632 of SEQ ID NO: 1884846
auaguauuccucuggguua

SEQ ID NO: 2296575 - RNA, 19 nt, Artificial Sequence
  Description of Artificial Sequence: Synthetic oligonucleotide
  Antisense strand to SEQ ID NO: 2296574
uaacccagaggaauacuau

SEQ ID NO: 2296576 - RNA, 19 nt, Artificial Sequence
  Description of Artificial Sequence: Synthetic oligonucleotide
  Sense strand starting at position 2738 of SEQ ID NO: 1884846
cuaaauguauagcuugaca

SEQ ID NO: 2296577 - RNA, 19 nt, Artificial Sequence
  Description of Artificial Sequence: Synthetic oligonucleotide
  Antisense strand to SEQ ID NO: 2296576
ugucaagcuauacauuuag

SEQ ID NO: 2296578 - RNA, 19 nt, Artificial Sequence
  Description of Artificial Sequence: Synthetic oligonucleotide
  Sense strand starting at position 3130 of SEQ ID NO: 1884846
ggaaacaccuacuugcauu

SEQ ID NO: 2296579 - RNA, 19 nt, Artificial Sequence
  Description of Artificial Sequence: Synthetic oligonucleotide
  Antisense strand to SEQ ID NO: 2296578
aaugcaaguagguguuucc

SEQ ID NO: 2296580 - RNA, 19 nt, Artificial Sequence
  Description of Artificial Sequence: Synthetic oligonucleotide
  Sense strand starting at position 3396 of SEQ ID NO: 1884846
gagcacaguuugguuuaua

SEQ ID NO: 2296581 - RNA, 19 nt, Artificial Sequence
  Description of Artificial Sequence: Synthetic oligonucleotide
  Antisense strand to SEQ ID NO: 2296580
uauaaaccaaacugugcuc

SEQ ID NO: 2296582 - RNA, 19 nt, Artificial Sequence
  Description of Artificial Sequence: Synthetic oligonucleotide
  Sense strand starting at position 3466 of SEQ ID NO: 1884846
ugcuuccuucuggaaaggu

SEQ ID NO: 2296583 - RNA, 19 nt, Artificial Sequence
  Description of Artificial Sequence: Synthetic oligonucleotide
  Antisense strand to SEQ ID NO: 2296582
accuuuccagaaggaagca

SEQ ID NO: 2296584 - RNA, 19 nt, Artificial Sequence
  Description of Artificial Sequence: Synthetic oligonucleotide
  Sense strand starting at position 3825 of SEQ ID NO: 1884846
cucuaaugggagggucuua

SEQ ID NO: 2296585 - RNA, 19 nt, Artificial Sequence
  Description of Artificial Sequence: Synthetic oligonucleotide
  Antisense strand to SEQ ID NO: 2296584
uaagacccucccauuagag

SEQ ID NO: 2296586 - RNA, 19 nt, Artificial Sequence
  Description of Artificial Sequence: Synthetic oligonucleotide
  Sense strand starting at position 336 of SEQ ID NO: 1884847
guaaaucaauugucauauc

SEQ ID NO: 2296587 - RNA, 19 nt, Artificial Sequence
  Description of Artificial Sequence: Synthetic oligonucleotide
  Antisense strand to SEQ ID NO: 2296586
gauaugacaauugauuuac

SEQ ID NO: 2296588 - RNA, 19 nt, Artificial Sequence
  Description of Artificial Sequence: Synthetic oligonucleotide
  Sense strand starting at position 344 of SEQ ID NO: 1884847
auugucauaucuccuguaa

SEQ ID NO: 2296589 - RNA, 19 nt, Artificial Sequence
  Description of Artificial Sequence: Synthetic oligonucleotide
  Antisense strand to SEQ ID NO: 2296588
uuacaggagauaugacaau

SEQ ID NO: 2296590 - RNA, 19 nt, Artificial Sequence
  Description of Artificial Sequence: Synthetic oligonucleotide
  Sense strand starting at position 512 of SEQ ID NO: 1884847
aauggcugucuauaaaguu

SEQ ID NO: 2296591 - RNA, 19 nt, Artificial Sequence
  Description of Artificial Sequence: Synthetic oligonucleotide
  Antisense strand to SEQ ID NO: 2296590
aacuuuauagacagccauu

SEQ ID NO: 2296592 - RNA, 19 nt, Artificial Sequence
  Description of Artificial Sequence: Synthetic oligonucleotide
  Sense strand starting at position 620 of SEQ ID NO: 1884847
cuuuauguguacccacgaa

SEQ ID NO: 2296593 - RNA, 19 nt, Artificial Sequence
  Description of Artificial Sequence: Synthetic oligonucleotide
  Antisense strand to SEQ ID NO: 2296592
uucguggguacacauaaag

SEQ ID NO: 2296594 - RNA, 19 nt, Artificial Sequence
  Description of Artificial Sequence: Synthetic oligonucleotide
  Sense strand starting at position 1018 of SEQ ID NO: 1884847
uuuagugaacgccaaucau

SEQ ID NO: 2296595 - RNA, 19 nt, Artificial Sequence
  Description of Artificial Sequence: Synthetic oligonucleotide
  Antisense strand to SEQ ID NO: 2296594
augauuggcguucacuaaa

SEQ ID NO: 2296596 - RNA, 19 nt, Artificial Sequence
  Description of Artificial Sequence: Synthetic oligonucleotide
  Sense strand starting at position 1044 of SEQ ID NO: 1884847
cacccaguucuggaagcau

SEQ ID NO: 2296597 - RNA, 19 nt, Artificial Sequence
  Description of Artificial Sequence: Synthetic oligonucleotide
  Antisense strand to SEQ ID NO: 2296596
augcuuccagaacugggug

SEQ ID NO: 2296598 - RNA, 19 nt, Artificial Sequence
  Description of Artificial Sequence: Synthetic oligonucleotide
  Sense strand starting at position 1058 of SEQ ID NO: 1884847
agcauuuccugugugaagu

SEQ ID NO: 2296599 - RNA, 19 nt, Artificial Sequence
  Description of Artificial Sequence: Synthetic oligonucleotide
  Antisense strand to SEQ ID NO: 2296598
acuucacacaggaaaugcu

SEQ ID NO: 2296600 - RNA, 19 nt, Artificial Sequence
  Description of Artificial Sequence: Synthetic oligonucleotide
  Sense strand starting at position 1059 of SEQ ID NO: 1884847
gcauuuccugugugaaguc

SEQ ID NO: 2296601 - RNA, 19 nt, Artificial Sequence
  Description of Artificial Sequence: Synthetic oligonucleotide
  Antisense strand to SEQ ID NO: 2296600
gacuucacacaggaaaugc

SEQ ID NO: 2296602 - RNA, 19 nt, Artificial Sequence
  Description of Artificial Sequence: Synthetic oligonucleotide
  Sense strand starting at position 1069 of SEQ ID NO: 1884847
ugugaagucuucucugaag

SEQ ID NO: 2296603 - RNA, 19 nt, Artificial Sequence
  Description of Artificial Sequence: Synthetic oligonucleotide
  Antisense strand to SEQ ID NO: 2296602
cuucagagaagacuucaca

SEQ ID NO: 2296604 - RNA, 19 nt, Artificial Sequence
  Description of Artificial Sequence: Synthetic oligonucleotide
  Sense strand starting at position 1146 of SEQ ID NO: 1884847
ccuucuuaguggcucuaga

SEQ ID NO: 2296605 - RNA, 19 nt, Artificial Sequence
  Description of Artificial Sequence: Synthetic oligonucleotide
  Antisense strand to SEQ ID NO: 2296604
ucuagagccacuaagaagg

SEQ ID NO: 2296606 - RNA, 19 nt, Artificial Sequence
  Description of Artificial Sequence: Synthetic oligonucleotide
  Sense strand starting at position 1229 of SEQ ID NO: 1884847
aucagauagucacuuuaua

SEQ ID NO: 2296607 - RNA, 19 nt, Artificial Sequence
  Description of Artificial Sequence: Synthetic oligonucleotide
  Antisense strand to SEQ ID NO: 2296606
uauaaagugacuaucugau

SEQ ID NO: 2296608 - RNA, 19 nt, Artificial Sequence
  Description of Artificial Sequence: Synthetic oligonucleotide
  Sense strand starting at position 1315 of SEQ ID NO: 1884847
gguuaaaugagccaacgaa

SEQ ID NO: 2296609 - RNA, 19 nt, Artificial Sequence
  Description of Artificial Sequence: Synthetic oligonucleotide
  Antisense strand to SEQ ID NO: 2296608
uucguuggcucauuuaacc

SEQ ID NO: 2296610 - RNA, 19 nt, Artificial Sequence
  Description of Artificial Sequence: Synthetic oligonucleotide
  Sense strand starting at position 1329 of SEQ ID NO: 1884847
acgaaugacuaagaauaca

SEQ ID NO: 2296611 - RNA, 19 nt, Artificial Sequence
  Description of Artificial Sequence: Synthetic oligonucleotide
  Antisense strand to SEQ ID NO: 2296610
uguauucuuagucauucgu

SEQ ID NO: 2296612 - RNA, 19 nt, Artificial Sequence
  Description of Artificial Sequence: Synthetic oligonucleotide
  Sense strand starting at position 1355 of SEQ ID NO: 1884847
gguugaacaaauugugugu

SEQ ID NO: 2296613 - RNA, 19 nt, Artificial Sequence
  Description of Artificial Sequence: Synthetic oligonucleotide
  Antisense strand to SEQ ID NO: 2296612
acacacaauuuguucaacc

SEQ ID NO: 2296614 - RNA, 19 nt, Artificial Sequence
  Description of Artificial Sequence: Synthetic oligonucleotide
  Sense strand starting at position 1358 of SEQ ID NO: 1884847
ugaacaaauugugugucuu

SEQ ID NO: 2296615 - RNA, 19 nt, Artificial Sequence
  Description of Artificial Sequence: Synthetic oligonucleotide
  Antisense strand to SEQ ID NO: 2296614
aagacacacaauuuguuca

SEQ ID NO: 2296616 - RNA, 19 nt, Artificial Sequence
  Description of Artificial Sequence: Synthetic oligonucleotide
  Sense strand starting at position 1359 of SEQ ID NO: 1884847
gaacaaauugugugucuuu

SEQ ID NO: 2296617 - RNA, 19 nt, Artificial Sequence
  Description of Artificial Sequence: Synthetic oligonucleotide
  Antisense strand to SEQ ID NO: 2296616
aaagacacacaauuuguuc

SEQ ID NO: 2296618 - RNA, 19 nt, Artificial Sequence
  Description of Artificial Sequence: Synthetic oligonucleotide
  Sense strand starting at position 1636 of SEQ ID NO: 1884847
uggaauugcaugugagcua

SEQ ID NO: 2296619 - RNA, 19 nt, Artificial Sequence
  Description of Artificial Sequence: Synthetic oligonucleotide
  Antisense strand to SEQ ID NO: 2296618
uagcucacaugcaauucca

SEQ ID NO: 2296620 - RNA, 19 nt, Artificial Sequence
  Description of Artificial Sequence: Synthetic oligonucleotide
  Sense strand starting at position 1665 of SEQ ID NO: 1884847
cccaaauugugugucuuaa

SEQ ID NO: 2296621 - RNA, 19 nt, Artificial Sequence
  Description of Artificial Sequence: Synthetic oligonucleotide
  Antisense strand to SEQ ID NO: 2296620
uuaagacacacaauuuggg

SEQ ID NO: 2296622 - RNA, 19 nt, Artificial Sequence
  Description of Artificial Sequence: Synthetic oligonucleotide
  Sense strand starting at position 1688 of SEQ ID NO: 1884847
gauauuaaaugacaggaga

SEQ ID NO: 2296623 - RNA, 19 nt, Artificial Sequence
  Description of Artificial Sequence: Synthetic oligonucleotide
  Antisense strand to SEQ ID NO: 2296622
ucuccugucauuuaauauc

SEQ ID NO: 2296624 - RNA, 19 nt, Artificial Sequence
  Description of Artificial Sequence: Synthetic oligonucleotide
  Sense strand starting at position 1719 of SEQ ID NO: 1884847
ggauauugucccuauucca

SEQ ID NO: 2296625 - RNA, 19 nt, Artificial Sequence
  Description of Artificial Sequence: Synthetic oligonucleotide
  Antisense strand to SEQ ID NO: 2296624
uggaauagggacaauaucc

SEQ ID NO: 2296626 - RNA, 19 nt, Artificial Sequence
  Description of Artificial Sequence: Synthetic oligonucleotide
  Sense strand starting at position 1755 of SEQ ID NO: 1884847
acuguuggccuuggaggau

SEQ ID NO: 2296627 - RNA, 19 nt, Artificial Sequence
  Description of Artificial Sequence: Synthetic oligonucleotide
  Antisense strand to SEQ ID NO: 2296626
auccuccaaggccaacagu

SEQ ID NO: 2296628 - RNA, 19 nt, Artificial Sequence
  Description of Artificial Sequence: Synthetic oligonucleotide
  Sense strand starting at position 1820 of SEQ ID NO: 1884847
ugaagcaucuagguaaaga

SEQ ID NO: 2296629 - RNA, 19 nt, Artificial Sequence
  Description of Artificial Sequence: Synthetic oligonucleotide
  Antisense strand to SEQ ID NO: 2296628
ucuuuaccuagaugcuuca

SEQ ID NO: 2296630 - RNA, 19 nt, Artificial Sequence
  Description of Artificial Sequence: Synthetic oligonucleotide
  Sense strand starting at position 2106 of SEQ ID NO: 1884847
gugggagugggcuaaauaa

SEQ ID NO: 2296631 - RNA, 19 nt, Artificial Sequence
  Description of Artificial Sequence: Synthetic oligonucleotide
  Antisense strand to SEQ ID NO: 2296630
uuauuuagcccacucccac

SEQ ID NO: 2296632 - RNA, 19 nt, Artificial Sequence
  Description of Artificial Sequence: Synthetic oligonucleotide
  Sense strand starting at position 2137 of SEQ ID NO: 1884847
ggaggaaucaauugucagu

SEQ ID NO: 2296633 - RNA, 19 nt, Artificial Sequence
  Description of Artificial Sequence: Synthetic oligonucleotide
  Antisense strand to SEQ ID NO: 2296632
acugacaauugauuccucc

SEQ ID NO: 2296634 - RNA, 19 nt, Artificial Sequence
  Description of Artificial Sequence: Synthetic oligonucleotide
  Sense strand starting at position 2235 of SEQ ID NO: 1884847
uuaguuaugccauauucua

SEQ ID NO: 2296635 - RNA, 19 nt, Artificial Sequence
  Description of Artificial Sequence: Synthetic oligonucleotide
  Antisense strand to SEQ ID NO: 2296634
uagaauauggcauaacuaa

SEQ ID NO: 2296636 - RNA, 19 nt, Artificial Sequence
  Description of Artificial Sequence: Synthetic oligonucleotide
  Sense strand starting at position 2248 of SEQ ID NO: 1884847
auucuaggugucugacuuu

SEQ ID NO: 2296637 - RNA, 19 nt, Artificial Sequence
  Description of Artificial Sequence: Synthetic oligonucleotide
  Antisense strand to SEQ ID NO: 2296636
aaagucagacaccuagaau

SEQ ID NO: 2296638 - RNA, 19 nt, Artificial Sequence
  Description of Artificial Sequence: Synthetic oligonucleotide
  Sense strand starting at position 2251 of SEQ ID NO: 1884847
cuaggugucugacuuugaa

SEQ ID NO: 2296639 - RNA, 19 nt, Artificial Sequence
  Description of Artificial Sequence: Synthetic oligonucleotide
  Antisense strand to SEQ ID NO: 2296638
uucaaagucagacaccuag

SEQ ID NO: 2296640 - RNA, 19 nt, Artificial Sequence
  Description of Artificial Sequence: Synthetic oligonucleotide
  Sense strand starting at position 2254 of SEQ ID NO: 1884847
ggugucugacuuugaauag

SEQ ID NO: 2296641 - RNA, 19 nt, Artificial Sequence
  Description of Artificial Sequence: Synthetic oligonucleotide
  Antisense strand to SEQ ID NO: 2296640
cuauucaaagucagacacc

SEQ ID NO: 2296642 - RNA, 19 nt, Artificial Sequence
  Description of Artificial Sequence: Synthetic oligonucleotide
  Sense strand starting at position 2426 of SEQ ID NO: 1884847
uuaagagucucccucuguu

SEQ ID NO: 2296643 - RNA, 19 nt, Artificial Sequence
  Description of Artificial Sequence: Synthetic oligonucleotide
  Antisense strand to SEQ ID NO: 2296642
aacagagggagacucuuaa

SEQ ID NO: 2296644 - RNA, 19 nt, Artificial Sequence
  Description of Artificial Sequence: Synthetic oligonucleotide
  Sense strand starting at position 2841 of SEQ ID NO: 1884847
gugaauugguuguuaaaca

SEQ ID NO: 2296645 - RNA, 19 nt, Artificial Sequence
  Description of Artificial Sequence: Synthetic oligonucleotide
  Antisense strand to SEQ ID NO: 2296644
uguuuaacaaccaauucac

SEQ ID NO: 2296646 - RNA, 19 nt, Artificial Sequence
  Description of Artificial Sequence: Synthetic oligonucleotide
  Sense strand starting at position 2849 of SEQ ID NO: 1884847
guuguuaaacaaggcauua

SEQ ID NO: 2296647 - RNA, 19 nt, Artificial Sequence
  Description of Artificial Sequence: Synthetic oligonucleotide
  Antisense strand to SEQ ID NO: 2296646
uaaugccuuguuuaacaac

SEQ ID NO: 2296648 - RNA, 19 nt, Artificial Sequence
  Description of Artificial Sequence: Synthetic oligonucleotide
  Sense strand starting at position 2993 of SEQ ID NO: 1884847
agcucacaaguuugaaauc

SEQ ID NO: 2296649 - RNA, 19 nt, Artificial Sequence
  Description of Artificial Sequence: Synthetic oligonucleotide
  Antisense strand to SEQ ID NO: 2296648
gauuucaaacuugugagcu

SEQ ID NO: 2296650 - RNA, 19 nt, Artificial Sequence
  Description of Artificial Sequence: Synthetic oligonucleotide
  Sense strand starting at position 3242 of SEQ ID NO: 1884847
agucaucucuuccugauua

SEQ ID NO: 2296651 - RNA, 19 nt, Artificial Sequence
  Description of Artificial Sequence: Synthetic oligonucleotide
  Antisense strand to SEQ ID NO: 2296650
uaaucaggaagagaugacu

SEQ ID NO: 2296652 - RNA, 19 nt, Artificial Sequence
  Description of Artificial Sequence: Synthetic oligonucleotide
  Sense strand starting at position 3268 of SEQ ID NO: 1884847
cuuaucuaugcucaugagu

SEQ ID NO: 2296653 - RNA, 19 nt, Artificial Sequence
  Description of Artificial Sequence: Synthetic oligonucleotide
  Antisense strand to SEQ ID NO: 2296652
acucaugagcauagauaag

SEQ ID NO: 2296654 - RNA, 19 nt, Artificial Sequence
  Description of Artificial Sequence: Synthetic oligonucleotide
  Sense strand starting at position 3271 of SEQ ID NO: 1884847
aucuaugcucaugaguuua

SEQ ID NO: 2296655 - RNA, 19 nt, Artificial Sequence
  Description of Artificial Sequence: Synthetic oligonucleotide
  Antisense strand to SEQ ID NO: 2296654
uaaacucaugagcauagau

SEQ ID NO: 2296656 - RNA, 19 nt, Artificial Sequence
  Description of Artificial Sequence: Synthetic oligonucleotide
  Sense strand starting at position 3273 of SEQ ID NO: 1884847
cuaugcucaugaguuuauu

SEQ ID NO: 2296657 - RNA, 19 nt, Artificial Sequence
  Description of Artificial Sequence: Synthetic oligonucleotide
  Antisense strand to SEQ ID NO: 2296656
aauaaacucaugagcauag

SEQ ID NO: 2296658 - RNA, 19 nt, Artificial Sequence
  Description of Artificial Sequence: Synthetic oligonucleotide
  Sense strand starting at position 3354 of SEQ ID NO: 1884847
uugggaaguuuccuauuga

SEQ ID NO: 2296659 - RNA, 19 nt, Artificial Sequence
  Description of Artificial Sequence: Synthetic oligonucleotide
  Antisense strand to SEQ ID NO: 2296658
ucaauaggaaacuucccaa

SEQ ID NO: 2296660 - RNA, 19 nt, Artificial Sequence
  Description of Artificial Sequence: Synthetic oligonucleotide
  Sense strand starting at position 3522 of SEQ ID NO: 1884847
cccuuuguucuugaauguu

SEQ ID NO: 2296661 - RNA, 19 nt, Artificial Sequence
  Description of Artificial Sequence: Synthetic oligonucleotide
  Antisense strand to SEQ ID NO: 2296660
aacauucaagaacaaaggg

SEQ ID NO: 2296662 - RNA, 19 nt, Artificial Sequence
  Description of Artificial Sequence: Synthetic oligonucleotide
  Sense strand starting at position 3583 of SEQ ID NO: 1884847
uuccauuaguguccuuaac

SEQ ID NO: 2296663 - RNA, 19 nt, Artificial Sequence
  Description of Artificial Sequence: Synthetic oligonucleotide
  Antisense strand to SEQ ID NO: 2296662
guuaaggacacuaauggaa

SEQ ID NO: 2296664 - RNA, 19 nt, Artificial Sequence
  Description of Artificial Sequence: Synthetic oligonucleotide
  Sense strand starting at position 3585 of SEQ ID NO: 1884847
ccauuaguguccuuaacau

SEQ ID NO: 2296665 - RNA, 19 nt, Artificial Sequence
  Description of Artificial Sequence: Synthetic oligonucleotide
  Antisense strand to SEQ ID NO: 2296664
auguuaaggacacuaaugg

SEQ ID NO: 2296666 - RNA, 19 nt, Artificial Sequence
  Description of Artificial Sequence: Synthetic oligonucleotide
  Sense strand starting at position 2490 of SEQ ID NO: 1884848
gccggauucgggagaagcu

SEQ ID NO: 2296667 - RNA, 19 nt, Artificial Sequence
  Description of Artificial Sequence: Synthetic oligonucleotide
  Antisense strand to SEQ ID NO: 2296666
agcuucucccgaauccggc

SEQ ID NO: 2296668 - RNA, 19 nt, Artificial Sequence
  Description of Artificial Sequence: Synthetic oligonucleotide
  Sense strand starting at position 2537 of SEQ ID NO: 1884848
uugccucuugccgggagau

SEQ ID NO: 2296669 - RNA, 19 nt, Artificial Sequence
  Description of Artificial Sequence: Synthetic oligonucleotide
  Antisense strand to SEQ ID NO: 2296668
aucucccggcaagaggcaa

SEQ ID NO: 2296670 - RNA, 19 nt, Artificial Sequence
  Description of Artificial Sequence: Synthetic oligonucleotide
  Sense strand starting at position 2538 of SEQ ID NO: 1884848
ugccucuugccgggagauu

SEQ ID NO: 2296671 - RNA, 19 nt, Artificial Sequence
  Description of Artificial Sequence: Synthetic oligonucleotide
  Antisense strand to SEQ ID NO: 2296670
aaucucccggcaagaggca

SEQ ID NO: 2296672 - RNA, 19 nt, Artificial Sequence
  Description of Artificial Sequence: Synthetic oligonucleotide
  Sense strand starting at position 2880 of SEQ ID NO: 1884848
guugauuguuggcguguca

SEQ ID NO: 2296673 - RNA, 19 nt, Artificial Sequence
  Description of Artificial Sequence: Synthetic oligonucleotide
  Antisense strand to SEQ ID NO: 2296672
ugacacgccaacaaucaac

SEQ ID NO: 2296674 - RNA, 19 nt, Artificial Sequence
  Description of Artificial Sequence: Synthetic oligonucleotide
  Sense strand starting at position 2891 of SEQ ID NO: 1884848
gcgugucaggacggugauu

SEQ ID NO: 2296675 - RNA, 19 nt, Artificial Sequence
  Description of Artificial Sequence: Synthetic oligonucleotide
  Antisense strand to SEQ ID NO: 2296674
aaucaccguccugacacgc

SEQ ID NO: 2296676 - RNA, 19 nt, Artificial Sequence
  Description of Artificial Sequence: Synthetic oligonucleotide
  Sense strand starting at position 2901 of SEQ ID NO: 1884848
acggugauuccucgggagu

SEQ ID NO: 2296677 - RNA, 19 nt, Artificial Sequence
  Description of Artificial Sequence: Synthetic oligonucleotide
  Antisense strand to SEQ ID NO: 2296676
acucccgaggaaucaccgu

SEQ ID NO: 2296678 - RNA, 19 nt, Artificial Sequence
  Description of Artificial Sequence: Synthetic oligonucleotide
  Sense strand starting at position 2902 of SEQ ID NO: 1884848
cggugauuccucgggaguu

SEQ ID NO: 2296679 - RNA, 19 nt, Artificial Sequence
  Description of Artificial Sequence: Synthetic oligonucleotide
  Antisense strand to SEQ ID NO: 2296678
aacucccgaggaaucaccg

SEQ ID NO: 2296680 - RNA, 19 nt, Artificial Sequence
  Description of Artificial Sequence: Synthetic oligonucleotide
  Sense strand starting at position 2903 of SEQ ID NO: 1884848
ggugauuccucgggaguug

SEQ ID NO: 2296681 - RNA, 19 nt, Artificial Sequence
  Description of Artificial Sequence: Synthetic oligonucleotide
  Antisense strand to SEQ ID NO: 2296680
caacucccgaggaaucacc

SEQ ID NO: 2296682 - RNA, 19 nt, Artificial Sequence
  Description of Artificial Sequence: Synthetic oligonucleotide
  Sense strand starting at position 2976 of SEQ ID NO: 1884848
acaguuguuuccgauucgu

SEQ ID NO: 2296683 - RNA, 19 nt, Artificial Sequence
  Description of Artificial Sequence: Synthetic oligonucleotide
  Antisense strand to SEQ ID NO: 2296682
acgaaucggaaacaacugu

SEQ ID NO: 2296684 - RNA, 19 nt, Artificial Sequence
  Description of Artificial Sequence: Synthetic oligonucleotide
  Sense strand starting at position 2978 of SEQ ID NO: 1884848
aguuguuuccgauucgugu

SEQ ID NO: 2296685 - RNA, 19 nt, Artificial Sequence
  Description of Artificial Sequence: Synthetic oligonucleotide
  Antisense strand to SEQ ID NO: 2296684
acacgaaucggaaacaacu

SEQ ID NO: 2296686 - RNA, 19 nt, Artificial Sequence
  Description of Artificial Sequence: Synthetic oligonucleotide
  Sense strand starting at position 2979 of SEQ ID NO: 1884848
guuguuuccgauucguguu

SEQ ID NO: 2296687 - RNA, 19 nt, Artificial Sequence
  Description of Artificial Sequence: Synthetic oligonucleotide
  Antisense strand to SEQ ID NO: 2296686
aacacgaaucggaaacaac

SEQ ID NO: 2296688 - RNA, 19 nt, Artificial Sequence
  Description of Artificial Sequence: Synthetic oligonucleotide
  Sense strand starting at position 2982 of SEQ ID NO: 1884848
guuuccgauucguguuuau

SEQ ID NO: 2296689 - RNA, 19 nt, Artificial Sequence
  Description of Artificial Sequence: Synthetic oligonucleotide
  Antisense strand to SEQ ID NO: 2296688
auaaacacgaaucggaaac

SEQ ID NO: 2296690 - RNA, 19 nt, Artificial Sequence
  Description of Artificial Sequence: Synthetic oligonucleotide
  Sense strand starting at position 2984 of SEQ ID NO: 1884848
uuccgauucguguuuauuc

SEQ ID NO: 2296691 - RNA, 19 nt, Artificial Sequence
  Description of Artificial Sequence: Synthetic oligonucleotide
  Antisense strand to SEQ ID NO: 2296690
gaauaaacacgaaucggaa

SEQ ID NO: 2296692 - RNA, 19 nt, Artificial Sequence
  Description of Artificial Sequence: Synthetic oligonucleotide
  Sense strand starting at position 3116 of SEQ ID NO: 1884848
ucccauccugcgggagaau

SEQ ID NO: 2296693 - RNA, 19 nt, Artificial Sequence
  Description of Artificial Sequence: Synthetic oligonucleotide
  Antisense strand to SEQ ID NO: 2296692
auucucccgcaggauggga

SEQ ID NO: 2296694 - RNA, 19 nt, Artificial Sequence
  Description of Artificial Sequence: Synthetic oligonucleotide
  Sense strand starting at position 3125 of SEQ ID NO: 1884848
gcgggagaauccuguggcu

SEQ ID NO: 2296695 - RNA, 19 nt, Artificial Sequence
  Description of Artificial Sequence: Synthetic oligonucleotide
  Antisense strand to SEQ ID NO: 2296694
agccacaggauucucccgc

SEQ ID NO: 2296696 - RNA, 19 nt, Artificial Sequence
  Description of Artificial Sequence: Synthetic oligonucleotide
  Sense strand starting at position 3127 of SEQ ID NO: 1884848
gggagaauccuguggcuaa

SEQ ID NO: 2296697 - RNA, 19 nt, Artificial Sequence
  Description of Artificial Sequence: Synthetic oligonucleotide
  Antisense strand to SEQ ID NO: 2296696
uuagccacaggauucuccc

SEQ ID NO: 2296698 - RNA, 19 nt, Artificial Sequence
  Description of Artificial Sequence: Synthetic oligonucleotide
  Sense strand starting at position 3128 of SEQ ID NO: 1884848
ggagaauccuguggcuaag

SEQ ID NO: 2296699 - RNA, 19 nt, Artificial Sequence
  Description of Artificial Sequence: Synthetic oligonucleotide
  Antisense strand to SEQ ID NO: 2296698
cuuagccacaggauucucc

SEQ ID NO: 2296700 - RNA, 19 nt, Artificial Sequence
  Description of Artificial Sequence: Synthetic oligonucleotide
  Sense strand starting at position 3443 of SEQ ID NO: 1884848
ggcuucuguugguaucgau

SEQ ID NO: 2296701 - RNA, 19 nt, Artificial Sequence
  Description of Artificial Sequence: Synthetic oligonucleotide
  Antisense strand to SEQ ID NO: 2296700
aucgauaccaacagaagcc

SEQ ID NO: 2296702 - RNA, 19 nt, Artificial Sequence
  Description of Artificial Sequence: Synthetic oligonucleotide
  Sense strand starting at position 3450 of SEQ ID NO: 1884848
guugguaucgauugcuguu

SEQ ID NO: 2296703 - RNA, 19 nt, Artificial Sequence
  Description of Artificial Sequence: Synthetic oligonucleotide
  Antisense strand to SEQ ID NO: 2296702
aacagcaaucgauaccaac

SEQ ID NO: 2296704 - RNA, 19 nt, Artificial Sequence
  Description of Artificial Sequence: Synthetic oligonucleotide
  Sense strand starting at position 3455 of SEQ ID NO: 1884848
uaucgauugcuguucguga

SEQ ID NO: 2296705 - RNA, 19 nt, Artificial Sequence
  Description of Artificial Sequence: Synthetic oligonucleotide
  Antisense strand to SEQ ID NO: 2296704
ucacgaacagcaaucgaua

SEQ ID NO: 2296706 - RNA, 19 nt, Artificial Sequence
  Description of Artificial Sequence: Synthetic oligonucleotide
  Sense strand starting at position 3456 of SEQ ID NO: 1884848
aucgauugcuguucgugau

SEQ ID NO: 2296707 - RNA, 19 nt, Artificial Sequence
  Description of Artificial Sequence: Synthetic oligonucleotide
  Antisense strand to SEQ ID NO: 2296706
aucacgaacagcaaucgau

SEQ ID NO: 2296708 - RNA, 19 nt, Artificial Sequence
  Description of Artificial Sequence: Synthetic oligonucleotide
  Sense strand starting at position 3457 of SEQ ID NO: 1884848
ucgauugcuguucgugaua

SEQ ID NO: 2296709 - RNA, 19 nt, Artificial Sequence
  Description of Artificial Sequence: Synthetic oligonucleotide
  Antisense strand to SEQ ID NO: 2296708
uaucacgaacagcaaucga

SEQ ID NO: 2296710 - RNA, 19 nt, Artificial Sequence
  Description of Artificial Sequence: Synthetic oligonucleotide
  Sense strand starting at position 3459 of SEQ ID NO: 1884848
gauugcuguucgugauaaa

SEQ ID NO: 2296711 - RNA, 19 nt, Artificial Sequence
  Description of Artificial Sequence: Synthetic oligonucleotide
  Antisense strand to SEQ ID NO: 2296710
uuuaucacgaacagcaauc

SEQ ID NO: 2296712 - RNA, 19 nt, Artificial Sequence
  Description of Artificial Sequence: Synthetic oligonucleotide
  Sense strand starting at position 3460 of SEQ ID NO: 1884848
auugcuguucgugauaaau

SEQ ID NO: 2296713 - RNA, 19 nt, Artificial Sequence
  Description of Artificial Sequence: Synthetic oligonucleotide
  Antisense strand to SEQ ID NO: 2296712
auuuaucacgaacagcaau

SEQ ID NO: 2296714 - RNA, 19 nt, Artificial Sequence
  Description of Artificial Sequence: Synthetic oligonucleotide
  Sense strand starting at position 3462 of SEQ ID NO: 1884848
ugcuguucgugauaaauua

SEQ ID NO: 2296715 - RNA, 19 nt, Artificial Sequence
  Description of Artificial Sequence: Synthetic oligonucleotide
  Antisense strand to SEQ ID NO: 2296714
uaauuuaucacgaacagca

SEQ ID NO: 2296716 - RNA, 19 nt, Artificial Sequence
  Description of Artificial Sequence: Synthetic oligonucleotide
  Sense strand starting at position 3469 of SEQ ID NO: 1884848
cgugauaaauuagcuacau

SEQ ID NO: 2296717 - RNA, 19 nt, Artificial Sequence
  Description of Artificial Sequence: Synthetic oligonucleotide
  Antisense strand to SEQ ID NO: 2296716
auguagcuaauuuaucacg

SEQ ID NO: 2296718 - RNA, 19 nt, Artificial Sequence
  Description of Artificial Sequence: Synthetic oligonucleotide
  Sense strand starting at position 3470 of SEQ ID NO: 1884848
gugauaaauuagcuacaua

SEQ ID NO: 2296719 - RNA, 19 nt, Artificial Sequence
  Description of Artificial Sequence: Synthetic oligonucleotide
  Antisense strand to SEQ ID NO: 2296718
uauguagcuaauuuaucac

SEQ ID NO: 2296720 - RNA, 19 nt, Artificial Sequence
  Description of Artificial Sequence: Synthetic oligonucleotide
  Sense strand starting at position 3495 of SEQ ID NO: 1884848
uuucauacguguguaggua

SEQ ID NO: 2296721 - RNA, 19 nt, Artificial Sequence
  Description of Artificial Sequence: Synthetic oligonucleotide
  Antisense strand to SEQ ID NO: 2296720
uaccuacacacguaugaaa

SEQ ID NO: 2296722 - RNA, 19 nt, Artificial Sequence
  Description of Artificial Sequence: Synthetic oligonucleotide
  Sense strand starting at position 3496 of SEQ ID NO: 1884848
uucauacguguguagguau

SEQ ID NO: 2296723 - RNA, 19 nt, Artificial Sequence
  Description of Artificial Sequence: Synthetic oligonucleotide
  Antisense strand to SEQ ID NO: 2296722
auaccuacacacguaugaa

SEQ ID NO: 2296724 - RNA, 19 nt, Artificial Sequence
  Description of Artificial Sequence: Synthetic oligonucleotide
  Sense strand starting at position 3527 of SEQ ID NO: 1884848
gaacuugucugccugucaa

SEQ ID NO: 2296725 - RNA, 19 nt, Artificial Sequence
  Description of Artificial Sequence: Synthetic oligonucleotide
  Antisense strand to SEQ ID NO: 2296724
uugacaggcagacaaguuc

SEQ ID NO: 2296726 - RNA, 19 nt, Artificial Sequence
  Description of Artificial Sequence: Synthetic oligonucleotide
  Sense strand starting at position 3551 of SEQ ID NO: 1884848
aagccuuuguuguguuuaa

SEQ ID NO: 2296727 - RNA, 19 nt, Artificial Sequence
  Description of Artificial Sequence: Synthetic oligonucleotide
  Antisense strand to SEQ ID NO: 2296726
uuaaacacaacaaaggcuu

SEQ ID NO: 2296728 - RNA, 19 nt, Artificial Sequence
  Description of Artificial Sequence: Synthetic oligonucleotide
  Sense strand starting at position 3837 of SEQ ID NO: 1884848
uuguacuugugcguuucau

SEQ ID NO: 2296729 - RNA, 19 nt, Artificial Sequence
  Description of Artificial Sequence: Synthetic oligonucleotide
  Antisense strand to SEQ ID NO: 2296728
augaaacgcacaaguacaa

SEQ ID NO: 2296730 - RNA, 19 nt, Artificial Sequence
  Description of Artificial Sequence: Synthetic oligonucleotide
  Sense strand starting at position 3838 of SEQ ID NO: 1884848
uguacuugugcguuucauu

SEQ ID NO: 2296731 - RNA, 19 nt, Artificial Sequence
  Description of Artificial Sequence: Synthetic oligonucleotide
  Antisense strand to SEQ ID NO: 2296730
aaugaaacgcacaaguaca

SEQ ID NO: 2296732 - RNA, 19 nt, Artificial Sequence
  Description of Artificial Sequence: Synthetic oligonucleotide
  Sense strand starting at position 3884 of SEQ ID NO: 1884848
cuuuauccuccuggugagu

SEQ ID NO: 2296733 - RNA, 19 nt, Artificial Sequence
  Description of Artificial Sequence: Synthetic oligonucleotide
  Antisense strand to SEQ ID NO: 2296732
acucaccaggaggauaaag

SEQ ID NO: 2296734 - RNA, 19 nt, Artificial Sequence
  Description of Artificial Sequence: Synthetic oligonucleotide
  Sense strand starting at position 3939 of SEQ ID NO: 1884848
uugggaaccuuugauagcu

SEQ ID NO: 2296735 - RNA, 19 nt, Artificial Sequence
  Description of Artificial Sequence: Synthetic oligonucleotide
  Antisense strand to SEQ ID NO: 2296734
agcuaucaaagguucccaa

SEQ ID NO: 2296736 - RNA, 19 nt, Artificial Sequence
  Description of Artificial Sequence: Synthetic oligonucleotide
  Sense strand starting at position 3948 of SEQ ID NO: 1884848
uuugauagcuaguauauga

SEQ ID NO: 2296737 - RNA, 19 nt, Artificial Sequence
  Description of Artificial Sequence: Synthetic oligonucleotide
  Antisense strand to SEQ ID NO: 2296736
ucauauacuagcuaucaaa

SEQ ID NO: 2296738 - RNA, 19 nt, Artificial Sequence
  Description of Artificial Sequence: Synthetic oligonucleotide
  Sense strand starting at position 3958 of SEQ ID NO: 1884848
aguauaugaaaugggcuua

SEQ ID NO: 2296739 - RNA, 19 nt, Artificial Sequence
  Description of Artificial Sequence: Synthetic oligonucleotide
  Antisense strand to SEQ ID NO: 2296738
uaagcccauuucauauacu

SEQ ID NO: 2296740 - RNA, 19 nt, Artificial Sequence
  Description of Artificial Sequence: Synthetic oligonucleotide
  Sense strand starting at position 3959 of SEQ ID NO: 1884848
guauaugaaaugggcuuau

SEQ ID NO: 2296741 - RNA, 19 nt, Artificial Sequence
  Description of Artificial Sequence: Synthetic oligonucleotide
  Antisense strand to SEQ ID NO: 2296740
auaagcccauuucauauac

SEQ ID NO: 2296742 - RNA, 19 nt, Artificial Sequence
  Description of Artificial Sequence: Synthetic oligonucleotide
  Sense strand starting at position 240 of SEQ ID NO: 1884849
aaugaaguuucccggcguu

SEQ ID NO: 2296743 - RNA, 19 nt, Artificial Sequence
  Description of Artificial Sequence: Synthetic oligonucleotide
  Antisense strand to SEQ ID NO: 2296742
aacgccgggaaacuucauu

SEQ ID NO: 2296744 - RNA, 19 nt, Artificial Sequence
  Description of Artificial Sequence: Synthetic oligonucleotide
  Sense strand starting at position 243 of SEQ ID NO: 1884849
gaaguuucccggcguuaca

SEQ ID NO: 2296745 - RNA, 19 nt, Artificial Sequence
  Description of Artificial Sequence: Synthetic oligonucleotide
  Antisense strand to SEQ ID NO: 2296744
uguaacgccgggaaacuuc

SEQ ID NO: 2296746 - RNA, 19 nt, Artificial Sequence
  Description of Artificial Sequence: Synthetic oligonucleotide
  Sense strand starting at position 254 of SEQ ID NO: 1884849
gcguuacacugccauugua

SEQ ID NO: 2296747 - RNA, 19 nt, Artificial Sequence
  Description of Artificial Sequence: Synthetic oligonucleotide
  Antisense strand to SEQ ID NO: 2296746
uacaauggcaguguaacgc

SEQ ID NO: 2296748 - RNA, 19 nt, Artificial Sequence
  Description of Artificial Sequence: Synthetic oligonucleotide
  Sense strand starting at position 1406 of SEQ ID NO: 1884849
gccggaguugccgcucaau

SEQ ID NO: 2296749 - RNA, 19 nt, Artificial Sequence
  Description of Artificial Sequence: Synthetic oligonucleotide
  Antisense strand to SEQ ID NO: 2296748
auugagcggcaacuccggc

SEQ ID NO: 2296750 - RNA, 19 nt, Artificial Sequence
  Description of Artificial Sequence: Synthetic oligonucleotide
  Sense strand starting at position 1408 of SEQ ID NO: 1884849
cggaguugccgcucaauua

SEQ ID NO: 2296751 - RNA, 19 nt, Artificial Sequence
  Description of Artificial Sequence: Synthetic oligonucleotide
  Antisense strand to SEQ ID NO: 2296750
uaauugagcggcaacuccg

SEQ ID NO: 2296752 - RNA, 19 nt, Artificial Sequence
  Description of Artificial Sequence: Synthetic oligonucleotide
  Sense strand starting at position 1409 of SEQ ID NO: 1884849
ggaguugccgcucaauuac

SEQ ID NO: 2296753 - RNA, 19 nt, Artificial Sequence
  Description of Artificial Sequence: Synthetic oligonucleotide
  Antisense strand to SEQ ID NO: 2296752
guaauugagcggcaacucc

SEQ ID NO: 2296754 - RNA, 19 nt, Artificial Sequence
  Description of Artificial Sequence: Synthetic oligonucleotide
  Sense strand starting at position 2519 of SEQ ID NO: 1884849
agagaagucucagagguug

SEQ ID NO: 2296755 - RNA, 19 nt, Artificial Sequence
  Description of Artificial Sequence: Synthetic oligonucleotide
  Antisense strand to SEQ ID NO: 2296754
caaccucugagacuucucu

SEQ ID NO: 2296756 - RNA, 19 nt, Artificial Sequence
  Description of Artificial Sequence: Synthetic oligonucleotide
  Sense strand starting at position 2521 of SEQ ID NO: 1884849
agaagucucagagguuguu

SEQ ID NO: 2296757 - RNA, 19 nt, Artificial Sequence
  Description of Artificial Sequence: Synthetic oligonucleotide
  Antisense strand to SEQ ID NO: 2296756
aacaaccucugagacuucu

SEQ ID NO: 2296758 - RNA, 19 nt, Artificial Sequence
  Description of Artificial Sequence: Synthetic oligonucleotide
  Sense strand starting at position 3259 of SEQ ID NO: 1884849
cagaguaggugcucaggaa

SEQ ID NO: 2296759 - RNA, 19 nt, Artificial Sequence
  Description of Artificial Sequence: Synthetic oligonucleotide
  Antisense strand to SEQ ID NO: 2296758
uuccugagcaccuacucug

SEQ ID NO: 2296760 - RNA, 19 nt, Artificial Sequence
  Description of Artificial Sequence: Synthetic oligonucleotide
  Sense strand starting at position 3466 of SEQ ID NO: 1884849
ggaagagacugagauauaa

SEQ ID NO: 2296761 - RNA, 19 nt, Artificial Sequence
  Description of Artificial Sequence: Synthetic oligonucleotide
  Antisense strand to SEQ ID NO: 2296760
uuauaucucagucucuucc

SEQ ID NO: 2296762 - RNA, 19 nt, Artificial Sequence
  Description of Artificial Sequence: Synthetic oligonucleotide
  Sense strand starting at position 3705 of SEQ ID NO: 1884849
gcagaaggguucuagguca

SEQ ID NO: 2296763 - RNA, 19 nt, Artificial Sequence
  Description of Artificial Sequence: Synthetic oligonucleotide
  Antisense strand to SEQ ID NO: 2296762
ugaccuagaacccuucugc

SEQ ID NO: 2296764 - RNA, 19 nt, Artificial Sequence
  Description of Artificial Sequence: Synthetic oligonucleotide
  Sense strand starting at position 3959 of SEQ ID NO: 1884849
agacuugugcaggaucacu

SEQ ID NO: 2296765 - RNA, 19 nt, Artificial Sequence
  Description of Artificial Sequence: Synthetic oligonucleotide
  Antisense strand to SEQ ID NO: 2296764
agugauccugcacaagucu

SEQ ID NO: 2296766 - RNA, 19 nt, Artificial Sequence
  Description of Artificial Sequence: Synthetic oligonucleotide
  Sense strand starting at position 6 of SEQ ID NO: 1884850
aauguaauagaagguuacu

SEQ ID NO: 2296767 - RNA, 19 nt, Artificial Sequence
  Description of Artificial Sequence: Synthetic oligonucleotide
  Antisense strand to SEQ ID NO: 2296766
aguaaccuucuauuacauu

SEQ ID NO: 2296768 - RNA, 19 nt, Artificial Sequence
  Description of Artificial Sequence: Synthetic oligonucleotide
  Sense strand starting at position 11 of SEQ ID NO: 1884850
aauagaagguuacuuuagu

SEQ ID NO: 2296769 - RNA, 19 nt, Artificial Sequence
  Description of Artificial Sequence: Synthetic oligonucleotide
  Antisense strand to SEQ ID NO: 2296768
acuaaaguaaccuucuauu

SEQ ID NO: 2296770 - RNA, 19 nt, Artificial Sequence
  Description of Artificial Sequence: Synthetic oligonucleotide
  Sense strand starting at position 12 of SEQ ID NO: 1884850
auagaagguuacuuuagua

SEQ ID NO: 2296771 - RNA, 19 nt, Artificial Sequence
  Description of Artificial Sequence: Synthetic oligonucleotide
  Antisense strand to SEQ ID NO: 2296770
uacuaaaguaaccuucuau

SEQ ID NO: 2296772 - RNA, 19 nt, Artificial Sequence
  Description of Artificial Sequence: Synthetic oligonucleotide
  Sense strand starting at position 55 of SEQ ID NO: 1884850
acucuacuuggaugcuaaa

SEQ ID NO: 2296773 - RNA, 19 nt, Artificial Sequence
  Description of Artificial Sequence: Synthetic oligonucleotide
  Antisense strand to SEQ ID NO: 2296772
uuuagcauccaaguagagu

SEQ ID NO: 2296774 - RNA, 19 nt, Artificial Sequence
  Description of Artificial Sequence: Synthetic oligonucleotide
  Sense strand starting at position 134 of SEQ ID NO: 1884850
ggacaucaauaagaacaga

SEQ ID NO: 2296775 - RNA, 19 nt, Artificial Sequence
  Description of Artificial Sequence: Synthetic oligonucleotide
  Antisense strand to SEQ ID NO: 2296774
ucuguucuuauugaugucc

SEQ ID NO: 2296776 - RNA, 19 nt, Artificial Sequence
  Description of Artificial Sequence: Synthetic oligonucleotide
  Sense strand starting at position 159 of SEQ ID NO: 1884850
cagaaauuguaucuuggug

SEQ ID NO: 2296777 - RNA, 19 nt, Artificial Sequence
  Description of Artificial Sequence: Synthetic oligonucleotide
  Antisense strand to SEQ ID NO: 2296776
caccaagauacaauuucug

SEQ ID NO: 2296778 - RNA, 19 nt, Artificial Sequence
  Description of Artificial Sequence: Synthetic oligonucleotide
  Sense strand starting at position 167 of SEQ ID NO: 1884850
guaucuuggugauccacau

SEQ ID NO: 2296779 - RNA, 19 nt, Artificial Sequence
  Description of Artificial Sequence: Synthetic oligonucleotide
  Antisense strand to SEQ ID NO: 2296778
auguggaucaccaagauac

SEQ ID NO: 2296780 - RNA, 19 nt, Artificial Sequence
  Description of Artificial Sequence: Synthetic oligonucleotide
  Sense strand starting at position 211 of SEQ ID NO: 1884850
gagaguggaacuuagcgau

SEQ ID NO: 2296781 - RNA, 19 nt, Artificial Sequence
  Description of Artificial Sequence: Synthetic oligonucleotide
  Antisense strand to SEQ ID NO: 2296780
aucgcuaaguuccacucuc

SEQ ID NO: 2296782 - RNA, 19 nt, Artificial Sequence
  Description of Artificial Sequence: Synthetic oligonucleotide
  Sense strand starting at position 253 of SEQ ID NO: 1884850
gcacuucugcacuagagau

SEQ ID NO: 2296783 - RNA, 19 nt, Artificial Sequence
  Description of Artificial Sequence: Synthetic oligonucleotide
  Antisense strand to SEQ ID NO: 2296782
aucucuagugcagaagugc

SEQ ID NO: 2296784 - RNA, 19 nt, Artificial Sequence
  Description of Artificial Sequence: Synthetic oligonucleotide
  Sense strand starting at position 255 of SEQ ID NO: 1884850
acuucugcacuagagauua

SEQ ID NO: 2296785 - RNA, 19 nt, Artificial Sequence
  Description of Artificial Sequence: Synthetic oligonucleotide
  Antisense strand to SEQ ID NO: 2296784
uaaucucuagugcagaagu

SEQ ID NO: 2296786 - RNA, 19 nt, Artificial Sequence
  Description of Artificial Sequence: Synthetic oligonucleotide
  Sense strand starting at position 363 of SEQ ID NO: 1884850
aauaaaugauucgugugau

SEQ ID NO: 2296787 - RNA, 19 nt, Artificial Sequence
  Description of Artificial Sequence: Synthetic oligonucleotide
  Antisense strand to SEQ ID NO: 2296786
aucacacgaaucauuuauu

SEQ ID NO: 2296788 - RNA, 19 nt, Artificial Sequence
  Description of Artificial Sequence: Synthetic oligonucleotide
  Sense strand starting at position 543 of SEQ ID NO: 1884850
ggguauauacaguguuaag

SEQ ID NO: 2296789 - RNA, 19 nt, Artificial Sequence
  Description of Artificial Sequence: Synthetic oligonucleotide
  Antisense strand to SEQ ID NO: 2296788
cuuaacacuguauauaccc

SEQ ID NO: 2296790 - RNA, 19 nt, Artificial Sequence
  Description of Artificial Sequence: Synthetic oligonucleotide
  Sense strand starting at position 697 of SEQ ID NO: 1884850
cuaguaucacuccaagucu

SEQ ID NO: 2296791 - RNA, 19 nt, Artificial Sequence
  Description of Artificial Sequence: Synthetic oligonucleotide
  Antisense strand to SEQ ID NO: 2296790
agacuuggagugauacuag

SEQ ID NO: 2296792 - RNA, 19 nt, Artificial Sequence
  Description of Artificial Sequence: Synthetic oligonucleotide
  Sense strand starting at position 708 of SEQ ID NO: 1884850
ccaagucuuuagccuuuga

SEQ ID NO: 2296793 - RNA, 19 nt, Artificial Sequence
  Description of Artificial Sequence: Synthetic oligonucleotide
  Antisense strand to SEQ ID NO: 2296792
ucaaaggcuaaagacuugg

SEQ ID NO: 2296794 - RNA, 19 nt, Artificial Sequence
  Description of Artificial Sequence: Synthetic oligonucleotide
  Sense strand starting at position 721 of SEQ ID NO: 1884850
cuuugauacuugcucugaa

SEQ ID NO: 2296795 - RNA, 19 nt, Artificial Sequence
  Description of Artificial Sequence: Synthetic oligonucleotide
  Antisense strand to SEQ ID NO: 2296794
uucagagcaaguaucaaag

SEQ ID NO: 2296796 - RNA, 19 nt, Artificial Sequence
  Description of Artificial Sequence: Synthetic oligonucleotide
  Sense strand starting at position 722 of SEQ ID NO: 1884850
uuugauacuugcucugaaa

SEQ ID NO: 2296797 - RNA, 19 nt, Artificial Sequence
  Description of Artificial Sequence: Synthetic oligonucleotide
  Antisense strand to SEQ ID NO: 2296796
uuucagagcaaguaucaaa

SEQ ID NO: 2296798 - RNA, 19 nt, Artificial Sequence
  Description of Artificial Sequence: Synthetic oligonucleotide
  Sense strand starting at position 910 of SEQ ID NO: 1884850
uaagucucgccugagacaa

SEQ ID NO: 2296799 - RNA, 19 nt, Artificial Sequence
  Description of Artificial Sequence: Synthetic oligonucleotide
  Antisense strand to SEQ ID NO: 2296798
uugucucaggcgagacuua

SEQ ID NO: 2296800 - RNA, 19 nt, Artificial Sequence
  Description of Artificial Sequence: Synthetic oligonucleotide
  Sense strand starting at position 949 of SEQ ID NO: 1884850
ucccaacuuggaugacuua

SEQ ID NO: 2296801 - RNA, 19 nt, Artificial Sequence
  Description of Artificial Sequence: Synthetic oligonucleotide
  Antisense strand to SEQ ID NO: 2296800
uaagucauccaaguuggga

SEQ ID NO: 2296802 - RNA, 19 nt, Artificial Sequence
  Description of Artificial Sequence: Synthetic oligonucleotide
  Sense strand starting at position 1272 of SEQ ID NO: 1884850
aagagauucuggucagcug

SEQ ID NO: 2296803 - RNA, 19 nt, Artificial Sequence
  Description of Artificial Sequence: Synthetic oligonucleotide
  Antisense strand to SEQ ID NO: 2296802
cagcugaccagaaucucuu

SEQ ID NO: 2296804 - RNA, 19 nt, Artificial Sequence
  Description of Artificial Sequence: Synthetic oligonucleotide
  Sense strand starting at position 1446 of SEQ ID NO: 1884850
guagaagucguuggcauuu

SEQ ID NO: 2296805 - RNA, 19 nt, Artificial Sequence
  Description of Artificial Sequence: Synthetic oligonucleotide
  Antisense strand to SEQ ID NO: 2296804
aaaugccaacgacuucuac

SEQ ID NO: 2296806 - RNA, 19 nt, Artificial Sequence
  Description of Artificial Sequence: Synthetic oligonucleotide
  Sense strand starting at position 1658 of SEQ ID NO: 1884850
uguguauaaugguugaaua

SEQ ID NO: 2296807 - RNA, 19 nt, Artificial Sequence
  Description of Artificial Sequence: Synthetic oligonucleotide
  Antisense strand to SEQ ID NO: 2296806
uauucaaccauuauacaca

SEQ ID NO: 2296808 - RNA, 19 nt, Artificial Sequence
  Description of Artificial Sequence: Synthetic oligonucleotide
  Sense strand starting at position 1659 of SEQ ID NO: 1884850
guguauaaugguugaauag

SEQ ID NO: 2296809 - RNA, 19 nt, Artificial Sequence
  Description of Artificial Sequence: Synthetic oligonucleotide
  Antisense strand to SEQ ID NO: 2296808
cuauucaaccauuauacac

SEQ ID NO: 2296810 - RNA, 19 nt, Artificial Sequence
  Description of Artificial Sequence: Synthetic oligonucleotide
  Sense strand starting at position 1702 of SEQ ID NO: 1884850
ggcacugacgguuacguaa

SEQ ID NO: 2296811 - RNA, 19 nt, Artificial Sequence
  Description of Artificial Sequence: Synthetic oligonucleotide
  Antisense strand to SEQ ID NO: 2296810
uuacguaaccgucagugcc

SEQ ID NO: 2296812 - RNA, 19 nt, Artificial Sequence
  Description of Artificial Sequence: Synthetic oligonucleotide
  Sense strand starting at position 1998 of SEQ ID NO: 1884850
caaacuuuaguugggaaau

SEQ ID NO: 2296813 - RNA, 19 nt, Artificial Sequence
  Description of Artificial Sequence: Synthetic oligonucleotide
  Antisense strand to SEQ ID NO: 2296812
auuucccaacuaaaguuug

SEQ ID NO: 2296814 - RNA, 19 nt, Artificial Sequence
  Description of Artificial Sequence: Synthetic oligonucleotide
  Sense strand starting at position 2011 of SEQ ID NO: 1884850
ggaaauaaguccguuuccu

SEQ ID NO: 2296815 - RNA, 19 nt, Artificial Sequence
  Description of Artificial Sequence: Synthetic oligonucleotide
  Antisense strand to SEQ ID NO: 2296814
aggaaacggacuuauuucc

SEQ ID NO: 2296816 - RNA, 19 nt, Artificial Sequence
  Description of Artificial Sequence: Synthetic oligonucleotide
  Sense strand starting at position 2019 of SEQ ID NO: 1884850
guccguuuccuagagugag

SEQ ID NO: 2296817 - RNA, 19 nt, Artificial Sequence
  Description of Artificial Sequence: Synthetic oligonucleotide
  Antisense strand to SEQ ID NO: 2296816
cucacucuaggaaacggac

SEQ ID NO: 2296818 - RNA, 19 nt, Artificial Sequence
  Description of Artificial Sequence: Synthetic oligonucleotide
  Sense strand starting at position 2097 of SEQ ID NO: 1884850
uggaacgacuaccugaaau

SEQ ID NO: 2296819 - RNA, 19 nt, Artificial Sequence
  Description of Artificial Sequence: Synthetic oligonucleotide
  Antisense strand to SEQ ID NO: 2296818
auuucagguagucguucca

SEQ ID NO: 2296820 - RNA, 19 nt, Artificial Sequence
  Description of Artificial Sequence: Synthetic oligonucleotide
  Sense strand starting at position 2270 of SEQ ID NO: 1884850
ugcaaauuuaggugguagu

SEQ ID NO: 2296821 - RNA, 19 nt, Artificial Sequence
  Description of Artificial Sequence: Synthetic oligonucleotide
  Antisense strand to SEQ ID NO: 2296820
acuaccaccuaaauuugca

SEQ ID NO: 2296822 - RNA, 19 nt, Artificial Sequence
  Description of Artificial Sequence: Synthetic oligonucleotide
  Sense strand starting at position 2271 of SEQ ID NO: 1884850
gcaaauuuaggugguagua

SEQ ID NO: 2296823 - RNA, 19 nt, Artificial Sequence
  Description of Artificial Sequence: Synthetic oligonucleotide
  Antisense strand to SEQ ID NO: 2296822
uacuaccaccuaaauuugc

SEQ ID NO: 2296824 - RNA, 19 nt, Artificial Sequence
  Description of Artificial Sequence: Synthetic oligonucleotide
  Sense strand starting at position 2273 of SEQ ID NO: 1884850
aaauuuaggugguaguauu

SEQ ID NO: 2296825 - RNA, 19 nt, Artificial Sequence
  Description of Artificial Sequence: Synthetic oligonucleotide
  Antisense strand to SEQ ID NO: 2296824
aauacuaccaccuaaauuu

SEQ ID NO: 2296826 - RNA, 19 nt, Artificial Sequence
  Description of Artificial Sequence: Synthetic oligonucleotide
  Sense strand starting at position 2281 of SEQ ID NO: 1884850
gugguaguauuuguugaga

SEQ ID NO: 2296827 - RNA, 19 nt, Artificial Sequence
  Description of Artificial Sequence: Synthetic oligonucleotide
  Antisense strand to SEQ ID NO: 2296826
ucucaacaaauacuaccac

SEQ ID NO: 2296828 - RNA, 19 nt, Artificial Sequence
  Description of Artificial Sequence: Synthetic oligonucleotide
  Sense strand starting at position 2415 of SEQ ID NO: 1884850
cgcagcaaucuugaagaga

SEQ ID NO: 2296829 - RNA, 19 nt, Artificial Sequence
  Description of Artificial Sequence: Synthetic oligonucleotide
  Antisense strand to SEQ ID NO: 2296828
ucucuucaagauugcugcg

SEQ ID NO: 2296830 - RNA, 19 nt, Artificial Sequence
  Description of Artificial Sequence: Synthetic oligonucleotide
  Sense strand starting at position 2454 of SEQ ID NO: 1884850
ccuuaauuauuauugucga

SEQ ID NO: 2296831 - RNA, 19 nt, Artificial Sequence
  Description of Artificial Sequence: Synthetic oligonucleotide
  Antisense strand to SEQ ID NO: 2296830
ucgacaauaauaauuaagg

SEQ ID NO: 2296832 - RNA, 19 nt, Artificial Sequence
  Description of Artificial Sequence: Synthetic oligonucleotide
  Sense strand starting at position 2468 of SEQ ID NO: 1884850
gucgaaguucgauagauug

SEQ ID NO: 2296833 - RNA, 19 nt, Artificial Sequence
  Description of Artificial Sequence: Synthetic oligonucleotide
  Antisense strand to SEQ ID NO: 2296832
caaucuaucgaacuucgac

SEQ ID NO: 2296834 - RNA, 19 nt, Artificial Sequence
  Description of Artificial Sequence: Synthetic oligonucleotide
  Sense strand starting at position 2470 of SEQ ID NO: 1884850
cgaaguucgauagauugcu

SEQ ID NO: 2296835 - RNA, 19 nt, Artificial Sequence
  Description of Artificial Sequence: Synthetic oligonucleotide
  Antisense strand to SEQ ID NO: 2296834
agcaaucuaucgaacuucg

SEQ ID NO: 2296836 - RNA, 19 nt, Artificial Sequence
  Description of Artificial Sequence: Synthetic oligonucleotide
  Sense strand starting at position 2476 of SEQ ID NO: 1884850
ucgauagauugcuucccaa

SEQ ID NO: 2296837 - RNA, 19 nt, Artificial Sequence
  Description of Artificial Sequence: Synthetic oligonucleotide
  Antisense strand to SEQ ID NO: 2296836
uugggaagcaaucuaucga

SEQ ID NO: 2296838 - RNA, 19 nt, Artificial Sequence
  Description of Artificial Sequence: Synthetic oligonucleotide
  Sense strand starting at position 2511 of SEQ ID NO: 1884850
gcauaacuuugcucauaga

SEQ ID NO: 2296839 - RNA, 19 nt, Artificial Sequence
  Description of Artificial Sequence: Synthetic oligonucleotide
  Antisense strand to SEQ ID NO: 2296838
ucuaugagcaaaguuaugc

SEQ ID NO: 2296840 - RNA, 19 nt, Artificial Sequence
  Description of Artificial Sequence: Synthetic oligonucleotide
  Sense strand starting at position 2628 of SEQ ID NO: 1884850
aacguauaguuugcuaaag

SEQ ID NO: 2296841 - RNA, 19 nt, Artificial Sequence
  Description of Artificial Sequence: Synthetic oligonucleotide
  Antisense strand to SEQ ID NO: 2296840
cuuuagcaaacuauacguu

SEQ ID NO: 2296842 - RNA, 19 nt, Artificial Sequence
  Description of Artificial Sequence: Synthetic oligonucleotide
  Sense strand starting at position 2972 of SEQ ID NO: 1884850
cuuugugugcgugugaaau

SEQ ID NO: 2296843 - RNA, 19 nt, Artificial Sequence
  Description of Artificial Sequence: Synthetic oligonucleotide
  Antisense strand to SEQ ID NO: 2296842
auuucacacgcacacaaag

SEQ ID NO: 2296844 - RNA, 19 nt, Artificial Sequence
  Description of Artificial Sequence: Synthetic oligonucleotide
  Sense strand starting at position 3625 of SEQ ID NO: 1884850
ucgcuccgauuucuuuaaa

SEQ ID NO: 2296845 - RNA, 19 nt, Artificial Sequence
  Description of Artificial Sequence: Synthetic oligonucleotide
  Antisense strand to SEQ ID NO: 2296844
uuuaaagaaaucggagcga

SEQ ID NO: 2296846 - RNA, 19 nt, Artificial Sequence
  Description of Artificial Sequence: Synthetic oligonucleotide
  Sense strand starting at position 416 of SEQ ID NO: 1884851
gcaaguucucaucauguau

SEQ ID NO: 2296847 - RNA, 19 nt, Artificial Sequence
  Description of Artificial Sequence: Synthetic oligonucleotide
  Antisense strand to SEQ ID NO: 2296846
auacaugaugagaacuugc

SEQ ID NO: 2296848 - RNA, 19 nt, Artificial Sequence
  Description of Artificial Sequence: Synthetic oligonucleotide
  Sense strand starting at position 462 of SEQ ID NO: 1884851
cugggagcucacuaauuac

SEQ ID NO: 2296849 - RNA, 19 nt, Artificial Sequence
  Description of Artificial Sequence: Synthetic oligonucleotide
  Antisense strand to SEQ ID NO: 2296848
guaauuagugagcucccag

SEQ ID NO: 2296850 - RNA, 19 nt, Artificial Sequence
  Description of Artificial Sequence: Synthetic oligonucleotide
  Sense strand starting at position 465 of SEQ ID NO: 1884851
ggagcucacuaauuacaaa

SEQ ID NO: 2296851 - RNA, 19 nt, Artificial Sequence
  Description of Artificial Sequence: Synthetic oligonucleotide
  Antisense strand to SEQ ID NO: 2296850
uuuguaauuagugagcucc

SEQ ID NO: 2296852 - RNA, 19 nt, Artificial Sequence
  Description of Artificial Sequence: Synthetic oligonucleotide
  Sense strand starting at position 489 of SEQ ID NO: 1884851
aagagauucugggcuggac

SEQ ID NO: 2296853 - RNA, 19 nt, Artificial Sequence
  Description of Artificial Sequence: Synthetic oligonucleotide
  Antisense strand to SEQ ID NO: 2296852
guccagcccagaaucucuu

SEQ ID NO: 2296854 - RNA, 19 nt, Artificial Sequence
  Description of Artificial Sequence: Synthetic oligonucleotide
  Sense strand starting at position 491 of SEQ ID NO: 1884851
gagauucugggcuggacau

SEQ ID NO: 2296855 - RNA, 19 nt, Artificial Sequence
  Description of Artificial Sequence: Synthetic oligonucleotide
  Antisense strand to SEQ ID NO: 2296854
auguccagcccagaaucuc

SEQ ID NO: 2296856 - RNA, 19 nt, Artificial Sequence
  Description of Artificial Sequence: Synthetic oligonucleotide
  Sense strand starting at position 492 of SEQ ID NO: 1884851
agauucugggcuggacauu

SEQ ID NO: 2296857 - RNA, 19 nt, Artificial Sequence
  Description of Artificial Sequence: Synthetic oligonucleotide
  Antisense strand to SEQ ID NO: 2296856
aauguccagcccagaaucu

SEQ ID NO: 2296858 - RNA, 19 nt, Artificial Sequence
  Description of Artificial Sequence: Synthetic oligonucleotide
  Sense strand starting at position 502 of SEQ ID NO: 1884851
cuggacauugcuuguuuau

SEQ ID NO: 2296859 - RNA, 19 nt, Artificial Sequence
  Description of Artificial Sequence: Synthetic oligonucleotide
  Antisense strand to SEQ ID NO: 2296858
auaaacaagcaauguccag

SEQ ID NO: 2296860 - RNA, 19 nt, Artificial Sequence
  Description of Artificial Sequence: Synthetic oligonucleotide
  Sense strand starting at position 504 of SEQ ID NO: 1884851
ggacauugcuuguuuaucu

SEQ ID NO: 2296861 - RNA, 19 nt, Artificial Sequence
  Description of Artificial Sequence: Synthetic oligonucleotide
  Antisense strand to SEQ ID NO: 2296860
agauaaacaagcaaugucc

SEQ ID NO: 2296862 - RNA, 19 nt, Artificial Sequence
  Description of Artificial Sequence: Synthetic oligonucleotide
  Sense strand starting at position 513 of SEQ ID NO: 1884851
uuguuuaucuguccaggua

SEQ ID NO: 2296863 - RNA, 19 nt, Artificial Sequence
  Description of Artificial Sequence: Synthetic oligonucleotide
  Antisense strand to SEQ ID NO: 2296862
uaccuggacagauaaacaa

SEQ ID NO: 2296864 - RNA, 19 nt, Artificial Sequence
  Description of Artificial Sequence: Synthetic oligonucleotide
  Sense strand starting at position 564 of SEQ ID NO: 1884851
cugccuguugcugugacua

SEQ ID NO: 2296865 - RNA, 19 nt, Artificial Sequence
  Description of Artificial Sequence: Synthetic oligonucleotide
  Antisense strand to SEQ ID NO: 2296864
uagucacagcaacaggcag

SEQ ID NO: 2296866 - RNA, 19 nt, Artificial Sequence
  Description of Artificial Sequence: Synthetic oligonucleotide
  Sense strand starting at position 646 of SEQ ID NO: 1884851
acugauaucugacugugca

SEQ ID NO: 2296867 - RNA, 19 nt, Artificial Sequence
  Description of Artificial Sequence: Synthetic oligonucleotide
  Antisense strand to SEQ ID NO: 2296866
ugcacagucagauaucagu

SEQ ID NO: 2296868 - RNA, 19 nt, Artificial Sequence
  Description of Artificial Sequence: Synthetic oligonucleotide
  Sense strand starting at position 647 of SEQ ID NO: 1884851
cugauaucugacugugcaa

SEQ ID NO: 2296869 - RNA, 19 nt, Artificial Sequence
  Description of Artificial Sequence: Synthetic oligonucleotide
  Antisense strand to SEQ ID NO: 2296868
uugcacagucagauaucag

SEQ ID NO: 2296870 - RNA, 19 nt, Artificial Sequence
  Description of Artificial Sequence: Synthetic oligonucleotide
  Sense strand starting at position 649 of SEQ ID NO: 1884851
gauaucugacugugcaaug

SEQ ID NO: 2296871 - RNA, 19 nt, Artificial Sequence
  Description of Artificial Sequence: Synthetic oligonucleotide
  Antisense strand to SEQ ID NO: 2296870
cauugcacagucagauauc

SEQ ID NO: 2296872 - RNA, 19 nt, Artificial Sequence
  Description of Artificial Sequence: Synthetic oligonucleotide
  Sense strand starting at position 1291 of SEQ ID NO: 1884851
gcuugcuaucauuacugaa

SEQ ID NO: 2296873 - RNA, 19 nt, Artificial Sequence
  Description of Artificial Sequence: Synthetic oligonucleotide
  Antisense strand to SEQ ID NO: 2296872
uucaguaaugauagcaagc

SEQ ID NO: 2296874 - RNA, 19 nt, Artificial Sequence
  Description of Artificial Sequence: Synthetic oligonucleotide
  Sense strand starting at position 1394 of SEQ ID NO: 1884851
aauaaugcauacguguuua

SEQ ID NO: 2296875 - RNA, 19 nt, Artificial Sequence
  Description of Artificial Sequence: Synthetic oligonucleotide
  Antisense strand to SEQ ID NO: 2296874
uaaacacguaugcauuauu

SEQ ID NO: 2296876 - RNA, 19 nt, Artificial Sequence
  Description of Artificial Sequence: Synthetic oligonucleotide
  Sense strand starting at position 1398 of SEQ ID NO: 1884851
augcauacguguuuagaga

SEQ ID NO: 2296877 - RNA, 19 nt, Artificial Sequence
  Description of Artificial Sequence: Synthetic oligonucleotide
  Antisense strand to SEQ ID NO: 2296876
ucucuaaacacguaugcau

SEQ ID NO: 2296878 - RNA, 19 nt, Artificial Sequence
  Description of Artificial Sequence: Synthetic oligonucleotide
  Sense strand starting at position 1399 of SEQ ID NO: 1884851
ugcauacguguuuagagaa

SEQ ID NO: 2296879 - RNA, 19 nt, Artificial Sequence
  Description of Artificial Sequence: Synthetic oligonucleotide
  Antisense strand to SEQ ID NO: 2296878
uucucuaaacacguaugca

SEQ ID NO: 2296880 - RNA, 19 nt, Artificial Sequence
  Description of Artificial Sequence: Synthetic oligonucleotide
  Sense strand starting at position 1407 of SEQ ID NO: 1884851
uguuuagagaagugcauac

SEQ ID NO: 2296881 - RNA, 19 nt, Artificial Sequence
  Description of Artificial Sequence: Synthetic oligonucleotide
  Antisense strand to SEQ ID NO: 2296880
guaugcacuucucuaaaca

SEQ ID NO: 2296882 - RNA, 19 nt, Artificial Sequence
  Description of Artificial Sequence: Synthetic oligonucleotide
  Sense strand starting at position 1613 of SEQ ID NO: 1884851
ccuggaccuuguguaauau

SEQ ID NO: 2296883 - RNA, 19 nt, Artificial Sequence
  Description of Artificial Sequence: Synthetic oligonucleotide
  Antisense strand to SEQ ID NO: 2296882
auauuacacaagguccagg

SEQ ID NO: 2296884 - RNA, 19 nt, Artificial Sequence
  Description of Artificial Sequence: Synthetic oligonucleotide
  Sense strand starting at position 1614 of SEQ ID NO: 1884851
cuggaccuuguguaauauu

SEQ ID NO: 2296885 - RNA, 19 nt, Artificial Sequence
  Description of Artificial Sequence: Synthetic oligonucleotide
  Antisense strand to SEQ ID NO: 2296884
aauauuacacaagguccag

SEQ ID NO: 2296886 - RNA, 19 nt, Artificial Sequence
  Description of Artificial Sequence: Synthetic oligonucleotide
  Sense strand starting at position 1661 of SEQ ID NO: 1884851
gguagucugauguggauua

SEQ ID NO: 2296887 - RNA, 19 nt, Artificial Sequence
  Description of Artificial Sequence: Synthetic oligonucleotide
  Antisense strand to SEQ ID NO: 2296886
uaauccacaucagacuacc

SEQ ID NO: 2296888 - RNA, 19 nt, Artificial Sequence
  Description of Artificial Sequence: Synthetic oligonucleotide
  Sense strand starting at position 1830 of SEQ ID NO: 1884851
cuccaagaauccucuggga

SEQ ID NO: 2296889 - RNA, 19 nt, Artificial Sequence
  Description of Artificial Sequence: Synthetic oligonucleotide
  Antisense strand to SEQ ID NO: 2296888
ucccagaggauucuuggag

SEQ ID NO: 2296890 - RNA, 19 nt, Artificial Sequence
  Description of Artificial Sequence: Synthetic oligonucleotide
  Sense strand starting at position 1844 of SEQ ID NO: 1884851
ugggaaguguguucuuuac

SEQ ID NO: 2296891 - RNA, 19 nt, Artificial Sequence
  Description of Artificial Sequence: Synthetic oligonucleotide
  Antisense strand to SEQ ID NO: 2296890
guaaagaacacacuuccca

SEQ ID NO: 2296892 - RNA, 19 nt, Artificial Sequence
  Description of Artificial Sequence: Synthetic oligonucleotide
  Sense strand starting at position 1925 of SEQ ID NO: 1884851
cuggacaacucuuugcaca

SEQ ID NO: 2296893 - RNA, 19 nt, Artificial Sequence
  Description of Artificial Sequence: Synthetic oligonucleotide
  Antisense strand to SEQ ID NO: 2296892
ugugcaaagaguuguccag

SEQ ID NO: 2296894 - RNA, 19 nt, Artificial Sequence
  Description of Artificial Sequence: Synthetic oligonucleotide
  Sense strand starting at position 2131 of SEQ ID NO: 1884851
ugccuauuagcgggaacca

SEQ ID NO: 2296895 - RNA, 19 nt, Artificial Sequence
  Description of Artificial Sequence: Synthetic oligonucleotide
  Antisense strand to SEQ ID NO: 2296894
ugguucccgcuaauaggca

SEQ ID NO: 2296896 - RNA, 19 nt, Artificial Sequence
  Description of Artificial Sequence: Synthetic oligonucleotide
  Sense strand starting at position 2132 of SEQ ID NO: 1884851
gccuauuagcgggaaccau

SEQ ID NO: 2296897 - RNA, 19 nt, Artificial Sequence
  Description of Artificial Sequence: Synthetic oligonucleotide
  Antisense strand to SEQ ID NO: 2296896
augguucccgcuaauaggc

SEQ ID NO: 2296898 - RNA, 19 nt, Artificial Sequence
  Description of Artificial Sequence: Synthetic oligonucleotide
  Sense strand starting at position 2223 of SEQ ID NO: 1884851
ucaccuauucgcuggacuu

SEQ ID NO: 2296899 - RNA, 19 nt, Artificial Sequence
  Description of Artificial Sequence: Synthetic oligonucleotide
  Antisense strand to SEQ ID NO: 2296898
aaguccagcgaauagguga

SEQ ID NO: 2296900 - RNA, 19 nt, Artificial Sequence
  Description of Artificial Sequence: Synthetic oligonucleotide
  Sense strand starting at position 2224 of SEQ ID NO: 1884851
caccuauucgcuggacuuu

SEQ ID NO: 2296901 - RNA, 19 nt, Artificial Sequence
  Description of Artificial Sequence: Synthetic oligonucleotide
  Antisense strand to SEQ ID NO: 2296900
aaaguccagcgaauaggug

SEQ ID NO: 2296902 - RNA, 19 nt, Artificial Sequence
  Description of Artificial Sequence: Synthetic oligonucleotide
  Sense strand starting at position 2314 of SEQ ID NO: 1884851
cuuugugacguuuaccaga

SEQ ID NO: 2296903 - RNA, 19 nt, Artificial Sequence
  Description of Artificial Sequence: Synthetic oligonucleotide
  Antisense strand to SEQ ID NO: 2296902
ucugguaaacgucacaaag

SEQ ID NO: 2296904 - RNA, 19 nt, Artificial Sequence
  Description of Artificial Sequence: Synthetic oligonucleotide
  Sense strand starting at position 2316 of SEQ ID NO: 1884851
uugugacguuuaccagaaa

SEQ ID NO: 2296905 - RNA, 19 nt, Artificial Sequence
  Description of Artificial Sequence: Synthetic oligonucleotide
  Antisense strand to SEQ ID NO: 2296904
uuucugguaaacgucacaa

SEQ ID NO: 2296906 - RNA, 19 nt, Artificial Sequence
  Description of Artificial Sequence: Synthetic oligonucleotide
  Sense strand starting at position 2480 of SEQ ID NO: 1884851
ggcauuugcucugcuggga

SEQ ID NO: 2296907 - RNA, 19 nt, Artificial Sequence
  Description of Artificial Sequence: Synthetic oligonucleotide
  Antisense strand to SEQ ID NO: 2296906
ucccagcagagcaaaugcc

SEQ ID NO: 2296908 - RNA, 19 nt, Artificial Sequence
  Description of Artificial Sequence: Synthetic oligonucleotide
  Sense strand starting at position 2721 of SEQ ID NO: 1884851
ggaagugcuguuuaggaaa

SEQ ID NO: 2296909 - RNA, 19 nt, Artificial Sequence
  Description of Artificial Sequence: Synthetic oligonucleotide
  Antisense strand to SEQ ID NO: 2296908
uuuccuaaacagcacuucc

SEQ ID NO: 2296910 - RNA, 19 nt, Artificial Sequence
  Description of Artificial Sequence: Synthetic oligonucleotide
  Sense strand starting at position 2778 of SEQ ID NO: 1884851
gagcuugguggcuggacaa

SEQ ID NO: 2296911 - RNA, 19 nt, Artificial Sequence
  Description of Artificial Sequence: Synthetic oligonucleotide
  Antisense strand to SEQ ID NO: 2296910
uuguccagccaccaagcuc

SEQ ID NO: 2296912 - RNA, 19 nt, Artificial Sequence
  Description of Artificial Sequence: Synthetic oligonucleotide
  Sense strand starting at position 2874 of SEQ ID NO: 1884851
ugccuaauucugggaaagg

SEQ ID NO: 2296913 - RNA, 19 nt, Artificial Sequence
  Description of Artificial Sequence: Synthetic oligonucleotide
  Antisense strand to SEQ ID NO: 2296912
ccuuucccagaauuaggca

SEQ ID NO: 2296914 - RNA, 19 nt, Artificial Sequence
  Description of Artificial Sequence: Synthetic oligonucleotide
  Sense strand starting at position 3573 of SEQ ID NO: 1884851
uuucuuauuagugggagaa

SEQ ID NO: 2296915 - RNA, 19 nt, Artificial Sequence
  Description of Artificial Sequence: Synthetic oligonucleotide
  Antisense strand to SEQ ID NO: 2296914
uucucccacuaauaagaaa

SEQ ID NO: 2296916 - RNA, 19 nt, Artificial Sequence
  Description of Artificial Sequence: Synthetic oligonucleotide
  Sense strand starting at position 3574 of SEQ ID NO: 1884851
uucuuauuagugggagaag

SEQ ID NO: 2296917 - RNA, 19 nt, Artificial Sequence
  Description of Artificial Sequence: Synthetic oligonucleotide
  Antisense strand to SEQ ID NO: 2296916
cuucucccacuaauaagaa

SEQ ID NO: 2296918 - RNA, 19 nt, Artificial Sequence
  Description of Artificial Sequence: Synthetic oligonucleotide
  Sense strand starting at position 3645 of SEQ ID NO: 1884851
augagaagcuucuuaccuu

SEQ ID NO: 2296919 - RNA, 19 nt, Artificial Sequence
  Description of Artificial Sequence: Synthetic oligonucleotide
  Antisense strand to SEQ ID NO: 2296918
aagguaagaagcuucucau

SEQ ID NO: 2296920 - RNA, 19 nt, Artificial Sequence
  Description of Artificial Sequence: Synthetic oligonucleotide
  Sense strand starting at position 3761 of SEQ ID NO: 1884851
accucuauccagugugaaa

SEQ ID NO: 2296921 - RNA, 19 nt, Artificial Sequence
  Description of Artificial Sequence: Synthetic oligonucleotide
  Antisense strand to SEQ ID NO: 2296920
uuucacacuggauagaggu

SEQ ID NO: 2296922 - RNA, 19 nt, Artificial Sequence
  Description of Artificial Sequence: Synthetic oligonucleotide
  Sense strand starting at position 3813 of SEQ ID NO: 1884851
cugcuuaauguuuacggaa

SEQ ID NO: 2296923 - RNA, 19 nt, Artificial Sequence
  Description of Artificial Sequence: Synthetic oligonucleotide
  Antisense strand to SEQ ID NO: 2296922
uuccguaaacauuaagcag

SEQ ID NO: 2296924 - RNA, 19 nt, Artificial Sequence
  Description of Artificial Sequence: Synthetic oligonucleotide
  Sense strand starting at position 3924 of SEQ ID NO: 1884851
cugucuuaccucuaaguuu

SEQ ID NO: 2296925 - RNA, 19 nt, Artificial Sequence
  Description of Artificial Sequence: Synthetic oligonucleotide
  Antisense strand to SEQ ID NO: 2296924
aaacuuagagguaagacag

SEQ ID NO: 2296926 - RNA, 19 nt, Artificial Sequence
  Description of Artificial Sequence: Synthetic oligonucleotide
  Sense strand starting at position 44 of SEQ ID NO: 1884852
uccucauuugcucacguua

SEQ ID NO: 2296927 - RNA, 19 nt, Artificial Sequence
  Description of Artificial Sequence: Synthetic oligonucleotide
  Antisense strand to SEQ ID NO: 2296926
uaacgugagcaaaugagga

SEQ ID NO: 2296928 - RNA, 19 nt, Artificial Sequence
  Description of Artificial Sequence: Synthetic oligonucleotide
  Sense strand starting at position 857 of SEQ ID NO: 1884852
uucccacuggucugugaga

SEQ ID NO: 2296929 - RNA, 19 nt, Artificial Sequence
  Description of Artificial Sequence: Synthetic oligonucleotide
  Antisense strand to SEQ ID NO: 2296928
ucucacagaccagugggaa

SEQ ID NO: 2296930 - RNA, 19 nt, Artificial Sequence
  Description of Artificial Sequence: Synthetic oligonucleotide
  Sense strand starting at position 858 of SEQ ID NO: 1884852
ucccacuggucugugagau

SEQ ID NO: 2296931 - RNA, 19 nt, Artificial Sequence
  Description of Artificial Sequence: Synthetic oligonucleotide
  Antisense strand to SEQ ID NO: 2296930
aucucacagaccaguggga

SEQ ID NO: 2296932 - RNA, 19 nt, Artificial Sequence
  Description of Artificial Sequence: Synthetic oligonucleotide
  Sense strand starting at position 859 of SEQ ID NO: 1884852
cccacuggucugugagauc

SEQ ID NO: 2296933 - RNA, 19 nt, Artificial Sequence
  Description of Artificial Sequence: Synthetic oligonucleotide
  Antisense strand to SEQ ID NO: 2296932
gaucucacagaccaguggg

SEQ ID NO: 2296934 - RNA, 19 nt, Artificial Sequence
  Description of Artificial Sequence: Synthetic oligonucleotide
  Sense strand starting at position 1053 of SEQ ID NO: 1884852
cugggaaaccucugucuau

SEQ ID NO: 2296935 - RNA, 19 nt, Artificial Sequence
  Description of Artificial Sequence: Synthetic oligonucleotide
  Antisense strand to SEQ ID NO: 2296934
auagacagagguuucccag

SEQ ID NO: 2296936 - RNA, 19 nt, Artificial Sequence
  Description of Artificial Sequence: Synthetic oligonucleotide
  Sense strand starting at position 1054 of SEQ ID NO: 1884852
ugggaaaccucugucuaug

SEQ ID NO: 2296937 - RNA, 19 nt, Artificial Sequence
  Description of Artificial Sequence: Synthetic oligonucleotide
  Antisense strand to SEQ ID NO: 2296936
cauagacagagguuuccca

SEQ ID NO: 2296938 - RNA, 19 nt, Artificial Sequence
  Description of Artificial Sequence: Synthetic oligonucleotide
  Sense strand starting at position 1110 of SEQ ID NO: 1884852
agaagugcuaugggcagaa

SEQ ID NO: 2296939 - RNA, 19 nt, Artificial Sequence
  Description of Artificial Sequence: Synthetic oligonucleotide
  Antisense strand to SEQ ID NO: 2296938
uucugcccauagcacuucu

SEQ ID NO: 2296940 - RNA, 19 nt, Artificial Sequence
  Description of Artificial Sequence: Synthetic oligonucleotide
  Sense strand starting at position 1365 of SEQ ID NO: 1884852
ccuugauacuuaucugggu

SEQ ID NO: 2296941 - RNA, 19 nt, Artificial Sequence
  Description of Artificial Sequence: Synthetic oligonucleotide
  Antisense strand to SEQ ID NO: 2296940
acccagauaaguaucaagg

SEQ ID NO: 2296942 - RNA, 19 nt, Artificial Sequence
  Description of Artificial Sequence: Synthetic oligonucleotide
  Sense strand starting at position 1372 of SEQ ID NO: 1884852
acuuaucuggguggcgaaa

SEQ ID NO: 2296943 - RNA, 19 nt, Artificial Sequence
  Description of Artificial Sequence: Synthetic oligonucleotide
  Antisense strand to SEQ ID NO: 2296942
uuucgccacccagauaagu

SEQ ID NO: 2296944 - RNA, 19 nt, Artificial Sequence
  Description of Artificial Sequence: Synthetic oligonucleotide
  Sense strand starting at position 1432 of SEQ ID NO: 1884852
ugcaguauucucuacacca

SEQ ID NO: 2296945 - RNA, 19 nt, Artificial Sequence
  Description of Artificial Sequence: Synthetic oligonucleotide
  Antisense strand to SEQ ID NO: 2296944
ugguguagagaauacugca

SEQ ID NO: 2296946 - RNA, 19 nt, Artificial Sequence
  Description of Artificial Sequence: Synthetic oligonucleotide
  Sense strand starting at position 1628 of SEQ ID NO: 1884852
aggagaacgucgucuugga

SEQ ID NO: 2296947 - RNA, 19 nt, Artificial Sequence
  Description of Artificial Sequence: Synthetic oligonucleotide
  Antisense strand to SEQ ID NO: 2296946
uccaagacgacguucuccu

SEQ ID NO: 2296948 - RNA, 19 nt, Artificial Sequence
  Description of Artificial Sequence: Synthetic oligonucleotide
  Sense strand starting at position 1672 of SEQ ID NO: 1884852
aucucuaaugcugagaacu

SEQ ID NO: 2296949 - RNA, 19 nt, Artificial Sequence
  Description of Artificial Sequence: Synthetic oligonucleotide
  Antisense strand to SEQ ID NO: 2296948
aguucucagcauuagagau

SEQ ID NO: 2296950 - RNA, 19 nt, Artificial Sequence
  Description of Artificial Sequence: Synthetic oligonucleotide
  Sense strand starting at position 1749 of SEQ ID NO: 1884852
cuuggcuucucccuagaca

SEQ ID NO: 2296951 - RNA, 19 nt, Artificial Sequence
  Description of Artificial Sequence: Synthetic oligonucleotide
  Antisense strand to SEQ ID NO: 2296950
ugucuagggagaagccaag

SEQ ID NO: 2296952 - RNA, 19 nt, Artificial Sequence
  Description of Artificial Sequence: Synthetic oligonucleotide
  Sense strand starting at position 1750 of SEQ ID NO: 1884852
uuggcuucucccuagacau

SEQ ID NO: 2296953 - RNA, 19 nt, Artificial Sequence
  Description of Artificial Sequence: Synthetic oligonucleotide
  Antisense strand to SEQ ID NO: 2296952
augucuagggagaagccaa

SEQ ID NO: 2296954 - RNA, 19 nt, Artificial Sequence
  Description of Artificial Sequence: Synthetic oligonucleotide
  Sense strand starting at position 1807 of SEQ ID NO: 1884852
auucuuagacuuuggcuua

SEQ ID NO: 2296955 - RNA, 19 nt, Artificial Sequence
  Description of Artificial Sequence: Synthetic oligonucleotide
  Antisense strand to SEQ ID NO: 2296954
uaagccaaagucuaagaau

SEQ ID NO: 2296956 - RNA, 19 nt, Artificial Sequence
  Description of Artificial Sequence: Synthetic oligonucleotide
  Sense strand starting at position 1810 of SEQ ID NO: 1884852
cuuagacuuuggcuuauga

SEQ ID NO: 2296957 - RNA, 19 nt, Artificial Sequence
  Description of Artificial Sequence: Synthetic oligonucleotide
  Antisense strand to SEQ ID NO: 2296956
ucauaagccaaagucuaag

SEQ ID NO: 2296958 - RNA, 19 nt, Artificial Sequence
  Description of Artificial Sequence: Synthetic oligonucleotide
  Sense strand starting at position 1812 of SEQ ID NO: 1884852
uagacuuuggcuuaugacu

SEQ ID NO: 2296959 - RNA, 19 nt, Artificial Sequence
  Description of Artificial Sequence: Synthetic oligonucleotide
  Antisense strand to SEQ ID NO: 2296958
agucauaagccaaagucua

SEQ ID NO: 2296960 - RNA, 19 nt, Artificial Sequence
  Description of Artificial Sequence: Synthetic oligonucleotide
  Sense strand starting at position 2115 of SEQ ID NO: 1884852
ggcauuacucaugacucaa

SEQ ID NO: 2296961 - RNA, 19 nt, Artificial Sequence
  Description of Artificial Sequence: Synthetic oligonucleotide
  Antisense strand to SEQ ID NO: 2296960
uugagucaugaguaaugcc

SEQ ID NO: 2296962 - RNA, 19 nt, Artificial Sequence
  Description of Artificial Sequence: Synthetic oligonucleotide
  Sense strand starting at position 2138 of SEQ ID NO: 1884852
gugaacaucuaucuagaua

SEQ ID NO: 2296963 - RNA, 19 nt, Artificial Sequence
  Description of Artificial Sequence: Synthetic oligonucleotide
  Antisense strand to SEQ ID NO: 2296962
uaucuagauagauguucac

SEQ ID NO: 2296964 - RNA, 19 nt, Artificial Sequence
  Description of Artificial Sequence: Synthetic oligonucleotide
  Sense strand starting at position 2156 of SEQ ID NO: 1884852
acccaagguugaguuaaau

SEQ ID NO: 2296965 - RNA, 19 nt, Artificial Sequence
  Description of Artificial Sequence: Synthetic oligonucleotide
  Antisense strand to SEQ ID NO: 2296964
auuuaacucaaccuugggu

SEQ ID NO: 2296966 - RNA, 19 nt, Artificial Sequence
  Description of Artificial Sequence: Synthetic oligonucleotide
  Sense strand starting at position 2492 of SEQ ID NO: 1884852
cgaccaaucuguccacauu

SEQ ID NO: 2296967 - RNA, 19 nt, Artificial Sequence
  Description of Artificial Sequence: Synthetic oligonucleotide
  Antisense strand to SEQ ID NO: 2296966
aauguggacagauuggucg

SEQ ID NO: 2296968 - RNA, 19 nt, Artificial Sequence
  Description of Artificial Sequence: Synthetic oligonucleotide
  Sense strand starting at position 2652 of SEQ ID NO: 1884852
ccacauacuccagggaagu

SEQ ID NO: 2296969 - RNA, 19 nt, Artificial Sequence
  Description of Artificial Sequence: Synthetic oligonucleotide
  Antisense strand to SEQ ID NO: 2296968
acuucccuggaguaugugg

SEQ ID NO: 2296970 - RNA, 19 nt, Artificial Sequence
  Description of Artificial Sequence: Synthetic oligonucleotide
  Sense strand starting at position 2653 of SEQ ID NO: 1884852
cacauacuccagggaagua

SEQ ID NO: 2296971 - RNA, 19 nt, Artificial Sequence
  Description of Artificial Sequence: Synthetic oligonucleotide
  Antisense strand to SEQ ID NO: 2296970
uacuucccuggaguaugug

SEQ ID NO: 2296972 - RNA, 19 nt, Artificial Sequence
  Description of Artificial Sequence: Synthetic oligonucleotide
  Sense strand starting at position 2718 of SEQ ID NO: 1884852
accaaagagggcuguuacu

SEQ ID NO: 2296973 - RNA, 19 nt, Artificial Sequence
  Description of Artificial Sequence: Synthetic oligonucleotide
  Antisense strand to SEQ ID NO: 2296972
aguaacagcccucuuuggu

SEQ ID NO: 2296974 - RNA, 19 nt, Artificial Sequence
  Description of Artificial Sequence: Synthetic oligonucleotide
  Sense strand starting at position 2724 of SEQ ID NO: 1884852
gagggcuguuacucaauag

SEQ ID NO: 2296975 - RNA, 19 nt, Artificial Sequence
  Description of Artificial Sequence: Synthetic oligonucleotide
  Antisense strand to SEQ ID NO: 2296974
cuauugaguaacagcccuc

SEQ ID NO: 2296976 - RNA, 19 nt, Artificial Sequence
  Description of Artificial Sequence: Synthetic oligonucleotide
  Sense strand starting at position 2725 of SEQ ID NO: 1884852
agggcuguuacucaauagu

SEQ ID NO: 2296977 - RNA, 19 nt, Artificial Sequence
  Description of Artificial Sequence: Synthetic oligonucleotide
  Antisense strand to SEQ ID NO: 2296976
acuauugaguaacagcccu

SEQ ID NO: 2296978 - RNA, 19 nt, Artificial Sequence
  Description of Artificial Sequence: Synthetic oligonucleotide
  Sense strand starting at position 2728 of SEQ ID NO: 1884852
gcuguuacucaauaguuga

SEQ ID NO: 2296979 - RNA, 19 nt, Artificial Sequence
  Description of Artificial Sequence: Synthetic oligonucleotide
  Antisense strand to SEQ ID NO: 2296978
ucaacuauugaguaacagc

SEQ ID NO: 2296980 - RNA, 19 nt, Artificial Sequence
  Description of Artificial Sequence: Synthetic oligonucleotide
  Sense strand starting at position 2731 of SEQ ID NO: 1884852
guuacucaauaguugagau

SEQ ID NO: 2296981 - RNA, 19 nt, Artificial Sequence
  Description of Artificial Sequence: Synthetic oligonucleotide
  Antisense strand to SEQ ID NO: 2296980
aucucaacuauugaguaac

SEQ ID NO: 2296982 - RNA, 19 nt, Artificial Sequence
  Description of Artificial Sequence: Synthetic oligonucleotide
  Sense strand starting at position 2735 of SEQ ID NO: 1884852
cucaauaguugagauuucu

SEQ ID NO: 2296983 - RNA, 19 nt, Artificial Sequence
  Description of Artificial Sequence: Synthetic oligonucleotide
  Antisense strand to SEQ ID NO: 2296982
agaaaucucaacuauugag

SEQ ID NO: 2296984 - RNA, 19 nt, Artificial Sequence
  Description of Artificial Sequence: Synthetic oligonucleotide
  Sense strand starting at position 3049 of SEQ ID NO: 1884852
acaguucuagaagaugcua

SEQ ID NO: 2296985 - RNA, 19 nt, Artificial Sequence
  Description of Artificial Sequence: Synthetic oligonucleotide
  Antisense strand to SEQ ID NO: 2296984
uagcaucuucuagaacugu

SEQ ID NO: 2296986 - RNA, 19 nt, Artificial Sequence
  Description of Artificial Sequence: Synthetic oligonucleotide
  Sense strand starting at position 3246 of SEQ ID NO: 1884852
ccgacaugguauguuacaa

SEQ ID NO: 2296987 - RNA, 19 nt, Artificial Sequence
  Description of Artificial Sequence: Synthetic oligonucleotide
  Antisense strand to SEQ ID NO: 2296986
uuguaacauaccaugucgg

SEQ ID NO: 2296988 - RNA, 19 nt, Artificial Sequence
  Description of Artificial Sequence: Synthetic oligonucleotide
  Sense strand starting at position 3427 of SEQ ID NO: 1884852
cacucagguccugguagau

SEQ ID NO: 2296989 - RNA, 19 nt, Artificial Sequence
  Description of Artificial Sequence: Synthetic oligonucleotide
  Antisense strand to SEQ ID NO: 2296988
aucuaccaggaccugagug

SEQ ID NO: 2296990 - RNA, 19 nt, Artificial Sequence
  Description of Artificial Sequence: Synthetic oligonucleotide
  Sense strand starting at position 3433 of SEQ ID NO: 1884852
gguccugguagauggcaaa

SEQ ID NO: 2296991 - RNA, 19 nt, Artificial Sequence
  Description of Artificial Sequence: Synthetic oligonucleotide
  Antisense strand to SEQ ID NO: 2296990
uuugccaucuaccaggacc

SEQ ID NO: 2296992 - RNA, 19 nt, Artificial Sequence
  Description of Artificial Sequence: Synthetic oligonucleotide
  Sense strand starting at position 3617 of SEQ ID NO: 1884852
agauguguuuguucaggag

SEQ ID NO: 2296993 - RNA, 19 nt, Artificial Sequence
  Description of Artificial Sequence: Synthetic oligonucleotide
  Antisense strand to SEQ ID NO: 2296992
cuccugaacaaacacaucu

SEQ ID NO: 2296994 - RNA, 19 nt, Artificial Sequence
  Description of Artificial Sequence: Synthetic oligonucleotide
  Sense strand starting at position 3621 of SEQ ID NO: 1884852
guguuuguucaggaguuga

SEQ ID NO: 2296995 - RNA, 19 nt, Artificial Sequence
  Description of Artificial Sequence: Synthetic oligonucleotide
  Antisense strand to SEQ ID NO: 2296994
ucaacuccugaacaaacac

SEQ ID NO: 2296996 - RNA, 19 nt, Artificial Sequence
  Description of Artificial Sequence: Synthetic oligonucleotide
  Sense strand starting at position 3644 of SEQ ID NO: 1884852
ggaucugugugacuccaua

SEQ ID NO: 2296997 - RNA, 19 nt, Artificial Sequence
  Description of Artificial Sequence: Synthetic oligonucleotide
  Antisense strand to SEQ ID NO: 2296996
uauggagucacacagaucc

SEQ ID NO: 2296998 - RNA, 19 nt, Artificial Sequence
  Description of Artificial Sequence: Synthetic oligonucleotide
  Sense strand starting at position 3743 of SEQ ID NO: 1884852
ugccucuacgaacagaaau

SEQ ID NO: 2296999 - RNA, 19 nt, Artificial Sequence
  Description of Artificial Sequence: Synthetic oligonucleotide
  Antisense strand to SEQ ID NO: 2296998
auuucuguucguagaggca

SEQ ID NO: 2297000 - RNA, 19 nt, Artificial Sequence
  Description of Artificial Sequence: Synthetic oligonucleotide
  Sense strand starting at position 3755 of SEQ ID NO: 1884852
cagaaaucucagggcugca

SEQ ID NO: 2297001 - RNA, 19 nt, Artificial Sequence
  Description of Artificial Sequence: Synthetic oligonucleotide
  Antisense strand to SEQ ID NO: 2297000
ugcagcccugagauuucug

SEQ ID NO: 2297002 - RNA, 19 nt, Artificial Sequence
  Description of Artificial Sequence: Synthetic oligonucleotide
  Sense strand starting at position 3979 of SEQ ID NO: 1884852
ucugcuuugcuguauagaa

SEQ ID NO: 2297003 - RNA, 19 nt, Artificial Sequence
  Description of Artificial Sequence: Synthetic oligonucleotide
  Antisense strand to SEQ ID NO: 2297002
uucuauacagcaaagcaga

SEQ ID NO: 2297004 - RNA, 19 nt, Artificial Sequence
  Description of Artificial Sequence: Synthetic oligonucleotide
  Sense strand starting at position 3981 of SEQ ID NO: 1884852
ugcuuugcuguauagaaga

SEQ ID NO: 2297005 - RNA, 19 nt, Artificial Sequence
  Description of Artificial Sequence: Synthetic oligonucleotide
  Antisense strand to SEQ ID NO: 2297004
ucuucuauacagcaaagca

SEQ ID NO: 2297006 - RNA, 19 nt, Artificial Sequence
  Description of Artificial Sequence: Synthetic oligonucleotide
  Sense strand starting at position 328 of SEQ ID NO: 1884853
gagcauguaggaugaacua

SEQ ID NO: 2297007 - RNA, 19 nt, Artificial Sequence
  Description of Artificial Sequence: Synthetic oligonucleotide
  Antisense strand to SEQ ID NO: 2297006
uaguucauccuacaugcuc

SEQ ID NO: 2297008 - RNA, 19 nt, Artificial Sequence
  Description of Artificial Sequence: Synthetic oligonucleotide
  Sense strand starting at position 478 of SEQ ID NO: 1884853
agggaugagucgucggaac

SEQ ID NO: 2297009 - RNA, 19 nt, Artificial Sequence
  Description of Artificial Sequence: Synthetic oligonucleotide
  Antisense strand to SEQ ID NO: 2297008
guuccgacgacucaucccu

SEQ ID NO: 2297010 - RNA, 19 nt, Artificial Sequence
  Description of Artificial Sequence: Synthetic oligonucleotide
  Sense strand starting at position 489 of SEQ ID NO: 1884853
gucggaacuggaugcuaau

SEQ ID NO: 2297011 - RNA, 19 nt, Artificial Sequence
  Description of Artificial Sequence: Synthetic oligonucleotide
  Antisense strand to SEQ ID NO: 2297010
auuagcauccaguuccgac

SEQ ID NO: 2297012 - RNA, 19 nt, Artificial Sequence
  Description of Artificial Sequence: Synthetic oligonucleotide
  Sense strand starting at position 495 of SEQ ID NO: 1884853
acuggaugcuaaucagaua

SEQ ID NO: 2297013 - RNA, 19 nt, Artificial Sequence
  Description of Artificial Sequence: Synthetic oligonucleotide
  Antisense strand to SEQ ID NO: 2297012
uaucugauuagcauccagu

SEQ ID NO: 2297014 - RNA, 19 nt, Artificial Sequence
  Description of Artificial Sequence: Synthetic oligonucleotide
  Sense strand starting at position 511 of SEQ ID NO: 1884853
auauaaucagcugacgaca

SEQ ID NO: 2297015 - RNA, 19 nt, Artificial Sequence
  Description of Artificial Sequence: Synthetic oligonucleotide
  Antisense strand to SEQ ID NO: 2297014
ugucgucagcugauuauau

SEQ ID NO: 2297016 - RNA, 19 nt, Artificial Sequence
  Description of Artificial Sequence: Synthetic oligonucleotide
  Sense strand starting at position 526 of SEQ ID NO: 1884853
gacauuccuucuguggagu

SEQ ID NO: 2297017 - RNA, 19 nt, Artificial Sequence
  Description of Artificial Sequence: Synthetic oligonucleotide
  Antisense strand to SEQ ID NO: 2297016
acuccacagaaggaauguc

SEQ ID NO: 2297018 - RNA, 19 nt, Artificial Sequence
  Description of Artificial Sequence: Synthetic oligonucleotide
  Sense strand starting at position 527 of SEQ ID NO: 1884853
acauuccuucuguggagua

SEQ ID NO: 2297019 - RNA, 19 nt, Artificial Sequence
  Description of Artificial Sequence: Synthetic oligonucleotide
  Antisense strand to SEQ ID NO: 2297018
uacuccacagaaggaaugu

SEQ ID NO: 2297020 - RNA, 19 nt, Artificial Sequence
  Description of Artificial Sequence: Synthetic oligonucleotide
  Sense strand starting at position 541 of SEQ ID NO: 1884853
gaguaagccacuugggaag

SEQ ID NO: 2297021 - RNA, 19 nt, Artificial Sequence
  Description of Artificial Sequence: Synthetic oligonucleotide
  Antisense strand to SEQ ID NO: 2297020
cuucccaaguggcuuacuc

SEQ ID NO: 2297022 - RNA, 19 nt, Artificial Sequence
  Description of Artificial Sequence: Synthetic oligonucleotide
  Sense strand starting at position 688 of SEQ ID NO: 1884853
agcugucucuaccuggaga

SEQ ID NO: 2297023 - RNA, 19 nt, Artificial Sequence
  Description of Artificial Sequence: Synthetic oligonucleotide
  Antisense strand to SEQ ID NO: 2297022
ucuccagguagagacagcu

SEQ ID NO: 2297024 - RNA, 19 nt, Artificial Sequence
  Description of Artificial Sequence: Synthetic oligonucleotide
  Sense strand starting at position 690 of SEQ ID NO: 1884853
cugucucuaccuggagaga

SEQ ID NO: 2297025 - RNA, 19 nt, Artificial Sequence
  Description of Artificial Sequence: Synthetic oligonucleotide
  Antisense strand to SEQ ID NO: 2297024
ucucuccagguagagacag

SEQ ID NO: 2297026 - RNA, 19 nt, Artificial Sequence
  Description of Artificial Sequence: Synthetic oligonucleotide
  Sense strand starting at position 963 of SEQ ID NO: 1884853
cggcuaaggcuagagagua

SEQ ID NO: 2297027 - RNA, 19 nt, Artificial Sequence
  Description of Artificial Sequence: Synthetic oligonucleotide
  Antisense strand to SEQ ID NO: 2297026
uacucucuagccuuagccg

SEQ ID NO: 2297028 - RNA, 19 nt, Artificial Sequence
  Description of Artificial Sequence: Synthetic oligonucleotide
  Sense strand starting at position 1150 of SEQ ID NO: 1884853
uggaaauccgaguagagcu

SEQ ID NO: 2297029 - RNA, 19 nt, Artificial Sequence
  Description of Artificial Sequence: Synthetic oligonucleotide
  Antisense strand to SEQ ID NO: 2297028
agcucuacucggauuucca

SEQ ID NO: 2297030 - RNA, 19 nt, Artificial Sequence
  Description of Artificial Sequence: Synthetic oligonucleotide
  Sense strand starting at position 1162 of SEQ ID NO: 1884853
uagagcugacucggacuua

SEQ ID NO: 2297031 - RNA, 19 nt, Artificial Sequence
  Description of Artificial Sequence: Synthetic oligonucleotide
  Antisense strand to SEQ ID NO: 2297030
uaaguccgagucagcucua

SEQ ID NO: 2297032 - RNA, 19 nt, Artificial Sequence
  Description of Artificial Sequence: Synthetic oligonucleotide
  Sense strand starting at position 2148 of SEQ ID NO: 1884853
gggcgaagcccugagaugu

SEQ ID NO: 2297033 - RNA, 19 nt, Artificial Sequence
  Description of Artificial Sequence: Synthetic oligonucleotide
  Antisense strand to SEQ ID NO: 2297032
acaucucagggcuucgccc

SEQ ID NO: 2297034 - RNA, 19 nt, Artificial Sequence
  Description of Artificial Sequence: Synthetic oligonucleotide
  Sense strand starting at position 2149 of SEQ ID NO: 1884853
ggcgaagcccugagaugug

SEQ ID NO: 2297035 - RNA, 19 nt, Artificial Sequence
  Description of Artificial Sequence: Synthetic oligonucleotide
  Antisense strand to SEQ ID NO: 2297034
cacaucucagggcuucgcc

SEQ ID NO: 2297036 - RNA, 19 nt, Artificial Sequence
  Description of Artificial Sequence: Synthetic oligonucleotide
  Sense strand starting at position 2154 of SEQ ID NO: 1884853
agcccugagaugugaggau

SEQ ID NO: 2297037 - RNA, 19 nt, Artificial Sequence
  Description of Artificial Sequence: Synthetic oligonucleotide
  Antisense strand to SEQ ID NO: 2297036
auccucacaucucagggcu

SEQ ID NO: 2297038 - RNA, 19 nt, Artificial Sequence
  Description of Artificial Sequence: Synthetic oligonucleotide
  Sense strand starting at position 2163 of SEQ ID NO: 1884853
augugaggaugauucuuaa

SEQ ID NO: 2297039 - RNA, 19 nt, Artificial Sequence
  Description of Artificial Sequence: Synthetic oligonucleotide
  Antisense strand to SEQ ID NO: 2297038
uuaagaaucauccucacau

SEQ ID NO: 2297040 - RNA, 19 nt, Artificial Sequence
  Description of Artificial Sequence: Synthetic oligonucleotide
  Sense strand starting at position 2167 of SEQ ID NO: 1884853
gaggaugauucuuaagaca

SEQ ID NO: 2297041 - RNA, 19 nt, Artificial Sequence
  Description of Artificial Sequence: Synthetic oligonucleotide
  Antisense strand to SEQ ID NO: 2297040
ugucuuaagaaucauccuc

SEQ ID NO: 2297042 - RNA, 19 nt, Artificial Sequence
  Description of Artificial Sequence: Synthetic oligonucleotide
  Sense strand starting at position 2306 of SEQ ID NO: 1884853
ggaagugacucaucugcuu

SEQ ID NO: 2297043 - RNA, 19 nt, Artificial Sequence
  Description of Artificial Sequence: Synthetic oligonucleotide
  Antisense strand to SEQ ID NO: 2297042
aagcagaugagucacuucc

SEQ ID NO: 2297044 - RNA, 19 nt, Artificial Sequence
  Description of Artificial Sequence: Synthetic oligonucleotide
  Sense strand starting at position 2349 of SEQ ID NO: 1884853
ccaggaccauauuaagaaa

SEQ ID NO: 2297045 - RNA, 19 nt, Artificial Sequence
  Description of Artificial Sequence: Synthetic oligonucleotide
  Antisense strand to SEQ ID NO: 2297044
uuucuuaauaugguccugg

SEQ ID NO: 2297046 - RNA, 19 nt, Artificial Sequence
  Description of Artificial Sequence: Synthetic oligonucleotide
  Sense strand starting at position 2530 of SEQ ID NO: 1884853
ugagucagcggaugugaaa

SEQ ID NO: 2297047 - RNA, 19 nt, Artificial Sequence
  Description of Artificial Sequence: Synthetic oligonucleotide
  Antisense strand to SEQ ID NO: 2297046
uuucacauccgcugacuca

SEQ ID NO: 2297048 - RNA, 19 nt, Artificial Sequence
  Description of Artificial Sequence: Synthetic oligonucleotide
  Sense strand starting at position 2541 of SEQ ID NO: 1884853
augugaaacaaaggguuau

SEQ ID NO: 2297049 - RNA, 19 nt, Artificial Sequence
  Description of Artificial Sequence: Synthetic oligonucleotide
  Antisense strand to SEQ ID NO: 2297048
auaacccuuuguuucacau

SEQ ID NO: 2297050 - RNA, 19 nt, Artificial Sequence
  Description of Artificial Sequence: Synthetic oligonucleotide
  Sense strand starting at position 2542 of SEQ ID NO: 1884853
ugugaaacaaaggguuauu

SEQ ID NO: 2297051 - RNA, 19 nt, Artificial Sequence
  Description of Artificial Sequence: Synthetic oligonucleotide
  Antisense strand to SEQ ID NO: 2297050
aauaacccuuuguuucaca

SEQ ID NO: 2297052 - RNA, 19 nt, Artificial Sequence
  Description of Artificial Sequence: Synthetic oligonucleotide
  Sense strand starting at position 2605 of SEQ ID NO: 1884853
gagugugucuauuuagcag

SEQ ID NO: 2297053 - RNA, 19 nt, Artificial Sequence
  Description of Artificial Sequence: Synthetic oligonucleotide
  Antisense strand to SEQ ID NO: 2297052
cugcuaaauagacacacuc

SEQ ID NO: 2297054 - RNA, 19 nt, Artificial Sequence
  Description of Artificial Sequence: Synthetic oligonucleotide
  Sense strand starting at position 2655 of SEQ ID NO: 1884853
agaaaugugcugugacuuu

SEQ ID NO: 2297055 - RNA, 19 nt, Artificial Sequence
  Description of Artificial Sequence: Synthetic oligonucleotide
  Antisense strand to SEQ ID NO: 2297054
aaagucacagcacauuucu

SEQ ID NO: 2297056 - RNA, 19 nt, Artificial Sequence
  Description of Artificial Sequence: Synthetic oligonucleotide
  Sense strand starting at position 2756 of SEQ ID NO: 1884853
gguggccauuugucaggua

SEQ ID NO: 2297057 - RNA, 19 nt, Artificial Sequence
  Description of Artificial Sequence: Synthetic oligonucleotide
  Antisense strand to SEQ ID NO: 2297056
uaccugacaaauggccacc

SEQ ID NO: 2297058 - RNA, 19 nt, Artificial Sequence
  Description of Artificial Sequence: Synthetic oligonucleotide
  Sense strand starting at position 2816 of SEQ ID NO: 1884853
cagaaauaucccgaaggcu

SEQ ID NO: 2297059 - RNA, 19 nt, Artificial Sequence
  Description of Artificial Sequence: Synthetic oligonucleotide
  Antisense strand to SEQ ID NO: 2297058
agccuucgggauauuucug

SEQ ID NO: 2297060 - RNA, 19 nt, Artificial Sequence
  Description of Artificial Sequence: Synthetic oligonucleotide
  Sense strand starting at position 2850 of SEQ ID NO: 1884853
cuaacucauuucggaggaa

SEQ ID NO: 2297061 - RNA, 19 nt, Artificial Sequence
  Description of Artificial Sequence: Synthetic oligonucleotide
  Antisense strand to SEQ ID NO: 2297060
uuccuccgaaaugaguuag

SEQ ID NO: 2297062 - RNA, 19 nt, Artificial Sequence
  Description of Artificial Sequence: Synthetic oligonucleotide
  Sense strand starting at position 2851 of SEQ ID NO: 1884853
uaacucauuucggaggaag

SEQ ID NO: 2297063 - RNA, 19 nt, Artificial Sequence
  Description of Artificial Sequence: Synthetic oligonucleotide
  Antisense strand to SEQ ID NO: 2297062
cuuccuccgaaaugaguua

SEQ ID NO: 2297064 - RNA, 19 nt, Artificial Sequence
  Description of Artificial Sequence: Synthetic oligonucleotide
  Sense strand starting at position 2865 of SEQ ID NO: 1884853
ggaaguaaggcuugaaggu

SEQ ID NO: 2297065 - RNA, 19 nt, Artificial Sequence
  Description of Artificial Sequence: Synthetic oligonucleotide
  Antisense strand to SEQ ID NO: 2297064
accuucaagccuuacuucc

SEQ ID NO: 2297066 - RNA, 19 nt, Artificial Sequence
  Description of Artificial Sequence: Synthetic oligonucleotide
  Sense strand starting at position 3369 of SEQ ID NO: 1884853
aagacuuccggaugguaga

SEQ ID NO: 2297067 - RNA, 19 nt, Artificial Sequence
  Description of Artificial Sequence: Synthetic oligonucleotide
  Antisense strand to SEQ ID NO: 2297066
ucuaccauccggaagucuu

SEQ ID NO: 2297068 - RNA, 19 nt, Artificial Sequence
  Description of Artificial Sequence: Synthetic oligonucleotide
  Sense strand starting at position 3370 of SEQ ID NO: 1884853
agacuuccggaugguagaa

SEQ ID NO: 2297069 - RNA, 19 nt, Artificial Sequence
  Description of Artificial Sequence: Synthetic oligonucleotide
  Antisense strand to SEQ ID NO: 2297068
uucuaccauccggaagucu

SEQ ID NO: 2297070 - RNA, 19 nt, Artificial Sequence
  Description of Artificial Sequence: Synthetic oligonucleotide
  Sense strand starting at position 3444 of SEQ ID NO: 1884853
guggcaggaaugugagaaa

SEQ ID NO: 2297071 - RNA, 19 nt, Artificial Sequence
  Description of Artificial Sequence: Synthetic oligonucleotide
  Antisense strand to SEQ ID NO: 2297070
uuucucacauuccugccac

SEQ ID NO: 2297072 - RNA, 19 nt, Artificial Sequence
  Description of Artificial Sequence: Synthetic oligonucleotide
  Sense strand starting at position 3597 of SEQ ID NO: 1884853
gcuugcuggccauauuugu

SEQ ID NO: 2297073 - RNA, 19 nt, Artificial Sequence
  Description of Artificial Sequence: Synthetic oligonucleotide
  Antisense strand to SEQ ID NO: 2297072
acaaauauggccagcaagc

SEQ ID NO: 2297074 - RNA, 19 nt, Artificial Sequence
  Description of Artificial Sequence: Synthetic oligonucleotide
  Sense strand starting at position 3603 of SEQ ID NO: 1884853
uggccauauuugucugcaa

SEQ ID NO: 2297075 - RNA, 19 nt, Artificial Sequence
  Description of Artificial Sequence: Synthetic oligonucleotide
  Antisense strand to SEQ ID NO: 2297074
uugcagacaaauauggcca

SEQ ID NO: 2297076 - RNA, 19 nt, Artificial Sequence
  Description of Artificial Sequence: Synthetic oligonucleotide
  Sense strand starting at position 3604 of SEQ ID NO: 1884853
ggccauauuugucugcaau

SEQ ID NO: 2297077 - RNA, 19 nt, Artificial Sequence
  Description of Artificial Sequence: Synthetic oligonucleotide
  Antisense strand to SEQ ID NO: 2297076
auugcagacaaauauggcc

SEQ ID NO: 2297078 - RNA, 19 nt, Artificial Sequence
  Description of Artificial Sequence: Synthetic oligonucleotide
  Sense strand starting at position 3605 of SEQ ID NO: 1884853
gccauauuugucugcaauc

SEQ ID NO: 2297079 - RNA, 19 nt, Artificial Sequence
  Description of Artificial Sequence: Synthetic oligonucleotide
  Antisense strand to SEQ ID NO: 2297078
gauugcagacaaauauggc

SEQ ID NO: 2297080 - RNA, 19 nt, Artificial Sequence
  Description of Artificial Sequence: Synthetic oligonucleotide
  Sense strand starting at position 3961 of SEQ ID NO: 1884853
uuguaaaccuggcucacau

SEQ ID NO: 2297081 - RNA, 19 nt, Artificial Sequence
  Description of Artificial Sequence: Synthetic oligonucleotide
  Antisense strand to SEQ ID NO: 2297080
augugagccagguuuacaa

SEQ ID NO: 2297082 - RNA, 19 nt, Artificial Sequence
  Description of Artificial Sequence: Synthetic oligonucleotide
  Sense strand starting at position 3963 of SEQ ID NO: 1884853
guaaaccuggcucacauaa

SEQ ID NO: 2297083 - RNA, 19 nt, Artificial Sequence
  Description of Artificial Sequence: Synthetic oligonucleotide
  Antisense strand to SEQ ID NO: 2297082
uuaugugagccagguuuac

SEQ ID NO: 2297084 - RNA, 19 nt, Artificial Sequence
  Description of Artificial Sequence: Synthetic oligonucleotide
  Sense strand starting at position 3983 of SEQ ID NO: 1884853
acucaucuccaugggcaaa

SEQ ID NO: 2297085 - RNA, 19 nt, Artificial Sequence
  Description of Artificial Sequence: Synthetic oligonucleotide
  Antisense strand to SEQ ID NO: 2297084
uuugcccauggagaugagu

SEQ ID NO: 2297086 - RNA, 19 nt, Artificial Sequence
  Description of Artificial Sequence: Synthetic oligonucleotide
  Sense strand starting at position 13 of SEQ ID NO: 1884854
caguacuguuucccuggaa

SEQ ID NO: 2297087 - RNA, 19 nt, Artificial Sequence
  Description of Artificial Sequence: Synthetic oligonucleotide
  Antisense strand to SEQ ID NO: 2297086
uuccagggaaacaguacug

SEQ ID NO: 2297088 - RNA, 19 nt, Artificial Sequence
  Description of Artificial Sequence: Synthetic oligonucleotide
  Sense strand starting at position 16 of SEQ ID NO: 1884854
uacuguuucccuggaagua

SEQ ID NO: 2297089 - RNA, 19 nt, Artificial Sequence
  Description of Artificial Sequence: Synthetic oligonucleotide
  Antisense strand to SEQ ID NO: 2297088
uacuuccagggaaacagua

SEQ ID NO: 2297090 - RNA, 19 nt, Artificial Sequence
  Description of Artificial Sequence: Synthetic oligonucleotide
  Sense strand starting at position 17 of SEQ ID NO: 1884854
acuguuucccuggaaguaa

SEQ ID NO: 2297091 - RNA, 19 nt, Artificial Sequence
  Description of Artificial Sequence: Synthetic oligonucleotide
  Antisense strand to SEQ ID NO: 2297090
uuacuuccagggaaacagu

SEQ ID NO: 2297092 - RNA, 19 nt, Artificial Sequence
  Description of Artificial Sequence: Synthetic oligonucleotide
  Sense strand starting at position 98 of SEQ ID NO: 1884854
agaggaccuguguggagau

SEQ ID NO: 2297093 - RNA, 19 nt, Artificial Sequence
  Description of Artificial Sequence: Synthetic oligonucleotide
  Antisense strand to SEQ ID NO: 2297092
aucuccacacagguccucu

SEQ ID NO: 2297094 - RNA, 19 nt, Artificial Sequence
  Description of Artificial Sequence: Synthetic oligonucleotide
  Sense strand starting at position 189 of SEQ ID NO: 1884854
ggcugcuugcacuggagau

SEQ ID NO: 2297095 - RNA, 19 nt, Artificial Sequence
  Description of Artificial Sequence: Synthetic oligonucleotide
  Antisense strand to SEQ ID NO: 2297094
aucuccagugcaagcagcc

SEQ ID NO: 2297096 - RNA, 19 nt, Artificial Sequence
  Description of Artificial Sequence: Synthetic oligonucleotide
  Sense strand starting at position 382 of SEQ ID NO: 1884854
aacggauguccaggcuaau

SEQ ID NO: 2297097 - RNA, 19 nt, Artificial Sequence
  Description of Artificial Sequence: Synthetic oligonucleotide
  Antisense strand to SEQ ID NO: 2297096
auuagccuggacauccguu

SEQ ID NO: 2297098 - RNA, 19 nt, Artificial Sequence
  Description of Artificial Sequence: Synthetic oligonucleotide
  Sense strand starting at position 385 of SEQ ID NO: 1884854
ggauguccaggcuaauauu

SEQ ID NO: 2297099 - RNA, 19 nt, Artificial Sequence
  Description of Artificial Sequence: Synthetic oligonucleotide
  Antisense strand to SEQ ID NO: 2297098
aauauuagccuggacaucc

SEQ ID NO: 2297100 - RNA, 19 nt, Artificial Sequence
  Description of Artificial Sequence: Synthetic oligonucleotide
  Sense strand starting at position 489 of SEQ ID NO: 1884854
gccugcaagucaucagauc

SEQ ID NO: 2297101 - RNA, 19 nt, Artificial Sequence
  Description of Artificial Sequence: Synthetic oligonucleotide
  Antisense strand to SEQ ID NO: 2297100
gaucugaugacuugcaggc

SEQ ID NO: 2297102 - RNA, 19 nt, Artificial Sequence
  Description of Artificial Sequence: Synthetic oligonucleotide
  Sense strand starting at position 490 of SEQ ID NO: 1884854
ccugcaagucaucagauca

SEQ ID NO: 2297103 - RNA, 19 nt, Artificial Sequence
  Description of Artificial Sequence: Synthetic oligonucleotide
  Antisense strand to SEQ ID NO: 2297102
ugaucugaugacuugcagg

SEQ ID NO: 2297104 - RNA, 19 nt, Artificial Sequence
  Description of Artificial Sequence: Synthetic oligonucleotide
  Sense strand starting at position 673 of SEQ ID NO: 1884854
agaucuaagugcucucuca

SEQ ID NO: 2297105 - RNA, 19 nt, Artificial Sequence
  Description of Artificial Sequence: Synthetic oligonucleotide
  Antisense strand to SEQ ID NO: 2297104
ugagagagcacuuagaucu

SEQ ID NO: 2297106 - RNA, 19 nt, Artificial Sequence
  Description of Artificial Sequence: Synthetic oligonucleotide
  Sense strand starting at position 728 of SEQ ID NO: 1884854
ugugacauuuaguccaugu

SEQ ID NO: 2297107 - RNA, 19 nt, Artificial Sequence
  Description of Artificial Sequence: Synthetic oligonucleotide
  Antisense strand to SEQ ID NO: 2297106
acauggacuaaaugucaca

SEQ ID NO: 2297108 - RNA, 19 nt, Artificial Sequence
  Description of Artificial Sequence: Synthetic oligonucleotide
  Sense strand starting at position 807 of SEQ ID NO: 1884854
acgugacauccuggcaaag

SEQ ID NO: 2297109 - RNA, 19 nt, Artificial Sequence
  Description of Artificial Sequence: Synthetic oligonucleotide
  Antisense strand to SEQ ID NO: 2297108
cuuugccaggaugucacgu

SEQ ID NO: 2297110 - RNA, 19 nt, Artificial Sequence
  Description of Artificial Sequence: Synthetic oligonucleotide
  Sense strand starting at position 818 of SEQ ID NO: 1884854
uggcaaaggauccaauguu

SEQ ID NO: 2297111 - RNA, 19 nt, Artificial Sequence
  Description of Artificial Sequence: Synthetic oligonucleotide
  Antisense strand to SEQ ID NO: 2297110
aacauuggauccuuugcca

SEQ ID NO: 2297112 - RNA, 19 nt, Artificial Sequence
  Description of Artificial Sequence: Synthetic oligonucleotide
  Sense strand starting at position 1339 of SEQ ID NO: 1884854
acaaucugauuguugguau

SEQ ID NO: 2297113 - RNA, 19 nt, Artificial Sequence
  Description of Artificial Sequence: Synthetic oligonucleotide
  Antisense strand to SEQ ID NO: 2297112
auaccaacaaucagauugu

SEQ ID NO: 2297114 - RNA, 19 nt, Artificial Sequence
  Description of Artificial Sequence: Synthetic oligonucleotide
  Sense strand starting at position 1576 of SEQ ID NO: 1884854
ggaaauggccuuggaauag

SEQ ID NO: 2297115 - RNA, 19 nt, Artificial Sequence
  Description of Artificial Sequence: Synthetic oligonucleotide
  Antisense strand to SEQ ID NO: 2297114
cuauuccaaggccauuucc

SEQ ID NO: 2297116 - RNA, 19 nt, Artificial Sequence
  Description of Artificial Sequence: Synthetic oligonucleotide
  Sense strand starting at position 1616 of SEQ ID NO: 1884854
ccucuauaagggugauggu

SEQ ID NO: 2297117 - RNA, 19 nt, Artificial Sequence
  Description of Artificial Sequence: Synthetic oligonucleotide
  Antisense strand to SEQ ID NO: 2297116
accaucacccuuauagagg

SEQ ID NO: 2297118 - RNA, 19 nt, Artificial Sequence
  Description of Artificial Sequence: Synthetic oligonucleotide
  Sense strand starting at position 1630 of SEQ ID NO: 1884854
augguccuguuuccaagau

SEQ ID NO: 2297119 - RNA, 19 nt, Artificial Sequence
  Description of Artificial Sequence: Synthetic oligonucleotide
  Antisense strand to SEQ ID NO: 2297118
aucuuggaaacaggaccau

SEQ ID NO: 2297120 - RNA, 19 nt, Artificial Sequence
  Description of Artificial Sequence: Synthetic oligonucleotide
  Sense strand starting at position 1669 of SEQ ID NO: 1884854
auaugaggguuuccucaca

SEQ ID NO: 2297121 - RNA, 19 nt, Artificial Sequence
  Description of Artificial Sequence: Synthetic oligonucleotide
  Antisense strand to SEQ ID NO: 2297120
ugugaggaaacccucauau

SEQ ID NO: 2297122 - RNA, 19 nt, Artificial Sequence
  Description of Artificial Sequence: Synthetic oligonucleotide
  Sense strand starting at position 2109 of SEQ ID NO: 1884854
gucaaagcugccgagucau

SEQ ID NO: 2297123 - RNA, 19 nt, Artificial Sequence
  Description of Artificial Sequence: Synthetic oligonucleotide
  Antisense strand to SEQ ID NO: 2297122
augacucggcagcuuugac

SEQ ID NO: 2297124 - RNA, 19 nt, Artificial Sequence
  Description of Artificial Sequence: Synthetic oligonucleotide
  Sense strand starting at position 2119 of SEQ ID NO: 1884854
ccgagucauccugacauca

SEQ ID NO: 2297125 - RNA, 19 nt, Artificial Sequence
  Description of Artificial Sequence: Synthetic oligonucleotide
  Antisense strand to SEQ ID NO: 2297124
ugaugucaggaugacucgg

SEQ ID NO: 2297126 - RNA, 19 nt, Artificial Sequence
  Description of Artificial Sequence: Synthetic oligonucleotide
  Sense strand starting at position 2130 of SEQ ID NO: 1884854
ugacaucaguacuuaggau

SEQ ID NO: 2297127 - RNA, 19 nt, Artificial Sequence
  Description of Artificial Sequence: Synthetic oligonucleotide
  Antisense strand to SEQ ID NO: 2297126
auccuaaguacugauguca

SEQ ID NO: 2297128 - RNA, 19 nt, Artificial Sequence
  Description of Artificial Sequence: Synthetic oligonucleotide
  Sense strand starting at position 2242 of SEQ ID NO: 1884854
ggguuuacugcugaccuca

SEQ ID NO: 2297129 - RNA, 19 nt, Artificial Sequence
  Description of Artificial Sequence: Synthetic oligonucleotide
  Antisense strand to SEQ ID NO: 2297128
ugaggucagcaguaaaccc

SEQ ID NO: 2297130 - RNA, 19 nt, Artificial Sequence
  Description of Artificial Sequence: Synthetic oligonucleotide
  Sense strand starting at position 2556 of SEQ ID NO: 1884854
uauggaaguuucucagaca

SEQ ID NO: 2297131 - RNA, 19 nt, Artificial Sequence
  Description of Artificial Sequence: Synthetic oligonucleotide
  Antisense strand to SEQ ID NO: 2297130
ugucugagaaacuuccaua

SEQ ID NO: 2297132 - RNA, 19 nt, Artificial Sequence
  Description of Artificial Sequence: Synthetic oligonucleotide
  Sense strand starting at position 2568 of SEQ ID NO: 1884854
ucagacauucgaugcacuu

SEQ ID NO: 2297133 - RNA, 19 nt, Artificial Sequence
  Description of Artificial Sequence: Synthetic oligonucleotide
  Antisense strand to SEQ ID NO: 2297132
aagugcaucgaaugucuga

SEQ ID NO: 2297134 - RNA, 19 nt, Artificial Sequence
  Description of Artificial Sequence: Synthetic oligonucleotide
  Sense strand starting at position 2635 of SEQ ID NO: 1884854
ucuugacucgcacgaacaa

SEQ ID NO: 2297135 - RNA, 19 nt, Artificial Sequence
  Description of Artificial Sequence: Synthetic oligonucleotide
  Antisense strand to SEQ ID NO: 2297134
uuguucgugcgagucaaga

SEQ ID NO: 2297136 - RNA, 19 nt, Artificial Sequence
  Description of Artificial Sequence: Synthetic oligonucleotide
  Sense strand starting at position 2719 of SEQ ID NO: 1884854
gacagaacugagcguuaac

SEQ ID NO: 2297137 - RNA, 19 nt, Artificial Sequence
  Description of Artificial Sequence: Synthetic oligonucleotide
  Antisense strand to SEQ ID NO: 2297136
guuaacgcucaguucuguc

SEQ ID NO: 2297138 - RNA, 19 nt, Artificial Sequence
  Description of Artificial Sequence: Synthetic oligonucleotide
  Sense strand starting at position 2844 of SEQ ID NO: 1884854
ccuguaagccauugccuau

SEQ ID NO: 2297139 - RNA, 19 nt, Artificial Sequence
  Description of Artificial Sequence: Synthetic oligonucleotide
  Antisense strand to SEQ ID NO: 2297138
auaggcaauggcuuacagg

SEQ ID NO: 2297140 - RNA, 19 nt, Artificial Sequence
  Description of Artificial Sequence: Synthetic oligonucleotide
  Sense strand starting at position 2898 of SEQ ID NO: 1884854
aaggaauggucccugugga

SEQ ID NO: 2297141 - RNA, 19 nt, Artificial Sequence
  Description of Artificial Sequence: Synthetic oligonucleotide
  Antisense strand to SEQ ID NO: 2297140
uccacagggaccauuccuu

SEQ ID NO: 2297142 - RNA, 19 nt, Artificial Sequence
  Description of Artificial Sequence: Synthetic oligonucleotide
  Sense strand starting at position 3007 of SEQ ID NO: 1884854
gccucauucccaggaaauc

SEQ ID NO: 2297143 - RNA, 19 nt, Artificial Sequence
  Description of Artificial Sequence: Synthetic oligonucleotide
  Antisense strand to SEQ ID NO: 2297142
gauuuccugggaaugaggc

SEQ ID NO: 2297144 - RNA, 19 nt, Artificial Sequence
  Description of Artificial Sequence: Synthetic oligonucleotide
  Sense strand starting at position 3047 of SEQ ID NO: 1884854
gccugaaauccugacguga

SEQ ID NO: 2297145 - RNA, 19 nt, Artificial Sequence
  Description of Artificial Sequence: Synthetic oligonucleotide
  Antisense strand to SEQ ID NO: 2297144
ucacgucaggauuucaggc

SEQ ID NO: 2297146 - RNA, 19 nt, Artificial Sequence
  Description of Artificial Sequence: Synthetic oligonucleotide
  Sense strand starting at position 3229 of SEQ ID NO: 1884854
ccaguuaaguugcuguaua

SEQ ID NO: 2297147 - RNA, 19 nt, Artificial Sequence
  Description of Artificial Sequence: Synthetic oligonucleotide
  Antisense strand to SEQ ID NO: 2297146
uauacagcaacuuaacugg

SEQ ID NO: 2297148 - RNA, 19 nt, Artificial Sequence
  Description of Artificial Sequence: Synthetic oligonucleotide
  Sense strand starting at position 3242 of SEQ ID NO: 1884854
uguauaacucagggcaacu

SEQ ID NO: 2297149 - RNA, 19 nt, Artificial Sequence
  Description of Artificial Sequence: Synthetic oligonucleotide
  Antisense strand to SEQ ID NO: 2297148
aguugcccugaguuauaca

SEQ ID NO: 2297150 - RNA, 19 nt, Artificial Sequence
  Description of Artificial Sequence: Synthetic oligonucleotide
  Sense strand starting at position 3273 of SEQ ID NO: 1884854
ucuaguuucucugccagaa

SEQ ID NO: 2297151 - RNA, 19 nt, Artificial Sequence
  Description of Artificial Sequence: Synthetic oligonucleotide
  Antisense strand to SEQ ID NO: 2297150
uucuggcagagaaacuaga

SEQ ID NO: 2297152 - RNA, 19 nt, Artificial Sequence
  Description of Artificial Sequence: Synthetic oligonucleotide
  Sense strand starting at position 3320 of SEQ ID NO: 1884854
ccucauguugaguaacuga

SEQ ID NO: 2297153 - RNA, 19 nt, Artificial Sequence
  Description of Artificial Sequence: Synthetic oligonucleotide
  Antisense strand to SEQ ID NO: 2297152
ucaguuacucaacaugagg

SEQ ID NO: 2297154 - RNA, 19 nt, Artificial Sequence
  Description of Artificial Sequence: Synthetic oligonucleotide
  Sense strand starting at position 3323 of SEQ ID NO: 1884854
cauguugaguaacugaaga

SEQ ID NO: 2297155 - RNA, 19 nt, Artificial Sequence
  Description of Artificial Sequence: Synthetic oligonucleotide
  Antisense strand to SEQ ID NO: 2297154
ucuucaguuacucaacaug

SEQ ID NO: 2297156 - RNA, 19 nt, Artificial Sequence
  Description of Artificial Sequence: Synthetic oligonucleotide
  Sense strand starting at position 3331 of SEQ ID NO: 1884854
guaacugaagauugaguga

SEQ ID NO: 2297157 - RNA, 19 nt, Artificial Sequence
  Description of Artificial Sequence: Synthetic oligonucleotide
  Antisense strand to SEQ ID NO: 2297156
ucacucaaucuucaguuac

SEQ ID NO: 2297158 - RNA, 19 nt, Artificial Sequence
  Description of Artificial Sequence: Synthetic oligonucleotide
  Sense strand starting at position 3631 of SEQ ID NO: 1884854
cuaugauugcagugcuaca

SEQ ID NO: 2297159 - RNA, 19 nt, Artificial Sequence
  Description of Artificial Sequence: Synthetic oligonucleotide
  Antisense strand to SEQ ID NO: 2297158
uguagcacugcaaucauag

SEQ ID NO: 2297160 - RNA, 19 nt, Artificial Sequence
  Description of Artificial Sequence: Synthetic oligonucleotide
  Sense strand starting at position 3670 of SEQ ID NO: 1884854
ccagaugugucucucaaug

SEQ ID NO: 2297161 - RNA, 19 nt, Artificial Sequence
  Description of Artificial Sequence: Synthetic oligonucleotide
  Antisense strand to SEQ ID NO: 2297160
cauugagagacacaucugg

SEQ ID NO: 2297162 - RNA, 19 nt, Artificial Sequence
  Description of Artificial Sequence: Synthetic oligonucleotide
  Sense strand starting at position 3675 of SEQ ID NO: 1884854
ugugucucucaauguauca

SEQ ID NO: 2297163 - RNA, 19 nt, Artificial Sequence
  Description of Artificial Sequence: Synthetic oligonucleotide
  Antisense strand to SEQ ID NO: 2297162
ugauacauugagagacaca

SEQ ID NO: 2297164 - RNA, 19 nt, Artificial Sequence
  Description of Artificial Sequence: Synthetic oligonucleotide
  Sense strand starting at position 3896 of SEQ ID NO: 1884854
gugagaucgugucucccaa

SEQ ID NO: 2297165 - RNA, 19 nt, Artificial Sequence
  Description of Artificial Sequence: Synthetic oligonucleotide
  Antisense strand to SEQ ID NO: 2297164
uugggagacacgaucucac

SEQ ID NO: 2297166 - RNA, 19 nt, Artificial Sequence
  Description of Artificial Sequence: Synthetic oligonucleotide
  Sense strand starting at position 14 of SEQ ID NO: 1884855
guuucuuguauggacugau

SEQ ID NO: 2297167 - RNA, 19 nt, Artificial Sequence
  Description of Artificial Sequence: Synthetic oligonucleotide
  Antisense strand to SEQ ID NO: 2297166
aucaguccauacaagaaac

SEQ ID NO: 2297168 - RNA, 19 nt, Artificial Sequence
  Description of Artificial Sequence: Synthetic oligonucleotide
  Sense strand starting at position 78 of SEQ ID NO: 1884855
uggaaagaccucugcuaug

SEQ ID NO: 2297169 - RNA, 19 nt, Artificial Sequence
  Description of Artificial Sequence: Synthetic oligonucleotide
  Antisense strand to SEQ ID NO: 2297168
cauagcagaggucuuucca

SEQ ID NO: 2297170 - RNA, 19 nt, Artificial Sequence
  Description of Artificial Sequence: Synthetic oligonucleotide
  Sense strand starting at position 251 of SEQ ID NO: 1884855
acgugaagacacugugaga

SEQ ID NO: 2297171 - RNA, 19 nt, Artificial Sequence
  Description of Artificial Sequence: Synthetic oligonucleotide
  Antisense strand to SEQ ID NO: 2297170
ucucacagugucuucacgu

SEQ ID NO: 2297172 - RNA, 19 nt, Artificial Sequence
  Description of Artificial Sequence: Synthetic oligonucleotide
  Sense strand starting at position 455 of SEQ ID NO: 1884855
auaacacuuguugauguau

SEQ ID NO: 2297173 - RNA, 19 nt, Artificial Sequence
  Description of Artificial Sequence: Synthetic oligonucleotide
  Antisense strand to SEQ ID NO: 2297172
auacaucaacaaguguuau

SEQ ID NO: 2297174 - RNA, 19 nt, Artificial Sequence
  Description of Artificial Sequence: Synthetic oligonucleotide
  Sense strand starting at position 686 of SEQ ID NO: 1884855
acaguauuaucccuggaaa

SEQ ID NO: 2297175 - RNA, 19 nt, Artificial Sequence
  Description of Artificial Sequence: Synthetic oligonucleotide
  Antisense strand to SEQ ID NO: 2297174
uuuccagggauaauacugu

SEQ ID NO: 2297176 - RNA, 19 nt, Artificial Sequence
  Description of Artificial Sequence: Synthetic oligonucleotide
  Sense strand starting at position 688 of SEQ ID NO: 1884855
aguauuaucccuggaaaca

SEQ ID NO: 2297177 - RNA, 19 nt, Artificial Sequence
  Description of Artificial Sequence: Synthetic oligonucleotide
  Antisense strand to SEQ ID NO: 2297176
uguuuccagggauaauacu

SEQ ID NO: 2297178 - RNA, 19 nt, Artificial Sequence
  Description of Artificial Sequence: Synthetic oligonucleotide
  Sense strand starting at position 899 of SEQ ID NO: 1884855
auacaucaagcaugaguua

SEQ ID NO: 2297179 - RNA, 19 nt, Artificial Sequence
  Description of Artificial Sequence: Synthetic oligonucleotide
  Antisense strand to SEQ ID NO: 2297178
uaacucaugcuugauguau

SEQ ID NO: 2297180 - RNA, 19 nt, Artificial Sequence
  Description of Artificial Sequence: Synthetic oligonucleotide
  Sense strand starting at position 1017 of SEQ ID NO: 1884855
cugugcucagaugaacuau

SEQ ID NO: 2297181 - RNA, 19 nt, Artificial Sequence
  Description of Artificial Sequence: Synthetic oligonucleotide
  Antisense strand to SEQ ID NO: 2297180
auaguucaucugagcacag

SEQ ID NO: 2297182 - RNA, 19 nt, Artificial Sequence
  Description of Artificial Sequence: Synthetic oligonucleotide
  Sense strand starting at position 1085 of SEQ ID NO: 1884855
ugaacugauggcugguaaa

SEQ ID NO: 2297183 - RNA, 19 nt, Artificial Sequence
  Description of Artificial Sequence: Synthetic oligonucleotide
  Antisense strand to SEQ ID NO: 2297182
uuuaccagccaucaguuca

SEQ ID NO: 2297184 - RNA, 19 nt, Artificial Sequence
  Description of Artificial Sequence: Synthetic oligonucleotide
  Sense strand starting at position 1204 of SEQ ID NO: 1884855
aggaaaugucuguggaaua

SEQ ID NO: 2297185 - RNA, 19 nt, Artificial Sequence
  Description of Artificial Sequence: Synthetic oligonucleotide
  Antisense strand to SEQ ID NO: 2297184
uauuccacagacauuuccu

SEQ ID NO: 2297186 - RNA, 19 nt, Artificial Sequence
  Description of Artificial Sequence: Synthetic oligonucleotide
  Sense strand starting at position 1515 of SEQ ID NO: 1884855
acuuguugaggauguggaa

SEQ ID NO: 2297187 - RNA, 19 nt, Artificial Sequence
  Description of Artificial Sequence: Synthetic oligonucleotide
  Antisense strand to SEQ ID NO: 2297186
uuccacauccucaacaagu

SEQ ID NO: 2297188 - RNA, 19 nt, Artificial Sequence
  Description of Artificial Sequence: Synthetic oligonucleotide
  Sense strand starting at position 1559 of SEQ ID NO: 1884855
gcucaugugguggagaaga

SEQ ID NO: 2297189 - RNA, 19 nt, Artificial Sequence
  Description of Artificial Sequence: Synthetic oligonucleotide
  Antisense strand to SEQ ID NO: 2297188
ucuucuccaccacaugagc

SEQ ID NO: 2297190 - RNA, 19 nt, Artificial Sequence
  Description of Artificial Sequence: Synthetic oligonucleotide
  Sense strand starting at position 1599 of SEQ ID NO: 1884855
guguguaaugcauugcagu

SEQ ID NO: 2297191 - RNA, 19 nt, Artificial Sequence
  Description of Artificial Sequence: Synthetic oligonucleotide
  Antisense strand to SEQ ID NO: 2297190
acugcaaugcauuacacac

SEQ ID NO: 2297192 - RNA, 19 nt, Artificial Sequence
  Description of Artificial Sequence: Synthetic oligonucleotide
  Sense strand starting at position 1601 of SEQ ID NO: 1884855
guguaaugcauugcagugu

SEQ ID NO: 2297193 - RNA, 19 nt, Artificial Sequence
  Description of Artificial Sequence: Synthetic oligonucleotide
  Antisense strand to SEQ ID NO: 2297192
acacugcaaugcauuacac

SEQ ID NO: 2297194 - RNA, 19 nt, Artificial Sequence
  Description of Artificial Sequence: Synthetic oligonucleotide
  Sense strand starting at position 1759 of SEQ ID NO: 1884855
agauaaacuccacgcacaa

SEQ ID NO: 2297195 - RNA, 19 nt, Artificial Sequence
  Description of Artificial Sequence: Synthetic oligonucleotide
  Antisense strand to SEQ ID NO: 2297194
uugugcguggaguuuaucu

SEQ ID NO: 2297196 - RNA, 19 nt, Artificial Sequence
  Description of Artificial Sequence: Synthetic oligonucleotide
  Sense strand starting at position 1992 of SEQ ID NO: 1884855
uuccaagacuggucauaau

SEQ ID NO: 2297197 - RNA, 19 nt, Artificial Sequence
  Description of Artificial Sequence: Synthetic oligonucleotide
  Antisense strand to SEQ ID NO: 2297196
auuaugaccagucuuggaa

SEQ ID NO: 2297198 - RNA, 19 nt, Artificial Sequence
  Description of Artificial Sequence: Synthetic oligonucleotide
  Sense strand starting at position 2176 of SEQ ID NO: 1884855
ccuucuagguaucugaaga

SEQ ID NO: 2297199 - RNA, 19 nt, Artificial Sequence
  Description of Artificial Sequence: Synthetic oligonucleotide
  Antisense strand to SEQ ID NO: 2297198
ucuucagauaccuagaagg

SEQ ID NO: 2297200 - RNA, 19 nt, Artificial Sequence
  Description of Artificial Sequence: Synthetic oligonucleotide
  Sense strand starting at position 2183 of SEQ ID NO: 1884855
gguaucugaagauguugaa

SEQ ID NO: 2297201 - RNA, 19 nt, Artificial Sequence
  Description of Artificial Sequence: Synthetic oligonucleotide
  Antisense strand to SEQ ID NO: 2297200
uucaacaucuucagauacc

SEQ ID NO: 2297202 - RNA, 19 nt, Artificial Sequence
  Description of Artificial Sequence: Synthetic oligonucleotide
  Sense strand starting at position 2280 of SEQ ID NO: 1884855
gugacugaaagaugaaguu

SEQ ID NO: 2297203 - RNA, 19 nt, Artificial Sequence
  Description of Artificial Sequence: Synthetic oligonucleotide
  Antisense strand to SEQ ID NO: 2297202
aacuucaucuuucagucac

SEQ ID NO: 2297204 - RNA, 19 nt, Artificial Sequence
  Description of Artificial Sequence: Synthetic oligonucleotide
  Sense strand starting at position 2568 of SEQ ID NO: 1884855
agaaguagauaguugccaa

SEQ ID NO: 2297205 - RNA, 19 nt, Artificial Sequence
  Description of Artificial Sequence: Synthetic oligonucleotide
  Antisense strand to SEQ ID NO: 2297204
uuggcaacuaucuacuucu

SEQ ID NO: 2297206 - RNA, 19 nt, Artificial Sequence
  Description of Artificial Sequence: Synthetic oligonucleotide
  Sense strand starting at position 2582 of SEQ ID NO: 1884855
gccaaagauaccuguggaa

SEQ ID NO: 2297207 - RNA, 19 nt, Artificial Sequence
  Description of Artificial Sequence: Synthetic oligonucleotide
  Antisense strand to SEQ ID NO: 2297206
uuccacagguaucuuuggc

SEQ ID NO: 2297208 - RNA, 19 nt, Artificial Sequence
  Description of Artificial Sequence: Synthetic oligonucleotide
  Sense strand starting at position 2673 of SEQ ID NO: 1884855
gaaagagauuuagaagccu

SEQ ID NO: 2297209 - RNA, 19 nt, Artificial Sequence
  Description of Artificial Sequence: Synthetic oligonucleotide
  Antisense strand to SEQ ID NO: 2297208
aggcuucuaaaucucuuuc

SEQ ID NO: 2297210 - RNA, 19 nt, Artificial Sequence
  Description of Artificial Sequence: Synthetic oligonucleotide
  Sense strand starting at position 2692 of SEQ ID NO: 1884855
ucagcagagagaugauguu

SEQ ID NO: 2297211 - RNA, 19 nt, Artificial Sequence
  Description of Artificial Sequence: Synthetic oligonucleotide
  Antisense strand to SEQ ID NO: 2297210
aacaucaucucucugcuga

SEQ ID NO: 2297212 - RNA, 19 nt, Artificial Sequence
  Description of Artificial Sequence: Synthetic oligonucleotide
  Sense strand starting at position 2713 of SEQ ID NO: 1884855
aagccuuaggagugaauga

SEQ ID NO: 2297213 - RNA, 19 nt, Artificial Sequence
  Description of Artificial Sequence: Synthetic oligonucleotide
  Antisense strand to SEQ ID NO: 2297212
ucauucacuccuaaggcuu

SEQ ID NO: 2297214 - RNA, 19 nt, Artificial Sequence
  Description of Artificial Sequence: Synthetic oligonucleotide
  Sense strand starting at position 2889 of SEQ ID NO: 1884855
ugaaacauuccacgagggu

SEQ ID NO: 2297215 - RNA, 19 nt, Artificial Sequence
  Description of Artificial Sequence: Synthetic oligonucleotide
  Antisense strand to SEQ ID NO: 2297214
acccucguggaauguuuca

SEQ ID NO: 2297216 - RNA, 19 nt, Artificial Sequence
  Description of Artificial Sequence: Synthetic oligonucleotide
  Sense strand starting at position 2902 of SEQ ID NO: 1884855
gaggguucgggccaugaga

SEQ ID NO: 2297217 - RNA, 19 nt, Artificial Sequence
  Description of Artificial Sequence: Synthetic oligonucleotide
  Antisense strand to SEQ ID NO: 2297216
ucucauggcccgaacccuc

SEQ ID NO: 2297218 - RNA, 19 nt, Artificial Sequence
  Description of Artificial Sequence: Synthetic oligonucleotide
  Sense strand starting at position 2945 of SEQ ID NO: 1884855
uuaacacauucugcugaga

SEQ ID NO: 2297219 - RNA, 19 nt, Artificial Sequence
  Description of Artificial Sequence: Synthetic oligonucleotide
  Antisense strand to SEQ ID NO: 2297218
ucucagcagaauguguuaa

SEQ ID NO: 2297220 - RNA, 19 nt, Artificial Sequence
  Description of Artificial Sequence: Synthetic oligonucleotide
  Sense strand starting at position 2983 of SEQ ID NO: 1884855
uuauuacauucugugggaa

SEQ ID NO: 2297221 - RNA, 19 nt, Artificial Sequence
  Description of Artificial Sequence: Synthetic oligonucleotide
  Antisense strand to SEQ ID NO: 2297220
uucccacagaauguaauaa

SEQ ID NO: 2297222 - RNA, 19 nt, Artificial Sequence
  Description of Artificial Sequence: Synthetic oligonucleotide
  Sense strand starting at position 2984 of SEQ ID NO: 1884855
uauuacauucugugggaac

SEQ ID NO: 2297223 - RNA, 19 nt, Artificial Sequence
  Description of Artificial Sequence: Synthetic oligonucleotide
  Antisense strand to SEQ ID NO: 2297222
guucccacagaauguaaua

SEQ ID NO: 2297224 - RNA, 19 nt, Artificial Sequence
  Description of Artificial Sequence: Synthetic oligonucleotide
  Sense strand starting at position 2986 of SEQ ID NO: 1884855
uuacauucugugggaacaa

SEQ ID NO: 2297225 - RNA, 19 nt, Artificial Sequence
  Description of Artificial Sequence: Synthetic oligonucleotide
  Antisense strand to SEQ ID NO: 2297224
uuguucccacagaauguaa

SEQ ID NO: 2297226 - RNA, 19 nt, Artificial Sequence
  Description of Artificial Sequence: Synthetic oligonucleotide
  Sense strand starting at position 3164 of SEQ ID NO: 1884855
ggacauaaauaccugcauu

SEQ ID NO: 2297227 - RNA, 19 nt, Artificial Sequence
  Description of Artificial Sequence: Synthetic oligonucleotide
  Antisense strand to SEQ ID NO: 2297226
aaugcagguauuuaugucc

SEQ ID NO: 2297228 - RNA, 19 nt, Artificial Sequence
  Description of Artificial Sequence: Synthetic oligonucleotide
  Sense strand starting at position 3318 of SEQ ID NO: 1884855
guagaacagugauucucaa

SEQ ID NO: 2297229 - RNA, 19 nt, Artificial Sequence
  Description of Artificial Sequence: Synthetic oligonucleotide
  Antisense strand to SEQ ID NO: 2297228
uugagaaucacuguucuac

SEQ ID NO: 2297230 - RNA, 19 nt, Artificial Sequence
  Description of Artificial Sequence: Synthetic oligonucleotide
  Sense strand starting at position 3439 of SEQ ID NO: 1884855
uucucaugagcacaugaau

SEQ ID NO: 2297231 - RNA, 19 nt, Artificial Sequence
  Description of Artificial Sequence: Synthetic oligonucleotide
  Antisense strand to SEQ ID NO: 2297230
auucaugugcucaugagaa

SEQ ID NO: 2297232 - RNA, 19 nt, Artificial Sequence
  Description of Artificial Sequence: Synthetic oligonucleotide
  Sense strand starting at position 3491 of SEQ ID NO: 1884855
gugauauugcaacaaacug

SEQ ID NO: 2297233 - RNA, 19 nt, Artificial Sequence
  Description of Artificial Sequence: Synthetic oligonucleotide
  Antisense strand to SEQ ID NO: 2297232
caguuuguugcaauaucac

SEQ ID NO: 2297234 - RNA, 19 nt, Artificial Sequence
  Description of Artificial Sequence: Synthetic oligonucleotide
  Sense strand starting at position 3617 of SEQ ID NO: 1884855
cagauccugugaucaaaga

SEQ ID NO: 2297235 - RNA, 19 nt, Artificial Sequence
  Description of Artificial Sequence: Synthetic oligonucleotide
  Antisense strand to SEQ ID NO: 2297234
ucuuugaucacaggaucug

SEQ ID NO: 2297236 - RNA, 19 nt, Artificial Sequence
  Description of Artificial Sequence: Synthetic oligonucleotide
  Sense strand starting at position 3718 of SEQ ID NO: 1884855
gucagaagcaaccaucgaa

SEQ ID NO: 2297237 - RNA, 19 nt, Artificial Sequence
  Description of Artificial Sequence: Synthetic oligonucleotide
  Antisense strand to SEQ ID NO: 2297236
uucgaugguugcuucugac

SEQ ID NO: 2297238 - RNA, 19 nt, Artificial Sequence
  Description of Artificial Sequence: Synthetic oligonucleotide
  Sense strand starting at position 3767 of SEQ ID NO: 1884855
agcuguuccgugucauggu

SEQ ID NO: 2297239 - RNA, 19 nt, Artificial Sequence
  Description of Artificial Sequence: Synthetic oligonucleotide
  Antisense strand to SEQ ID NO: 2297238
accaugacacggaacagcu

SEQ ID NO: 2297240 - RNA, 19 nt, Artificial Sequence
  Description of Artificial Sequence: Synthetic oligonucleotide
  Sense strand starting at position 3842 of SEQ ID NO: 1884855
gccugaagggaccauucuu

SEQ ID NO: 2297241 - RNA, 19 nt, Artificial Sequence
  Description of Artificial Sequence: Synthetic oligonucleotide
  Antisense strand to SEQ ID NO: 2297240
aagaauggucccuucaggc

SEQ ID NO: 2297242 - RNA, 19 nt, Artificial Sequence
  Description of Artificial Sequence: Synthetic oligonucleotide
  Sense strand starting at position 3897 of SEQ ID NO: 1884855
cccauuucgucuucuacua

SEQ ID NO: 2297243 - RNA, 19 nt, Artificial Sequence
  Description of Artificial Sequence: Synthetic oligonucleotide
  Antisense strand to SEQ ID NO: 2297242
uaguagaagacgaaauggg

SEQ ID NO: 2297244 - RNA, 19 nt, Artificial Sequence
  Description of Artificial Sequence: Synthetic oligonucleotide
  Sense strand starting at position 3946 of SEQ ID NO: 1884855
agggcauuaacuggauauu

SEQ ID NO: 2297245 - RNA, 19 nt, Artificial Sequence
  Description of Artificial Sequence: Synthetic oligonucleotide
  Antisense strand to SEQ ID NO: 2297244
aauauccaguuaaugcccu

SEQ ID NO: 2297246 - RNA, 19 nt, Artificial Sequence
  Description of Artificial Sequence: Synthetic oligonucleotide
  Sense strand starting at position 284 of SEQ ID NO: 1884856
gacuuaacaugauaaggga

SEQ ID NO: 2297247 - RNA, 19 nt, Artificial Sequence
  Description of Artificial Sequence: Synthetic oligonucleotide
  Antisense strand to SEQ ID NO: 2297246
ucccuuaucauguuaaguc

SEQ ID NO: 2297248 - RNA, 19 nt, Artificial Sequence
  Description of Artificial Sequence: Synthetic oligonucleotide
  Sense strand starting at position 297 of SEQ ID NO: 1884856
aagggaggguuuguuaaag

SEQ ID NO: 2297249 - RNA, 19 nt, Artificial Sequence
  Description of Artificial Sequence: Synthetic oligonucleotide
  Antisense strand to SEQ ID NO: 2297248
cuuuaacaaacccucccuu

SEQ ID NO: 2297250 - RNA, 19 nt, Artificial Sequence
  Description of Artificial Sequence: Synthetic oligonucleotide
  Sense strand starting at position 361 of SEQ ID NO: 1884856
cucagaaccucagugguuu

SEQ ID NO: 2297251 - RNA, 19 nt, Artificial Sequence
  Description of Artificial Sequence: Synthetic oligonucleotide
  Antisense strand to SEQ ID NO: 2297250
aaaccacugagguucugag

SEQ ID NO: 2297252 - RNA, 19 nt, Artificial Sequence
  Description of Artificial Sequence: Synthetic oligonucleotide
  Sense strand starting at position 365 of SEQ ID NO: 1884856
gaaccucagugguuugaaa

SEQ ID NO: 2297253 - RNA, 19 nt, Artificial Sequence
  Description of Artificial Sequence: Synthetic oligonucleotide
  Antisense strand to SEQ ID NO: 2297252
uuucaaaccacugagguuc

SEQ ID NO: 2297254 - RNA, 19 nt, Artificial Sequence
  Description of Artificial Sequence: Synthetic oligonucleotide
  Sense strand starting at position 421 of SEQ ID NO: 1884856
cagugaucaguagagaggu

SEQ ID NO: 2297255 - RNA, 19 nt, Artificial Sequence
  Description of Artificial Sequence: Synthetic oligonucleotide
  Antisense strand to SEQ ID NO: 2297254
accucucuacugaucacug

SEQ ID NO: 2297256 - RNA, 19 nt, Artificial Sequence
  Description of Artificial Sequence: Synthetic oligonucleotide
  Sense strand starting at position 726 of SEQ ID NO: 1884856
cugucauuauaguuaauag

SEQ ID NO: 2297257 - RNA, 19 nt, Artificial Sequence
  Description of Artificial Sequence: Synthetic oligonucleotide
  Antisense strand to SEQ ID NO: 2297256
cuauuaacuauaaugacag

SEQ ID NO: 2297258 - RNA, 19 nt, Artificial Sequence
  Description of Artificial Sequence: Synthetic oligonucleotide
  Sense strand starting at position 865 of SEQ ID NO: 1884856
uagcauccaguuuggaaau

SEQ ID NO: 2297259 - RNA, 19 nt, Artificial Sequence
  Description of Artificial Sequence: Synthetic oligonucleotide
  Antisense strand to SEQ ID NO: 2297258
auuuccaaacuggaugcua

SEQ ID NO: 2297260 - RNA, 19 nt, Artificial Sequence
  Description of Artificial Sequence: Synthetic oligonucleotide
  Sense strand starting at position 912 of SEQ ID NO: 1884856
augauaugaccuuguguau

SEQ ID NO: 2297261 - RNA, 19 nt, Artificial Sequence
  Description of Artificial Sequence: Synthetic oligonucleotide
  Antisense strand to SEQ ID NO: 2297260
auacacaaggucauaucau

SEQ ID NO: 2297262 - RNA, 19 nt, Artificial Sequence
  Description of Artificial Sequence: Synthetic oligonucleotide
  Sense strand starting at position 918 of SEQ ID NO: 1884856
ugaccuuguguauggaaca

SEQ ID NO: 2297263 - RNA, 19 nt, Artificial Sequence
  Description of Artificial Sequence: Synthetic oligonucleotide
  Antisense strand to SEQ ID NO: 2297262
uguuccauacacaagguca

SEQ ID NO: 2297264 - RNA, 19 nt, Artificial Sequence
  Description of Artificial Sequence: Synthetic oligonucleotide
  Sense strand starting at position 923 of SEQ ID NO: 1884856
uuguguauggaacaucuua

SEQ ID NO: 2297265 - RNA, 19 nt, Artificial Sequence
  Description of Artificial Sequence: Synthetic oligonucleotide
  Antisense strand to SEQ ID NO: 2297264
uaagauguuccauacacaa

SEQ ID NO: 2297266 - RNA, 19 nt, Artificial Sequence
  Description of Artificial Sequence: Synthetic oligonucleotide
  Sense strand starting at position 1316 of SEQ ID NO: 1884856
uguuguauaaauugagaag

SEQ ID NO: 2297267 - RNA, 19 nt, Artificial Sequence
  Description of Artificial Sequence: Synthetic oligonucleotide
  Antisense strand to SEQ ID NO: 2297266
cuucucaauuuauacaaca

SEQ ID NO: 2297268 - RNA, 19 nt, Artificial Sequence
  Description of Artificial Sequence: Synthetic oligonucleotide
  Sense strand starting at position 1431 of SEQ ID NO: 1884856
agacauuacccgggcacaa

SEQ ID NO: 2297269 - RNA, 19 nt, Artificial Sequence
  Description of Artificial Sequence: Synthetic oligonucleotide
  Antisense strand to SEQ ID NO: 2297268
uugugcccggguaaugucu

SEQ ID NO: 2297270 - RNA, 19 nt, Artificial Sequence
  Description of Artificial Sequence: Synthetic oligonucleotide
  Sense strand starting at position 1451 of SEQ ID NO: 1884856
aauuaaagagugugguauu

SEQ ID NO: 2297271 - RNA, 19 nt, Artificial Sequence
  Description of Artificial Sequence: Synthetic oligonucleotide
  Antisense strand to SEQ ID NO: 2297270
aauaccacacucuuuaauu

SEQ ID NO: 2297272 - RNA, 19 nt, Artificial Sequence
  Description of Artificial Sequence: Synthetic oligonucleotide
  Sense strand starting at position 1496 of SEQ ID NO: 1884856
guggaauagacuugagagc

SEQ ID NO: 2297273 - RNA, 19 nt, Artificial Sequence
  Description of Artificial Sequence: Synthetic oligonucleotide
  Antisense strand to SEQ ID NO: 2297272
gcucucaagucuauuccac

SEQ ID NO: 2297274 - RNA, 19 nt, Artificial Sequence
  Description of Artificial Sequence: Synthetic oligonucleotide
  Sense strand starting at position 1855 of SEQ ID NO: 1884856
uuguuauuguuacugagac

SEQ ID NO: 2297275 - RNA, 19 nt, Artificial Sequence
  Description of Artificial Sequence: Synthetic oligonucleotide
  Antisense strand to SEQ ID NO: 2297274
gucucaguaacaauaacaa

SEQ ID NO: 2297276 - RNA, 19 nt, Artificial Sequence
  Description of Artificial Sequence: Synthetic oligonucleotide
  Sense strand starting at position 1857 of SEQ ID NO: 1884856
guuauuguuacugagacga

SEQ ID NO: 2297277 - RNA, 19 nt, Artificial Sequence
  Description of Artificial Sequence: Synthetic oligonucleotide
  Antisense strand to SEQ ID NO: 2297276
ucgucucaguaacaauaac

SEQ ID NO: 2297278 - RNA, 19 nt, Artificial Sequence
  Description of Artificial Sequence: Synthetic oligonucleotide
  Sense strand starting at position 1889 of SEQ ID NO: 1884856
gaccgaagguucuucucaa

SEQ ID NO: 2297279 - RNA, 19 nt, Artificial Sequence
  Description of Artificial Sequence: Synthetic oligonucleotide
  Antisense strand to SEQ ID NO: 2297278
uugagaagaaccuucgguc

SEQ ID NO: 2297280 - RNA, 19 nt, Artificial Sequence
  Description of Artificial Sequence: Synthetic oligonucleotide
  Sense strand starting at position 1890 of SEQ ID NO: 1884856
accgaagguucuucucaau

SEQ ID NO: 2297281 - RNA, 19 nt, Artificial Sequence
  Description of Artificial Sequence: Synthetic oligonucleotide
  Antisense strand to SEQ ID NO: 2297280
auugagaagaaccuucggu

SEQ ID NO: 2297282 - RNA, 19 nt, Artificial Sequence
  Description of Artificial Sequence: Synthetic oligonucleotide
  Sense strand starting at position 1984 of SEQ ID NO: 1884856
gagugugcugcggcaagau

SEQ ID NO: 2297283 - RNA, 19 nt, Artificial Sequence
  Description of Artificial Sequence: Synthetic oligonucleotide
  Antisense strand to SEQ ID NO: 2297282
aucuugccgcagcacacuc

SEQ ID NO: 2297284 - RNA, 19 nt, Artificial Sequence
  Description of Artificial Sequence: Synthetic oligonucleotide
  Sense strand starting at position 2062 of SEQ ID NO: 1884856
gcuguuucuggcuugggua

SEQ ID NO: 2297285 - RNA, 19 nt, Artificial Sequence
  Description of Artificial Sequence: Synthetic oligonucleotide
  Antisense strand to SEQ ID NO: 2297284
uacccaagccagaaacagc

SEQ ID NO: 2297286 - RNA, 19 nt, Artificial Sequence
  Description of Artificial Sequence: Synthetic oligonucleotide
  Sense strand starting at position 2075 of SEQ ID NO: 1884856
uggguaucuuaugcuuaca

SEQ ID NO: 2297287 - RNA, 19 nt, Artificial Sequence
  Description of Artificial Sequence: Synthetic oligonucleotide
  Antisense strand to SEQ ID NO: 2297286
uguaagcauaagauaccca

SEQ ID NO: 2297288 - RNA, 19 nt, Artificial Sequence
  Description of Artificial Sequence: Synthetic oligonucleotide
  Sense strand starting at position 2810 of SEQ ID NO: 1884856
ggauuucagugaugaacug

SEQ ID NO: 2297289 - RNA, 19 nt, Artificial Sequence
  Description of Artificial Sequence: Synthetic oligonucleotide
  Antisense strand to SEQ ID NO: 2297288
caguucaucacugaaaucc

SEQ ID NO: 2297290 - RNA, 19 nt, Artificial Sequence
  Description of Artificial Sequence: Synthetic oligonucleotide
  Sense strand starting at position 2950 of SEQ ID NO: 1884856
ccaggcuauucuguaaaug

SEQ ID NO: 2297291 - RNA, 19 nt, Artificial Sequence
  Description of Artificial Sequence: Synthetic oligonucleotide
  Antisense strand to SEQ ID NO: 2297290
cauuuacagaauagccugg

SEQ ID NO: 2297292 - RNA, 19 nt, Artificial Sequence
  Description of Artificial Sequence: Synthetic oligonucleotide
  Sense strand starting at position 2951 of SEQ ID NO: 1884856
caggcuauucuguaaauga

SEQ ID NO: 2297293 - RNA, 19 nt, Artificial Sequence
  Description of Artificial Sequence: Synthetic oligonucleotide
  Antisense strand to SEQ ID NO: 2297292
ucauuuacagaauagccug

SEQ ID NO: 2297294 - RNA, 19 nt, Artificial Sequence
  Description of Artificial Sequence: Synthetic oligonucleotide
  Sense strand starting at position 3131 of SEQ ID NO: 1884856
agaagacuccuaggcugau

SEQ ID NO: 2297295 - RNA, 19 nt, Artificial Sequence
  Description of Artificial Sequence: Synthetic oligonucleotide
  Antisense strand to SEQ ID NO: 2297294
aucagccuaggagucuucu

SEQ ID NO: 2297296 - RNA, 19 nt, Artificial Sequence
  Description of Artificial Sequence: Synthetic oligonucleotide
  Sense strand starting at position 3132 of SEQ ID NO: 1884856
gaagacuccuaggcugaua

SEQ ID NO: 2297297 - RNA, 19 nt, Artificial Sequence
  Description of Artificial Sequence: Synthetic oligonucleotide
  Antisense strand to SEQ ID NO: 2297296
uaucagccuaggagucuuc

SEQ ID NO: 2297298 - RNA, 19 nt, Artificial Sequence
  Description of Artificial Sequence: Synthetic oligonucleotide
  Sense strand starting at position 3143 of SEQ ID NO: 1884856
ggcugauaagaauguguga

SEQ ID NO: 2297299 - RNA, 19 nt, Artificial Sequence
  Description of Artificial Sequence: Synthetic oligonucleotide
  Antisense strand to SEQ ID NO: 2297298
ucacacauucuuaucagcc

SEQ ID NO: 2297300 - RNA, 19 nt, Artificial Sequence
  Description of Artificial Sequence: Synthetic oligonucleotide
  Sense strand starting at position 3145 of SEQ ID NO: 1884856
cugauaagaaugugugaag

SEQ ID NO: 2297301 - RNA, 19 nt, Artificial Sequence
  Description of Artificial Sequence: Synthetic oligonucleotide
  Antisense strand to SEQ ID NO: 2297300
cuucacacauucuuaucag

SEQ ID NO: 2297302 - RNA, 19 nt, Artificial Sequence
  Description of Artificial Sequence: Synthetic oligonucleotide
  Sense strand starting at position 3176 of SEQ ID NO: 1884856
ugaauaugcaaaggagagu

SEQ ID NO: 2297303 - RNA, 19 nt, Artificial Sequence
  Description of Artificial Sequence: Synthetic oligonucleotide
  Antisense strand to SEQ ID NO: 2297302
acucuccuuugcauauuca

SEQ ID NO: 2297304 - RNA, 19 nt, Artificial Sequence
  Description of Artificial Sequence: Synthetic oligonucleotide
  Sense strand starting at position 3214 of SEQ ID NO: 1884856
aggacuaaauuagaagaaa

SEQ ID NO: 2297305 - RNA, 19 nt, Artificial Sequence
  Description of Artificial Sequence: Synthetic oligonucleotide
  Antisense strand to SEQ ID NO: 2297304
uuucuucuaauuuaguccu

SEQ ID NO: 2297306 - RNA, 19 nt, Artificial Sequence
  Description of Artificial Sequence: Synthetic oligonucleotide
  Sense strand starting at position 3263 of SEQ ID NO: 1884856
cugccauuagucugaaauc

SEQ ID NO: 2297307 - RNA, 19 nt, Artificial Sequence
  Description of Artificial Sequence: Synthetic oligonucleotide
  Antisense strand to SEQ ID NO: 2297306
gauuucagacuaauggcag

SEQ ID NO: 2297308 - RNA, 19 nt, Artificial Sequence
  Description of Artificial Sequence: Synthetic oligonucleotide
  Sense strand starting at position 3302 of SEQ ID NO: 1884856
agacacauguugcuagaga

SEQ ID NO: 2297309 - RNA, 19 nt, Artificial Sequence
  Description of Artificial Sequence: Synthetic oligonucleotide
  Antisense strand to SEQ ID NO: 2297308
ucucuagcaacaugugucu

SEQ ID NO: 2297310 - RNA, 19 nt, Artificial Sequence
  Description of Artificial Sequence: Synthetic oligonucleotide
  Sense strand starting at position 3421 of SEQ ID NO: 1884856
gauucugauggucauggua

SEQ ID NO: 2297311 - RNA, 19 nt, Artificial Sequence
  Description of Artificial Sequence: Synthetic oligonucleotide
  Antisense strand to SEQ ID NO: 2297310
uaccaugaccaucagaauc

SEQ ID NO: 2297312 - RNA, 19 nt, Artificial Sequence
  Description of Artificial Sequence: Synthetic oligonucleotide
  Sense strand starting at position 3424 of SEQ ID NO: 1884856
ucugauggucaugguaagu

SEQ ID NO: 2297313 - RNA, 19 nt, Artificial Sequence
  Description of Artificial Sequence: Synthetic oligonucleotide
  Antisense strand to SEQ ID NO: 2297312
acuuaccaugaccaucaga

SEQ ID NO: 2297314 - RNA, 19 nt, Artificial Sequence
  Description of Artificial Sequence: Synthetic oligonucleotide
  Sense strand starting at position 3570 of SEQ ID NO: 1884856
gagacagguauugguaguu

SEQ ID NO: 2297315 - RNA, 19 nt, Artificial Sequence
  Description of Artificial Sequence: Synthetic oligonucleotide
  Antisense strand to SEQ ID NO: 2297314
aacuaccaauaccugucuc

SEQ ID NO: 2297316 - RNA, 19 nt, Artificial Sequence
  Description of Artificial Sequence: Synthetic oligonucleotide
  Sense strand starting at position 3630 of SEQ ID NO: 1884856
agauaugaacucugugauu

SEQ ID NO: 2297317 - RNA, 19 nt, Artificial Sequence
  Description of Artificial Sequence: Synthetic oligonucleotide
  Antisense strand to SEQ ID NO: 2297316
aaucacagaguucauaucu

SEQ ID NO: 2297318 - RNA, 19 nt, Artificial Sequence
  Description of Artificial Sequence: Synthetic oligonucleotide
  Sense strand starting at position 3770 of SEQ ID NO: 1884856
cucuuugauuuagcguuau

SEQ ID NO: 2297319 - RNA, 19 nt, Artificial Sequence
  Description of Artificial Sequence: Synthetic oligonucleotide
  Antisense strand to SEQ ID NO: 2297318
auaacgcuaaaucaaagag

SEQ ID NO: 2297320 - RNA, 19 nt, Artificial Sequence
  Description of Artificial Sequence: Synthetic oligonucleotide
  Sense strand starting at position 3900 of SEQ ID NO: 1884856
uucuuuaugcaucaagaug

SEQ ID NO: 2297321 - RNA, 19 nt, Artificial Sequence
  Description of Artificial Sequence: Synthetic oligonucleotide
  Antisense strand to SEQ ID NO: 2297320
caucuugaugcauaaagaa

SEQ ID NO: 2297322 - RNA, 19 nt, Artificial Sequence
  Description of Artificial Sequence: Synthetic oligonucleotide
  Sense strand starting at position 3915 of SEQ ID NO: 1884856
gauguuauugcugagaugu

SEQ ID NO: 2297323 - RNA, 19 nt, Artificial Sequence
  Description of Artificial Sequence: Synthetic oligonucleotide
  Antisense strand to SEQ ID NO: 2297322
acaucucagcaauaacauc

SEQ ID NO: 2297324 - RNA, 19 nt, Artificial Sequence
  Description of Artificial Sequence: Synthetic oligonucleotide
  Sense strand starting at position 3921 of SEQ ID NO: 1884856
auugcugagaugugaauca

SEQ ID NO: 2297325 - RNA, 19 nt, Artificial Sequence
  Description of Artificial Sequence: Synthetic oligonucleotide
  Antisense strand to SEQ ID NO: 2297324
ugauucacaucucagcaau

SEQ ID NO: 2297326 - RNA, 19 nt, Artificial Sequence
  Description of Artificial Sequence: Synthetic oligonucleotide
  Sense strand starting at position 979 of SEQ ID NO: 1884857
agccaugcauucucaggaa

SEQ ID NO: 2297327 - RNA, 19 nt, Artificial Sequence
  Description of Artificial Sequence: Synthetic oligonucleotide
  Antisense strand to SEQ ID NO: 2297326
uuccugagaaugcauggcu

SEQ ID NO: 2297328 - RNA, 19 nt, Artificial Sequence
  Description of Artificial Sequence: Synthetic oligonucleotide
  Sense strand starting at position 983 of SEQ ID NO: 1884857
augcauucucaggaagugu

SEQ ID NO: 2297329 - RNA, 19 nt, Artificial Sequence
  Description of Artificial Sequence: Synthetic oligonucleotide
  Antisense strand to SEQ ID NO: 2297328
acacuuccugagaaugcau

SEQ ID NO: 2297330 - RNA, 19 nt, Artificial Sequence
  Description of Artificial Sequence: Synthetic oligonucleotide
  Sense strand starting at position 991 of SEQ ID NO: 1884857
ucaggaagugugugacaau

SEQ ID NO: 2297331 - RNA, 19 nt, Artificial Sequence
  Description of Artificial Sequence: Synthetic oligonucleotide
  Antisense strand to SEQ ID NO: 2297330
auugucacacacuuccuga

SEQ ID NO: 2297332 - RNA, 19 nt, Artificial Sequence
  Description of Artificial Sequence: Synthetic oligonucleotide
  Sense strand starting at position 998 of SEQ ID NO: 1884857
gugugugacaaugaguuga

SEQ ID NO: 2297333 - RNA, 19 nt, Artificial Sequence
  Description of Artificial Sequence: Synthetic oligonucleotide
  Antisense strand to SEQ ID NO: 2297332
ucaacucauugucacacac

SEQ ID NO: 2297334 - RNA, 19 nt, Artificial Sequence
  Description of Artificial Sequence: Synthetic oligonucleotide
  Sense strand starting at position 1000 of SEQ ID NO: 1884857
gugugacaaugaguugacu

SEQ ID NO: 2297335 - RNA, 19 nt, Artificial Sequence
  Description of Artificial Sequence: Synthetic oligonucleotide
  Antisense strand to SEQ ID NO: 2297334
agucaacucauugucacac

SEQ ID NO: 2297336 - RNA, 19 nt, Artificial Sequence
  Description of Artificial Sequence: Synthetic oligonucleotide
  Sense strand starting at position 1002 of SEQ ID NO: 1884857
gugacaaugaguugacuga

SEQ ID NO: 2297337 - RNA, 19 nt, Artificial Sequence
  Description of Artificial Sequence: Synthetic oligonucleotide
  Antisense strand to SEQ ID NO: 2297336
ucagucaacucauugucac

SEQ ID NO: 2297338 - RNA, 19 nt, Artificial Sequence
  Description of Artificial Sequence: Synthetic oligonucleotide
  Sense strand starting at position 1050 of SEQ ID NO: 1884857
uagucaaggccuuacuagu

SEQ ID NO: 2297339 - RNA, 19 nt, Artificial Sequence
  Description of Artificial Sequence: Synthetic oligonucleotide
  Antisense strand to SEQ ID NO: 2297338
acuaguaaggccuugacua

SEQ ID NO: 2297340 - RNA, 19 nt, Artificial Sequence
  Description of Artificial Sequence: Synthetic oligonucleotide
  Sense strand starting at position 1057 of SEQ ID NO: 1884857
ggccuuacuaguugaggua

SEQ ID NO: 2297341 - RNA, 19 nt, Artificial Sequence
  Description of Artificial Sequence: Synthetic oligonucleotide
  Antisense strand to SEQ ID NO: 2297340
uaccucaacuaguaaggcc

SEQ ID NO: 2297342 - RNA, 19 nt, Artificial Sequence
  Description of Artificial Sequence: Synthetic oligonucleotide
  Sense strand starting at position 1136 of SEQ ID NO: 1884857
ugcaucucacagugacauu

SEQ ID NO: 2297343 - RNA, 19 nt, Artificial Sequence
  Description of Artificial Sequence: Synthetic oligonucleotide
  Antisense strand to SEQ ID NO: 2297342
aaugucacugugagaugca

SEQ ID NO: 2297344 - RNA, 19 nt, Artificial Sequence
  Description of Artificial Sequence: Synthetic oligonucleotide
  Sense strand starting at position 1335 of SEQ ID NO: 1884857
gcaucagguaaguguaaua

SEQ ID NO: 2297345 - RNA, 19 nt, Artificial Sequence
  Description of Artificial Sequence: Synthetic oligonucleotide
  Antisense strand to SEQ ID NO: 2297344
uauuacacuuaccugaugc

SEQ ID NO: 2297346 - RNA, 19 nt, Artificial Sequence
  Description of Artificial Sequence: Synthetic oligonucleotide
  Sense strand starting at position 1371 of SEQ ID NO: 1884857
uguuaagugacuugccaga

SEQ ID NO: 2297347 - RNA, 19 nt, Artificial Sequence
  Description of Artificial Sequence: Synthetic oligonucleotide
  Antisense strand to SEQ ID NO: 2297346
ucuggcaagucacuuaaca

SEQ ID NO: 2297348 - RNA, 19 nt, Artificial Sequence
  Description of Artificial Sequence: Synthetic oligonucleotide
  Sense strand starting at position 1373 of SEQ ID NO: 1884857
uuaagugacuugccagagu

SEQ ID NO: 2297349 - RNA, 19 nt, Artificial Sequence
  Description of Artificial Sequence: Synthetic oligonucleotide
  Antisense strand to SEQ ID NO: 2297348
acucuggcaagucacuuaa

SEQ ID NO: 2297350 - RNA, 19 nt, Artificial Sequence
  Description of Artificial Sequence: Synthetic oligonucleotide
  Sense strand starting at position 1376 of SEQ ID NO: 1884857
agugacuugccagaguaug

SEQ ID NO: 2297351 - RNA, 19 nt, Artificial Sequence
  Description of Artificial Sequence: Synthetic oligonucleotide
  Antisense strand to SEQ ID NO: 2297350
cauacucuggcaagucacu

SEQ ID NO: 2297352 - RNA, 19 nt, Artificial Sequence
  Description of Artificial Sequence: Synthetic oligonucleotide
  Sense strand starting at position 1387 of SEQ ID NO: 1884857
agaguaugcaguuguggaa

SEQ ID NO: 2297353 - RNA, 19 nt, Artificial Sequence
  Description of Artificial Sequence: Synthetic oligonucleotide
  Antisense strand to SEQ ID NO: 2297352
uuccacaacugcauacucu

SEQ ID NO: 2297354 - RNA, 19 nt, Artificial Sequence
  Description of Artificial Sequence: Synthetic oligonucleotide
  Sense strand starting at position 2454 of SEQ ID NO: 1884857
ucuuauuccgagcauucca

SEQ ID NO: 2297355 - RNA, 19 nt, Artificial Sequence
  Description of Artificial Sequence: Synthetic oligonucleotide
  Antisense strand to SEQ ID NO: 2297354
uggaaugcucggaauaaga

SEQ ID NO: 2297356 - RNA, 19 nt, Artificial Sequence
  Description of Artificial Sequence: Synthetic oligonucleotide
  Sense strand starting at position 2611 of SEQ ID NO: 1884857
guuugauguaugugugaaa

SEQ ID NO: 2297357 - RNA, 19 nt, Artificial Sequence
  Description of Artificial Sequence: Synthetic oligonucleotide
  Antisense strand to SEQ ID NO: 2297356
uuucacacauacaucaaac

SEQ ID NO: 2297358 - RNA, 19 nt, Artificial Sequence
  Description of Artificial Sequence: Synthetic oligonucleotide
  Sense strand starting at position 2612 of SEQ ID NO: 1884857
uuugauguaugugugaaac

SEQ ID NO: 2297359 - RNA, 19 nt, Artificial Sequence
  Description of Artificial Sequence: Synthetic oligonucleotide
  Antisense strand to SEQ ID NO: 2297358
guuucacacauacaucaaa

SEQ ID NO: 2297360 - RNA, 19 nt, Artificial Sequence
  Description of Artificial Sequence: Synthetic oligonucleotide
  Sense strand starting at position 2618 of SEQ ID NO: 1884857
guaugugugaaacaauguu

SEQ ID NO: 2297361 - RNA, 19 nt, Artificial Sequence
  Description of Artificial Sequence: Synthetic oligonucleotide
  Antisense strand to SEQ ID NO: 2297360
aacauuguuucacacauac

SEQ ID NO: 2297362 - RNA, 19 nt, Artificial Sequence
  Description of Artificial Sequence: Synthetic oligonucleotide
  Sense strand starting at position 2876 of SEQ ID NO: 1884857
ggcuguugaccucaggaca

SEQ ID NO: 2297363 - RNA, 19 nt, Artificial Sequence
  Description of Artificial Sequence: Synthetic oligonucleotide
  Antisense strand to SEQ ID NO: 2297362
uguccugaggucaacagcc

SEQ ID NO: 2297364 - RNA, 19 nt, Artificial Sequence
  Description of Artificial Sequence: Synthetic oligonucleotide
  Sense strand starting at position 2892 of SEQ ID NO: 1884857
acaggauucuuucugauac

SEQ ID NO: 2297365 - RNA, 19 nt, Artificial Sequence
  Description of Artificial Sequence: Synthetic oligonucleotide
  Antisense strand to SEQ ID NO: 2297364
guaucagaaagaauccugu

SEQ ID NO: 2297366 - RNA, 19 nt, Artificial Sequence
  Description of Artificial Sequence: Synthetic oligonucleotide
  Sense strand starting at position 2907 of SEQ ID NO: 1884857
auaccucuguguuucucaa

SEQ ID NO: 2297367 - RNA, 19 nt, Artificial Sequence
  Description of Artificial Sequence: Synthetic oligonucleotide
  Antisense strand to SEQ ID NO: 2297366
uugagaaacacagagguau

SEQ ID NO: 2297368 - RNA, 19 nt, Artificial Sequence
  Description of Artificial Sequence: Synthetic oligonucleotide
  Sense strand starting at position 2909 of SEQ ID NO: 1884857
accucuguguuucucaaau

SEQ ID NO: 2297369 - RNA, 19 nt, Artificial Sequence
  Description of Artificial Sequence: Synthetic oligonucleotide
  Antisense strand to SEQ ID NO: 2297368
auuugagaaacacagaggu

SEQ ID NO: 2297370 - RNA, 19 nt, Artificial Sequence
  Description of Artificial Sequence: Synthetic oligonucleotide
  Sense strand starting at position 2954 of SEQ ID NO: 1884857
ugaaauaucugugugacac

SEQ ID NO: 2297371 - RNA, 19 nt, Artificial Sequence
  Description of Artificial Sequence: Synthetic oligonucleotide
  Antisense strand to SEQ ID NO: 2297370
gugucacacagauauuuca

SEQ ID NO: 2297372 - RNA, 19 nt, Artificial Sequence
  Description of Artificial Sequence: Synthetic oligonucleotide
  Sense strand starting at position 2955 of SEQ ID NO: 1884857
gaaauaucugugugacacu

SEQ ID NO: 2297373 - RNA, 19 nt, Artificial Sequence
  Description of Artificial Sequence: Synthetic oligonucleotide
  Antisense strand to SEQ ID NO: 2297372
agugucacacagauauuuc

SEQ ID NO: 2297374 - RNA, 19 nt, Artificial Sequence
  Description of Artificial Sequence: Synthetic oligonucleotide
  Sense strand starting at position 3040 of SEQ ID NO: 1884857
agaggaacuccagguuacu

SEQ ID NO: 2297375 - RNA, 19 nt, Artificial Sequence
  Description of Artificial Sequence: Synthetic oligonucleotide
  Antisense strand to SEQ ID NO: 2297374
aguaaccuggaguuccucu

SEQ ID NO: 2297376 - RNA, 19 nt, Artificial Sequence
  Description of Artificial Sequence: Synthetic oligonucleotide
  Sense strand starting at position 3049 of SEQ ID NO: 1884857
ccagguuacuaacuuguau

SEQ ID NO: 2297377 - RNA, 19 nt, Artificial Sequence
  Description of Artificial Sequence: Synthetic oligonucleotide
  Antisense strand to SEQ ID NO: 2297376
auacaaguuaguaaccugg

SEQ ID NO: 2297378 - RNA, 19 nt, Artificial Sequence
  Description of Artificial Sequence: Synthetic oligonucleotide
  Sense strand starting at position 3212 of SEQ ID NO: 1884857
ugacgauaaugcucagucu

SEQ ID NO: 2297379 - RNA, 19 nt, Artificial Sequence
  Description of Artificial Sequence: Synthetic oligonucleotide
  Antisense strand to SEQ ID NO: 2297378
agacugagcauuaucguca

SEQ ID NO: 2297380 - RNA, 19 nt, Artificial Sequence
  Description of Artificial Sequence: Synthetic oligonucleotide
  Sense strand starting at position 3248 of SEQ ID NO: 1884857
auacgaggaucccuugaua

SEQ ID NO: 2297381 - RNA, 19 nt, Artificial Sequence
  Description of Artificial Sequence: Synthetic oligonucleotide
  Antisense strand to SEQ ID NO: 2297380
uaucaagggauccucguau

SEQ ID NO: 2297382 - RNA, 19 nt, Artificial Sequence
  Description of Artificial Sequence: Synthetic oligonucleotide
  Sense strand starting at position 3273 of SEQ ID NO: 1884857
ucuagucaauggcuuuaau

SEQ ID NO: 2297383 - RNA, 19 nt, Artificial Sequence
  Description of Artificial Sequence: Synthetic oligonucleotide
  Antisense strand to SEQ ID NO: 2297382
auuaaagccauugacuaga

SEQ ID NO: 2297384 - RNA, 19 nt, Artificial Sequence
  Description of Artificial Sequence: Synthetic oligonucleotide
  Sense strand starting at position 3276 of SEQ ID NO: 1884857
agucaauggcuuuaauaac

SEQ ID NO: 2297385 - RNA, 19 nt, Artificial Sequence
  Description of Artificial Sequence: Synthetic oligonucleotide
  Antisense strand to SEQ ID NO: 2297384
guuauuaaagccauugacu

SEQ ID NO: 2297386 - RNA, 19 nt, Artificial Sequence
  Description of Artificial Sequence: Synthetic oligonucleotide
  Sense strand starting at position 3297 of SEQ ID NO: 1884857
cuauguacuuguguccaaa

SEQ ID NO: 2297387 - RNA, 19 nt, Artificial Sequence
  Description of Artificial Sequence: Synthetic oligonucleotide
  Antisense strand to SEQ ID NO: 2297386
uuuggacacaaguacauag

SEQ ID NO: 2297388 - RNA, 19 nt, Artificial Sequence
  Description of Artificial Sequence: Synthetic oligonucleotide
  Sense strand starting at position 3394 of SEQ ID NO: 1884857
guaggucucauaggcauau

SEQ ID NO: 2297389 - RNA, 19 nt, Artificial Sequence
  Description of Artificial Sequence: Synthetic oligonucleotide
  Antisense strand to SEQ ID NO: 2297388
auaugccuaugagaccuac

SEQ ID NO: 2297390 - RNA, 19 nt, Artificial Sequence
  Description of Artificial Sequence: Synthetic oligonucleotide
  Sense strand starting at position 3398 of SEQ ID NO: 1884857
gucucauaggcauaucaaa

SEQ ID NO: 2297391 - RNA, 19 nt, Artificial Sequence
  Description of Artificial Sequence: Synthetic oligonucleotide
  Antisense strand to SEQ ID NO: 2297390
uuugauaugccuaugagac

SEQ ID NO: 2297392 - RNA, 19 nt, Artificial Sequence
  Description of Artificial Sequence: Synthetic oligonucleotide
  Sense strand starting at position 3422 of SEQ ID NO: 1884857
caaguuuaagacugaguau

SEQ ID NO: 2297393 - RNA, 19 nt, Artificial Sequence
  Description of Artificial Sequence: Synthetic oligonucleotide
  Antisense strand to SEQ ID NO: 2297392
auacucagucuuaaacuug

SEQ ID NO: 2297394 - RNA, 19 nt, Artificial Sequence
  Description of Artificial Sequence: Synthetic oligonucleotide
  Sense strand starting at position 3425 of SEQ ID NO: 1884857
guuuaagacugaguaucug

SEQ ID NO: 2297395 - RNA, 19 nt, Artificial Sequence
  Description of Artificial Sequence: Synthetic oligonucleotide
  Antisense strand to SEQ ID NO: 2297394
cagauacucagucuuaaac

SEQ ID NO: 2297396 - RNA, 19 nt, Artificial Sequence
  Description of Artificial Sequence: Synthetic oligonucleotide
  Sense strand starting at position 3530 of SEQ ID NO: 1884857
uuuggaguucuuuacuaca

SEQ ID NO: 2297397 - RNA, 19 nt, Artificial Sequence
  Description of Artificial Sequence: Synthetic oligonucleotide
  Antisense strand to SEQ ID NO: 2297396
uguaguaaagaacuccaaa

SEQ ID NO: 2297398 - RNA, 19 nt, Artificial Sequence
  Description of Artificial Sequence: Synthetic oligonucleotide
  Sense strand starting at position 3532 of SEQ ID NO: 1884857
uggaguucuuuacuacauu

SEQ ID NO: 2297399 - RNA, 19 nt, Artificial Sequence
  Description of Artificial Sequence: Synthetic oligonucleotide
  Antisense strand to SEQ ID NO: 2297398
aauguaguaaagaacucca

SEQ ID NO: 2297400 - RNA, 19 nt, Artificial Sequence
  Description of Artificial Sequence: Synthetic oligonucleotide
  Sense strand starting at position 3580 of SEQ ID NO: 1884857
gcacaaaucuagucgauuc

SEQ ID NO: 2297401 - RNA, 19 nt, Artificial Sequence
  Description of Artificial Sequence: Synthetic oligonucleotide
  Antisense strand to SEQ ID NO: 2297400
gaaucgacuagauuugugc

SEQ ID NO: 2297402 - RNA, 19 nt, Artificial Sequence
  Description of Artificial Sequence: Synthetic oligonucleotide
  Sense strand starting at position 3696 of SEQ ID NO: 1884857
cugaucaucucuucuuguu

SEQ ID NO: 2297403 - RNA, 19 nt, Artificial Sequence
  Description of Artificial Sequence: Synthetic oligonucleotide
  Antisense strand to SEQ ID NO: 2297402
aacaagaagagaugaucag

SEQ ID NO: 2297404 - RNA, 19 nt, Artificial Sequence
  Description of Artificial Sequence: Synthetic oligonucleotide
  Sense strand starting at position 3804 of SEQ ID NO: 1884857
uaaguuaaagcguaaguuu

SEQ ID NO: 2297405 - RNA, 19 nt, Artificial Sequence
  Description of Artificial Sequence: Synthetic oligonucleotide
  Antisense strand to SEQ ID NO: 2297404
aaacuuacgcuuuaacuua

SEQ ID NO: 2297406 - RNA, 19 nt, Artificial Sequence
  Description of Artificial Sequence: Synthetic oligonucleotide
  Sense strand starting at position 171 of SEQ ID NO: 1884858
uugauuuaguugggaaauu

SEQ ID NO: 2297407 - RNA, 19 nt, Artificial Sequence
  Description of Artificial Sequence: Synthetic oligonucleotide
  Antisense strand to SEQ ID NO: 2297406
aauuucccaacuaaaucaa

SEQ ID NO: 2297408 - RNA, 19 nt, Artificial Sequence
  Description of Artificial Sequence: Synthetic oligonucleotide
  Sense strand starting at position 204 of SEQ ID NO: 1884858
gugucuuuguucuuauuac

SEQ ID NO: 2297409 - RNA, 19 nt, Artificial Sequence
  Description of Artificial Sequence: Synthetic oligonucleotide
  Antisense strand to SEQ ID NO: 2297408
guaauaagaacaaagacac

SEQ ID NO: 2297410 - RNA, 19 nt, Artificial Sequence
  Description of Artificial Sequence: Synthetic oligonucleotide
  Sense strand starting at position 312 of SEQ ID NO: 1884858
acuguuuacugcucuggau

SEQ ID NO: 2297411 - RNA, 19 nt, Artificial Sequence
  Description of Artificial Sequence: Synthetic oligonucleotide
  Antisense strand to SEQ ID NO: 2297410
auccagagcaguaaacagu

SEQ ID NO: 2297412 - RNA, 19 nt, Artificial Sequence
  Description of Artificial Sequence: Synthetic oligonucleotide
  Sense strand starting at position 314 of SEQ ID NO: 1884858
uguuuacugcucuggauau

SEQ ID NO: 2297413 - RNA, 19 nt, Artificial Sequence
  Description of Artificial Sequence: Synthetic oligonucleotide
  Antisense strand to SEQ ID NO: 2297412
auauccagagcaguaaaca

SEQ ID NO: 2297414 - RNA, 19 nt, Artificial Sequence
  Description of Artificial Sequence: Synthetic oligonucleotide
  Sense strand starting at position 327 of SEQ ID NO: 1884858
ggauauagcaaugguguga

SEQ ID NO: 2297415 - RNA, 19 nt, Artificial Sequence
  Description of Artificial Sequence: Synthetic oligonucleotide
  Antisense strand to SEQ ID NO: 2297414
ucacaccauugcuauaucc

SEQ ID NO: 2297416 - RNA, 19 nt, Artificial Sequence
  Description of Artificial Sequence: Synthetic oligonucleotide
  Sense strand starting at position 331 of SEQ ID NO: 1884858
auagcaauggugugaucgu

SEQ ID NO: 2297417 - RNA, 19 nt, Artificial Sequence
  Description of Artificial Sequence: Synthetic oligonucleotide
  Antisense strand to SEQ ID NO: 2297416
acgaucacaccauugcuau

SEQ ID NO: 2297418 - RNA, 19 nt, Artificial Sequence
  Description of Artificial Sequence: Synthetic oligonucleotide
  Sense strand starting at position 338 of SEQ ID NO: 1884858
uggugugaucgucauuaag

SEQ ID NO: 2297419 - RNA, 19 nt, Artificial Sequence
  Description of Artificial Sequence: Synthetic oligonucleotide
  Antisense strand to SEQ ID NO: 2297418
cuuaaugacgaucacacca

SEQ ID NO: 2297420 - RNA, 19 nt, Artificial Sequence
  Description of Artificial Sequence: Synthetic oligonucleotide
  Sense strand starting at position 340 of SEQ ID NO: 1884858
gugugaucgucauuaagag

SEQ ID NO: 2297421 - RNA, 19 nt, Artificial Sequence
  Description of Artificial Sequence: Synthetic oligonucleotide
  Antisense strand to SEQ ID NO: 2297420
cucuuaaugacgaucacac

SEQ ID NO: 2297422 - RNA, 19 nt, Artificial Sequence
  Description of Artificial Sequence: Synthetic oligonucleotide
  Sense strand starting at position 341 of SEQ ID NO: 1884858
ugugaucgucauuaagaga

SEQ ID NO: 2297423 - RNA, 19 nt, Artificial Sequence
  Description of Artificial Sequence: Synthetic oligonucleotide
  Antisense strand to SEQ ID NO: 2297422
ucucuuaaugacgaucaca

SEQ ID NO: 2297424 - RNA, 19 nt, Artificial Sequence
  Description of Artificial Sequence: Synthetic oligonucleotide
  Sense strand starting at position 344 of SEQ ID NO: 1884858
gaucgucauuaagagacaa

SEQ ID NO: 2297425 - RNA, 19 nt, Artificial Sequence
  Description of Artificial Sequence: Synthetic oligonucleotide
  Antisense strand to SEQ ID NO: 2297424
uugucucuuaaugacgauc

SEQ ID NO: 2297426 - RNA, 19 nt, Artificial Sequence
  Description of Artificial Sequence: Synthetic oligonucleotide
  Sense strand starting at position 506 of SEQ ID NO: 1884858
cggcuuuagucucucuaca

SEQ ID NO: 2297427 - RNA, 19 nt, Artificial Sequence
  Description of Artificial Sequence: Synthetic oligonucleotide
  Antisense strand to SEQ ID NO: 2297426
uguagagagacuaaagccg

SEQ ID NO: 2297428 - RNA, 19 nt, Artificial Sequence
  Description of Artificial Sequence: Synthetic oligonucleotide
  Sense strand starting at position 508 of SEQ ID NO: 1884858
gcuuuagucucucuacaca

SEQ ID NO: 2297429 - RNA, 19 nt, Artificial Sequence
  Description of Artificial Sequence: Synthetic oligonucleotide
  Antisense strand to SEQ ID NO: 2297428
uguguagagagacuaaagc

SEQ ID NO: 2297430 - RNA, 19 nt, Artificial Sequence
  Description of Artificial Sequence: Synthetic oligonucleotide
  Sense strand starting at position 650 of SEQ ID NO: 1884858
gaagaaagcugacuagcau

SEQ ID NO: 2297431 - RNA, 19 nt, Artificial Sequence
  Description of Artificial Sequence: Synthetic oligonucleotide
  Antisense strand to SEQ ID NO: 2297430
augcuagucagcuuucuuc

SEQ ID NO: 2297432 - RNA, 19 nt, Artificial Sequence
  Description of Artificial Sequence: Synthetic oligonucleotide
  Sense strand starting at position 700 of SEQ ID NO: 1884858
gcuagaaccuuagcuuuau

SEQ ID NO: 2297433 - RNA, 19 nt, Artificial Sequence
  Description of Artificial Sequence: Synthetic oligonucleotide
  Antisense strand to SEQ ID NO: 2297432
auaaagcuaagguucuagc

SEQ ID NO: 2297434 - RNA, 19 nt, Artificial Sequence
  Description of Artificial Sequence: Synthetic oligonucleotide
  Sense strand starting at position 719 of SEQ ID NO: 1884858
aaagcaagaucgucucaag

SEQ ID NO: 2297435 - RNA, 19 nt, Artificial Sequence
  Description of Artificial Sequence: Synthetic oligonucleotide
  Antisense strand to SEQ ID NO: 2297434
cuugagacgaucuugcuuu

SEQ ID NO: 2297436 - RNA, 19 nt, Artificial Sequence
  Description of Artificial Sequence: Synthetic oligonucleotide
  Sense strand starting at position 747 of SEQ ID NO: 1884858
uggcuuauauuagacaaga

SEQ ID NO: 2297437 - RNA, 19 nt, Artificial Sequence
  Description of Artificial Sequence: Synthetic oligonucleotide
  Antisense strand to SEQ ID NO: 2297436
ucuugucuaauauaagcca

SEQ ID NO: 2297438 - RNA, 19 nt, Artificial Sequence
  Description of Artificial Sequence: Synthetic oligonucleotide
  Sense strand starting at position 856 of SEQ ID NO: 1884858
uggauuggguacuuacaau

SEQ ID NO: 2297439 - RNA, 19 nt, Artificial Sequence
  Description of Artificial Sequence: Synthetic oligonucleotide
  Antisense strand to SEQ ID NO: 2297438
auuguaaguacccaaucca

SEQ ID NO: 2297440 - RNA, 19 nt, Artificial Sequence
  Description of Artificial Sequence: Synthetic oligonucleotide
  Sense strand starting at position 932 of SEQ ID NO: 1884858
ccauuucgcuaguccuaaa

SEQ ID NO: 2297441 - RNA, 19 nt, Artificial Sequence
  Description of Artificial Sequence: Synthetic oligonucleotide
  Antisense strand to SEQ ID NO: 2297440
uuuaggacuagcgaaaugg

SEQ ID NO: 2297442 - RNA, 19 nt, Artificial Sequence
  Description of Artificial Sequence: Synthetic oligonucleotide
  Sense strand starting at position 997 of SEQ ID NO: 1884858
uaauaagauggccagguuu

SEQ ID NO: 2297443 - RNA, 19 nt, Artificial Sequence
  Description of Artificial Sequence: Synthetic oligonucleotide
  Antisense strand to SEQ ID NO: 2297442
aaaccuggccaucuuauua

SEQ ID NO: 2297444 - RNA, 19 nt, Artificial Sequence
  Description of Artificial Sequence: Synthetic oligonucleotide
  Sense strand starting at position 999 of SEQ ID NO: 1884858
auaagauggccagguuuaa

SEQ ID NO: 2297445 - RNA, 19 nt, Artificial Sequence
  Description of Artificial Sequence: Synthetic oligonucleotide
  Antisense strand to SEQ ID NO: 2297444
uuaaaccuggccaucuuau

SEQ ID NO: 2297446 - RNA, 19 nt, Artificial Sequence
  Description of Artificial Sequence: Synthetic oligonucleotide
  Sense strand starting at position 1011 of SEQ ID NO: 1884858
gguuuaaguguuuaauaga

SEQ ID NO: 2297447 - RNA, 19 nt, Artificial Sequence
  Description of Artificial Sequence: Synthetic oligonucleotide
  Antisense strand to SEQ ID NO: 2297446
ucuauuaaacacuuaaacc

SEQ ID NO: 2297448 - RNA, 19 nt, Artificial Sequence
  Description of Artificial Sequence: Synthetic oligonucleotide
  Sense strand starting at position 1018 of SEQ ID NO: 1884858
guguuuaauagaggaaacu

SEQ ID NO: 2297449 - RNA, 19 nt, Artificial Sequence
  Description of Artificial Sequence: Synthetic oligonucleotide
  Antisense strand to SEQ ID NO: 2297448
aguuuccucuauuaaacac

SEQ ID NO: 2297450 - RNA, 19 nt, Artificial Sequence
  Description of Artificial Sequence: Synthetic oligonucleotide
  Sense strand starting at position 1170 of SEQ ID NO: 1884858
cuguuaacugcugacauga

SEQ ID NO: 2297451 - RNA, 19 nt, Artificial Sequence
  Description of Artificial Sequence: Synthetic oligonucleotide
  Antisense strand to SEQ ID NO: 2297450
ucaugucagcaguuaacag

SEQ ID NO: 2297452 - RNA, 19 nt, Artificial Sequence
  Description of Artificial Sequence: Synthetic oligonucleotide
  Sense strand starting at position 1183 of SEQ ID NO: 1884858
acaugaauggugugcuaug

SEQ ID NO: 2297453 - RNA, 19 nt, Artificial Sequence
  Description of Artificial Sequence: Synthetic oligonucleotide
  Antisense strand to SEQ ID NO: 2297452
cauagcacaccauucaugu

SEQ ID NO: 2297454 - RNA, 19 nt, Artificial Sequence
  Description of Artificial Sequence: Synthetic oligonucleotide
  Sense strand starting at position 1184 of SEQ ID NO: 1884858
caugaauggugugcuauga

SEQ ID NO: 2297455 - RNA, 19 nt, Artificial Sequence
  Description of Artificial Sequence: Synthetic oligonucleotide
  Antisense strand to SEQ ID NO: 2297454
ucauagcacaccauucaug

SEQ ID NO: 2297456 - RNA, 19 nt, Artificial Sequence
  Description of Artificial Sequence: Synthetic oligonucleotide
  Sense strand starting at position 1188 of SEQ ID NO: 1884858
aauggugugcuaugaccua

SEQ ID NO: 2297457 - RNA, 19 nt, Artificial Sequence
  Description of Artificial Sequence: Synthetic oligonucleotide
  Antisense strand to SEQ ID NO: 2297456
uaggucauagcacaccauu

SEQ ID NO: 2297458 - RNA, 19 nt, Artificial Sequence
  Description of Artificial Sequence: Synthetic oligonucleotide
  Sense strand starting at position 1199 of SEQ ID NO: 1884858
augaccuaguuauacaaga

SEQ ID NO: 2297459 - RNA, 19 nt, Artificial Sequence
  Description of Artificial Sequence: Synthetic oligonucleotide
  Antisense strand to SEQ ID NO: 2297458
ucuuguauaacuaggucau

SEQ ID NO: 2297460 - RNA, 19 nt, Artificial Sequence
  Description of Artificial Sequence: Synthetic oligonucleotide
  Sense strand starting at position 1219 of SEQ ID NO: 1884858
aaagauggauuccaaguca

SEQ ID NO: 2297461 - RNA, 19 nt, Artificial Sequence
  Description of Artificial Sequence: Synthetic oligonucleotide
  Antisense strand to SEQ ID NO: 2297460
ugacuuggaauccaucuuu

SEQ ID NO: 2297462 - RNA, 19 nt, Artificial Sequence
  Description of Artificial Sequence: Synthetic oligonucleotide
  Sense strand starting at position 1445 of SEQ ID NO: 1884858
ucuccuucgugucugauga

SEQ ID NO: 2297463 - RNA, 19 nt, Artificial Sequence
  Description of Artificial Sequence: Synthetic oligonucleotide
  Antisense strand to SEQ ID NO: 2297462
ucaucagacacgaaggaga

SEQ ID NO: 2297464 - RNA, 19 nt, Artificial Sequence
  Description of Artificial Sequence: Synthetic oligonucleotide
  Sense strand starting at position 1446 of SEQ ID NO: 1884858
cuccuucgugucugaugaa

SEQ ID NO: 2297465 - RNA, 19 nt, Artificial Sequence
  Description of Artificial Sequence: Synthetic oligonucleotide
  Antisense strand to SEQ ID NO: 2297464
uucaucagacacgaaggag

SEQ ID NO: 2297466 - RNA, 19 nt, Artificial Sequence
  Description of Artificial Sequence: Synthetic oligonucleotide
  Sense strand starting at position 1453 of SEQ ID NO: 1884858
gugucugaugaaggauguu

SEQ ID NO: 2297467 - RNA, 19 nt, Artificial Sequence
  Description of Artificial Sequence: Synthetic oligonucleotide
  Antisense strand to SEQ ID NO: 2297466
aacauccuucaucagacac

SEQ ID NO: 2297468 - RNA, 19 nt, Artificial Sequence
  Description of Artificial Sequence: Synthetic oligonucleotide
  Sense strand starting at position 1474 of SEQ ID NO: 1884858
gagaucagcgucuaauaac

SEQ ID NO: 2297469 - RNA, 19 nt, Artificial Sequence
  Description of Artificial Sequence: Synthetic oligonucleotide
  Antisense strand to SEQ ID NO: 2297468
guuauuagacgcugaucuc

SEQ ID NO: 2297470 - RNA, 19 nt, Artificial Sequence
  Description of Artificial Sequence: Synthetic oligonucleotide
  Sense strand starting at position 1760 of SEQ ID NO: 1884858
ccggaccuuuaauaaagaa

SEQ ID NO: 2297471 - RNA, 19 nt, Artificial Sequence
  Description of Artificial Sequence: Synthetic oligonucleotide
  Antisense strand to SEQ ID NO: 2297470
uucuuuauuaaagguccgg

SEQ ID NO: 2297472 - RNA, 19 nt, Artificial Sequence
  Description of Artificial Sequence: Synthetic oligonucleotide
  Sense strand starting at position 2037 of SEQ ID NO: 1884858
cgcagauaccucgauugca

SEQ ID NO: 2297473 - RNA, 19 nt, Artificial Sequence
  Description of Artificial Sequence: Synthetic oligonucleotide
  Antisense strand to SEQ ID NO: 2297472
ugcaaucgagguaucugcg

SEQ ID NO: 2297474 - RNA, 19 nt, Artificial Sequence
  Description of Artificial Sequence: Synthetic oligonucleotide
  Sense strand starting at position 2049 of SEQ ID NO: 1884858
gauugcaacuccucugagu

SEQ ID NO: 2297475 - RNA, 19 nt, Artificial Sequence
  Description of Artificial Sequence: Synthetic oligonucleotide
  Antisense strand to SEQ ID NO: 2297474
acucagaggaguugcaauc

SEQ ID NO: 2297476 - RNA, 19 nt, Artificial Sequence
  Description of Artificial Sequence: Synthetic oligonucleotide
  Sense strand starting at position 2166 of SEQ ID NO: 1884858
cgggcaguuuggaaacagu

SEQ ID NO: 2297477 - RNA, 19 nt, Artificial Sequence
  Description of Artificial Sequence: Synthetic oligonucleotide
  Antisense strand to SEQ ID NO: 2297476
acuguuuccaaacugcccg

SEQ ID NO: 2297478 - RNA, 19 nt, Artificial Sequence
  Description of Artificial Sequence: Synthetic oligonucleotide
  Sense strand starting at position 2511 of SEQ ID NO: 1884858
ggcuccuuagcgguguauu

SEQ ID NO: 2297479 - RNA, 19 nt, Artificial Sequence
  Description of Artificial Sequence: Synthetic oligonucleotide
  Antisense strand to SEQ ID NO: 2297478
aauacaccgcuaaggagcc

SEQ ID NO: 2297480 - RNA, 19 nt, Artificial Sequence
  Description of Artificial Sequence: Synthetic oligonucleotide
  Sense strand starting at position 3049 of SEQ ID NO: 1884858
guaauucucccggaagggu

SEQ ID NO: 2297481 - RNA, 19 nt, Artificial Sequence
  Description of Artificial Sequence: Synthetic oligonucleotide
  Antisense strand to SEQ ID NO: 2297480
acccuuccgggagaauuac

SEQ ID NO: 2297482 - RNA, 19 nt, Artificial Sequence
  Description of Artificial Sequence: Synthetic oligonucleotide
  Sense strand starting at position 3243 of SEQ ID NO: 1884858
ggguuaacggcauggagaa

SEQ ID NO: 2297483 - RNA, 19 nt, Artificial Sequence
  Description of Artificial Sequence: Synthetic oligonucleotide
  Antisense strand to SEQ ID NO: 2297482
uucuccaugccguuaaccc

SEQ ID NO: 2297484 - RNA, 19 nt, Artificial Sequence
  Description of Artificial Sequence: Synthetic oligonucleotide
  Sense strand starting at position 3552 of SEQ ID NO: 1884858
ugacaagugccucgagaaa

SEQ ID NO: 2297485 - RNA, 19 nt, Artificial Sequence
  Description of Artificial Sequence: Synthetic oligonucleotide
  Antisense strand to SEQ ID NO: 2297484
uuucucgaggcacuuguca

SEQ ID NO: 2297486 - RNA, 19 nt, Artificial Sequence
  Description of Artificial Sequence: Synthetic oligonucleotide
  Sense strand starting at position 142 of SEQ ID NO: 1884859
gccaguuguccuucugugu

SEQ ID NO: 2297487 - RNA, 19 nt, Artificial Sequence
  Description of Artificial Sequence: Synthetic oligonucleotide
  Antisense strand to SEQ ID NO: 2297486
acacagaaggacaacuggc

SEQ ID NO: 2297488 - RNA, 19 nt, Artificial Sequence
  Description of Artificial Sequence: Synthetic oligonucleotide
  Sense strand starting at position 304 of SEQ ID NO: 1884859
uggacacuugcuggaauca

SEQ ID NO: 2297489 - RNA, 19 nt, Artificial Sequence
  Description of Artificial Sequence: Synthetic oligonucleotide
  Antisense strand to SEQ ID NO: 2297488
ugauuccagcaagugucca

SEQ ID NO: 2297490 - RNA, 19 nt, Artificial Sequence
  Description of Artificial Sequence: Synthetic oligonucleotide
  Sense strand starting at position 357 of SEQ ID NO: 1884859
guaggcugaguccaaagaa

SEQ ID NO: 2297491 - RNA, 19 nt, Artificial Sequence
  Description of Artificial Sequence: Synthetic oligonucleotide
  Antisense strand to SEQ ID NO: 2297490
uucuuuggacucagccuac

SEQ ID NO: 2297492 - RNA, 19 nt, Artificial Sequence
  Description of Artificial Sequence: Synthetic oligonucleotide
  Sense strand starting at position 714 of SEQ ID NO: 1884859
cugauuagagucuagugca

SEQ ID NO: 2297493 - RNA, 19 nt, Artificial Sequence
  Description of Artificial Sequence: Synthetic oligonucleotide
  Antisense strand to SEQ ID NO: 2297492
ugcacuagacucuaaucag

SEQ ID NO: 2297494 - RNA, 19 nt, Artificial Sequence
  Description of Artificial Sequence: Synthetic oligonucleotide
  Sense strand starting at position 748 of SEQ ID NO: 1884859
uugaccauuucucaaaggu

SEQ ID NO: 2297495 - RNA, 19 nt, Artificial Sequence
  Description of Artificial Sequence: Synthetic oligonucleotide
  Antisense strand to SEQ ID NO: 2297494
accuuugagaaauggucaa

SEQ ID NO: 2297496 - RNA, 19 nt, Artificial Sequence
  Description of Artificial Sequence: Synthetic oligonucleotide
  Sense strand starting at position 788 of SEQ ID NO: 1884859
agacauaguggugagcaga

SEQ ID NO: 2297497 - RNA, 19 nt, Artificial Sequence
  Description of Artificial Sequence: Synthetic oligonucleotide
  Antisense strand to SEQ ID NO: 2297496
ucugcucaccacuaugucu

SEQ ID NO: 2297498 - RNA, 19 nt, Artificial Sequence
  Description of Artificial Sequence: Synthetic oligonucleotide
  Sense strand starting at position 853 of SEQ ID NO: 1884859
gguggacauuaaucacaua

SEQ ID NO: 2297499 - RNA, 19 nt, Artificial Sequence
  Description of Artificial Sequence: Synthetic oligonucleotide
  Antisense strand to SEQ ID NO: 2297498
uaugugauuaauguccacc

SEQ ID NO: 2297500 - RNA, 19 nt, Artificial Sequence
  Description of Artificial Sequence: Synthetic oligonucleotide
  Sense strand starting at position 868 of SEQ ID NO: 1884859
cauagucaugccuagaaug

SEQ ID NO: 2297501 - RNA, 19 nt, Artificial Sequence
  Description of Artificial Sequence: Synthetic oligonucleotide
  Antisense strand to SEQ ID NO: 2297500
cauucuaggcaugacuaug

SEQ ID NO: 2297502 - RNA, 19 nt, Artificial Sequence
  Description of Artificial Sequence: Synthetic oligonucleotide
  Sense strand starting at position 870 of SEQ ID NO: 1884859
uagucaugccuagaaugac

SEQ ID NO: 2297503 - RNA, 19 nt, Artificial Sequence
  Description of Artificial Sequence: Synthetic oligonucleotide
  Antisense strand to SEQ ID NO: 2297502
gucauucuaggcaugacua

SEQ ID NO: 2297504 - RNA, 19 nt, Artificial Sequence
  Description of Artificial Sequence: Synthetic oligonucleotide
  Sense strand starting at position 981 of SEQ ID NO: 1884859
aaugacucuugagcugaga

SEQ ID NO: 2297505 - RNA, 19 nt, Artificial Sequence
  Description of Artificial Sequence: Synthetic oligonucleotide
  Antisense strand to SEQ ID NO: 2297504
ucucagcucaagagucauu

SEQ ID NO: 2297506 - RNA, 19 nt, Artificial Sequence
  Description of Artificial Sequence: Synthetic oligonucleotide
  Sense strand starting at position 983 of SEQ ID NO: 1884859
ugacucuugagcugagacu

SEQ ID NO: 2297507 - RNA, 19 nt, Artificial Sequence
  Description of Artificial Sequence: Synthetic oligonucleotide
  Antisense strand to SEQ ID NO: 2297506
agucucagcucaagaguca

SEQ ID NO: 2297508 - RNA, 19 nt, Artificial Sequence
  Description of Artificial Sequence: Synthetic oligonucleotide
  Sense strand starting at position 1015 of SEQ ID NO: 1884859
gaugcuaagucagcaaaga

SEQ ID NO: 2297509 - RNA, 19 nt, Artificial Sequence
  Description of Artificial Sequence: Synthetic oligonucleotide
  Antisense strand to SEQ ID NO: 2297508
ucuuugcugacuuagcauc

SEQ ID NO: 2297510 - RNA, 19 nt, Artificial Sequence
  Description of Artificial Sequence: Synthetic oligonucleotide
  Sense strand starting at position 1042 of SEQ ID NO: 1884859
aagagcauucugugcagaa

SEQ ID NO: 2297511 - RNA, 19 nt, Artificial Sequence
  Description of Artificial Sequence: Synthetic oligonucleotide
  Antisense strand to SEQ ID NO: 2297510
uucugcacagaaugcucuu

SEQ ID NO: 2297512 - RNA, 19 nt, Artificial Sequence
  Description of Artificial Sequence: Synthetic oligonucleotide
  Sense strand starting at position 1043 of SEQ ID NO: 1884859
agagcauucugugcagaag

SEQ ID NO: 2297513 - RNA, 19 nt, Artificial Sequence
  Description of Artificial Sequence: Synthetic oligonucleotide
  Antisense strand to SEQ ID NO: 2297512
cuucugcacagaaugcucu

SEQ ID NO: 2297514 - RNA, 19 nt, Artificial Sequence
  Description of Artificial Sequence: Synthetic oligonucleotide
  Sense strand starting at position 1046 of SEQ ID NO: 1884859
gcauucugugcagaaggaa

SEQ ID NO: 2297515 - RNA, 19 nt, Artificial Sequence
  Description of Artificial Sequence: Synthetic oligonucleotide
  Antisense strand to SEQ ID NO: 2297514
uuccuucugcacagaaugc

SEQ ID NO: 2297516 - RNA, 19 nt, Artificial Sequence
  Description of Artificial Sequence: Synthetic oligonucleotide
  Sense strand starting at position 1278 of SEQ ID NO: 1884859
ccacacuggugcuuagaaa

SEQ ID NO: 2297517 - RNA, 19 nt, Artificial Sequence
  Description of Artificial Sequence: Synthetic oligonucleotide
  Antisense strand to SEQ ID NO: 2297516
uuucuaagcaccagugugg

SEQ ID NO: 2297518 - RNA, 19 nt, Artificial Sequence
  Description of Artificial Sequence: Synthetic oligonucleotide
  Sense strand starting at position 1279 of SEQ ID NO: 1884859
cacacuggugcuuagaaau

SEQ ID NO: 2297519 - RNA, 19 nt, Artificial Sequence
  Description of Artificial Sequence: Synthetic oligonucleotide
  Antisense strand to SEQ ID NO: 2297518
auuucuaagcaccagugug

SEQ ID NO: 2297520 - RNA, 19 nt, Artificial Sequence
  Description of Artificial Sequence: Synthetic oligonucleotide
  Sense strand starting at position 1285 of SEQ ID NO: 1884859
ggugcuuagaaauagcauc

SEQ ID NO: 2297521 - RNA, 19 nt, Artificial Sequence
  Description of Artificial Sequence: Synthetic oligonucleotide
  Antisense strand to SEQ ID NO: 2297520
gaugcuauuucuaagcacc

SEQ ID NO: 2297522 - RNA, 19 nt, Artificial Sequence
  Description of Artificial Sequence: Synthetic oligonucleotide
  Sense strand starting at position 1618 of SEQ ID NO: 1884859
acaugaugaugggaggaaa

SEQ ID NO: 2297523 - RNA, 19 nt, Artificial Sequence
  Description of Artificial Sequence: Synthetic oligonucleotide
  Antisense strand to SEQ ID NO: 2297522
uuuccucccaucaucaugu

SEQ ID NO: 2297524 - RNA, 19 nt, Artificial Sequence
  Description of Artificial Sequence: Synthetic oligonucleotide
  Sense strand starting at position 1890 of SEQ ID NO: 1884859
ucucaagucccacgagaug

SEQ ID NO: 2297525 - RNA, 19 nt, Artificial Sequence
  Description of Artificial Sequence: Synthetic oligonucleotide
  Antisense strand to SEQ ID NO: 2297524
caucucgugggacuugaga

SEQ ID NO: 2297526 - RNA, 19 nt, Artificial Sequence
  Description of Artificial Sequence: Synthetic oligonucleotide
  Sense strand starting at position 2052 of SEQ ID NO: 1884859
caaucaguguaguuagaga

SEQ ID NO: 2297527 - RNA, 19 nt, Artificial Sequence
  Description of Artificial Sequence: Synthetic oligonucleotide
  Antisense strand to SEQ ID NO: 2297526
ucucuaacuacacugauug

SEQ ID NO: 2297528 - RNA, 19 nt, Artificial Sequence
  Description of Artificial Sequence: Synthetic oligonucleotide
  Sense strand starting at position 2162 of SEQ ID NO: 1884859
gggucaugugaucacccuu

SEQ ID NO: 2297529 - RNA, 19 nt, Artificial Sequence
  Description of Artificial Sequence: Synthetic oligonucleotide
  Antisense strand to SEQ ID NO: 2297528
aagggugaucacaugaccc

SEQ ID NO: 2297530 - RNA, 19 nt, Artificial Sequence
  Description of Artificial Sequence: Synthetic oligonucleotide
  Sense strand starting at position 2178 of SEQ ID NO: 1884859
cuuguaucggaagaugguu

SEQ ID NO: 2297531 - RNA, 19 nt, Artificial Sequence
  Description of Artificial Sequence: Synthetic oligonucleotide
  Antisense strand to SEQ ID NO: 2297530
aaccaucuuccgauacaag

SEQ ID NO: 2297532 - RNA, 19 nt, Artificial Sequence
  Description of Artificial Sequence: Synthetic oligonucleotide
  Sense strand starting at position 2578 of SEQ ID NO: 1884859
agggaaagacucugucuua

SEQ ID NO: 2297533 - RNA, 19 nt, Artificial Sequence
  Description of Artificial Sequence: Synthetic oligonucleotide
  Antisense strand to SEQ ID NO: 2297532
uaagacagagucuuucccu

SEQ ID NO: 2297534 - RNA, 19 nt, Artificial Sequence
  Description of Artificial Sequence: Synthetic oligonucleotide
  Sense strand starting at position 2579 of SEQ ID NO: 1884859
gggaaagacucugucuuaa

SEQ ID NO: 2297535 - RNA, 19 nt, Artificial Sequence
  Description of Artificial Sequence: Synthetic oligonucleotide
  Antisense strand to SEQ ID NO: 2297534
uuaagacagagucuuuccc

SEQ ID NO: 2297536 - RNA, 19 nt, Artificial Sequence
  Description of Artificial Sequence: Synthetic oligonucleotide
  Sense strand starting at position 2787 of SEQ ID NO: 1884859
aucccaguuucugcuagaa

SEQ ID NO: 2297537 - RNA, 19 nt, Artificial Sequence
  Description of Artificial Sequence: Synthetic oligonucleotide
  Antisense strand to SEQ ID NO: 2297536
uucuagcagaaacugggau

SEQ ID NO: 2297538 - RNA, 19 nt, Artificial Sequence
  Description of Artificial Sequence: Synthetic oligonucleotide
  Sense strand starting at position 2948 of SEQ ID NO: 1884859
ggcacauagcauuauguca

SEQ ID NO: 2297539 - RNA, 19 nt, Artificial Sequence
  Description of Artificial Sequence: Synthetic oligonucleotide
  Antisense strand to SEQ ID NO: 2297538
ugacauaaugcuaugugcc

SEQ ID NO: 2297540 - RNA, 19 nt, Artificial Sequence
  Description of Artificial Sequence: Synthetic oligonucleotide
  Sense strand starting at position 3036 of SEQ ID NO: 1884859
gcuugcuuugggcuacgua

SEQ ID NO: 2297541 - RNA, 19 nt, Artificial Sequence
  Description of Artificial Sequence: Synthetic oligonucleotide
  Antisense strand to SEQ ID NO: 2297540
uacguagcccaaagcaagc

SEQ ID NO: 2297542 - RNA, 19 nt, Artificial Sequence
  Description of Artificial Sequence: Synthetic oligonucleotide
  Sense strand starting at position 3125 of SEQ ID NO: 1884859
aggguaaaucuauguuguu

SEQ ID NO: 2297543 - RNA, 19 nt, Artificial Sequence
  Description of Artificial Sequence: Synthetic oligonucleotide
  Antisense strand to SEQ ID NO: 2297542
aacaacauagauuuacccu

SEQ ID NO: 2297544 - RNA, 19 nt, Artificial Sequence
  Description of Artificial Sequence: Synthetic oligonucleotide
  Sense strand starting at position 3272 of SEQ ID NO: 1884859
gagggaauguauccaucac

SEQ ID NO: 2297545 - RNA, 19 nt, Artificial Sequence
  Description of Artificial Sequence: Synthetic oligonucleotide
  Antisense strand to SEQ ID NO: 2297544
gugauggauacauucccuc

SEQ ID NO: 2297546 - RNA, 19 nt, Artificial Sequence
  Description of Artificial Sequence: Synthetic oligonucleotide
  Sense strand starting at position 3456 of SEQ ID NO: 1884859
acucuuucuugaguaccua

SEQ ID NO: 2297547 - RNA, 19 nt, Artificial Sequence
  Description of Artificial Sequence: Synthetic oligonucleotide
  Antisense strand to SEQ ID NO: 2297546
uagguacucaagaaagagu

SEQ ID NO: 2297548 - RNA, 19 nt, Artificial Sequence
  Description of Artificial Sequence: Synthetic oligonucleotide
  Sense strand starting at position 3528 of SEQ ID NO: 1884859
agggaaguauuaucaugca

SEQ ID NO: 2297549 - RNA, 19 nt, Artificial Sequence
  Description of Artificial Sequence: Synthetic oligonucleotide
  Antisense strand to SEQ ID NO: 2297548
ugcaugauaauacuucccu

SEQ ID NO: 2297550 - RNA, 19 nt, Artificial Sequence
  Description of Artificial Sequence: Synthetic oligonucleotide
  Sense strand starting at position 3626 of SEQ ID NO: 1884859
gaacuaaggucugucucca

SEQ ID NO: 2297551 - RNA, 19 nt, Artificial Sequence
  Description of Artificial Sequence: Synthetic oligonucleotide
  Antisense strand to SEQ ID NO: 2297550
uggagacagaccuuaguuc

SEQ ID NO: 2297552 - RNA, 19 nt, Artificial Sequence
  Description of Artificial Sequence: Synthetic oligonucleotide
  Sense strand starting at position 3691 of SEQ ID NO: 1884859
uaggauguccuaugguuua

SEQ ID NO: 2297553 - RNA, 19 nt, Artificial Sequence
  Description of Artificial Sequence: Synthetic oligonucleotide
  Antisense strand to SEQ ID NO: 2297552
uaaaccauaggacauccua

SEQ ID NO: 2297554 - RNA, 19 nt, Artificial Sequence
  Description of Artificial Sequence: Synthetic oligonucleotide
  Sense strand starting at position 3694 of SEQ ID NO: 1884859
gauguccuaugguuuacau

SEQ ID NO: 2297555 - RNA, 19 nt, Artificial Sequence
  Description of Artificial Sequence: Synthetic oligonucleotide
  Antisense strand to SEQ ID NO: 2297554
auguaaaccauaggacauc

SEQ ID NO: 2297556 - RNA, 19 nt, Artificial Sequence
  Description of Artificial Sequence: Synthetic oligonucleotide
  Sense strand starting at position 3715 of SEQ ID NO: 1884859
cugguucuugauugauuga

SEQ ID NO: 2297557 - RNA, 19 nt, Artificial Sequence
  Description of Artificial Sequence: Synthetic oligonucleotide
  Antisense strand to SEQ ID NO: 2297556
ucaaucaaucaagaaccag

SEQ ID NO: 2297558 - RNA, 19 nt, Artificial Sequence
  Description of Artificial Sequence: Synthetic oligonucleotide
  Sense strand starting at position 3716 of SEQ ID NO: 1884859
ugguucuugauugauugau

SEQ ID NO: 2297559 - RNA, 19 nt, Artificial Sequence
  Description of Artificial Sequence: Synthetic oligonucleotide
  Antisense strand to SEQ ID NO: 2297558
aucaaucaaucaagaacca

SEQ ID NO: 2297560 - RNA, 19 nt, Artificial Sequence
  Description of Artificial Sequence: Synthetic oligonucleotide
  Sense strand starting at position 3775 of SEQ ID NO: 1884859
gcgcgacuccaagaaugga

SEQ ID NO: 2297561 - RNA, 19 nt, Artificial Sequence
  Description of Artificial Sequence: Synthetic oligonucleotide
  Antisense strand to SEQ ID NO: 2297560
uccauucuuggagucgcgc

SEQ ID NO: 2297562 - RNA, 19 nt, Artificial Sequence
  Description of Artificial Sequence: Synthetic oligonucleotide
  Sense strand starting at position 3790 of SEQ ID NO: 1884859
uggacccuuccuuaaaguu

SEQ ID NO: 2297563 - RNA, 19 nt, Artificial Sequence
  Description of Artificial Sequence: Synthetic oligonucleotide
  Antisense strand to SEQ ID NO: 2297562
aacuuuaaggaagggucca

SEQ ID NO: 2297564 - RNA, 19 nt, Artificial Sequence
  Description of Artificial Sequence: Synthetic oligonucleotide
  Sense strand starting at position 3978 of SEQ ID NO: 1884859
gccuuagagcuuuaggauu

SEQ ID NO: 2297565 - RNA, 19 nt, Artificial Sequence
  Description of Artificial Sequence: Synthetic oligonucleotide
  Antisense strand to SEQ ID NO: 2297564
aauccuaaagcucuaaggc

SEQ ID NO: 2297566 - RNA, 19 nt, Artificial Sequence
  Description of Artificial Sequence: Synthetic oligonucleotide
  Sense strand starting at position 629 of SEQ ID NO: 1884860
gcaucaagcuuaucagaau

SEQ ID NO: 2297567 - RNA, 19 nt, Artificial Sequence
  Description of Artificial Sequence: Synthetic oligonucleotide
  Antisense strand to SEQ ID NO: 2297566
auucugauaagcuugaugc

SEQ ID NO: 2297568 - RNA, 19 nt, Artificial Sequence
  Description of Artificial Sequence: Synthetic oligonucleotide
  Sense strand starting at position 703 of SEQ ID NO: 1884860
gccugcugucaccaugaga

SEQ ID NO: 2297569 - RNA, 19 nt, Artificial Sequence
  Description of Artificial Sequence: Synthetic oligonucleotide
  Antisense strand to SEQ ID NO: 2297568
ucucauggugacagcaggc

SEQ ID NO: 2297570 - RNA, 19 nt, Artificial Sequence
  Description of Artificial Sequence: Synthetic oligonucleotide
  Sense strand starting at position 737 of SEQ ID NO: 1884860
gcgugcauucugagaggug

SEQ ID NO: 2297571 - RNA, 19 nt, Artificial Sequence
  Description of Artificial Sequence: Synthetic oligonucleotide
  Antisense strand to SEQ ID NO: 2297570
caccucucagaaugcacgc

SEQ ID NO: 2297572 - RNA, 19 nt, Artificial Sequence
  Description of Artificial Sequence: Synthetic oligonucleotide
  Sense strand starting at position 742 of SEQ ID NO: 1884860
cauucugagaggugugguu

SEQ ID NO: 2297573 - RNA, 19 nt, Artificial Sequence
  Description of Artificial Sequence: Synthetic oligonucleotide
  Antisense strand to SEQ ID NO: 2297572
aaccacaccucucagaaug

SEQ ID NO: 2297574 - RNA, 19 nt, Artificial Sequence
  Description of Artificial Sequence: Synthetic oligonucleotide
  Sense strand starting at position 749 of SEQ ID NO: 1884860
agaggugugguucauugga

SEQ ID NO: 2297575 - RNA, 19 nt, Artificial Sequence
  Description of Artificial Sequence: Synthetic oligonucleotide
  Antisense strand to SEQ ID NO: 2297574
uccaaugaaccacaccucu

SEQ ID NO: 2297576 - RNA, 19 nt, Artificial Sequence
  Description of Artificial Sequence: Synthetic oligonucleotide
  Sense strand starting at position 779 of SEQ ID NO: 1884860
aacagugugcagugagauu

SEQ ID NO: 2297577 - RNA, 19 nt, Artificial Sequence
  Description of Artificial Sequence: Synthetic oligonucleotide
  Antisense strand to SEQ ID NO: 2297576
aaucucacugcacacuguu

SEQ ID NO: 2297578 - RNA, 19 nt, Artificial Sequence
  Description of Artificial Sequence: Synthetic oligonucleotide
  Sense strand starting at position 832 of SEQ ID NO: 1884860
uugaauuucugaugaagga

SEQ ID NO: 2297579 - RNA, 19 nt, Artificial Sequence
  Description of Artificial Sequence: Synthetic oligonucleotide
  Antisense strand to SEQ ID NO: 2297578
uccuucaucagaaauucaa

SEQ ID NO: 2297580 - RNA, 19 nt, Artificial Sequence
  Description of Artificial Sequence: Synthetic oligonucleotide
  Sense strand starting at position 842 of SEQ ID NO: 1884860
gaugaaggauuucgaaugu

SEQ ID NO: 2297581 - RNA, 19 nt, Artificial Sequence
  Description of Artificial Sequence: Synthetic oligonucleotide
  Antisense strand to SEQ ID NO: 2297580
acauucgaaauccuucauc

SEQ ID NO: 2297582 - RNA, 19 nt, Artificial Sequence
  Description of Artificial Sequence: Synthetic oligonucleotide
  Sense strand starting at position 885 of SEQ ID NO: 1884860
aacgcaguaccuugaaaga

SEQ ID NO: 2297583 - RNA, 19 nt, Artificial Sequence
  Description of Artificial Sequence: Synthetic oligonucleotide
  Antisense strand to SEQ ID NO: 2297582
ucuuucaagguacugcguu

SEQ ID NO: 2297584 - RNA, 19 nt, Artificial Sequence
  Description of Artificial Sequence: Synthetic oligonucleotide
  Sense strand starting at position 902 of SEQ ID NO: 1884860
gagaguuaccuugggucaa

SEQ ID NO: 2297585 - RNA, 19 nt, Artificial Sequence
  Description of Artificial Sequence: Synthetic oligonucleotide
  Antisense strand to SEQ ID NO: 2297584
uugacccaagguaacucuc

SEQ ID NO: 2297586 - RNA, 19 nt, Artificial Sequence
  Description of Artificial Sequence: Synthetic oligonucleotide
  Sense strand starting at position 904 of SEQ ID NO: 1884860
gaguuaccuugggucaagu

SEQ ID NO: 2297587 - RNA, 19 nt, Artificial Sequence
  Description of Artificial Sequence: Synthetic oligonucleotide
  Antisense strand to SEQ ID NO: 2297586
acuugacccaagguaacuc

SEQ ID NO: 2297588 - RNA, 19 nt, Artificial Sequence
  Description of Artificial Sequence: Synthetic oligonucleotide
  Sense strand starting at position 978 of SEQ ID NO: 1884860
gcagcaauuauuggagcua

SEQ ID NO: 2297589 - RNA, 19 nt, Artificial Sequence
  Description of Artificial Sequence: Synthetic oligonucleotide
  Antisense strand to SEQ ID NO: 2297588
uagcuccaauaauugcugc

SEQ ID NO: 2297590 - RNA, 19 nt, Artificial Sequence
  Description of Artificial Sequence: Synthetic oligonucleotide
  Sense strand starting at position 1000 of SEQ ID NO: 1884860
aaguguaaucuguauugga

SEQ ID NO: 2297591 - RNA, 19 nt, Artificial Sequence
  Description of Artificial Sequence: Synthetic oligonucleotide
  Antisense strand to SEQ ID NO: 2297590
uccaauacagauuacacuu

SEQ ID NO: 2297592 - RNA, 19 nt, Artificial Sequence
  Description of Artificial Sequence: Synthetic oligonucleotide
  Sense strand starting at position 1004 of SEQ ID NO: 1884860
guaaucuguauuggaagag

SEQ ID NO: 2297593 - RNA, 19 nt, Artificial Sequence
  Description of Artificial Sequence: Synthetic oligonucleotide
  Antisense strand to SEQ ID NO: 2297592
cucuuccaauacagauuac

SEQ ID NO: 2297594 - RNA, 19 nt, Artificial Sequence
  Description of Artificial Sequence: Synthetic oligonucleotide
  Sense strand starting at position 1008 of SEQ ID NO: 1884860
ucuguauuggaagagaguu

SEQ ID NO: 2297595 - RNA, 19 nt, Artificial Sequence
  Description of Artificial Sequence: Synthetic oligonucleotide
  Antisense strand to SEQ ID NO: 2297594
aacucucuuccaauacaga

SEQ ID NO: 2297596 - RNA, 19 nt, Artificial Sequence
  Description of Artificial Sequence: Synthetic oligonucleotide
  Sense strand starting at position 1103 of SEQ ID NO: 1884860
cagaauacucacgguuauu

SEQ ID NO: 2297597 - RNA, 19 nt, Artificial Sequence
  Description of Artificial Sequence: Synthetic oligonucleotide
  Antisense strand to SEQ ID NO: 2297596
aauaaccgugaguauucug

SEQ ID NO: 2297598 - RNA, 19 nt, Artificial Sequence
  Description of Artificial Sequence: Synthetic oligonucleotide
  Sense strand starting at position 1446 of SEQ ID NO: 1884860
ggaaacguugcugauuaaa

SEQ ID NO: 2297599 - RNA, 19 nt, Artificial Sequence
  Description of Artificial Sequence: Synthetic oligonucleotide
  Antisense strand to SEQ ID NO: 2297598
uuuaaucagcaacguuucc

SEQ ID NO: 2297600 - RNA, 19 nt, Artificial Sequence
  Description of Artificial Sequence: Synthetic oligonucleotide
  Sense strand starting at position 1448 of SEQ ID NO: 1884860
aaacguugcugauuaaaua

SEQ ID NO: 2297601 - RNA, 19 nt, Artificial Sequence
  Description of Artificial Sequence: Synthetic oligonucleotide
  Antisense strand to SEQ ID NO: 2297600
uauuuaaucagcaacguuu

SEQ ID NO: 2297602 - RNA, 19 nt, Artificial Sequence
  Description of Artificial Sequence: Synthetic oligonucleotide
  Sense strand starting at position 1476 of SEQ ID NO: 1884860
uugaauugggcugauggua

SEQ ID NO: 2297603 - RNA, 19 nt, Artificial Sequence
  Description of Artificial Sequence: Synthetic oligonucleotide
  Antisense strand to SEQ ID NO: 2297602
uaccaucagcccaauucaa

SEQ ID NO: 2297604 - RNA, 19 nt, Artificial Sequence
  Description of Artificial Sequence: Synthetic oligonucleotide
  Sense strand starting at position 1485 of SEQ ID NO: 1884860
gcugaugguagaugcuaua

SEQ ID NO: 2297605 - RNA, 19 nt, Artificial Sequence
  Description of Artificial Sequence: Synthetic oligonucleotide
  Antisense strand to SEQ ID NO: 2297604
uauagcaucuaccaucagc

SEQ ID NO: 2297606 - RNA, 19 nt, Artificial Sequence
  Description of Artificial Sequence: Synthetic oligonucleotide
  Sense strand starting at position 1582 of SEQ ID NO: 1884860
gcagaaaguuacucucuca

SEQ ID NO: 2297607 - RNA, 19 nt, Artificial Sequence
  Description of Artificial Sequence: Synthetic oligonucleotide
  Antisense strand to SEQ ID NO: 2297606
ugagagaguaacuuucugc

SEQ ID NO: 2297608 - RNA, 19 nt, Artificial Sequence
  Description of Artificial Sequence: Synthetic oligonucleotide
  Sense strand starting at position 3057 of SEQ ID NO: 1884860
auaagugauauaggaguua

SEQ ID NO: 2297609 - RNA, 19 nt, Artificial Sequence
  Description of Artificial Sequence: Synthetic oligonucleotide
  Antisense strand to SEQ ID NO: 2297608
uaacuccuauaucacuuau

SEQ ID NO: 2297610 - RNA, 19 nt, Artificial Sequence
  Description of Artificial Sequence: Synthetic oligonucleotide
  Sense strand starting at position 3293 of SEQ ID NO: 1884860
cguauacuuggucaucauu

SEQ ID NO: 2297611 - RNA, 19 nt, Artificial Sequence
  Description of Artificial Sequence: Synthetic oligonucleotide
  Antisense strand to SEQ ID NO: 2297610
aaugaugaccaaguauacg

SEQ ID NO: 2297612 - RNA, 19 nt, Artificial Sequence
  Description of Artificial Sequence: Synthetic oligonucleotide
  Sense strand starting at position 3356 of SEQ ID NO: 1884860
agaaucauuugcuaaugau

SEQ ID NO: 2297613 - RNA, 19 nt, Artificial Sequence
  Description of Artificial Sequence: Synthetic oligonucleotide
  Antisense strand to SEQ ID NO: 2297612
aucauuagcaaaugauucu

SEQ ID NO: 2297614 - RNA, 19 nt, Artificial Sequence
  Description of Artificial Sequence: Synthetic oligonucleotide
  Sense strand starting at position 3455 of SEQ ID NO: 1884860
gggugaaugccuuauuauu

SEQ ID NO: 2297615 - RNA, 19 nt, Artificial Sequence
  Description of Artificial Sequence: Synthetic oligonucleotide
  Antisense strand to SEQ ID NO: 2297614
aauaauaaggcauucaccc

SEQ ID NO: 2297616 - RNA, 19 nt, Artificial Sequence
  Description of Artificial Sequence: Synthetic oligonucleotide
  Sense strand starting at position 3492 of SEQ ID NO: 1884860
agggcuuuccagugaagac

SEQ ID NO: 2297617 - RNA, 19 nt, Artificial Sequence
  Description of Artificial Sequence: Synthetic oligonucleotide
  Antisense strand to SEQ ID NO: 2297616
gucuucacuggaaagcccu

SEQ ID NO: 2297618 - RNA, 19 nt, Artificial Sequence
  Description of Artificial Sequence: Synthetic oligonucleotide
  Sense strand starting at position 3493 of SEQ ID NO: 1884860
gggcuuuccagugaagacu

SEQ ID NO: 2297619 - RNA, 19 nt, Artificial Sequence
  Description of Artificial Sequence: Synthetic oligonucleotide
  Antisense strand to SEQ ID NO: 2297618
agucuucacuggaaagccc

SEQ ID NO: 2297620 - RNA, 19 nt, Artificial Sequence
  Description of Artificial Sequence: Synthetic oligonucleotide
  Sense strand starting at position 3540 of SEQ ID NO: 1884860
agcuguaacacugggugaa

SEQ ID NO: 2297621 - RNA, 19 nt, Artificial Sequence
  Description of Artificial Sequence: Synthetic oligonucleotide
  Antisense strand to SEQ ID NO: 2297620
uucacccaguguuacagcu

SEQ ID NO: 2297622 - RNA, 19 nt, Artificial Sequence
  Description of Artificial Sequence: Synthetic oligonucleotide
  Sense strand starting at position 3541 of SEQ ID NO: 1884860
gcuguaacacugggugaau

SEQ ID NO: 2297623 - RNA, 19 nt, Artificial Sequence
  Description of Artificial Sequence: Synthetic oligonucleotide
  Antisense strand to SEQ ID NO: 2297622
auucacccaguguuacagc

SEQ ID NO: 2297624 - RNA, 19 nt, Artificial Sequence
  Description of Artificial Sequence: Synthetic oligonucleotide
  Sense strand starting at position 3562 of SEQ ID NO: 1884860
uguagaagcacauaguguu

SEQ ID NO: 2297625 - RNA, 19 nt, Artificial Sequence
  Description of Artificial Sequence: Synthetic oligonucleotide
  Antisense strand to SEQ ID NO: 2297624
aacacuaugugcuucuaca

SEQ ID NO: 2297626 - RNA, 19 nt, Artificial Sequence
  Description of Artificial Sequence: Synthetic oligonucleotide
  Sense strand starting at position 3580 of SEQ ID NO: 1884860
uaguaaggugugggucaga

SEQ ID NO: 2297627 - RNA, 19 nt, Artificial Sequence
  Description of Artificial Sequence: Synthetic oligonucleotide
  Antisense strand to SEQ ID NO: 2297626
ucugacccacaccuuacua

SEQ ID NO: 2297628 - RNA, 19 nt, Artificial Sequence
  Description of Artificial Sequence: Synthetic oligonucleotide
  Sense strand starting at position 3602 of SEQ ID NO: 1884860
ggcuuuagagaauguagca

SEQ ID NO: 2297629 - RNA, 19 nt, Artificial Sequence
  Description of Artificial Sequence: Synthetic oligonucleotide
  Antisense strand to SEQ ID NO: 2297628
ugcuacauucucuaaagcc

SEQ ID NO: 2297630 - RNA, 19 nt, Artificial Sequence
  Description of Artificial Sequence: Synthetic oligonucleotide
  Sense strand starting at position 3655 of SEQ ID NO: 1884860
uggauaagcuaauauuucu

SEQ ID NO: 2297631 - RNA, 19 nt, Artificial Sequence
  Description of Artificial Sequence: Synthetic oligonucleotide
  Antisense strand to SEQ ID NO: 2297630
agaaauauuagcuuaucca

SEQ ID NO: 2297632 - RNA, 19 nt, Artificial Sequence
  Description of Artificial Sequence: Synthetic oligonucleotide
  Sense strand starting at position 3739 of SEQ ID NO: 1884860
ucugaaguuacagaagugu

SEQ ID NO: 2297633 - RNA, 19 nt, Artificial Sequence
  Description of Artificial Sequence: Synthetic oligonucleotide
  Antisense strand to SEQ ID NO: 2297632
acacuucuguaacuucaga

SEQ ID NO: 2297634 - RNA, 19 nt, Artificial Sequence
  Description of Artificial Sequence: Synthetic oligonucleotide
  Sense strand starting at position 3743 of SEQ ID NO: 1884860
aaguuacagaagugugaug

SEQ ID NO: 2297635 - RNA, 19 nt, Artificial Sequence
  Description of Artificial Sequence: Synthetic oligonucleotide
  Antisense strand to SEQ ID NO: 2297634
caucacacuucuguaacuu

SEQ ID NO: 2297636 - RNA, 19 nt, Artificial Sequence
  Description of Artificial Sequence: Synthetic oligonucleotide
  Sense strand starting at position 3745 of SEQ ID NO: 1884860
guuacagaagugugaugaa

SEQ ID NO: 2297637 - RNA, 19 nt, Artificial Sequence
  Description of Artificial Sequence: Synthetic oligonucleotide
  Antisense strand to SEQ ID NO: 2297636
uucaucacacuucuguaac

SEQ ID NO: 2297638 - RNA, 19 nt, Artificial Sequence
  Description of Artificial Sequence: Synthetic oligonucleotide
  Sense strand starting at position 3759 of SEQ ID NO: 1884860
augaauugcggucaauaug

SEQ ID NO: 2297639 - RNA, 19 nt, Artificial Sequence
  Description of Artificial Sequence: Synthetic oligonucleotide
  Antisense strand to SEQ ID NO: 2297638
cauauugaccgcaauucau

SEQ ID NO: 2297640 - RNA, 19 nt, Artificial Sequence
  Description of Artificial Sequence: Synthetic oligonucleotide
  Sense strand starting at position 3795 of SEQ ID NO: 1884860
ggagucagucagugaccuu

SEQ ID NO: 2297641 - RNA, 19 nt, Artificial Sequence
  Description of Artificial Sequence: Synthetic oligonucleotide
  Antisense strand to SEQ ID NO: 2297640
aaggucacugacugacucc

SEQ ID NO: 2297642 - RNA, 19 nt, Artificial Sequence
  Description of Artificial Sequence: Synthetic oligonucleotide
  Sense strand starting at position 3798 of SEQ ID NO: 1884860
gucagucagugaccuuaaa

SEQ ID NO: 2297643 - RNA, 19 nt, Artificial Sequence
  Description of Artificial Sequence: Synthetic oligonucleotide
  Antisense strand to SEQ ID NO: 2297642
uuuaaggucacugacugac

SEQ ID NO: 2297644 - RNA, 19 nt, Artificial Sequence
  Description of Artificial Sequence: Synthetic oligonucleotide
  Sense strand starting at position 3908 of SEQ ID NO: 1884860
cgcuuuaagaggcagaaau

SEQ ID NO: 2297645 - RNA, 19 nt, Artificial Sequence
  Description of Artificial Sequence: Synthetic oligonucleotide
  Antisense strand to SEQ ID NO: 2297644
auuucugccucuuaaagcg

SEQ ID NO: 2297646 - RNA, 19 nt, Artificial Sequence
  Description of Artificial Sequence: Synthetic oligonucleotide
  Sense strand starting at position 138 of SEQ ID NO: 1884861
cugggaaaguuauccuauc

SEQ ID NO: 2297647 - RNA, 19 nt, Artificial Sequence
  Description of Artificial Sequence: Synthetic oligonucleotide
  Antisense strand to SEQ ID NO: 2297646
gauaggauaacuuucccag

SEQ ID NO: 2297648 - RNA, 19 nt, Artificial Sequence
  Description of Artificial Sequence: Synthetic oligonucleotide
  Sense strand starting at position 139 of SEQ ID NO: 1884861
ugggaaaguuauccuaucu

SEQ ID NO: 2297649 - RNA, 19 nt, Artificial Sequence
  Description of Artificial Sequence: Synthetic oligonucleotide
  Antisense strand to SEQ ID NO: 2297648
agauaggauaacuuuccca

SEQ ID NO: 2297650 - RNA, 19 nt, Artificial Sequence
  Description of Artificial Sequence: Synthetic oligonucleotide
  Sense strand starting at position 289 of SEQ ID NO: 1884861
agauuuaaguauggacaua

SEQ ID NO: 2297651 - RNA, 19 nt, Artificial Sequence
  Description of Artificial Sequence: Synthetic oligonucleotide
  Antisense strand to SEQ ID NO: 2297650
uauguccauacuuaaaucu

SEQ ID NO: 2297652 - RNA, 19 nt, Artificial Sequence
  Description of Artificial Sequence: Synthetic oligonucleotide
  Sense strand starting at position 365 of SEQ ID NO: 1884861
cacagaugcuguccuguga

SEQ ID NO: 2297653 - RNA, 19 nt, Artificial Sequence
  Description of Artificial Sequence: Synthetic oligonucleotide
  Antisense strand to SEQ ID NO: 2297652
ucacaggacagcaucugug

SEQ ID NO: 2297654 - RNA, 19 nt, Artificial Sequence
  Description of Artificial Sequence: Synthetic oligonucleotide
  Sense strand starting at position 374 of SEQ ID NO: 1884861
uguccugugauauguugaa

SEQ ID NO: 2297655 - RNA, 19 nt, Artificial Sequence
  Description of Artificial Sequence: Synthetic oligonucleotide
  Antisense strand to SEQ ID NO: 2297654
uucaacauaucacaggaca

SEQ ID NO: 2297656 - RNA, 19 nt, Artificial Sequence
  Description of Artificial Sequence: Synthetic oligonucleotide
  Sense strand starting at position 424 of SEQ ID NO: 1884861
agucaaacuuucucaaggu

SEQ ID NO: 2297657 - RNA, 19 nt, Artificial Sequence
  Description of Artificial Sequence: Synthetic oligonucleotide
  Antisense strand to SEQ ID NO: 2297656
accuugagaaaguuugacu

SEQ ID NO: 2297658 - RNA, 19 nt, Artificial Sequence
  Description of Artificial Sequence: Synthetic oligonucleotide
  Sense strand starting at position 476 of SEQ ID NO: 1884861
cagugaauaugaguugaug

SEQ ID NO: 2297659 - RNA, 19 nt, Artificial Sequence
  Description of Artificial Sequence: Synthetic oligonucleotide
  Antisense strand to SEQ ID NO: 2297658
caucaacucauauucacug

SEQ ID NO: 2297660 - RNA, 19 nt, Artificial Sequence
  Description of Artificial Sequence: Synthetic oligonucleotide
  Sense strand starting at position 478 of SEQ ID NO: 1884861
gugaauaugaguugaugca

SEQ ID NO: 2297661 - RNA, 19 nt, Artificial Sequence
  Description of Artificial Sequence: Synthetic oligonucleotide
  Antisense strand to SEQ ID NO: 2297660
ugcaucaacucauauucac

SEQ ID NO: 2297662 - RNA, 19 nt, Artificial Sequence
  Description of Artificial Sequence: Synthetic oligonucleotide
  Sense strand starting at position 556 of SEQ ID NO: 1884861
gcuggaugagcuggugaga

SEQ ID NO: 2297663 - RNA, 19 nt, Artificial Sequence
  Description of Artificial Sequence: Synthetic oligonucleotide
  Antisense strand to SEQ ID NO: 2297662
ucucaccagcucauccagc

SEQ ID NO: 2297664 - RNA, 19 nt, Artificial Sequence
  Description of Artificial Sequence: Synthetic oligonucleotide
  Sense strand starting at position 727 of SEQ ID NO: 1884861
uguuaacacugaucauguu

SEQ ID NO: 2297665 - RNA, 19 nt, Artificial Sequence
  Description of Artificial Sequence: Synthetic oligonucleotide
  Antisense strand to SEQ ID NO: 2297664
aacaugaucaguguuaaca

SEQ ID NO: 2297666 - RNA, 19 nt, Artificial Sequence
  Description of Artificial Sequence: Synthetic oligonucleotide
  Sense strand starting at position 728 of SEQ ID NO: 1884861
guuaacacugaucauguua

SEQ ID NO: 2297667 - RNA, 19 nt, Artificial Sequence
  Description of Artificial Sequence: Synthetic oligonucleotide
  Antisense strand to SEQ ID NO: 2297666
uaacaugaucaguguuaac

SEQ ID NO: 2297668 - RNA, 19 nt, Artificial Sequence
  Description of Artificial Sequence: Synthetic oligonucleotide
  Sense strand starting at position 736 of SEQ ID NO: 1884861
ugaucauguuaaguaaaca

SEQ ID NO: 2297669 - RNA, 19 nt, Artificial Sequence
  Description of Artificial Sequence: Synthetic oligonucleotide
  Antisense strand to SEQ ID NO: 2297668
uguuuacuuaacaugauca

SEQ ID NO: 2297670 - RNA, 19 nt, Artificial Sequence
  Description of Artificial Sequence: Synthetic oligonucleotide
  Sense strand starting at position 855 of SEQ ID NO: 1884861
gauuaaaucugaucuuggu

SEQ ID NO: 2297671 - RNA, 19 nt, Artificial Sequence
  Description of Artificial Sequence: Synthetic oligonucleotide
  Antisense strand to SEQ ID NO: 2297670
accaagaucagauuuaauc

SEQ ID NO: 2297672 - RNA, 19 nt, Artificial Sequence
  Description of Artificial Sequence: Synthetic oligonucleotide
  Sense strand starting at position 864 of SEQ ID NO: 1884861
ugaucuuggugaccaucau

SEQ ID NO: 2297673 - RNA, 19 nt, Artificial Sequence
  Description of Artificial Sequence: Synthetic oligonucleotide
  Antisense strand to SEQ ID NO: 2297672
augauggucaccaagauca

SEQ ID NO: 2297674 - RNA, 19 nt, Artificial Sequence
  Description of Artificial Sequence: Synthetic oligonucleotide
  Sense strand starting at position 865 of SEQ ID NO: 1884861
gaucuuggugaccaucauu

SEQ ID NO: 2297675 - RNA, 19 nt, Artificial Sequence
  Description of Artificial Sequence: Synthetic oligonucleotide
  Antisense strand to SEQ ID NO: 2297674
aaugauggucaccaagauc

SEQ ID NO: 2297676 - RNA, 19 nt, Artificial Sequence
  Description of Artificial Sequence: Synthetic oligonucleotide
  Sense strand starting at position 1055 of SEQ ID NO: 1884861
ccuggaauguccucuccca

SEQ ID NO: 2297677 - RNA, 19 nt, Artificial Sequence
  Description of Artificial Sequence: Synthetic oligonucleotide
  Antisense strand to SEQ ID NO: 2297676
ugggagaggacauuccagg

SEQ ID NO: 2297678 - RNA, 19 nt, Artificial Sequence
  Description of Artificial Sequence: Synthetic oligonucleotide
  Sense strand starting at position 1117 of SEQ ID NO: 1884861
ugugaagccuuccuccauu

SEQ ID NO: 2297679 - RNA, 19 nt, Artificial Sequence
  Description of Artificial Sequence: Synthetic oligonucleotide
  Antisense strand to SEQ ID NO: 2297678
aauggaggaaggcuucaca

SEQ ID NO: 2297680 - RNA, 19 nt, Artificial Sequence
  Description of Artificial Sequence: Synthetic oligonucleotide
  Sense strand starting at position 1192 of SEQ ID NO: 1884861
gccaccgugcaugauagau

SEQ ID NO: 2297681 - RNA, 19 nt, Artificial Sequence
  Description of Artificial Sequence: Synthetic oligonucleotide
  Antisense strand to SEQ ID NO: 2297680
aucuaucaugcacgguggc

SEQ ID NO: 2297682 - RNA, 19 nt, Artificial Sequence
  Description of Artificial Sequence: Synthetic oligonucleotide
  Sense strand starting at position 1323 of SEQ ID NO: 1884861
agugaugccagcuaugaag

SEQ ID NO: 2297683 - RNA, 19 nt, Artificial Sequence
  Description of Artificial Sequence: Synthetic oligonucleotide
  Antisense strand to SEQ ID NO: 2297682
cuucauagcuggcaucacu

SEQ ID NO: 2297684 - RNA, 19 nt, Artificial Sequence
  Description of Artificial Sequence: Synthetic oligonucleotide
  Sense strand starting at position 1404 of SEQ ID NO: 1884861
gguuucuggagagguaacu

SEQ ID NO: 2297685 - RNA, 19 nt, Artificial Sequence
  Description of Artificial Sequence: Synthetic oligonucleotide
  Antisense strand to SEQ ID NO: 2297684
aguuaccucuccagaaacc

SEQ ID NO: 2297686 - RNA, 19 nt, Artificial Sequence
  Description of Artificial Sequence: Synthetic oligonucleotide
  Sense strand starting at position 1413 of SEQ ID NO: 1884861
agagguaacucucccacua

SEQ ID NO: 2297687 - RNA, 19 nt, Artificial Sequence
  Description of Artificial Sequence: Synthetic oligonucleotide
  Antisense strand to SEQ ID NO: 2297686
uagugggagaguuaccucu

SEQ ID NO: 2297688 - RNA, 19 nt, Artificial Sequence
  Description of Artificial Sequence: Synthetic oligonucleotide
  Sense strand starting at position 1500 of SEQ ID NO: 1884861
ugcaaagguccugaaguaa

SEQ ID NO: 2297689 - RNA, 19 nt, Artificial Sequence
  Description of Artificial Sequence: Synthetic oligonucleotide
  Antisense strand to SEQ ID NO: 2297688
uuacuucaggaccuuugca

SEQ ID NO: 2297690 - RNA, 19 nt, Artificial Sequence
  Description of Artificial Sequence: Synthetic oligonucleotide
  Sense strand starting at position 1572 of SEQ ID NO: 1884861
agcauaugacgcugaggaa

SEQ ID NO: 2297691 - RNA, 19 nt, Artificial Sequence
  Description of Artificial Sequence: Synthetic oligonucleotide
  Antisense strand to SEQ ID NO: 2297690
uuccucagcgucauaugcu

SEQ ID NO: 2297692 - RNA, 19 nt, Artificial Sequence
  Description of Artificial Sequence: Synthetic oligonucleotide
  Sense strand starting at position 1573 of SEQ ID NO: 1884861
gcauaugacgcugaggaaa

SEQ ID NO: 2297693 - RNA, 19 nt, Artificial Sequence
  Description of Artificial Sequence: Synthetic oligonucleotide
  Antisense strand to SEQ ID NO: 2297692
uuuccucagcgucauaugc

SEQ ID NO: 2297694 - RNA, 19 nt, Artificial Sequence
  Description of Artificial Sequence: Synthetic oligonucleotide
  Sense strand starting at position 1681 of SEQ ID NO: 1884861
gggacucaugagugcugaa

SEQ ID NO: 2297695 - RNA, 19 nt, Artificial Sequence
  Description of Artificial Sequence: Synthetic oligonucleotide
  Antisense strand to SEQ ID NO: 2297694
uucagcacucaugaguccc

SEQ ID NO: 2297696 - RNA, 19 nt, Artificial Sequence
  Description of Artificial Sequence: Synthetic oligonucleotide
  Sense strand starting at position 2494 of SEQ ID NO: 1884861
caaggacucuuggucuaug

SEQ ID NO: 2297697 - RNA, 19 nt, Artificial Sequence
  Description of Artificial Sequence: Synthetic oligonucleotide
  Antisense strand to SEQ ID NO: 2297696
cauagaccaagaguccuug

SEQ ID NO: 2297698 - RNA, 19 nt, Artificial Sequence
  Description of Artificial Sequence: Synthetic oligonucleotide
  Sense strand starting at position 2495 of SEQ ID NO: 1884861
aaggacucuuggucuauga

SEQ ID NO: 2297699 - RNA, 19 nt, Artificial Sequence
  Description of Artificial Sequence: Synthetic oligonucleotide
  Antisense strand to SEQ ID NO: 2297698
ucauagaccaagaguccuu

SEQ ID NO: 2297700 - RNA, 19 nt, Artificial Sequence
  Description of Artificial Sequence: Synthetic oligonucleotide
  Sense strand starting at position 2597 of SEQ ID NO: 1884861
guccaaucggagugagcau

SEQ ID NO: 2297701 - RNA, 19 nt, Artificial Sequence
  Description of Artificial Sequence: Synthetic oligonucleotide
  Antisense strand to SEQ ID NO: 2297700
augcucacuccgauuggac

SEQ ID NO: 2297702 - RNA, 19 nt, Artificial Sequence
  Description of Artificial Sequence: Synthetic oligonucleotide
  Sense strand starting at position 2604 of SEQ ID NO: 1884861
cggagugagcaucaggauu

SEQ ID NO: 2297703 - RNA, 19 nt, Artificial Sequence
  Description of Artificial Sequence: Synthetic oligonucleotide
  Antisense strand to SEQ ID NO: 2297702
aauccugaugcucacuccg

SEQ ID NO: 2297704 - RNA, 19 nt, Artificial Sequence
  Description of Artificial Sequence: Synthetic oligonucleotide
  Sense strand starting at position 2637 of SEQ ID NO: 1884861
ugggaaagguuguuacacu

SEQ ID NO: 2297705 - RNA, 19 nt, Artificial Sequence
  Description of Artificial Sequence: Synthetic oligonucleotide
  Antisense strand to SEQ ID NO: 2297704
aguguaacaaccuuuccca

SEQ ID NO: 2297706 - RNA, 19 nt, Artificial Sequence
  Description of Artificial Sequence: Synthetic oligonucleotide
  Sense strand starting at position 2665 of SEQ ID NO: 1884861
ugugcucuggcuuugugau

SEQ ID NO: 2297707 - RNA, 19 nt, Artificial Sequence
  Description of Artificial Sequence: Synthetic oligonucleotide
  Antisense strand to SEQ ID NO: 2297706
aucacaaagccagagcaca

SEQ ID NO: 2297708 - RNA, 19 nt, Artificial Sequence
  Description of Artificial Sequence: Synthetic oligonucleotide
  Sense strand starting at position 2677 of SEQ ID NO: 1884861
uugugauuggugcagagcu

SEQ ID NO: 2297709 - RNA, 19 nt, Artificial Sequence
  Description of Artificial Sequence: Synthetic oligonucleotide
  Antisense strand to SEQ ID NO: 2297708
agcucugcaccaaucacaa

SEQ ID NO: 2297710 - RNA, 19 nt, Artificial Sequence
  Description of Artificial Sequence: Synthetic oligonucleotide
  Sense strand starting at position 2739 of SEQ ID NO: 1884861
gugcccugggccuaugauu

SEQ ID NO: 2297711 - RNA, 19 nt, Artificial Sequence
  Description of Artificial Sequence: Synthetic oligonucleotide
  Antisense strand to SEQ ID NO: 2297710
aaucauaggcccagggcac

SEQ ID NO: 2297712 - RNA, 19 nt, Artificial Sequence
  Description of Artificial Sequence: Synthetic oligonucleotide
  Sense strand starting at position 2747 of SEQ ID NO: 1884861
ggccuaugauugguacaga

SEQ ID NO: 2297713 - RNA, 19 nt, Artificial Sequence
  Description of Artificial Sequence: Synthetic oligonucleotide
  Antisense strand to SEQ ID NO: 2297712
ucuguaccaaucauaggcc

SEQ ID NO: 2297714 - RNA, 19 nt, Artificial Sequence
  Description of Artificial Sequence: Synthetic oligonucleotide
  Sense strand starting at position 2943 of SEQ ID NO: 1884861
gcugaaggcccagauauga

SEQ ID NO: 2297715 - RNA, 19 nt, Artificial Sequence
  Description of Artificial Sequence: Synthetic oligonucleotide
  Antisense strand to SEQ ID NO: 2297714
ucauaucugggccuucagc

SEQ ID NO: 2297716 - RNA, 19 nt, Artificial Sequence
  Description of Artificial Sequence: Synthetic oligonucleotide
  Sense strand starting at position 3743 of SEQ ID NO: 1884861
gcagcauaugaguauccau

SEQ ID NO: 2297717 - RNA, 19 nt, Artificial Sequence
  Description of Artificial Sequence: Synthetic oligonucleotide
  Antisense strand to SEQ ID NO: 2297716
auggauacucauaugcugc

SEQ ID NO: 2297718 - RNA, 19 nt, Artificial Sequence
  Description of Artificial Sequence: Synthetic oligonucleotide
  Sense strand starting at position 3746 of SEQ ID NO: 1884861
gcauaugaguauccaugag

SEQ ID NO: 2297719 - RNA, 19 nt, Artificial Sequence
  Description of Artificial Sequence: Synthetic oligonucleotide
  Antisense strand to SEQ ID NO: 2297718
cucauggauacucauaugc

SEQ ID NO: 2297720 - RNA, 19 nt, Artificial Sequence
  Description of Artificial Sequence: Synthetic oligonucleotide
  Sense strand starting at position 3835 of SEQ ID NO: 1884861
gugugugacaccuauaagu

SEQ ID NO: 2297721 - RNA, 19 nt, Artificial Sequence
  Description of Artificial Sequence: Synthetic oligonucleotide
  Antisense strand to SEQ ID NO: 2297720
acuuauaggugucacacac

SEQ ID NO: 2297722 - RNA, 19 nt, Artificial Sequence
  Description of Artificial Sequence: Synthetic oligonucleotide
  Sense strand starting at position 3837 of SEQ ID NO: 1884861
gugugacaccuauaaguac

SEQ ID NO: 2297723 - RNA, 19 nt, Artificial Sequence
  Description of Artificial Sequence: Synthetic oligonucleotide
  Antisense strand to SEQ ID NO: 2297722
guacuuauaggugucacac

SEQ ID NO: 2297724 - RNA, 19 nt, Artificial Sequence
  Description of Artificial Sequence: Synthetic oligonucleotide
  Sense strand starting at position 3982 of SEQ ID NO: 1884861
gcgggaaugguuuaauaca

SEQ ID NO: 2297725 - RNA, 19 nt, Artificial Sequence
  Description of Artificial Sequence: Synthetic oligonucleotide
  Antisense strand to SEQ ID NO: 2297724
uguauuaaaccauucccgc

SEQ ID NO: 2297726 - RNA, 19 nt, Artificial Sequence
  Description of Artificial Sequence: Synthetic oligonucleotide
  Sense strand starting at position 112 of SEQ ID NO: 1884862
cuuuccucugccugaaaug

SEQ ID NO: 2297727 - RNA, 19 nt, Artificial Sequence
  Description of Artificial Sequence: Synthetic oligonucleotide
  Antisense strand to SEQ ID NO: 2297726
cauuucaggcagaggaaag

SEQ ID NO: 2297728 - RNA, 19 nt, Artificial Sequence
  Description of Artificial Sequence: Synthetic oligonucleotide
  Sense strand starting at position 941 of SEQ ID NO: 1884862
cuccuaggucguuugcuua

SEQ ID NO: 2297729 - RNA, 19 nt, Artificial Sequence
  Description of Artificial Sequence: Synthetic oligonucleotide
  Antisense strand to SEQ ID NO: 2297728
uaagcaaacgaccuaggag

SEQ ID NO: 2297730 - RNA, 19 nt, Artificial Sequence
  Description of Artificial Sequence: Synthetic oligonucleotide
  Sense strand starting at position 948 of SEQ ID NO: 1884862
gucguuugcuuauuuauua

SEQ ID NO: 2297731 - RNA, 19 nt, Artificial Sequence
  Description of Artificial Sequence: Synthetic oligonucleotide
  Antisense strand to SEQ ID NO: 2297730
uaauaaauaagcaaacgac

SEQ ID NO: 2297732 - RNA, 19 nt, Artificial Sequence
  Description of Artificial Sequence: Synthetic oligonucleotide
  Sense strand starting at position 1033 of SEQ ID NO: 1884862
auuggaauuugugucuguu

SEQ ID NO: 2297733 - RNA, 19 nt, Artificial Sequence
  Description of Artificial Sequence: Synthetic oligonucleotide
  Antisense strand to SEQ ID NO: 2297732
aacagacacaaauuccaau

SEQ ID NO: 2297734 - RNA, 19 nt, Artificial Sequence
  Description of Artificial Sequence: Synthetic oligonucleotide
  Sense strand starting at position 1060 of SEQ ID NO: 1884862
uguugacucccagggcuua

SEQ ID NO: 2297735 - RNA, 19 nt, Artificial Sequence
  Description of Artificial Sequence: Synthetic oligonucleotide
  Antisense strand to SEQ ID NO: 2297734
uaagcccugggagucaaca

SEQ ID NO: 2297736 - RNA, 19 nt, Artificial Sequence
  Description of Artificial Sequence: Synthetic oligonucleotide
  Sense strand starting at position 1409 of SEQ ID NO: 1884862
acaaguacaccugggaauu

SEQ ID NO: 2297737 - RNA, 19 nt, Artificial Sequence
  Description of Artificial Sequence: Synthetic oligonucleotide
  Antisense strand to SEQ ID NO: 2297736
aauucccagguguacuugu

SEQ ID NO: 2297738 - RNA, 19 nt, Artificial Sequence
  Description of Artificial Sequence: Synthetic oligonucleotide
  Sense strand starting at position 1606 of SEQ ID NO: 1884862
aaggcugaccgugauggaa

SEQ ID NO: 2297739 - RNA, 19 nt, Artificial Sequence
  Description of Artificial Sequence: Synthetic oligonucleotide
  Antisense strand to SEQ ID NO: 2297738
uuccaucacggucagccuu

SEQ ID NO: 2297740 - RNA, 19 nt, Artificial Sequence
  Description of Artificial Sequence: Synthetic oligonucleotide
  Sense strand starting at position 1810 of SEQ ID NO: 1884862
ggaaauguauuaguguauu

SEQ ID NO: 2297741 - RNA, 19 nt, Artificial Sequence
  Description of Artificial Sequence: Synthetic oligonucleotide
  Antisense strand to SEQ ID NO: 2297740
aauacacuaauacauuucc

SEQ ID NO: 2297742 - RNA, 19 nt, Artificial Sequence
  Description of Artificial Sequence: Synthetic oligonucleotide
  Sense strand starting at position 2032 of SEQ ID NO: 1884862
gagcucuaucacgagaaua

SEQ ID NO: 2297743 - RNA, 19 nt, Artificial Sequence
  Description of Artificial Sequence: Synthetic oligonucleotide
  Antisense strand to SEQ ID NO: 2297742
uauucucgugauagagcuc

SEQ ID NO: 2297744 - RNA, 19 nt, Artificial Sequence
  Description of Artificial Sequence: Synthetic oligonucleotide
  Sense strand starting at position 2034 of SEQ ID NO: 1884862
gcucuaucacgagaauagc

SEQ ID NO: 2297745 - RNA, 19 nt, Artificial Sequence
  Description of Artificial Sequence: Synthetic oligonucleotide
  Antisense strand to SEQ ID NO: 2297744
gcuauucucgugauagagc

SEQ ID NO: 2297746 - RNA, 19 nt, Artificial Sequence
  Description of Artificial Sequence: Synthetic oligonucleotide
  Sense strand starting at position 2121 of SEQ ID NO: 1884862
ggaauacaauuggagauga

SEQ ID NO: 2297747 - RNA, 19 nt, Artificial Sequence
  Description of Artificial Sequence: Synthetic oligonucleotide
  Antisense strand to SEQ ID NO: 2297746
ucaucuccaauuguauucc

SEQ ID NO: 2297748 - RNA, 19 nt, Artificial Sequence
  Description of Artificial Sequence: Synthetic oligonucleotide
  Sense strand starting at position 2174 of SEQ ID NO: 1884862
uagccaagucaagauuguu

SEQ ID NO: 2297749 - RNA, 19 nt, Artificial Sequence
  Description of Artificial Sequence: Synthetic oligonucleotide
  Antisense strand to SEQ ID NO: 2297748
aacaaucuugacuuggcua

SEQ ID NO: 2297750 - RNA, 19 nt, Artificial Sequence
  Description of Artificial Sequence: Synthetic oligonucleotide
  Sense strand starting at position 2214 of SEQ ID NO: 1884862
gugaauuuacugugugcca

SEQ ID NO: 2297751 - RNA, 19 nt, Artificial Sequence
  Description of Artificial Sequence: Synthetic oligonucleotide
  Antisense strand to SEQ ID NO: 2297750
uggcacacaguaaauucac

SEQ ID NO: 2297752 - RNA, 19 nt, Artificial Sequence
  Description of Artificial Sequence: Synthetic oligonucleotide
  Sense strand starting at position 2290 of SEQ ID NO: 1884862
cuuuauggagccgauauua

SEQ ID NO: 2297753 - RNA, 19 nt, Artificial Sequence
  Description of Artificial Sequence: Synthetic oligonucleotide
  Antisense strand to SEQ ID NO: 2297752
uaauaucggcuccauaaag

SEQ ID NO: 2297754 - RNA, 19 nt, Artificial Sequence
  Description of Artificial Sequence: Synthetic oligonucleotide
  Sense strand starting at position 2317 of SEQ ID NO: 1884862
gagacaagucccuaacgca

SEQ ID NO: 2297755 - RNA, 19 nt, Artificial Sequence
  Description of Artificial Sequence: Synthetic oligonucleotide
  Antisense strand to SEQ ID NO: 2297754
ugcguuagggacuugucuc

SEQ ID NO: 2297756 - RNA, 19 nt, Artificial Sequence
  Description of Artificial Sequence: Synthetic oligonucleotide
  Sense strand starting at position 2324 of SEQ ID NO: 1884862
gucccuaacgcacaaauaa

SEQ ID NO: 2297757 - RNA, 19 nt, Artificial Sequence
  Description of Artificial Sequence: Synthetic oligonucleotide
  Antisense strand to SEQ ID NO: 2297756
uuauuugugcguuagggac

SEQ ID NO: 2297758 - RNA, 19 nt, Artificial Sequence
  Description of Artificial Sequence: Synthetic oligonucleotide
  Sense strand starting at position 2365 of SEQ ID NO: 1884862
uaagguaagugcccugaaa

SEQ ID NO: 2297759 - RNA, 19 nt, Artificial Sequence
  Description of Artificial Sequence: Synthetic oligonucleotide
  Antisense strand to SEQ ID NO: 2297758
uuucagggcacuuaccuua

SEQ ID NO: 2297760 - RNA, 19 nt, Artificial Sequence
  Description of Artificial Sequence: Synthetic oligonucleotide
  Sense strand starting at position 2367 of SEQ ID NO: 1884862
agguaagugcccugaaaga

SEQ ID NO: 2297761 - RNA, 19 nt, Artificial Sequence
  Description of Artificial Sequence: Synthetic oligonucleotide
  Antisense strand to SEQ ID NO: 2297760
ucuuucagggcacuuaccu

SEQ ID NO: 2297762 - RNA, 19 nt, Artificial Sequence
  Description of Artificial Sequence: Synthetic oligonucleotide
  Sense strand starting at position 2468 of SEQ ID NO: 1884862
cugaauuccucucccagga

SEQ ID NO: 2297763 - RNA, 19 nt, Artificial Sequence
  Description of Artificial Sequence: Synthetic oligonucleotide
  Antisense strand to SEQ ID NO: 2297762
uccugggagaggaauucag

SEQ ID NO: 2297764 - RNA, 19 nt, Artificial Sequence
  Description of Artificial Sequence: Synthetic oligonucleotide
  Sense strand starting at position 2600 of SEQ ID NO: 1884862
auguuugcucuguaguaaa

SEQ ID NO: 2297765 - RNA, 19 nt, Artificial Sequence
  Description of Artificial Sequence: Synthetic oligonucleotide
  Antisense strand to SEQ ID NO: 2297764
uuuacuacagagcaaacau

SEQ ID NO: 2297766 - RNA, 19 nt, Artificial Sequence
  Description of Artificial Sequence: Synthetic oligonucleotide
  Sense strand starting at position 2692 of SEQ ID NO: 1884862
uccucugucccuuagaguu

SEQ ID NO: 2297767 - RNA, 19 nt, Artificial Sequence
  Description of Artificial Sequence: Synthetic oligonucleotide
  Antisense strand to SEQ ID NO: 2297766
aacucuaagggacagagga

SEQ ID NO: 2297768 - RNA, 19 nt, Artificial Sequence
  Description of Artificial Sequence: Synthetic oligonucleotide
  Sense strand starting at position 2700 of SEQ ID NO: 1884862
cccuuagaguuauuauaag

SEQ ID NO: 2297769 - RNA, 19 nt, Artificial Sequence
  Description of Artificial Sequence: Synthetic oligonucleotide
  Antisense strand to SEQ ID NO: 2297768
cuuauaauaacucuaaggg

SEQ ID NO: 2297770 - RNA, 19 nt, Artificial Sequence
  Description of Artificial Sequence: Synthetic oligonucleotide
  Sense strand starting at position 2728 of SEQ ID NO: 1884862
agauaauagagauguagcu

SEQ ID NO: 2297771 - RNA, 19 nt, Artificial Sequence
  Description of Artificial Sequence: Synthetic oligonucleotide
  Antisense strand to SEQ ID NO: 2297770
agcuacaucucuauuaucu

SEQ ID NO: 2297772 - RNA, 19 nt, Artificial Sequence
  Description of Artificial Sequence: Synthetic oligonucleotide
  Sense strand starting at position 2759 of SEQ ID NO: 1884862
gcuggcaaauagucaauaa

SEQ ID NO: 2297773 - RNA, 19 nt, Artificial Sequence
  Description of Artificial Sequence: Synthetic oligonucleotide
  Antisense strand to SEQ ID NO: 2297772
uuauugacuauuugccagc

SEQ ID NO: 2297774 - RNA, 19 nt, Artificial Sequence
  Description of Artificial Sequence: Synthetic oligonucleotide
  Sense strand starting at position 2763 of SEQ ID NO: 1884862
gcaaauagucaauaaguag

SEQ ID NO: 2297775 - RNA, 19 nt, Artificial Sequence
  Description of Artificial Sequence: Synthetic oligonucleotide
  Antisense strand to SEQ ID NO: 2297774
cuacuuauugacuauuugc

SEQ ID NO: 2297776 - RNA, 19 nt, Artificial Sequence
  Description of Artificial Sequence: Synthetic oligonucleotide
  Sense strand starting at position 2770 of SEQ ID NO: 1884862
gucaauaaguagucaucau

SEQ ID NO: 2297777 - RNA, 19 nt, Artificial Sequence
  Description of Artificial Sequence: Synthetic oligonucleotide
  Antisense strand to SEQ ID NO: 2297776
augaugacuacuuauugac

SEQ ID NO: 2297778 - RNA, 19 nt, Artificial Sequence
  Description of Artificial Sequence: Synthetic oligonucleotide
  Sense strand starting at position 2774 of SEQ ID NO: 1884862
auaaguagucaucauuguu

SEQ ID NO: 2297779 - RNA, 19 nt, Artificial Sequence
  Description of Artificial Sequence: Synthetic oligonucleotide
  Antisense strand to SEQ ID NO: 2297778
aacaaugaugacuacuuau

SEQ ID NO: 2297780 - RNA, 19 nt, Artificial Sequence
  Description of Artificial Sequence: Synthetic oligonucleotide
  Sense strand starting at position 2790 of SEQ ID NO: 1884862
guuuaaaggcucugagaag

SEQ ID NO: 2297781 - RNA, 19 nt, Artificial Sequence
  Description of Artificial Sequence: Synthetic oligonucleotide
  Antisense strand to SEQ ID NO: 2297780
cuucucagagccuuuaaac

SEQ ID NO: 2297782 - RNA, 19 nt, Artificial Sequence
  Description of Artificial Sequence: Synthetic oligonucleotide
  Sense strand starting at position 2840 of SEQ ID NO: 1884862
ucucuuguuggcuacagaa

SEQ ID NO: 2297783 - RNA, 19 nt, Artificial Sequence
  Description of Artificial Sequence: Synthetic oligonucleotide
  Antisense strand to SEQ ID NO: 2297782
uucuguagccaacaagaga

SEQ ID NO: 2297784 - RNA, 19 nt, Artificial Sequence
  Description of Artificial Sequence: Synthetic oligonucleotide
  Sense strand starting at position 3295 of SEQ ID NO: 1884862
cuaauagaacucugguuau

SEQ ID NO: 2297785 - RNA, 19 nt, Artificial Sequence
  Description of Artificial Sequence: Synthetic oligonucleotide
  Antisense strand to SEQ ID NO: 2297784
auaaccagaguucuauuag

SEQ ID NO: 2297786 - RNA, 19 nt, Artificial Sequence
  Description of Artificial Sequence: Synthetic oligonucleotide
  Sense strand starting at position 3298 of SEQ ID NO: 1884862
auagaacucugguuauguu

SEQ ID NO: 2297787 - RNA, 19 nt, Artificial Sequence
  Description of Artificial Sequence: Synthetic oligonucleotide
  Antisense strand to SEQ ID NO: 2297786
aacauaaccagaguucuau

SEQ ID NO: 2297788 - RNA, 19 nt, Artificial Sequence
  Description of Artificial Sequence: Synthetic oligonucleotide
  Sense strand starting at position 3308 of SEQ ID NO: 1884862
gguuauguucaggauuagg

SEQ ID NO: 2297789 - RNA, 19 nt, Artificial Sequence
  Description of Artificial Sequence: Synthetic oligonucleotide
  Antisense strand to SEQ ID NO: 2297788
ccuaauccugaacauaacc

SEQ ID NO: 2297790 - RNA, 19 nt, Artificial Sequence
  Description of Artificial Sequence: Synthetic oligonucleotide
  Sense strand starting at position 3326 of SEQ ID NO: 1884862
gccaaagaaccuuggaugu

SEQ ID NO: 2297791 - RNA, 19 nt, Artificial Sequence
  Description of Artificial Sequence: Synthetic oligonucleotide
  Antisense strand to SEQ ID NO: 2297790
acauccaagguucuuuggc

SEQ ID NO: 2297792 - RNA, 19 nt, Artificial Sequence
  Description of Artificial Sequence: Synthetic oligonucleotide
  Sense strand starting at position 3353 of SEQ ID NO: 1884862
guaggucagacuuggucua

SEQ ID NO: 2297793 - RNA, 19 nt, Artificial Sequence
  Description of Artificial Sequence: Synthetic oligonucleotide
  Antisense strand to SEQ ID NO: 2297792
uagaccaagucugaccuac

SEQ ID NO: 2297794 - RNA, 19 nt, Artificial Sequence
  Description of Artificial Sequence: Synthetic oligonucleotide
  Sense strand starting at position 3355 of SEQ ID NO: 1884862
aggucagacuuggucuaga

SEQ ID NO: 2297795 - RNA, 19 nt, Artificial Sequence
  Description of Artificial Sequence: Synthetic oligonucleotide
  Antisense strand to SEQ ID NO: 2297794
ucuagaccaagucugaccu

SEQ ID NO: 2297796 - RNA, 19 nt, Artificial Sequence
  Description of Artificial Sequence: Synthetic oligonucleotide
  Sense strand starting at position 3358 of SEQ ID NO: 1884862
ucagacuuggucuagaugu

SEQ ID NO: 2297797 - RNA, 19 nt, Artificial Sequence
  Description of Artificial Sequence: Synthetic oligonucleotide
  Antisense strand to SEQ ID NO: 2297796
acaucuagaccaagucuga

SEQ ID NO: 2297798 - RNA, 19 nt, Artificial Sequence
  Description of Artificial Sequence: Synthetic oligonucleotide
  Sense strand starting at position 3395 of SEQ ID NO: 1884862
uggccagugagauguauga

SEQ ID NO: 2297799 - RNA, 19 nt, Artificial Sequence
  Description of Artificial Sequence: Synthetic oligonucleotide
  Antisense strand to SEQ ID NO: 2297798
ucauacaucucacuggcca

SEQ ID NO: 2297800 - RNA, 19 nt, Artificial Sequence
  Description of Artificial Sequence: Synthetic oligonucleotide
  Sense strand starting at position 3397 of SEQ ID NO: 1884862
gccagugagauguaugaaa

SEQ ID NO: 2297801 - RNA, 19 nt, Artificial Sequence
  Description of Artificial Sequence: Synthetic oligonucleotide
  Antisense strand to SEQ ID NO: 2297800
uuucauacaucucacuggc

SEQ ID NO: 2297802 - RNA, 19 nt, Artificial Sequence
  Description of Artificial Sequence: Synthetic oligonucleotide
  Sense strand starting at position 3437 of SEQ ID NO: 1884862
ugaagauauuguccuccau

SEQ ID NO: 2297803 - RNA, 19 nt, Artificial Sequence
  Description of Artificial Sequence: Synthetic oligonucleotide
  Antisense strand to SEQ ID NO: 2297802
auggaggacaauaucuuca

SEQ ID NO: 2297804 - RNA, 19 nt, Artificial Sequence
  Description of Artificial Sequence: Synthetic oligonucleotide
  Sense strand starting at position 3813 of SEQ ID NO: 1884862
gucuaaauauucucugguu

SEQ ID NO: 2297805 - RNA, 19 nt, Artificial Sequence
  Description of Artificial Sequence: Synthetic oligonucleotide
  Antisense strand to SEQ ID NO: 2297804
aaccagagaauauuuagac

SEQ ID NO: 2297806 - RNA, 19 nt, Artificial Sequence
  Description of Artificial Sequence: Synthetic oligonucleotide
  Sense strand starting at position 6 of SEQ ID NO: 1884863
ggaaggauggugugaaguu

SEQ ID NO: 2297807 - RNA, 19 nt, Artificial Sequence
  Description of Artificial Sequence: Synthetic oligonucleotide
  Antisense strand to SEQ ID NO: 2297806
aacuucacaccauccuucc

SEQ ID NO: 2297808 - RNA, 19 nt, Artificial Sequence
  Description of Artificial Sequence: Synthetic oligonucleotide
  Sense strand starting at position 25 of SEQ ID NO: 1884863
ucuacagacuuucugguaa

SEQ ID NO: 2297809 - RNA, 19 nt, Artificial Sequence
  Description of Artificial Sequence: Synthetic oligonucleotide
  Antisense strand to SEQ ID NO: 2297808
uuaccagaaagucuguaga

SEQ ID NO: 2297810 - RNA, 19 nt, Artificial Sequence
  Description of Artificial Sequence: Synthetic oligonucleotide
  Sense strand starting at position 33 of SEQ ID NO: 1884863
cuuucugguaagugauuga

SEQ ID NO: 2297811 - RNA, 19 nt, Artificial Sequence
  Description of Artificial Sequence: Synthetic oligonucleotide
  Antisense strand to SEQ ID NO: 2297810
ucaaucacuuaccagaaag

SEQ ID NO: 2297812 - RNA, 19 nt, Artificial Sequence
  Description of Artificial Sequence: Synthetic oligonucleotide
  Sense strand starting at position 36 of SEQ ID NO: 1884863
ucugguaagugauugauag

SEQ ID NO: 2297813 - RNA, 19 nt, Artificial Sequence
  Description of Artificial Sequence: Synthetic oligonucleotide
  Antisense strand to SEQ ID NO: 2297812
cuaucaaucacuuaccaga

SEQ ID NO: 2297814 - RNA, 19 nt, Artificial Sequence
  Description of Artificial Sequence: Synthetic oligonucleotide
  Sense strand starting at position 37 of SEQ ID NO: 1884863
cugguaagugauugauaga

SEQ ID NO: 2297815 - RNA, 19 nt, Artificial Sequence
  Description of Artificial Sequence: Synthetic oligonucleotide
  Antisense strand to SEQ ID NO: 2297814
ucuaucaaucacuuaccag

SEQ ID NO: 2297816 - RNA, 19 nt, Artificial Sequence
  Description of Artificial Sequence: Synthetic oligonucleotide
  Sense strand starting at position 44 of SEQ ID NO: 1884863
gugauugauagaugaguuu

SEQ ID NO: 2297817 - RNA, 19 nt, Artificial Sequence
  Description of Artificial Sequence: Synthetic oligonucleotide
  Antisense strand to SEQ ID NO: 2297816
aaacucaucuaucaaucac

SEQ ID NO: 2297818 - RNA, 19 nt, Artificial Sequence
  Description of Artificial Sequence: Synthetic oligonucleotide
  Sense strand starting at position 86 of SEQ ID NO: 1884863
ugaguuuaugcuuagugau

SEQ ID NO: 2297819 - RNA, 19 nt, Artificial Sequence
  Description of Artificial Sequence: Synthetic oligonucleotide
  Antisense strand to SEQ ID NO: 2297818
aucacuaagcauaaacuca

SEQ ID NO: 2297820 - RNA, 19 nt, Artificial Sequence
  Description of Artificial Sequence: Synthetic oligonucleotide
  Sense strand starting at position 92 of SEQ ID NO: 1884863
uaugcuuagugauugauag

SEQ ID NO: 2297821 - RNA, 19 nt, Artificial Sequence
  Description of Artificial Sequence: Synthetic oligonucleotide
  Antisense strand to SEQ ID NO: 2297820
cuaucaaucacuaagcaua

SEQ ID NO: 2297822 - RNA, 19 nt, Artificial Sequence
  Description of Artificial Sequence: Synthetic oligonucleotide
  Sense strand starting at position 94 of SEQ ID NO: 1884863
ugcuuagugauugauaggu

SEQ ID NO: 2297823 - RNA, 19 nt, Artificial Sequence
  Description of Artificial Sequence: Synthetic oligonucleotide
  Antisense strand to SEQ ID NO: 2297822
accuaucaaucacuaagca

SEQ ID NO: 2297824 - RNA, 19 nt, Artificial Sequence
  Description of Artificial Sequence: Synthetic oligonucleotide
  Sense strand starting at position 98 of SEQ ID NO: 1884863
uagugauugauaggugagu

SEQ ID NO: 2297825 - RNA, 19 nt, Artificial Sequence
  Description of Artificial Sequence: Synthetic oligonucleotide
  Antisense strand to SEQ ID NO: 2297824
acucaccuaucaaucacua

SEQ ID NO: 2297826 - RNA, 19 nt, Artificial Sequence
  Description of Artificial Sequence: Synthetic oligonucleotide
  Sense strand starting at position 99 of SEQ ID NO: 1884863
agugauugauaggugaguu

SEQ ID NO: 2297827 - RNA, 19 nt, Artificial Sequence
  Description of Artificial Sequence: Synthetic oligonucleotide
  Antisense strand to SEQ ID NO: 2297826
aacucaccuaucaaucacu

SEQ ID NO: 2297828 - RNA, 19 nt, Artificial Sequence
  Description of Artificial Sequence: Synthetic oligonucleotide
  Sense strand starting at position 100 of SEQ ID NO: 1884863
gugauugauaggugaguuu

SEQ ID NO: 2297829 - RNA, 19 nt, Artificial Sequence
  Description of Artificial Sequence: Synthetic oligonucleotide
  Antisense strand to SEQ ID NO: 2297828
aaacucaccuaucaaucac

SEQ ID NO: 2297830 - RNA, 19 nt, Artificial Sequence
  Description of Artificial Sequence: Synthetic oligonucleotide
  Sense strand starting at position 180 of SEQ ID NO: 1884863
uggaaauaguuucugaaua

SEQ ID NO: 2297831 - RNA, 19 nt, Artificial Sequence
  Description of Artificial Sequence: Synthetic oligonucleotide
  Antisense strand to SEQ ID NO: 2297830
uauucagaaacuauuucca

SEQ ID NO: 2297832 - RNA, 19 nt, Artificial Sequence
  Description of Artificial Sequence: Synthetic oligonucleotide
  Sense strand starting at position 268 of SEQ ID NO: 1884863
gaaauuguuugggucccau

SEQ ID NO: 2297833 - RNA, 19 nt, Artificial Sequence
  Description of Artificial Sequence: Synthetic oligonucleotide
  Antisense strand to SEQ ID NO: 2297832
augggacccaaacaauuuc

SEQ ID NO: 2297834 - RNA, 19 nt, Artificial Sequence
  Description of Artificial Sequence: Synthetic oligonucleotide
  Sense strand starting at position 343 of SEQ ID NO: 1884863
auuaaacucuuggccaaga

SEQ ID NO: 2297835 - RNA, 19 nt, Artificial Sequence
  Description of Artificial Sequence: Synthetic oligonucleotide
  Antisense strand to SEQ ID NO: 2297834
ucuuggccaagaguuuaau

SEQ ID NO: 2297836 - RNA, 19 nt, Artificial Sequence
  Description of Artificial Sequence: Synthetic oligonucleotide
  Sense strand starting at position 376 of SEQ ID NO: 1884863
aaauuacaucgugauagcu

SEQ ID NO: 2297837 - RNA, 19 nt, Artificial Sequence
  Description of Artificial Sequence: Synthetic oligonucleotide
  Antisense strand to SEQ ID NO: 2297836
agcuaucacgauguaauuu

SEQ ID NO: 2297838 - RNA, 19 nt, Artificial Sequence
  Description of Artificial Sequence: Synthetic oligonucleotide
  Sense strand starting at position 503 of SEQ ID NO: 1884863
aucaaagucugggcaaaga

SEQ ID NO: 2297839 - RNA, 19 nt, Artificial Sequence
  Description of Artificial Sequence: Synthetic oligonucleotide
  Antisense strand to SEQ ID NO: 2297838
ucuuugcccagacuuugau

SEQ ID NO: 2297840 - RNA, 19 nt, Artificial Sequence
  Description of Artificial Sequence: Synthetic oligonucleotide
  Sense strand starting at position 519 of SEQ ID NO: 1884863
agacaauucuaaguuguag

SEQ ID NO: 2297841 - RNA, 19 nt, Artificial Sequence
  Description of Artificial Sequence: Synthetic oligonucleotide
  Antisense strand to SEQ ID NO: 2297840
cuacaacuuagaauugucu

SEQ ID NO: 2297842 - RNA, 19 nt, Artificial Sequence
  Description of Artificial Sequence: Synthetic oligonucleotide
  Sense strand starting at position 609 of SEQ ID NO: 1884863
cugauaggguugccagaua

SEQ ID NO: 2297843 - RNA, 19 nt, Artificial Sequence
  Description of Artificial Sequence: Synthetic oligonucleotide
  Antisense strand to SEQ ID NO: 2297842
uaucuggcaacccuaucag

SEQ ID NO: 2297844 - RNA, 19 nt, Artificial Sequence
  Description of Artificial Sequence: Synthetic oligonucleotide
  Sense strand starting at position 639 of SEQ ID NO: 1884863
aauugagaaugugcaguua

SEQ ID NO: 2297845 - RNA, 19 nt, Artificial Sequence
  Description of Artificial Sequence: Synthetic oligonucleotide
  Antisense strand to SEQ ID NO: 2297844
uaacugcacauucucaauu

SEQ ID NO: 2297846 - RNA, 19 nt, Artificial Sequence
  Description of Artificial Sequence: Synthetic oligonucleotide
  Sense strand starting at position 1033 of SEQ ID NO: 1884863
gguuguguccuugcugguu

SEQ ID NO: 2297847 - RNA, 19 nt, Artificial Sequence
  Description of Artificial Sequence: Synthetic oligonucleotide
  Antisense strand to SEQ ID NO: 2297846
aaccagcaaggacacaacc

SEQ ID NO: 2297848 - RNA, 19 nt, Artificial Sequence
  Description of Artificial Sequence: Synthetic oligonucleotide
  Sense strand starting at position 1386 of SEQ ID NO: 1884863
uuaagugaucucuaagguu

SEQ ID NO: 2297849 - RNA, 19 nt, Artificial Sequence
  Description of Artificial Sequence: Synthetic oligonucleotide
  Antisense strand to SEQ ID NO: 2297848
aaccuuagagaucacuuaa

SEQ ID NO: 2297850 - RNA, 19 nt, Artificial Sequence
  Description of Artificial Sequence: Synthetic oligonucleotide
  Sense strand starting at position 1663 of SEQ ID NO: 1884863
gcgauuaucggcgccgaga

SEQ ID NO: 2297851 - RNA, 19 nt, Artificial Sequence
  Description of Artificial Sequence: Synthetic oligonucleotide
  Antisense strand to SEQ ID NO: 2297850
ucucggcgccgauaaucgc

SEQ ID NO: 2297852 - RNA, 19 nt, Artificial Sequence
  Description of Artificial Sequence: Synthetic oligonucleotide
  Sense strand starting at position 2567 of SEQ ID NO: 1884863
aguggaauuguguaagaua

SEQ ID NO: 2297853 - RNA, 19 nt, Artificial Sequence
  Description of Artificial Sequence: Synthetic oligonucleotide
  Antisense strand to SEQ ID NO: 2297852
uaucuuacacaauuccacu

SEQ ID NO: 2297854 - RNA, 19 nt, Artificial Sequence
  Description of Artificial Sequence: Synthetic oligonucleotide
  Sense strand starting at position 2575 of SEQ ID NO: 1884863
uguguaagauaauugauac

SEQ ID NO: 2297855 - RNA, 19 nt, Artificial Sequence
  Description of Artificial Sequence: Synthetic oligonucleotide
  Antisense strand to SEQ ID NO: 2297854
guaucaauuaucuuacaca

SEQ ID NO: 2297856 - RNA, 19 nt, Artificial Sequence
  Description of Artificial Sequence: Synthetic oligonucleotide
  Sense strand starting at position 2643 of SEQ ID NO: 1884863
augccaaauuuagugugua

SEQ ID NO: 2297857 - RNA, 19 nt, Artificial Sequence
  Description of Artificial Sequence: Synthetic oligonucleotide
  Antisense strand to SEQ ID NO: 2297856
uacacacuaaauuuggcau

SEQ ID NO: 2297858 - RNA, 19 nt, Artificial Sequence
  Description of Artificial Sequence: Synthetic oligonucleotide
  Sense strand starting at position 2777 of SEQ ID NO: 1884863
uagaucugguuucugauau

SEQ ID NO: 2297859 - RNA, 19 nt, Artificial Sequence
  Description of Artificial Sequence: Synthetic oligonucleotide
  Antisense strand to SEQ ID NO: 2297858
auaucagaaaccagaucua

SEQ ID NO: 2297860 - RNA, 19 nt, Artificial Sequence
  Description of Artificial Sequence: Synthetic oligonucleotide
  Sense strand starting at position 3084 of SEQ ID NO: 1884863
guacuuacaucuuugaggu

SEQ ID NO: 2297861 - RNA, 19 nt, Artificial Sequence
  Description of Artificial Sequence: Synthetic oligonucleotide
  Antisense strand to SEQ ID NO: 2297860
accucaaagauguaaguac

SEQ ID NO: 2297862 - RNA, 19 nt, Artificial Sequence
  Description of Artificial Sequence: Synthetic oligonucleotide
  Sense strand starting at position 3127 of SEQ ID NO: 1884863
aauugaaagugguuucuag

SEQ ID NO: 2297863 - RNA, 19 nt, Artificial Sequence
  Description of Artificial Sequence: Synthetic oligonucleotide
  Antisense strand to SEQ ID NO: 2297862
cuagaaaccacuuucaauu

SEQ ID NO: 2297864 - RNA, 19 nt, Artificial Sequence
  Description of Artificial Sequence: Synthetic oligonucleotide
  Sense strand starting at position 3235 of SEQ ID NO: 1884863
uaguuuggauaacuaauga

SEQ ID NO: 2297865 - RNA, 19 nt, Artificial Sequence
  Description of Artificial Sequence: Synthetic oligonucleotide
  Antisense strand to SEQ ID NO: 2297864
ucauuaguuauccaaacua

SEQ ID NO: 2297866 - RNA, 19 nt, Artificial Sequence
  Description of Artificial Sequence: Synthetic oligonucleotide
  Sense strand starting at position 3431 of SEQ ID NO: 1884863
uucugaugcucaguugaaa

SEQ ID NO: 2297867 - RNA, 19 nt, Artificial Sequence
  Description of Artificial Sequence: Synthetic oligonucleotide
  Antisense strand to SEQ ID NO: 2297866
uuucaacugagcaucagaa

SEQ ID NO: 2297868 - RNA, 19 nt, Artificial Sequence
  Description of Artificial Sequence: Synthetic oligonucleotide
  Sense strand starting at position 3549 of SEQ ID NO: 1884863
ugguuuagccuugagaaua

SEQ ID NO: 2297869 - RNA, 19 nt, Artificial Sequence
  Description of Artificial Sequence: Synthetic oligonucleotide
  Antisense strand to SEQ ID NO: 2297868
uauucucaaggcuaaacca

SEQ ID NO: 2297870 - RNA, 19 nt, Artificial Sequence
  Description of Artificial Sequence: Synthetic oligonucleotide
  Sense strand starting at position 3769 of SEQ ID NO: 1884863
ugucaaaucuugguuuaug

SEQ ID NO: 2297871 - RNA, 19 nt, Artificial Sequence
  Description of Artificial Sequence: Synthetic oligonucleotide
  Antisense strand to SEQ ID NO: 2297870
cauaaaccaagauuugaca

SEQ ID NO: 2297872 - RNA, 19 nt, Artificial Sequence
  Description of Artificial Sequence: Synthetic oligonucleotide
  Sense strand starting at position 3894 of SEQ ID NO: 1884863
uggagaaucaacgguuguu

SEQ ID NO: 2297873 - RNA, 19 nt, Artificial Sequence
  Description of Artificial Sequence: Synthetic oligonucleotide
  Antisense strand to SEQ ID NO: 2297872
aacaaccguugauucucca

SEQ ID NO: 2297874 - RNA, 19 nt, Artificial Sequence
  Description of Artificial Sequence: Synthetic oligonucleotide
  Sense strand starting at position 3897 of SEQ ID NO: 1884863
agaaucaacgguuguuaau

SEQ ID NO: 2297875 - RNA, 19 nt, Artificial Sequence
  Description of Artificial Sequence: Synthetic oligonucleotide
  Antisense strand to SEQ ID NO: 2297874
auuaacaaccguugauucu

SEQ ID NO: 2297876 - RNA, 19 nt, Artificial Sequence
  Description of Artificial Sequence: Synthetic oligonucleotide
  Sense strand starting at position 3930 of SEQ ID NO: 1884863
auaacaaauucugcuggua

SEQ ID NO: 2297877 - RNA, 19 nt, Artificial Sequence
  Description of Artificial Sequence: Synthetic oligonucleotide
  Antisense strand to SEQ ID NO: 2297876
uaccagcagaauuuguuau

SEQ ID NO: 2297878 - RNA, 19 nt, Artificial Sequence
  Description of Artificial Sequence: Synthetic oligonucleotide
  Sense strand starting at position 3933 of SEQ ID NO: 1884863
acaaauucugcugguaauu

SEQ ID NO: 2297879 - RNA, 19 nt, Artificial Sequence
  Description of Artificial Sequence: Synthetic oligonucleotide
  Antisense strand to SEQ ID NO: 2297878
aauuaccagcagaauuugu

SEQ ID NO: 2297880 - RNA, 19 nt, Artificial Sequence
  Description of Artificial Sequence: Synthetic oligonucleotide
  Sense strand starting at position 3950 of SEQ ID NO: 1884863
uuuaaacuuuaagcggaua

SEQ ID NO: 2297881 - RNA, 19 nt, Artificial Sequence
  Description of Artificial Sequence: Synthetic oligonucleotide
  Antisense strand to SEQ ID NO: 2297880
uauccgcuuaaaguuuaaa

SEQ ID NO: 2297882 - RNA, 19 nt, Artificial Sequence
  Description of Artificial Sequence: Synthetic oligonucleotide
  Sense strand starting at position 3974 of SEQ ID NO: 1884863
accagaaaugcucaauguc

SEQ ID NO: 2297883 - RNA, 19 nt, Artificial Sequence
  Description of Artificial Sequence: Synthetic oligonucleotide
  Antisense strand to SEQ ID NO: 2297882
gacauugagcauuucuggu

SEQ ID NO: 2297884 - RNA, 19 nt, Artificial Sequence
  Description of Artificial Sequence: Synthetic oligonucleotide
  Sense strand starting at position 3977 of SEQ ID NO: 1884863
agaaaugcucaauguccua

SEQ ID NO: 2297885 - RNA, 19 nt, Artificial Sequence
  Description of Artificial Sequence: Synthetic oligonucleotide
  Antisense strand to SEQ ID NO: 2297884
uaggacauugagcauuucu

SEQ ID NO: 2297886 - RNA, 19 nt, Artificial Sequence
  Description of Artificial Sequence: Synthetic oligonucleotide
  Sense strand starting at position 185 of SEQ ID NO: 1884864
gaacuucuuggagguuaga

SEQ ID NO: 2297887 - RNA, 19 nt, Artificial Sequence
  Description of Artificial Sequence: Synthetic oligonucleotide
  Antisense strand to SEQ ID NO: 2297886
ucuaaccuccaagaaguuc

SEQ ID NO: 2297888 - RNA, 19 nt, Artificial Sequence
  Description of Artificial Sequence: Synthetic oligonucleotide
  Sense strand starting at position 235 of SEQ ID NO: 1884864
guuucuuaacuaggauacu

SEQ ID NO: 2297889 - RNA, 19 nt, Artificial Sequence
  Description of Artificial Sequence: Synthetic oligonucleotide
  Antisense strand to SEQ ID NO: 2297888
aguauccuaguuaagaaac

SEQ ID NO: 2297890 - RNA, 19 nt, Artificial Sequence
  Description of Artificial Sequence: Synthetic oligonucleotide
  Sense strand starting at position 482 of SEQ ID NO: 1884864
cugugucugacucaggaau

SEQ ID NO: 2297891 - RNA, 19 nt, Artificial Sequence
  Description of Artificial Sequence: Synthetic oligonucleotide
  Antisense strand to SEQ ID NO: 2297890
auuccugagucagacacag

SEQ ID NO: 2297892 - RNA, 19 nt, Artificial Sequence
  Description of Artificial Sequence: Synthetic oligonucleotide
  Sense strand starting at position 504 of SEQ ID NO: 1884864
ugucuucugcaagaaucca

SEQ ID NO: 2297893 - RNA, 19 nt, Artificial Sequence
  Description of Artificial Sequence: Synthetic oligonucleotide
  Antisense strand to SEQ ID NO: 2297892
uggauucuugcagaagaca

SEQ ID NO: 2297894 - RNA, 19 nt, Artificial Sequence
  Description of Artificial Sequence: Synthetic oligonucleotide
  Sense strand starting at position 699 of SEQ ID NO: 1884864
aggucauagguguagcaga

SEQ ID NO: 2297895 - RNA, 19 nt, Artificial Sequence
  Description of Artificial Sequence: Synthetic oligonucleotide
  Antisense strand to SEQ ID NO: 2297894
ucugcuacaccuaugaccu

SEQ ID NO: 2297896 - RNA, 19 nt, Artificial Sequence
  Description of Artificial Sequence: Synthetic oligonucleotide
  Sense strand starting at position 712 of SEQ ID NO: 1884864
agcagagaugguuagcuau

SEQ ID NO: 2297897 - RNA, 19 nt, Artificial Sequence
  Description of Artificial Sequence: Synthetic oligonucleotide
  Antisense strand to SEQ ID NO: 2297896
auagcuaaccaucucugcu

SEQ ID NO: 2297898 - RNA, 19 nt, Artificial Sequence
  Description of Artificial Sequence: Synthetic oligonucleotide
  Sense strand starting at position 769 of SEQ ID NO: 1884864
gaaauuguagugugacaaa

SEQ ID NO: 2297899 - RNA, 19 nt, Artificial Sequence
  Description of Artificial Sequence: Synthetic oligonucleotide
  Antisense strand to SEQ ID NO: 2297898
uuugucacacuacaauuuc

SEQ ID NO: 2297900 - RNA, 19 nt, Artificial Sequence
  Description of Artificial Sequence: Synthetic oligonucleotide
  Sense strand starting at position 836 of SEQ ID NO: 1884864
gugaucaagcaauaaagcu

SEQ ID NO: 2297901 - RNA, 19 nt, Artificial Sequence
  Description of Artificial Sequence: Synthetic oligonucleotide
  Antisense strand to SEQ ID NO: 2297900
agcuuuauugcuugaucac

SEQ ID NO: 2297902 - RNA, 19 nt, Artificial Sequence
  Description of Artificial Sequence: Synthetic oligonucleotide
  Sense strand starting at position 941 of SEQ ID NO: 1884864
ucccauugccuggaauaca

SEQ ID NO: 2297903 - RNA, 19 nt, Artificial Sequence
  Description of Artificial Sequence: Synthetic oligonucleotide
  Antisense strand to SEQ ID NO: 2297902
uguauuccaggcaauggga

SEQ ID NO: 2297904 - RNA, 19 nt, Artificial Sequence
  Description of Artificial Sequence: Synthetic oligonucleotide
  Sense strand starting at position 969 of SEQ ID NO: 1884864
guaagacaucuuggaacau

SEQ ID NO: 2297905 - RNA, 19 nt, Artificial Sequence
  Description of Artificial Sequence: Synthetic oligonucleotide
  Antisense strand to SEQ ID NO: 2297904
auguuccaagaugucuuac

SEQ ID NO: 2297906 - RNA, 19 nt, Artificial Sequence
  Description of Artificial Sequence: Synthetic oligonucleotide
  Sense strand starting at position 1070 of SEQ ID NO: 1884864
aguccuggacugcaaauau

SEQ ID NO: 2297907 - RNA, 19 nt, Artificial Sequence
  Description of Artificial Sequence: Synthetic oligonucleotide
  Antisense strand to SEQ ID NO: 2297906
auauuugcaguccaggacu

SEQ ID NO: 2297908 - RNA, 19 nt, Artificial Sequence
  Description of Artificial Sequence: Synthetic oligonucleotide
  Sense strand starting at position 1134 of SEQ ID NO: 1884864
uccuauuuggcauguuuau

SEQ ID NO: 2297909 - RNA, 19 nt, Artificial Sequence
  Description of Artificial Sequence: Synthetic oligonucleotide
  Antisense strand to SEQ ID NO: 2297908
auaaacaugccaaauagga

SEQ ID NO: 2297910 - RNA, 19 nt, Artificial Sequence
  Description of Artificial Sequence: Synthetic oligonucleotide
  Sense strand starting at position 1207 of SEQ ID NO: 1884864
ggauuagaaagaugcuauu

SEQ ID NO: 2297911 - RNA, 19 nt, Artificial Sequence
  Description of Artificial Sequence: Synthetic oligonucleotide
  Antisense strand to SEQ ID NO: 2297910
aauagcaucuuucuaaucc

SEQ ID NO: 2297912 - RNA, 19 nt, Artificial Sequence
  Description of Artificial Sequence: Synthetic oligonucleotide
  Sense strand starting at position 1217 of SEQ ID NO: 1884864
gaugcuauuggugauggua

SEQ ID NO: 2297913 - RNA, 19 nt, Artificial Sequence
  Description of Artificial Sequence: Synthetic oligonucleotide
  Antisense strand to SEQ ID NO: 2297912
uaccaucaccaauagcauc

SEQ ID NO: 2297914 - RNA, 19 nt, Artificial Sequence
  Description of Artificial Sequence: Synthetic oligonucleotide
  Sense strand starting at position 1357 of SEQ ID NO: 1884864
uuacaagaaguuugaauuc

SEQ ID NO: 2297915 - RNA, 19 nt, Artificial Sequence
  Description of Artificial Sequence: Synthetic oligonucleotide
  Antisense strand to SEQ ID NO: 2297914
gaauucaaacuucuuguaa

SEQ ID NO: 2297916 - RNA, 19 nt, Artificial Sequence
  Description of Artificial Sequence: Synthetic oligonucleotide
  Sense strand starting at position 1366 of SEQ ID NO: 1884864
guuugaauuccauagucaa

SEQ ID NO: 2297917 - RNA, 19 nt, Artificial Sequence
  Description of Artificial Sequence: Synthetic oligonucleotide
  Antisense strand to SEQ ID NO: 2297916
uugacuauggaauucaaac

SEQ ID NO: 2297918 - RNA, 19 nt, Artificial Sequence
  Description of Artificial Sequence: Synthetic oligonucleotide
  Sense strand starting at position 1562 of SEQ ID NO: 1884864
auccaaugccuaugggauu

SEQ ID NO: 2297919 - RNA, 19 nt, Artificial Sequence
  Description of Artificial Sequence: Synthetic oligonucleotide
  Antisense strand to SEQ ID NO: 2297918
aaucccauaggcauuggau

SEQ ID NO: 2297920 - RNA, 19 nt, Artificial Sequence
  Description of Artificial Sequence: Synthetic oligonucleotide
  Sense strand starting at position 1680 of SEQ ID NO: 1884864
uagacaugugugcaugaca

SEQ ID NO: 2297921 - RNA, 19 nt, Artificial Sequence
  Description of Artificial Sequence: Synthetic oligonucleotide
  Antisense strand to SEQ ID NO: 2297920
ugucaugcacacaugucua

SEQ ID NO: 2297922 - RNA, 19 nt, Artificial Sequence
  Description of Artificial Sequence: Synthetic oligonucleotide
  Sense strand starting at position 1746 of SEQ ID NO: 1884864
gaaaccaugcgguaucaau

SEQ ID NO: 2297923 - RNA, 19 nt, Artificial Sequence
  Description of Artificial Sequence: Synthetic oligonucleotide
  Antisense strand to SEQ ID NO: 2297922
auugauaccgcaugguuuc

SEQ ID NO: 2297924 - RNA, 19 nt, Artificial Sequence
  Description of Artificial Sequence: Synthetic oligonucleotide
  Sense strand starting at position 1833 of SEQ ID NO: 1884864
ggauaacaguuccuaccuu

SEQ ID NO: 2297925 - RNA, 19 nt, Artificial Sequence
  Description of Artificial Sequence: Synthetic oligonucleotide
  Antisense strand to SEQ ID NO: 2297924
aagguaggaacuguuaucc

SEQ ID NO: 2297926 - RNA, 19 nt, Artificial Sequence
  Description of Artificial Sequence: Synthetic oligonucleotide
  Sense strand starting at position 2053 of SEQ ID NO: 1884864
uuugaucuggcaggaacua

SEQ ID NO: 2297927 - RNA, 19 nt, Artificial Sequence
  Description of Artificial Sequence: Synthetic oligonucleotide
  Antisense strand to SEQ ID NO: 2297926
uaguuccugccagaucaaa

SEQ ID NO: 2297928 - RNA, 19 nt, Artificial Sequence
  Description of Artificial Sequence: Synthetic oligonucleotide
  Sense strand starting at position 2093 of SEQ ID NO: 1884864
cuguauagcacuuauggga

SEQ ID NO: 2297929 - RNA, 19 nt, Artificial Sequence
  Description of Artificial Sequence: Synthetic oligonucleotide
  Antisense strand to SEQ ID NO: 2297928
ucccauaagugcuauacag

SEQ ID NO: 2297930 - RNA, 19 nt, Artificial Sequence
  Description of Artificial Sequence: Synthetic oligonucleotide
  Sense strand starting at position 2118 of SEQ ID NO: 1884864
ggcaguauaaauuggauca

SEQ ID NO: 2297931 - RNA, 19 nt, Artificial Sequence
  Description of Artificial Sequence: Synthetic oligonucleotide
  Antisense strand to SEQ ID NO: 2297930
ugauccaauuuauacugcc

SEQ ID NO: 2297932 - RNA, 19 nt, Artificial Sequence
  Description of Artificial Sequence: Synthetic oligonucleotide
  Sense strand starting at position 2601 of SEQ ID NO: 1884864
ggucuuuauggaggaucuu

SEQ ID NO: 2297933 - RNA, 19 nt, Artificial Sequence
  Description of Artificial Sequence: Synthetic oligonucleotide
  Antisense strand to SEQ ID NO: 2297932
aagauccuccauaaagacc

SEQ ID NO: 2297934 - RNA, 19 nt, Artificial Sequence
  Description of Artificial Sequence: Synthetic oligonucleotide
  Sense strand starting at position 2602 of SEQ ID NO: 1884864
gucuuuauggaggaucuuu

SEQ ID NO: 2297935 - RNA, 19 nt, Artificial Sequence
  Description of Artificial Sequence: Synthetic oligonucleotide
  Antisense strand to SEQ ID NO: 2297934
aaagauccuccauaaagac

SEQ ID NO: 2297936 - RNA, 19 nt, Artificial Sequence
  Description of Artificial Sequence: Synthetic oligonucleotide
  Sense strand starting at position 2633 of SEQ ID NO: 1884864
uggaauuggaggugaauuc

SEQ ID NO: 2297937 - RNA, 19 nt, Artificial Sequence
  Description of Artificial Sequence: Synthetic oligonucleotide
  Antisense strand to SEQ ID NO: 2297936
gaauucaccuccaauucca

SEQ ID NO: 2297938 - RNA, 19 nt, Artificial Sequence
  Description of Artificial Sequence: Synthetic oligonucleotide
  Sense strand starting at position 2705 of SEQ ID NO: 1884864
augcauguuggucacauaa

SEQ ID NO: 2297939 - RNA, 19 nt, Artificial Sequence
  Description of Artificial Sequence: Synthetic oligonucleotide
  Antisense strand to SEQ ID NO: 2297938
uuaugugaccaacaugcau

SEQ ID NO: 2297940 - RNA, 19 nt, Artificial Sequence
  Description of Artificial Sequence: Synthetic oligonucleotide
  Sense strand starting at position 2812 of SEQ ID NO: 1884864
ugugucuaagucuauacaa

SEQ ID NO: 2297941 - RNA, 19 nt, Artificial Sequence
  Description of Artificial Sequence: Synthetic oligonucleotide
  Antisense strand to SEQ ID NO: 2297940
uuguauagacuuagacaca

SEQ ID NO: 2297942 - RNA, 19 nt, Artificial Sequence
  Description of Artificial Sequence: Synthetic oligonucleotide
  Sense strand starting at position 2814 of SEQ ID NO: 1884864
ugucuaagucuauacaaug

SEQ ID NO: 2297943 - RNA, 19 nt, Artificial Sequence
  Description of Artificial Sequence: Synthetic oligonucleotide
  Antisense strand to SEQ ID NO: 2297942
cauuguauagacuuagaca

SEQ ID NO: 2297944 - RNA, 19 nt, Artificial Sequence
  Description of Artificial Sequence: Synthetic oligonucleotide
  Sense strand starting at position 2830 of SEQ ID NO: 1884864
augagaaggugacuucuuu

SEQ ID NO: 2297945 - RNA, 19 nt, Artificial Sequence
  Description of Artificial Sequence: Synthetic oligonucleotide
  Antisense strand to SEQ ID NO: 2297944
aaagaagucaccuucucau

SEQ ID NO: 2297946 - RNA, 19 nt, Artificial Sequence
  Description of Artificial Sequence: Synthetic oligonucleotide
  Sense strand starting at position 3049 of SEQ ID NO: 1884864
uuguuaugggccuagauag

SEQ ID NO: 2297947 - RNA, 19 nt, Artificial Sequence
  Description of Artificial Sequence: Synthetic oligonucleotide
  Antisense strand to SEQ ID NO: 2297946
cuaucuaggcccauaacaa

SEQ ID NO: 2297948 - RNA, 19 nt, Artificial Sequence
  Description of Artificial Sequence: Synthetic oligonucleotide
  Sense strand starting at position 3100 of SEQ ID NO: 1884864
ggaauuaguuaauccauua

SEQ ID NO: 2297949 - RNA, 19 nt, Artificial Sequence
  Description of Artificial Sequence: Synthetic oligonucleotide
  Antisense strand to SEQ ID NO: 2297948
uaauggauuaacuaauucc

SEQ ID NO: 2297950 - RNA, 19 nt, Artificial Sequence
  Description of Artificial Sequence: Synthetic oligonucleotide
  Sense strand starting at position 3207 of SEQ ID NO: 1884864
uccacauucuuggugagga

SEQ ID NO: 2297951 - RNA, 19 nt, Artificial Sequence
  Description of Artificial Sequence: Synthetic oligonucleotide
  Antisense strand to SEQ ID NO: 2297950
uccucaccaagaaugugga

SEQ ID NO: 2297952 - RNA, 19 nt, Artificial Sequence
  Description of Artificial Sequence: Synthetic oligonucleotide
  Sense strand starting at position 3212 of SEQ ID NO: 1884864
auucuuggugaggaaguua

SEQ ID NO: 2297953 - RNA, 19 nt, Artificial Sequence
  Description of Artificial Sequence: Synthetic oligonucleotide
  Antisense strand to SEQ ID NO: 2297952
uaacuuccucaccaagaau

SEQ ID NO: 2297954 - RNA, 19 nt, Artificial Sequence
  Description of Artificial Sequence: Synthetic oligonucleotide
  Sense strand starting at position 3320 of SEQ ID NO: 1884864
agagaugggcugcaggauu

SEQ ID NO: 2297955 - RNA, 19 nt, Artificial Sequence
  Description of Artificial Sequence: Synthetic oligonucleotide
  Antisense strand to SEQ ID NO: 2297954
aauccugcagcccaucucu

SEQ ID NO: 2297956 - RNA, 19 nt, Artificial Sequence
  Description of Artificial Sequence: Synthetic oligonucleotide
  Sense strand starting at position 3327 of SEQ ID NO: 1884864
ggcugcaggauuugugcaa

SEQ ID NO: 2297957 - RNA, 19 nt, Artificial Sequence
  Description of Artificial Sequence: Synthetic oligonucleotide
  Antisense strand to SEQ ID NO: 2297956
uugcacaaauccugcagcc

SEQ ID NO: 2297958 - RNA, 19 nt, Artificial Sequence
  Description of Artificial Sequence: Synthetic oligonucleotide
  Sense strand starting at position 3349 of SEQ ID NO: 1884864
ucaucucacugguuggaau

SEQ ID NO: 2297959 - RNA, 19 nt, Artificial Sequence
  Description of Artificial Sequence: Synthetic oligonucleotide
  Antisense strand to SEQ ID NO: 2297958
auuccaaccagugagauga

SEQ ID NO: 2297960 - RNA, 19 nt, Artificial Sequence
  Description of Artificial Sequence: Synthetic oligonucleotide
  Sense strand starting at position 3803 of SEQ ID NO: 1884864
gauuuagccucauggauuu

SEQ ID NO: 2297961 - RNA, 19 nt, Artificial Sequence
  Description of Artificial Sequence: Synthetic oligonucleotide
  Antisense strand to SEQ ID NO: 2297960
aaauccaugaggcuaaauc

SEQ ID NO: 2297962 - RNA, 19 nt, Artificial Sequence
  Description of Artificial Sequence: Synthetic oligonucleotide
  Sense strand starting at position 3823 of SEQ ID NO: 1884864
ugcccuaugcuauagagaa

SEQ ID NO: 2297963 - RNA, 19 nt, Artificial Sequence
  Description of Artificial Sequence: Synthetic oligonucleotide
  Antisense strand to SEQ ID NO: 2297962
uucucuauagcauagggca

SEQ ID NO: 2297964 - RNA, 19 nt, Artificial Sequence
  Description of Artificial Sequence: Synthetic oligonucleotide
  Sense strand starting at position 3907 of SEQ ID NO: 1884864
uaguuauaagcugaaguag

SEQ ID NO: 2297965 - RNA, 19 nt, Artificial Sequence
  Description of Artificial Sequence: Synthetic oligonucleotide
  Antisense strand to SEQ ID NO: 2297964
cuacuucagcuuauaacua

SEQ ID NO: 2297966 - RNA, 19 nt, Artificial Sequence
  Description of Artificial Sequence: Synthetic oligonucleotide
  Sense strand starting at position 52 of SEQ ID NO: 1884865
gggcaaacuuaaucaacau

SEQ ID NO: 2297967 - RNA, 19 nt, Artificial Sequence
  Description of Artificial Sequence: Synthetic oligonucleotide
  Antisense strand to SEQ ID NO: 2297966
auguugauuaaguuugccc

SEQ ID NO: 2297968 - RNA, 19 nt, Artificial Sequence
  Description of Artificial Sequence: Synthetic oligonucleotide
  Sense strand starting at position 198 of SEQ ID NO: 1884865
uagaguacccucuaaggua

SEQ ID NO: 2297969 - RNA, 19 nt, Artificial Sequence
  Description of Artificial Sequence: Synthetic oligonucleotide
  Antisense strand to SEQ ID NO: 2297968
uaccuuagaggguacucua

SEQ ID NO: 2297970 - RNA, 19 nt, Artificial Sequence
  Description of Artificial Sequence: Synthetic oligonucleotide
  Sense strand starting at position 206 of SEQ ID NO: 1884865
ccucuaagguagguauuaa

SEQ ID NO: 2297971 - RNA, 19 nt, Artificial Sequence
  Description of Artificial Sequence: Synthetic oligonucleotide
  Antisense strand to SEQ ID NO: 2297970
uuaauaccuaccuuagagg

SEQ ID NO: 2297972 - RNA, 19 nt, Artificial Sequence
  Description of Artificial Sequence: Synthetic oligonucleotide
  Sense strand starting at position 337 of SEQ ID NO: 1884865
gagucaaaguaaguaguau

SEQ ID NO: 2297973 - RNA, 19 nt, Artificial Sequence
  Description of Artificial Sequence: Synthetic oligonucleotide
  Antisense strand to SEQ ID NO: 2297972
auacuacuuacuuugacuc

SEQ ID NO: 2297974 - RNA, 19 nt, Artificial Sequence
  Description of Artificial Sequence: Synthetic oligonucleotide
  Sense strand starting at position 536 of SEQ ID NO: 1884865
accaucuuaugguugaaga

SEQ ID NO: 2297975 - RNA, 19 nt, Artificial Sequence
  Description of Artificial Sequence: Synthetic oligonucleotide
  Antisense strand to SEQ ID NO: 2297974
ucuucaaccauaagauggu

SEQ ID NO: 2297976 - RNA, 19 nt, Artificial Sequence
  Description of Artificial Sequence: Synthetic oligonucleotide
  Sense strand starting at position 537 of SEQ ID NO: 1884865
ccaucuuaugguugaagau

SEQ ID NO: 2297977 - RNA, 19 nt, Artificial Sequence
  Description of Artificial Sequence: Synthetic oligonucleotide
  Antisense strand to SEQ ID NO: 2297976
aucuucaaccauaagaugg

SEQ ID NO: 2297978 - RNA, 19 nt, Artificial Sequence
  Description of Artificial Sequence: Synthetic oligonucleotide
  Sense strand starting at position 591 of SEQ ID NO: 1884865
agggacuauuugcagaaga

SEQ ID NO: 2297979 - RNA, 19 nt, Artificial Sequence
  Description of Artificial Sequence: Synthetic oligonucleotide
  Antisense strand to SEQ ID NO: 2297978
ucuucugcaaauagucccu

SEQ ID NO: 2297980 - RNA, 19 nt, Artificial Sequence
  Description of Artificial Sequence: Synthetic oligonucleotide
  Sense strand starting at position 642 of SEQ ID NO: 1884865
guuguuccuccucgaauuu

SEQ ID NO: 2297981 - RNA, 19 nt, Artificial Sequence
  Description of Artificial Sequence: Synthetic oligonucleotide
  Antisense strand to SEQ ID NO: 2297980
aaauucgaggaggaacaac

SEQ ID NO: 2297982 - RNA, 19 nt, Artificial Sequence
  Description of Artificial Sequence: Synthetic oligonucleotide
  Sense strand starting at position 684 of SEQ ID NO: 1884865
gaaguagaguguuugauga

SEQ ID NO: 2297983 - RNA, 19 nt, Artificial Sequence
  Description of Artificial Sequence: Synthetic oligonucleotide
  Antisense strand to SEQ ID NO: 2297982
ucaucaaacacucuacuuc

SEQ ID NO: 2297984 - RNA, 19 nt, Artificial Sequence
  Description of Artificial Sequence: Synthetic oligonucleotide
  Sense strand starting at position 888 of SEQ ID NO: 1884865
acuggauuacagugauucu

SEQ ID NO: 2297985 - RNA, 19 nt, Artificial Sequence
  Description of Artificial Sequence: Synthetic oligonucleotide
  Antisense strand to SEQ ID NO: 2297984
agaaucacuguaauccagu

SEQ ID NO: 2297986 - RNA, 19 nt, Artificial Sequence
  Description of Artificial Sequence: Synthetic oligonucleotide
  Sense strand starting at position 1120 of SEQ ID NO: 1884865
aaaggcgaauuauugcaaa

SEQ ID NO: 2297987 - RNA, 19 nt, Artificial Sequence
  Description of Artificial Sequence: Synthetic oligonucleotide
  Antisense strand to SEQ ID NO: 2297986
uuugcaauaauucgccuuu

SEQ ID NO: 2297988 - RNA, 19 nt, Artificial Sequence
  Description of Artificial Sequence: Synthetic oligonucleotide
  Sense strand starting at position 2960 of SEQ ID NO: 1884865
gucguaggucucgcuuaaa

SEQ ID NO: 2297989 - RNA, 19 nt, Artificial Sequence
  Description of Artificial Sequence: Synthetic oligonucleotide
  Antisense strand to SEQ ID NO: 2297988
uuuaagcgagaccuacgac

SEQ ID NO: 2297990 - RNA, 19 nt, Artificial Sequence
  Description of Artificial Sequence: Synthetic oligonucleotide
  Sense strand starting at position 3060 of SEQ ID NO: 1884865
cugauaacucuugguaacu

SEQ ID NO: 2297991 - RNA, 19 nt, Artificial Sequence
  Description of Artificial Sequence: Synthetic oligonucleotide
  Antisense strand to SEQ ID NO: 2297990
aguuaccaagaguuaucag

SEQ ID NO: 2297992 - RNA, 19 nt, Artificial Sequence
  Description of Artificial Sequence: Synthetic oligonucleotide
  Sense strand starting at position 3061 of SEQ ID NO: 1884865
ugauaacucuugguaacug

SEQ ID NO: 2297993 - RNA, 19 nt, Artificial Sequence
  Description of Artificial Sequence: Synthetic oligonucleotide
  Antisense strand to SEQ ID NO: 2297992
caguuaccaagaguuauca

SEQ ID NO: 2297994 - RNA, 19 nt, Artificial Sequence
  Description of Artificial Sequence: Synthetic oligonucleotide
  Sense strand starting at position 3075 of SEQ ID NO: 1884865
aacugugguccuuagcaaa

SEQ ID NO: 2297995 - RNA, 19 nt, Artificial Sequence
  Description of Artificial Sequence: Synthetic oligonucleotide
  Antisense strand to SEQ ID NO: 2297994
uuugcuaaggaccacaguu

SEQ ID NO: 2297996 - RNA, 19 nt, Artificial Sequence
  Description of Artificial Sequence: Synthetic oligonucleotide
  Sense strand starting at position 3145 of SEQ ID NO: 1884865
auauuuauuccaggccugu

SEQ ID NO: 2297997 - RNA, 19 nt, Artificial Sequence
  Description of Artificial Sequence: Synthetic oligonucleotide
  Antisense strand to SEQ ID NO: 2297996
acaggccuggaauaaauau

SEQ ID NO: 2297998 - RNA, 19 nt, Artificial Sequence
  Description of Artificial Sequence: Synthetic oligonucleotide
  Sense strand starting at position 3237 of SEQ ID NO: 1884865
uccuucgaauccuuggaga

SEQ ID NO: 2297999 - RNA, 19 nt, Artificial Sequence
  Description of Artificial Sequence: Synthetic oligonucleotide
  Antisense strand to SEQ ID NO: 2297998
ucuccaaggauucgaagga

SEQ ID NO: 2298000 - RNA, 19 nt, Artificial Sequence
  Description of Artificial Sequence: Synthetic oligonucleotide
  Sense strand starting at position 3239 of SEQ ID NO: 1884865
cuucgaauccuuggagaca

SEQ ID NO: 2298001 - RNA, 19 nt, Artificial Sequence
  Description of Artificial Sequence: Synthetic oligonucleotide
  Antisense strand to SEQ ID NO: 2298000
ugucuccaaggauucgaag

SEQ ID NO: 2298002 - RNA, 19 nt, Artificial Sequence
  Description of Artificial Sequence: Synthetic oligonucleotide
  Sense strand starting at position 3354 of SEQ ID NO: 1884865
uugggcaauuccucauaau

SEQ ID NO: 2298003 - RNA, 19 nt, Artificial Sequence
  Description of Artificial Sequence: Synthetic oligonucleotide
  Antisense strand to SEQ ID NO: 2298002
auuaugaggaauugcccaa

SEQ ID NO: 2298004 - RNA, 19 nt, Artificial Sequence
  Description of Artificial Sequence: Synthetic oligonucleotide
  Sense strand starting at position 3355 of SEQ ID NO: 1884865
ugggcaauuccucauaauu

SEQ ID NO: 2298005 - RNA, 19 nt, Artificial Sequence
  Description of Artificial Sequence: Synthetic oligonucleotide
  Antisense strand to SEQ ID NO: 2298004
aauuaugaggaauugccca

SEQ ID NO: 2298006 - RNA, 19 nt, Artificial Sequence
  Description of Artificial Sequence: Synthetic oligonucleotide
  Sense strand starting at position 3634 of SEQ ID NO: 1884865
ugauguugaguuugggaau

SEQ ID NO: 2298007 - RNA, 19 nt, Artificial Sequence
  Description of Artificial Sequence: Synthetic oligonucleotide
  Antisense strand to SEQ ID NO: 2298006
auucccaaacucaacauca

SEQ ID NO: 2298008 - RNA, 19 nt, Artificial Sequence
  Description of Artificial Sequence: Synthetic oligonucleotide
  Sense strand starting at position 3646 of SEQ ID NO: 1884865
ugggaaugcuuggcauaau

SEQ ID NO: 2298009 - RNA, 19 nt, Artificial Sequence
  Description of Artificial Sequence: Synthetic oligonucleotide
  Antisense strand to SEQ ID NO: 2298008
auuaugccaagcauuccca

SEQ ID NO: 2298010 - RNA, 19 nt, Artificial Sequence
  Description of Artificial Sequence: Synthetic oligonucleotide
  Sense strand starting at position 3649 of SEQ ID NO: 1884865
gaaugcuuggcauaauuga

SEQ ID NO: 2298011 - RNA, 19 nt, Artificial Sequence
  Description of Artificial Sequence: Synthetic oligonucleotide
  Antisense strand to SEQ ID NO: 2298010
ucaauuaugccaagcauuc

SEQ ID NO: 2298012 - RNA, 19 nt, Artificial Sequence
  Description of Artificial Sequence: Synthetic oligonucleotide
  Sense strand starting at position 3676 of SEQ ID NO: 1884865
cuuuccaaacgucaaugaa

SEQ ID NO: 2298013 - RNA, 19 nt, Artificial Sequence
  Description of Artificial Sequence: Synthetic oligonucleotide
  Antisense strand to SEQ ID NO: 2298012
uucauugacguuuggaaag

SEQ ID NO: 2298014 - RNA, 19 nt, Artificial Sequence
  Description of Artificial Sequence: Synthetic oligonucleotide
  Sense strand starting at position 3679 of SEQ ID NO: 1884865
uccaaacgucaaugaauaa

SEQ ID NO: 2298015 - RNA, 19 nt, Artificial Sequence
  Description of Artificial Sequence: Synthetic oligonucleotide
  Antisense strand to SEQ ID NO: 2298014
uuauucauugacguuugga

SEQ ID NO: 2298016 - RNA, 19 nt, Artificial Sequence
  Description of Artificial Sequence: Synthetic oligonucleotide
  Sense strand starting at position 3716 of SEQ ID NO: 1884865
guaacuauugcagauugaa

SEQ ID NO: 2298017 - RNA, 19 nt, Artificial Sequence
  Description of Artificial Sequence: Synthetic oligonucleotide
  Antisense strand to SEQ ID NO: 2298016
uucaaucugcaauaguuac

SEQ ID NO: 2298018 - RNA, 19 nt, Artificial Sequence
  Description of Artificial Sequence: Synthetic oligonucleotide
  Sense strand starting at position 3724 of SEQ ID NO: 1884865
ugcagauugaaaggguuaa

SEQ ID NO: 2298019 - RNA, 19 nt, Artificial Sequence
  Description of Artificial Sequence: Synthetic oligonucleotide
  Antisense strand to SEQ ID NO: 2298018
uuaacccuuucaaucugca

SEQ ID NO: 2298020 - RNA, 19 nt, Artificial Sequence
  Description of Artificial Sequence: Synthetic oligonucleotide
  Sense strand starting at position 3725 of SEQ ID NO: 1884865
gcagauugaaaggguuaag

SEQ ID NO: 2298021 - RNA, 19 nt, Artificial Sequence
  Description of Artificial Sequence: Synthetic oligonucleotide
  Antisense strand to SEQ ID NO: 2298020
cuuaacccuuucaaucugc

SEQ ID NO: 2298022 - RNA, 19 nt, Artificial Sequence
  Description of Artificial Sequence: Synthetic oligonucleotide
  Sense strand starting at position 3742 of SEQ ID NO: 1884865
agaaucauaguuggcugaa

SEQ ID NO: 2298023 - RNA, 19 nt, Artificial Sequence
  Description of Artificial Sequence: Synthetic oligonucleotide
  Antisense strand to SEQ ID NO: 2298022
uucagccaacuaugauucu

SEQ ID NO: 2298024 - RNA, 19 nt, Artificial Sequence
  Description of Artificial Sequence: Synthetic oligonucleotide
  Sense strand starting at position 3743 of SEQ ID NO: 1884865
gaaucauaguuggcugaaa

SEQ ID NO: 2298025 - RNA, 19 nt, Artificial Sequence
  Description of Artificial Sequence: Synthetic oligonucleotide
  Antisense strand to SEQ ID NO: 2298024
uuucagccaacuaugauuc

SEQ ID NO: 2298026 - RNA, 19 nt, Artificial Sequence
  Description of Artificial Sequence: Synthetic oligonucleotide
  Sense strand starting at position 3744 of SEQ ID NO: 1884865
aaucauaguuggcugaaau

SEQ ID NO: 2298027 - RNA, 19 nt, Artificial Sequence
  Description of Artificial Sequence: Synthetic oligonucleotide
  Antisense strand to SEQ ID NO: 2298026
auuucagccaacuaugauu

SEQ ID NO: 2298028 - RNA, 19 nt, Artificial Sequence
  Description of Artificial Sequence: Synthetic oligonucleotide
  Sense strand starting at position 3745 of SEQ ID NO: 1884865
aucauaguuggcugaaaug

SEQ ID NO: 2298029 - RNA, 19 nt, Artificial Sequence
  Description of Artificial Sequence: Synthetic oligonucleotide
  Antisense strand to SEQ ID NO: 2298028
cauuucagccaacuaugau

SEQ ID NO: 2298030 - RNA, 19 nt, Artificial Sequence
  Description of Artificial Sequence: Synthetic oligonucleotide
  Sense strand starting at position 3754 of SEQ ID NO: 1884865
ggcugaaaugguuaagugu

SEQ ID NO: 2298031 - RNA, 19 nt, Artificial Sequence
  Description of Artificial Sequence: Synthetic oligonucleotide
  Antisense strand to SEQ ID NO: 2298030
acacuuaaccauuucagcc

SEQ ID NO: 2298032 - RNA, 19 nt, Artificial Sequence
  Description of Artificial Sequence: Synthetic oligonucleotide
  Sense strand starting at position 3757 of SEQ ID NO: 1884865
ugaaaugguuaagugucua

SEQ ID NO: 2298033 - RNA, 19 nt, Artificial Sequence
  Description of Artificial Sequence: Synthetic oligonucleotide
  Antisense strand to SEQ ID NO: 2298032
uagacacuuaaccauuuca

SEQ ID NO: 2298034 - RNA, 19 nt, Artificial Sequence
  Description of Artificial Sequence: Synthetic oligonucleotide
  Sense strand starting at position 3762 of SEQ ID NO: 1884865
ugguuaagugucuauauuc

SEQ ID NO: 2298035 - RNA, 19 nt, Artificial Sequence
  Description of Artificial Sequence: Synthetic oligonucleotide
  Antisense strand to SEQ ID NO: 2298034
gaauauagacacuuaacca

SEQ ID NO: 2298036 - RNA, 19 nt, Artificial Sequence
  Description of Artificial Sequence: Synthetic oligonucleotide
  Sense strand starting at position 3814 of SEQ ID NO: 1884865
ccaagauaauuaguaagcu

SEQ ID NO: 2298037 - RNA, 19 nt, Artificial Sequence
  Description of Artificial Sequence: Synthetic oligonucleotide
  Antisense strand to SEQ ID NO: 2298036
agcuuacuaauuaucuugg

SEQ ID NO: 2298038 - RNA, 19 nt, Artificial Sequence
  Description of Artificial Sequence: Synthetic oligonucleotide
  Sense strand starting at position 3835 of SEQ ID NO: 1884865
guauguugaauuuguuuag

SEQ ID NO: 2298039 - RNA, 19 nt, Artificial Sequence
  Description of Artificial Sequence: Synthetic oligonucleotide
  Antisense strand to SEQ ID NO: 2298038
cuaaacaaauucaacauac

SEQ ID NO: 2298040 - RNA, 19 nt, Artificial Sequence
  Description of Artificial Sequence: Synthetic oligonucleotide
  Sense strand starting at position 3939 of SEQ ID NO: 1884865
uuucuugacuuuguaagau

SEQ ID NO: 2298041 - RNA, 19 nt, Artificial Sequence
  Description of Artificial Sequence: Synthetic oligonucleotide
  Antisense strand to SEQ ID NO: 2298040
aucuuacaaagucaagaaa

SEQ ID NO: 2298042 - RNA, 19 nt, Artificial Sequence
  Description of Artificial Sequence: Synthetic oligonucleotide
  Sense strand starting at position 3949 of SEQ ID NO: 1884865
uuguaagauccuuacugua

SEQ ID NO: 2298043 - RNA, 19 nt, Artificial Sequence
  Description of Artificial Sequence: Synthetic oligonucleotide
  Antisense strand to SEQ ID NO: 2298042
uacaguaaggaucuuacaa

SEQ ID NO: 2298044 - RNA, 19 nt, Artificial Sequence
  Description of Artificial Sequence: Synthetic oligonucleotide
  Sense strand starting at position 3951 of SEQ ID NO: 1884865
guaagauccuuacuguaaa

SEQ ID NO: 2298045 - RNA, 19 nt, Artificial Sequence
  Description of Artificial Sequence: Synthetic oligonucleotide
  Antisense strand to SEQ ID NO: 2298044
uuuacaguaaggaucuuac

SEQ ID NO: 2298046 - RNA, 19 nt, Artificial Sequence
  Description of Artificial Sequence: Synthetic oligonucleotide
  Sense strand starting at position 494 of SEQ ID NO: 1884866
gggccaucauuugcugauu

SEQ ID NO: 2298047 - RNA, 19 nt, Artificial Sequence
  Description of Artificial Sequence: Synthetic oligonucleotide
  Antisense strand to SEQ ID NO: 2298046
aaucagcaaaugauggccc

SEQ ID NO: 2298048 - RNA, 19 nt, Artificial Sequence
  Description of Artificial Sequence: Synthetic oligonucleotide
  Sense strand starting at position 616 of SEQ ID NO: 1884866
auccacugauaucuaguau

SEQ ID NO: 2298049 - RNA, 19 nt, Artificial Sequence
  Description of Artificial Sequence: Synthetic oligonucleotide
  Antisense strand to SEQ ID NO: 2298048
auacuagauaucaguggau

SEQ ID NO: 2298050 - RNA, 19 nt, Artificial Sequence
  Description of Artificial Sequence: Synthetic oligonucleotide
  Sense strand starting at position 670 of SEQ ID NO: 1884866
ucaauaacgcaucaugaca

SEQ ID NO: 2298051 - RNA, 19 nt, Artificial Sequence
  Description of Artificial Sequence: Synthetic oligonucleotide
  Antisense strand to SEQ ID NO: 2298050
ugucaugaugcguuauuga

SEQ ID NO: 2298052 - RNA, 19 nt, Artificial Sequence
  Description of Artificial Sequence: Synthetic oligonucleotide
  Sense strand starting at position 711 of SEQ ID NO: 1884866
ugcaaauaucaggauugcu

SEQ ID NO: 2298053 - RNA, 19 nt, Artificial Sequence
  Description of Artificial Sequence: Synthetic oligonucleotide
  Antisense strand to SEQ ID NO: 2298052
agcaauccugauauuugca

SEQ ID NO: 2298054 - RNA, 19 nt, Artificial Sequence
  Description of Artificial Sequence: Synthetic oligonucleotide
  Sense strand starting at position 783 of SEQ ID NO: 1884866
gguauacaagacuguaaac

SEQ ID NO: 2298055 - RNA, 19 nt, Artificial Sequence
  Description of Artificial Sequence: Synthetic oligonucleotide
  Antisense strand to SEQ ID NO: 2298054
guuuacagucuuguauacc

SEQ ID NO: 2298056 - RNA, 19 nt, Artificial Sequence
  Description of Artificial Sequence: Synthetic oligonucleotide
  Sense strand starting at position 1203 of SEQ ID NO: 1884866
guguucucugcaguaugca

SEQ ID NO: 2298057 - RNA, 19 nt, Artificial Sequence
  Description of Artificial Sequence: Synthetic oligonucleotide
  Antisense strand to SEQ ID NO: 2298056
ugcauacugcagagaacac

SEQ ID NO: 2298058 - RNA, 19 nt, Artificial Sequence
  Description of Artificial Sequence: Synthetic oligonucleotide
  Sense strand starting at position 1746 of SEQ ID NO: 1884866
uggacccuucuugacgaua

SEQ ID NO: 2298059 - RNA, 19 nt, Artificial Sequence
  Description of Artificial Sequence: Synthetic oligonucleotide
  Antisense strand to SEQ ID NO: 2298058
uaucgucaagaagggucca

SEQ ID NO: 2298060 - RNA, 19 nt, Artificial Sequence
  Description of Artificial Sequence: Synthetic oligonucleotide
  Sense strand starting at position 1751 of SEQ ID NO: 1884866
ccuucuugacgauauucuu

SEQ ID NO: 2298061 - RNA, 19 nt, Artificial Sequence
  Description of Artificial Sequence: Synthetic oligonucleotide
  Antisense strand to SEQ ID NO: 2298060
aagaauaucgucaagaagg

SEQ ID NO: 2298062 - RNA, 19 nt, Artificial Sequence
  Description of Artificial Sequence: Synthetic oligonucleotide
  Sense strand starting at position 1758 of SEQ ID NO: 1884866
gacgauauucuuuaccugu

SEQ ID NO: 2298063 - RNA, 19 nt, Artificial Sequence
  Description of Artificial Sequence: Synthetic oligonucleotide
  Antisense strand to SEQ ID NO: 2298062
acagguaaagaauaucguc

SEQ ID NO: 2298064 - RNA, 19 nt, Artificial Sequence
  Description of Artificial Sequence: Synthetic oligonucleotide
  Sense strand starting at position 1944 of SEQ ID NO: 1884866
aucuuuaaaugagugucaa

SEQ ID NO: 2298065 - RNA, 19 nt, Artificial Sequence
  Description of Artificial Sequence: Synthetic oligonucleotide
  Antisense strand to SEQ ID NO: 2298064
uugacacucauuuaaagau

SEQ ID NO: 2298066 - RNA, 19 nt, Artificial Sequence
  Description of Artificial Sequence: Synthetic oligonucleotide
  Sense strand starting at position 1945 of SEQ ID NO: 1884866
ucuuuaaaugagugucaaa

SEQ ID NO: 2298067 - RNA, 19 nt, Artificial Sequence
  Description of Artificial Sequence: Synthetic oligonucleotide
  Antisense strand to SEQ ID NO: 2298066
uuugacacucauuuaaaga

SEQ ID NO: 2298068 - RNA, 19 nt, Artificial Sequence
  Description of Artificial Sequence: Synthetic oligonucleotide
  Sense strand starting at position 1983 of SEQ ID NO: 1884866
ccguuaaccgcacaauuua

SEQ ID NO: 2298069 - RNA, 19 nt, Artificial Sequence
  Description of Artificial Sequence: Synthetic oligonucleotide
  Antisense strand to SEQ ID NO: 2298068
uaaauugugcgguuaacgg

SEQ ID NO: 2298070 - RNA, 19 nt, Artificial Sequence
  Description of Artificial Sequence: Synthetic oligonucleotide
  Sense strand starting at position 2116 of SEQ ID NO: 1884866
gugugaaauccacagugac

SEQ ID NO: 2298071 - RNA, 19 nt, Artificial Sequence
  Description of Artificial Sequence: Synthetic oligonucleotide
  Antisense strand to SEQ ID NO: 2298070
gucacuguggauuucacac

SEQ ID NO: 2298072 - RNA, 19 nt, Artificial Sequence
  Description of Artificial Sequence: Synthetic oligonucleotide
  Sense strand starting at position 2176 of SEQ ID NO: 1884866
gggcuauauguguaaugga

SEQ ID NO: 2298073 - RNA, 19 nt, Artificial Sequence
  Description of Artificial Sequence: Synthetic oligonucleotide
  Antisense strand to SEQ ID NO: 2298072
uccauuacacauauagccc

SEQ ID NO: 2298074 - RNA, 19 nt, Artificial Sequence
  Description of Artificial Sequence: Synthetic oligonucleotide
  Sense strand starting at position 2181 of SEQ ID NO: 1884866
auauguguaauggauugua

SEQ ID NO: 2298075 - RNA, 19 nt, Artificial Sequence
  Description of Artificial Sequence: Synthetic oligonucleotide
  Antisense strand to SEQ ID NO: 2298074
uacaauccauuacacauau

SEQ ID NO: 2298076 - RNA, 19 nt, Artificial Sequence
  Description of Artificial Sequence: Synthetic oligonucleotide
  Sense strand starting at position 2380 of SEQ ID NO: 1884866
cgcaguuaguauuuaaagu

SEQ ID NO: 2298077 - RNA, 19 nt, Artificial Sequence
  Description of Artificial Sequence: Synthetic oligonucleotide
  Antisense strand to SEQ ID NO: 2298076
acuuuaaauacuaacugcg

SEQ ID NO: 2298078 - RNA, 19 nt, Artificial Sequence
  Description of Artificial Sequence: Synthetic oligonucleotide
  Sense strand starting at position 2391 of SEQ ID NO: 1884866
uuuaaaguuguggaguuua

SEQ ID NO: 2298079 - RNA, 19 nt, Artificial Sequence
  Description of Artificial Sequence: Synthetic oligonucleotide
  Antisense strand to SEQ ID NO: 2298078
uaaacuccacaacuuuaaa

SEQ ID NO: 2298080 - RNA, 19 nt, Artificial Sequence
  Description of Artificial Sequence: Synthetic oligonucleotide
  Sense strand starting at position 2396 of SEQ ID NO: 1884866
aguuguggaguuuaaagga

SEQ ID NO: 2298081 - RNA, 19 nt, Artificial Sequence
  Description of Artificial Sequence: Synthetic oligonucleotide
  Antisense strand to SEQ ID NO: 2298080
uccuuuaaacuccacaacu

SEQ ID NO: 2298082 - RNA, 19 nt, Artificial Sequence
  Description of Artificial Sequence: Synthetic oligonucleotide
  Sense strand starting at position 2404 of SEQ ID NO: 1884866
aguuuaaaggaauguuuga

SEQ ID NO: 2298083 - RNA, 19 nt, Artificial Sequence
  Description of Artificial Sequence: Synthetic oligonucleotide
  Antisense strand to SEQ ID NO: 2298082
ucaaacauuccuuuaaacu

SEQ ID NO: 2298084 - RNA, 19 nt, Artificial Sequence
  Description of Artificial Sequence: Synthetic oligonucleotide
  Sense strand starting at position 2414 of SEQ ID NO: 1884866
aauguuugaacucgggaga

SEQ ID NO: 2298085 - RNA, 19 nt, Artificial Sequence
  Description of Artificial Sequence: Synthetic oligonucleotide
  Antisense strand to SEQ ID NO: 2298084
ucucccgaguucaaacauu

SEQ ID NO: 2298086 - RNA, 19 nt, Artificial Sequence
  Description of Artificial Sequence: Synthetic oligonucleotide
  Sense strand starting at position 2415 of SEQ ID NO: 1884866
auguuugaacucgggagau

SEQ ID NO: 2298087 - RNA, 19 nt, Artificial Sequence
  Description of Artificial Sequence: Synthetic oligonucleotide
  Antisense strand to SEQ ID NO: 2298086
aucucccgaguucaaacau

SEQ ID NO: 2298088 - RNA, 19 nt, Artificial Sequence
  Description of Artificial Sequence: Synthetic oligonucleotide
  Sense strand starting at position 2542 of SEQ ID NO: 1884866
ccuauuucuuaggaacaag

SEQ ID NO: 2298089 - RNA, 19 nt, Artificial Sequence
  Description of Artificial Sequence: Synthetic oligonucleotide
  Antisense strand to SEQ ID NO: 2298088
cuuguuccuaagaaauagg

SEQ ID NO: 2298090 - RNA, 19 nt, Artificial Sequence
  Description of Artificial Sequence: Synthetic oligonucleotide
  Sense strand starting at position 2646 of SEQ ID NO: 1884866
ccuggauguauguggauaa

SEQ ID NO: 2298091 - RNA, 19 nt, Artificial Sequence
  Description of Artificial Sequence: Synthetic oligonucleotide
  Antisense strand to SEQ ID NO: 2298090
uuauccacauacauccagg

SEQ ID NO: 2298092 - RNA, 19 nt, Artificial Sequence
  Description of Artificial Sequence: Synthetic oligonucleotide
  Sense strand starting at position 2782 of SEQ ID NO: 1884866
uacugagacccuugaguuu

SEQ ID NO: 2298093 - RNA, 19 nt, Artificial Sequence
  Description of Artificial Sequence: Synthetic oligonucleotide
  Antisense strand to SEQ ID NO: 2298092
aaacucaagggucucagua

SEQ ID NO: 2298094 - RNA, 19 nt, Artificial Sequence
  Description of Artificial Sequence: Synthetic oligonucleotide
  Sense strand starting at position 2810 of SEQ ID NO: 1884866
cucuaaucgguuuaugaca

SEQ ID NO: 2298095 - RNA, 19 nt, Artificial Sequence
  Description of Artificial Sequence: Synthetic oligonucleotide
  Antisense strand to SEQ ID NO: 2298094
ugucauaaaccgauuagag

SEQ ID NO: 2298096 - RNA, 19 nt, Artificial Sequence
  Description of Artificial Sequence: Synthetic oligonucleotide
  Sense strand starting at position 2841 of SEQ ID NO: 1884866
guuucuggugccucgugaa

SEQ ID NO: 2298097 - RNA, 19 nt, Artificial Sequence
  Description of Artificial Sequence: Synthetic oligonucleotide
  Antisense strand to SEQ ID NO: 2298096
uucacgaggcaccagaaac

SEQ ID NO: 2298098 - RNA, 19 nt, Artificial Sequence
  Description of Artificial Sequence: Synthetic oligonucleotide
  Sense strand starting at position 2854 of SEQ ID NO: 1884866
cgugaaucaaugcagagau

SEQ ID NO: 2298099 - RNA, 19 nt, Artificial Sequence
  Description of Artificial Sequence: Synthetic oligonucleotide
  Antisense strand to SEQ ID NO: 2298098
aucucugcauugauucacg

SEQ ID NO: 2298100 - RNA, 19 nt, Artificial Sequence
  Description of Artificial Sequence: Synthetic oligonucleotide
  Sense strand starting at position 2892 of SEQ ID NO: 1884866
cgaugcuuuguugccaauu

SEQ ID NO: 2298101 - RNA, 19 nt, Artificial Sequence
  Description of Artificial Sequence: Synthetic oligonucleotide
  Antisense strand to SEQ ID NO: 2298100
aauuggcaacaaagcaucg

SEQ ID NO: 2298102 - RNA, 19 nt, Artificial Sequence
  Description of Artificial Sequence: Synthetic oligonucleotide
  Sense strand starting at position 3029 of SEQ ID NO: 1884866
uucugaugacuguaggcua

SEQ ID NO: 2298103 - RNA, 19 nt, Artificial Sequence
  Description of Artificial Sequence: Synthetic oligonucleotide
  Antisense strand to SEQ ID NO: 2298102
uagccuacagucaucagaa

SEQ ID NO: 2298104 - RNA, 19 nt, Artificial Sequence
  Description of Artificial Sequence: Synthetic oligonucleotide
  Sense strand starting at position 3032 of SEQ ID NO: 1884866
ugaugacuguaggcuaaau

SEQ ID NO: 2298105 - RNA, 19 nt, Artificial Sequence
  Description of Artificial Sequence: Synthetic oligonucleotide
  Antisense strand to SEQ ID NO: 2298104
auuuagccuacagucauca

SEQ ID NO: 2298106 - RNA, 19 nt, Artificial Sequence
  Description of Artificial Sequence: Synthetic oligonucleotide
  Sense strand starting at position 3145 of SEQ ID NO: 1884866
guccuuauggaagaugugu

SEQ ID NO: 2298107 - RNA, 19 nt, Artificial Sequence
  Description of Artificial Sequence: Synthetic oligonucleotide
  Antisense strand to SEQ ID NO: 2298106
acacaucuuccauaaggac

SEQ ID NO: 2298108 - RNA, 19 nt, Artificial Sequence
  Description of Artificial Sequence: Synthetic oligonucleotide
  Sense strand starting at position 3150 of SEQ ID NO: 1884866
uauggaagaugugugaacu

SEQ ID NO: 2298109 - RNA, 19 nt, Artificial Sequence
  Description of Artificial Sequence: Synthetic oligonucleotide
  Antisense strand to SEQ ID NO: 2298108
aguucacacaucuuccaua

SEQ ID NO: 2298110 - RNA, 19 nt, Artificial Sequence
  Description of Artificial Sequence: Synthetic oligonucleotide
  Sense strand starting at position 3158 of SEQ ID NO: 1884866
augugugaacuggagucaa

SEQ ID NO: 2298111 - RNA, 19 nt, Artificial Sequence
  Description of Artificial Sequence: Synthetic oligonucleotide
  Antisense strand to SEQ ID NO: 2298110
uugacuccaguucacacau

SEQ ID NO: 2298112 - RNA, 19 nt, Artificial Sequence
  Description of Artificial Sequence: Synthetic oligonucleotide
  Sense strand starting at position 3191 of SEQ ID NO: 1884866
uugcucuuucuccaugaga

SEQ ID NO: 2298113 - RNA, 19 nt, Artificial Sequence
  Description of Artificial Sequence: Synthetic oligonucleotide
  Antisense strand to SEQ ID NO: 2298112
ucucauggagaaagagcaa

SEQ ID NO: 2298114 - RNA, 19 nt, Artificial Sequence
  Description of Artificial Sequence: Synthetic oligonucleotide
  Sense strand starting at position 3261 of SEQ ID NO: 1884866
gugaauuagagagguuaac

SEQ ID NO: 2298115 - RNA, 19 nt, Artificial Sequence
  Description of Artificial Sequence: Synthetic oligonucleotide
  Antisense strand to SEQ ID NO: 2298114
guuaaccucucuaauucac

SEQ ID NO: 2298116 - RNA, 19 nt, Artificial Sequence
  Description of Artificial Sequence: Synthetic oligonucleotide
  Sense strand starting at position 3284 of SEQ ID NO: 1884866
auaggucuuguuuacaaga

SEQ ID NO: 2298117 - RNA, 19 nt, Artificial Sequence
  Description of Artificial Sequence: Synthetic oligonucleotide
  Antisense strand to SEQ ID NO: 2298116
ucuuguaaacaagaccuau

SEQ ID NO: 2298118 - RNA, 19 nt, Artificial Sequence
  Description of Artificial Sequence: Synthetic oligonucleotide
  Sense strand starting at position 3399 of SEQ ID NO: 1884866
gaagguauaacggaguagu

SEQ ID NO: 2298119 - RNA, 19 nt, Artificial Sequence
  Description of Artificial Sequence: Synthetic oligonucleotide
  Antisense strand to SEQ ID NO: 2298118
acuacuccguuauaccuuc

SEQ ID NO: 2298120 - RNA, 19 nt, Artificial Sequence
  Description of Artificial Sequence: Synthetic oligonucleotide
  Sense strand starting at position 3402 of SEQ ID NO: 1884866
gguauaacggaguagugau

SEQ ID NO: 2298121 - RNA, 19 nt, Artificial Sequence
  Description of Artificial Sequence: Synthetic oligonucleotide
  Antisense strand to SEQ ID NO: 2298120
aucacuacuccguuauacc

SEQ ID NO: 2298122 - RNA, 19 nt, Artificial Sequence
  Description of Artificial Sequence: Synthetic oligonucleotide
  Sense strand starting at position 3685 of SEQ ID NO: 1884866
cuuauuauuguaggacaua

SEQ ID NO: 2298123 - RNA, 19 nt, Artificial Sequence
  Description of Artificial Sequence: Synthetic oligonucleotide
  Antisense strand to SEQ ID NO: 2298122
uauguccuacaauaauaag

SEQ ID NO: 2298124 - RNA, 19 nt, Artificial Sequence
  Description of Artificial Sequence: Synthetic oligonucleotide
  Sense strand starting at position 3971 of SEQ ID NO: 1884866
agaugauucuaacuggcau

SEQ ID NO: 2298125 - RNA, 19 nt, Artificial Sequence
  Description of Artificial Sequence: Synthetic oligonucleotide
  Antisense strand to SEQ ID NO: 2298124
augccaguuagaaucaucu

SEQ ID NO: 2298126 - RNA, 19 nt, Artificial Sequence
  Description of Artificial Sequence: Synthetic oligonucleotide
  Sense strand starting at position 32 of SEQ ID NO: 1884867
ucguauuugucccucauua

SEQ ID NO: 2298127 - RNA, 19 nt, Artificial Sequence
  Description of Artificial Sequence: Synthetic oligonucleotide
  Antisense strand to SEQ ID NO: 2298126
uaaugagggacaaauacga

SEQ ID NO: 2298128 - RNA, 19 nt, Artificial Sequence
  Description of Artificial Sequence: Synthetic oligonucleotide
  Sense strand starting at position 37 of SEQ ID NO: 1884867
uuugucccucauuaaugua

SEQ ID NO: 2298129 - RNA, 19 nt, Artificial Sequence
  Description of Artificial Sequence: Synthetic oligonucleotide
  Antisense strand to SEQ ID NO: 2298128
uacauuaaugagggacaaa

SEQ ID NO: 2298130 - RNA, 19 nt, Artificial Sequence
  Description of Artificial Sequence: Synthetic oligonucleotide
  Sense strand starting at position 99 of SEQ ID NO: 1884867
augcuuuaugguggaagga

SEQ ID NO: 2298131 - RNA, 19 nt, Artificial Sequence
  Description of Artificial Sequence: Synthetic oligonucleotide
  Antisense strand to SEQ ID NO: 2298130
uccuuccaccauaaagcau

SEQ ID NO: 2298132 - RNA, 19 nt, Artificial Sequence
  Description of Artificial Sequence: Synthetic oligonucleotide
  Sense strand starting at position 249 of SEQ ID NO: 1884867
uccacaagugugugaagaa

SEQ ID NO: 2298133 - RNA, 19 nt, Artificial Sequence
  Description of Artificial Sequence: Synthetic oligonucleotide
  Antisense strand to SEQ ID NO: 2298132
uucuucacacacuugugga

SEQ ID NO: 2298134 - RNA, 19 nt, Artificial Sequence
  Description of Artificial Sequence: Synthetic oligonucleotide
  Sense strand starting at position 315 of SEQ ID NO: 1884867
aggaguuuaagucauugcu

SEQ ID NO: 2298135 - RNA, 19 nt, Artificial Sequence
  Description of Artificial Sequence: Synthetic oligonucleotide
  Antisense strand to SEQ ID NO: 2298134
agcaaugacuuaaacuccu

SEQ ID NO: 2298136 - RNA, 19 nt, Artificial Sequence
  Description of Artificial Sequence: Synthetic oligonucleotide
  Sense strand starting at position 355 of SEQ ID NO: 1884867
augacuucucugcagguca

SEQ ID NO: 2298137 - RNA, 19 nt, Artificial Sequence
  Description of Artificial Sequence: Synthetic oligonucleotide
  Antisense strand to SEQ ID NO: 2298136
ugaccugcagagaagucau

SEQ ID NO: 2298138 - RNA, 19 nt, Artificial Sequence
  Description of Artificial Sequence: Synthetic oligonucleotide
  Sense strand starting at position 721 of SEQ ID NO: 1884867
gcgagugggcugucgagau

SEQ ID NO: 2298139 - RNA, 19 nt, Artificial Sequence
  Description of Artificial Sequence: Synthetic oligonucleotide
  Antisense strand to SEQ ID NO: 2298138
aucucgacagcccacucgc

SEQ ID NO: 2298140 - RNA, 19 nt, Artificial Sequence
  Description of Artificial Sequence: Synthetic oligonucleotide
  Sense strand starting at position 938 of SEQ ID NO: 1884867
cauuaauccgauggaaaug

SEQ ID NO: 2298141 - RNA, 19 nt, Artificial Sequence
  Description of Artificial Sequence: Synthetic oligonucleotide
  Antisense strand to SEQ ID NO: 2298140
cauuuccaucggauuaaug

SEQ ID NO: 2298142 - RNA, 19 nt, Artificial Sequence
  Description of Artificial Sequence: Synthetic oligonucleotide
  Sense strand starting at position 969 of SEQ ID NO: 1884867
auaaguaagacuggagcau

SEQ ID NO: 2298143 - RNA, 19 nt, Artificial Sequence
  Description of Artificial Sequence: Synthetic oligonucleotide
  Antisense strand to SEQ ID NO: 2298142
augcuccagucuuacuuau

SEQ ID NO: 2298144 - RNA, 19 nt, Artificial Sequence
  Description of Artificial Sequence: Synthetic oligonucleotide
  Sense strand starting at position 1020 of SEQ ID NO: 1884867
guguuuaaauacccaccaa

SEQ ID NO: 2298145 - RNA, 19 nt, Artificial Sequence
  Description of Artificial Sequence: Synthetic oligonucleotide
  Antisense strand to SEQ ID NO: 2298144
uugguggguauuuaaacac

SEQ ID NO: 2298146 - RNA, 19 nt, Artificial Sequence
  Description of Artificial Sequence: Synthetic oligonucleotide
  Sense strand starting at position 1093 of SEQ ID NO: 1884867
aaagaaguccugcaaguuu

SEQ ID NO: 2298147 - RNA, 19 nt, Artificial Sequence
  Description of Artificial Sequence: Synthetic oligonucleotide
  Antisense strand to SEQ ID NO: 2298146
aaacuugcaggacuucuuu

SEQ ID NO: 2298148 - RNA, 19 nt, Artificial Sequence
  Description of Artificial Sequence: Synthetic oligonucleotide
  Sense strand starting at position 1118 of SEQ ID NO: 1884867
uguuaagagcuuugaaaua

SEQ ID NO: 2298149 - RNA, 19 nt, Artificial Sequence
  Description of Artificial Sequence: Synthetic oligonucleotide
  Antisense strand to SEQ ID NO: 2298148
uauuucaaagcucuuaaca

SEQ ID NO: 2298150 - RNA, 19 nt, Artificial Sequence
  Description of Artificial Sequence: Synthetic oligonucleotide
  Sense strand starting at position 1152 of SEQ ID NO: 1884867
cacacauagcuguaggaua

SEQ ID NO: 2298151 - RNA, 19 nt, Artificial Sequence
  Description of Artificial Sequence: Synthetic oligonucleotide
  Antisense strand to SEQ ID NO: 2298150
uauccuacagcuaugugug

SEQ ID NO: 2298152 - RNA, 19 nt, Artificial Sequence
  Description of Artificial Sequence: Synthetic oligonucleotide
  Sense strand starting at position 1154 of SEQ ID NO: 1884867
cacauagcuguaggauaaa

SEQ ID NO: 2298153 - RNA, 19 nt, Artificial Sequence
  Description of Artificial Sequence: Synthetic oligonucleotide
  Antisense strand to SEQ ID NO: 2298152
uuuauccuacagcuaugug

SEQ ID NO: 2298154 - RNA, 19 nt, Artificial Sequence
  Description of Artificial Sequence: Synthetic oligonucleotide
  Sense strand starting at position 1256 of SEQ ID NO: 1884867
guuauaaggaauuggcuaa

SEQ ID NO: 2298155 - RNA, 19 nt, Artificial Sequence
  Description of Artificial Sequence: Synthetic oligonucleotide
  Antisense strand to SEQ ID NO: 2298154
uuagccaauuccuuauaac

SEQ ID NO: 2298156 - RNA, 19 nt, Artificial Sequence
  Description of Artificial Sequence: Synthetic oligonucleotide
  Sense strand starting at position 1260 of SEQ ID NO: 1884867
uaaggaauuggcuaagcua

SEQ ID NO: 2298157 - RNA, 19 nt, Artificial Sequence
  Description of Artificial Sequence: Synthetic oligonucleotide
  Antisense strand to SEQ ID NO: 2298156
uagcuuagccaauuccuua

SEQ ID NO: 2298158 - RNA, 19 nt, Artificial Sequence
  Description of Artificial Sequence: Synthetic oligonucleotide
  Sense strand starting at position 1263 of SEQ ID NO: 1884867
ggaauuggcuaagcuaaau

SEQ ID NO: 2298159 - RNA, 19 nt, Artificial Sequence
  Description of Artificial Sequence: Synthetic oligonucleotide
  Antisense strand to SEQ ID NO: 2298158
auuuagcuuagccaauucc

SEQ ID NO: 2298160 - RNA, 19 nt, Artificial Sequence
  Description of Artificial Sequence: Synthetic oligonucleotide
  Sense strand starting at position 1324 of SEQ ID NO: 1884867
gguguuccuaaugagcaau

SEQ ID NO: 2298161 - RNA, 19 nt, Artificial Sequence
  Description of Artificial Sequence: Synthetic oligonucleotide
  Antisense strand to SEQ ID NO: 2298160
auugcucauuaggaacacc

SEQ ID NO: 2298162 - RNA, 19 nt, Artificial Sequence
  Description of Artificial Sequence: Synthetic oligonucleotide
  Sense strand starting at position 1440 of SEQ ID NO: 1884867
auggguaacuuugcagaaa

SEQ ID NO: 2298163 - RNA, 19 nt, Artificial Sequence
  Description of Artificial Sequence: Synthetic oligonucleotide
  Antisense strand to SEQ ID NO: 2298162
uuucugcaaaguuacccau

SEQ ID NO: 2298164 - RNA, 19 nt, Artificial Sequence
  Description of Artificial Sequence: Synthetic oligonucleotide
  Sense strand starting at position 1666 of SEQ ID NO: 1884867
ccauaaagcugaguaagga

SEQ ID NO: 2298165 - RNA, 19 nt, Artificial Sequence
  Description of Artificial Sequence: Synthetic oligonucleotide
  Antisense strand to SEQ ID NO: 2298164
uccuuacucagcuuuaugg

SEQ ID NO: 2298166 - RNA, 19 nt, Artificial Sequence
  Description of Artificial Sequence: Synthetic oligonucleotide
  Sense strand starting at position 1919 of SEQ ID NO: 1884867
uuuacucacccaggaagua

SEQ ID NO: 2298167 - RNA, 19 nt, Artificial Sequence
  Description of Artificial Sequence: Synthetic oligonucleotide
  Antisense strand to SEQ ID NO: 2298166
uacuuccugggugaguaaa

SEQ ID NO: 2298168 - RNA, 19 nt, Artificial Sequence
  Description of Artificial Sequence: Synthetic oligonucleotide
  Sense strand starting at position 2075 of SEQ ID NO: 1884867
gccgguagugcuaagugua

SEQ ID NO: 2298169 - RNA, 19 nt, Artificial Sequence
  Description of Artificial Sequence: Synthetic oligonucleotide
  Antisense strand to SEQ ID NO: 2298168
uacacuuagcacuaccggc

SEQ ID NO: 2298170 - RNA, 19 nt, Artificial Sequence
  Description of Artificial Sequence: Synthetic oligonucleotide
  Sense strand starting at position 2195 of SEQ ID NO: 1884867
gcucacaugggcuaauauu

SEQ ID NO: 2298171 - RNA, 19 nt, Artificial Sequence
  Description of Artificial Sequence: Synthetic oligonucleotide
  Antisense strand to SEQ ID NO: 2298170
aauauuagcccaugugagc

SEQ ID NO: 2298172 - RNA, 19 nt, Artificial Sequence
  Description of Artificial Sequence: Synthetic oligonucleotide
  Sense strand starting at position 2331 of SEQ ID NO: 1884867
ucuggugagagccaaagua

SEQ ID NO: 2298173 - RNA, 19 nt, Artificial Sequence
  Description of Artificial Sequence: Synthetic oligonucleotide
  Antisense strand to SEQ ID NO: 2298172
uacuuuggcucucaccaga

SEQ ID NO: 2298174 - RNA, 19 nt, Artificial Sequence
  Description of Artificial Sequence: Synthetic oligonucleotide
  Sense strand starting at position 2382 of SEQ ID NO: 1884867
guggaugagcuucaggaca

SEQ ID NO: 2298175 - RNA, 19 nt, Artificial Sequence
  Description of Artificial Sequence: Synthetic oligonucleotide
  Antisense strand to SEQ ID NO: 2298174
uguccugaagcucauccac

SEQ ID NO: 2298176 - RNA, 19 nt, Artificial Sequence
  Description of Artificial Sequence: Synthetic oligonucleotide
  Sense strand starting at position 2465 of SEQ ID NO: 1884867
agcuuuaaugaugaacuuu

SEQ ID NO: 2298177 - RNA, 19 nt, Artificial Sequence
  Description of Artificial Sequence: Synthetic oligonucleotide
  Antisense strand to SEQ ID NO: 2298176
aaaguucaucauuaaagcu

SEQ ID NO: 2298178 - RNA, 19 nt, Artificial Sequence
  Description of Artificial Sequence: Synthetic oligonucleotide
  Sense strand starting at position 2489 of SEQ ID NO: 1884867
agaagauauuugggagaag

SEQ ID NO: 2298179 - RNA, 19 nt, Artificial Sequence
  Description of Artificial Sequence: Synthetic oligonucleotide
  Antisense strand to SEQ ID NO: 2298178
cuucucccaaauaucuucu

SEQ ID NO: 2298180 - RNA, 19 nt, Artificial Sequence
  Description of Artificial Sequence: Synthetic oligonucleotide
  Sense strand starting at position 2490 of SEQ ID NO: 1884867
gaagauauuugggagaagu

SEQ ID NO: 2298181 - RNA, 19 nt, Artificial Sequence
  Description of Artificial Sequence: Synthetic oligonucleotide
  Antisense strand to SEQ ID NO: 2298180
acuucucccaaauaucuuc

SEQ ID NO: 2298182 - RNA, 19 nt, Artificial Sequence
  Description of Artificial Sequence: Synthetic oligonucleotide
  Sense strand starting at position 2575 of SEQ ID NO: 1884867
uuguaucuuagcguauagu

SEQ ID NO: 2298183 - RNA, 19 nt, Artificial Sequence
  Description of Artificial Sequence: Synthetic oligonucleotide
  Antisense strand to SEQ ID NO: 2298182
acuauacgcuaagauacaa

SEQ ID NO: 2298184 - RNA, 19 nt, Artificial Sequence
  Description of Artificial Sequence: Synthetic oligonucleotide
  Sense strand starting at position 2849 of SEQ ID NO: 1884867
gcagauuauguauacugaa

SEQ ID NO: 2298185 - RNA, 19 nt, Artificial Sequence
  Description of Artificial Sequence: Synthetic oligonucleotide
  Antisense strand to SEQ ID NO: 2298184
uucaguauacauaaucugc

SEQ ID NO: 2298186 - RNA, 19 nt, Artificial Sequence
  Description of Artificial Sequence: Synthetic oligonucleotide
  Sense strand starting at position 3004 of SEQ ID NO: 1884867
ggccacuguauguaaauga

SEQ ID NO: 2298187 - RNA, 19 nt, Artificial Sequence
  Description of Artificial Sequence: Synthetic oligonucleotide
  Antisense strand to SEQ ID NO: 2298186
ucauuuacauacaguggcc

SEQ ID NO: 2298188 - RNA, 19 nt, Artificial Sequence
  Description of Artificial Sequence: Synthetic oligonucleotide
  Sense strand starting at position 3011 of SEQ ID NO: 1884867
guauguaaaugaccucuaa

SEQ ID NO: 2298189 - RNA, 19 nt, Artificial Sequence
  Description of Artificial Sequence: Synthetic oligonucleotide
  Antisense strand to SEQ ID NO: 2298188
uuagaggucauuuacauac

SEQ ID NO: 2298190 - RNA, 19 nt, Artificial Sequence
  Description of Artificial Sequence: Synthetic oligonucleotide
  Sense strand starting at position 3139 of SEQ ID NO: 1884867
guacuuagugaauagcuca

SEQ ID NO: 2298191 - RNA, 19 nt, Artificial Sequence
  Description of Artificial Sequence: Synthetic oligonucleotide
  Antisense strand to SEQ ID NO: 2298190
ugagcuauucacuaaguac

SEQ ID NO: 2298192 - RNA, 19 nt, Artificial Sequence
  Description of Artificial Sequence: Synthetic oligonucleotide
  Sense strand starting at position 3142 of SEQ ID NO: 1884867
cuuagugaauagcucagaa

SEQ ID NO: 2298193 - RNA, 19 nt, Artificial Sequence
  Description of Artificial Sequence: Synthetic oligonucleotide
  Antisense strand to SEQ ID NO: 2298192
uucugagcuauucacuaag

SEQ ID NO: 2298194 - RNA, 19 nt, Artificial Sequence
  Description of Artificial Sequence: Synthetic oligonucleotide
  Sense strand starting at position 3273 of SEQ ID NO: 1884867
ggcuaaguugaagggauau

SEQ ID NO: 2298195 - RNA, 19 nt, Artificial Sequence
  Description of Artificial Sequence: Synthetic oligonucleotide
  Antisense strand to SEQ ID NO: 2298194
auaucccuucaacuuagcc

SEQ ID NO: 2298196 - RNA, 19 nt, Artificial Sequence
  Description of Artificial Sequence: Synthetic oligonucleotide
  Sense strand starting at position 3407 of SEQ ID NO: 1884867
aggugaagaagucgugaaa

SEQ ID NO: 2298197 - RNA, 19 nt, Artificial Sequence
  Description of Artificial Sequence: Synthetic oligonucleotide
  Antisense strand to SEQ ID NO: 2298196
uuucacgacuucuucaccu

SEQ ID NO: 2298198 - RNA, 19 nt, Artificial Sequence
  Description of Artificial Sequence: Synthetic oligonucleotide
  Sense strand starting at position 3410 of SEQ ID NO: 1884867
ugaagaagucgugaaacuc

SEQ ID NO: 2298199 - RNA, 19 nt, Artificial Sequence
  Description of Artificial Sequence: Synthetic oligonucleotide
  Antisense strand to SEQ ID NO: 2298198
gaguuucacgacuucuuca

SEQ ID NO: 2298200 - RNA, 19 nt, Artificial Sequence
  Description of Artificial Sequence: Synthetic oligonucleotide
  Sense strand starting at position 3663 of SEQ ID NO: 1884867
cuuugagcugcuuaagaug

SEQ ID NO: 2298201 - RNA, 19 nt, Artificial Sequence
  Description of Artificial Sequence: Synthetic oligonucleotide
  Antisense strand to SEQ ID NO: 2298200
caucuuaagcagcucaaag

SEQ ID NO: 2298202 - RNA, 19 nt, Artificial Sequence
  Description of Artificial Sequence: Synthetic oligonucleotide
  Sense strand starting at position 3937 of SEQ ID NO: 1884867
gcuuucuuugugccaguuu

SEQ ID NO: 2298203 - RNA, 19 nt, Artificial Sequence
  Description of Artificial Sequence: Synthetic oligonucleotide
  Antisense strand to SEQ ID NO: 2298202
aaacuggcacaaagaaagc

SEQ ID NO: 2298204 - RNA, 19 nt, Artificial Sequence
  Description of Artificial Sequence: Synthetic oligonucleotide
  Sense strand starting at position 3980 of SEQ ID NO: 1884867
aagggaaugggccauguuu

SEQ ID NO: 2298205 - RNA, 19 nt, Artificial Sequence
  Description of Artificial Sequence: Synthetic oligonucleotide
  Antisense strand to SEQ ID NO: 2298204
aaacauggcccauucccuu

SEQ ID NO: 2298206 - RNA, 19 nt, Artificial Sequence
  Description of Artificial Sequence: Synthetic oligonucleotide
  Sense strand starting at position 253 of SEQ ID NO: 1884868
ggccauucuaagggaaagu

SEQ ID NO: 2298207 - RNA, 19 nt, Artificial Sequence
  Description of Artificial Sequence: Synthetic oligonucleotide
  Antisense strand to SEQ ID NO: 2298206
acuuucccuuagaauggcc

SEQ ID NO: 2298208 - RNA, 19 nt, Artificial Sequence
  Description of Artificial Sequence: Synthetic oligonucleotide
  Sense strand starting at position 276 of SEQ ID NO: 1884868
aggaaagccagucauagug

SEQ ID NO: 2298209 - RNA, 19 nt, Artificial Sequence
  Description of Artificial Sequence: Synthetic oligonucleotide
  Antisense strand to SEQ ID NO: 2298208
cacuaugacuggcuuuccu

SEQ ID NO: 2298210 - RNA, 19 nt, Artificial Sequence
  Description of Artificial Sequence: Synthetic oligonucleotide
  Sense strand starting at position 386 of SEQ ID NO: 1884868
acaugauaauuugagauac

SEQ ID NO: 2298211 - RNA, 19 nt, Artificial Sequence
  Description of Artificial Sequence: Synthetic oligonucleotide
  Antisense strand to SEQ ID NO: 2298210
guaucucaaauuaucaugu

SEQ ID NO: 2298212 - RNA, 19 nt, Artificial Sequence
  Description of Artificial Sequence: Synthetic oligonucleotide
  Sense strand starting at position 388 of SEQ ID NO: 1884868
augauaauuugagauacac

SEQ ID NO: 2298213 - RNA, 19 nt, Artificial Sequence
  Description of Artificial Sequence: Synthetic oligonucleotide
  Antisense strand to SEQ ID NO: 2298212
guguaucucaaauuaucau

SEQ ID NO: 2298214 - RNA, 19 nt, Artificial Sequence
  Description of Artificial Sequence: Synthetic oligonucleotide
  Sense strand starting at position 474 of SEQ ID NO: 1884868
uccaguaacuggguauaca

SEQ ID NO: 2298215 - RNA, 19 nt, Artificial Sequence
  Description of Artificial Sequence: Synthetic oligonucleotide
  Antisense strand to SEQ ID NO: 2298214
uguauacccaguuacugga

SEQ ID NO: 2298216 - RNA, 19 nt, Artificial Sequence
  Description of Artificial Sequence: Synthetic oligonucleotide
  Sense strand starting at position 925 of SEQ ID NO: 1884868
cugcauacacuagaaagua

SEQ ID NO: 2298217 - RNA, 19 nt, Artificial Sequence
  Description of Artificial Sequence: Synthetic oligonucleotide
  Antisense strand to SEQ ID NO: 2298216
uacuuucuaguguaugcag

SEQ ID NO: 2298218 - RNA, 19 nt, Artificial Sequence
  Description of Artificial Sequence: Synthetic oligonucleotide
  Sense strand starting at position 933 of SEQ ID NO: 1884868
acuagaaaguaagcauauu

SEQ ID NO: 2298219 - RNA, 19 nt, Artificial Sequence
  Description of Artificial Sequence: Synthetic oligonucleotide
  Antisense strand to SEQ ID NO: 2298218
aauaugcuuacuuucuagu

SEQ ID NO: 2298220 - RNA, 19 nt, Artificial Sequence
  Description of Artificial Sequence: Synthetic oligonucleotide
  Sense strand starting at position 987 of SEQ ID NO: 1884868
uuuggaaccucaguuggau

SEQ ID NO: 2298221 - RNA, 19 nt, Artificial Sequence
  Description of Artificial Sequence: Synthetic oligonucleotide
  Antisense strand to SEQ ID NO: 2298220
auccaacugagguuccaaa

SEQ ID NO: 2298222 - RNA, 19 nt, Artificial Sequence
  Description of Artificial Sequence: Synthetic oligonucleotide
  Sense strand starting at position 989 of SEQ ID NO: 1884868
uggaaccucaguuggauua

SEQ ID NO: 2298223 - RNA, 19 nt, Artificial Sequence
  Description of Artificial Sequence: Synthetic oligonucleotide
  Antisense strand to SEQ ID NO: 2298222
uaauccaacugagguucca

SEQ ID NO: 2298224 - RNA, 19 nt, Artificial Sequence
  Description of Artificial Sequence: Synthetic oligonucleotide
  Sense strand starting at position 990 of SEQ ID NO: 1884868
ggaaccucaguuggauuaa

SEQ ID NO: 2298225 - RNA, 19 nt, Artificial Sequence
  Description of Artificial Sequence: Synthetic oligonucleotide
  Antisense strand to SEQ ID NO: 2298224
uuaauccaacugagguucc

SEQ ID NO: 2298226 - RNA, 19 nt, Artificial Sequence
  Description of Artificial Sequence: Synthetic oligonucleotide
  Sense strand starting at position 1018 of SEQ ID NO: 1884868
aacuuaaugcgggauccau

SEQ ID NO: 2298227 - RNA, 19 nt, Artificial Sequence
  Description of Artificial Sequence: Synthetic oligonucleotide
  Antisense strand to SEQ ID NO: 2298226
auggaucccgcauuaaguu

SEQ ID NO: 2298228 - RNA, 19 nt, Artificial Sequence
  Description of Artificial Sequence: Synthetic oligonucleotide
  Sense strand starting at position 1230 of SEQ ID NO: 1884868
acaaaugaaguguguuaau

SEQ ID NO: 2298229 - RNA, 19 nt, Artificial Sequence
  Description of Artificial Sequence: Synthetic oligonucleotide
  Antisense strand to SEQ ID NO: 2298228
auuaacacacuucauuugu

SEQ ID NO: 2298230 - RNA, 19 nt, Artificial Sequence
  Description of Artificial Sequence: Synthetic oligonucleotide
  Sense strand starting at position 1588 of SEQ ID NO: 1884868
caguuuaauuuagugugua

SEQ ID NO: 2298231 - RNA, 19 nt, Artificial Sequence
  Description of Artificial Sequence: Synthetic oligonucleotide
  Antisense strand to SEQ ID NO: 2298230
uacacacuaaauuaaacug

SEQ ID NO: 2298232 - RNA, 19 nt, Artificial Sequence
  Description of Artificial Sequence: Synthetic oligonucleotide
  Sense strand starting at position 1678 of SEQ ID NO: 1884868
ucaauacaaugguugcaua

SEQ ID NO: 2298233 - RNA, 19 nt, Artificial Sequence
  Description of Artificial Sequence: Synthetic oligonucleotide
  Antisense strand to SEQ ID NO: 2298232
uaugcaaccauuguauuga

SEQ ID NO: 2298234 - RNA, 19 nt, Artificial Sequence
  Description of Artificial Sequence: Synthetic oligonucleotide
  Sense strand starting at position 1877 of SEQ ID NO: 1884868
uuugaaaucuggguguuag

SEQ ID NO: 2298235 - RNA, 19 nt, Artificial Sequence
  Description of Artificial Sequence: Synthetic oligonucleotide
  Antisense strand to SEQ ID NO: 2298234
cuaacacccagauuucaaa

SEQ ID NO: 2298236 - RNA, 19 nt, Artificial Sequence
  Description of Artificial Sequence: Synthetic oligonucleotide
  Sense strand starting at position 2068 of SEQ ID NO: 1884868
uuuauagagcuugaauacu

SEQ ID NO: 2298237 - RNA, 19 nt, Artificial Sequence
  Description of Artificial Sequence: Synthetic oligonucleotide
  Antisense strand to SEQ ID NO: 2298236
aguauucaagcucuauaaa

SEQ ID NO: 2298238 - RNA, 19 nt, Artificial Sequence
  Description of Artificial Sequence: Synthetic oligonucleotide
  Sense strand starting at position 2076 of SEQ ID NO: 1884868
gcuugaauacuacagugaa

SEQ ID NO: 2298239 - RNA, 19 nt, Artificial Sequence
  Description of Artificial Sequence: Synthetic oligonucleotide
  Antisense strand to SEQ ID NO: 2298238
uucacuguaguauucaagc

SEQ ID NO: 2298240 - RNA, 19 nt, Artificial Sequence
  Description of Artificial Sequence: Synthetic oligonucleotide
  Sense strand starting at position 2095 of SEQ ID NO: 1884868
aggguaaaggucuagugca

SEQ ID NO: 2298241 - RNA, 19 nt, Artificial Sequence
  Description of Artificial Sequence: Synthetic oligonucleotide
  Antisense strand to SEQ ID NO: 2298240
ugcacuagaccuuuacccu

SEQ ID NO: 2298242 - RNA, 19 nt, Artificial Sequence
  Description of Artificial Sequence: Synthetic oligonucleotide
  Sense strand starting at position 2251 of SEQ ID NO: 1884868
gugacccuuaagugagaga

SEQ ID NO: 2298243 - RNA, 19 nt, Artificial Sequence
  Description of Artificial Sequence: Synthetic oligonucleotide
  Antisense strand to SEQ ID NO: 2298242
ucucucacuuaagggucac

SEQ ID NO: 2298244 - RNA, 19 nt, Artificial Sequence
  Description of Artificial Sequence: Synthetic oligonucleotide
  Sense strand starting at position 2271 of SEQ ID NO: 1884868
uguguccggaaugauauaa

SEQ ID NO: 2298245 - RNA, 19 nt, Artificial Sequence
  Description of Artificial Sequence: Synthetic oligonucleotide
  Antisense strand to SEQ ID NO: 2298244
uuauaucauuccggacaca

SEQ ID NO: 2298246 - RNA, 19 nt, Artificial Sequence
  Description of Artificial Sequence: Synthetic oligonucleotide
  Sense strand starting at position 2691 of SEQ ID NO: 1884868
cuucuuuagugacuggaau

SEQ ID NO: 2298247 - RNA, 19 nt, Artificial Sequence
  Description of Artificial Sequence: Synthetic oligonucleotide
  Antisense strand to SEQ ID NO: 2298246
auuccagucacuaaagaag

SEQ ID NO: 2298248 - RNA, 19 nt, Artificial Sequence
  Description of Artificial Sequence: Synthetic oligonucleotide
  Sense strand starting at position 2692 of SEQ ID NO: 1884868
uucuuuagugacuggaauu

SEQ ID NO: 2298249 - RNA, 19 nt, Artificial Sequence
  Description of Artificial Sequence: Synthetic oligonucleotide
  Antisense strand to SEQ ID NO: 2298248
aauuccagucacuaaagaa

SEQ ID NO: 2298250 - RNA, 19 nt, Artificial Sequence
  Description of Artificial Sequence: Synthetic oligonucleotide
  Sense strand starting at position 2704 of SEQ ID NO: 1884868
uggaauuauuagcccugga

SEQ ID NO: 2298251 - RNA, 19 nt, Artificial Sequence
  Description of Artificial Sequence: Synthetic oligonucleotide
  Antisense strand to SEQ ID NO: 2298250
uccagggcuaauaauucca

SEQ ID NO: 2298252 - RNA, 19 nt, Artificial Sequence
  Description of Artificial Sequence: Synthetic oligonucleotide
  Sense strand starting at position 2709 of SEQ ID NO: 1884868
uuauuagcccuggaagguu

SEQ ID NO: 2298253 - RNA, 19 nt, Artificial Sequence
  Description of Artificial Sequence: Synthetic oligonucleotide
  Antisense strand to SEQ ID NO: 2298252
aaccuuccagggcuaauaa

SEQ ID NO: 2298254 - RNA, 19 nt, Artificial Sequence
  Description of Artificial Sequence: Synthetic oligonucleotide
  Sense strand starting at position 2747 of SEQ ID NO: 1884868
ggauucugaacuuggcuau

SEQ ID NO: 2298255 - RNA, 19 nt, Artificial Sequence
  Description of Artificial Sequence: Synthetic oligonucleotide
  Antisense strand to SEQ ID NO: 2298254
auagccaaguucagaaucc

SEQ ID NO: 2298256 - RNA, 19 nt, Artificial Sequence
  Description of Artificial Sequence: Synthetic oligonucleotide
  Sense strand starting at position 2751 of SEQ ID NO: 1884868
ucugaacuuggcuaugauu

SEQ ID NO: 2298257 - RNA, 19 nt, Artificial Sequence
  Description of Artificial Sequence: Synthetic oligonucleotide
  Antisense strand to SEQ ID NO: 2298256
aaucauagccaaguucaga

SEQ ID NO: 2298258 - RNA, 19 nt, Artificial Sequence
  Description of Artificial Sequence: Synthetic oligonucleotide
  Sense strand starting at position 2760 of SEQ ID NO: 1884868
ggcuaugauuuauugccca

SEQ ID NO: 2298259 - RNA, 19 nt, Artificial Sequence
  Description of Artificial Sequence: Synthetic oligonucleotide
  Antisense strand to SEQ ID NO: 2298258
ugggcaauaaaucauagcc

SEQ ID NO: 2298260 - RNA, 19 nt, Artificial Sequence
  Description of Artificial Sequence: Synthetic oligonucleotide
  Sense strand starting at position 2796 of SEQ ID NO: 1884868
acaacugugcaugacaauu

SEQ ID NO: 2298261 - RNA, 19 nt, Artificial Sequence
  Description of Artificial Sequence: Synthetic oligonucleotide
  Antisense strand to SEQ ID NO: 2298260
aauugucaugcacaguugu

SEQ ID NO: 2298262 - RNA, 19 nt, Artificial Sequence
  Description of Artificial Sequence: Synthetic oligonucleotide
  Sense strand starting at position 2809 of SEQ ID NO: 1884868
acaauuguuaugcugcgua

SEQ ID NO: 2298263 - RNA, 19 nt, Artificial Sequence
  Description of Artificial Sequence: Synthetic oligonucleotide
  Antisense strand to SEQ ID NO: 2298262
uacgcagcauaacaauugu

SEQ ID NO: 2298264 - RNA, 19 nt, Artificial Sequence
  Description of Artificial Sequence: Synthetic oligonucleotide
  Sense strand starting at position 3151 of SEQ ID NO: 1884868
uuaggaaauucuguugacu

SEQ ID NO: 2298265 - RNA, 19 nt, Artificial Sequence
  Description of Artificial Sequence: Synthetic oligonucleotide
  Antisense strand to SEQ ID NO: 2298264
agucaacagaauuuccuaa

SEQ ID NO: 2298266 - RNA, 19 nt, Artificial Sequence
  Description of Artificial Sequence: Synthetic oligonucleotide
  Sense strand starting at position 3577 of SEQ ID NO: 1884868
gcuguuucucaggaacauu

SEQ ID NO: 2298267 - RNA, 19 nt, Artificial Sequence
  Description of Artificial Sequence: Synthetic oligonucleotide
  Antisense strand to SEQ ID NO: 2298266
aauguuccugagaaacagc

SEQ ID NO: 2298268 - RNA, 19 nt, Artificial Sequence
  Description of Artificial Sequence: Synthetic oligonucleotide
  Sense strand starting at position 3596 of SEQ ID NO: 1884868
ggguaugucuaccuuagga

SEQ ID NO: 2298269 - RNA, 19 nt, Artificial Sequence
  Description of Artificial Sequence: Synthetic oligonucleotide
  Antisense strand to SEQ ID NO: 2298268
uccuaagguagacauaccc

SEQ ID NO: 2298270 - RNA, 19 nt, Artificial Sequence
  Description of Artificial Sequence: Synthetic oligonucleotide
  Sense strand starting at position 3598 of SEQ ID NO: 1884868
guaugucuaccuuaggaca

SEQ ID NO: 2298271 - RNA, 19 nt, Artificial Sequence
  Description of Artificial Sequence: Synthetic oligonucleotide
  Antisense strand to SEQ ID NO: 2298270
uguccuaagguagacauac

SEQ ID NO: 2298272 - RNA, 19 nt, Artificial Sequence
  Description of Artificial Sequence: Synthetic oligonucleotide
  Sense strand starting at position 3628 of SEQ ID NO: 1884868
cuucucucugcuuaggaua

SEQ ID NO: 2298273 - RNA, 19 nt, Artificial Sequence
  Description of Artificial Sequence: Synthetic oligonucleotide
  Antisense strand to SEQ ID NO: 2298272
uauccuaagcagagagaag

SEQ ID NO: 2298274 - RNA, 19 nt, Artificial Sequence
  Description of Artificial Sequence: Synthetic oligonucleotide
  Sense strand starting at position 3640 of SEQ ID NO: 1884868
uaggauacuuucuucgaga

SEQ ID NO: 2298275 - RNA, 19 nt, Artificial Sequence
  Description of Artificial Sequence: Synthetic oligonucleotide
  Antisense strand to SEQ ID NO: 2298274
ucucgaagaaaguauccua

SEQ ID NO: 2298276 - RNA, 19 nt, Artificial Sequence
  Description of Artificial Sequence: Synthetic oligonucleotide
  Sense strand starting at position 3641 of SEQ ID NO: 1884868
aggauacuuucuucgagac

SEQ ID NO: 2298277 - RNA, 19 nt, Artificial Sequence
  Description of Artificial Sequence: Synthetic oligonucleotide
  Antisense strand to SEQ ID NO: 2298276
gucucgaagaaaguauccu

SEQ ID NO: 2298278 - RNA, 19 nt, Artificial Sequence
  Description of Artificial Sequence: Synthetic oligonucleotide
  Sense strand starting at position 3642 of SEQ ID NO: 1884868
ggauacuuucuucgagaca

SEQ ID NO: 2298279 - RNA, 19 nt, Artificial Sequence
  Description of Artificial Sequence: Synthetic oligonucleotide
  Antisense strand to SEQ ID NO: 2298278
ugucucgaagaaaguaucc

SEQ ID NO: 2298280 - RNA, 19 nt, Artificial Sequence
  Description of Artificial Sequence: Synthetic oligonucleotide
  Sense strand starting at position 3655 of SEQ ID NO: 1884868
gagacaacugcugggcuaa

SEQ ID NO: 2298281 - RNA, 19 nt, Artificial Sequence
  Description of Artificial Sequence: Synthetic oligonucleotide
  Antisense strand to SEQ ID NO: 2298280
uuagcccagcaguugucuc

SEQ ID NO: 2298282 - RNA, 19 nt, Artificial Sequence
  Description of Artificial Sequence: Synthetic oligonucleotide
  Sense strand starting at position 3755 of SEQ ID NO: 1884868
uuuguucgucaguauuuau

SEQ ID NO: 2298283 - RNA, 19 nt, Artificial Sequence
  Description of Artificial Sequence: Synthetic oligonucleotide
  Antisense strand to SEQ ID NO: 2298282
auaaauacugacgaacaaa

SEQ ID NO: 2298284 - RNA, 19 nt, Artificial Sequence
  Description of Artificial Sequence: Synthetic oligonucleotide
  Sense strand starting at position 3758 of SEQ ID NO: 1884868
guucgucaguauuuauuag

SEQ ID NO: 2298285 - RNA, 19 nt, Artificial Sequence
  Description of Artificial Sequence: Synthetic oligonucleotide
  Antisense strand to SEQ ID NO: 2298284
cuaauaaauacugacgaac

SEQ ID NO: 2298286 - RNA, 19 nt, Artificial Sequence
  Description of Artificial Sequence: Synthetic oligonucleotide
  Sense strand starting at position 354 of SEQ ID NO: 1884869
uggaauuaacacugccuau

SEQ ID NO: 2298287 - RNA, 19 nt, Artificial Sequence
  Description of Artificial Sequence: Synthetic oligonucleotide
  Antisense strand to SEQ ID NO: 2298286
auaggcaguguuaauucca

SEQ ID NO: 2298288 - RNA, 19 nt, Artificial Sequence
  Description of Artificial Sequence: Synthetic oligonucleotide
  Sense strand starting at position 379 of SEQ ID NO: 1884869
gggaaagcaucucuccagu

SEQ ID NO: 2298289 - RNA, 19 nt, Artificial Sequence
  Description of Artificial Sequence: Synthetic oligonucleotide
  Antisense strand to SEQ ID NO: 2298288
acuggagagaugcuuuccc

SEQ ID NO: 2298290 - RNA, 19 nt, Artificial Sequence
  Description of Artificial Sequence: Synthetic oligonucleotide
  Sense strand starting at position 381 of SEQ ID NO: 1884869
gaaagcaucucuccaguga

SEQ ID NO: 2298291 - RNA, 19 nt, Artificial Sequence
  Description of Artificial Sequence: Synthetic oligonucleotide
  Antisense strand to SEQ ID NO: 2298290
ucacuggagagaugcuuuc

SEQ ID NO: 2298292 - RNA, 19 nt, Artificial Sequence
  Description of Artificial Sequence: Synthetic oligonucleotide
  Sense strand starting at position 389 of SEQ ID NO: 1884869
cucuccagugaugauugua

SEQ ID NO: 2298293 - RNA, 19 nt, Artificial Sequence
  Description of Artificial Sequence: Synthetic oligonucleotide
  Antisense strand to SEQ ID NO: 2298292
uacaaucaucacuggagag

SEQ ID NO: 2298294 - RNA, 19 nt, Artificial Sequence
  Description of Artificial Sequence: Synthetic oligonucleotide
  Sense strand starting at position 392 of SEQ ID NO: 1884869
uccagugaugauuguagaa

SEQ ID NO: 2298295 - RNA, 19 nt, Artificial Sequence
  Description of Artificial Sequence: Synthetic oligonucleotide
  Antisense strand to SEQ ID NO: 2298294
uucuacaaucaucacugga

SEQ ID NO: 2298296 - RNA, 19 nt, Artificial Sequence
  Description of Artificial Sequence: Synthetic oligonucleotide
  Sense strand starting at position 407 of SEQ ID NO: 1884869
agaaguugcuggguaaaua

SEQ ID NO: 2298297 - RNA, 19 nt, Artificial Sequence
  Description of Artificial Sequence: Synthetic oligonucleotide
  Antisense strand to SEQ ID NO: 2298296
uauuuacccagcaacuucu

SEQ ID NO: 2298298 - RNA, 19 nt, Artificial Sequence
  Description of Artificial Sequence: Synthetic oligonucleotide
  Sense strand starting at position 408 of SEQ ID NO: 1884869
gaaguugcuggguaaauac

SEQ ID NO: 2298299 - RNA, 19 nt, Artificial Sequence
  Description of Artificial Sequence: Synthetic oligonucleotide
  Antisense strand to SEQ ID NO: 2298298
guauuuacccagcaacuuc

SEQ ID NO: 2298300 - RNA, 19 nt, Artificial Sequence
  Description of Artificial Sequence: Synthetic oligonucleotide
  Sense strand starting at position 450 of SEQ ID NO: 1884869
cauaguagccucugagauu

SEQ ID NO: 2298301 - RNA, 19 nt, Artificial Sequence
  Description of Artificial Sequence: Synthetic oligonucleotide
  Antisense strand to SEQ ID NO: 2298300
aaucucagaggcuacuaug

SEQ ID NO: 2298302 - RNA, 19 nt, Artificial Sequence
  Description of Artificial Sequence: Synthetic oligonucleotide
  Sense strand starting at position 514 of SEQ ID NO: 1884869
aaauaagaucuggguucua

SEQ ID NO: 2298303 - RNA, 19 nt, Artificial Sequence
  Description of Artificial Sequence: Synthetic oligonucleotide
  Antisense strand to SEQ ID NO: 2298302
uagaacccagaucuuauuu

SEQ ID NO: 2298304 - RNA, 19 nt, Artificial Sequence
  Description of Artificial Sequence: Synthetic oligonucleotide
  Sense strand starting at position 624 of SEQ ID NO: 1884869
guuugaaugucuuccauuu

SEQ ID NO: 2298305 - RNA, 19 nt, Artificial Sequence
  Description of Artificial Sequence: Synthetic oligonucleotide
  Antisense strand to SEQ ID NO: 2298304
aaauggaagacauucaaac

SEQ ID NO: 2298306 - RNA, 19 nt, Artificial Sequence
  Description of Artificial Sequence: Synthetic oligonucleotide
  Sense strand starting at position 936 of SEQ ID NO: 1884869
gcuucucagcucuaaagag

SEQ ID NO: 2298307 - RNA, 19 nt, Artificial Sequence
  Description of Artificial Sequence: Synthetic oligonucleotide
  Antisense strand to SEQ ID NO: 2298306
cucuuuagagcugagaagc

SEQ ID NO: 2298308 - RNA, 19 nt, Artificial Sequence
  Description of Artificial Sequence: Synthetic oligonucleotide
  Sense strand starting at position 995 of SEQ ID NO: 1884869
ugaccugaccuuugccaua

SEQ ID NO: 2298309 - RNA, 19 nt, Artificial Sequence
  Description of Artificial Sequence: Synthetic oligonucleotide
  Antisense strand to SEQ ID NO: 2298308
uauggcaaaggucagguca

SEQ ID NO: 2298310 - RNA, 19 nt, Artificial Sequence
  Description of Artificial Sequence: Synthetic oligonucleotide
  Sense strand starting at position 1000 of SEQ ID NO: 1884869
ugaccuuugccauacgaca

SEQ ID NO: 2298311 - RNA, 19 nt, Artificial Sequence
  Description of Artificial Sequence: Synthetic oligonucleotide
  Antisense strand to SEQ ID NO: 2298310
ugucguauggcaaagguca

SEQ ID NO: 2298312 - RNA, 19 nt, Artificial Sequence
  Description of Artificial Sequence: Synthetic oligonucleotide
  Sense strand starting at position 1034 of SEQ ID NO: 1884869
ccaggauaauugccagguu

SEQ ID NO: 2298313 - RNA, 19 nt, Artificial Sequence
  Description of Artificial Sequence: Synthetic oligonucleotide
  Antisense strand to SEQ ID NO: 2298312
aaccuggcaauuauccugg

SEQ ID NO: 2298314 - RNA, 19 nt, Artificial Sequence
  Description of Artificial Sequence: Synthetic oligonucleotide
  Sense strand starting at position 1037 of SEQ ID NO: 1884869
ggauaauugccagguuuac

SEQ ID NO: 2298315 - RNA, 19 nt, Artificial Sequence
  Description of Artificial Sequence: Synthetic oligonucleotide
  Antisense strand to SEQ ID NO: 2298314
guaaaccuggcaauuaucc

SEQ ID NO: 2298316 - RNA, 19 nt, Artificial Sequence
  Description of Artificial Sequence: Synthetic oligonucleotide
  Sense strand starting at position 1061 of SEQ ID NO: 1884869
cuuuguccugucuaaauga

SEQ ID NO: 2298317 - RNA, 19 nt, Artificial Sequence
  Description of Artificial Sequence: Synthetic oligonucleotide
  Antisense strand to SEQ ID NO: 2298316
ucauuuagacaggacaaag

SEQ ID NO: 2298318 - RNA, 19 nt, Artificial Sequence
  Description of Artificial Sequence: Synthetic oligonucleotide
  Sense strand starting at position 1226 of SEQ ID NO: 1884869
ccaucuucugauugagcua

SEQ ID NO: 2298319 - RNA, 19 nt, Artificial Sequence
  Description of Artificial Sequence: Synthetic oligonucleotide
  Antisense strand to SEQ ID NO: 2298318
uagcucaaucagaagaugg

SEQ ID NO: 2298320 - RNA, 19 nt, Artificial Sequence
  Description of Artificial Sequence: Synthetic oligonucleotide
  Sense strand starting at position 1229 of SEQ ID NO: 1884869
ucuucugauugagcuauga

SEQ ID NO: 2298321 - RNA, 19 nt, Artificial Sequence
  Description of Artificial Sequence: Synthetic oligonucleotide
  Antisense strand to SEQ ID NO: 2298320
ucauagcucaaucagaaga

SEQ ID NO: 2298322 - RNA, 19 nt, Artificial Sequence
  Description of Artificial Sequence: Synthetic oligonucleotide
  Sense strand starting at position 1233 of SEQ ID NO: 1884869
cugauugagcuaugacaua

SEQ ID NO: 2298323 - RNA, 19 nt, Artificial Sequence
  Description of Artificial Sequence: Synthetic oligonucleotide
  Antisense strand to SEQ ID NO: 2298322
uaugucauagcucaaucag

SEQ ID NO: 2298324 - RNA, 19 nt, Artificial Sequence
  Description of Artificial Sequence: Synthetic oligonucleotide
  Sense strand starting at position 1387 of SEQ ID NO: 1884869
cggcauuugccaugaucag

SEQ ID NO: 2298325 - RNA, 19 nt, Artificial Sequence
  Description of Artificial Sequence: Synthetic oligonucleotide
  Antisense strand to SEQ ID NO: 2298324
cugaucauggcaaaugccg

SEQ ID NO: 2298326 - RNA, 19 nt, Artificial Sequence
  Description of Artificial Sequence: Synthetic oligonucleotide
  Sense strand starting at position 1393 of SEQ ID NO: 1884869
uugccaugaucagucauaa

SEQ ID NO: 2298327 - RNA, 19 nt, Artificial Sequence
  Description of Artificial Sequence: Synthetic oligonucleotide
  Antisense strand to SEQ ID NO: 2298326
uuaugacugaucauggcaa

SEQ ID NO: 2298328 - RNA, 19 nt, Artificial Sequence
  Description of Artificial Sequence: Synthetic oligonucleotide
  Sense strand starting at position 1404 of SEQ ID NO: 1884869
agucauaauggaugauguu

SEQ ID NO: 2298329 - RNA, 19 nt, Artificial Sequence
  Description of Artificial Sequence: Synthetic oligonucleotide
  Antisense strand to SEQ ID NO: 2298328
aacaucauccauuaugacu

SEQ ID NO: 2298330 - RNA, 19 nt, Artificial Sequence
  Description of Artificial Sequence: Synthetic oligonucleotide
  Sense strand starting at position 1434 of SEQ ID NO: 1884869
gcaucuuggcaaugggaaa

SEQ ID NO: 2298331 - RNA, 19 nt, Artificial Sequence
  Description of Artificial Sequence: Synthetic oligonucleotide
  Antisense strand to SEQ ID NO: 2298330
uuucccauugccaagaugc

SEQ ID NO: 2298332 - RNA, 19 nt, Artificial Sequence
  Description of Artificial Sequence: Synthetic oligonucleotide
  Sense strand starting at position 1554 of SEQ ID NO: 1884869
cuaauaucagauuguauga

SEQ ID NO: 2298333 - RNA, 19 nt, Artificial Sequence
  Description of Artificial Sequence: Synthetic oligonucleotide
  Antisense strand to SEQ ID NO: 2298332
ucauacaaucugauauuag

SEQ ID NO: 2298334 - RNA, 19 nt, Artificial Sequence
  Description of Artificial Sequence: Synthetic oligonucleotide
  Sense strand starting at position 1584 of SEQ ID NO: 1884869
cccaacucgugauccgaaa

SEQ ID NO: 2298335 - RNA, 19 nt, Artificial Sequence
  Description of Artificial Sequence: Synthetic oligonucleotide
  Antisense strand to SEQ ID NO: 2298334
uuucggaucacgaguuggg

SEQ ID NO: 2298336 - RNA, 19 nt, Artificial Sequence
  Description of Artificial Sequence: Synthetic oligonucleotide
  Sense strand starting at position 1790 of SEQ ID NO: 1884869
gucucucacccacaggaau

SEQ ID NO: 2298337 - RNA, 19 nt, Artificial Sequence
  Description of Artificial Sequence: Synthetic oligonucleotide
  Antisense strand to SEQ ID NO: 2298336
auuccugugggugagagac

SEQ ID NO: 2298338 - RNA, 19 nt, Artificial Sequence
  Description of Artificial Sequence: Synthetic oligonucleotide
  Sense strand starting at position 1991 of SEQ ID NO: 1884869
ugggacaucugcuccaagu

SEQ ID NO: 2298339 - RNA, 19 nt, Artificial Sequence
  Description of Artificial Sequence: Synthetic oligonucleotide
  Antisense strand to SEQ ID NO: 2298338
acuuggagcagauguccca

SEQ ID NO: 2298340 - RNA, 19 nt, Artificial Sequence
  Description of Artificial Sequence: Synthetic oligonucleotide
  Sense strand starting at position 2073 of SEQ ID NO: 1884869
agcaucuugcaucagcaau

SEQ ID NO: 2298341 - RNA, 19 nt, Artificial Sequence
  Description of Artificial Sequence: Synthetic oligonucleotide
  Antisense strand to SEQ ID NO: 2298340
auugcugaugcaagaugcu

SEQ ID NO: 2298342 - RNA, 19 nt, Artificial Sequence
  Description of Artificial Sequence: Synthetic oligonucleotide
  Sense strand starting at position 2527 of SEQ ID NO: 1884869
acagcuuggccagagaagu

SEQ ID NO: 2298343 - RNA, 19 nt, Artificial Sequence
  Description of Artificial Sequence: Synthetic oligonucleotide
  Antisense strand to SEQ ID NO: 2298342
acuucucuggccaagcugu

SEQ ID NO: 2298344 - RNA, 19 nt, Artificial Sequence
  Description of Artificial Sequence: Synthetic oligonucleotide
  Sense strand starting at position 2533 of SEQ ID NO: 1884869
uggccagagaaguggauaa

SEQ ID NO: 2298345 - RNA, 19 nt, Artificial Sequence
  Description of Artificial Sequence: Synthetic oligonucleotide
  Antisense strand to SEQ ID NO: 2298344
uuauccacuucucuggcca

SEQ ID NO: 2298346 - RNA, 19 nt, Artificial Sequence
  Description of Artificial Sequence: Synthetic oligonucleotide
  Sense strand starting at position 2838 of SEQ ID NO: 1884869
uggucuauuuaguagagau

SEQ ID NO: 2298347 - RNA, 19 nt, Artificial Sequence
  Description of Artificial Sequence: Synthetic oligonucleotide
  Antisense strand to SEQ ID NO: 2298346
aucucuacuaaauagacca

SEQ ID NO: 2298348 - RNA, 19 nt, Artificial Sequence
  Description of Artificial Sequence: Synthetic oligonucleotide
  Sense strand starting at position 3041 of SEQ ID NO: 1884869
agguuucccuuguuuauaa

SEQ ID NO: 2298349 - RNA, 19 nt, Artificial Sequence
  Description of Artificial Sequence: Synthetic oligonucleotide
  Antisense strand to SEQ ID NO: 2298348
uuauaaacaagggaaaccu

SEQ ID NO: 2298350 - RNA, 19 nt, Artificial Sequence
  Description of Artificial Sequence: Synthetic oligonucleotide
  Sense strand starting at position 3042 of SEQ ID NO: 1884869
gguuucccuuguuuauaaa

SEQ ID NO: 2298351 - RNA, 19 nt, Artificial Sequence
  Description of Artificial Sequence: Synthetic oligonucleotide
  Antisense strand to SEQ ID NO: 2298350
uuuauaaacaagggaaacc

SEQ ID NO: 2298352 - RNA, 19 nt, Artificial Sequence
  Description of Artificial Sequence: Synthetic oligonucleotide
  Sense strand starting at position 3087 of SEQ ID NO: 1884869
cuagcaucacgggacagau

SEQ ID NO: 2298353 - RNA, 19 nt, Artificial Sequence
  Description of Artificial Sequence: Synthetic oligonucleotide
  Antisense strand to SEQ ID NO: 2298352
aucugucccgugaugcuag

SEQ ID NO: 2298354 - RNA, 19 nt, Artificial Sequence
  Description of Artificial Sequence: Synthetic oligonucleotide
  Sense strand starting at position 3097 of SEQ ID NO: 1884869
gggacagauuucuacuaau

SEQ ID NO: 2298355 - RNA, 19 nt, Artificial Sequence
  Description of Artificial Sequence: Synthetic oligonucleotide
  Antisense strand to SEQ ID NO: 2298354
auuaguagaaaucuguccc

SEQ ID NO: 2298356 - RNA, 19 nt, Artificial Sequence
  Description of Artificial Sequence: Synthetic oligonucleotide
  Sense strand starting at position 3230 of SEQ ID NO: 1884869
guaauaggugcucaguaag

SEQ ID NO: 2298357 - RNA, 19 nt, Artificial Sequence
  Description of Artificial Sequence: Synthetic oligonucleotide
  Antisense strand to SEQ ID NO: 2298356
cuuacugagcaccuauuac

SEQ ID NO: 2298358 - RNA, 19 nt, Artificial Sequence
  Description of Artificial Sequence: Synthetic oligonucleotide
  Sense strand starting at position 3248 of SEQ ID NO: 1884869
guacuuacuggaugaauaa

SEQ ID NO: 2298359 - RNA, 19 nt, Artificial Sequence
  Description of Artificial Sequence: Synthetic oligonucleotide
  Antisense strand to SEQ ID NO: 2298358
uuauucauccaguaaguac

SEQ ID NO: 2298360 - RNA, 19 nt, Artificial Sequence
  Description of Artificial Sequence: Synthetic oligonucleotide
  Sense strand starting at position 3740 of SEQ ID NO: 1884869
uugccuuggcauuagugaa

SEQ ID NO: 2298361 - RNA, 19 nt, Artificial Sequence
  Description of Artificial Sequence: Synthetic oligonucleotide
  Antisense strand to SEQ ID NO: 2298360
uucacuaaugccaaggcaa

SEQ ID NO: 2298362 - RNA, 19 nt, Artificial Sequence
  Description of Artificial Sequence: Synthetic oligonucleotide
  Sense strand starting at position 3776 of SEQ ID NO: 1884869
cuuugugcucaugauccaa

SEQ ID NO: 2298363 - RNA, 19 nt, Artificial Sequence
  Description of Artificial Sequence: Synthetic oligonucleotide
  Antisense strand to SEQ ID NO: 2298362
uuggaucaugagcacaaag

SEQ ID NO: 2298364 - RNA, 19 nt, Artificial Sequence
  Description of Artificial Sequence: Synthetic oligonucleotide
  Sense strand starting at position 3778 of SEQ ID NO: 1884869
uugugcucaugauccaaau

SEQ ID NO: 2298365 - RNA, 19 nt, Artificial Sequence
  Description of Artificial Sequence: Synthetic oligonucleotide
  Antisense strand to SEQ ID NO: 2298364
auuuggaucaugagcacaa

SEQ ID NO: 2298366 - RNA, 19 nt, Artificial Sequence
  Description of Artificial Sequence: Synthetic oligonucleotide
  Sense strand starting at position 344 of SEQ ID NO: 1884870
gagagucauuuaggagaag

SEQ ID NO: 2298367 - RNA, 19 nt, Artificial Sequence
  Description of Artificial Sequence: Synthetic oligonucleotide
  Antisense strand to SEQ ID NO: 2298366
cuucuccuaaaugacucuc

SEQ ID NO: 2298368 - RNA, 19 nt, Artificial Sequence
  Description of Artificial Sequence: Synthetic oligonucleotide
  Sense strand starting at position 366 of SEQ ID NO: 1884870
auugaaagcagcugugaaa

SEQ ID NO: 2298369 - RNA, 19 nt, Artificial Sequence
  Description of Artificial Sequence: Synthetic oligonucleotide
  Antisense strand to SEQ ID NO: 2298368
uuucacagcugcuuucaau

SEQ ID NO: 2298370 - RNA, 19 nt, Artificial Sequence
  Description of Artificial Sequence: Synthetic oligonucleotide
  Sense strand starting at position 424 of SEQ ID NO: 1884870
cgcauaugcccacauggaa

SEQ ID NO: 2298371 - RNA, 19 nt, Artificial Sequence
  Description of Artificial Sequence: Synthetic oligonucleotide
  Antisense strand to SEQ ID NO: 2298370
uuccaugugggcauaugcg

SEQ ID NO: 2298372 - RNA, 19 nt, Artificial Sequence
  Description of Artificial Sequence: Synthetic oligonucleotide
  Sense strand starting at position 445 of SEQ ID NO: 1884870
acacuuaaucagcagagcu

SEQ ID NO: 2298373 - RNA, 19 nt, Artificial Sequence
  Description of Artificial Sequence: Synthetic oligonucleotide
  Antisense strand to SEQ ID NO: 2298372
agcucugcugauuaagugu

SEQ ID NO: 2298374 - RNA, 19 nt, Artificial Sequence
  Description of Artificial Sequence: Synthetic oligonucleotide
  Sense strand starting at position 660 of SEQ ID NO: 1884870
acagaaugugaguggaagu

SEQ ID NO: 2298375 - RNA, 19 nt, Artificial Sequence
  Description of Artificial Sequence: Synthetic oligonucleotide
  Antisense strand to SEQ ID NO: 2298374
acuuccacucacauucugu

SEQ ID NO: 2298376 - RNA, 19 nt, Artificial Sequence
  Description of Artificial Sequence: Synthetic oligonucleotide
  Sense strand starting at position 703 of SEQ ID NO: 1884870
ccaugaaacuuggcucaua

SEQ ID NO: 2298377 - RNA, 19 nt, Artificial Sequence
  Description of Artificial Sequence: Synthetic oligonucleotide
  Antisense strand to SEQ ID NO: 2298376
uaugagccaaguuucaugg

SEQ ID NO: 2298378 - RNA, 19 nt, Artificial Sequence
  Description of Artificial Sequence: Synthetic oligonucleotide
  Sense strand starting at position 757 of SEQ ID NO: 1884870
ccugcuuggcuggaauaca

SEQ ID NO: 2298379 - RNA, 19 nt, Artificial Sequence
  Description of Artificial Sequence: Synthetic oligonucleotide
  Antisense strand to SEQ ID NO: 2298378
uguauuccagccaagcagg

SEQ ID NO: 2298380 - RNA, 19 nt, Artificial Sequence
  Description of Artificial Sequence: Synthetic oligonucleotide
  Sense strand starting at position 872 of SEQ ID NO: 1884870
uggccuguucuagacuauu

SEQ ID NO: 2298381 - RNA, 19 nt, Artificial Sequence
  Description of Artificial Sequence: Synthetic oligonucleotide
  Antisense strand to SEQ ID NO: 2298380
aauagucuagaacaggcca

SEQ ID NO: 2298382 - RNA, 19 nt, Artificial Sequence
  Description of Artificial Sequence: Synthetic oligonucleotide
  Sense strand starting at position 944 of SEQ ID NO: 1884870
uuccaauuggcacaguuua

SEQ ID NO: 2298383 - RNA, 19 nt, Artificial Sequence
  Description of Artificial Sequence: Synthetic oligonucleotide
  Antisense strand to SEQ ID NO: 2298382
uaaacugugccaauuggaa

SEQ ID NO: 2298384 - RNA, 19 nt, Artificial Sequence
  Description of Artificial Sequence: Synthetic oligonucleotide
  Sense strand starting at position 962 of SEQ ID NO: 1884870
agaccauguuaacuaguau

SEQ ID NO: 2298385 - RNA, 19 nt, Artificial Sequence
  Description of Artificial Sequence: Synthetic oligonucleotide
  Antisense strand to SEQ ID NO: 2298384
auacuaguuaacauggucu

SEQ ID NO: 2298386 - RNA, 19 nt, Artificial Sequence
  Description of Artificial Sequence: Synthetic oligonucleotide
  Sense strand starting at position 1031 of SEQ ID NO: 1884870
ccugcagcucugggaauuu

SEQ ID NO: 2298387 - RNA, 19 nt, Artificial Sequence
  Description of Artificial Sequence: Synthetic oligonucleotide
  Antisense strand to SEQ ID NO: 2298386
aaauucccagagcugcagg

SEQ ID NO: 2298388 - RNA, 19 nt, Artificial Sequence
  Description of Artificial Sequence: Synthetic oligonucleotide
  Sense strand starting at position 1091 of SEQ ID NO: 1884870
gagucauuauuugaacuga

SEQ ID NO: 2298389 - RNA, 19 nt, Artificial Sequence
  Description of Artificial Sequence: Synthetic oligonucleotide
  Antisense strand to SEQ ID NO: 2298388
ucaguucaaauaaugacuc

SEQ ID NO: 2298390 - RNA, 19 nt, Artificial Sequence
  Description of Artificial Sequence: Synthetic oligonucleotide
  Sense strand starting at position 1107 of SEQ ID NO: 1884870
ugaagucugucaguuuaaa

SEQ ID NO: 2298391 - RNA, 19 nt, Artificial Sequence
  Description of Artificial Sequence: Synthetic oligonucleotide
  Antisense strand to SEQ ID NO: 2298390
uuuaaacugacagacuuca

SEQ ID NO: 2298392 - RNA, 19 nt, Artificial Sequence
  Description of Artificial Sequence: Synthetic oligonucleotide
  Sense strand starting at position 1645 of SEQ ID NO: 1884870
uuaggaaucuuuccauugu

SEQ ID NO: 2298393 - RNA, 19 nt, Artificial Sequence
  Description of Artificial Sequence: Synthetic oligonucleotide
  Antisense strand to SEQ ID NO: 2298392
acaauggaaagauuccuaa

SEQ ID NO: 2298394 - RNA, 19 nt, Artificial Sequence
  Description of Artificial Sequence: Synthetic oligonucleotide
  Sense strand starting at position 1659 of SEQ ID NO: 1884870
auuguacugguguauuaga

SEQ ID NO: 2298395 - RNA, 19 nt, Artificial Sequence
  Description of Artificial Sequence: Synthetic oligonucleotide
  Antisense strand to SEQ ID NO: 2298394
ucuaauacaccaguacaau

SEQ ID NO: 2298396 - RNA, 19 nt, Artificial Sequence
  Description of Artificial Sequence: Synthetic oligonucleotide
  Sense strand starting at position 1869 of SEQ ID NO: 1884870
gaguucugauguccaagau

SEQ ID NO: 2298397 - RNA, 19 nt, Artificial Sequence
  Description of Artificial Sequence: Synthetic oligonucleotide
  Antisense strand to SEQ ID NO: 2298396
aucuuggacaucagaacuc

SEQ ID NO: 2298398 - RNA, 19 nt, Artificial Sequence
  Description of Artificial Sequence: Synthetic oligonucleotide
  Sense strand starting at position 1870 of SEQ ID NO: 1884870
aguucugauguccaagauc

SEQ ID NO: 2298399 - RNA, 19 nt, Artificial Sequence
  Description of Artificial Sequence: Synthetic oligonucleotide
  Antisense strand to SEQ ID NO: 2298398
gaucuuggacaucagaacu

SEQ ID NO: 2298400 - RNA, 19 nt, Artificial Sequence
  Description of Artificial Sequence: Synthetic oligonucleotide
  Sense strand starting at position 1962 of SEQ ID NO: 1884870
ucugcaauggauugaauga

SEQ ID NO: 2298401 - RNA, 19 nt, Artificial Sequence
  Description of Artificial Sequence: Synthetic oligonucleotide
  Antisense strand to SEQ ID NO: 2298400
ucauucaauccauugcaga

SEQ ID NO: 2298402 - RNA, 19 nt, Artificial Sequence
  Description of Artificial Sequence: Synthetic oligonucleotide
  Sense strand starting at position 1994 of SEQ ID NO: 1884870
uggugaggaugaucucuuu

SEQ ID NO: 2298403 - RNA, 19 nt, Artificial Sequence
  Description of Artificial Sequence: Synthetic oligonucleotide
  Antisense strand to SEQ ID NO: 2298402
aaagagaucauccucacca

SEQ ID NO: 2298404 - RNA, 19 nt, Artificial Sequence
  Description of Artificial Sequence: Synthetic oligonucleotide
  Sense strand starting at position 1997 of SEQ ID NO: 1884870
ugaggaugaucucuuuacu

SEQ ID NO: 2298405 - RNA, 19 nt, Artificial Sequence
  Description of Artificial Sequence: Synthetic oligonucleotide
  Antisense strand to SEQ ID NO: 2298404
aguaaagagaucauccuca

SEQ ID NO: 2298406 - RNA, 19 nt, Artificial Sequence
  Description of Artificial Sequence: Synthetic oligonucleotide
  Sense strand starting at position 2278 of SEQ ID NO: 1884870
uaagcacguguuuaauuga

SEQ ID NO: 2298407 - RNA, 19 nt, Artificial Sequence
  Description of Artificial Sequence: Synthetic oligonucleotide
  Antisense strand to SEQ ID NO: 2298406
ucaauuaaacacgugcuua

SEQ ID NO: 2298408 - RNA, 19 nt, Artificial Sequence
  Description of Artificial Sequence: Synthetic oligonucleotide
  Sense strand starting at position 2283 of SEQ ID NO: 1884870
acguguuuaauugagaaga

SEQ ID NO: 2298409 - RNA, 19 nt, Artificial Sequence
  Description of Artificial Sequence: Synthetic oligonucleotide
  Antisense strand to SEQ ID NO: 2298408
ucuucucaauuaaacacgu

SEQ ID NO: 2298410 - RNA, 19 nt, Artificial Sequence
  Description of Artificial Sequence: Synthetic oligonucleotide
  Sense strand starting at position 2375 of SEQ ID NO: 1884870
gagagucagcauugaggaa

SEQ ID NO: 2298411 - RNA, 19 nt, Artificial Sequence
  Description of Artificial Sequence: Synthetic oligonucleotide
  Antisense strand to SEQ ID NO: 2298410
uuccucaaugcugacucuc

SEQ ID NO: 2298412 - RNA, 19 nt, Artificial Sequence
  Description of Artificial Sequence: Synthetic oligonucleotide
  Sense strand starting at position 2466 of SEQ ID NO: 1884870
guuauagauuuggagggau

SEQ ID NO: 2298413 - RNA, 19 nt, Artificial Sequence
  Description of Artificial Sequence: Synthetic oligonucleotide
  Antisense strand to SEQ ID NO: 2298412
aucccuccaaaucuauaac

SEQ ID NO: 2298414 - RNA, 19 nt, Artificial Sequence
  Description of Artificial Sequence: Synthetic oligonucleotide
  Sense strand starting at position 2554 of SEQ ID NO: 1884870
cuuuguuccagggagcuau

SEQ ID NO: 2298415 - RNA, 19 nt, Artificial Sequence
  Description of Artificial Sequence: Synthetic oligonucleotide
  Antisense strand to SEQ ID NO: 2298414
auagcucccuggaacaaag

SEQ ID NO: 2298416 - RNA, 19 nt, Artificial Sequence
  Description of Artificial Sequence: Synthetic oligonucleotide
  Sense strand starting at position 2564 of SEQ ID NO: 1884870
gggagcuaucuggagguau

SEQ ID NO: 2298417 - RNA, 19 nt, Artificial Sequence
  Description of Artificial Sequence: Synthetic oligonucleotide
  Antisense strand to SEQ ID NO: 2298416
auaccuccagauagcuccc

SEQ ID NO: 2298418 - RNA, 19 nt, Artificial Sequence
  Description of Artificial Sequence: Synthetic oligonucleotide
  Sense strand starting at position 2566 of SEQ ID NO: 1884870
gagcuaucuggagguauac

SEQ ID NO: 2298419 - RNA, 19 nt, Artificial Sequence
  Description of Artificial Sequence: Synthetic oligonucleotide
  Antisense strand to SEQ ID NO: 2298418
guauaccuccagauagcuc

SEQ ID NO: 2298420 - RNA, 19 nt, Artificial Sequence
  Description of Artificial Sequence: Synthetic oligonucleotide
  Sense strand starting at position 2614 of SEQ ID NO: 1884870
uguacauguuggucacaga

SEQ ID NO: 2298421 - RNA, 19 nt, Artificial Sequence
  Description of Artificial Sequence: Synthetic oligonucleotide
  Antisense strand to SEQ ID NO: 2298420
ucugugaccaacauguaca

SEQ ID NO: 2298422 - RNA, 19 nt, Artificial Sequence
  Description of Artificial Sequence: Synthetic oligonucleotide
  Sense strand starting at position 2968 of SEQ ID NO: 1884870
ugaggucauucccuauaac

SEQ ID NO: 2298423 - RNA, 19 nt, Artificial Sequence
  Description of Artificial Sequence: Synthetic oligonucleotide
  Antisense strand to SEQ ID NO: 2298422
guuauagggaaugaccuca

SEQ ID NO: 2298424 - RNA, 19 nt, Artificial Sequence
  Description of Artificial Sequence: Synthetic oligonucleotide
  Sense strand starting at position 3112 of SEQ ID NO: 1884870
ggacaaucucccuauugca

SEQ ID NO: 2298425 - RNA, 19 nt, Artificial Sequence
  Description of Artificial Sequence: Synthetic oligonucleotide
  Antisense strand to SEQ ID NO: 2298424
ugcaauagggagauugucc

SEQ ID NO: 2298426 - RNA, 19 nt, Artificial Sequence
  Description of Artificial Sequence: Synthetic oligonucleotide
  Sense strand starting at position 3180 of SEQ ID NO: 1884870
ugcaguauagcauaaucau

SEQ ID NO: 2298427 - RNA, 19 nt, Artificial Sequence
  Description of Artificial Sequence: Synthetic oligonucleotide
  Antisense strand to SEQ ID NO: 2298426
augauuaugcuauacugca

SEQ ID NO: 2298428 - RNA, 19 nt, Artificial Sequence
  Description of Artificial Sequence: Synthetic oligonucleotide
  Sense strand starting at position 3305 of SEQ ID NO: 1884870
cucugagaacaaugguaac

SEQ ID NO: 2298429 - RNA, 19 nt, Artificial Sequence
  Description of Artificial Sequence: Synthetic oligonucleotide
  Antisense strand to SEQ ID NO: 2298428
guuaccauuguucucagag

SEQ ID NO: 2298430 - RNA, 19 nt, Artificial Sequence
  Description of Artificial Sequence: Synthetic oligonucleotide
  Sense strand starting at position 3372 of SEQ ID NO: 1884870
cuagcuucuggguaggaua

SEQ ID NO: 2298431 - RNA, 19 nt, Artificial Sequence
  Description of Artificial Sequence: Synthetic oligonucleotide
  Antisense strand to SEQ ID NO: 2298430
uauccuacccagaagcuag

SEQ ID NO: 2298432 - RNA, 19 nt, Artificial Sequence
  Description of Artificial Sequence: Synthetic oligonucleotide
  Sense strand starting at position 3374 of SEQ ID NO: 1884870
agcuucuggguaggauaaa

SEQ ID NO: 2298433 - RNA, 19 nt, Artificial Sequence
  Description of Artificial Sequence: Synthetic oligonucleotide
  Antisense strand to SEQ ID NO: 2298432
uuuauccuacccagaagcu

SEQ ID NO: 2298434 - RNA, 19 nt, Artificial Sequence
  Description of Artificial Sequence: Synthetic oligonucleotide
  Sense strand starting at position 3426 of SEQ ID NO: 1884870
ugguuugugaggcaaagca

SEQ ID NO: 2298435 - RNA, 19 nt, Artificial Sequence
  Description of Artificial Sequence: Synthetic oligonucleotide
  Antisense strand to SEQ ID NO: 2298434
ugcuuugccucacaaacca

SEQ ID NO: 2298436 - RNA, 19 nt, Artificial Sequence
  Description of Artificial Sequence: Synthetic oligonucleotide
  Sense strand starting at position 3435 of SEQ ID NO: 1884870
aggcaaagcagguauuaga

SEQ ID NO: 2298437 - RNA, 19 nt, Artificial Sequence
  Description of Artificial Sequence: Synthetic oligonucleotide
  Antisense strand to SEQ ID NO: 2298436
ucuaauaccugcuuugccu

SEQ ID NO: 2298438 - RNA, 19 nt, Artificial Sequence
  Description of Artificial Sequence: Synthetic oligonucleotide
  Sense strand starting at position 3492 of SEQ ID NO: 1884870
gccuauuucuguccacaca

SEQ ID NO: 2298439 - RNA, 19 nt, Artificial Sequence
  Description of Artificial Sequence: Synthetic oligonucleotide
  Antisense strand to SEQ ID NO: 2298438
uguguggacagaaauaggc

SEQ ID NO: 2298440 - RNA, 19 nt, Artificial Sequence
  Description of Artificial Sequence: Synthetic oligonucleotide
  Sense strand starting at position 3606 of SEQ ID NO: 1884870
cgacgaucagaauaaucuu

SEQ ID NO: 2298441 - RNA, 19 nt, Artificial Sequence
  Description of Artificial Sequence: Synthetic oligonucleotide
  Antisense strand to SEQ ID NO: 2298440
aagauuauucugaucgucg

SEQ ID NO: 2298442 - RNA, 19 nt, Artificial Sequence
  Description of Artificial Sequence: Synthetic oligonucleotide
  Sense strand starting at position 3841 of SEQ ID NO: 1884870
aggauugcuggcuauguua

SEQ ID NO: 2298443 - RNA, 19 nt, Artificial Sequence
  Description of Artificial Sequence: Synthetic oligonucleotide
  Antisense strand to SEQ ID NO: 2298442
uaacauagccagcaauccu

SEQ ID NO: 2298444 - RNA, 19 nt, Artificial Sequence
  Description of Artificial Sequence: Synthetic oligonucleotide
  Sense strand starting at position 3876 of SEQ ID NO: 1884870
auaagaaauugccuaguua

SEQ ID NO: 2298445 - RNA, 19 nt, Artificial Sequence
  Description of Artificial Sequence: Synthetic oligonucleotide
  Antisense strand to SEQ ID NO: 2298444
uaacuaggcaauuucuuau

SEQ ID NO: 2298446 - RNA, 19 nt, Artificial Sequence
  Description of Artificial Sequence: Synthetic oligonucleotide
  Sense strand starting at position 55 of SEQ ID NO: 1884871
cuuccuguuccuuacugau

SEQ ID NO: 2298447 - RNA, 19 nt, Artificial Sequence
  Description of Artificial Sequence: Synthetic oligonucleotide
  Antisense strand to SEQ ID NO: 2298446
aucaguaaggaacaggaag

SEQ ID NO: 2298448 - RNA, 19 nt, Artificial Sequence
  Description of Artificial Sequence: Synthetic oligonucleotide
  Sense strand starting at position 279 of SEQ ID NO: 1884871
uuguuuguccauuaggaga

SEQ ID NO: 2298449 - RNA, 19 nt, Artificial Sequence
  Description of Artificial Sequence: Synthetic oligonucleotide
  Antisense strand to SEQ ID NO: 2298448
ucuccuaauggacaaacaa

SEQ ID NO: 2298450 - RNA, 19 nt, Artificial Sequence
  Description of Artificial Sequence: Synthetic oligonucleotide
  Sense strand starting at position 356 of SEQ ID NO: 1884871
ccuauaauagagugcauau

SEQ ID NO: 2298451 - RNA, 19 nt, Artificial Sequence
  Description of Artificial Sequence: Synthetic oligonucleotide
  Antisense strand to SEQ ID NO: 2298450
auaugcacucuauuauagg

SEQ ID NO: 2298452 - RNA, 19 nt, Artificial Sequence
  Description of Artificial Sequence: Synthetic oligonucleotide
  Sense strand starting at position 521 of SEQ ID NO: 1884871
uaaaucauggcaugguauu

SEQ ID NO: 2298453 - RNA, 19 nt, Artificial Sequence
  Description of Artificial Sequence: Synthetic oligonucleotide
  Antisense strand to SEQ ID NO: 2298452
aauaccaugccaugauuua

SEQ ID NO: 2298454 - RNA, 19 nt, Artificial Sequence
  Description of Artificial Sequence: Synthetic oligonucleotide
  Sense strand starting at position 768 of SEQ ID NO: 1884871
gcuuuauaagaacgaaauc

SEQ ID NO: 2298455 - RNA, 19 nt, Artificial Sequence
  Description of Artificial Sequence: Synthetic oligonucleotide
  Antisense strand to SEQ ID NO: 2298454
gauuucguucuuauaaagc

SEQ ID NO: 2298456 - RNA, 19 nt, Artificial Sequence
  Description of Artificial Sequence: Synthetic oligonucleotide
  Sense strand starting at position 943 of SEQ ID NO: 1884871
acccauagauugccucaga

SEQ ID NO: 2298457 - RNA, 19 nt, Artificial Sequence
  Description of Artificial Sequence: Synthetic oligonucleotide
  Antisense strand to SEQ ID NO: 2298456
ucugaggcaaucuaugggu

SEQ ID NO: 2298458 - RNA, 19 nt, Artificial Sequence
  Description of Artificial Sequence: Synthetic oligonucleotide
  Sense strand starting at position 944 of SEQ ID NO: 1884871
cccauagauugccucagaa

SEQ ID NO: 2298459 - RNA, 19 nt, Artificial Sequence
  Description of Artificial Sequence: Synthetic oligonucleotide
  Antisense strand to SEQ ID NO: 2298458
uucugaggcaaucuauggg

SEQ ID NO: 2298460 - RNA, 19 nt, Artificial Sequence
  Description of Artificial Sequence: Synthetic oligonucleotide
  Sense strand starting at position 1029 of SEQ ID NO: 1884871
gucguaaaucucuagaaac

SEQ ID NO: 2298461 - RNA, 19 nt, Artificial Sequence
  Description of Artificial Sequence: Synthetic oligonucleotide
  Antisense strand to SEQ ID NO: 2298460
guuucuagagauuuacgac

SEQ ID NO: 2298462 - RNA, 19 nt, Artificial Sequence
  Description of Artificial Sequence: Synthetic oligonucleotide
  Sense strand starting at position 1189 of SEQ ID NO: 1884871
auuacucacccauaucguu

SEQ ID NO: 2298463 - RNA, 19 nt, Artificial Sequence
  Description of Artificial Sequence: Synthetic oligonucleotide
  Antisense strand to SEQ ID NO: 2298462
aacgauaugggugaguaau

SEQ ID NO: 2298464 - RNA, 19 nt, Artificial Sequence
  Description of Artificial Sequence: Synthetic oligonucleotide
  Sense strand starting at position 1211 of SEQ ID NO: 1884871
aaguguuggaagcaagagu

SEQ ID NO: 2298465 - RNA, 19 nt, Artificial Sequence
  Description of Artificial Sequence: Synthetic oligonucleotide
  Antisense strand to SEQ ID NO: 2298464
acucuugcuuccaacacuu

SEQ ID NO: 2298466 - RNA, 19 nt, Artificial Sequence
  Description of Artificial Sequence: Synthetic oligonucleotide
  Sense strand starting at position 1237 of SEQ ID NO: 1884871
agaccuauaugguuccaaa

SEQ ID NO: 2298467 - RNA, 19 nt, Artificial Sequence
  Description of Artificial Sequence: Synthetic oligonucleotide
  Antisense strand to SEQ ID NO: 2298466
uuuggaaccauauaggucu

SEQ ID NO: 2298468 - RNA, 19 nt, Artificial Sequence
  Description of Artificial Sequence: Synthetic oligonucleotide
  Sense strand starting at position 1255 of SEQ ID NO: 1884871
agccuaugccaguagaaau

SEQ ID NO: 2298469 - RNA, 19 nt, Artificial Sequence
  Description of Artificial Sequence: Synthetic oligonucleotide
  Antisense strand to SEQ ID NO: 2298468
auuucuacuggcauaggcu

SEQ ID NO: 2298470 - RNA, 19 nt, Artificial Sequence
  Description of Artificial Sequence: Synthetic oligonucleotide
  Sense strand starting at position 1265 of SEQ ID NO: 1884871
aguagaaauaguuguacag

SEQ ID NO: 2298471 - RNA, 19 nt, Artificial Sequence
  Description of Artificial Sequence: Synthetic oligonucleotide
  Antisense strand to SEQ ID NO: 2298470
cuguacaacuauuucuacu

SEQ ID NO: 2298472 - RNA, 19 nt, Artificial Sequence
  Description of Artificial Sequence: Synthetic oligonucleotide
  Sense strand starting at position 1290 of SEQ ID NO: 1884871
uuauucgugagcuaagaca

SEQ ID NO: 2298473 - RNA, 19 nt, Artificial Sequence
  Description of Artificial Sequence: Synthetic oligonucleotide
  Antisense strand to SEQ ID NO: 2298472
ugucuuagcucacgaauaa

SEQ ID NO: 2298474 - RNA, 19 nt, Artificial Sequence
  Description of Artificial Sequence: Synthetic oligonucleotide
  Sense strand starting at position 1334 of SEQ ID NO: 1884871
ugauacguaagugaucaga

SEQ ID NO: 2298475 - RNA, 19 nt, Artificial Sequence
  Description of Artificial Sequence: Synthetic oligonucleotide
  Antisense strand to SEQ ID NO: 2298474
ucugaucacuuacguauca

SEQ ID NO: 2298476 - RNA, 19 nt, Artificial Sequence
  Description of Artificial Sequence: Synthetic oligonucleotide
  Sense strand starting at position 1336 of SEQ ID NO: 1884871
auacguaagugaucagaca

SEQ ID NO: 2298477 - RNA, 19 nt, Artificial Sequence
  Description of Artificial Sequence: Synthetic oligonucleotide
  Antisense strand to SEQ ID NO: 2298476
ugucugaucacuuacguau

SEQ ID NO: 2298478 - RNA, 19 nt, Artificial Sequence
  Description of Artificial Sequence: Synthetic oligonucleotide
  Sense strand starting at position 1343 of SEQ ID NO: 1884871
agugaucagacagguaaac

SEQ ID NO: 2298479 - RNA, 19 nt, Artificial Sequence
  Description of Artificial Sequence: Synthetic oligonucleotide
  Antisense strand to SEQ ID NO: 2298478
guuuaccugucugaucacu

SEQ ID NO: 2298480 - RNA, 19 nt, Artificial Sequence
  Description of Artificial Sequence: Synthetic oligonucleotide
  Sense strand starting at position 1444 of SEQ ID NO: 1884871
aaccgcuuugaguauaacu

SEQ ID NO: 2298481 - RNA, 19 nt, Artificial Sequence
  Description of Artificial Sequence: Synthetic oligonucleotide
  Antisense strand to SEQ ID NO: 2298480
aguuauacucaaagcgguu

SEQ ID NO: 2298482 - RNA, 19 nt, Artificial Sequence
  Description of Artificial Sequence: Synthetic oligonucleotide
  Sense strand starting at position 1449 of SEQ ID NO: 1884871
cuuugaguauaacugacau

SEQ ID NO: 2298483 - RNA, 19 nt, Artificial Sequence
  Description of Artificial Sequence: Synthetic oligonucleotide
  Antisense strand to SEQ ID NO: 2298482
augucaguuauacucaaag

SEQ ID NO: 2298484 - RNA, 19 nt, Artificial Sequence
  Description of Artificial Sequence: Synthetic oligonucleotide
  Sense strand starting at position 1482 of SEQ ID NO: 1884871
auauuuaaagugugcaguu

SEQ ID NO: 2298485 - RNA, 19 nt, Artificial Sequence
  Description of Artificial Sequence: Synthetic oligonucleotide
  Antisense strand to SEQ ID NO: 2298484
aacugcacacuuuaaauau

SEQ ID NO: 2298486 - RNA, 19 nt, Artificial Sequence
  Description of Artificial Sequence: Synthetic oligonucleotide
  Sense strand starting at position 1483 of SEQ ID NO: 1884871
uauuuaaagugugcaguuu

SEQ ID NO: 2298487 - RNA, 19 nt, Artificial Sequence
  Description of Artificial Sequence: Synthetic oligonucleotide
  Antisense strand to SEQ ID NO: 2298486
aaacugcacacuuuaaaua

SEQ ID NO: 2298488 - RNA, 19 nt, Artificial Sequence
  Description of Artificial Sequence: Synthetic oligonucleotide
  Sense strand starting at position 1532 of SEQ ID NO: 1884871
aggccaucacccgagauga

SEQ ID NO: 2298489 - RNA, 19 nt, Artificial Sequence
  Description of Artificial Sequence: Synthetic oligonucleotide
  Antisense strand to SEQ ID NO: 2298488
ucaucucgggugauggccu

SEQ ID NO: 2298490 - RNA, 19 nt, Artificial Sequence
  Description of Artificial Sequence: Synthetic oligonucleotide
  Sense strand starting at position 1534 of SEQ ID NO: 1884871
gccaucacccgagaugaga

SEQ ID NO: 2298491 - RNA, 19 nt, Artificial Sequence
  Description of Artificial Sequence: Synthetic oligonucleotide
  Antisense strand to SEQ ID NO: 2298490
ucucaucucgggugauggc

SEQ ID NO: 2298492 - RNA, 19 nt, Artificial Sequence
  Description of Artificial Sequence: Synthetic oligonucleotide
  Sense strand starting at position 1611 of SEQ ID NO: 1884871
cuaggcugacuugaucuaa

SEQ ID NO: 2298493 - RNA, 19 nt, Artificial Sequence
  Description of Artificial Sequence: Synthetic oligonucleotide
  Antisense strand to SEQ ID NO: 2298492
uuagaucaagucagccuag

SEQ ID NO: 2298494 - RNA, 19 nt, Artificial Sequence
  Description of Artificial Sequence: Synthetic oligonucleotide
  Sense strand starting at position 1682 of SEQ ID NO: 1884871
ggagcucccuaucugacaa

SEQ ID NO: 2298495 - RNA, 19 nt, Artificial Sequence
  Description of Artificial Sequence: Synthetic oligonucleotide
  Antisense strand to SEQ ID NO: 2298494
uugucagauagggagcucc

SEQ ID NO: 2298496 - RNA, 19 nt, Artificial Sequence
  Description of Artificial Sequence: Synthetic oligonucleotide
  Sense strand starting at position 2332 of SEQ ID NO: 1884871
gguugaguuauguagacaa

SEQ ID NO: 2298497 - RNA, 19 nt, Artificial Sequence
  Description of Artificial Sequence: Synthetic oligonucleotide
  Antisense strand to SEQ ID NO: 2298496
uugucuacauaacucaacc

SEQ ID NO: 2298498 - RNA, 19 nt, Artificial Sequence
  Description of Artificial Sequence: Synthetic oligonucleotide
  Sense strand starting at position 2364 of SEQ ID NO: 1884871
cugugauugccggcguuca

SEQ ID NO: 2298499 - RNA, 19 nt, Artificial Sequence
  Description of Artificial Sequence: Synthetic oligonucleotide
  Antisense strand to SEQ ID NO: 2298498
ugaacgccggcaaucacag

SEQ ID NO: 2298500 - RNA, 19 nt, Artificial Sequence
  Description of Artificial Sequence: Synthetic oligonucleotide
  Sense strand starting at position 2366 of SEQ ID NO: 1884871
gugauugccggcguucaaa

SEQ ID NO: 2298501 - RNA, 19 nt, Artificial Sequence
  Description of Artificial Sequence: Synthetic oligonucleotide
  Antisense strand to SEQ ID NO: 2298500
uuugaacgccggcaaucac

SEQ ID NO: 2298502 - RNA, 19 nt, Artificial Sequence
  Description of Artificial Sequence: Synthetic oligonucleotide
  Sense strand starting at position 2573 of SEQ ID NO: 1884871
uucugagguagcgaaugaa

SEQ ID NO: 2298503 - RNA, 19 nt, Artificial Sequence
  Description of Artificial Sequence: Synthetic oligonucleotide
  Antisense strand to SEQ ID NO: 2298502
uucauucgcuaccucagaa

SEQ ID NO: 2298504 - RNA, 19 nt, Artificial Sequence
  Description of Artificial Sequence: Synthetic oligonucleotide
  Sense strand starting at position 2642 of SEQ ID NO: 1884871
aaggcacugacguagagau

SEQ ID NO: 2298505 - RNA, 19 nt, Artificial Sequence
  Description of Artificial Sequence: Synthetic oligonucleotide
  Antisense strand to SEQ ID NO: 2298504
aucucuacgucagugccuu

SEQ ID NO: 2298506 - RNA, 19 nt, Artificial Sequence
  Description of Artificial Sequence: Synthetic oligonucleotide
  Sense strand starting at position 2646 of SEQ ID NO: 1884871
cacugacguagagauaguu

SEQ ID NO: 2298507 - RNA, 19 nt, Artificial Sequence
  Description of Artificial Sequence: Synthetic oligonucleotide
  Antisense strand to SEQ ID NO: 2298506
aacuaucucuacgucagug

SEQ ID NO: 2298508 - RNA, 19 nt, Artificial Sequence
  Description of Artificial Sequence: Synthetic oligonucleotide
  Sense strand starting at position 2921 of SEQ ID NO: 1884871
uuaaguuggcuugagagga

SEQ ID NO: 2298509 - RNA, 19 nt, Artificial Sequence
  Description of Artificial Sequence: Synthetic oligonucleotide
  Antisense strand to SEQ ID NO: 2298508
uccucucaagccaacuuaa

SEQ ID NO: 2298510 - RNA, 19 nt, Artificial Sequence
  Description of Artificial Sequence: Synthetic oligonucleotide
  Sense strand starting at position 2929 of SEQ ID NO: 1884871
gcuugagaggauggauaau

SEQ ID NO: 2298511 - RNA, 19 nt, Artificial Sequence
  Description of Artificial Sequence: Synthetic oligonucleotide
  Antisense strand to SEQ ID NO: 2298510
auuauccauccucucaagc

SEQ ID NO: 2298512 - RNA, 19 nt, Artificial Sequence
  Description of Artificial Sequence: Synthetic oligonucleotide
  Sense strand starting at position 3390 of SEQ ID NO: 1884871
auugguuugauuuguaguu

SEQ ID NO: 2298513 - RNA, 19 nt, Artificial Sequence
  Description of Artificial Sequence: Synthetic oligonucleotide
  Antisense strand to SEQ ID NO: 2298512
aacuacaaaucaaaccaau

SEQ ID NO: 2298514 - RNA, 19 nt, Artificial Sequence
  Description of Artificial Sequence: Synthetic oligonucleotide
  Sense strand starting at position 3391 of SEQ ID NO: 1884871
uugguuugauuuguaguuu

SEQ ID NO: 2298515 - RNA, 19 nt, Artificial Sequence
  Description of Artificial Sequence: Synthetic oligonucleotide
  Antisense strand to SEQ ID NO: 2298514
aaacuacaaaucaaaccaa

SEQ ID NO: 2298516 - RNA, 19 nt, Artificial Sequence
  Description of Artificial Sequence: Synthetic oligonucleotide
  Sense strand starting at position 3397 of SEQ ID NO: 1884871
ugauuuguaguuugcuuau

SEQ ID NO: 2298517 - RNA, 19 nt, Artificial Sequence
  Description of Artificial Sequence: Synthetic oligonucleotide
  Antisense strand to SEQ ID NO: 2298516
auaagcaaacuacaaauca

SEQ ID NO: 2298518 - RNA, 19 nt, Artificial Sequence
  Description of Artificial Sequence: Synthetic oligonucleotide
  Sense strand starting at position 3409 of SEQ ID NO: 1884871
ugcuuaugaccacaaguuu

SEQ ID NO: 2298519 - RNA, 19 nt, Artificial Sequence
  Description of Artificial Sequence: Synthetic oligonucleotide
  Antisense strand to SEQ ID NO: 2298518
aaacuuguggucauaagca

SEQ ID NO: 2298520 - RNA, 19 nt, Artificial Sequence
  Description of Artificial Sequence: Synthetic oligonucleotide
  Sense strand starting at position 3441 of SEQ ID NO: 1884871
guuauuuagugacugugua

SEQ ID NO: 2298521 - RNA, 19 nt, Artificial Sequence
  Description of Artificial Sequence: Synthetic oligonucleotide
  Antisense strand to SEQ ID NO: 2298520
uacacagucacuaaauaac

SEQ ID NO: 2298522 - RNA, 19 nt, Artificial Sequence
  Description of Artificial Sequence: Synthetic oligonucleotide
  Sense strand starting at position 3442 of SEQ ID NO: 1884871
uuauuuagugacuguguau

SEQ ID NO: 2298523 - RNA, 19 nt, Artificial Sequence
  Description of Artificial Sequence: Synthetic oligonucleotide
  Antisense strand to SEQ ID NO: 2298522
auacacagucacuaaauaa

SEQ ID NO: 2298524 - RNA, 19 nt, Artificial Sequence
  Description of Artificial Sequence: Synthetic oligonucleotide
  Sense strand starting at position 3857 of SEQ ID NO: 1884871
gugagugugcuucuccuuu

SEQ ID NO: 2298525 - RNA, 19 nt, Artificial Sequence
  Description of Artificial Sequence: Synthetic oligonucleotide
  Antisense strand to SEQ ID NO: 2298524
aaaggagaagcacacucac

SEQ ID NO: 2298526 - RNA, 19 nt, Artificial Sequence
  Description of Artificial Sequence: Synthetic oligonucleotide
  Sense strand starting at position 220 of SEQ ID NO: 1884872
aggucacucaguuauuagu

SEQ ID NO: 2298527 - RNA, 19 nt, Artificial Sequence
  Description of Artificial Sequence: Synthetic oligonucleotide
  Antisense strand to SEQ ID NO: 2298526
acuaauaacugagugaccu

SEQ ID NO: 2298528 - RNA, 19 nt, Artificial Sequence
  Description of Artificial Sequence: Synthetic oligonucleotide
  Sense strand starting at position 222 of SEQ ID NO: 1884872
gucacucaguuauuaguga

SEQ ID NO: 2298529 - RNA, 19 nt, Artificial Sequence
  Description of Artificial Sequence: Synthetic oligonucleotide
  Antisense strand to SEQ ID NO: 2298528
ucacuaauaacugagugac

SEQ ID NO: 2298530 - RNA, 19 nt, Artificial Sequence
  Description of Artificial Sequence: Synthetic oligonucleotide
  Sense strand starting at position 452 of SEQ ID NO: 1884872
ucgggcuuuguugcuaauu

SEQ ID NO: 2298531 - RNA, 19 nt, Artificial Sequence
  Description of Artificial Sequence: Synthetic oligonucleotide
  Antisense strand to SEQ ID NO: 2298530
aauuagcaacaaagcccga

SEQ ID NO: 2298532 - RNA, 19 nt, Artificial Sequence
  Description of Artificial Sequence: Synthetic oligonucleotide
  Sense strand starting at position 453 of SEQ ID NO: 1884872
cgggcuuuguugcuaauuu

SEQ ID NO: 2298533 - RNA, 19 nt, Artificial Sequence
  Description of Artificial Sequence: Synthetic oligonucleotide
  Antisense strand to SEQ ID NO: 2298532
aaauuagcaacaaagcccg

SEQ ID NO: 2298534 - RNA, 19 nt, Artificial Sequence
  Description of Artificial Sequence: Synthetic oligonucleotide
  Sense strand starting at position 562 of SEQ ID NO: 1884872
aaaugugaccucugcagga

SEQ ID NO: 2298535 - RNA, 19 nt, Artificial Sequence
  Description of Artificial Sequence: Synthetic oligonucleotide
  Antisense strand to SEQ ID NO: 2298534
uccugcagaggucacauuu

SEQ ID NO: 2298536 - RNA, 19 nt, Artificial Sequence
  Description of Artificial Sequence: Synthetic oligonucleotide
  Sense strand starting at position 575 of SEQ ID NO: 1884872
gcaggagucgacugaggaa

SEQ ID NO: 2298537 - RNA, 19 nt, Artificial Sequence
  Description of Artificial Sequence: Synthetic oligonucleotide
  Antisense strand to SEQ ID NO: 2298536
uuccucagucgacuccugc

SEQ ID NO: 2298538 - RNA, 19 nt, Artificial Sequence
  Description of Artificial Sequence: Synthetic oligonucleotide
  Sense strand starting at position 622 of SEQ ID NO: 1884872
gaagaacuccugcgagaga

SEQ ID NO: 2298539 - RNA, 19 nt, Artificial Sequence
  Description of Artificial Sequence: Synthetic oligonucleotide
  Antisense strand to SEQ ID NO: 2298538
ucucucgcaggaguucuuc

SEQ ID NO: 2298540 - RNA, 19 nt, Artificial Sequence
  Description of Artificial Sequence: Synthetic oligonucleotide
  Sense strand starting at position 686 of SEQ ID NO: 1884872
uggaauagguggcuacauu

SEQ ID NO: 2298541 - RNA, 19 nt, Artificial Sequence
  Description of Artificial Sequence: Synthetic oligonucleotide
  Antisense strand to SEQ ID NO: 2298540
aauguagccaccuauucca

SEQ ID NO: 2298542 - RNA, 19 nt, Artificial Sequence
  Description of Artificial Sequence: Synthetic oligonucleotide
  Sense strand starting at position 822 of SEQ ID NO: 1884872
uuaagaaaugccuggaggu

SEQ ID NO: 2298543 - RNA, 19 nt, Artificial Sequence
  Description of Artificial Sequence: Synthetic oligonucleotide
  Antisense strand to SEQ ID NO: 2298542
accuccaggcauuucuuaa

SEQ ID NO: 2298544 - RNA, 19 nt, Artificial Sequence
  Description of Artificial Sequence: Synthetic oligonucleotide
  Sense strand starting at position 823 of SEQ ID NO: 1884872
uaagaaaugccuggaggug

SEQ ID NO: 2298545 - RNA, 19 nt, Artificial Sequence
  Description of Artificial Sequence: Synthetic oligonucleotide
  Antisense strand to SEQ ID NO: 2298544
caccuccaggcauuucuua

SEQ ID NO: 2298546 - RNA, 19 nt, Artificial Sequence
  Description of Artificial Sequence: Synthetic oligonucleotide
  Sense strand starting at position 874 of SEQ ID NO: 1884872
ucaugaacucucugaaguc

SEQ ID NO: 2298547 - RNA, 19 nt, Artificial Sequence
  Description of Artificial Sequence: Synthetic oligonucleotide
  Antisense strand to SEQ ID NO: 2298546
gacuucagagaguucauga

SEQ ID NO: 2298548 - RNA, 19 nt, Artificial Sequence
  Description of Artificial Sequence: Synthetic oligonucleotide
  Sense strand starting at position 1135 of SEQ ID NO: 1884872
caggacuaacuuggucaaa

SEQ ID NO: 2298549 - RNA, 19 nt, Artificial Sequence
  Description of Artificial Sequence: Synthetic oligonucleotide
  Antisense strand to SEQ ID NO: 2298548
uuugaccaaguuaguccug

SEQ ID NO: 2298550 - RNA, 19 nt, Artificial Sequence
  Description of Artificial Sequence: Synthetic oligonucleotide
  Sense strand starting at position 1148 of SEQ ID NO: 1884872
gucaaagaaccauaguuuc

SEQ ID NO: 2298551 - RNA, 19 nt, Artificial Sequence
  Description of Artificial Sequence: Synthetic oligonucleotide
  Antisense strand to SEQ ID NO: 2298550
gaaacuaugguucuuugac

SEQ ID NO: 2298552 - RNA, 19 nt, Artificial Sequence
  Description of Artificial Sequence: Synthetic oligonucleotide
  Sense strand starting at position 1156 of SEQ ID NO: 1884872
accauaguuucugcaccau

SEQ ID NO: 2298553 - RNA, 19 nt, Artificial Sequence
  Description of Artificial Sequence: Synthetic oligonucleotide
  Antisense strand to SEQ ID NO: 2298552
auggugcagaaacuauggu

SEQ ID NO: 2298554 - RNA, 19 nt, Artificial Sequence
  Description of Artificial Sequence: Synthetic oligonucleotide
  Sense strand starting at position 1388 of SEQ ID NO: 1884872
uuuacaaagcuuugucaga

SEQ ID NO: 2298555 - RNA, 19 nt, Artificial Sequence
  Description of Artificial Sequence: Synthetic oligonucleotide
  Antisense strand to SEQ ID NO: 2298554
ucugacaaagcuuuguaaa

SEQ ID NO: 2298556 - RNA, 19 nt, Artificial Sequence
  Description of Artificial Sequence: Synthetic oligonucleotide
  Sense strand starting at position 1395 of SEQ ID NO: 1884872
agcuuugucagaggucaag

SEQ ID NO: 2298557 - RNA, 19 nt, Artificial Sequence
  Description of Artificial Sequence: Synthetic oligonucleotide
  Antisense strand to SEQ ID NO: 2298556
cuugaccucugacaaagcu

SEQ ID NO: 2298558 - RNA, 19 nt, Artificial Sequence
  Description of Artificial Sequence: Synthetic oligonucleotide
  Sense strand starting at position 1771 of SEQ ID NO: 1884872
uugacuuguucuguacaua

SEQ ID NO: 2298559 - RNA, 19 nt, Artificial Sequence
  Description of Artificial Sequence: Synthetic oligonucleotide
  Antisense strand to SEQ ID NO: 2298558
uauguacagaacaagucaa

SEQ ID NO: 2298560 - RNA, 19 nt, Artificial Sequence
  Description of Artificial Sequence: Synthetic oligonucleotide
  Sense strand starting at position 1772 of SEQ ID NO: 1884872
ugacuuguucuguacauag

SEQ ID NO: 2298561 - RNA, 19 nt, Artificial Sequence
  Description of Artificial Sequence: Synthetic oligonucleotide
  Antisense strand to SEQ ID NO: 2298560
cuauguacagaacaaguca

SEQ ID NO: 2298562 - RNA, 19 nt, Artificial Sequence
  Description of Artificial Sequence: Synthetic oligonucleotide
  Sense strand starting at position 1911 of SEQ ID NO: 1884872
ccaguaugugugagugugu

SEQ ID NO: 2298563 - RNA, 19 nt, Artificial Sequence
  Description of Artificial Sequence: Synthetic oligonucleotide
  Antisense strand to SEQ ID NO: 2298562
acacacucacacauacugg

SEQ ID NO: 2298564 - RNA, 19 nt, Artificial Sequence
  Description of Artificial Sequence: Synthetic oligonucleotide
  Sense strand starting at position 2127 of SEQ ID NO: 1884872
ccaacuguaugaucuguua

SEQ ID NO: 2298565 - RNA, 19 nt, Artificial Sequence
  Description of Artificial Sequence: Synthetic oligonucleotide
  Antisense strand to SEQ ID NO: 2298564
uaacagaucauacaguugg

SEQ ID NO: 2298566 - RNA, 19 nt, Artificial Sequence
  Description of Artificial Sequence: Synthetic oligonucleotide
  Sense strand starting at position 2238 of SEQ ID NO: 1884872
ugggauuauuccucugccu

SEQ ID NO: 2298567 - RNA, 19 nt, Artificial Sequence
  Description of Artificial Sequence: Synthetic oligonucleotide
  Antisense strand to SEQ ID NO: 2298566
aggcagaggaauaauccca

SEQ ID NO: 2298568 - RNA, 19 nt, Artificial Sequence
  Description of Artificial Sequence: Synthetic oligonucleotide
  Sense strand starting at position 2240 of SEQ ID NO: 1884872
ggauuauuccucugccuac

SEQ ID NO: 2298569 - RNA, 19 nt, Artificial Sequence
  Description of Artificial Sequence: Synthetic oligonucleotide
  Antisense strand to SEQ ID NO: 2298568
guaggcagaggaauaaucc

SEQ ID NO: 2298570 - RNA, 19 nt, Artificial Sequence
  Description of Artificial Sequence: Synthetic oligonucleotide
  Sense strand starting at position 2264 of SEQ ID NO: 1884872
caucauucgcgguaauuag

SEQ ID NO: 2298571 - RNA, 19 nt, Artificial Sequence
  Description of Artificial Sequence: Synthetic oligonucleotide
  Antisense strand to SEQ ID NO: 2298570
cuaauuaccgcgaaugaug

SEQ ID NO: 2298572 - RNA, 19 nt, Artificial Sequence
  Description of Artificial Sequence: Synthetic oligonucleotide
  Sense strand starting at position 2301 of SEQ ID NO: 1884872
gcaguaagauuccugauau

SEQ ID NO: 2298573 - RNA, 19 nt, Artificial Sequence
  Description of Artificial Sequence: Synthetic oligonucleotide
  Antisense strand to SEQ ID NO: 2298572
auaucaggaaucuuacugc

SEQ ID NO: 2298574 - RNA, 19 nt, Artificial Sequence
  Description of Artificial Sequence: Synthetic oligonucleotide
  Sense strand starting at position 2643 of SEQ ID NO: 1884872
ugauaauuagaugggucau

SEQ ID NO: 2298575 - RNA, 19 nt, Artificial Sequence
  Description of Artificial Sequence: Synthetic oligonucleotide
  Antisense strand to SEQ ID NO: 2298574
augacccaucuaauuauca

SEQ ID NO: 2298576 - RNA, 19 nt, Artificial Sequence
  Description of Artificial Sequence: Synthetic oligonucleotide
  Sense strand starting at position 2700 of SEQ ID NO: 1884872
uaaagcugacaggguauua

SEQ ID NO: 2298577 - RNA, 19 nt, Artificial Sequence
  Description of Artificial Sequence: Synthetic oligonucleotide
  Antisense strand to SEQ ID NO: 2298576
uaauacccugucagcuuua

SEQ ID NO: 2298578 - RNA, 19 nt, Artificial Sequence
  Description of Artificial Sequence: Synthetic oligonucleotide
  Sense strand starting at position 2718 of SEQ ID NO: 1884872
accugacaguaauuagguu

SEQ ID NO: 2298579 - RNA, 19 nt, Artificial Sequence
  Description of Artificial Sequence: Synthetic oligonucleotide
  Antisense strand to SEQ ID NO: 2298578
aaccuaauuacugucaggu

SEQ ID NO: 2298580 - RNA, 19 nt, Artificial Sequence
  Description of Artificial Sequence: Synthetic oligonucleotide
  Sense strand starting at position 2907 of SEQ ID NO: 1884872
gaugaagaggcuugccacu

SEQ ID NO: 2298581 - RNA, 19 nt, Artificial Sequence
  Description of Artificial Sequence: Synthetic oligonucleotide
  Antisense strand to SEQ ID NO: 2298580
aguggcaagccucuucauc

SEQ ID NO: 2298582 - RNA, 19 nt, Artificial Sequence
  Description of Artificial Sequence: Synthetic oligonucleotide
  Sense strand starting at position 2909 of SEQ ID NO: 1884872
ugaagaggcuugccacuua

SEQ ID NO: 2298583 - RNA, 19 nt, Artificial Sequence
  Description of Artificial Sequence: Synthetic oligonucleotide
  Antisense strand to SEQ ID NO: 2298582
uaaguggcaagccucuuca

SEQ ID NO: 2298584 - RNA, 19 nt, Artificial Sequence
  Description of Artificial Sequence: Synthetic oligonucleotide
  Sense strand starting at position 2924 of SEQ ID NO: 1884872
cuuaauguacugcacagau

SEQ ID NO: 2298585 - RNA, 19 nt, Artificial Sequence
  Description of Artificial Sequence: Synthetic oligonucleotide
  Antisense strand to SEQ ID NO: 2298584
aucugugcaguacauuaag

SEQ ID NO: 2298586 - RNA, 19 nt, Artificial Sequence
  Description of Artificial Sequence: Synthetic oligonucleotide
  Sense strand starting at position 2955 of SEQ ID NO: 1884872
gguugccgacaaugaaaua

SEQ ID NO: 2298587 - RNA, 19 nt, Artificial Sequence
  Description of Artificial Sequence: Synthetic oligonucleotide
  Antisense strand to SEQ ID NO: 2298586
uauuucauugucggcaacc

SEQ ID NO: 2298588 - RNA, 19 nt, Artificial Sequence
  Description of Artificial Sequence: Synthetic oligonucleotide
  Sense strand starting at position 2998 of SEQ ID NO: 1884872
gugaacaagagguggaauu

SEQ ID NO: 2298589 - RNA, 19 nt, Artificial Sequence
  Description of Artificial Sequence: Synthetic oligonucleotide
  Antisense strand to SEQ ID NO: 2298588
aauuccaccucuuguucac

SEQ ID NO: 2298590 - RNA, 19 nt, Artificial Sequence
  Description of Artificial Sequence: Synthetic oligonucleotide
  Sense strand starting at position 3209 of SEQ ID NO: 1884872
agaguaaacuacccaguuu

SEQ ID NO: 2298591 - RNA, 19 nt, Artificial Sequence
  Description of Artificial Sequence: Synthetic oligonucleotide
  Antisense strand to SEQ ID NO: 2298590
aaacuggguaguuuacucu

SEQ ID NO: 2298592 - RNA, 19 nt, Artificial Sequence
  Description of Artificial Sequence: Synthetic oligonucleotide
  Sense strand starting at position 3240 of SEQ ID NO: 1884872
uuuggaaaucuuugcgaaa

SEQ ID NO: 2298593 - RNA, 19 nt, Artificial Sequence
  Description of Artificial Sequence: Synthetic oligonucleotide
  Antisense strand to SEQ ID NO: 2298592
uuucgcaaagauuuccaaa

SEQ ID NO: 2298594 - RNA, 19 nt, Artificial Sequence
  Description of Artificial Sequence: Synthetic oligonucleotide
  Sense strand starting at position 3241 of SEQ ID NO: 1884872
uuggaaaucuuugcgaaag

SEQ ID NO: 2298595 - RNA, 19 nt, Artificial Sequence
  Description of Artificial Sequence: Synthetic oligonucleotide
  Antisense strand to SEQ ID NO: 2298594
cuuucgcaaagauuuccaa

SEQ ID NO: 2298596 - RNA, 19 nt, Artificial Sequence
  Description of Artificial Sequence: Synthetic oligonucleotide
  Sense strand starting at position 3251 of SEQ ID NO: 1884872
uugcgaaaggauugcuaua

SEQ ID NO: 2298597 - RNA, 19 nt, Artificial Sequence
  Description of Artificial Sequence: Synthetic oligonucleotide
  Antisense strand to SEQ ID NO: 2298596
uauagcaauccuuucgcaa

SEQ ID NO: 2298598 - RNA, 19 nt, Artificial Sequence
  Description of Artificial Sequence: Synthetic oligonucleotide
  Sense strand starting at position 3253 of SEQ ID NO: 1884872
gcgaaaggauugcuauaaa

SEQ ID NO: 2298599 - RNA, 19 nt, Artificial Sequence
  Description of Artificial Sequence: Synthetic oligonucleotide
  Antisense strand to SEQ ID NO: 2298598
uuuauagcaauccuuucgc

SEQ ID NO: 2298600 - RNA, 19 nt, Artificial Sequence
  Description of Artificial Sequence: Synthetic oligonucleotide
  Sense strand starting at position 3328 of SEQ ID NO: 1884872
ucaucagacguuugaugag

SEQ ID NO: 2298601 - RNA, 19 nt, Artificial Sequence
  Description of Artificial Sequence: Synthetic oligonucleotide
  Antisense strand to SEQ ID NO: 2298600
cucaucaaacgucugauga

SEQ ID NO: 2298602 - RNA, 19 nt, Artificial Sequence
  Description of Artificial Sequence: Synthetic oligonucleotide
  Sense strand starting at position 3640 of SEQ ID NO: 1884872
gcggguguucaguuacgau

SEQ ID NO: 2298603 - RNA, 19 nt, Artificial Sequence
  Description of Artificial Sequence: Synthetic oligonucleotide
  Antisense strand to SEQ ID NO: 2298602
aucguaacugaacacccgc

SEQ ID NO: 2298604 - RNA, 19 nt, Artificial Sequence
  Description of Artificial Sequence: Synthetic oligonucleotide
  Sense strand starting at position 3785 of SEQ ID NO: 1884872
gugaaaggucucggucaag

SEQ ID NO: 2298605 - RNA, 19 nt, Artificial Sequence
  Description of Artificial Sequence: Synthetic oligonucleotide
  Antisense strand to SEQ ID NO: 2298604
cuugaccgagaccuuucac

SEQ ID NO: 2298606 - RNA, 19 nt, Artificial Sequence
  Description of Artificial Sequence: Synthetic oligonucleotide
  Sense strand starting at position 103 of SEQ ID NO: 1884873
uccgcugggauuugucuau

SEQ ID NO: 2298607 - RNA, 19 nt, Artificial Sequence
  Description of Artificial Sequence: Synthetic oligonucleotide
  Antisense strand to SEQ ID NO: 2298606
auagacaaaucccagcgga

SEQ ID NO: 2298608 - RNA, 19 nt, Artificial Sequence
  Description of Artificial Sequence: Synthetic oligonucleotide
  Sense strand starting at position 403 of SEQ ID NO: 1884873
acagacacccugugaacau

SEQ ID NO: 2298609 - RNA, 19 nt, Artificial Sequence
  Description of Artificial Sequence: Synthetic oligonucleotide
  Antisense strand to SEQ ID NO: 2298608
auguucacagggugucugu

SEQ ID NO: 2298610 - RNA, 19 nt, Artificial Sequence
  Description of Artificial Sequence: Synthetic oligonucleotide
  Sense strand starting at position 414 of SEQ ID NO: 1884873
gugaacauuccagagugca

SEQ ID NO: 2298611 - RNA, 19 nt, Artificial Sequence
  Description of Artificial Sequence: Synthetic oligonucleotide
  Antisense strand to SEQ ID NO: 2298610
ugcacucuggaauguucac

SEQ ID NO: 2298612 - RNA, 19 nt, Artificial Sequence
  Description of Artificial Sequence: Synthetic oligonucleotide
  Sense strand starting at position 426 of SEQ ID NO: 1884873
gagugcagggcugaagaau

SEQ ID NO: 2298613 - RNA, 19 nt, Artificial Sequence
  Description of Artificial Sequence: Synthetic oligonucleotide
  Antisense strand to SEQ ID NO: 2298612
auucuucagcccugcacuc

SEQ ID NO: 2298614 - RNA, 19 nt, Artificial Sequence
  Description of Artificial Sequence: Synthetic oligonucleotide
  Sense strand starting at position 435 of SEQ ID NO: 1884873
gcugaagaauggccugaau

SEQ ID NO: 2298615 - RNA, 19 nt, Artificial Sequence
  Description of Artificial Sequence: Synthetic oligonucleotide
  Antisense strand to SEQ ID NO: 2298614
auucaggccauucuucagc

SEQ ID NO: 2298616 - RNA, 19 nt, Artificial Sequence
  Description of Artificial Sequence: Synthetic oligonucleotide
  Sense strand starting at position 464 of SEQ ID NO: 1884873
ggcugauuucccugugguc

SEQ ID NO: 2298617 - RNA, 19 nt, Artificial Sequence
  Description of Artificial Sequence: Synthetic oligonucleotide
  Antisense strand to SEQ ID NO: 2298616
gaccacagggaaaucagcc

SEQ ID NO: 2298618 - RNA, 19 nt, Artificial Sequence
  Description of Artificial Sequence: Synthetic oligonucleotide
  Sense strand starting at position 623 of SEQ ID NO: 1884873
uggaaucucugauucuacu

SEQ ID NO: 2298619 - RNA, 19 nt, Artificial Sequence
  Description of Artificial Sequence: Synthetic oligonucleotide
  Antisense strand to SEQ ID NO: 2298618
aguagaaucagagauucca

SEQ ID NO: 2298620 - RNA, 19 nt, Artificial Sequence
  Description of Artificial Sequence: Synthetic oligonucleotide
  Sense strand starting at position 689 of SEQ ID NO: 1884873
acaggaaucucagcuuuac

SEQ ID NO: 2298621 - RNA, 19 nt, Artificial Sequence
  Description of Artificial Sequence: Synthetic oligonucleotide
  Antisense strand to SEQ ID NO: 2298620
guaaagcugagauuccugu

SEQ ID NO: 2298622 - RNA, 19 nt, Artificial Sequence
  Description of Artificial Sequence: Synthetic oligonucleotide
  Sense strand starting at position 991 of SEQ ID NO: 1884873
aggagcauugcagaaaucu

SEQ ID NO: 2298623 - RNA, 19 nt, Artificial Sequence
  Description of Artificial Sequence: Synthetic oligonucleotide
  Antisense strand to SEQ ID NO: 2298622
agauuucugcaaugcuccu

SEQ ID NO: 2298624 - RNA, 19 nt, Artificial Sequence
  Description of Artificial Sequence: Synthetic oligonucleotide
  Sense strand starting at position 997 of SEQ ID NO: 1884873
auugcagaaaucuggaguu

SEQ ID NO: 2298625 - RNA, 19 nt, Artificial Sequence
  Description of Artificial Sequence: Synthetic oligonucleotide
  Antisense strand to SEQ ID NO: 2298624
aacuccagauuucugcaau

SEQ ID NO: 2298626 - RNA, 19 nt, Artificial Sequence
  Description of Artificial Sequence: Synthetic oligonucleotide
  Sense strand starting at position 999 of SEQ ID NO: 1884873
ugcagaaaucuggaguucu

SEQ ID NO: 2298627 - RNA, 19 nt, Artificial Sequence
  Description of Artificial Sequence: Synthetic oligonucleotide
  Antisense strand to SEQ ID NO: 2298626
agaacuccagauuucugca

SEQ ID NO: 2298628 - RNA, 19 nt, Artificial Sequence
  Description of Artificial Sequence: Synthetic oligonucleotide
  Sense strand starting at position 1010 of SEQ ID NO: 1884873
ggaguucuacucuguuuau

SEQ ID NO: 2298629 - RNA, 19 nt, Artificial Sequence
  Description of Artificial Sequence: Synthetic oligonucleotide
  Antisense strand to SEQ ID NO: 2298628
auaaacagaguagaacucc

SEQ ID NO: 2298630 - RNA, 19 nt, Artificial Sequence
  Description of Artificial Sequence: Synthetic oligonucleotide
  Sense strand starting at position 1054 of SEQ ID NO: 1884873
ucagauaguuuccuggaaa

SEQ ID NO: 2298631 - RNA, 19 nt, Artificial Sequence
  Description of Artificial Sequence: Synthetic oligonucleotide
  Antisense strand to SEQ ID NO: 2298630
uuuccaggaaacuaucuga

SEQ ID NO: 2298632 - RNA, 19 nt, Artificial Sequence
  Description of Artificial Sequence: Synthetic oligonucleotide
  Sense strand starting at position 1180 of SEQ ID NO: 1884873
ggacaaucuuugcauuucu

SEQ ID NO: 2298633 - RNA, 19 nt, Artificial Sequence
  Description of Artificial Sequence: Synthetic oligonucleotide
  Antisense strand to SEQ ID NO: 2298632
agaaaugcaaagauugucc

SEQ ID NO: 2298634 - RNA, 19 nt, Artificial Sequence
  Description of Artificial Sequence: Synthetic oligonucleotide
  Sense strand starting at position 1199 of SEQ ID NO: 1884873
cauuucugaucccagggau

SEQ ID NO: 2298635 - RNA, 19 nt, Artificial Sequence
  Description of Artificial Sequence: Synthetic oligonucleotide
  Antisense strand to SEQ ID NO: 2298634
aucccugggaucagaaaug

SEQ ID NO: 2298636 - RNA, 19 nt, Artificial Sequence
  Description of Artificial Sequence: Synthetic oligonucleotide
  Sense strand starting at position 1557 of SEQ ID NO: 1884873
cagcucucaggugaguaaa

SEQ ID NO: 2298637 - RNA, 19 nt, Artificial Sequence
  Description of Artificial Sequence: Synthetic oligonucleotide
  Antisense strand to SEQ ID NO: 2298636
uuuacucaccugagagcug

SEQ ID NO: 2298638 - RNA, 19 nt, Artificial Sequence
  Description of Artificial Sequence: Synthetic oligonucleotide
  Sense strand starting at position 1559 of SEQ ID NO: 1884873
gcucucaggugaguaaauu

SEQ ID NO: 2298639 - RNA, 19 nt, Artificial Sequence
  Description of Artificial Sequence: Synthetic oligonucleotide
  Antisense strand to SEQ ID NO: 2298638
aauuuacucaccugagagc

SEQ ID NO: 2298640 - RNA, 19 nt, Artificial Sequence
  Description of Artificial Sequence: Synthetic oligonucleotide
  Sense strand starting at position 1567 of SEQ ID NO: 1884873
gugaguaaauucgcagaug

SEQ ID NO: 2298641 - RNA, 19 nt, Artificial Sequence
  Description of Artificial Sequence: Synthetic oligonucleotide
  Antisense strand to SEQ ID NO: 2298640
caucugcgaauuuacucac

SEQ ID NO: 2298642 - RNA, 19 nt, Artificial Sequence
  Description of Artificial Sequence: Synthetic oligonucleotide
  Sense strand starting at position 1588 of SEQ ID NO: 1884873
cacgcaugucuggaacaua

SEQ ID NO: 2298643 - RNA, 19 nt, Artificial Sequence
  Description of Artificial Sequence: Synthetic oligonucleotide
  Antisense strand to SEQ ID NO: 2298642
uauguuccagacaugcgug

SEQ ID NO: 2298644 - RNA, 19 nt, Artificial Sequence
  Description of Artificial Sequence: Synthetic oligonucleotide
  Sense strand starting at position 1671 of SEQ ID NO: 1884873
aacguuuguccggagagca

SEQ ID NO: 2298645 - RNA, 19 nt, Artificial Sequence
  Description of Artificial Sequence: Synthetic oligonucleotide
  Antisense strand to SEQ ID NO: 2298644
ugcucuccggacaaacguu

SEQ ID NO: 2298646 - RNA, 19 nt, Artificial Sequence
  Description of Artificial Sequence: Synthetic oligonucleotide
  Sense strand starting at position 1672 of SEQ ID NO: 1884873
acguuuguccggagagcau

SEQ ID NO: 2298647 - RNA, 19 nt, Artificial Sequence
  Description of Artificial Sequence: Synthetic oligonucleotide
  Antisense strand to SEQ ID NO: 2298646
augcucuccggacaaacgu

SEQ ID NO: 2298648 - RNA, 19 nt, Artificial Sequence
  Description of Artificial Sequence: Synthetic oligonucleotide
  Sense strand starting at position 1757 of SEQ ID NO: 1884873
cuggcauugaguuagaaau

SEQ ID NO: 2298649 - RNA, 19 nt, Artificial Sequence
  Description of Artificial Sequence: Synthetic oligonucleotide
  Antisense strand to SEQ ID NO: 2298648
auuucuaacucaaugccag

SEQ ID NO: 2298650 - RNA, 19 nt, Artificial Sequence
  Description of Artificial Sequence: Synthetic oligonucleotide
  Sense strand starting at position 2565 of SEQ ID NO: 1884873
agcuuucuugcugauagaa

SEQ ID NO: 2298651 - RNA, 19 nt, Artificial Sequence
  Description of Artificial Sequence: Synthetic oligonucleotide
  Antisense strand to SEQ ID NO: 2298650
uucuaucagcaagaaagcu

SEQ ID NO: 2298652 - RNA, 19 nt, Artificial Sequence
  Description of Artificial Sequence: Synthetic oligonucleotide
  Sense strand starting at position 2612 of SEQ ID NO: 1884873
acugaagagucacuuucuu

SEQ ID NO: 2298653 - RNA, 19 nt, Artificial Sequence
  Description of Artificial Sequence: Synthetic oligonucleotide
  Antisense strand to SEQ ID NO: 2298652
aagaaagugacucuucagu

SEQ ID NO: 2298654 - RNA, 19 nt, Artificial Sequence
  Description of Artificial Sequence: Synthetic oligonucleotide
  Sense strand starting at position 2738 of SEQ ID NO: 1884873
cuaagagcgguuugguaaa

SEQ ID NO: 2298655 - RNA, 19 nt, Artificial Sequence
  Description of Artificial Sequence: Synthetic oligonucleotide
  Antisense strand to SEQ ID NO: 2298654
uuuaccaaaccgcucuuag

SEQ ID NO: 2298656 - RNA, 19 nt, Artificial Sequence
  Description of Artificial Sequence: Synthetic oligonucleotide
  Sense strand starting at position 2767 of SEQ ID NO: 1884873
gcuaucuuggcguuaccua

SEQ ID NO: 2298657 - RNA, 19 nt, Artificial Sequence
  Description of Artificial Sequence: Synthetic oligonucleotide
  Antisense strand to SEQ ID NO: 2298656
uagguaacgccaagauagc

SEQ ID NO: 2298658 - RNA, 19 nt, Artificial Sequence
  Description of Artificial Sequence: Synthetic oligonucleotide
  Sense strand starting at position 2768 of SEQ ID NO: 1884873
cuaucuuggcguuaccuaa

SEQ ID NO: 2298659 - RNA, 19 nt, Artificial Sequence
  Description of Artificial Sequence: Synthetic oligonucleotide
  Antisense strand to SEQ ID NO: 2298658
uuagguaacgccaagauag

SEQ ID NO: 2298660 - RNA, 19 nt, Artificial Sequence
  Description of Artificial Sequence: Synthetic oligonucleotide
  Sense strand starting at position 3391 of SEQ ID NO: 1884873
cuggacugucaugaaguuu

SEQ ID NO: 2298661 - RNA, 19 nt, Artificial Sequence
  Description of Artificial Sequence: Synthetic oligonucleotide
  Antisense strand to SEQ ID NO: 2298660
aaacuucaugacaguccag

SEQ ID NO: 2298662 - RNA, 19 nt, Artificial Sequence
  Description of Artificial Sequence: Synthetic oligonucleotide
  Sense strand starting at position 3414 of SEQ ID NO: 1884873
uagguuaauugcguggaga

SEQ ID NO: 2298663 - RNA, 19 nt, Artificial Sequence
  Description of Artificial Sequence: Synthetic oligonucleotide
  Antisense strand to SEQ ID NO: 2298662
ucuccacgcaauuaaccua

SEQ ID NO: 2298664 - RNA, 19 nt, Artificial Sequence
  Description of Artificial Sequence: Synthetic oligonucleotide
  Sense strand starting at position 3415 of SEQ ID NO: 1884873
agguuaauugcguggagag

SEQ ID NO: 2298665 - RNA, 19 nt, Artificial Sequence
  Description of Artificial Sequence: Synthetic oligonucleotide
  Antisense strand to SEQ ID NO: 2298664
cucuccacgcaauuaaccu

SEQ ID NO: 2298666 - RNA, 19 nt, Artificial Sequence
  Description of Artificial Sequence: Synthetic oligonucleotide
  Sense strand starting at position 3416 of SEQ ID NO: 1884873
gguuaauugcguggagaga

SEQ ID NO: 2298667 - RNA, 19 nt, Artificial Sequence
  Description of Artificial Sequence: Synthetic oligonucleotide
  Antisense strand to SEQ ID NO: 2298666
ucucuccacgcaauuaacc

SEQ ID NO: 2298668 - RNA, 19 nt, Artificial Sequence
  Description of Artificial Sequence: Synthetic oligonucleotide
  Sense strand starting at position 3425 of SEQ ID NO: 1884873
cguggagagaccuggaaga

SEQ ID NO: 2298669 - RNA, 19 nt, Artificial Sequence
  Description of Artificial Sequence: Synthetic oligonucleotide
  Antisense strand to SEQ ID NO: 2298668
ucuuccaggucucuccacg

SEQ ID NO: 2298670 - RNA, 19 nt, Artificial Sequence
  Description of Artificial Sequence: Synthetic oligonucleotide
  Sense strand starting at position 3578 of SEQ ID NO: 1884873
cacuuacuccuucggugaa

SEQ ID NO: 2298671 - RNA, 19 nt, Artificial Sequence
  Description of Artificial Sequence: Synthetic oligonucleotide
  Antisense strand to SEQ ID NO: 2298670
uucaccgaaggaguaagug

SEQ ID NO: 2298672 - RNA, 19 nt, Artificial Sequence
  Description of Artificial Sequence: Synthetic oligonucleotide
  Sense strand starting at position 3581 of SEQ ID NO: 1884873
uuacuccuucggugaacuu

SEQ ID NO: 2298673 - RNA, 19 nt, Artificial Sequence
  Description of Artificial Sequence: Synthetic oligonucleotide
  Antisense strand to SEQ ID NO: 2298672
aaguucaccgaaggaguaa

SEQ ID NO: 2298674 - RNA, 19 nt, Artificial Sequence
  Description of Artificial Sequence: Synthetic oligonucleotide
  Sense strand starting at position 3710 of SEQ ID NO: 1884873
aggguaucauugccagaaa

SEQ ID NO: 2298675 - RNA, 19 nt, Artificial Sequence
  Description of Artificial Sequence: Synthetic oligonucleotide
  Antisense strand to SEQ ID NO: 2298674
uuucuggcaaugauacccu

SEQ ID NO: 2298676 - RNA, 19 nt, Artificial Sequence
  Description of Artificial Sequence: Synthetic oligonucleotide
  Sense strand starting at position 3771 of SEQ ID NO: 1884873
guacaagaacucugggcua

SEQ ID NO: 2298677 - RNA, 19 nt, Artificial Sequence
  Description of Artificial Sequence: Synthetic oligonucleotide
  Antisense strand to SEQ ID NO: 2298676
uagcccagaguucuuguac

SEQ ID NO: 2298678 - RNA, 19 nt, Artificial Sequence
  Description of Artificial Sequence: Synthetic oligonucleotide
  Sense strand starting at position 3773 of SEQ ID NO: 1884873
acaagaacucugggcuagu

SEQ ID NO: 2298679 - RNA, 19 nt, Artificial Sequence
  Description of Artificial Sequence: Synthetic oligonucleotide
  Antisense strand to SEQ ID NO: 2298678
acuagcccagaguucuugu

SEQ ID NO: 2298680 - RNA, 19 nt, Artificial Sequence
  Description of Artificial Sequence: Synthetic oligonucleotide
  Sense strand starting at position 3783 of SEQ ID NO: 1884873
ugggcuaguccaugaagua

SEQ ID NO: 2298681 - RNA, 19 nt, Artificial Sequence
  Description of Artificial Sequence: Synthetic oligonucleotide
  Antisense strand to SEQ ID NO: 2298680
uacuucauggacuagccca

SEQ ID NO: 2298682 - RNA, 19 nt, Artificial Sequence
  Description of Artificial Sequence: Synthetic oligonucleotide
  Sense strand starting at position 3784 of SEQ ID NO: 1884873
gggcuaguccaugaaguaa

SEQ ID NO: 2298683 - RNA, 19 nt, Artificial Sequence
  Description of Artificial Sequence: Synthetic oligonucleotide
  Antisense strand to SEQ ID NO: 2298682
uuacuucauggacuagccc

SEQ ID NO: 2298684 - RNA, 19 nt, Artificial Sequence
  Description of Artificial Sequence: Synthetic oligonucleotide
  Sense strand starting at position 3839 of SEQ ID NO: 1884873
gagaauggcuacucuauag

SEQ ID NO: 2298685 - RNA, 19 nt, Artificial Sequence
  Description of Artificial Sequence: Synthetic oligonucleotide
  Antisense strand to SEQ ID NO: 2298684
cuauagaguagccauucuc

SEQ ID NO: 2298686 - RNA, 19 nt, Artificial Sequence
  Description of Artificial Sequence: Synthetic oligonucleotide
  Sense strand starting at position 37 of SEQ ID NO: 1884874
ggcacagcggcucuguaau

SEQ ID NO: 2298687 - RNA, 19 nt, Artificial Sequence
  Description of Artificial Sequence: Synthetic oligonucleotide
  Antisense strand to SEQ ID NO: 2298686
auuacagagccgcugugcc

SEQ ID NO: 2298688 - RNA, 19 nt, Artificial Sequence
  Description of Artificial Sequence: Synthetic oligonucleotide
  Sense strand starting at position 221 of SEQ ID NO: 1884874
cgcugaaaccuaggaggua

SEQ ID NO: 2298689 - RNA, 19 nt, Artificial Sequence
  Description of Artificial Sequence: Synthetic oligonucleotide
  Antisense strand to SEQ ID NO: 2298688
uaccuccuagguuucagcg

SEQ ID NO: 2298690 - RNA, 19 nt, Artificial Sequence
  Description of Artificial Sequence: Synthetic oligonucleotide
  Sense strand starting at position 373 of SEQ ID NO: 1884874
aucugcuguccauagagua

SEQ ID NO: 2298691 - RNA, 19 nt, Artificial Sequence
  Description of Artificial Sequence: Synthetic oligonucleotide
  Antisense strand to SEQ ID NO: 2298690
uacucuauggacagcagau

SEQ ID NO: 2298692 - RNA, 19 nt, Artificial Sequence
  Description of Artificial Sequence: Synthetic oligonucleotide
  Sense strand starting at position 385 of SEQ ID NO: 1884874
uagaguaaccaagggcuau

SEQ ID NO: 2298693 - RNA, 19 nt, Artificial Sequence
  Description of Artificial Sequence: Synthetic oligonucleotide
  Antisense strand to SEQ ID NO: 2298692
auagcccuugguuacucua

SEQ ID NO: 2298694 - RNA, 19 nt, Artificial Sequence
  Description of Artificial Sequence: Synthetic oligonucleotide
  Sense strand starting at position 386 of SEQ ID NO: 1884874
agaguaaccaagggcuauu

SEQ ID NO: 2298695 - RNA, 19 nt, Artificial Sequence
  Description of Artificial Sequence: Synthetic oligonucleotide
  Antisense strand to SEQ ID NO: 2298694
aauagcccuugguuacucu

SEQ ID NO: 2298696 - RNA, 19 nt, Artificial Sequence
  Description of Artificial Sequence: Synthetic oligonucleotide
  Sense strand starting at position 411 of SEQ ID NO: 1884874
ccacuaauuccagagguuu

SEQ ID NO: 2298697 - RNA, 19 nt, Artificial Sequence
  Description of Artificial Sequence: Synthetic oligonucleotide
  Antisense strand to SEQ ID NO: 2298696
aaaccucuggaauuagugg

SEQ ID NO: 2298698 - RNA, 19 nt, Artificial Sequence
  Description of Artificial Sequence: Synthetic oligonucleotide
  Sense strand starting at position 496 of SEQ ID NO: 1884874
ucccaaagucuugguugaa

SEQ ID NO: 2298699 - RNA, 19 nt, Artificial Sequence
  Description of Artificial Sequence: Synthetic oligonucleotide
  Antisense strand to SEQ ID NO: 2298698
uucaaccaagacuuuggga

SEQ ID NO: 2298700 - RNA, 19 nt, Artificial Sequence
  Description of Artificial Sequence: Synthetic oligonucleotide
  Sense strand starting at position 497 of SEQ ID NO: 1884874
cccaaagucuugguugaaa

SEQ ID NO: 2298701 - RNA, 19 nt, Artificial Sequence
  Description of Artificial Sequence: Synthetic oligonucleotide
  Antisense strand to SEQ ID NO: 2298700
uuucaaccaagacuuuggg

SEQ ID NO: 2298702 - RNA, 19 nt, Artificial Sequence
  Description of Artificial Sequence: Synthetic oligonucleotide
  Sense strand starting at position 618 of SEQ ID NO: 1884874
ugcaucaggccucagagaa

SEQ ID NO: 2298703 - RNA, 19 nt, Artificial Sequence
  Description of Artificial Sequence: Synthetic oligonucleotide
  Antisense strand to SEQ ID NO: 2298702
uucucugaggccugaugca

SEQ ID NO: 2298704 - RNA, 19 nt, Artificial Sequence
  Description of Artificial Sequence: Synthetic oligonucleotide
  Sense strand starting at position 665 of SEQ ID NO: 1884874
uggccauucucuccauaag

SEQ ID NO: 2298705 - RNA, 19 nt, Artificial Sequence
  Description of Artificial Sequence: Synthetic oligonucleotide
  Antisense strand to SEQ ID NO: 2298704
cuuauggagagaauggcca

SEQ ID NO: 2298706 - RNA, 19 nt, Artificial Sequence
  Description of Artificial Sequence: Synthetic oligonucleotide
  Sense strand starting at position 666 of SEQ ID NO: 1884874
ggccauucucuccauaagu

SEQ ID NO: 2298707 - RNA, 19 nt, Artificial Sequence
  Description of Artificial Sequence: Synthetic oligonucleotide
  Antisense strand to SEQ ID NO: 2298706
acuuauggagagaauggcc

SEQ ID NO: 2298708 - RNA, 19 nt, Artificial Sequence
  Description of Artificial Sequence: Synthetic oligonucleotide
  Sense strand starting at position 935 of SEQ ID NO: 1884874
gagguugugaucuagcaag

SEQ ID NO: 2298709 - RNA, 19 nt, Artificial Sequence
  Description of Artificial Sequence: Synthetic oligonucleotide
  Antisense strand to SEQ ID NO: 2298708
cuugcuagaucacaaccuc

SEQ ID NO: 2298710 - RNA, 19 nt, Artificial Sequence
  Description of Artificial Sequence: Synthetic oligonucleotide
  Sense strand starting at position 941 of SEQ ID NO: 1884874
gugaucuagcaaggaagau

SEQ ID NO: 2298711 - RNA, 19 nt, Artificial Sequence
  Description of Artificial Sequence: Synthetic oligonucleotide
  Antisense strand to SEQ ID NO: 2298710
aucuuccuugcuagaucac

SEQ ID NO: 2298712 - RNA, 19 nt, Artificial Sequence
  Description of Artificial Sequence: Synthetic oligonucleotide
  Sense strand starting at position 959 of SEQ ID NO: 1884874
uuagguuuauaccuagaaa

SEQ ID NO: 2298713 - RNA, 19 nt, Artificial Sequence
  Description of Artificial Sequence: Synthetic oligonucleotide
  Antisense strand to SEQ ID NO: 2298712
uuucuagguauaaaccuaa

SEQ ID NO: 2298714 - RNA, 19 nt, Artificial Sequence
  Description of Artificial Sequence: Synthetic oligonucleotide
  Sense strand starting at position 1079 of SEQ ID NO: 1884874
ucauaagauguuuacugca

SEQ ID NO: 2298715 - RNA, 19 nt, Artificial Sequence
  Description of Artificial Sequence: Synthetic oligonucleotide
  Antisense strand to SEQ ID NO: 2298714
ugcaguaaacaucuuauga

SEQ ID NO: 2298716 - RNA, 19 nt, Artificial Sequence
  Description of Artificial Sequence: Synthetic oligonucleotide
  Sense strand starting at position 1081 of SEQ ID NO: 1884874
auaagauguuuacugcaga

SEQ ID NO: 2298717 - RNA, 19 nt, Artificial Sequence
  Description of Artificial Sequence: Synthetic oligonucleotide
  Antisense strand to SEQ ID NO: 2298716
ucugcaguaaacaucuuau

SEQ ID NO: 2298718 - RNA, 19 nt, Artificial Sequence
  Description of Artificial Sequence: Synthetic oligonucleotide
  Sense strand starting at position 1245 of SEQ ID NO: 1884874
uucuuuaaauggccaaagu

SEQ ID NO: 2298719 - RNA, 19 nt, Artificial Sequence
  Description of Artificial Sequence: Synthetic oligonucleotide
  Antisense strand to SEQ ID NO: 2298718
acuuuggccauuuaaagaa

SEQ ID NO: 2298720 - RNA, 19 nt, Artificial Sequence
  Description of Artificial Sequence: Synthetic oligonucleotide
  Sense strand starting at position 1246 of SEQ ID NO: 1884874
ucuuuaaauggccaaagua

SEQ ID NO: 2298721 - RNA, 19 nt, Artificial Sequence
  Description of Artificial Sequence: Synthetic oligonucleotide
  Antisense strand to SEQ ID NO: 2298720
uacuuuggccauuuaaaga

SEQ ID NO: 2298722 - RNA, 19 nt, Artificial Sequence
  Description of Artificial Sequence: Synthetic oligonucleotide
  Sense strand starting at position 1556 of SEQ ID NO: 1884874
agaacauguuuaucuauga

SEQ ID NO: 2298723 - RNA, 19 nt, Artificial Sequence
  Description of Artificial Sequence: Synthetic oligonucleotide
  Antisense strand to SEQ ID NO: 2298722
ucauagauaaacauguucu

SEQ ID NO: 2298724 - RNA, 19 nt, Artificial Sequence
  Description of Artificial Sequence: Synthetic oligonucleotide
  Sense strand starting at position 1692 of SEQ ID NO: 1884874
guuguaggaggucauaaca

SEQ ID NO: 2298725 - RNA, 19 nt, Artificial Sequence
  Description of Artificial Sequence: Synthetic oligonucleotide
  Antisense strand to SEQ ID NO: 2298724
uguuaugaccuccuacaac

SEQ ID NO: 2298726 - RNA, 19 nt, Artificial Sequence
  Description of Artificial Sequence: Synthetic oligonucleotide
  Sense strand starting at position 2022 of SEQ ID NO: 1884874
ucuguuaacagugacaguu

SEQ ID NO: 2298727 - RNA, 19 nt, Artificial Sequence
  Description of Artificial Sequence: Synthetic oligonucleotide
  Antisense strand to SEQ ID NO: 2298726
aacugucacuguuaacaga

SEQ ID NO: 2298728 - RNA, 19 nt, Artificial Sequence
  Description of Artificial Sequence: Synthetic oligonucleotide
  Sense strand starting at position 2030 of SEQ ID NO: 1884874
cagugacaguuauuacaga

SEQ ID NO: 2298729 - RNA, 19 nt, Artificial Sequence
  Description of Artificial Sequence: Synthetic oligonucleotide
  Antisense strand to SEQ ID NO: 2298728
ucuguaauaacugucacug

SEQ ID NO: 2298730 - RNA, 19 nt, Artificial Sequence
  Description of Artificial Sequence: Synthetic oligonucleotide
  Sense strand starting at position 2128 of SEQ ID NO: 1884874
ugaggcagugcuuaggaau

SEQ ID NO: 2298731 - RNA, 19 nt, Artificial Sequence
  Description of Artificial Sequence: Synthetic oligonucleotide
  Antisense strand to SEQ ID NO: 2298730
auuccuaagcacugccuca

SEQ ID NO: 2298732 - RNA, 19 nt, Artificial Sequence
  Description of Artificial Sequence: Synthetic oligonucleotide
  Sense strand starting at position 2167 of SEQ ID NO: 1884874
ccaggacuuccuugaguuu

SEQ ID NO: 2298733 - RNA, 19 nt, Artificial Sequence
  Description of Artificial Sequence: Synthetic oligonucleotide
  Antisense strand to SEQ ID NO: 2298732
aaacucaaggaaguccugg

SEQ ID NO: 2298734 - RNA, 19 nt, Artificial Sequence
  Description of Artificial Sequence: Synthetic oligonucleotide
  Sense strand starting at position 2168 of SEQ ID NO: 1884874
caggacuuccuugaguuua

SEQ ID NO: 2298735 - RNA, 19 nt, Artificial Sequence
  Description of Artificial Sequence: Synthetic oligonucleotide
  Antisense strand to SEQ ID NO: 2298734
uaaacucaaggaaguccug

SEQ ID NO: 2298736 - RNA, 19 nt, Artificial Sequence
  Description of Artificial Sequence: Synthetic oligonucleotide
  Sense strand starting at position 2170 of SEQ ID NO: 1884874
ggacuuccuugaguuuacu

SEQ ID NO: 2298737 - RNA, 19 nt, Artificial Sequence
  Description of Artificial Sequence: Synthetic oligonucleotide
  Antisense strand to SEQ ID NO: 2298736
aguaaacucaaggaagucc

SEQ ID NO: 2298738 - RNA, 19 nt, Artificial Sequence
  Description of Artificial Sequence: Synthetic oligonucleotide
  Sense strand starting at position 2880 of SEQ ID NO: 1884874
guucuaagaugacuucuga

SEQ ID NO: 2298739 - RNA, 19 nt, Artificial Sequence
  Description of Artificial Sequence: Synthetic oligonucleotide
  Antisense strand to SEQ ID NO: 2298738
ucagaagucaucuuagaac

SEQ ID NO: 2298740 - RNA, 19 nt, Artificial Sequence
  Description of Artificial Sequence: Synthetic oligonucleotide
  Sense strand starting at position 2887 of SEQ ID NO: 1884874
gaugacuucugagacauuu

SEQ ID NO: 2298741 - RNA, 19 nt, Artificial Sequence
  Description of Artificial Sequence: Synthetic oligonucleotide
  Antisense strand to SEQ ID NO: 2298740
aaaugucucagaagucauc

SEQ ID NO: 2298742 - RNA, 19 nt, Artificial Sequence
  Description of Artificial Sequence: Synthetic oligonucleotide
  Sense strand starting at position 2895 of SEQ ID NO: 1884874
cugagacauuuagcgugua

SEQ ID NO: 2298743 - RNA, 19 nt, Artificial Sequence
  Description of Artificial Sequence: Synthetic oligonucleotide
  Antisense strand to SEQ ID NO: 2298742
uacacgcuaaaugucucag

SEQ ID NO: 2298744 - RNA, 19 nt, Artificial Sequence
  Description of Artificial Sequence: Synthetic oligonucleotide
  Sense strand starting at position 2898 of SEQ ID NO: 1884874
agacauuuagcguguauug

SEQ ID NO: 2298745 - RNA, 19 nt, Artificial Sequence
  Description of Artificial Sequence: Synthetic oligonucleotide
  Antisense strand to SEQ ID NO: 2298744
caauacacgcuaaaugucu

SEQ ID NO: 2298746 - RNA, 19 nt, Artificial Sequence
  Description of Artificial Sequence: Synthetic oligonucleotide
  Sense strand starting at position 2909 of SEQ ID NO: 1884874
guguauugauuacuuauac

SEQ ID NO: 2298747 - RNA, 19 nt, Artificial Sequence
  Description of Artificial Sequence: Synthetic oligonucleotide
  Antisense strand to SEQ ID NO: 2298746
guauaaguaaucaauacac

SEQ ID NO: 2298748 - RNA, 19 nt, Artificial Sequence
  Description of Artificial Sequence: Synthetic oligonucleotide
  Sense strand starting at position 2940 of SEQ ID NO: 1884874
ugcuucuacucauugaaga

SEQ ID NO: 2298749 - RNA, 19 nt, Artificial Sequence
  Description of Artificial Sequence: Synthetic oligonucleotide
  Antisense strand to SEQ ID NO: 2298748
ucuucaaugaguagaagca

SEQ ID NO: 2298750 - RNA, 19 nt, Artificial Sequence
  Description of Artificial Sequence: Synthetic oligonucleotide
  Sense strand starting at position 2941 of SEQ ID NO: 1884874
gcuucuacucauugaagag

SEQ ID NO: 2298751 - RNA, 19 nt, Artificial Sequence
  Description of Artificial Sequence: Synthetic oligonucleotide
  Antisense strand to SEQ ID NO: 2298750
cucuucaaugaguagaagc

SEQ ID NO: 2298752 - RNA, 19 nt, Artificial Sequence
  Description of Artificial Sequence: Synthetic oligonucleotide
  Sense strand starting at position 3036 of SEQ ID NO: 1884874
uguccaaaucugcacgaga

SEQ ID NO: 2298753 - RNA, 19 nt, Artificial Sequence
  Description of Artificial Sequence: Synthetic oligonucleotide
  Antisense strand to SEQ ID NO: 2298752
ucucgugcagauuuggaca

SEQ ID NO: 2298754 - RNA, 19 nt, Artificial Sequence
  Description of Artificial Sequence: Synthetic oligonucleotide
  Sense strand starting at position 3038 of SEQ ID NO: 1884874
uccaaaucugcacgagaaa

SEQ ID NO: 2298755 - RNA, 19 nt, Artificial Sequence
  Description of Artificial Sequence: Synthetic oligonucleotide
  Antisense strand to SEQ ID NO: 2298754
uuucucgugcagauuugga

SEQ ID NO: 2298756 - RNA, 19 nt, Artificial Sequence
  Description of Artificial Sequence: Synthetic oligonucleotide
  Sense strand starting at position 3236 of SEQ ID NO: 1884874
cacguuuagcuaugauuug

SEQ ID NO: 2298757 - RNA, 19 nt, Artificial Sequence
  Description of Artificial Sequence: Synthetic oligonucleotide
  Antisense strand to SEQ ID NO: 2298756
caaaucauagcuaaacgug

SEQ ID NO: 2298758 - RNA, 19 nt, Artificial Sequence
  Description of Artificial Sequence: Synthetic oligonucleotide
  Sense strand starting at position 3873 of SEQ ID NO: 1884874
ggaauauugugggcaccaa

SEQ ID NO: 2298759 - RNA, 19 nt, Artificial Sequence
  Description of Artificial Sequence: Synthetic oligonucleotide
  Antisense strand to SEQ ID NO: 2298758
uuggugcccacaauauucc

SEQ ID NO: 2298760 - RNA, 19 nt, Artificial Sequence
  Description of Artificial Sequence: Synthetic oligonucleotide
  Sense strand starting at position 3881 of SEQ ID NO: 1884874
gugggcaccaaguaaauau

SEQ ID NO: 2298761 - RNA, 19 nt, Artificial Sequence
  Description of Artificial Sequence: Synthetic oligonucleotide
  Antisense strand to SEQ ID NO: 2298760
auauuuacuuggugcccac

SEQ ID NO: 2298762 - RNA, 19 nt, Artificial Sequence
  Description of Artificial Sequence: Synthetic oligonucleotide
  Sense strand starting at position 3892 of SEQ ID NO: 1884874
guaaauaucguggaugcau

SEQ ID NO: 2298763 - RNA, 19 nt, Artificial Sequence
  Description of Artificial Sequence: Synthetic oligonucleotide
  Antisense strand to SEQ ID NO: 2298762
augcauccacgauauuuac

SEQ ID NO: 2298764 - RNA, 19 nt, Artificial Sequence
  Description of Artificial Sequence: Synthetic oligonucleotide
  Sense strand starting at position 3961 of SEQ ID NO: 1884874
ggaguuugauccucugaau

SEQ ID NO: 2298765 - RNA, 19 nt, Artificial Sequence
  Description of Artificial Sequence: Synthetic oligonucleotide
  Antisense strand to SEQ ID NO: 2298764
auucagaggaucaaacucc

SEQ ID NO: 2298766 - RNA, 19 nt, Artificial Sequence
  Description of Artificial Sequence: Synthetic oligonucleotide
  Sense strand starting at position 1087 of SEQ ID NO: 1884875
ggaaguucaugucucaggu

SEQ ID NO: 2298767 - RNA, 19 nt, Artificial Sequence
  Description of Artificial Sequence: Synthetic oligonucleotide
  Antisense strand to SEQ ID NO: 2298766
accugagacaugaacuucc

SEQ ID NO: 2298768 - RNA, 19 nt, Artificial Sequence
  Description of Artificial Sequence: Synthetic oligonucleotide
  Sense strand starting at position 1475 of SEQ ID NO: 1884875
cagagagaagucugcaauc

SEQ ID NO: 2298769 - RNA, 19 nt, Artificial Sequence
  Description of Artificial Sequence: Synthetic oligonucleotide
  Antisense strand to SEQ ID NO: 2298768
gauugcagacuucucucug

SEQ ID NO: 2298770 - RNA, 19 nt, Artificial Sequence
  Description of Artificial Sequence: Synthetic oligonucleotide
  Sense strand starting at position 1477 of SEQ ID NO: 1884875
gagagaagucugcaauccu

SEQ ID NO: 2298771 - RNA, 19 nt, Artificial Sequence
  Description of Artificial Sequence: Synthetic oligonucleotide
  Antisense strand to SEQ ID NO: 2298770
aggauugcagacuucucuc

SEQ ID NO: 2298772 - RNA, 19 nt, Artificial Sequence
  Description of Artificial Sequence: Synthetic oligonucleotide
  Sense strand starting at position 1484 of SEQ ID NO: 1884875
gucugcaauccucagauau

SEQ ID NO: 2298773 - RNA, 19 nt, Artificial Sequence
  Description of Artificial Sequence: Synthetic oligonucleotide
  Antisense strand to SEQ ID NO: 2298772
auaucugaggauugcagac

SEQ ID NO: 2298774 - RNA, 19 nt, Artificial Sequence
  Description of Artificial Sequence: Synthetic oligonucleotide
  Sense strand starting at position 1624 of SEQ ID NO: 1884875
gccggcugcagugagaaau

SEQ ID NO: 2298775 - RNA, 19 nt, Artificial Sequence
  Description of Artificial Sequence: Synthetic oligonucleotide
  Antisense strand to SEQ ID NO: 2298774
auuucucacugcagccggc

SEQ ID NO: 2298776 - RNA, 19 nt, Artificial Sequence
  Description of Artificial Sequence: Synthetic oligonucleotide
  Sense strand starting at position 1684 of SEQ ID NO: 1884875
cgcucuagcuccgcaaauu

SEQ ID NO: 2298777 - RNA, 19 nt, Artificial Sequence
  Description of Artificial Sequence: Synthetic oligonucleotide
  Antisense strand to SEQ ID NO: 2298776
aauuugcggagcuagagcg

SEQ ID NO: 2298778 - RNA, 19 nt, Artificial Sequence
  Description of Artificial Sequence: Synthetic oligonucleotide
  Sense strand starting at position 1776 of SEQ ID NO: 1884875
ugggcuuugcgucccgaga

SEQ ID NO: 2298779 - RNA, 19 nt, Artificial Sequence
  Description of Artificial Sequence: Synthetic oligonucleotide
  Antisense strand to SEQ ID NO: 2298778
ucucgggacgcaaagccca

SEQ ID NO: 2298780 - RNA, 19 nt, Artificial Sequence
  Description of Artificial Sequence: Synthetic oligonucleotide
  Sense strand starting at position 1906 of SEQ ID NO: 1884875
cccuuaccuuccuggagaa

SEQ ID NO: 2298781 - RNA, 19 nt, Artificial Sequence
  Description of Artificial Sequence: Synthetic oligonucleotide
  Antisense strand to SEQ ID NO: 2298780
uucuccaggaagguaaggg

SEQ ID NO: 2298782 - RNA, 19 nt, Artificial Sequence
  Description of Artificial Sequence: Synthetic oligonucleotide
  Sense strand starting at position 1907 of SEQ ID NO: 1884875
ccuuaccuuccuggagaaa

SEQ ID NO: 2298783 - RNA, 19 nt, Artificial Sequence
  Description of Artificial Sequence: Synthetic oligonucleotide
  Antisense strand to SEQ ID NO: 2298782
uuucuccaggaagguaagg

SEQ ID NO: 2298784 - RNA, 19 nt, Artificial Sequence
  Description of Artificial Sequence: Synthetic oligonucleotide
  Sense strand starting at position 1960 of SEQ ID NO: 1884875
gugugaagaucaucccuua

SEQ ID NO: 2298785 - RNA, 19 nt, Artificial Sequence
  Description of Artificial Sequence: Synthetic oligonucleotide
  Antisense strand to SEQ ID NO: 2298784
uaagggaugaucuucacac

SEQ ID NO: 2298786 - RNA, 19 nt, Artificial Sequence
  Description of Artificial Sequence: Synthetic oligonucleotide
  Sense strand starting at position 2120 of SEQ ID NO: 1884875
cccucugucuugccggaau

SEQ ID NO: 2298787 - RNA, 19 nt, Artificial Sequence
  Description of Artificial Sequence: Synthetic oligonucleotide
  Antisense strand to SEQ ID NO: 2298786
auuccggcaagacagaggg

SEQ ID NO: 2298788 - RNA, 19 nt, Artificial Sequence
  Description of Artificial Sequence: Synthetic oligonucleotide
  Sense strand starting at position 2166 of SEQ ID NO: 1884875
ucuucuucccucgaguucu

SEQ ID NO: 2298789 - RNA, 19 nt, Artificial Sequence
  Description of Artificial Sequence: Synthetic oligonucleotide
  Antisense strand to SEQ ID NO: 2298788
agaacucgagggaagaaga

SEQ ID NO: 2298790 - RNA, 19 nt, Artificial Sequence
  Description of Artificial Sequence: Synthetic oligonucleotide
  Sense strand starting at position 2179 of SEQ ID NO: 1884875
aguucuuaacucugcgcua

SEQ ID NO: 2298791 - RNA, 19 nt, Artificial Sequence
  Description of Artificial Sequence: Synthetic oligonucleotide
  Antisense strand to SEQ ID NO: 2298790
uagcgcagaguuaagaacu

SEQ ID NO: 2298792 - RNA, 19 nt, Artificial Sequence
  Description of Artificial Sequence: Synthetic oligonucleotide
  Sense strand starting at position 2180 of SEQ ID NO: 1884875
guucuuaacucugcgcuaa

SEQ ID NO: 2298793 - RNA, 19 nt, Artificial Sequence
  Description of Artificial Sequence: Synthetic oligonucleotide
  Antisense strand to SEQ ID NO: 2298792
uuagcgcagaguuaagaac

SEQ ID NO: 2298794 - RNA, 19 nt, Artificial Sequence
  Description of Artificial Sequence: Synthetic oligonucleotide
  Sense strand starting at position 2181 of SEQ ID NO: 1884875
uucuuaacucugcgcuaaa

SEQ ID NO: 2298795 - RNA, 19 nt, Artificial Sequence
  Description of Artificial Sequence: Synthetic oligonucleotide
  Antisense strand to SEQ ID NO: 2298794
uuuagcgcagaguuaagaa

SEQ ID NO: 2298796 - RNA, 19 nt, Artificial Sequence
  Description of Artificial Sequence: Synthetic oligonucleotide
  Sense strand starting at position 2220 of SEQ ID NO: 1884875
gcagcaaagcuuuauaaau

SEQ ID NO: 2298797 - RNA, 19 nt, Artificial Sequence
  Description of Artificial Sequence: Synthetic oligonucleotide
  Antisense strand to SEQ ID NO: 2298796
auuuauaaagcuuugcugc

SEQ ID NO: 2298798 - RNA, 19 nt, Artificial Sequence
  Description of Artificial Sequence: Synthetic oligonucleotide
  Sense strand starting at position 2334 of SEQ ID NO: 1884875
uagcgaaugcugucuccuu

SEQ ID NO: 2298799 - RNA, 19 nt, Artificial Sequence
  Description of Artificial Sequence: Synthetic oligonucleotide
  Antisense strand to SEQ ID NO: 2298798
aaggagacagcauucgcua

SEQ ID NO: 2298800 - RNA, 19 nt, Artificial Sequence
  Description of Artificial Sequence: Synthetic oligonucleotide
  Sense strand starting at position 2339 of SEQ ID NO: 1884875
aaugcugucuccuugaguu

SEQ ID NO: 2298801 - RNA, 19 nt, Artificial Sequence
  Description of Artificial Sequence: Synthetic oligonucleotide
  Antisense strand to SEQ ID NO: 2298800
aacucaaggagacagcauu

SEQ ID NO: 2298802 - RNA, 19 nt, Artificial Sequence
  Description of Artificial Sequence: Synthetic oligonucleotide
  Sense strand starting at position 2341 of SEQ ID NO: 1884875
ugcugucuccuugaguuag

SEQ ID NO: 2298803 - RNA, 19 nt, Artificial Sequence
  Description of Artificial Sequence: Synthetic oligonucleotide
  Antisense strand to SEQ ID NO: 2298802
cuaacucaaggagacagca

SEQ ID NO: 2298804 - RNA, 19 nt, Artificial Sequence
  Description of Artificial Sequence: Synthetic oligonucleotide
  Sense strand starting at position 2420 of SEQ ID NO: 1884875
agcagacauucggaaugau

SEQ ID NO: 2298805 - RNA, 19 nt, Artificial Sequence
  Description of Artificial Sequence: Synthetic oligonucleotide
  Antisense strand to SEQ ID NO: 2298804
aucauuccgaaugucugcu

SEQ ID NO: 2298806 - RNA, 19 nt, Artificial Sequence
  Description of Artificial Sequence: Synthetic oligonucleotide
  Sense strand starting at position 3074 of SEQ ID NO: 1884875
gcggaucgguucuuagcaa

SEQ ID NO: 2298807 - RNA, 19 nt, Artificial Sequence
  Description of Artificial Sequence: Synthetic oligonucleotide
  Antisense strand to SEQ ID NO: 2298806
uugcuaagaaccgauccgc

SEQ ID NO: 2298808 - RNA, 19 nt, Artificial Sequence
  Description of Artificial Sequence: Synthetic oligonucleotide
  Sense strand starting at position 3112 of SEQ ID NO: 1884875
gaacccagacuuggucaaa

SEQ ID NO: 2298809 - RNA, 19 nt, Artificial Sequence
  Description of Artificial Sequence: Synthetic oligonucleotide
  Antisense strand to SEQ ID NO: 2298808
uuugaccaagucuggguuc

SEQ ID NO: 2298810 - RNA, 19 nt, Artificial Sequence
  Description of Artificial Sequence: Synthetic oligonucleotide
  Sense strand starting at position 3115 of SEQ ID NO: 1884875
cccagacuuggucaaacgu

SEQ ID NO: 2298811 - RNA, 19 nt, Artificial Sequence
  Description of Artificial Sequence: Synthetic oligonucleotide
  Antisense strand to SEQ ID NO: 2298810
acguuugaccaagucuggg

SEQ ID NO: 2298812 - RNA, 19 nt, Artificial Sequence
  Description of Artificial Sequence: Synthetic oligonucleotide
  Sense strand starting at position 3156 of SEQ ID NO: 1884875
gcgugacaaucacuugguu

SEQ ID NO: 2298813 - RNA, 19 nt, Artificial Sequence
  Description of Artificial Sequence: Synthetic oligonucleotide
  Antisense strand to SEQ ID NO: 2298812
aaccaagugauugucacgc

SEQ ID NO: 2298814 - RNA, 19 nt, Artificial Sequence
  Description of Artificial Sequence: Synthetic oligonucleotide
  Sense strand starting at position 3242 of SEQ ID NO: 1884875
uguggacuugccugcauuu

SEQ ID NO: 2298815 - RNA, 19 nt, Artificial Sequence
  Description of Artificial Sequence: Synthetic oligonucleotide
  Antisense strand to SEQ ID NO: 2298814
aaaugcaggcaaguccaca

SEQ ID NO: 2298816 - RNA, 19 nt, Artificial Sequence
  Description of Artificial Sequence: Synthetic oligonucleotide
  Sense strand starting at position 3251 of SEQ ID NO: 1884875
gccugcauuuaugguagau

SEQ ID NO: 2298817 - RNA, 19 nt, Artificial Sequence
  Description of Artificial Sequence: Synthetic oligonucleotide
  Antisense strand to SEQ ID NO: 2298816
aucuaccauaaaugcaggc

SEQ ID NO: 2298818 - RNA, 19 nt, Artificial Sequence
  Description of Artificial Sequence: Synthetic oligonucleotide
  Sense strand starting at position 3253 of SEQ ID NO: 1884875
cugcauuuaugguagauga

SEQ ID NO: 2298819 - RNA, 19 nt, Artificial Sequence
  Description of Artificial Sequence: Synthetic oligonucleotide
  Antisense strand to SEQ ID NO: 2298818
ucaucuaccauaaaugcag

SEQ ID NO: 2298820 - RNA, 19 nt, Artificial Sequence
  Description of Artificial Sequence: Synthetic oligonucleotide
  Sense strand starting at position 3318 of SEQ ID NO: 1884875
cgugguagugguccuaguu

SEQ ID NO: 2298821 - RNA, 19 nt, Artificial Sequence
  Description of Artificial Sequence: Synthetic oligonucleotide
  Antisense strand to SEQ ID NO: 2298820
aacuaggaccacuaccacg

SEQ ID NO: 2298822 - RNA, 19 nt, Artificial Sequence
  Description of Artificial Sequence: Synthetic oligonucleotide
  Sense strand starting at position 3437 of SEQ ID NO: 1884875
cucacagucucauggacaa

SEQ ID NO: 2298823 - RNA, 19 nt, Artificial Sequence
  Description of Artificial Sequence: Synthetic oligonucleotide
  Antisense strand to SEQ ID NO: 2298822
uuguccaugagacugugag

SEQ ID NO: 2298824 - RNA, 19 nt, Artificial Sequence
  Description of Artificial Sequence: Synthetic oligonucleotide
  Sense strand starting at position 3450 of SEQ ID NO: 1884875
ggacaacuaugauggauaa

SEQ ID NO: 2298825 - RNA, 19 nt, Artificial Sequence
  Description of Artificial Sequence: Synthetic oligonucleotide
  Antisense strand to SEQ ID NO: 2298824
uuauccaucauaguugucc

SEQ ID NO: 2298826 - RNA, 19 nt, Artificial Sequence
  Description of Artificial Sequence: Synthetic oligonucleotide
  Sense strand starting at position 3462 of SEQ ID NO: 1884875
uggauaauccuguagccac

SEQ ID NO: 2298827 - RNA, 19 nt, Artificial Sequence
  Description of Artificial Sequence: Synthetic oligonucleotide
  Antisense strand to SEQ ID NO: 2298826
guggcuacaggauuaucca

SEQ ID NO: 2298828 - RNA, 19 nt, Artificial Sequence
  Description of Artificial Sequence: Synthetic oligonucleotide
  Sense strand starting at position 3613 of SEQ ID NO: 1884875
aagucuucugguggguuaa

SEQ ID NO: 2298829 - RNA, 19 nt, Artificial Sequence
  Description of Artificial Sequence: Synthetic oligonucleotide
  Antisense strand to SEQ ID NO: 2298828
uuaacccaccagaagacuu

SEQ ID NO: 2298830 - RNA, 19 nt, Artificial Sequence
  Description of Artificial Sequence: Synthetic oligonucleotide
  Sense strand starting at position 3624 of SEQ ID NO: 1884875
uggguuaagucagcccuga

SEQ ID NO: 2298831 - RNA, 19 nt, Artificial Sequence
  Description of Artificial Sequence: Synthetic oligonucleotide
  Antisense strand to SEQ ID NO: 2298830
ucagggcugacuuaaccca

SEQ ID NO: 2298832 - RNA, 19 nt, Artificial Sequence
  Description of Artificial Sequence: Synthetic oligonucleotide
  Sense strand starting at position 3628 of SEQ ID NO: 1884875
uuaagucagcccugaaaca

SEQ ID NO: 2298833 - RNA, 19 nt, Artificial Sequence
  Description of Artificial Sequence: Synthetic oligonucleotide
  Antisense strand to SEQ ID NO: 2298832
uguuucagggcugacuuaa

SEQ ID NO: 2298834 - RNA, 19 nt, Artificial Sequence
  Description of Artificial Sequence: Synthetic oligonucleotide
  Sense strand starting at position 3690 of SEQ ID NO: 1884875
ugcuauuucuaacaagaug

SEQ ID NO: 2298835 - RNA, 19 nt, Artificial Sequence
  Description of Artificial Sequence: Synthetic oligonucleotide
  Antisense strand to SEQ ID NO: 2298834
caucuuguuagaaauagca

SEQ ID NO: 2298836 - RNA, 19 nt, Artificial Sequence
  Description of Artificial Sequence: Synthetic oligonucleotide
  Sense strand starting at position 3709 of SEQ ID NO: 1884875
ccaugugugaaugggagua

SEQ ID NO: 2298837 - RNA, 19 nt, Artificial Sequence
  Description of Artificial Sequence: Synthetic oligonucleotide
  Antisense strand to SEQ ID NO: 2298836
uacucccauucacacaugg

SEQ ID NO: 2298838 - RNA, 19 nt, Artificial Sequence
  Description of Artificial Sequence: Synthetic oligonucleotide
  Sense strand starting at position 3746 of SEQ ID NO: 1884875
aggaauacuuuggaaggga

SEQ ID NO: 2298839 - RNA, 19 nt, Artificial Sequence
  Description of Artificial Sequence: Synthetic oligonucleotide
  Antisense strand to SEQ ID NO: 2298838
ucccuuccaaaguauuccu

SEQ ID NO: 2298840 - RNA, 19 nt, Artificial Sequence
  Description of Artificial Sequence: Synthetic oligonucleotide
  Sense strand starting at position 3794 of SEQ ID NO: 1884875
gggagaaaguguucguuca

SEQ ID NO: 2298841 - RNA, 19 nt, Artificial Sequence
  Description of Artificial Sequence: Synthetic oligonucleotide
  Antisense strand to SEQ ID NO: 2298840
ugaacgaacacuuucuccc

SEQ ID NO: 2298842 - RNA, 19 nt, Artificial Sequence
  Description of Artificial Sequence: Synthetic oligonucleotide
  Sense strand starting at position 3795 of SEQ ID NO: 1884875
ggagaaaguguucguucaa

SEQ ID NO: 2298843 - RNA, 19 nt, Artificial Sequence
  Description of Artificial Sequence: Synthetic oligonucleotide
  Antisense strand to SEQ ID NO: 2298842
uugaacgaacacuuucucc

SEQ ID NO: 2298844 - RNA, 19 nt, Artificial Sequence
  Description of Artificial Sequence: Synthetic oligonucleotide
  Sense strand starting at position 3816 of SEQ ID NO: 1884875
gcuaaagcuacggagagau

SEQ ID NO: 2298845 - RNA, 19 nt, Artificial Sequence
  Description of Artificial Sequence: Synthetic oligonucleotide
  Antisense strand to SEQ ID NO: 2298844
aucucuccguagcuuuagc

SEQ ID NO: 2298846 - RNA, 19 nt, Artificial Sequence
  Description of Artificial Sequence: Synthetic oligonucleotide
  Sense strand starting at position 152 of SEQ ID NO: 1884876
guuaaaugucuauauugag

SEQ ID NO: 2298847 - RNA, 19 nt, Artificial Sequence
  Description of Artificial Sequence: Synthetic oligonucleotide
  Antisense strand to SEQ ID NO: 2298846
cucaauauagacauuuaac

SEQ ID NO: 2298848 - RNA, 19 nt, Artificial Sequence
  Description of Artificial Sequence: Synthetic oligonucleotide
  Sense strand starting at position 231 of SEQ ID NO: 1884876
auauauccuugggugggaa

SEQ ID NO: 2298849 - RNA, 19 nt, Artificial Sequence
  Description of Artificial Sequence: Synthetic oligonucleotide
  Antisense strand to SEQ ID NO: 2298848
uucccacccaaggauauau

SEQ ID NO: 2298850 - RNA, 19 nt, Artificial Sequence
  Description of Artificial Sequence: Synthetic oligonucleotide
  Sense strand starting at position 253 of SEQ ID NO: 1884876
ggugcaaagaucuaagcau

SEQ ID NO: 2298851 - RNA, 19 nt, Artificial Sequence
  Description of Artificial Sequence: Synthetic oligonucleotide
  Antisense strand to SEQ ID NO: 2298850
augcuuagaucuuugcacc

SEQ ID NO: 2298852 - RNA, 19 nt, Artificial Sequence
  Description of Artificial Sequence: Synthetic oligonucleotide
  Sense strand starting at position 461 of SEQ ID NO: 1884876
uuuacagugguugaccaaa

SEQ ID NO: 2298853 - RNA, 19 nt, Artificial Sequence
  Description of Artificial Sequence: Synthetic oligonucleotide
  Antisense strand to SEQ ID NO: 2298852
uuuggucaaccacuguaaa

SEQ ID NO: 2298854 - RNA, 19 nt, Artificial Sequence
  Description of Artificial Sequence: Synthetic oligonucleotide
  Sense strand starting at position 572 of SEQ ID NO: 1884876
acucuugaucacuggagau

SEQ ID NO: 2298855 - RNA, 19 nt, Artificial Sequence
  Description of Artificial Sequence: Synthetic oligonucleotide
  Antisense strand to SEQ ID NO: 2298854
aucuccagugaucaagagu

SEQ ID NO: 2298856 - RNA, 19 nt, Artificial Sequence
  Description of Artificial Sequence: Synthetic oligonucleotide
  Sense strand starting at position 780 of SEQ ID NO: 1884876
agguuauggcaaugaagga

SEQ ID NO: 2298857 - RNA, 19 nt, Artificial Sequence
  Description of Artificial Sequence: Synthetic oligonucleotide
  Antisense strand to SEQ ID NO: 2298856
uccuucauugccauaaccu

SEQ ID NO: 2298858 - RNA, 19 nt, Artificial Sequence
  Description of Artificial Sequence: Synthetic oligonucleotide
  Sense strand starting at position 814 of SEQ ID NO: 1884876
acacguguugcccuuugua

SEQ ID NO: 2298859 - RNA, 19 nt, Artificial Sequence
  Description of Artificial Sequence: Synthetic oligonucleotide
  Antisense strand to SEQ ID NO: 2298858
uacaaagggcaacacgugu

SEQ ID NO: 2298860 - RNA, 19 nt, Artificial Sequence
  Description of Artificial Sequence: Synthetic oligonucleotide
  Sense strand starting at position 816 of SEQ ID NO: 1884876
acguguugcccuuuguauu

SEQ ID NO: 2298861 - RNA, 19 nt, Artificial Sequence
  Description of Artificial Sequence: Synthetic oligonucleotide
  Antisense strand to SEQ ID NO: 2298860
aauacaaagggcaacacgu

SEQ ID NO: 2298862 - RNA, 19 nt, Artificial Sequence
  Description of Artificial Sequence: Synthetic oligonucleotide
  Sense strand starting at position 901 of SEQ ID NO: 1884876
uuuagagcuauaugggaaa

SEQ ID NO: 2298863 - RNA, 19 nt, Artificial Sequence
  Description of Artificial Sequence: Synthetic oligonucleotide
  Antisense strand to SEQ ID NO: 2298862
uuucccauauagcucuaaa

SEQ ID NO: 2298864 - RNA, 19 nt, Artificial Sequence
  Description of Artificial Sequence: Synthetic oligonucleotide
  Sense strand starting at position 935 of SEQ ID NO: 1884876
acagucccuguauauuaaa

SEQ ID NO: 2298865 - RNA, 19 nt, Artificial Sequence
  Description of Artificial Sequence: Synthetic oligonucleotide
  Antisense strand to SEQ ID NO: 2298864
uuuaauauacagggacugu

SEQ ID NO: 2298866 - RNA, 19 nt, Artificial Sequence
  Description of Artificial Sequence: Synthetic oligonucleotide
  Sense strand starting at position 1023 of SEQ ID NO: 1884876
augaguuagaaguacuagu

SEQ ID NO: 2298867 - RNA, 19 nt, Artificial Sequence
  Description of Artificial Sequence: Synthetic oligonucleotide
  Antisense strand to SEQ ID NO: 2298866
acuaguacuucuaacucau

SEQ ID NO: 2298868 - RNA, 19 nt, Artificial Sequence
  Description of Artificial Sequence: Synthetic oligonucleotide
  Sense strand starting at position 1087 of SEQ ID NO: 1884876
caguuaagaccucaucgau

SEQ ID NO: 2298869 - RNA, 19 nt, Artificial Sequence
  Description of Artificial Sequence: Synthetic oligonucleotide
  Antisense strand to SEQ ID NO: 2298868
aucgaugaggucuuaacug

SEQ ID NO: 2298870 - RNA, 19 nt, Artificial Sequence
  Description of Artificial Sequence: Synthetic oligonucleotide
  Sense strand starting at position 1090 of SEQ ID NO: 1884876
uuaagaccucaucgauauc

SEQ ID NO: 2298871 - RNA, 19 nt, Artificial Sequence
  Description of Artificial Sequence: Synthetic oligonucleotide
  Antisense strand to SEQ ID NO: 2298870
gauaucgaugaggucuuaa

SEQ ID NO: 2298872 - RNA, 19 nt, Artificial Sequence
  Description of Artificial Sequence: Synthetic oligonucleotide
  Sense strand starting at position 1110 of SEQ ID NO: 1884876
cccgguaaaugcuuauuua

SEQ ID NO: 2298873 - RNA, 19 nt, Artificial Sequence
  Description of Artificial Sequence: Synthetic oligonucleotide
  Antisense strand to SEQ ID NO: 2298872
uaaauaagcauuuaccggg

SEQ ID NO: 2298874 - RNA, 19 nt, Artificial Sequence
  Description of Artificial Sequence: Synthetic oligonucleotide
  Sense strand starting at position 1158 of SEQ ID NO: 1884876
uucuuauuccaggagucua

SEQ ID NO: 2298875 - RNA, 19 nt, Artificial Sequence
  Description of Artificial Sequence: Synthetic oligonucleotide
  Antisense strand to SEQ ID NO: 2298874
uagacuccuggaauaagaa

SEQ ID NO: 2298876 - RNA, 19 nt, Artificial Sequence
  Description of Artificial Sequence: Synthetic oligonucleotide
  Sense strand starting at position 1216 of SEQ ID NO: 1884876
uccucugauaagugaggau

SEQ ID NO: 2298877 - RNA, 19 nt, Artificial Sequence
  Description of Artificial Sequence: Synthetic oligonucleotide
  Antisense strand to SEQ ID NO: 2298876
auccucacuuaucagagga

SEQ ID NO: 2298878 - RNA, 19 nt, Artificial Sequence
  Description of Artificial Sequence: Synthetic oligonucleotide
  Sense strand starting at position 1241 of SEQ ID NO: 1884876
aacuuucugguggaucauu

SEQ ID NO: 2298879 - RNA, 19 nt, Artificial Sequence
  Description of Artificial Sequence: Synthetic oligonucleotide
  Antisense strand to SEQ ID NO: 2298878
aaugauccaccagaaaguu

SEQ ID NO: 2298880 - RNA, 19 nt, Artificial Sequence
  Description of Artificial Sequence: Synthetic oligonucleotide
  Sense strand starting at position 1294 of SEQ ID NO: 1884876
ggcucuauuuaucuuagca

SEQ ID NO: 2298881 - RNA, 19 nt, Artificial Sequence
  Description of Artificial Sequence: Synthetic oligonucleotide
  Antisense strand to SEQ ID NO: 2298880
ugcuaagauaaauagagcc

SEQ ID NO: 2298882 - RNA, 19 nt, Artificial Sequence
  Description of Artificial Sequence: Synthetic oligonucleotide
  Sense strand starting at position 1304 of SEQ ID NO: 1884876
aucuuagcauggguugaaa

SEQ ID NO: 2298883 - RNA, 19 nt, Artificial Sequence
  Description of Artificial Sequence: Synthetic oligonucleotide
  Antisense strand to SEQ ID NO: 2298882
uuucaacccaugcuaagau

SEQ ID NO: 2298884 - RNA, 19 nt, Artificial Sequence
  Description of Artificial Sequence: Synthetic oligonucleotide
  Sense strand starting at position 1306 of SEQ ID NO: 1884876
cuuagcauggguugaaaga

SEQ ID NO: 2298885 - RNA, 19 nt, Artificial Sequence
  Description of Artificial Sequence: Synthetic oligonucleotide
  Antisense strand to SEQ ID NO: 2298884
ucuuucaacccaugcuaag

SEQ ID NO: 2298886 - RNA, 19 nt, Artificial Sequence
  Description of Artificial Sequence: Synthetic oligonucleotide
  Sense strand starting at position 1521 of SEQ ID NO: 1884876
ugaauugacaggcaguuua

SEQ ID NO: 2298887 - RNA, 19 nt, Artificial Sequence
  Description of Artificial Sequence: Synthetic oligonucleotide
  Antisense strand to SEQ ID NO: 2298886
uaaacugccugucaauuca

SEQ ID NO: 2298888 - RNA, 19 nt, Artificial Sequence
  Description of Artificial Sequence: Synthetic oligonucleotide
  Sense strand starting at position 1572 of SEQ ID NO: 1884876
ucuggcuauccugacacuu

SEQ ID NO: 2298889 - RNA, 19 nt, Artificial Sequence
  Description of Artificial Sequence: Synthetic oligonucleotide
  Antisense strand to SEQ ID NO: 2298888
aagugucaggauagccaga

SEQ ID NO: 2298890 - RNA, 19 nt, Artificial Sequence
  Description of Artificial Sequence: Synthetic oligonucleotide
  Sense strand starting at position 1818 of SEQ ID NO: 1884876
uccaacauccuuggguuaa

SEQ ID NO: 2298891 - RNA, 19 nt, Artificial Sequence
  Description of Artificial Sequence: Synthetic oligonucleotide
  Antisense strand to SEQ ID NO: 2298890
uuaacccaaggauguugga

SEQ ID NO: 2298892 - RNA, 19 nt, Artificial Sequence
  Description of Artificial Sequence: Synthetic oligonucleotide
  Sense strand starting at position 1849 of SEQ ID NO: 1884876
uggccaggauauguaaaua

SEQ ID NO: 2298893 - RNA, 19 nt, Artificial Sequence
  Description of Artificial Sequence: Synthetic oligonucleotide
  Antisense strand to SEQ ID NO: 2298892
uauuuacauauccuggcca

SEQ ID NO: 2298894 - RNA, 19 nt, Artificial Sequence
  Description of Artificial Sequence: Synthetic oligonucleotide
  Sense strand starting at position 1967 of SEQ ID NO: 1884876
ugugcuaccaaguaaugga

SEQ ID NO: 2298895 - RNA, 19 nt, Artificial Sequence
  Description of Artificial Sequence: Synthetic oligonucleotide
  Antisense strand to SEQ ID NO: 2298894
uccauuacuugguagcaca

SEQ ID NO: 2298896 - RNA, 19 nt, Artificial Sequence
  Description of Artificial Sequence: Synthetic oligonucleotide
  Sense strand starting at position 1990 of SEQ ID NO: 1884876
uccaguuaugacuggaacu

SEQ ID NO: 2298897 - RNA, 19 nt, Artificial Sequence
  Description of Artificial Sequence: Synthetic oligonucleotide
  Antisense strand to SEQ ID NO: 2298896
aguuccagucauaacugga

SEQ ID NO: 2298898 - RNA, 19 nt, Artificial Sequence
  Description of Artificial Sequence: Synthetic oligonucleotide
  Sense strand starting at position 1991 of SEQ ID NO: 1884876
ccaguuaugacuggaacug

SEQ ID NO: 2298899 - RNA, 19 nt, Artificial Sequence
  Description of Artificial Sequence: Synthetic oligonucleotide
  Antisense strand to SEQ ID NO: 2298898
caguuccagucauaacugg

SEQ ID NO: 2298900 - RNA, 19 nt, Artificial Sequence
  Description of Artificial Sequence: Synthetic oligonucleotide
  Sense strand starting at position 1992 of SEQ ID NO: 1884876
caguuaugacuggaacugu

SEQ ID NO: 2298901 - RNA, 19 nt, Artificial Sequence
  Description of Artificial Sequence: Synthetic oligonucleotide
  Antisense strand to SEQ ID NO: 2298900
acaguuccagucauaacug

SEQ ID NO: 2298902 - RNA, 19 nt, Artificial Sequence
  Description of Artificial Sequence: Synthetic oligonucleotide
  Sense strand starting at position 2920 of SEQ ID NO: 1884876
agacaugugacguaucuga

SEQ ID NO: 2298903 - RNA, 19 nt, Artificial Sequence
  Description of Artificial Sequence: Synthetic oligonucleotide
  Antisense strand to SEQ ID NO: 2298902
ucagauacgucacaugucu

SEQ ID NO: 2298904 - RNA, 19 nt, Artificial Sequence
  Description of Artificial Sequence: Synthetic oligonucleotide
  Sense strand starting at position 2957 of SEQ ID NO: 1884876
guagaaaugucuccugagg

SEQ ID NO: 2298905 - RNA, 19 nt, Artificial Sequence
  Description of Artificial Sequence: Synthetic oligonucleotide
  Antisense strand to SEQ ID NO: 2298904
ccucaggagacauuucuac

SEQ ID NO: 2298906 - RNA, 19 nt, Artificial Sequence
  Description of Artificial Sequence: Synthetic oligonucleotide
  Sense strand starting at position 3019 of SEQ ID NO: 1884876
uaguguaacccuggacaag

SEQ ID NO: 2298907 - RNA, 19 nt, Artificial Sequence
  Description of Artificial Sequence: Synthetic oligonucleotide
  Antisense strand to SEQ ID NO: 2298906
cuuguccaggguuacacua

SEQ ID NO: 2298908 - RNA, 19 nt, Artificial Sequence
  Description of Artificial Sequence: Synthetic oligonucleotide
  Sense strand starting at position 3020 of SEQ ID NO: 1884876
aguguaacccuggacaagu

SEQ ID NO: 2298909 - RNA, 19 nt, Artificial Sequence
  Description of Artificial Sequence: Synthetic oligonucleotide
  Antisense strand to SEQ ID NO: 2298908
acuuguccaggguuacacu

SEQ ID NO: 2298910 - RNA, 19 nt, Artificial Sequence
  Description of Artificial Sequence: Synthetic oligonucleotide
  Sense strand starting at position 3251 of SEQ ID NO: 1884876
ccugaucugcuagggaaau

SEQ ID NO: 2298911 - RNA, 19 nt, Artificial Sequence
  Description of Artificial Sequence: Synthetic oligonucleotide
  Antisense strand to SEQ ID NO: 2298910
auuucccuagcagaucagg

SEQ ID NO: 2298912 - RNA, 19 nt, Artificial Sequence
  Description of Artificial Sequence: Synthetic oligonucleotide
  Sense strand starting at position 3305 of SEQ ID NO: 1884876
guaggcacacuugaauuaa

SEQ ID NO: 2298913 - RNA, 19 nt, Artificial Sequence
  Description of Artificial Sequence: Synthetic oligonucleotide
  Antisense strand to SEQ ID NO: 2298912
uuaauucaagugugccuac

SEQ ID NO: 2298914 - RNA, 19 nt, Artificial Sequence
  Description of Artificial Sequence: Synthetic oligonucleotide
  Sense strand starting at position 3458 of SEQ ID NO: 1884876
ccguuuagauuuccugacu

SEQ ID NO: 2298915 - RNA, 19 nt, Artificial Sequence
  Description of Artificial Sequence: Synthetic oligonucleotide
  Antisense strand to SEQ ID NO: 2298914
agucaggaaaucuaaacgg

SEQ ID NO: 2298916 - RNA, 19 nt, Artificial Sequence
  Description of Artificial Sequence: Synthetic oligonucleotide
  Sense strand starting at position 3459 of SEQ ID NO: 1884876
cguuuagauuuccugacuc

SEQ ID NO: 2298917 - RNA, 19 nt, Artificial Sequence
  Description of Artificial Sequence: Synthetic oligonucleotide
  Antisense strand to SEQ ID NO: 2298916
gagucaggaaaucuaaacg

SEQ ID NO: 2298918 - RNA, 19 nt, Artificial Sequence
  Description of Artificial Sequence: Synthetic oligonucleotide
  Sense strand starting at position 3691 of SEQ ID NO: 1884876
ggauaaggaacucgguuua

SEQ ID NO: 2298919 - RNA, 19 nt, Artificial Sequence
  Description of Artificial Sequence: Synthetic oligonucleotide
  Antisense strand to SEQ ID NO: 2298918
uaaaccgaguuccuuaucc

SEQ ID NO: 2298920 - RNA, 19 nt, Artificial Sequence
  Description of Artificial Sequence: Synthetic oligonucleotide
  Sense strand starting at position 3704 of SEQ ID NO: 1884876
gguuuauagcaacagauac

SEQ ID NO: 2298921 - RNA, 19 nt, Artificial Sequence
  Description of Artificial Sequence: Synthetic oligonucleotide
  Antisense strand to SEQ ID NO: 2298920
guaucuguugcuauaaacc

SEQ ID NO: 2298922 - RNA, 19 nt, Artificial Sequence
  Description of Artificial Sequence: Synthetic oligonucleotide
  Sense strand starting at position 3749 of SEQ ID NO: 1884876
gacacuaacugguugugaa

SEQ ID NO: 2298923 - RNA, 19 nt, Artificial Sequence
  Description of Artificial Sequence: Synthetic oligonucleotide
  Antisense strand to SEQ ID NO: 2298922
uucacaaccaguuaguguc

SEQ ID NO: 2298924 - RNA, 19 nt, Artificial Sequence
  Description of Artificial Sequence: Synthetic oligonucleotide
  Sense strand starting at position 3763 of SEQ ID NO: 1884876
gugaaucacuuguuaaaga

SEQ ID NO: 2298925 - RNA, 19 nt, Artificial Sequence
  Description of Artificial Sequence: Synthetic oligonucleotide
  Antisense strand to SEQ ID NO: 2298924
ucuuuaacaagugauucac

SEQ ID NO: 2298926 - RNA, 19 nt, Artificial Sequence
  Description of Artificial Sequence: Synthetic oligonucleotide
  Sense strand starting at position 16 of SEQ ID NO: 1884877
aguuccagauguuuggaaa

SEQ ID NO: 2298927 - RNA, 19 nt, Artificial Sequence
  Description of Artificial Sequence: Synthetic oligonucleotide
  Antisense strand to SEQ ID NO: 2298926
uuuccaaacaucuggaacu

SEQ ID NO: 2298928 - RNA, 19 nt, Artificial Sequence
  Description of Artificial Sequence: Synthetic oligonucleotide
  Sense strand starting at position 17 of SEQ ID NO: 1884877
guuccagauguuuggaaag

SEQ ID NO: 2298929 - RNA, 19 nt, Artificial Sequence
  Description of Artificial Sequence: Synthetic oligonucleotide
  Antisense strand to SEQ ID NO: 2298928
cuuuccaaacaucuggaac

SEQ ID NO: 2298930 - RNA, 19 nt, Artificial Sequence
  Description of Artificial Sequence: Synthetic oligonucleotide
  Sense strand starting at position 85 of SEQ ID NO: 1884877
uugugaaacucagcauucu

SEQ ID NO: 2298931 - RNA, 19 nt, Artificial Sequence
  Description of Artificial Sequence: Synthetic oligonucleotide
  Antisense strand to SEQ ID NO: 2298930
agaaugcugaguuucacaa

SEQ ID NO: 2298932 - RNA, 19 nt, Artificial Sequence
  Description of Artificial Sequence: Synthetic oligonucleotide
  Sense strand starting at position 86 of SEQ ID NO: 1884877
ugugaaacucagcauucua

SEQ ID NO: 2298933 - RNA, 19 nt, Artificial Sequence
  Description of Artificial Sequence: Synthetic oligonucleotide
  Antisense strand to SEQ ID NO: 2298932
uagaaugcugaguuucaca

SEQ ID NO: 2298934 - RNA, 19 nt, Artificial Sequence
  Description of Artificial Sequence: Synthetic oligonucleotide
  Sense strand starting at position 109 of SEQ ID NO: 1884877
cgguuucugagcuaaaucu

SEQ ID NO: 2298935 - RNA, 19 nt, Artificial Sequence
  Description of Artificial Sequence: Synthetic oligonucleotide
  Antisense strand to SEQ ID NO: 2298934
agauuuagcucagaaaccg

SEQ ID NO: 2298936 - RNA, 19 nt, Artificial Sequence
  Description of Artificial Sequence: Synthetic oligonucleotide
  Sense strand starting at position 505 of SEQ ID NO: 1884877
uggcccuugggucaagaua

SEQ ID NO: 2298937 - RNA, 19 nt, Artificial Sequence
  Description of Artificial Sequence: Synthetic oligonucleotide
  Antisense strand to SEQ ID NO: 2298936
uaucuugacccaagggcca

SEQ ID NO: 2298938 - RNA, 19 nt, Artificial Sequence
  Description of Artificial Sequence: Synthetic oligonucleotide
  Sense strand starting at position 513 of SEQ ID NO: 1884877
gggucaagauaagucuguu

SEQ ID NO: 2298939 - RNA, 19 nt, Artificial Sequence
  Description of Artificial Sequence: Synthetic oligonucleotide
  Antisense strand to SEQ ID NO: 2298938
aacagacuuaucuugaccc

SEQ ID NO: 2298940 - RNA, 19 nt, Artificial Sequence
  Description of Artificial Sequence: Synthetic oligonucleotide
  Sense strand starting at position 517 of SEQ ID NO: 1884877
caagauaagucuguuguag

SEQ ID NO: 2298941 - RNA, 19 nt, Artificial Sequence
  Description of Artificial Sequence: Synthetic oligonucleotide
  Antisense strand to SEQ ID NO: 2298940
cuacaacagacuuaucuug

SEQ ID NO: 2298942 - RNA, 19 nt, Artificial Sequence
  Description of Artificial Sequence: Synthetic oligonucleotide
  Sense strand starting at position 916 of SEQ ID NO: 1884877
gcaguuugccucuagagaa

SEQ ID NO: 2298943 - RNA, 19 nt, Artificial Sequence
  Description of Artificial Sequence: Synthetic oligonucleotide
  Antisense strand to SEQ ID NO: 2298942
uucucuagaggcaaacugc

SEQ ID NO: 2298944 - RNA, 19 nt, Artificial Sequence
  Description of Artificial Sequence: Synthetic oligonucleotide
  Sense strand starting at position 1164 of SEQ ID NO: 1884877
ccaaauuaaugagcaugau

SEQ ID NO: 2298945 - RNA, 19 nt, Artificial Sequence
  Description of Artificial Sequence: Synthetic oligonucleotide
  Antisense strand to SEQ ID NO: 2298944
aucaugcucauuaauuugg

SEQ ID NO: 2298946 - RNA, 19 nt, Artificial Sequence
  Description of Artificial Sequence: Synthetic oligonucleotide
  Sense strand starting at position 1178 of SEQ ID NO: 1884877
augauaaaccgcuauugcu

SEQ ID NO: 2298947 - RNA, 19 nt, Artificial Sequence
  Description of Artificial Sequence: Synthetic oligonucleotide
  Antisense strand to SEQ ID NO: 2298946
agcaauagcgguuuaucau

SEQ ID NO: 2298948 - RNA, 19 nt, Artificial Sequence
  Description of Artificial Sequence: Synthetic oligonucleotide
  Sense strand starting at position 1210 of SEQ ID NO: 1884877
ucucuacucugaguaauug

SEQ ID NO: 2298949 - RNA, 19 nt, Artificial Sequence
  Description of Artificial Sequence: Synthetic oligonucleotide
  Antisense strand to SEQ ID NO: 2298948
caauuacucagaguagaga

SEQ ID NO: 2298950 - RNA, 19 nt, Artificial Sequence
  Description of Artificial Sequence: Synthetic oligonucleotide
  Sense strand starting at position 1283 of SEQ ID NO: 1884877
uugggacaguccuugucaa

SEQ ID NO: 2298951 - RNA, 19 nt, Artificial Sequence
  Description of Artificial Sequence: Synthetic oligonucleotide
  Antisense strand to SEQ ID NO: 2298950
uugacaaggacugucccaa

SEQ ID NO: 2298952 - RNA, 19 nt, Artificial Sequence
  Description of Artificial Sequence: Synthetic oligonucleotide
  Sense strand starting at position 1284 of SEQ ID NO: 1884877
ugggacaguccuugucaaa

SEQ ID NO: 2298953 - RNA, 19 nt, Artificial Sequence
  Description of Artificial Sequence: Synthetic oligonucleotide
  Antisense strand to SEQ ID NO: 2298952
uuugacaaggacuguccca

SEQ ID NO: 2298954 - RNA, 19 nt, Artificial Sequence
  Description of Artificial Sequence: Synthetic oligonucleotide
  Sense strand starting at position 1508 of SEQ ID NO: 1884877
auuuaucugcgcuguuuga

SEQ ID NO: 2298955 - RNA, 19 nt, Artificial Sequence
  Description of Artificial Sequence: Synthetic oligonucleotide
  Antisense strand to SEQ ID NO: 2298954
ucaaacagcgcagauaaau

SEQ ID NO: 2298956 - RNA, 19 nt, Artificial Sequence
  Description of Artificial Sequence: Synthetic oligonucleotide
  Sense strand starting at position 1509 of SEQ ID NO: 1884877
uuuaucugcgcuguuugaa

SEQ ID NO: 2298957 - RNA, 19 nt, Artificial Sequence
  Description of Artificial Sequence: Synthetic oligonucleotide
  Antisense strand to SEQ ID NO: 2298956
uucaaacagcgcagauaaa

SEQ ID NO: 2298958 - RNA, 19 nt, Artificial Sequence
  Description of Artificial Sequence: Synthetic oligonucleotide
  Sense strand starting at position 1551 of SEQ ID NO: 1884877
gaggcugucugaucacauu

SEQ ID NO: 2298959 - RNA, 19 nt, Artificial Sequence
  Description of Artificial Sequence: Synthetic oligonucleotide
  Antisense strand to SEQ ID NO: 2298958
aaugugaucagacagccuc

SEQ ID NO: 2298960 - RNA, 19 nt, Artificial Sequence
  Description of Artificial Sequence: Synthetic oligonucleotide
  Sense strand starting at position 1583 of SEQ ID NO: 1884877
cugucuucggguuaggaga

SEQ ID NO: 2298961 - RNA, 19 nt, Artificial Sequence
  Description of Artificial Sequence: Synthetic oligonucleotide
  Antisense strand to SEQ ID NO: 2298960
ucuccuaacccgaagacag

SEQ ID NO: 2298962 - RNA, 19 nt, Artificial Sequence
  Description of Artificial Sequence: Synthetic oligonucleotide
  Sense strand starting at position 1862 of SEQ ID NO: 1884877
ugggcacuuugggagauuu

SEQ ID NO: 2298963 - RNA, 19 nt, Artificial Sequence
  Description of Artificial Sequence: Synthetic oligonucleotide
  Antisense strand to SEQ ID NO: 2298962
aaaucucccaaagugccca

SEQ ID NO: 2298964 - RNA, 19 nt, Artificial Sequence
  Description of Artificial Sequence: Synthetic oligonucleotide
  Sense strand starting at position 1880 of SEQ ID NO: 1884877
ugaauuuccugcuuucugu

SEQ ID NO: 2298965 - RNA, 19 nt, Artificial Sequence
  Description of Artificial Sequence: Synthetic oligonucleotide
  Antisense strand to SEQ ID NO: 2298964
acagaaagcaggaaauuca

SEQ ID NO: 2298966 - RNA, 19 nt, Artificial Sequence
  Description of Artificial Sequence: Synthetic oligonucleotide
  Sense strand starting at position 2312 of SEQ ID NO: 1884877
ccagguucuugagugaauc

SEQ ID NO: 2298967 - RNA, 19 nt, Artificial Sequence
  Description of Artificial Sequence: Synthetic oligonucleotide
  Antisense strand to SEQ ID NO: 2298966
gauucacucaagaaccugg

SEQ ID NO: 2298968 - RNA, 19 nt, Artificial Sequence
  Description of Artificial Sequence: Synthetic oligonucleotide
  Sense strand starting at position 2416 of SEQ ID NO: 1884877
ggacuaaucuuaucaguuc

SEQ ID NO: 2298969 - RNA, 19 nt, Artificial Sequence
  Description of Artificial Sequence: Synthetic oligonucleotide
  Antisense strand to SEQ ID NO: 2298968
gaacugauaagauuagucc

SEQ ID NO: 2298970 - RNA, 19 nt, Artificial Sequence
  Description of Artificial Sequence: Synthetic oligonucleotide
  Sense strand starting at position 2533 of SEQ ID NO: 1884877
cgacuauucugaguuugaa

SEQ ID NO: 2298971 - RNA, 19 nt, Artificial Sequence
  Description of Artificial Sequence: Synthetic oligonucleotide
  Antisense strand to SEQ ID NO: 2298970
uucaaacucagaauagucg

SEQ ID NO: 2298972 - RNA, 19 nt, Artificial Sequence
  Description of Artificial Sequence: Synthetic oligonucleotide
  Sense strand starting at position 2536 of SEQ ID NO: 1884877
cuauucugaguuugaaucu

SEQ ID NO: 2298973 - RNA, 19 nt, Artificial Sequence
  Description of Artificial Sequence: Synthetic oligonucleotide
  Antisense strand to SEQ ID NO: 2298972
agauucaaacucagaauag

SEQ ID NO: 2298974 - RNA, 19 nt, Artificial Sequence
  Description of Artificial Sequence: Synthetic oligonucleotide
  Sense strand starting at position 2780 of SEQ ID NO: 1884877
ccuggaauauucucugcuu

SEQ ID NO: 2298975 - RNA, 19 nt, Artificial Sequence
  Description of Artificial Sequence: Synthetic oligonucleotide
  Antisense strand to SEQ ID NO: 2298974
aagcagagaauauuccagg

SEQ ID NO: 2298976 - RNA, 19 nt, Artificial Sequence
  Description of Artificial Sequence: Synthetic oligonucleotide
  Sense strand starting at position 2781 of SEQ ID NO: 1884877
cuggaauauucucugcuuu

SEQ ID NO: 2298977 - RNA, 19 nt, Artificial Sequence
  Description of Artificial Sequence: Synthetic oligonucleotide
  Antisense strand to SEQ ID NO: 2298976
aaagcagagaauauuccag

SEQ ID NO: 2298978 - RNA, 19 nt, Artificial Sequence
  Description of Artificial Sequence: Synthetic oligonucleotide
  Sense strand starting at position 3258 of SEQ ID NO: 1884877
gugcgcagccuaucacuua

SEQ ID NO: 2298979 - RNA, 19 nt, Artificial Sequence
  Description of Artificial Sequence: Synthetic oligonucleotide
  Antisense strand to SEQ ID NO: 2298978
uaagugauaggcugcgcac

SEQ ID NO: 2298980 - RNA, 19 nt, Artificial Sequence
  Description of Artificial Sequence: Synthetic oligonucleotide
  Sense strand starting at position 3325 of SEQ ID NO: 1884877
gggucaagcacugagucua

SEQ ID NO: 2298981 - RNA, 19 nt, Artificial Sequence
  Description of Artificial Sequence: Synthetic oligonucleotide
  Antisense strand to SEQ ID NO: 2298980
uagacucagugcuugaccc

SEQ ID NO: 2298982 - RNA, 19 nt, Artificial Sequence
  Description of Artificial Sequence: Synthetic oligonucleotide
  Sense strand starting at position 3330 of SEQ ID NO: 1884877
aagcacugagucuauuaga

SEQ ID NO: 2298983 - RNA, 19 nt, Artificial Sequence
  Description of Artificial Sequence: Synthetic oligonucleotide
  Antisense strand to SEQ ID NO: 2298982
ucuaauagacucagugcuu

SEQ ID NO: 2298984 - RNA, 19 nt, Artificial Sequence
  Description of Artificial Sequence: Synthetic oligonucleotide
  Sense strand starting at position 3448 of SEQ ID NO: 1884877
cugagugaccacuauguuu

SEQ ID NO: 2298985 - RNA, 19 nt, Artificial Sequence
  Description of Artificial Sequence: Synthetic oligonucleotide
  Antisense strand to SEQ ID NO: 2298984
aaacauaguggucacucag

SEQ ID NO: 2298986 - RNA, 19 nt, Artificial Sequence
  Description of Artificial Sequence: Synthetic oligonucleotide
  Sense strand starting at position 3450 of SEQ ID NO: 1884877
gagugaccacuauguuuaa

SEQ ID NO: 2298987 - RNA, 19 nt, Artificial Sequence
  Description of Artificial Sequence: Synthetic oligonucleotide
  Antisense strand to SEQ ID NO: 2298986
uuaaacauaguggucacuc

SEQ ID NO: 2298988 - RNA, 19 nt, Artificial Sequence
  Description of Artificial Sequence: Synthetic oligonucleotide
  Sense strand starting at position 3594 of SEQ ID NO: 1884877
aucacuuacuggccagaga

SEQ ID NO: 2298989 - RNA, 19 nt, Artificial Sequence
  Description of Artificial Sequence: Synthetic oligonucleotide
  Antisense strand to SEQ ID NO: 2298988
ucucuggccaguaagugau

SEQ ID NO: 2298990 - RNA, 19 nt, Artificial Sequence
  Description of Artificial Sequence: Synthetic oligonucleotide
  Sense strand starting at position 3649 of SEQ ID NO: 1884877
ggguuuagcuaacucaauu

SEQ ID NO: 2298991 - RNA, 19 nt, Artificial Sequence
  Description of Artificial Sequence: Synthetic oligonucleotide
  Antisense strand to SEQ ID NO: 2298990
aauugaguuagcuaaaccc

SEQ ID NO: 2298992 - RNA, 19 nt, Artificial Sequence
  Description of Artificial Sequence: Synthetic oligonucleotide
  Sense strand starting at position 3709 of SEQ ID NO: 1884877
ugccacaucucugugggaa

SEQ ID NO: 2298993 - RNA, 19 nt, Artificial Sequence
  Description of Artificial Sequence: Synthetic oligonucleotide
  Antisense strand to SEQ ID NO: 2298992
uucccacagagauguggca

SEQ ID NO: 2298994 - RNA, 19 nt, Artificial Sequence
  Description of Artificial Sequence: Synthetic oligonucleotide
  Sense strand starting at position 3710 of SEQ ID NO: 1884877
gccacaucucugugggaaa

SEQ ID NO: 2298995 - RNA, 19 nt, Artificial Sequence
  Description of Artificial Sequence: Synthetic oligonucleotide
  Antisense strand to SEQ ID NO: 2298994
uuucccacagagauguggc

SEQ ID NO: 2298996 - RNA, 19 nt, Artificial Sequence
  Description of Artificial Sequence: Synthetic oligonucleotide
  Sense strand starting at position 3712 of SEQ ID NO: 1884877
cacaucucugugggaaagu

SEQ ID NO: 2298997 - RNA, 19 nt, Artificial Sequence
  Description of Artificial Sequence: Synthetic oligonucleotide
  Antisense strand to SEQ ID NO: 2298996
acuuucccacagagaugug

SEQ ID NO: 2298998 - RNA, 19 nt, Artificial Sequence
  Description of Artificial Sequence: Synthetic oligonucleotide
  Sense strand starting at position 3725 of SEQ ID NO: 1884877
gaaaguaggugagucagaa

SEQ ID NO: 2298999 - RNA, 19 nt, Artificial Sequence
  Description of Artificial Sequence: Synthetic oligonucleotide
  Antisense strand to SEQ ID NO: 2298998
uucugacucaccuacuuuc

SEQ ID NO: 2299000 - RNA, 19 nt, Artificial Sequence
  Description of Artificial Sequence: Synthetic oligonucleotide
  Sense strand starting at position 3735 of SEQ ID NO: 1884877
gagucagaaugagugcaua

SEQ ID NO: 2299001 - RNA, 19 nt, Artificial Sequence
  Description of Artificial Sequence: Synthetic oligonucleotide
  Antisense strand to SEQ ID NO: 2299000
uaugcacucauucugacuc

SEQ ID NO: 2299002 - RNA, 19 nt, Artificial Sequence
  Description of Artificial Sequence: Synthetic oligonucleotide
  Sense strand starting at position 3775 of SEQ ID NO: 1884877
ugauaaugaauguguagau

SEQ ID NO: 2299003 - RNA, 19 nt, Artificial Sequence
  Description of Artificial Sequence: Synthetic oligonucleotide
  Antisense strand to SEQ ID NO: 2299002
aucuacacauucauuauca

SEQ ID NO: 2299004 - RNA, 19 nt, Artificial Sequence
  Description of Artificial Sequence: Synthetic oligonucleotide
  Sense strand starting at position 3776 of SEQ ID NO: 1884877
gauaaugaauguguagauu

SEQ ID NO: 2299005 - RNA, 19 nt, Artificial Sequence
  Description of Artificial Sequence: Synthetic oligonucleotide
  Antisense strand to SEQ ID NO: 2299004
aaucuacacauucauuauc

SEQ ID NO: 2299006 - RNA, 19 nt, Artificial Sequence
  Description of Artificial Sequence: Synthetic oligonucleotide
  Sense strand starting at position 155 of SEQ ID NO: 1884878
gcaagcguccauggaugau

SEQ ID NO: 2299007 - RNA, 19 nt, Artificial Sequence
  Description of Artificial Sequence: Synthetic oligonucleotide
  Antisense strand to SEQ ID NO: 2299006
aucauccauggacgcuugc

SEQ ID NO: 2299008 - RNA, 19 nt, Artificial Sequence
  Description of Artificial Sequence: Synthetic oligonucleotide
  Sense strand starting at position 158 of SEQ ID NO: 1884878
agcguccauggaugauuaa

SEQ ID NO: 2299009 - RNA, 19 nt, Artificial Sequence
  Description of Artificial Sequence: Synthetic oligonucleotide
  Antisense strand to SEQ ID NO: 2299008
uuaaucauccauggacgcu

SEQ ID NO: 2299010 - RNA, 19 nt, Artificial Sequence
  Description of Artificial Sequence: Synthetic oligonucleotide
  Sense strand starting at position 159 of SEQ ID NO: 1884878
gcguccauggaugauuaaa

SEQ ID NO: 2299011 - RNA, 19 nt, Artificial Sequence
  Description of Artificial Sequence: Synthetic oligonucleotide
  Antisense strand to SEQ ID NO: 2299010
uuuaaucauccauggacgc

SEQ ID NO: 2299012 - RNA, 19 nt, Artificial Sequence
  Description of Artificial Sequence: Synthetic oligonucleotide
  Sense strand starting at position 257 of SEQ ID NO: 1884878
gccaacuaucccggcagaa

SEQ ID NO: 2299013 - RNA, 19 nt, Artificial Sequence
  Description of Artificial Sequence: Synthetic oligonucleotide
  Antisense strand to SEQ ID NO: 2299012
uucugccgggauaguuggc

SEQ ID NO: 2299014 - RNA, 19 nt, Artificial Sequence
  Description of Artificial Sequence: Synthetic oligonucleotide
  Sense strand starting at position 303 of SEQ ID NO: 1884878
cagggcuggucaucggaaa

SEQ ID NO: 2299015 - RNA, 19 nt, Artificial Sequence
  Description of Artificial Sequence: Synthetic oligonucleotide
  Antisense strand to SEQ ID NO: 2299014
uuuccgaugaccagcccug

SEQ ID NO: 2299016 - RNA, 19 nt, Artificial Sequence
  Description of Artificial Sequence: Synthetic oligonucleotide
  Sense strand starting at position 418 of SEQ ID NO: 1884878
gugugugagauguauguac

SEQ ID NO: 2299017 - RNA, 19 nt, Artificial Sequence
  Description of Artificial Sequence: Synthetic oligonucleotide
  Antisense strand to SEQ ID NO: 2299016
guacauacaucucacacac

SEQ ID NO: 2299018 - RNA, 19 nt, Artificial Sequence
  Description of Artificial Sequence: Synthetic oligonucleotide
  Sense strand starting at position 420 of SEQ ID NO: 1884878
gugugagauguauguacau

SEQ ID NO: 2299019 - RNA, 19 nt, Artificial Sequence
  Description of Artificial Sequence: Synthetic oligonucleotide
  Antisense strand to SEQ ID NO: 2299018
auguacauacaucucacac

SEQ ID NO: 2299020 - RNA, 19 nt, Artificial Sequence
  Description of Artificial Sequence: Synthetic oligonucleotide
  Sense strand starting at position 422 of SEQ ID NO: 1884878
gugagauguauguacaugu

SEQ ID NO: 2299021 - RNA, 19 nt, Artificial Sequence
  Description of Artificial Sequence: Synthetic oligonucleotide
  Antisense strand to SEQ ID NO: 2299020
acauguacauacaucucac

SEQ ID NO: 2299022 - RNA, 19 nt, Artificial Sequence
  Description of Artificial Sequence: Synthetic oligonucleotide
  Sense strand starting at position 577 of SEQ ID NO: 1884878
cucuuugucagacgguaga

SEQ ID NO: 2299023 - RNA, 19 nt, Artificial Sequence
  Description of Artificial Sequence: Synthetic oligonucleotide
  Antisense strand to SEQ ID NO: 2299022
ucuaccgucugacaaagag

SEQ ID NO: 2299024 - RNA, 19 nt, Artificial Sequence
  Description of Artificial Sequence: Synthetic oligonucleotide
  Sense strand starting at position 587 of SEQ ID NO: 1884878
gacgguagaugcuugucua

SEQ ID NO: 2299025 - RNA, 19 nt, Artificial Sequence
  Description of Artificial Sequence: Synthetic oligonucleotide
  Antisense strand to SEQ ID NO: 2299024
uagacaagcaucuaccguc

SEQ ID NO: 2299026 - RNA, 19 nt, Artificial Sequence
  Description of Artificial Sequence: Synthetic oligonucleotide
  Sense strand starting at position 588 of SEQ ID NO: 1884878
acgguagaugcuugucuaa

SEQ ID NO: 2299027 - RNA, 19 nt, Artificial Sequence
  Description of Artificial Sequence: Synthetic oligonucleotide
  Antisense strand to SEQ ID NO: 2299026
uuagacaagcaucuaccgu

SEQ ID NO: 2299028 - RNA, 19 nt, Artificial Sequence
  Description of Artificial Sequence: Synthetic oligonucleotide
  Sense strand starting at position 590 of SEQ ID NO: 1884878
gguagaugcuugucuaauu

SEQ ID NO: 2299029 - RNA, 19 nt, Artificial Sequence
  Description of Artificial Sequence: Synthetic oligonucleotide
  Antisense strand to SEQ ID NO: 2299028
aauuagacaagcaucuacc

SEQ ID NO: 2299030 - RNA, 19 nt, Artificial Sequence
  Description of Artificial Sequence: Synthetic oligonucleotide
  Sense strand starting at position 591 of SEQ ID NO: 1884878
guagaugcuugucuaauua

SEQ ID NO: 2299031 - RNA, 19 nt, Artificial Sequence
  Description of Artificial Sequence: Synthetic oligonucleotide
  Antisense strand to SEQ ID NO: 2299030
uaauuagacaagcaucuac

SEQ ID NO: 2299032 - RNA, 19 nt, Artificial Sequence
  Description of Artificial Sequence: Synthetic oligonucleotide
  Sense strand starting at position 595 of SEQ ID NO: 1884878
augcuugucuaauuaggca

SEQ ID NO: 2299033 - RNA, 19 nt, Artificial Sequence
  Description of Artificial Sequence: Synthetic oligonucleotide
  Antisense strand to SEQ ID NO: 2299032
ugccuaauuagacaagcau

SEQ ID NO: 2299034 - RNA, 19 nt, Artificial Sequence
  Description of Artificial Sequence: Synthetic oligonucleotide
  Sense strand starting at position 616 of SEQ ID NO: 1884878
ggcuuuaauuaugccacaa

SEQ ID NO: 2299035 - RNA, 19 nt, Artificial Sequence
  Description of Artificial Sequence: Synthetic oligonucleotide
  Antisense strand to SEQ ID NO: 2299034
uuguggcauaauuaaagcc

SEQ ID NO: 2299036 - RNA, 19 nt, Artificial Sequence
  Description of Artificial Sequence: Synthetic oligonucleotide
  Sense strand starting at position 647 of SEQ ID NO: 1884878
agucuugauuauuaagacu

SEQ ID NO: 2299037 - RNA, 19 nt, Artificial Sequence
  Description of Artificial Sequence: Synthetic oligonucleotide
  Antisense strand to SEQ ID NO: 2299036
agucuuaauaaucaagacu

SEQ ID NO: 2299038 - RNA, 19 nt, Artificial Sequence
  Description of Artificial Sequence: Synthetic oligonucleotide
  Sense strand starting at position 660 of SEQ ID NO: 1884878
aagacuggcccaugggaua

SEQ ID NO: 2299039 - RNA, 19 nt, Artificial Sequence
  Description of Artificial Sequence: Synthetic oligonucleotide
  Antisense strand to SEQ ID NO: 2299038
uaucccaugggccagucuu

SEQ ID NO: 2299040 - RNA, 19 nt, Artificial Sequence
  Description of Artificial Sequence: Synthetic oligonucleotide
  Sense strand starting at position 725 of SEQ ID NO: 1884878
gaaugaccuuauccgagaa

SEQ ID NO: 2299041 - RNA, 19 nt, Artificial Sequence
  Description of Artificial Sequence: Synthetic oligonucleotide
  Antisense strand to SEQ ID NO: 2299040
uucucggauaaggucauuc

SEQ ID NO: 2299042 - RNA, 19 nt, Artificial Sequence
  Description of Artificial Sequence: Synthetic oligonucleotide
  Sense strand starting at position 832 of SEQ ID NO: 1884878
ggcugucagcucuaauaga

SEQ ID NO: 2299043 - RNA, 19 nt, Artificial Sequence
  Description of Artificial Sequence: Synthetic oligonucleotide
  Antisense strand to SEQ ID NO: 2299042
ucuauuagagcugacagcc

SEQ ID NO: 2299044 - RNA, 19 nt, Artificial Sequence
  Description of Artificial Sequence: Synthetic oligonucleotide
  Sense strand starting at position 1232 of SEQ ID NO: 1884878
ggucuuugccuuugaagca

SEQ ID NO: 2299045 - RNA, 19 nt, Artificial Sequence
  Description of Artificial Sequence: Synthetic oligonucleotide
  Antisense strand to SEQ ID NO: 2299044
ugcuucaaaggcaaagacc

SEQ ID NO: 2299046 - RNA, 19 nt, Artificial Sequence
  Description of Artificial Sequence: Synthetic oligonucleotide
  Sense strand starting at position 1335 of SEQ ID NO: 1884878
uguggcuuccugcugcaau

SEQ ID NO: 2299047 - RNA, 19 nt, Artificial Sequence
  Description of Artificial Sequence: Synthetic oligonucleotide
  Antisense strand to SEQ ID NO: 2299046
auugcagcaggaagccaca

SEQ ID NO: 2299048 - RNA, 19 nt, Artificial Sequence
  Description of Artificial Sequence: Synthetic oligonucleotide
  Sense strand starting at position 1405 of SEQ ID NO: 1884878
uggacucucuaagcagaaa

SEQ ID NO: 2299049 - RNA, 19 nt, Artificial Sequence
  Description of Artificial Sequence: Synthetic oligonucleotide
  Antisense strand to SEQ ID NO: 2299048
uuucugcuuagagagucca

SEQ ID NO: 2299050 - RNA, 19 nt, Artificial Sequence
  Description of Artificial Sequence: Synthetic oligonucleotide
  Sense strand starting at position 2062 of SEQ ID NO: 1884878
agccuauugccaugcugau

SEQ ID NO: 2299051 - RNA, 19 nt, Artificial Sequence
  Description of Artificial Sequence: Synthetic oligonucleotide
  Antisense strand to SEQ ID NO: 2299050
aucagcauggcaauaggcu

SEQ ID NO: 2299052 - RNA, 19 nt, Artificial Sequence
  Description of Artificial Sequence: Synthetic oligonucleotide
  Sense strand starting at position 2359 of SEQ ID NO: 1884878
ccugauacauggcuuagaa

SEQ ID NO: 2299053 - RNA, 19 nt, Artificial Sequence
  Description of Artificial Sequence: Synthetic oligonucleotide
  Antisense strand to SEQ ID NO: 2299052
uucuaagccauguaucagg

SEQ ID NO: 2299054 - RNA, 19 nt, Artificial Sequence
  Description of Artificial Sequence: Synthetic oligonucleotide
  Sense strand starting at position 2361 of SEQ ID NO: 1884878
ugauacauggcuuagaagu

SEQ ID NO: 2299055 - RNA, 19 nt, Artificial Sequence
  Description of Artificial Sequence: Synthetic oligonucleotide
  Antisense strand to SEQ ID NO: 2299054
acuucuaagccauguauca

SEQ ID NO: 2299056 - RNA, 19 nt, Artificial Sequence
  Description of Artificial Sequence: Synthetic oligonucleotide
  Sense strand starting at position 2412 of SEQ ID NO: 1884878
gggcaagcaccagagugau

SEQ ID NO: 2299057 - RNA, 19 nt, Artificial Sequence
  Description of Artificial Sequence: Synthetic oligonucleotide
  Antisense strand to SEQ ID NO: 2299056
aucacucuggugcuugccc

SEQ ID NO: 2299058 - RNA, 19 nt, Artificial Sequence
  Description of Artificial Sequence: Synthetic oligonucleotide
  Sense strand starting at position 2574 of SEQ ID NO: 1884878
guggcauauguucaugugu

SEQ ID NO: 2299059 - RNA, 19 nt, Artificial Sequence
  Description of Artificial Sequence: Synthetic oligonucleotide
  Antisense strand to SEQ ID NO: 2299058
acacaugaacauaugccac

SEQ ID NO: 2299060 - RNA, 19 nt, Artificial Sequence
  Description of Artificial Sequence: Synthetic oligonucleotide
  Sense strand starting at position 2764 of SEQ ID NO: 1884878
ugcugagugcaaugaauuc

SEQ ID NO: 2299061 - RNA, 19 nt, Artificial Sequence
  Description of Artificial Sequence: Synthetic oligonucleotide
  Antisense strand to SEQ ID NO: 2299060
gaauucauugcacucagca

SEQ ID NO: 2299062 - RNA, 19 nt, Artificial Sequence
  Description of Artificial Sequence: Synthetic oligonucleotide
  Sense strand starting at position 2836 of SEQ ID NO: 1884878
ccgagaugaggcggugaaa

SEQ ID NO: 2299063 - RNA, 19 nt, Artificial Sequence
  Description of Artificial Sequence: Synthetic oligonucleotide
  Antisense strand to SEQ ID NO: 2299062
uuucaccgccucaucucgg

SEQ ID NO: 2299064 - RNA, 19 nt, Artificial Sequence
  Description of Artificial Sequence: Synthetic oligonucleotide
  Sense strand starting at position 3331 of SEQ ID NO: 1884878
agcggagaaguaugagaga

SEQ ID NO: 2299065 - RNA, 19 nt, Artificial Sequence
  Description of Artificial Sequence: Synthetic oligonucleotide
  Antisense strand to SEQ ID NO: 2299064
ucucucauacuucuccgcu

SEQ ID NO: 2299066 - RNA, 19 nt, Artificial Sequence
  Description of Artificial Sequence: Synthetic oligonucleotide
  Sense strand starting at position 3417 of SEQ ID NO: 1884878
ccucacugugaaugugaaa

SEQ ID NO: 2299067 - RNA, 19 nt, Artificial Sequence
  Description of Artificial Sequence: Synthetic oligonucleotide
  Antisense strand to SEQ ID NO: 2299066
uuucacauucacagugagg

SEQ ID NO: 2299068 - RNA, 19 nt, Artificial Sequence
  Description of Artificial Sequence: Synthetic oligonucleotide
  Sense strand starting at position 3644 of SEQ ID NO: 1884878
cgugaucuugcugaacucu

SEQ ID NO: 2299069 - RNA, 19 nt, Artificial Sequence
  Description of Artificial Sequence: Synthetic oligonucleotide
  Antisense strand to SEQ ID NO: 2299068
agaguucagcaagaucacg

SEQ ID NO: 2299070 - RNA, 19 nt, Artificial Sequence
  Description of Artificial Sequence: Synthetic oligonucleotide
  Sense strand starting at position 3719 of SEQ ID NO: 1884878
acuuaaguccugcaaagaa

SEQ ID NO: 2299071 - RNA, 19 nt, Artificial Sequence
  Description of Artificial Sequence: Synthetic oligonucleotide
  Antisense strand to SEQ ID NO: 2299070
uucuuugcaggacuuaagu

SEQ ID NO: 2299072 - RNA, 19 nt, Artificial Sequence
  Description of Artificial Sequence: Synthetic oligonucleotide
  Sense strand starting at position 3746 of SEQ ID NO: 1884878
uuccacucaggcugaguua

SEQ ID NO: 2299073 - RNA, 19 nt, Artificial Sequence
  Description of Artificial Sequence: Synthetic oligonucleotide
  Antisense strand to SEQ ID NO: 2299072
uaacucagccugaguggaa

SEQ ID NO: 2299074 - RNA, 19 nt, Artificial Sequence
  Description of Artificial Sequence: Synthetic oligonucleotide
  Sense strand starting at position 3747 of SEQ ID NO: 1884878
uccacucaggcugaguuau

SEQ ID NO: 2299075 - RNA, 19 nt, Artificial Sequence
  Description of Artificial Sequence: Synthetic oligonucleotide
  Antisense strand to SEQ ID NO: 2299074
auaacucagccugagugga

SEQ ID NO: 2299076 - RNA, 19 nt, Artificial Sequence
  Description of Artificial Sequence: Synthetic oligonucleotide
  Sense strand starting at position 3777 of SEQ ID NO: 1884878
ugcugaacgguuugcauuu

SEQ ID NO: 2299077 - RNA, 19 nt, Artificial Sequence
  Description of Artificial Sequence: Synthetic oligonucleotide
  Antisense strand to SEQ ID NO: 2299076
aaaugcaaaccguucagca

SEQ ID NO: 2299078 - RNA, 19 nt, Artificial Sequence
  Description of Artificial Sequence: Synthetic oligonucleotide
  Sense strand starting at position 3790 of SEQ ID NO: 1884878
gcauuuguuuccucuguga

SEQ ID NO: 2299079 - RNA, 19 nt, Artificial Sequence
  Description of Artificial Sequence: Synthetic oligonucleotide
  Antisense strand to SEQ ID NO: 2299078
ucacagaggaaacaaaugc

SEQ ID NO: 2299080 - RNA, 19 nt, Artificial Sequence
  Description of Artificial Sequence: Synthetic oligonucleotide
  Sense strand starting at position 3793 of SEQ ID NO: 1884878
uuuguuuccucugugacau

SEQ ID NO: 2299081 - RNA, 19 nt, Artificial Sequence
  Description of Artificial Sequence: Synthetic oligonucleotide
  Antisense strand to SEQ ID NO: 2299080
augucacagaggaaacaaa

SEQ ID NO: 2299082 - RNA, 19 nt, Artificial Sequence
  Description of Artificial Sequence: Synthetic oligonucleotide
  Sense strand starting at position 3794 of SEQ ID NO: 1884878
uuguuuccucugugacauc

SEQ ID NO: 2299083 - RNA, 19 nt, Artificial Sequence
  Description of Artificial Sequence: Synthetic oligonucleotide
  Antisense strand to SEQ ID NO: 2299082
gaugucacagaggaaacaa

SEQ ID NO: 2299084 - RNA, 19 nt, Artificial Sequence
  Description of Artificial Sequence: Synthetic oligonucleotide
  Sense strand starting at position 3929 of SEQ ID NO: 1884878
gcaccuugccaccauugaa

SEQ ID NO: 2299085 - RNA, 19 nt, Artificial Sequence
  Description of Artificial Sequence: Synthetic oligonucleotide
  Antisense strand to SEQ ID NO: 2299084
uucaaugguggcaaggugc

SEQ ID NO: 2299086 - RNA, 19 nt, Artificial Sequence
  Description of Artificial Sequence: Synthetic oligonucleotide
  Sense strand starting at position 7 of SEQ ID NO: 1884879
uauuuaagaugauggagau

SEQ ID NO: 2299087 - RNA, 19 nt, Artificial Sequence
  Description of Artificial Sequence: Synthetic oligonucleotide
  Antisense strand to SEQ ID NO: 2299086
aucuccaucaucuuaaaua

SEQ ID NO: 2299088 - RNA, 19 nt, Artificial Sequence
  Description of Artificial Sequence: Synthetic oligonucleotide
  Sense strand starting at position 31 of SEQ ID NO: 1884879
guacauagauuugaucuuu

SEQ ID NO: 2299089 - RNA, 19 nt, Artificial Sequence
  Description of Artificial Sequence: Synthetic oligonucleotide
  Antisense strand to SEQ ID NO: 2299088
aaagaucaaaucuauguac

SEQ ID NO: 2299090 - RNA, 19 nt, Artificial Sequence
  Description of Artificial Sequence: Synthetic oligonucleotide
  Sense strand starting at position 165 of SEQ ID NO: 1884879
uugugauauauccguaaag

SEQ ID NO: 2299091 - RNA, 19 nt, Artificial Sequence
  Description of Artificial Sequence: Synthetic oligonucleotide
  Antisense strand to SEQ ID NO: 2299090
cuuuacggauauaucacaa

SEQ ID NO: 2299092 - RNA, 19 nt, Artificial Sequence
  Description of Artificial Sequence: Synthetic oligonucleotide
  Sense strand starting at position 167 of SEQ ID NO: 1884879
gugauauauccguaaagua

SEQ ID NO: 2299093 - RNA, 19 nt, Artificial Sequence
  Description of Artificial Sequence: Synthetic oligonucleotide
  Antisense strand to SEQ ID NO: 2299092
uacuuuacggauauaucac

SEQ ID NO: 2299094 - RNA, 19 nt, Artificial Sequence
  Description of Artificial Sequence: Synthetic oligonucleotide
  Sense strand starting at position 174 of SEQ ID NO: 1884879
auccguaaaguagaagauu

SEQ ID NO: 2299095 - RNA, 19 nt, Artificial Sequence
  Description of Artificial Sequence: Synthetic oligonucleotide
  Antisense strand to SEQ ID NO: 2299094
aaucuucuacuuuacggau

SEQ ID NO: 2299096 - RNA, 19 nt, Artificial Sequence
  Description of Artificial Sequence: Synthetic oligonucleotide
  Sense strand starting at position 177 of SEQ ID NO: 1884879
cguaaaguagaagauuauu

SEQ ID NO: 2299097 - RNA, 19 nt, Artificial Sequence
  Description of Artificial Sequence: Synthetic oligonucleotide
  Antisense strand to SEQ ID NO: 2299096
aauaaucuucuacuuuacg

SEQ ID NO: 2299098 - RNA, 19 nt, Artificial Sequence
  Description of Artificial Sequence: Synthetic oligonucleotide
  Sense strand starting at position 298 of SEQ ID NO: 1884879
guauaaugccauugauaug

SEQ ID NO: 2299099 - RNA, 19 nt, Artificial Sequence
  Description of Artificial Sequence: Synthetic oligonucleotide
  Antisense strand to SEQ ID NO: 2299098
cauaucaauggcauuauac

SEQ ID NO: 2299100 - RNA, 19 nt, Artificial Sequence
  Description of Artificial Sequence: Synthetic oligonucleotide
  Sense strand starting at position 361 of SEQ ID NO: 1884879
cauuguugccagggacaga

SEQ ID NO: 2299101 - RNA, 19 nt, Artificial Sequence
  Description of Artificial Sequence: Synthetic oligonucleotide
  Antisense strand to SEQ ID NO: 2299100
ucugucccuggcaacaaug

SEQ ID NO: 2299102 - RNA, 19 nt, Artificial Sequence
  Description of Artificial Sequence: Synthetic oligonucleotide
  Sense strand starting at position 530 of SEQ ID NO: 1884879
auguucuaugaaugucaau

SEQ ID NO: 2299103 - RNA, 19 nt, Artificial Sequence
  Description of Artificial Sequence: Synthetic oligonucleotide
  Antisense strand to SEQ ID NO: 2299102
auugacauucauagaacau

SEQ ID NO: 2299104 - RNA, 19 nt, Artificial Sequence
  Description of Artificial Sequence: Synthetic oligonucleotide
  Sense strand starting at position 688 of SEQ ID NO: 1884879
agggacuauuagucucacu

SEQ ID NO: 2299105 - RNA, 19 nt, Artificial Sequence
  Description of Artificial Sequence: Synthetic oligonucleotide
  Antisense strand to SEQ ID NO: 2299104
agugagacuaauagucccu

SEQ ID NO: 2299106 - RNA, 19 nt, Artificial Sequence
  Description of Artificial Sequence: Synthetic oligonucleotide
  Sense strand starting at position 699 of SEQ ID NO: 1884879
gucucacuugcagaugaga

SEQ ID NO: 2299107 - RNA, 19 nt, Artificial Sequence
  Description of Artificial Sequence: Synthetic oligonucleotide
  Antisense strand to SEQ ID NO: 2299106
ucucaucugcaagugagac

SEQ ID NO: 2299108 - RNA, 19 nt, Artificial Sequence
  Description of Artificial Sequence: Synthetic oligonucleotide
  Sense strand starting at position 1004 of SEQ ID NO: 1884879
accgauugcaacugagauu

SEQ ID NO: 2299109 - RNA, 19 nt, Artificial Sequence
  Description of Artificial Sequence: Synthetic oligonucleotide
  Antisense strand to SEQ ID NO: 2299108
aaucucaguugcaaucggu

SEQ ID NO: 2299110 - RNA, 19 nt, Artificial Sequence
  Description of Artificial Sequence: Synthetic oligonucleotide
  Sense strand starting at position 1056 of SEQ ID NO: 1884879
agaagcauuccaugaagau

SEQ ID NO: 2299111 - RNA, 19 nt, Artificial Sequence
  Description of Artificial Sequence: Synthetic oligonucleotide
  Antisense strand to SEQ ID NO: 2299110
aucuucauggaaugcuucu

SEQ ID NO: 2299112 - RNA, 19 nt, Artificial Sequence
  Description of Artificial Sequence: Synthetic oligonucleotide
  Sense strand starting at position 1126 of SEQ ID NO: 1884879
uuuguaauuuguguacuac

SEQ ID NO: 2299113 - RNA, 19 nt, Artificial Sequence
  Description of Artificial Sequence: Synthetic oligonucleotide
  Antisense strand to SEQ ID NO: 2299112
guaguacacaaauuacaaa

SEQ ID NO: 2299114 - RNA, 19 nt, Artificial Sequence
  Description of Artificial Sequence: Synthetic oligonucleotide
  Sense strand starting at position 1179 of SEQ ID NO: 1884879
uguauauagauguagguau

SEQ ID NO: 2299115 - RNA, 19 nt, Artificial Sequence
  Description of Artificial Sequence: Synthetic oligonucleotide
  Antisense strand to SEQ ID NO: 2299114
auaccuacaucuauauaca

SEQ ID NO: 2299116 - RNA, 19 nt, Artificial Sequence
  Description of Artificial Sequence: Synthetic oligonucleotide
  Sense strand starting at position 1243 of SEQ ID NO: 1884879
uggaacuuguuauuaaaca

SEQ ID NO: 2299117 - RNA, 19 nt, Artificial Sequence
  Description of Artificial Sequence: Synthetic oligonucleotide
  Antisense strand to SEQ ID NO: 2299116
uguuuaauaacaaguucca

SEQ ID NO: 2299118 - RNA, 19 nt, Artificial Sequence
  Description of Artificial Sequence: Synthetic oligonucleotide
  Sense strand starting at position 1318 of SEQ ID NO: 1884879
gggugagcaauguagggau

SEQ ID NO: 2299119 - RNA, 19 nt, Artificial Sequence
  Description of Artificial Sequence: Synthetic oligonucleotide
  Antisense strand to SEQ ID NO: 2299118
aucccuacauugcucaccc

SEQ ID NO: 2299120 - RNA, 19 nt, Artificial Sequence
  Description of Artificial Sequence: Synthetic oligonucleotide
  Sense strand starting at position 1459 of SEQ ID NO: 1884879
acccaauagcgugaguuua

SEQ ID NO: 2299121 - RNA, 19 nt, Artificial Sequence
  Description of Artificial Sequence: Synthetic oligonucleotide
  Antisense strand to SEQ ID NO: 2299120
uaaacucacgcuauugggu

SEQ ID NO: 2299122 - RNA, 19 nt, Artificial Sequence
  Description of Artificial Sequence: Synthetic oligonucleotide
  Sense strand starting at position 1469 of SEQ ID NO: 1884879
gugaguuuaggcgaucuau

SEQ ID NO: 2299123 - RNA, 19 nt, Artificial Sequence
  Description of Artificial Sequence: Synthetic oligonucleotide
  Antisense strand to SEQ ID NO: 2299122
auagaucgccuaaacucac

SEQ ID NO: 2299124 - RNA, 19 nt, Artificial Sequence
  Description of Artificial Sequence: Synthetic oligonucleotide
  Sense strand starting at position 1478 of SEQ ID NO: 1884879
ggcgaucuauuaucuagau

SEQ ID NO: 2299125 - RNA, 19 nt, Artificial Sequence
  Description of Artificial Sequence: Synthetic oligonucleotide
  Antisense strand to SEQ ID NO: 2299124
aucuagauaauagaucgcc

SEQ ID NO: 2299126 - RNA, 19 nt, Artificial Sequence
  Description of Artificial Sequence: Synthetic oligonucleotide
  Sense strand starting at position 1479 of SEQ ID NO: 1884879
gcgaucuauuaucuagauc

SEQ ID NO: 2299127 - RNA, 19 nt, Artificial Sequence
  Description of Artificial Sequence: Synthetic oligonucleotide
  Antisense strand to SEQ ID NO: 2299126
gaucuagauaauagaucgc

SEQ ID NO: 2299128 - RNA, 19 nt, Artificial Sequence
  Description of Artificial Sequence: Synthetic oligonucleotide
  Sense strand starting at position 1529 of SEQ ID NO: 1884879
caggaagacucaguuuguu

SEQ ID NO: 2299129 - RNA, 19 nt, Artificial Sequence
  Description of Artificial Sequence: Synthetic oligonucleotide
  Antisense strand to SEQ ID NO: 2299128
aacaaacugagucuuccug

SEQ ID NO: 2299130 - RNA, 19 nt, Artificial Sequence
  Description of Artificial Sequence: Synthetic oligonucleotide
  Sense strand starting at position 1532 of SEQ ID NO: 1884879
gaagacucaguuuguuuau

SEQ ID NO: 2299131 - RNA, 19 nt, Artificial Sequence
  Description of Artificial Sequence: Synthetic oligonucleotide
  Antisense strand to SEQ ID NO: 2299130
auaaacaaacugagucuuc

SEQ ID NO: 2299132 - RNA, 19 nt, Artificial Sequence
  Description of Artificial Sequence: Synthetic oligonucleotide
  Sense strand starting at position 1572 of SEQ ID NO: 1884879
aggaaugagaguugucaug

SEQ ID NO: 2299133 - RNA, 19 nt, Artificial Sequence
  Description of Artificial Sequence: Synthetic oligonucleotide
  Antisense strand to SEQ ID NO: 2299132
caugacaacucucauuccu

SEQ ID NO: 2299134 - RNA, 19 nt, Artificial Sequence
  Description of Artificial Sequence: Synthetic oligonucleotide
  Sense strand starting at position 1574 of SEQ ID NO: 1884879
gaaugagaguugucaugaa

SEQ ID NO: 2299135 - RNA, 19 nt, Artificial Sequence
  Description of Artificial Sequence: Synthetic oligonucleotide
  Antisense strand to SEQ ID NO: 2299134
uucaugacaacucucauuc

SEQ ID NO: 2299136 - RNA, 19 nt, Artificial Sequence
  Description of Artificial Sequence: Synthetic oligonucleotide
  Sense strand starting at position 1590 of SEQ ID NO: 1884879
gaagauuaauagucgcuaa

SEQ ID NO: 2299137 - RNA, 19 nt, Artificial Sequence
  Description of Artificial Sequence: Synthetic oligonucleotide
  Antisense strand to SEQ ID NO: 2299136
uuagcgacuauuaaucuuc

SEQ ID NO: 2299138 - RNA, 19 nt, Artificial Sequence
  Description of Artificial Sequence: Synthetic oligonucleotide
  Sense strand starting at position 1639 of SEQ ID NO: 1884879
cuaggcauucuacaugcau

SEQ ID NO: 2299139 - RNA, 19 nt, Artificial Sequence
  Description of Artificial Sequence: Synthetic oligonucleotide
  Antisense strand to SEQ ID NO: 2299138
augcauguagaaugccuag

SEQ ID NO: 2299140 - RNA, 19 nt, Artificial Sequence
  Description of Artificial Sequence: Synthetic oligonucleotide
  Sense strand starting at position 1836 of SEQ ID NO: 1884879
cagagucaagccugauaag

SEQ ID NO: 2299141 - RNA, 19 nt, Artificial Sequence
  Description of Artificial Sequence: Synthetic oligonucleotide
  Antisense strand to SEQ ID NO: 2299140
cuuaucaggcuugacucug

SEQ ID NO: 2299142 - RNA, 19 nt, Artificial Sequence
  Description of Artificial Sequence: Synthetic oligonucleotide
  Sense strand starting at position 1846 of SEQ ID NO: 1884879
ccugauaagcgguauuauc

SEQ ID NO: 2299143 - RNA, 19 nt, Artificial Sequence
  Description of Artificial Sequence: Synthetic oligonucleotide
  Antisense strand to SEQ ID NO: 2299142
gauaauaccgcuuaucagg

SEQ ID NO: 2299144 - RNA, 19 nt, Artificial Sequence
  Description of Artificial Sequence: Synthetic oligonucleotide
  Sense strand starting at position 1855 of SEQ ID NO: 1884879
cgguauuauccuggaggca

SEQ ID NO: 2299145 - RNA, 19 nt, Artificial Sequence
  Description of Artificial Sequence: Synthetic oligonucleotide
  Antisense strand to SEQ ID NO: 2299144
ugccuccaggauaauaccg

SEQ ID NO: 2299146 - RNA, 19 nt, Artificial Sequence
  Description of Artificial Sequence: Synthetic oligonucleotide
  Sense strand starting at position 1856 of SEQ ID NO: 1884879
gguauuauccuggaggcaa

SEQ ID NO: 2299147 - RNA, 19 nt, Artificial Sequence
  Description of Artificial Sequence: Synthetic oligonucleotide
  Antisense strand to SEQ ID NO: 2299146
uugccuccaggauaauacc

SEQ ID NO: 2299148 - RNA, 19 nt, Artificial Sequence
  Description of Artificial Sequence: Synthetic oligonucleotide
  Sense strand starting at position 3087 of SEQ ID NO: 1884879
augcauggugcauauacau

SEQ ID NO: 2299149 - RNA, 19 nt, Artificial Sequence
  Description of Artificial Sequence: Synthetic oligonucleotide
  Antisense strand to SEQ ID NO: 2299148
auguauaugcaccaugcau

SEQ ID NO: 2299150 - RNA, 19 nt, Artificial Sequence
  Description of Artificial Sequence: Synthetic oligonucleotide
  Sense strand starting at position 3240 of SEQ ID NO: 1884879
acuauauacgugcauacau

SEQ ID NO: 2299151 - RNA, 19 nt, Artificial Sequence
  Description of Artificial Sequence: Synthetic oligonucleotide
  Antisense strand to SEQ ID NO: 2299150
auguaugcacguauauagu

SEQ ID NO: 2299152 - RNA, 19 nt, Artificial Sequence
  Description of Artificial Sequence: Synthetic oligonucleotide
  Sense strand starting at position 3312 of SEQ ID NO: 1884879
uguguacaugcauaauaca

SEQ ID NO: 2299153 - RNA, 19 nt, Artificial Sequence
  Description of Artificial Sequence: Synthetic oligonucleotide
  Antisense strand to SEQ ID NO: 2299152
uguauuaugcauguacaca

SEQ ID NO: 2299154 - RNA, 19 nt, Artificial Sequence
  Description of Artificial Sequence: Synthetic oligonucleotide
  Sense strand starting at position 3475 of SEQ ID NO: 1884879
uugccaaauaggugaaagu

SEQ ID NO: 2299155 - RNA, 19 nt, Artificial Sequence
  Description of Artificial Sequence: Synthetic oligonucleotide
  Antisense strand to SEQ ID NO: 2299154
acuuucaccuauuuggcaa

SEQ ID NO: 2299156 - RNA, 19 nt, Artificial Sequence
  Description of Artificial Sequence: Synthetic oligonucleotide
  Sense strand starting at position 3476 of SEQ ID NO: 1884879
ugccaaauaggugaaagua

SEQ ID NO: 2299157 - RNA, 19 nt, Artificial Sequence
  Description of Artificial Sequence: Synthetic oligonucleotide
  Antisense strand to SEQ ID NO: 2299156
uacuuucaccuauuuggca

SEQ ID NO: 2299158 - RNA, 19 nt, Artificial Sequence
  Description of Artificial Sequence: Synthetic oligonucleotide
  Sense strand starting at position 3569 of SEQ ID NO: 1884879
uuucucaccuggcugaauu

SEQ ID NO: 2299159 - RNA, 19 nt, Artificial Sequence
  Description of Artificial Sequence: Synthetic oligonucleotide
  Antisense strand to SEQ ID NO: 2299158
aauucagccaggugagaaa

SEQ ID NO: 2299160 - RNA, 19 nt, Artificial Sequence
  Description of Artificial Sequence: Synthetic oligonucleotide
  Sense strand starting at position 3702 of SEQ ID NO: 1884879
ugagaaaucugauacaaau

SEQ ID NO: 2299161 - RNA, 19 nt, Artificial Sequence
  Description of Artificial Sequence: Synthetic oligonucleotide
  Antisense strand to SEQ ID NO: 2299160
auuuguaucagauuucuca

SEQ ID NO: 2299162 - RNA, 19 nt, Artificial Sequence
  Description of Artificial Sequence: Synthetic oligonucleotide
  Sense strand starting at position 3729 of SEQ ID NO: 1884879
uccugugaccuuggaagau

SEQ ID NO: 2299163 - RNA, 19 nt, Artificial Sequence
  Description of Artificial Sequence: Synthetic oligonucleotide
  Antisense strand to SEQ ID NO: 2299162
aucuuccaaggucacagga

SEQ ID NO: 2299164 - RNA, 19 nt, Artificial Sequence
  Description of Artificial Sequence: Synthetic oligonucleotide
  Sense strand starting at position 3906 of SEQ ID NO: 1884879
ccugcaaaugugugcauuu

SEQ ID NO: 2299165 - RNA, 19 nt, Artificial Sequence
  Description of Artificial Sequence: Synthetic oligonucleotide
  Antisense strand to SEQ ID NO: 2299164
aaaugcacacauuugcagg

SEQ ID NO: 2299166 - RNA, 19 nt, Artificial Sequence
  Description of Artificial Sequence: Synthetic oligonucleotide
  Sense strand starting at position 193 of SEQ ID NO: 1884880
gguacuguggaggaucuua

SEQ ID NO: 2299167 - RNA, 19 nt, Artificial Sequence
  Description of Artificial Sequence: Synthetic oligonucleotide
  Antisense strand to SEQ ID NO: 2299166
uaagauccuccacaguacc

SEQ ID NO: 2299168 - RNA, 19 nt, Artificial Sequence
  Description of Artificial Sequence: Synthetic oligonucleotide
  Sense strand starting at position 361 of SEQ ID NO: 1884880
ugagccaucugacuucuau

SEQ ID NO: 2299169 - RNA, 19 nt, Artificial Sequence
  Description of Artificial Sequence: Synthetic oligonucleotide
  Antisense strand to SEQ ID NO: 2299168
auagaagucagauggcuca

SEQ ID NO: 2299170 - RNA, 19 nt, Artificial Sequence
  Description of Artificial Sequence: Synthetic oligonucleotide
  Sense strand starting at position 1499 of SEQ ID NO: 1884880
gagguccacugguuaugau

SEQ ID NO: 2299171 - RNA, 19 nt, Artificial Sequence
  Description of Artificial Sequence: Synthetic oligonucleotide
  Antisense strand to SEQ ID NO: 2299170
aucauaaccaguggaccuc

SEQ ID NO: 2299172 - RNA, 19 nt, Artificial Sequence
  Description of Artificial Sequence: Synthetic oligonucleotide
  Sense strand starting at position 1500 of SEQ ID NO: 1884880
agguccacugguuaugaua

SEQ ID NO: 2299173 - RNA, 19 nt, Artificial Sequence
  Description of Artificial Sequence: Synthetic oligonucleotide
  Antisense strand to SEQ ID NO: 2299172
uaucauaaccaguggaccu

SEQ ID NO: 2299174 - RNA, 19 nt, Artificial Sequence
  Description of Artificial Sequence: Synthetic oligonucleotide
  Sense strand starting at position 1502 of SEQ ID NO: 1884880
guccacugguuaugauaua

SEQ ID NO: 2299175 - RNA, 19 nt, Artificial Sequence
  Description of Artificial Sequence: Synthetic oligonucleotide
  Antisense strand to SEQ ID NO: 2299174
uauaucauaaccaguggac

SEQ ID NO: 2299176 - RNA, 19 nt, Artificial Sequence
  Description of Artificial Sequence: Synthetic oligonucleotide
  Sense strand starting at position 1503 of SEQ ID NO: 1884880
uccacugguuaugauauaa

SEQ ID NO: 2299177 - RNA, 19 nt, Artificial Sequence
  Description of Artificial Sequence: Synthetic oligonucleotide
  Antisense strand to SEQ ID NO: 2299176
uuauaucauaaccagugga

SEQ ID NO: 2299178 - RNA, 19 nt, Artificial Sequence
  Description of Artificial Sequence: Synthetic oligonucleotide
  Sense strand starting at position 1993 of SEQ ID NO: 1884880
aaggcugugccguguggaa

SEQ ID NO: 2299179 - RNA, 19 nt, Artificial Sequence
  Description of Artificial Sequence: Synthetic oligonucleotide
  Antisense strand to SEQ ID NO: 2299178
uuccacacggcacagccuu

SEQ ID NO: 2299180 - RNA, 19 nt, Artificial Sequence
  Description of Artificial Sequence: Synthetic oligonucleotide
  Sense strand starting at position 2000 of SEQ ID NO: 1884880
ugccguguggaagggauua

SEQ ID NO: 2299181 - RNA, 19 nt, Artificial Sequence
  Description of Artificial Sequence: Synthetic oligonucleotide
  Antisense strand to SEQ ID NO: 2299180
uaaucccuuccacacggca

SEQ ID NO: 2299182 - RNA, 19 nt, Artificial Sequence
  Description of Artificial Sequence: Synthetic oligonucleotide
  Sense strand starting at position 2002 of SEQ ID NO: 1884880
ccguguggaagggauuaau

SEQ ID NO: 2299183 - RNA, 19 nt, Artificial Sequence
  Description of Artificial Sequence: Synthetic oligonucleotide
  Antisense strand to SEQ ID NO: 2299182
auuaaucccuuccacacgg

SEQ ID NO: 2299184 - RNA, 19 nt, Artificial Sequence
  Description of Artificial Sequence: Synthetic oligonucleotide
  Sense strand starting at position 2039 of SEQ ID NO: 1884880
ccuccauucuuaggacaga

SEQ ID NO: 2299185 - RNA, 19 nt, Artificial Sequence
  Description of Artificial Sequence: Synthetic oligonucleotide
  Antisense strand to SEQ ID NO: 2299184
ucuguccuaagaauggagg

SEQ ID NO: 2299186 - RNA, 19 nt, Artificial Sequence
  Description of Artificial Sequence: Synthetic oligonucleotide
  Sense strand starting at position 2842 of SEQ ID NO: 1884880
uucuuuggguccugacuau

SEQ ID NO: 2299187 - RNA, 19 nt, Artificial Sequence
  Description of Artificial Sequence: Synthetic oligonucleotide
  Antisense strand to SEQ ID NO: 2299186
auagucaggacccaaagaa

SEQ ID NO: 2299188 - RNA, 19 nt, Artificial Sequence
  Description of Artificial Sequence: Synthetic oligonucleotide
  Sense strand starting at position 2848 of SEQ ID NO: 1884880
ggguccugacuaugguuaa

SEQ ID NO: 2299189 - RNA, 19 nt, Artificial Sequence
  Description of Artificial Sequence: Synthetic oligonucleotide
  Antisense strand to SEQ ID NO: 2299188
uuaaccauagucaggaccc

SEQ ID NO: 2299190 - RNA, 19 nt, Artificial Sequence
  Description of Artificial Sequence: Synthetic oligonucleotide
  Sense strand starting at position 3065 of SEQ ID NO: 1884880
cucuuuagucaaggaaugu

SEQ ID NO: 2299191 - RNA, 19 nt, Artificial Sequence
  Description of Artificial Sequence: Synthetic oligonucleotide
  Antisense strand to SEQ ID NO: 2299190
acauuccuugacuaaagag

SEQ ID NO: 2299192 - RNA, 19 nt, Artificial Sequence
  Description of Artificial Sequence: Synthetic oligonucleotide
  Sense strand starting at position 3069 of SEQ ID NO: 1884880
uuagucaaggaauguuaaa

SEQ ID NO: 2299193 - RNA, 19 nt, Artificial Sequence
  Description of Artificial Sequence: Synthetic oligonucleotide
  Antisense strand to SEQ ID NO: 2299192
uuuaacauuccuugacuaa

SEQ ID NO: 2299194 - RNA, 19 nt, Artificial Sequence
  Description of Artificial Sequence: Synthetic oligonucleotide
  Sense strand starting at position 3116 of SEQ ID NO: 1884880
gggagaaucugggaauccu

SEQ ID NO: 2299195 - RNA, 19 nt, Artificial Sequence
  Description of Artificial Sequence: Synthetic oligonucleotide
  Antisense strand to SEQ ID NO: 2299194
aggauucccagauucuccc

SEQ ID NO: 2299196 - RNA, 19 nt, Artificial Sequence
  Description of Artificial Sequence: Synthetic oligonucleotide
  Sense strand starting at position 3190 of SEQ ID NO: 1884880
ccuuguacucuggaucuca

SEQ ID NO: 2299197 - RNA, 19 nt, Artificial Sequence
  Description of Artificial Sequence: Synthetic oligonucleotide
  Antisense strand to SEQ ID NO: 2299196
ugagauccagaguacaagg

SEQ ID NO: 2299198 - RNA, 19 nt, Artificial Sequence
  Description of Artificial Sequence: Synthetic oligonucleotide
  Sense strand starting at position 3200 of SEQ ID NO: 1884880
uggaucucaucccuagagu

SEQ ID NO: 2299199 - RNA, 19 nt, Artificial Sequence
  Description of Artificial Sequence: Synthetic oligonucleotide
  Antisense strand to SEQ ID NO: 2299198
acucuagggaugagaucca

SEQ ID NO: 2299200 - RNA, 19 nt, Artificial Sequence
  Description of Artificial Sequence: Synthetic oligonucleotide
  Sense strand starting at position 3201 of SEQ ID NO: 1884880
ggaucucaucccuagaguc

SEQ ID NO: 2299201 - RNA, 19 nt, Artificial Sequence
  Description of Artificial Sequence: Synthetic oligonucleotide
  Antisense strand to SEQ ID NO: 2299200
gacucuagggaugagaucc

SEQ ID NO: 2299202 - RNA, 19 nt, Artificial Sequence
  Description of Artificial Sequence: Synthetic oligonucleotide
  Sense strand starting at position 3232 of SEQ ID NO: 1884880
acguaaugauucucaaaua

SEQ ID NO: 2299203 - RNA, 19 nt, Artificial Sequence
  Description of Artificial Sequence: Synthetic oligonucleotide
  Antisense strand to SEQ ID NO: 2299202
uauuugagaaucauuacgu

SEQ ID NO: 2299204 - RNA, 19 nt, Artificial Sequence
  Description of Artificial Sequence: Synthetic oligonucleotide
  Sense strand starting at position 3233 of SEQ ID NO: 1884880
cguaaugauucucaaauaa

SEQ ID NO: 2299205 - RNA, 19 nt, Artificial Sequence
  Description of Artificial Sequence: Synthetic oligonucleotide
  Antisense strand to SEQ ID NO: 2299204
uuauuugagaaucauuacg

SEQ ID NO: 2299206 - RNA, 19 nt, Artificial Sequence
  Description of Artificial Sequence: Synthetic oligonucleotide
  Sense strand starting at position 3349 of SEQ ID NO: 1884880
ggagcagagcucuaaacca

SEQ ID NO: 2299207 - RNA, 19 nt, Artificial Sequence
  Description of Artificial Sequence: Synthetic oligonucleotide
  Antisense strand to SEQ ID NO: 2299206
ugguuuagagcucugcucc

SEQ ID NO: 2299208 - RNA, 19 nt, Artificial Sequence
  Description of Artificial Sequence: Synthetic oligonucleotide
  Sense strand starting at position 3513 of SEQ ID NO: 1884880
ccugaauuauuacguuuau

SEQ ID NO: 2299209 - RNA, 19 nt, Artificial Sequence
  Description of Artificial Sequence: Synthetic oligonucleotide
  Antisense strand to SEQ ID NO: 2299208
auaaacguaauaauucagg

SEQ ID NO: 2299210 - RNA, 19 nt, Artificial Sequence
  Description of Artificial Sequence: Synthetic oligonucleotide
  Sense strand starting at position 33 of SEQ ID NO: 1884881
gcgcgugcuggcuuuaaau

SEQ ID NO: 2299211 - RNA, 19 nt, Artificial Sequence
  Description of Artificial Sequence: Synthetic oligonucleotide
  Antisense strand to SEQ ID NO: 2299210
auuuaaagccagcacgcgc

SEQ ID NO: 2299212 - RNA, 19 nt, Artificial Sequence
  Description of Artificial Sequence: Synthetic oligonucleotide
  Sense strand starting at position 35 of SEQ ID NO: 1884881
gcgugcuggcuuuaaauaa

SEQ ID NO: 2299213 - RNA, 19 nt, Artificial Sequence
  Description of Artificial Sequence: Synthetic oligonucleotide
  Antisense strand to SEQ ID NO: 2299212
uuauuuaaagccagcacgc

SEQ ID NO: 2299214 - RNA, 19 nt, Artificial Sequence
  Description of Artificial Sequence: Synthetic oligonucleotide
  Sense strand starting at position 50 of SEQ ID NO: 1884881
auaagugacucacuggaua

SEQ ID NO: 2299215 - RNA, 19 nt, Artificial Sequence
  Description of Artificial Sequence: Synthetic oligonucleotide
  Antisense strand to SEQ ID NO: 2299214
uauccagugagucacuuau

SEQ ID NO: 2299216 - RNA, 19 nt, Artificial Sequence
  Description of Artificial Sequence: Synthetic oligonucleotide
  Sense strand starting at position 55 of SEQ ID NO: 1884881
ugacucacuggauagugua

SEQ ID NO: 2299217 - RNA, 19 nt, Artificial Sequence
  Description of Artificial Sequence: Synthetic oligonucleotide
  Antisense strand to SEQ ID NO: 2299216
uacacuauccagugaguca

SEQ ID NO: 2299218 - RNA, 19 nt, Artificial Sequence
  Description of Artificial Sequence: Synthetic oligonucleotide
  Sense strand starting at position 127 of SEQ ID NO: 1884881
cugaaaggguuugugacaa

SEQ ID NO: 2299219 - RNA, 19 nt, Artificial Sequence
  Description of Artificial Sequence: Synthetic oligonucleotide
  Antisense strand to SEQ ID NO: 2299218
uugucacaaacccuuucag

SEQ ID NO: 2299220 - RNA, 19 nt, Artificial Sequence
  Description of Artificial Sequence: Synthetic oligonucleotide
  Sense strand starting at position 131 of SEQ ID NO: 1884881
aaggguuugugacaaauuu

SEQ ID NO: 2299221 - RNA, 19 nt, Artificial Sequence
  Description of Artificial Sequence: Synthetic oligonucleotide
  Antisense strand to SEQ ID NO: 2299220
aaauuugucacaaacccuu

SEQ ID NO: 2299222 - RNA, 19 nt, Artificial Sequence
  Description of Artificial Sequence: Synthetic oligonucleotide
  Sense strand starting at position 161 of SEQ ID NO: 1884881
ucacgcucaucuguuauga

SEQ ID NO: 2299223 - RNA, 19 nt, Artificial Sequence
  Description of Artificial Sequence: Synthetic oligonucleotide
  Antisense strand to SEQ ID NO: 2299222
ucauaacagaugagcguga

SEQ ID NO: 2299224 - RNA, 19 nt, Artificial Sequence
  Description of Artificial Sequence: Synthetic oligonucleotide
  Sense strand starting at position 163 of SEQ ID NO: 1884881
acgcucaucuguuaugaug

SEQ ID NO: 2299225 - RNA, 19 nt, Artificial Sequence
  Description of Artificial Sequence: Synthetic oligonucleotide
  Antisense strand to SEQ ID NO: 2299224
caucauaacagaugagcgu

SEQ ID NO: 2299226 - RNA, 19 nt, Artificial Sequence
  Description of Artificial Sequence: Synthetic oligonucleotide
  Sense strand starting at position 165 of SEQ ID NO: 1884881
gcucaucuguuaugaugau

SEQ ID NO: 2299227 - RNA, 19 nt, Artificial Sequence
  Description of Artificial Sequence: Synthetic oligonucleotide
  Antisense strand to SEQ ID NO: 2299226
aucaucauaacagaugagc

SEQ ID NO: 2299228 - RNA, 19 nt, Artificial Sequence
  Description of Artificial Sequence: Synthetic oligonucleotide
  Sense strand starting at position 166 of SEQ ID NO: 1884881
cucaucuguuaugaugauu

SEQ ID NO: 2299229 - RNA, 19 nt, Artificial Sequence
  Description of Artificial Sequence: Synthetic oligonucleotide
  Antisense strand to SEQ ID NO: 2299228
aaucaucauaacagaugag

SEQ ID NO: 2299230 - RNA, 19 nt, Artificial Sequence
  Description of Artificial Sequence: Synthetic oligonucleotide
  Sense strand starting at position 666 of SEQ ID NO: 1884881
cugagcucuugccggauca

SEQ ID NO: 2299231 - RNA, 19 nt, Artificial Sequence
  Description of Artificial Sequence: Synthetic oligonucleotide
  Antisense strand to SEQ ID NO: 2299230
ugauccggcaagagcucag

SEQ ID NO: 2299232 - RNA, 19 nt, Artificial Sequence
  Description of Artificial Sequence: Synthetic oligonucleotide
  Sense strand starting at position 667 of SEQ ID NO: 1884881
ugagcucuugccggaucaa

SEQ ID NO: 2299233 - RNA, 19 nt, Artificial Sequence
  Description of Artificial Sequence: Synthetic oligonucleotide
  Antisense strand to SEQ ID NO: 2299232
uugauccggcaagagcuca

SEQ ID NO: 2299234 - RNA, 19 nt, Artificial Sequence
  Description of Artificial Sequence: Synthetic oligonucleotide
  Sense strand starting at position 668 of SEQ ID NO: 1884881
gagcucuugccggaucaag

SEQ ID NO: 2299235 - RNA, 19 nt, Artificial Sequence
  Description of Artificial Sequence: Synthetic oligonucleotide
  Antisense strand to SEQ ID NO: 2299234
cuugauccggcaagagcuc

SEQ ID NO: 2299236 - RNA, 19 nt, Artificial Sequence
  Description of Artificial Sequence: Synthetic oligonucleotide
  Sense strand starting at position 886 of SEQ ID NO: 1884881
cugucccuugucugggaaa

SEQ ID NO: 2299237 - RNA, 19 nt, Artificial Sequence
  Description of Artificial Sequence: Synthetic oligonucleotide
  Antisense strand to SEQ ID NO: 2299236
uuucccagacaagggacag

SEQ ID NO: 2299238 - RNA, 19 nt, Artificial Sequence
  Description of Artificial Sequence: Synthetic oligonucleotide
  Sense strand starting at position 1446 of SEQ ID NO: 1884881
cguaaagaaucccuucucu

SEQ ID NO: 2299239 - RNA, 19 nt, Artificial Sequence
  Description of Artificial Sequence: Synthetic oligonucleotide
  Antisense strand to SEQ ID NO: 2299238
agagaagggauucuuuacg

SEQ ID NO: 2299240 - RNA, 19 nt, Artificial Sequence
  Description of Artificial Sequence: Synthetic oligonucleotide
  Sense strand starting at position 2304 of SEQ ID NO: 1884881
ggcuaauucuggcccucuu

SEQ ID NO: 2299241 - RNA, 19 nt, Artificial Sequence
  Description of Artificial Sequence: Synthetic oligonucleotide
  Antisense strand to SEQ ID NO: 2299240
aagagggccagaauuagcc

SEQ ID NO: 2299242 - RNA, 19 nt, Artificial Sequence
  Description of Artificial Sequence: Synthetic oligonucleotide
  Sense strand starting at position 3018 of SEQ ID NO: 1884881
gcuugacaagugggacuau

SEQ ID NO: 2299243 - RNA, 19 nt, Artificial Sequence
  Description of Artificial Sequence: Synthetic oligonucleotide
  Antisense strand to SEQ ID NO: 2299242
auagucccacuugucaagc

SEQ ID NO: 2299244 - RNA, 19 nt, Artificial Sequence
  Description of Artificial Sequence: Synthetic oligonucleotide
  Sense strand starting at position 3172 of SEQ ID NO: 1884881
cuuccuauauuugggauuu

SEQ ID NO: 2299245 - RNA, 19 nt, Artificial Sequence
  Description of Artificial Sequence: Synthetic oligonucleotide
  Antisense strand to SEQ ID NO: 2299244
aaaucccaaauauaggaag

SEQ ID NO: 2299246 - RNA, 19 nt, Artificial Sequence
  Description of Artificial Sequence: Synthetic oligonucleotide
  Sense strand starting at position 3198 of SEQ ID NO: 1884881
cuaggauuugugugcgugu

SEQ ID NO: 2299247 - RNA, 19 nt, Artificial Sequence
  Description of Artificial Sequence: Synthetic oligonucleotide
  Antisense strand to SEQ ID NO: 2299246
acacgcacacaaauccuag

SEQ ID NO: 2299248 - RNA, 19 nt, Artificial Sequence
  Description of Artificial Sequence: Synthetic oligonucleotide
  Sense strand starting at position 3199 of SEQ ID NO: 1884881
uaggauuugugugcguguu

SEQ ID NO: 2299249 - RNA, 19 nt, Artificial Sequence
  Description of Artificial Sequence: Synthetic oligonucleotide
  Antisense strand to SEQ ID NO: 2299248
aacacgcacacaaauccua

SEQ ID NO: 2299250 - RNA, 19 nt, Artificial Sequence
  Description of Artificial Sequence: Synthetic oligonucleotide
  Sense strand starting at position 3311 of SEQ ID NO: 1884881
ucgugcuuccaccguuaau

SEQ ID NO: 2299251 - RNA, 19 nt, Artificial Sequence
  Description of Artificial Sequence: Synthetic oligonucleotide
  Antisense strand to SEQ ID NO: 2299250
auuaacgguggaagcacga

SEQ ID NO: 2299252 - RNA, 19 nt, Artificial Sequence
  Description of Artificial Sequence: Synthetic oligonucleotide
  Sense strand starting at position 3312 of SEQ ID NO: 1884881
cgugcuuccaccguuaauu

SEQ ID NO: 2299253 - RNA, 19 nt, Artificial Sequence
  Description of Artificial Sequence: Synthetic oligonucleotide
  Antisense strand to SEQ ID NO: 2299252
aauuaacgguggaagcacg

SEQ ID NO: 2299254 - RNA, 19 nt, Artificial Sequence
  Description of Artificial Sequence: Synthetic oligonucleotide
  Sense strand starting at position 3314 of SEQ ID NO: 1884881
ugcuuccaccguuaauuau

SEQ ID NO: 2299255 - RNA, 19 nt, Artificial Sequence
  Description of Artificial Sequence: Synthetic oligonucleotide
  Antisense strand to SEQ ID NO: 2299254
auaauuaacgguggaagca

SEQ ID NO: 2299256 - RNA, 19 nt, Artificial Sequence
  Description of Artificial Sequence: Synthetic oligonucleotide
  Sense strand starting at position 3321 of SEQ ID NO: 1884881
accguuaauuaucugggua

SEQ ID NO: 2299257 - RNA, 19 nt, Artificial Sequence
  Description of Artificial Sequence: Synthetic oligonucleotide
  Antisense strand to SEQ ID NO: 2299256
uacccagauaauuaacggu

SEQ ID NO: 2299258 - RNA, 19 nt, Artificial Sequence
  Description of Artificial Sequence: Synthetic oligonucleotide
  Sense strand starting at position 3322 of SEQ ID NO: 1884881
ccguuaauuaucuggguaa

SEQ ID NO: 2299259 - RNA, 19 nt, Artificial Sequence
  Description of Artificial Sequence: Synthetic oligonucleotide
  Antisense strand to SEQ ID NO: 2299258
uuacccagauaauuaacgg

SEQ ID NO: 2299260 - RNA, 19 nt, Artificial Sequence
  Description of Artificial Sequence: Synthetic oligonucleotide
  Sense strand starting at position 3323 of SEQ ID NO: 1884881
cguuaauuaucuggguaac

SEQ ID NO: 2299261 - RNA, 19 nt, Artificial Sequence
  Description of Artificial Sequence: Synthetic oligonucleotide
  Antisense strand to SEQ ID NO: 2299260
guuacccagauaauuaacg

SEQ ID NO: 2299262 - RNA, 19 nt, Artificial Sequence
  Description of Artificial Sequence: Synthetic oligonucleotide
  Sense strand starting at position 3738 of SEQ ID NO: 1884881
gaagguuuagccugccauu

SEQ ID NO: 2299263 - RNA, 19 nt, Artificial Sequence
  Description of Artificial Sequence: Synthetic oligonucleotide
  Antisense strand to SEQ ID NO: 2299262
aauggcaggcuaaaccuuc

SEQ ID NO: 2299264 - RNA, 19 nt, Artificial Sequence
  Description of Artificial Sequence: Synthetic oligonucleotide
  Sense strand starting at position 3894 of SEQ ID NO: 1884881
agcagagauggugguuaaa

SEQ ID NO: 2299265 - RNA, 19 nt, Artificial Sequence
  Description of Artificial Sequence: Synthetic oligonucleotide
  Antisense strand to SEQ ID NO: 2299264
uuuaaccaccaucucugcu

SEQ ID NO: 2299266 - RNA, 19 nt, Artificial Sequence
  Description of Artificial Sequence: Synthetic oligonucleotide
  Sense strand starting at position 3906 of SEQ ID NO: 1884881
gguuaaagaucuccuaaag

SEQ ID NO: 2299267 - RNA, 19 nt, Artificial Sequence
  Description of Artificial Sequence: Synthetic oligonucleotide
  Antisense strand to SEQ ID NO: 2299266
cuuuaggagaucuuuaacc

SEQ ID NO: 2299268 - RNA, 19 nt, Artificial Sequence
  Description of Artificial Sequence: Synthetic oligonucleotide
  Sense strand starting at position 138 of SEQ ID NO: 1884882
ccauguucguucuuauuuc

SEQ ID NO: 2299269 - RNA, 19 nt, Artificial Sequence
  Description of Artificial Sequence: Synthetic oligonucleotide
  Antisense strand to SEQ ID NO: 2299268
gaaauaagaacgaacaugg

SEQ ID NO: 2299270 - RNA, 19 nt, Artificial Sequence
  Description of Artificial Sequence: Synthetic oligonucleotide
  Sense strand starting at position 142 of SEQ ID NO: 1884882
guucguucuuauuuccgaa

SEQ ID NO: 2299271 - RNA, 19 nt, Artificial Sequence
  Description of Artificial Sequence: Synthetic oligonucleotide
  Antisense strand to SEQ ID NO: 2299270
uucggaaauaagaacgaac

SEQ ID NO: 2299272 - RNA, 19 nt, Artificial Sequence
  Description of Artificial Sequence: Synthetic oligonucleotide
  Sense strand starting at position 144 of SEQ ID NO: 1884882
ucguucuuauuuccgaauu

SEQ ID NO: 2299273 - RNA, 19 nt, Artificial Sequence
  Description of Artificial Sequence: Synthetic oligonucleotide
  Antisense strand to SEQ ID NO: 2299272
aauucggaaauaagaacga

SEQ ID NO: 2299274 - RNA, 19 nt, Artificial Sequence
  Description of Artificial Sequence: Synthetic oligonucleotide
  Sense strand starting at position 156 of SEQ ID NO: 1884882
ccgaauucccaguaucuag

SEQ ID NO: 2299275 - RNA, 19 nt, Artificial Sequence
  Description of Artificial Sequence: Synthetic oligonucleotide
  Antisense strand to SEQ ID NO: 2299274
cuagauacugggaauucgg

SEQ ID NO: 2299276 - RNA, 19 nt, Artificial Sequence
  Description of Artificial Sequence: Synthetic oligonucleotide
  Sense strand starting at position 499 of SEQ ID NO: 1884882
augggugcucacuagaaug

SEQ ID NO: 2299277 - RNA, 19 nt, Artificial Sequence
  Description of Artificial Sequence: Synthetic oligonucleotide
  Antisense strand to SEQ ID NO: 2299276
cauucuagugagcacccau

SEQ ID NO: 2299278 - RNA, 19 nt, Artificial Sequence
  Description of Artificial Sequence: Synthetic oligonucleotide
  Sense strand starting at position 501 of SEQ ID NO: 1884882
gggugcucacuagaaugga

SEQ ID NO: 2299279 - RNA, 19 nt, Artificial Sequence
  Description of Artificial Sequence: Synthetic oligonucleotide
  Antisense strand to SEQ ID NO: 2299278
uccauucuagugagcaccc

SEQ ID NO: 2299280 - RNA, 19 nt, Artificial Sequence
  Description of Artificial Sequence: Synthetic oligonucleotide
  Sense strand starting at position 621 of SEQ ID NO: 1884882
uguguaugaaauugauuga

SEQ ID NO: 2299281 - RNA, 19 nt, Artificial Sequence
  Description of Artificial Sequence: Synthetic oligonucleotide
  Antisense strand to SEQ ID NO: 2299280
ucaaucaauuucauacaca

SEQ ID NO: 2299282 - RNA, 19 nt, Artificial Sequence
  Description of Artificial Sequence: Synthetic oligonucleotide
  Sense strand starting at position 624 of SEQ ID NO: 1884882
guaugaaauugauugagcu

SEQ ID NO: 2299283 - RNA, 19 nt, Artificial Sequence
  Description of Artificial Sequence: Synthetic oligonucleotide
  Antisense strand to SEQ ID NO: 2299282
agcucaaucaauuucauac

SEQ ID NO: 2299284 - RNA, 19 nt, Artificial Sequence
  Description of Artificial Sequence: Synthetic oligonucleotide
  Sense strand starting at position 695 of SEQ ID NO: 1884882
augggaaucuuugucauca

SEQ ID NO: 2299285 - RNA, 19 nt, Artificial Sequence
  Description of Artificial Sequence: Synthetic oligonucleotide
  Antisense strand to SEQ ID NO: 2299284
ugaugacaaagauucccau

SEQ ID NO: 2299286 - RNA, 19 nt, Artificial Sequence
  Description of Artificial Sequence: Synthetic oligonucleotide
  Sense strand starting at position 696 of SEQ ID NO: 1884882
ugggaaucuuugucaucac

SEQ ID NO: 2299287 - RNA, 19 nt, Artificial Sequence
  Description of Artificial Sequence: Synthetic oligonucleotide
  Antisense strand to SEQ ID NO: 2299286
gugaugacaaagauuccca

SEQ ID NO: 2299288 - RNA, 19 nt, Artificial Sequence
  Description of Artificial Sequence: Synthetic oligonucleotide
  Sense strand starting at position 839 of SEQ ID NO: 1884882
uacugaaacuauucggguu

SEQ ID NO: 2299289 - RNA, 19 nt, Artificial Sequence
  Description of Artificial Sequence: Synthetic oligonucleotide
  Antisense strand to SEQ ID NO: 2299288
aacccgaauaguuucagua

SEQ ID NO: 2299290 - RNA, 19 nt, Artificial Sequence
  Description of Artificial Sequence: Synthetic oligonucleotide
  Sense strand starting at position 944 of SEQ ID NO: 1884882
agaugcaugcuagagauua

SEQ ID NO: 2299291 - RNA, 19 nt, Artificial Sequence
  Description of Artificial Sequence: Synthetic oligonucleotide
  Antisense strand to SEQ ID NO: 2299290
uaaucucuagcaugcaucu

SEQ ID NO: 2299292 - RNA, 19 nt, Artificial Sequence
  Description of Artificial Sequence: Synthetic oligonucleotide
  Sense strand starting at position 946 of SEQ ID NO: 1884882
augcaugcuagagauuagu

SEQ ID NO: 2299293 - RNA, 19 nt, Artificial Sequence
  Description of Artificial Sequence: Synthetic oligonucleotide
  Antisense strand to SEQ ID NO: 2299292
acuaaucucuagcaugcau

SEQ ID NO: 2299294 - RNA, 19 nt, Artificial Sequence
  Description of Artificial Sequence: Synthetic oligonucleotide
  Sense strand starting at position 949 of SEQ ID NO: 1884882
caugcuagagauuaguauu

SEQ ID NO: 2299295 - RNA, 19 nt, Artificial Sequence
  Description of Artificial Sequence: Synthetic oligonucleotide
  Antisense strand to SEQ ID NO: 2299294
aauacuaaucucuagcaug

SEQ ID NO: 2299296 - RNA, 19 nt, Artificial Sequence
  Description of Artificial Sequence: Synthetic oligonucleotide
  Sense strand starting at position 1030 of SEQ ID NO: 1884882
acuguagcugaguacauaa

SEQ ID NO: 2299297 - RNA, 19 nt, Artificial Sequence
  Description of Artificial Sequence: Synthetic oligonucleotide
  Antisense strand to SEQ ID NO: 2299296
uuauguacucagcuacagu

SEQ ID NO: 2299298 - RNA, 19 nt, Artificial Sequence
  Description of Artificial Sequence: Synthetic oligonucleotide
  Sense strand starting at position 1083 of SEQ ID NO: 1884882
gaccgaaaccgcuaaauga

SEQ ID NO: 2299299 - RNA, 19 nt, Artificial Sequence
  Description of Artificial Sequence: Synthetic oligonucleotide
  Antisense strand to SEQ ID NO: 2299298
ucauuuagcgguuucgguc

SEQ ID NO: 2299300 - RNA, 19 nt, Artificial Sequence
  Description of Artificial Sequence: Synthetic oligonucleotide
  Sense strand starting at position 1200 of SEQ ID NO: 1884882
caggacagucagcgacaua

SEQ ID NO: 2299301 - RNA, 19 nt, Artificial Sequence
  Description of Artificial Sequence: Synthetic oligonucleotide
  Antisense strand to SEQ ID NO: 2299300
uaugucgcugacuguccug

SEQ ID NO: 2299302 - RNA, 19 nt, Artificial Sequence
  Description of Artificial Sequence: Synthetic oligonucleotide
  Sense strand starting at position 1201 of SEQ ID NO: 1884882
aggacagucagcgacauaa

SEQ ID NO: 2299303 - RNA, 19 nt, Artificial Sequence
  Description of Artificial Sequence: Synthetic oligonucleotide
  Antisense strand to SEQ ID NO: 2299302
uuaugucgcugacuguccu

SEQ ID NO: 2299304 - RNA, 19 nt, Artificial Sequence
  Description of Artificial Sequence: Synthetic oligonucleotide
  Sense strand starting at position 1576 of SEQ ID NO: 1884882
uggacaguucuccgaggga

SEQ ID NO: 2299305 - RNA, 19 nt, Artificial Sequence
  Description of Artificial Sequence: Synthetic oligonucleotide
  Antisense strand to SEQ ID NO: 2299304
ucccucggagaacugucca

SEQ ID NO: 2299306 - RNA, 19 nt, Artificial Sequence
  Description of Artificial Sequence: Synthetic oligonucleotide
  Sense strand starting at position 1983 of SEQ ID NO: 1884882
ggauuacagcgacaaggua

SEQ ID NO: 2299307 - RNA, 19 nt, Artificial Sequence
  Description of Artificial Sequence: Synthetic oligonucleotide
  Antisense strand to SEQ ID NO: 2299306
uaccuugucgcuguaaucc

SEQ ID NO: 2299308 - RNA, 19 nt, Artificial Sequence
  Description of Artificial Sequence: Synthetic oligonucleotide
  Sense strand starting at position 2303 of SEQ ID NO: 1884882
cccacuccuggaugcauaa

SEQ ID NO: 2299309 - RNA, 19 nt, Artificial Sequence
  Description of Artificial Sequence: Synthetic oligonucleotide
  Antisense strand to SEQ ID NO: 2299308
uuaugcauccaggaguggg

SEQ ID NO: 2299310 - RNA, 19 nt, Artificial Sequence
  Description of Artificial Sequence: Synthetic oligonucleotide
  Sense strand starting at position 2397 of SEQ ID NO: 1884882
ucaaauguaucagcaacga

SEQ ID NO: 2299311 - RNA, 19 nt, Artificial Sequence
  Description of Artificial Sequence: Synthetic oligonucleotide
  Antisense strand to SEQ ID NO: 2299310
ucguugcugauacauuuga

SEQ ID NO: 2299312 - RNA, 19 nt, Artificial Sequence
  Description of Artificial Sequence: Synthetic oligonucleotide
  Sense strand starting at position 2549 of SEQ ID NO: 1884882
gugcaaagagcugaaauca

SEQ ID NO: 2299313 - RNA, 19 nt, Artificial Sequence
  Description of Artificial Sequence: Synthetic oligonucleotide
  Antisense strand to SEQ ID NO: 2299312
ugauuucagcucuuugcac

SEQ ID NO: 2299314 - RNA, 19 nt, Artificial Sequence
  Description of Artificial Sequence: Synthetic oligonucleotide
  Sense strand starting at position 2569 of SEQ ID NO: 1884882
gcccaaggucauggacaua

SEQ ID NO: 2299315 - RNA, 19 nt, Artificial Sequence
  Description of Artificial Sequence: Synthetic oligonucleotide
  Antisense strand to SEQ ID NO: 2299314
uauguccaugaccuugggc

SEQ ID NO: 2299316 - RNA, 19 nt, Artificial Sequence
  Description of Artificial Sequence: Synthetic oligonucleotide
  Sense strand starting at position 2593 of SEQ ID NO: 1884882
uuguaaguggguggagaau

SEQ ID NO: 2299317 - RNA, 19 nt, Artificial Sequence
  Description of Artificial Sequence: Synthetic oligonucleotide
  Antisense strand to SEQ ID NO: 2299316
auucuccacccacuuacaa

SEQ ID NO: 2299318 - RNA, 19 nt, Artificial Sequence
  Description of Artificial Sequence: Synthetic oligonucleotide
  Sense strand starting at position 2604 of SEQ ID NO: 1884882
uggagaauguaacuccuaa

SEQ ID NO: 2299319 - RNA, 19 nt, Artificial Sequence
  Description of Artificial Sequence: Synthetic oligonucleotide
  Antisense strand to SEQ ID NO: 2299318
uuaggaguuacauucucca

SEQ ID NO: 2299320 - RNA, 19 nt, Artificial Sequence
  Description of Artificial Sequence: Synthetic oligonucleotide
  Sense strand starting at position 2720 of SEQ ID NO: 1884882
gagacucuagauugguuaa

SEQ ID NO: 2299321 - RNA, 19 nt, Artificial Sequence
  Description of Artificial Sequence: Synthetic oligonucleotide
  Antisense strand to SEQ ID NO: 2299320
uuaaccaaucuagagucuc

SEQ ID NO: 2299322 - RNA, 19 nt, Artificial Sequence
  Description of Artificial Sequence: Synthetic oligonucleotide
  Sense strand starting at position 2723 of SEQ ID NO: 1884882
acucuagauugguuaagua

SEQ ID NO: 2299323 - RNA, 19 nt, Artificial Sequence
  Description of Artificial Sequence: Synthetic oligonucleotide
  Antisense strand to SEQ ID NO: 2299322
uacuuaaccaaucuagagu

SEQ ID NO: 2299324 - RNA, 19 nt, Artificial Sequence
  Description of Artificial Sequence: Synthetic oligonucleotide
  Sense strand starting at position 2942 of SEQ ID NO: 1884882
gguuuagaagacugcuuua

SEQ ID NO: 2299325 - RNA, 19 nt, Artificial Sequence
  Description of Artificial Sequence: Synthetic oligonucleotide
  Antisense strand to SEQ ID NO: 2299324
uaaagcagucuucuaaacc

SEQ ID NO: 2299326 - RNA, 19 nt, Artificial Sequence
  Description of Artificial Sequence: Synthetic oligonucleotide
  Sense strand starting at position 2945 of SEQ ID NO: 1884882
uuagaagacugcuuuauag

SEQ ID NO: 2299327 - RNA, 19 nt, Artificial Sequence
  Description of Artificial Sequence: Synthetic oligonucleotide
  Antisense strand to SEQ ID NO: 2299326
cuauaaagcagucuucuaa

SEQ ID NO: 2299328 - RNA, 19 nt, Artificial Sequence
  Description of Artificial Sequence: Synthetic oligonucleotide
  Sense strand starting at position 3153 of SEQ ID NO: 1884882
gcagaaauggcauacuggu

SEQ ID NO: 2299329 - RNA, 19 nt, Artificial Sequence
  Description of Artificial Sequence: Synthetic oligonucleotide
  Antisense strand to SEQ ID NO: 2299328
accaguaugccauuucugc

SEQ ID NO: 2299330 - RNA, 19 nt, Artificial Sequence
  Description of Artificial Sequence: Synthetic oligonucleotide
  Sense strand starting at position 3175 of SEQ ID NO: 1884882
ugaauucccguuuaaucuu

SEQ ID NO: 2299331 - RNA, 19 nt, Artificial Sequence
  Description of Artificial Sequence: Synthetic oligonucleotide
  Antisense strand to SEQ ID NO: 2299330
aagauuaaacgggaauuca

SEQ ID NO: 2299332 - RNA, 19 nt, Artificial Sequence
  Description of Artificial Sequence: Synthetic oligonucleotide
  Sense strand starting at position 3254 of SEQ ID NO: 1884882
augauaauguggucccaag

SEQ ID NO: 2299333 - RNA, 19 nt, Artificial Sequence
  Description of Artificial Sequence: Synthetic oligonucleotide
  Antisense strand to SEQ ID NO: 2299332
cuugggaccacauuaucau

SEQ ID NO: 2299334 - RNA, 19 nt, Artificial Sequence
  Description of Artificial Sequence: Synthetic oligonucleotide
  Sense strand starting at position 3305 of SEQ ID NO: 1884882
uugaauuuacguuguccaa

SEQ ID NO: 2299335 - RNA, 19 nt, Artificial Sequence
  Description of Artificial Sequence: Synthetic oligonucleotide
  Antisense strand to SEQ ID NO: 2299334
uuggacaacguaaauucaa

SEQ ID NO: 2299336 - RNA, 19 nt, Artificial Sequence
  Description of Artificial Sequence: Synthetic oligonucleotide
  Sense strand starting at position 3307 of SEQ ID NO: 1884882
gaauuuacguuguccaacu

SEQ ID NO: 2299337 - RNA, 19 nt, Artificial Sequence
  Description of Artificial Sequence: Synthetic oligonucleotide
  Antisense strand to SEQ ID NO: 2299336
aguuggacaacguaaauuc

SEQ ID NO: 2299338 - RNA, 19 nt, Artificial Sequence
  Description of Artificial Sequence: Synthetic oligonucleotide
  Sense strand starting at position 3447 of SEQ ID NO: 1884882
ugccuaauuuaggaauaac

SEQ ID NO: 2299339 - RNA, 19 nt, Artificial Sequence
  Description of Artificial Sequence: Synthetic oligonucleotide
  Antisense strand to SEQ ID NO: 2299338
guuauuccuaaauuaggca

SEQ ID NO: 2299340 - RNA, 19 nt, Artificial Sequence
  Description of Artificial Sequence: Synthetic oligonucleotide
  Sense strand starting at position 3491 of SEQ ID NO: 1884882
uguggagauuaugauuuaa

SEQ ID NO: 2299341 - RNA, 19 nt, Artificial Sequence
  Description of Artificial Sequence: Synthetic oligonucleotide
  Antisense strand to SEQ ID NO: 2299340
uuaaaucauaaucuccaca

SEQ ID NO: 2299342 - RNA, 19 nt, Artificial Sequence
  Description of Artificial Sequence: Synthetic oligonucleotide
  Sense strand starting at position 3741 of SEQ ID NO: 1884882
uggcuaaacuaauuagacu

SEQ ID NO: 2299343 - RNA, 19 nt, Artificial Sequence
  Description of Artificial Sequence: Synthetic oligonucleotide
  Antisense strand to SEQ ID NO: 2299342
agucuaauuaguuuagcca

SEQ ID NO: 2299344 - RNA, 19 nt, Artificial Sequence
  Description of Artificial Sequence: Synthetic oligonucleotide
  Sense strand starting at position 3804 of SEQ ID NO: 1884882
ccagauugguaucuacuua

SEQ ID NO: 2299345 - RNA, 19 nt, Artificial Sequence
  Description of Artificial Sequence: Synthetic oligonucleotide
  Antisense strand to SEQ ID NO: 2299344
uaaguagauaccaaucugg

SEQ ID NO: 2299346 - RNA, 19 nt, Artificial Sequence
  Description of Artificial Sequence: Synthetic oligonucleotide
  Sense strand starting at position 3975 of SEQ ID NO: 1884882
ugggaucaagccugagagu

SEQ ID NO: 2299347 - RNA, 19 nt, Artificial Sequence
  Description of Artificial Sequence: Synthetic oligonucleotide
  Antisense strand to SEQ ID NO: 2299346
acucucaggcuugauccca

SEQ ID NO: 2299348 - RNA, 19 nt, Artificial Sequence
  Description of Artificial Sequence: Synthetic oligonucleotide
  Sense strand starting at position 2375 of SEQ ID NO: 1884883
gagccauauuccugcaggu

SEQ ID NO: 2299349 - RNA, 19 nt, Artificial Sequence
  Description of Artificial Sequence: Synthetic oligonucleotide
  Antisense strand to SEQ ID NO: 2299348
accugcaggaauauggcuc

SEQ ID NO: 2299350 - RNA, 19 nt, Artificial Sequence
  Description of Artificial Sequence: Synthetic oligonucleotide
  Sense strand starting at position 2972 of SEQ ID NO: 1884883
accuguaccugcuaucuga

SEQ ID NO: 2299351 - RNA, 19 nt, Artificial Sequence
  Description of Artificial Sequence: Synthetic oligonucleotide
  Antisense strand to SEQ ID NO: 2299350
ucagauagcagguacaggu

SEQ ID NO: 2299352 - RNA, 19 nt, Artificial Sequence
  Description of Artificial Sequence: Synthetic oligonucleotide
  Sense strand starting at position 2976 of SEQ ID NO: 1884883
guaccugcuaucugaagga

SEQ ID NO: 2299353 - RNA, 19 nt, Artificial Sequence
  Description of Artificial Sequence: Synthetic oligonucleotide
  Antisense strand to SEQ ID NO: 2299352
uccuucagauagcagguac

SEQ ID NO: 2299354 - RNA, 19 nt, Artificial Sequence
  Description of Artificial Sequence: Synthetic oligonucleotide
  Sense strand starting at position 3747 of SEQ ID NO: 1884883
cuggcaugccucuaaaggu

SEQ ID NO: 2299355 - RNA, 19 nt, Artificial Sequence
  Description of Artificial Sequence: Synthetic oligonucleotide
  Antisense strand to SEQ ID NO: 2299354
accuuuagaggcaugccag

SEQ ID NO: 2299356 - RNA, 19 nt, Artificial Sequence
  Description of Artificial Sequence: Synthetic oligonucleotide
  Sense strand starting at position 3755 of SEQ ID NO: 1884883
ccucuaaagguuggaauga

SEQ ID NO: 2299357 - RNA, 19 nt, Artificial Sequence
  Description of Artificial Sequence: Synthetic oligonucleotide
  Antisense strand to SEQ ID NO: 2299356
ucauuccaaccuuuagagg

SEQ ID NO: 2299358 - RNA, 19 nt, Artificial Sequence
  Description of Artificial Sequence: Synthetic oligonucleotide
  Sense strand starting at position 33 of SEQ ID NO: 1884884
ucuguugagccugacagaa

SEQ ID NO: 2299359 - RNA, 19 nt, Artificial Sequence
  Description of Artificial Sequence: Synthetic oligonucleotide
  Antisense strand to SEQ ID NO: 2299358
uucugucaggcucaacaga

SEQ ID NO: 2299360 - RNA, 19 nt, Artificial Sequence
  Description of Artificial Sequence: Synthetic oligonucleotide
  Sense strand starting at position 282 of SEQ ID NO: 1884884
agguuucuuugggaaauuu

SEQ ID NO: 2299361 - RNA, 19 nt, Artificial Sequence
  Description of Artificial Sequence: Synthetic oligonucleotide
  Antisense strand to SEQ ID NO: 2299360
aaauuucccaaagaaaccu

SEQ ID NO: 2299362 - RNA, 19 nt, Artificial Sequence
  Description of Artificial Sequence: Synthetic oligonucleotide
  Sense strand starting at position 407 of SEQ ID NO: 1884884
gucauucuccuggaggauu

SEQ ID NO: 2299363 - RNA, 19 nt, Artificial Sequence
  Description of Artificial Sequence: Synthetic oligonucleotide
  Antisense strand to SEQ ID NO: 2299362
aauccuccaggagaaugac

SEQ ID NO: 2299364 - RNA, 19 nt, Artificial Sequence
  Description of Artificial Sequence: Synthetic oligonucleotide
  Sense strand starting at position 439 of SEQ ID NO: 1884884
gggcuaaagguguaugaag

SEQ ID NO: 2299365 - RNA, 19 nt, Artificial Sequence
  Description of Artificial Sequence: Synthetic oligonucleotide
  Antisense strand to SEQ ID NO: 2299364
cuucauacaccuuuagccc

SEQ ID NO: 2299366 - RNA, 19 nt, Artificial Sequence
  Description of Artificial Sequence: Synthetic oligonucleotide
  Sense strand starting at position 483 of SEQ ID NO: 1884884
augaguucuuaggucaaau

SEQ ID NO: 2299367 - RNA, 19 nt, Artificial Sequence
  Description of Artificial Sequence: Synthetic oligonucleotide
  Antisense strand to SEQ ID NO: 2299366
auuugaccuaagaacucau

SEQ ID NO: 2299368 - RNA, 19 nt, Artificial Sequence
  Description of Artificial Sequence: Synthetic oligonucleotide
  Sense strand starting at position 485 of SEQ ID NO: 1884884
gaguucuuaggucaaauau

SEQ ID NO: 2299369 - RNA, 19 nt, Artificial Sequence
  Description of Artificial Sequence: Synthetic oligonucleotide
  Antisense strand to SEQ ID NO: 2299368
auauuugaccuaagaacuc

SEQ ID NO: 2299370 - RNA, 19 nt, Artificial Sequence
  Description of Artificial Sequence: Synthetic oligonucleotide
  Sense strand starting at position 531 of SEQ ID NO: 1884884
guaacacugccuuggaaug

SEQ ID NO: 2299371 - RNA, 19 nt, Artificial Sequence
  Description of Artificial Sequence: Synthetic oligonucleotide
  Antisense strand to SEQ ID NO: 2299370
cauuccaaggcaguguuac

SEQ ID NO: 2299372 - RNA, 19 nt, Artificial Sequence
  Description of Artificial Sequence: Synthetic oligonucleotide
  Sense strand starting at position 752 of SEQ ID NO: 1884884
ggauuuaccugacaguuug

SEQ ID NO: 2299373 - RNA, 19 nt, Artificial Sequence
  Description of Artificial Sequence: Synthetic oligonucleotide
  Antisense strand to SEQ ID NO: 2299372
caaacugucagguaaaucc

SEQ ID NO: 2299374 - RNA, 19 nt, Artificial Sequence
  Description of Artificial Sequence: Synthetic oligonucleotide
  Sense strand starting at position 813 of SEQ ID NO: 1884884
gggcgaguuaucuaacuuc

SEQ ID NO: 2299375 - RNA, 19 nt, Artificial Sequence
  Description of Artificial Sequence: Synthetic oligonucleotide
  Antisense strand to SEQ ID NO: 2299374
gaaguuagauaacucgccc

SEQ ID NO: 2299376 - RNA, 19 nt, Artificial Sequence
  Description of Artificial Sequence: Synthetic oligonucleotide
  Sense strand starting at position 958 of SEQ ID NO: 1884884
gccuuauaugaagauuauu

SEQ ID NO: 2299377 - RNA, 19 nt, Artificial Sequence
  Description of Artificial Sequence: Synthetic oligonucleotide
  Antisense strand to SEQ ID NO: 2299376
aauaaucuucauauaaggc

SEQ ID NO: 2299378 - RNA, 19 nt, Artificial Sequence
  Description of Artificial Sequence: Synthetic oligonucleotide
  Sense strand starting at position 1002 of SEQ ID NO: 1884884
auugcagaaaucuaugcga

SEQ ID NO: 2299379 - RNA, 19 nt, Artificial Sequence
  Description of Artificial Sequence: Synthetic oligonucleotide
  Antisense strand to SEQ ID NO: 2299378
ucgcauagauuucugcaau

SEQ ID NO: 2299380 - RNA, 19 nt, Artificial Sequence
  Description of Artificial Sequence: Synthetic oligonucleotide
  Sense strand starting at position 1004 of SEQ ID NO: 1884884
ugcagaaaucuaugcgaaa

SEQ ID NO: 2299381 - RNA, 19 nt, Artificial Sequence
  Description of Artificial Sequence: Synthetic oligonucleotide
  Antisense strand to SEQ ID NO: 2299380
uuucgcauagauuucugca

SEQ ID NO: 2299382 - RNA, 19 nt, Artificial Sequence
  Description of Artificial Sequence: Synthetic oligonucleotide
  Sense strand starting at position 1103 of SEQ ID NO: 1884884
uguccuaugccucaaggua

SEQ ID NO: 2299383 - RNA, 19 nt, Artificial Sequence
  Description of Artificial Sequence: Synthetic oligonucleotide
  Antisense strand to SEQ ID NO: 2299382
uaccuugaggcauaggaca

SEQ ID NO: 2299384 - RNA, 19 nt, Artificial Sequence
  Description of Artificial Sequence: Synthetic oligonucleotide
  Sense strand starting at position 1181 of SEQ ID NO: 1884884
cacgaugucuuccugggaa

SEQ ID NO: 2299385 - RNA, 19 nt, Artificial Sequence
  Description of Artificial Sequence: Synthetic oligonucleotide
  Antisense strand to SEQ ID NO: 2299384
uucccaggaagacaucgug

SEQ ID NO: 2299386 - RNA, 19 nt, Artificial Sequence
  Description of Artificial Sequence: Synthetic oligonucleotide
  Sense strand starting at position 1183 of SEQ ID NO: 1884884
cgaugucuuccugggaaag

SEQ ID NO: 2299387 - RNA, 19 nt, Artificial Sequence
  Description of Artificial Sequence: Synthetic oligonucleotide
  Antisense strand to SEQ ID NO: 2299386
cuuucccaggaagacaucg

SEQ ID NO: 2299388 - RNA, 19 nt, Artificial Sequence
  Description of Artificial Sequence: Synthetic oligonucleotide
  Sense strand starting at position 1184 of SEQ ID NO: 1884884
gaugucuuccugggaaagg

SEQ ID NO: 2299389 - RNA, 19 nt, Artificial Sequence
  Description of Artificial Sequence: Synthetic oligonucleotide
  Antisense strand to SEQ ID NO: 2299388
ccuuucccaggaagacauc

SEQ ID NO: 2299390 - RNA, 19 nt, Artificial Sequence
  Description of Artificial Sequence: Synthetic oligonucleotide
  Sense strand starting at position 1260 of SEQ ID NO: 1884884
cuuccaagacuuugaugga

SEQ ID NO: 2299391 - RNA, 19 nt, Artificial Sequence
  Description of Artificial Sequence: Synthetic oligonucleotide
  Antisense strand to SEQ ID NO: 2299390
uccaucaaagucuuggaag

SEQ ID NO: 2299392 - RNA, 19 nt, Artificial Sequence
  Description of Artificial Sequence: Synthetic oligonucleotide
  Sense strand starting at position 1330 of SEQ ID NO: 1884884
gagagaugaaaccguugca

SEQ ID NO: 2299393 - RNA, 19 nt, Artificial Sequence
  Description of Artificial Sequence: Synthetic oligonucleotide
  Antisense strand to SEQ ID NO: 2299392
ugcaacgguuucaucucuc

SEQ ID NO: 2299394 - RNA, 19 nt, Artificial Sequence
  Description of Artificial Sequence: Synthetic oligonucleotide
  Sense strand starting at position 1435 of SEQ ID NO: 1884884
agaggaaaucuugguaagc

SEQ ID NO: 2299395 - RNA, 19 nt, Artificial Sequence
  Description of Artificial Sequence: Synthetic oligonucleotide
  Antisense strand to SEQ ID NO: 2299394
gcuuaccaagauuuccucu

SEQ ID NO: 2299396 - RNA, 19 nt, Artificial Sequence
  Description of Artificial Sequence: Synthetic oligonucleotide
  Sense strand starting at position 1578 of SEQ ID NO: 1884884
ggacuucccgggcacagau

SEQ ID NO: 2299397 - RNA, 19 nt, Artificial Sequence
  Description of Artificial Sequence: Synthetic oligonucleotide
  Antisense strand to SEQ ID NO: 2299396
aucugugcccgggaagucc

SEQ ID NO: 2299398 - RNA, 19 nt, Artificial Sequence
  Description of Artificial Sequence: Synthetic oligonucleotide
  Sense strand starting at position 2690 of SEQ ID NO: 1884884
gggcgucuugucuucucau

SEQ ID NO: 2299399 - RNA, 19 nt, Artificial Sequence
  Description of Artificial Sequence: Synthetic oligonucleotide
  Antisense strand to SEQ ID NO: 2299398
augagaagacaagacgccc

SEQ ID NO: 2299400 - RNA, 19 nt, Artificial Sequence
  Description of Artificial Sequence: Synthetic oligonucleotide
  Sense strand starting at position 2693 of SEQ ID NO: 1884884
cgucuugucuucucauuua

SEQ ID NO: 2299401 - RNA, 19 nt, Artificial Sequence
  Description of Artificial Sequence: Synthetic oligonucleotide
  Antisense strand to SEQ ID NO: 2299400
uaaaugagaagacaagacg

SEQ ID NO: 2299402 - RNA, 19 nt, Artificial Sequence
  Description of Artificial Sequence: Synthetic oligonucleotide
  Sense strand starting at position 2850 of SEQ ID NO: 1884884
auuuauuccugagacagca

SEQ ID NO: 2299403 - RNA, 19 nt, Artificial Sequence
  Description of Artificial Sequence: Synthetic oligonucleotide
  Antisense strand to SEQ ID NO: 2299402
ugcugucucaggaauaaau

SEQ ID NO: 2299404 - RNA, 19 nt, Artificial Sequence
  Description of Artificial Sequence: Synthetic oligonucleotide
  Sense strand starting at position 2885 of SEQ ID NO: 1884884
ugaccucauccauguagaa

SEQ ID NO: 2299405 - RNA, 19 nt, Artificial Sequence
  Description of Artificial Sequence: Synthetic oligonucleotide
  Antisense strand to SEQ ID NO: 2299404
uucuacauggaugagguca

SEQ ID NO: 2299406 - RNA, 19 nt, Artificial Sequence
  Description of Artificial Sequence: Synthetic oligonucleotide
  Sense strand starting at position 2903 of SEQ ID NO: 1884884
agugacaaaugguuacaca

SEQ ID NO: 2299407 - RNA, 19 nt, Artificial Sequence
  Description of Artificial Sequence: Synthetic oligonucleotide
  Antisense strand to SEQ ID NO: 2299406
uguguaaccauuugucacu

SEQ ID NO: 2299408 - RNA, 19 nt, Artificial Sequence
  Description of Artificial Sequence: Synthetic oligonucleotide
  Sense strand starting at position 3114 of SEQ ID NO: 1884884
gccuuaaucagucacgaag

SEQ ID NO: 2299409 - RNA, 19 nt, Artificial Sequence
  Description of Artificial Sequence: Synthetic oligonucleotide
  Antisense strand to SEQ ID NO: 2299408
cuucgugacugauuaaggc

SEQ ID NO: 2299410 - RNA, 19 nt, Artificial Sequence
  Description of Artificial Sequence: Synthetic oligonucleotide
  Sense strand starting at position 3450 of SEQ ID NO: 1884884
uuguaaggaucugaaauuu

SEQ ID NO: 2299411 - RNA, 19 nt, Artificial Sequence
  Description of Artificial Sequence: Synthetic oligonucleotide
  Antisense strand to SEQ ID NO: 2299410
aaauuucagauccuuacaa

SEQ ID NO: 2299412 - RNA, 19 nt, Artificial Sequence
  Description of Artificial Sequence: Synthetic oligonucleotide
  Sense strand starting at position 3545 of SEQ ID NO: 1884884
agcuuaauucuugauuguu

SEQ ID NO: 2299413 - RNA, 19 nt, Artificial Sequence
  Description of Artificial Sequence: Synthetic oligonucleotide
  Antisense strand to SEQ ID NO: 2299412
aacaaucaagaauuaagcu

SEQ ID NO: 2299414 - RNA, 19 nt, Artificial Sequence
  Description of Artificial Sequence: Synthetic oligonucleotide
  Sense strand starting at position 3601 of SEQ ID NO: 1884884
guauaugagaaucguaucu

SEQ ID NO: 2299415 - RNA, 19 nt, Artificial Sequence
  Description of Artificial Sequence: Synthetic oligonucleotide
  Antisense strand to SEQ ID NO: 2299414
agauacgauucucauauac

SEQ ID NO: 2299416 - RNA, 19 nt, Artificial Sequence
  Description of Artificial Sequence: Synthetic oligonucleotide
  Sense strand starting at position 3606 of SEQ ID NO: 1884884
ugagaaucguaucugugau

SEQ ID NO: 2299417 - RNA, 19 nt, Artificial Sequence
  Description of Artificial Sequence: Synthetic oligonucleotide
  Antisense strand to SEQ ID NO: 2299416
aucacagauacgauucuca

SEQ ID NO: 2299418 - RNA, 19 nt, Artificial Sequence
  Description of Artificial Sequence: Synthetic oligonucleotide
  Sense strand starting at position 3646 of SEQ ID NO: 1884884
ccaagacacuuauugguaa

SEQ ID NO: 2299419 - RNA, 19 nt, Artificial Sequence
  Description of Artificial Sequence: Synthetic oligonucleotide
  Antisense strand to SEQ ID NO: 2299418
uuaccaauaagugucuugg

SEQ ID NO: 2299420 - RNA, 19 nt, Artificial Sequence
  Description of Artificial Sequence: Synthetic oligonucleotide
  Sense strand starting at position 3649 of SEQ ID NO: 1884884
agacacuuauugguaauua

SEQ ID NO: 2299421 - RNA, 19 nt, Artificial Sequence
  Description of Artificial Sequence: Synthetic oligonucleotide
  Antisense strand to SEQ ID NO: 2299420
uaauuaccaauaagugucu

SEQ ID NO: 2299422 - RNA, 19 nt, Artificial Sequence
  Description of Artificial Sequence: Synthetic oligonucleotide
  Sense strand starting at position 3773 of SEQ ID NO: 1884884
agaccauuccagggucaaa

SEQ ID NO: 2299423 - RNA, 19 nt, Artificial Sequence
  Description of Artificial Sequence: Synthetic oligonucleotide
  Antisense strand to SEQ ID NO: 2299422
uuugacccuggaauggucu

SEQ ID NO: 2299424 - RNA, 19 nt, Artificial Sequence
  Description of Artificial Sequence: Synthetic oligonucleotide
  Sense strand starting at position 3816 of SEQ ID NO: 1884884
acaagaaggucauuaguca

SEQ ID NO: 2299425 - RNA, 19 nt, Artificial Sequence
  Description of Artificial Sequence: Synthetic oligonucleotide
  Antisense strand to SEQ ID NO: 2299424
ugacuaaugaccuucuugu

SEQ ID NO: 2299426 - RNA, 19 nt, Artificial Sequence
  Description of Artificial Sequence: Synthetic oligonucleotide
  Sense strand starting at position 3888 of SEQ ID NO: 1884884
gauacuaggucccuggaaa

SEQ ID NO: 2299427 - RNA, 19 nt, Artificial Sequence
  Description of Artificial Sequence: Synthetic oligonucleotide
  Antisense strand to SEQ ID NO: 2299426
uuuccagggaccuaguauc

SEQ ID NO: 2299428 - RNA, 19 nt, Artificial Sequence
  Description of Artificial Sequence: Synthetic oligonucleotide
  Sense strand starting at position 3889 of SEQ ID NO: 1884884
auacuaggucccuggaaag

SEQ ID NO: 2299429 - RNA, 19 nt, Artificial Sequence
  Description of Artificial Sequence: Synthetic oligonucleotide
  Antisense strand to SEQ ID NO: 2299428
cuuuccagggaccuaguau

SEQ ID NO: 2299430 - RNA, 19 nt, Artificial Sequence
  Description of Artificial Sequence: Synthetic oligonucleotide
  Sense strand starting at position 3916 of SEQ ID NO: 1884884
ucuugacagaauuggguau

SEQ ID NO: 2299431 - RNA, 19 nt, Artificial Sequence
  Description of Artificial Sequence: Synthetic oligonucleotide
  Antisense strand to SEQ ID NO: 2299430
auacccaauucugucaaga

SEQ ID NO: 2299432 - RNA, 19 nt, Artificial Sequence
  Description of Artificial Sequence: Synthetic oligonucleotide
  Sense strand starting at position 3920 of SEQ ID NO: 1884884
gacagaauuggguauguuu

SEQ ID NO: 2299433 - RNA, 19 nt, Artificial Sequence
  Description of Artificial Sequence: Synthetic oligonucleotide
  Antisense strand to SEQ ID NO: 2299432
aaacauacccaauucuguc

SEQ ID NO: 2299434 - RNA, 19 nt, Artificial Sequence
  Description of Artificial Sequence: Synthetic oligonucleotide
  Sense strand starting at position 3923 of SEQ ID NO: 1884884
agaauuggguauguuugua

SEQ ID NO: 2299435 - RNA, 19 nt, Artificial Sequence
  Description of Artificial Sequence: Synthetic oligonucleotide
  Antisense strand to SEQ ID NO: 2299434
uacaaacauacccaauucu

SEQ ID NO: 2299436 - RNA, 19 nt, Artificial Sequence
  Description of Artificial Sequence: Synthetic oligonucleotide
  Sense strand starting at position 3939 of SEQ ID NO: 1884884
guacuaaaguaucuguaaa

SEQ ID NO: 2299437 - RNA, 19 nt, Artificial Sequence
  Description of Artificial Sequence: Synthetic oligonucleotide
  Antisense strand to SEQ ID NO: 2299436
uuuacagauacuuuaguac

SEQ ID NO: 2299438 - RNA, 19 nt, Artificial Sequence
  Description of Artificial Sequence: Synthetic oligonucleotide
  Sense strand starting at position 9 of SEQ ID NO: 1884885
uuguguauuggacagagca

SEQ ID NO: 2299439 - RNA, 19 nt, Artificial Sequence
  Description of Artificial Sequence: Synthetic oligonucleotide
  Antisense strand to SEQ ID NO: 2299438
ugcucuguccaauacacaa

SEQ ID NO: 2299440 - RNA, 19 nt, Artificial Sequence
  Description of Artificial Sequence: Synthetic oligonucleotide
  Sense strand starting at position 11 of SEQ ID NO: 1884885
guguauuggacagagcagu

SEQ ID NO: 2299441 - RNA, 19 nt, Artificial Sequence
  Description of Artificial Sequence: Synthetic oligonucleotide
  Antisense strand to SEQ ID NO: 2299440
acugcucuguccaauacac

SEQ ID NO: 2299442 - RNA, 19 nt, Artificial Sequence
  Description of Artificial Sequence: Synthetic oligonucleotide
  Sense strand starting at position 107 of SEQ ID NO: 1884885
gaauuaaggcuguaguuau

SEQ ID NO: 2299443 - RNA, 19 nt, Artificial Sequence
  Description of Artificial Sequence: Synthetic oligonucleotide
  Antisense strand to SEQ ID NO: 2299442
auaacuacagccuuaauuc

SEQ ID NO: 2299444 - RNA, 19 nt, Artificial Sequence
  Description of Artificial Sequence: Synthetic oligonucleotide
  Sense strand starting at position 137 of SEQ ID NO: 1884885
uuauuaauuggaugcugaa

SEQ ID NO: 2299445 - RNA, 19 nt, Artificial Sequence
  Description of Artificial Sequence: Synthetic oligonucleotide
  Antisense strand to SEQ ID NO: 2299444
uucagcauccaauuaauaa

SEQ ID NO: 2299446 - RNA, 19 nt, Artificial Sequence
  Description of Artificial Sequence: Synthetic oligonucleotide
  Sense strand starting at position 158 of SEQ ID NO: 1884885
acaguuagcuaacugaaca

SEQ ID NO: 2299447 - RNA, 19 nt, Artificial Sequence
  Description of Artificial Sequence: Synthetic oligonucleotide
  Antisense strand to SEQ ID NO: 2299446
uguucaguuagcuaacugu

SEQ ID NO: 2299448 - RNA, 19 nt, Artificial Sequence
  Description of Artificial Sequence: Synthetic oligonucleotide
  Sense strand starting at position 236 of SEQ ID NO: 1884885
aaauaacauguggguaagu

SEQ ID NO: 2299449 - RNA, 19 nt, Artificial Sequence
  Description of Artificial Sequence: Synthetic oligonucleotide
  Antisense strand to SEQ ID NO: 2299448
acuuacccacauguuauuu

SEQ ID NO: 2299450 - RNA, 19 nt, Artificial Sequence
  Description of Artificial Sequence: Synthetic oligonucleotide
  Sense strand starting at position 237 of SEQ ID NO: 1884885
aauaacauguggguaagua

SEQ ID NO: 2299451 - RNA, 19 nt, Artificial Sequence
  Description of Artificial Sequence: Synthetic oligonucleotide
  Antisense strand to SEQ ID NO: 2299450
uacuuacccacauguuauu

SEQ ID NO: 2299452 - RNA, 19 nt, Artificial Sequence
  Description of Artificial Sequence: Synthetic oligonucleotide
  Sense strand starting at position 345 of SEQ ID NO: 1884885
acaagacauggcugaucaa

SEQ ID NO: 2299453 - RNA, 19 nt, Artificial Sequence
  Description of Artificial Sequence: Synthetic oligonucleotide
  Antisense strand to SEQ ID NO: 2299452
uugaucagccaugucuugu

SEQ ID NO: 2299454 - RNA, 19 nt, Artificial Sequence
  Description of Artificial Sequence: Synthetic oligonucleotide
  Sense strand starting at position 348 of SEQ ID NO: 1884885
agacauggcugaucaauug

SEQ ID NO: 2299455 - RNA, 19 nt, Artificial Sequence
  Description of Artificial Sequence: Synthetic oligonucleotide
  Antisense strand to SEQ ID NO: 2299454
caauugaucagccaugucu

SEQ ID NO: 2299456 - RNA, 19 nt, Artificial Sequence
  Description of Artificial Sequence: Synthetic oligonucleotide
  Sense strand starting at position 357 of SEQ ID NO: 1884885
ugaucaauuguguaagcuc

SEQ ID NO: 2299457 - RNA, 19 nt, Artificial Sequence
  Description of Artificial Sequence: Synthetic oligonucleotide
  Antisense strand to SEQ ID NO: 2299456
gagcuuacacaauugauca

SEQ ID NO: 2299458 - RNA, 19 nt, Artificial Sequence
  Description of Artificial Sequence: Synthetic oligonucleotide
  Sense strand starting at position 385 of SEQ ID NO: 1884885
acaaguauugcuuagcuca

SEQ ID NO: 2299459 - RNA, 19 nt, Artificial Sequence
  Description of Artificial Sequence: Synthetic oligonucleotide
  Antisense strand to SEQ ID NO: 2299458
ugagcuaagcaauacuugu

SEQ ID NO: 2299460 - RNA, 19 nt, Artificial Sequence
  Description of Artificial Sequence: Synthetic oligonucleotide
  Sense strand starting at position 408 of SEQ ID NO: 1884885
cucccauagcucuaggaca

SEQ ID NO: 2299461 - RNA, 19 nt, Artificial Sequence
  Description of Artificial Sequence: Synthetic oligonucleotide
  Antisense strand to SEQ ID NO: 2299460
uguccuagagcuaugggag

SEQ ID NO: 2299462 - RNA, 19 nt, Artificial Sequence
  Description of Artificial Sequence: Synthetic oligonucleotide
  Sense strand starting at position 410 of SEQ ID NO: 1884885
cccauagcucuaggacaaa

SEQ ID NO: 2299463 - RNA, 19 nt, Artificial Sequence
  Description of Artificial Sequence: Synthetic oligonucleotide
  Antisense strand to SEQ ID NO: 2299462
uuuguccuagagcuauggg

SEQ ID NO: 2299464 - RNA, 19 nt, Artificial Sequence
  Description of Artificial Sequence: Synthetic oligonucleotide
  Sense strand starting at position 464 of SEQ ID NO: 1884885
ucuguugagccugacagaa

SEQ ID NO: 2299465 - RNA, 19 nt, Artificial Sequence
  Description of Artificial Sequence: Synthetic oligonucleotide
  Antisense strand to SEQ ID NO: 2299464
uucugucaggcucaacaga

SEQ ID NO: 2299466 - RNA, 19 nt, Artificial Sequence
  Description of Artificial Sequence: Synthetic oligonucleotide
  Sense strand starting at position 713 of SEQ ID NO: 1884885
agguuucuuugggaaauuu

SEQ ID NO: 2299467 - RNA, 19 nt, Artificial Sequence
  Description of Artificial Sequence: Synthetic oligonucleotide
  Antisense strand to SEQ ID NO: 2299466
aaauuucccaaagaaaccu

SEQ ID NO: 2299468 - RNA, 19 nt, Artificial Sequence
  Description of Artificial Sequence: Synthetic oligonucleotide
  Sense strand starting at position 838 of SEQ ID NO: 1884885
gucauucuccuggaggauu

SEQ ID NO: 2299469 - RNA, 19 nt, Artificial Sequence
  Description of Artificial Sequence: Synthetic oligonucleotide
  Antisense strand to SEQ ID NO: 2299468
aauccuccaggagaaugac

SEQ ID NO: 2299470 - RNA, 19 nt, Artificial Sequence
  Description of Artificial Sequence: Synthetic oligonucleotide
  Sense strand starting at position 870 of SEQ ID NO: 1884885
gggcuaaagguguaugaag

SEQ ID NO: 2299471 - RNA, 19 nt, Artificial Sequence
  Description of Artificial Sequence: Synthetic oligonucleotide
  Antisense strand to SEQ ID NO: 2299470
cuucauacaccuuuagccc

SEQ ID NO: 2299472 - RNA, 19 nt, Artificial Sequence
  Description of Artificial Sequence: Synthetic oligonucleotide
  Sense strand starting at position 914 of SEQ ID NO: 1884885
augaguucuuaggucaaau

SEQ ID NO: 2299473 - RNA, 19 nt, Artificial Sequence
  Description of Artificial Sequence: Synthetic oligonucleotide
  Antisense strand to SEQ ID NO: 2299472
auuugaccuaagaacucau

SEQ ID NO: 2299474 - RNA, 19 nt, Artificial Sequence
  Description of Artificial Sequence: Synthetic oligonucleotide
  Sense strand starting at position 916 of SEQ ID NO: 1884885
gaguucuuaggucaaauau

SEQ ID NO: 2299475 - RNA, 19 nt, Artificial Sequence
  Description of Artificial Sequence: Synthetic oligonucleotide
  Antisense strand to SEQ ID NO: 2299474
auauuugaccuaagaacuc

SEQ ID NO: 2299476 - RNA, 19 nt, Artificial Sequence
  Description of Artificial Sequence: Synthetic oligonucleotide
  Sense strand starting at position 962 of SEQ ID NO: 1884885
guaacacugccuuggaaug

SEQ ID NO: 2299477 - RNA, 19 nt, Artificial Sequence
  Description of Artificial Sequence: Synthetic oligonucleotide
  Antisense strand to SEQ ID NO: 2299476
cauuccaaggcaguguuac

SEQ ID NO: 2299478 - RNA, 19 nt, Artificial Sequence
  Description of Artificial Sequence: Synthetic oligonucleotide
  Sense strand starting at position 1183 of SEQ ID NO: 1884885
ggauuuaccugacaguuug

SEQ ID NO: 2299479 - RNA, 19 nt, Artificial Sequence
  Description of Artificial Sequence: Synthetic oligonucleotide
  Antisense strand to SEQ ID NO: 2299478
caaacugucagguaaaucc

SEQ ID NO: 2299480 - RNA, 19 nt, Artificial Sequence
  Description of Artificial Sequence: Synthetic oligonucleotide
  Sense strand starting at position 1244 of SEQ ID NO: 1884885
gggcgaguuaucuaacuuc

SEQ ID NO: 2299481 - RNA, 19 nt, Artificial Sequence
  Description of Artificial Sequence: Synthetic oligonucleotide
  Antisense strand to SEQ ID NO: 2299480
gaaguuagauaacucgccc

SEQ ID NO: 2299482 - RNA, 19 nt, Artificial Sequence
  Description of Artificial Sequence: Synthetic oligonucleotide
  Sense strand starting at position 1389 of SEQ ID NO: 1884885
gccuuauaugaagauuauu

SEQ ID NO: 2299483 - RNA, 19 nt, Artificial Sequence
  Description of Artificial Sequence: Synthetic oligonucleotide
  Antisense strand to SEQ ID NO: 2299482
aauaaucuucauauaaggc

SEQ ID NO: 2299484 - RNA, 19 nt, Artificial Sequence
  Description of Artificial Sequence: Synthetic oligonucleotide
  Sense strand starting at position 1433 of SEQ ID NO: 1884885
auugcagaaaucuaugcga

SEQ ID NO: 2299485 - RNA, 19 nt, Artificial Sequence
  Description of Artificial Sequence: Synthetic oligonucleotide
  Antisense strand to SEQ ID NO: 2299484
ucgcauagauuucugcaau

SEQ ID NO: 2299486 - RNA, 19 nt, Artificial Sequence
  Description of Artificial Sequence: Synthetic oligonucleotide
  Sense strand starting at position 1435 of SEQ ID NO: 1884885
ugcagaaaucuaugcgaaa

SEQ ID NO: 2299487 - RNA, 19 nt, Artificial Sequence
  Description of Artificial Sequence: Synthetic oligonucleotide
  Antisense strand to SEQ ID NO: 2299486
uuucgcauagauuucugca

SEQ ID NO: 2299488 - RNA, 19 nt, Artificial Sequence
  Description of Artificial Sequence: Synthetic oligonucleotide
  Sense strand starting at position 1612 of SEQ ID NO: 1884885
cacgaugucuuccugggaa

SEQ ID NO: 2299489 - RNA, 19 nt, Artificial Sequence
  Description of Artificial Sequence: Synthetic oligonucleotide
  Antisense strand to SEQ ID NO: 2299488
uucccaggaagacaucgug

SEQ ID NO: 2299490 - RNA, 19 nt, Artificial Sequence
  Description of Artificial Sequence: Synthetic oligonucleotide
  Sense strand starting at position 1614 of SEQ ID NO: 1884885
cgaugucuuccugggaaag

SEQ ID NO: 2299491 - RNA, 19 nt, Artificial Sequence
  Description of Artificial Sequence: Synthetic oligonucleotide
  Antisense strand to SEQ ID NO: 2299490
cuuucccaggaagacaucg

SEQ ID NO: 2299492 - RNA, 19 nt, Artificial Sequence
  Description of Artificial Sequence: Synthetic oligonucleotide
  Sense strand starting at position 1615 of SEQ ID NO: 1884885
gaugucuuccugggaaagg

SEQ ID NO: 2299493 - RNA, 19 nt, Artificial Sequence
  Description of Artificial Sequence: Synthetic oligonucleotide
  Antisense strand to SEQ ID NO: 2299492
ccuuucccaggaagacauc

SEQ ID NO: 2299494 - RNA, 19 nt, Artificial Sequence
  Description of Artificial Sequence: Synthetic oligonucleotide
  Sense strand starting at position 1691 of SEQ ID NO: 1884885
cuuccaagacuuugaugga

SEQ ID NO: 2299495 - RNA, 19 nt, Artificial Sequence
  Description of Artificial Sequence: Synthetic oligonucleotide
  Antisense strand to SEQ ID NO: 2299494
uccaucaaagucuuggaag

SEQ ID NO: 2299496 - RNA, 19 nt, Artificial Sequence
  Description of Artificial Sequence: Synthetic oligonucleotide
  Sense strand starting at position 1761 of SEQ ID NO: 1884885
gagagaugaaaccguugca

SEQ ID NO: 2299497 - RNA, 19 nt, Artificial Sequence
  Description of Artificial Sequence: Synthetic oligonucleotide
  Antisense strand to SEQ ID NO: 2299496
ugcaacgguuucaucucuc

SEQ ID NO: 2299498 - RNA, 19 nt, Artificial Sequence
  Description of Artificial Sequence: Synthetic oligonucleotide
  Sense strand starting at position 1866 of SEQ ID NO: 1884885
agaggaaaucuugguaagc

SEQ ID NO: 2299499 - RNA, 19 nt, Artificial Sequence
  Description of Artificial Sequence: Synthetic oligonucleotide
  Antisense strand to SEQ ID NO: 2299498
gcuuaccaagauuuccucu

SEQ ID NO: 2299500 - RNA, 19 nt, Artificial Sequence
  Description of Artificial Sequence: Synthetic oligonucleotide
  Sense strand starting at position 2009 of SEQ ID NO: 1884885
ggacuucccgggcacagau

SEQ ID NO: 2299501 - RNA, 19 nt, Artificial Sequence
  Description of Artificial Sequence: Synthetic oligonucleotide
  Antisense strand to SEQ ID NO: 2299500
aucugugcccgggaagucc

SEQ ID NO: 2299502 - RNA, 19 nt, Artificial Sequence
  Description of Artificial Sequence: Synthetic oligonucleotide
  Sense strand starting at position 3121 of SEQ ID NO: 1884885
gggcgucuugucuucucau

SEQ ID NO: 2299503 - RNA, 19 nt, Artificial Sequence
  Description of Artificial Sequence: Synthetic oligonucleotide
  Antisense strand to SEQ ID NO: 2299502
augagaagacaagacgccc

SEQ ID NO: 2299504 - RNA, 19 nt, Artificial Sequence
  Description of Artificial Sequence: Synthetic oligonucleotide
  Sense strand starting at position 3124 of SEQ ID NO: 1884885
cgucuugucuucucauuua

SEQ ID NO: 2299505 - RNA, 19 nt, Artificial Sequence
  Description of Artificial Sequence: Synthetic oligonucleotide
  Antisense strand to SEQ ID NO: 2299504
uaaaugagaagacaagacg

SEQ ID NO: 2299506 - RNA, 19 nt, Artificial Sequence
  Description of Artificial Sequence: Synthetic oligonucleotide
  Sense strand starting at position 3281 of SEQ ID NO: 1884885
auuuauuccugagacagca

SEQ ID NO: 2299507 - RNA, 19 nt, Artificial Sequence
  Description of Artificial Sequence: Synthetic oligonucleotide
  Antisense strand to SEQ ID NO: 2299506
ugcugucucaggaauaaau

SEQ ID NO: 2299508 - RNA, 19 nt, Artificial Sequence
  Description of Artificial Sequence: Synthetic oligonucleotide
  Sense strand starting at position 3316 of SEQ ID NO: 1884885
ugaccucauccauguagaa

SEQ ID NO: 2299509 - RNA, 19 nt, Artificial Sequence
  Description of Artificial Sequence: Synthetic oligonucleotide
  Antisense strand to SEQ ID NO: 2299508
uucuacauggaugagguca

SEQ ID NO: 2299510 - RNA, 19 nt, Artificial Sequence
  Description of Artificial Sequence: Synthetic oligonucleotide
  Sense strand starting at position 3334 of SEQ ID NO: 1884885
agugacaaaugguuacaca

SEQ ID NO: 2299511 - RNA, 19 nt, Artificial Sequence
  Description of Artificial Sequence: Synthetic oligonucleotide
  Antisense strand to SEQ ID NO: 2299510
uguguaaccauuugucacu

SEQ ID NO: 2299512 - RNA, 19 nt, Artificial Sequence
  Description of Artificial Sequence: Synthetic oligonucleotide
  Sense strand starting at position 3545 of SEQ ID NO: 1884885
gccuuaaucagucacgaag

SEQ ID NO: 2299513 - RNA, 19 nt, Artificial Sequence
  Description of Artificial Sequence: Synthetic oligonucleotide
  Antisense strand to SEQ ID NO: 2299512
cuucgugacugauuaaggc

SEQ ID NO: 2299514 - RNA, 19 nt, Artificial Sequence
  Description of Artificial Sequence: Synthetic oligonucleotide
  Sense strand starting at position 3881 of SEQ ID NO: 1884885
uuguaaggaucugaaauuu

SEQ ID NO: 2299515 - RNA, 19 nt, Artificial Sequence
  Description of Artificial Sequence: Synthetic oligonucleotide
  Antisense strand to SEQ ID NO: 2299514
aaauuucagauccuuacaa

SEQ ID NO: 2299516 - RNA, 19 nt, Artificial Sequence
  Description of Artificial Sequence: Synthetic oligonucleotide
  Sense strand starting at position 3976 of SEQ ID NO: 1884885
agcuuaauucuugauuguu

SEQ ID NO: 2299517 - RNA, 19 nt, Artificial Sequence
  Description of Artificial Sequence: Synthetic oligonucleotide
  Antisense strand to SEQ ID NO: 2299516
aacaaucaagaauuaagcu

SEQ ID NO: 2299518 - RNA, 19 nt, Artificial Sequence
  Description of Artificial Sequence: Synthetic oligonucleotide
  Sense strand starting at position 2005 of SEQ ID NO: 1884886
cuuaaagcauucugagguu

SEQ ID NO: 2299519 - RNA, 19 nt, Artificial Sequence
  Description of Artificial Sequence: Synthetic oligonucleotide
  Antisense strand to SEQ ID NO: 2299518
aaccucagaaugcuuuaag

SEQ ID NO: 2299520 - RNA, 19 nt, Artificial Sequence
  Description of Artificial Sequence: Synthetic oligonucleotide
  Sense strand starting at position 2014 of SEQ ID NO: 1884886
uucugagguuccugaauua

SEQ ID NO: 2299521 - RNA, 19 nt, Artificial Sequence
  Description of Artificial Sequence: Synthetic oligonucleotide
  Antisense strand to SEQ ID NO: 2299520
uaauucaggaaccucagaa

SEQ ID NO: 2299522 - RNA, 19 nt, Artificial Sequence
  Description of Artificial Sequence: Synthetic oligonucleotide
  Sense strand starting at position 2046 of SEQ ID NO: 1884886
agauauuaaucuuggacuu

SEQ ID NO: 2299523 - RNA, 19 nt, Artificial Sequence
  Description of Artificial Sequence: Synthetic oligonucleotide
  Antisense strand to SEQ ID NO: 2299522
aaguccaagauuaauaucu

SEQ ID NO: 2299524 - RNA, 19 nt, Artificial Sequence
  Description of Artificial Sequence: Synthetic oligonucleotide
  Sense strand starting at position 2064 of SEQ ID NO: 1884886
ucaguaaguaugcauguua

SEQ ID NO: 2299525 - RNA, 19 nt, Artificial Sequence
  Description of Artificial Sequence: Synthetic oligonucleotide
  Antisense strand to SEQ ID NO: 2299524
uaacaugcauacuuacuga

SEQ ID NO: 2299526 - RNA, 19 nt, Artificial Sequence
  Description of Artificial Sequence: Synthetic oligonucleotide
  Sense strand starting at position 2176 of SEQ ID NO: 1884886
uaagaaguguggucaccau

SEQ ID NO: 2299527 - RNA, 19 nt, Artificial Sequence
  Description of Artificial Sequence: Synthetic oligonucleotide
  Antisense strand to SEQ ID NO: 2299526
auggugaccacacuucuua

SEQ ID NO: 2299528 - RNA, 19 nt, Artificial Sequence
  Description of Artificial Sequence: Synthetic oligonucleotide
  Sense strand starting at position 2214 of SEQ ID NO: 1884886
agcacuuucguaggccaau

SEQ ID NO: 2299529 - RNA, 19 nt, Artificial Sequence
  Description of Artificial Sequence: Synthetic oligonucleotide
  Antisense strand to SEQ ID NO: 2299528
auuggccuacgaaagugcu

SEQ ID NO: 2299530 - RNA, 19 nt, Artificial Sequence
  Description of Artificial Sequence: Synthetic oligonucleotide
  Sense strand starting at position 2327 of SEQ ID NO: 1884886
gggacuugugccuacagua

SEQ ID NO: 2299531 - RNA, 19 nt, Artificial Sequence
  Description of Artificial Sequence: Synthetic oligonucleotide
  Antisense strand to SEQ ID NO: 2299530
uacuguaggcacaaguccc

SEQ ID NO: 2299532 - RNA, 19 nt, Artificial Sequence
  Description of Artificial Sequence: Synthetic oligonucleotide
  Sense strand starting at position 2696 of SEQ ID NO: 1884886
auauauugagcccaugagu

SEQ ID NO: 2299533 - RNA, 19 nt, Artificial Sequence
  Description of Artificial Sequence: Synthetic oligonucleotide
  Antisense strand to SEQ ID NO: 2299532
acucaugggcucaauauau

SEQ ID NO: 2299534 - RNA, 19 nt, Artificial Sequence
  Description of Artificial Sequence: Synthetic oligonucleotide
  Sense strand starting at position 2856 of SEQ ID NO: 1884886
aguguaaacuaucaguaau

SEQ ID NO: 2299535 - RNA, 19 nt, Artificial Sequence
  Description of Artificial Sequence: Synthetic oligonucleotide
  Antisense strand to SEQ ID NO: 2299534
auuacugauaguuuacacu

SEQ ID NO: 2299536 - RNA, 19 nt, Artificial Sequence
  Description of Artificial Sequence: Synthetic oligonucleotide
  Sense strand starting at position 2858 of SEQ ID NO: 1884886
uguaaacuaucaguaauca

SEQ ID NO: 2299537 - RNA, 19 nt, Artificial Sequence
  Description of Artificial Sequence: Synthetic oligonucleotide
  Antisense strand to SEQ ID NO: 2299536
ugauuacugauaguuuaca

SEQ ID NO: 2299538 - RNA, 19 nt, Artificial Sequence
  Description of Artificial Sequence: Synthetic oligonucleotide
  Sense strand starting at position 2934 of SEQ ID NO: 1884886
uguacagcuuacgaagaaa

SEQ ID NO: 2299539 - RNA, 19 nt, Artificial Sequence
  Description of Artificial Sequence: Synthetic oligonucleotide
  Antisense strand to SEQ ID NO: 2299538
uuucuucguaagcuguaca

SEQ ID NO: 2299540 - RNA, 19 nt, Artificial Sequence
  Description of Artificial Sequence: Synthetic oligonucleotide
  Sense strand starting at position 2968 of SEQ ID NO: 1884886
aagccagagggcugacaau

SEQ ID NO: 2299541 - RNA, 19 nt, Artificial Sequence
  Description of Artificial Sequence: Synthetic oligonucleotide
  Antisense strand to SEQ ID NO: 2299540
auugucagcccucuggcuu

SEQ ID NO: 2299542 - RNA, 19 nt, Artificial Sequence
  Description of Artificial Sequence: Synthetic oligonucleotide
  Sense strand starting at position 3179 of SEQ ID NO: 1884886
caggcugggcuauaauaua

SEQ ID NO: 2299543 - RNA, 19 nt, Artificial Sequence
  Description of Artificial Sequence: Synthetic oligonucleotide
  Antisense strand to SEQ ID NO: 2299542
uauauuauagcccagccug

SEQ ID NO: 2299544 - RNA, 19 nt, Artificial Sequence
  Description of Artificial Sequence: Synthetic oligonucleotide
  Sense strand starting at position 3238 of SEQ ID NO: 1884886
aggcauuaauaugugauca

SEQ ID NO: 2299545 - RNA, 19 nt, Artificial Sequence
  Description of Artificial Sequence: Synthetic oligonucleotide
  Antisense strand to SEQ ID NO: 2299544
ugaucacauauuaaugccu

SEQ ID NO: 2299546 - RNA, 19 nt, Artificial Sequence
  Description of Artificial Sequence: Synthetic oligonucleotide
  Sense strand starting at position 3240 of SEQ ID NO: 1884886
gcauuaauaugugaucaua

SEQ ID NO: 2299547 - RNA, 19 nt, Artificial Sequence
  Description of Artificial Sequence: Synthetic oligonucleotide
  Antisense strand to SEQ ID NO: 2299546
uaugaucacauauuaaugc

SEQ ID NO: 2299548 - RNA, 19 nt, Artificial Sequence
  Description of Artificial Sequence: Synthetic oligonucleotide
  Sense strand starting at position 3296 of SEQ ID NO: 1884886
uuacaccugcaguaagaua

SEQ ID NO: 2299549 - RNA, 19 nt, Artificial Sequence
  Description of Artificial Sequence: Synthetic oligonucleotide
  Antisense strand to SEQ ID NO: 2299548
uaucuuacugcagguguaa

SEQ ID NO: 2299550 - RNA, 19 nt, Artificial Sequence
  Description of Artificial Sequence: Synthetic oligonucleotide
  Sense strand starting at position 3438 of SEQ ID NO: 1884886
gguucuuuaucucugcuua

SEQ ID NO: 2299551 - RNA, 19 nt, Artificial Sequence
  Description of Artificial Sequence: Synthetic oligonucleotide
  Antisense strand to SEQ ID NO: 2299550
uaagcagagauaaagaacc

SEQ ID NO: 2299552 - RNA, 19 nt, Artificial Sequence
  Description of Artificial Sequence: Synthetic oligonucleotide
  Sense strand starting at position 3439 of SEQ ID NO: 1884886
guucuuuaucucugcuuau

SEQ ID NO: 2299553 - RNA, 19 nt, Artificial Sequence
  Description of Artificial Sequence: Synthetic oligonucleotide
  Antisense strand to SEQ ID NO: 2299552
auaagcagagauaaagaac

SEQ ID NO: 2299554 - RNA, 19 nt, Artificial Sequence
  Description of Artificial Sequence: Synthetic oligonucleotide
  Sense strand starting at position 3451 of SEQ ID NO: 1884886
ugcuuaugcuguccaucaa

SEQ ID NO: 2299555 - RNA, 19 nt, Artificial Sequence
  Description of Artificial Sequence: Synthetic oligonucleotide
  Antisense strand to SEQ ID NO: 2299554
uugauggacagcauaagca

SEQ ID NO: 2299556 - RNA, 19 nt, Artificial Sequence
  Description of Artificial Sequence: Synthetic oligonucleotide
  Sense strand starting at position 3452 of SEQ ID NO: 1884886
gcuuaugcuguccaucaaa

SEQ ID NO: 2299557 - RNA, 19 nt, Artificial Sequence
  Description of Artificial Sequence: Synthetic oligonucleotide
  Antisense strand to SEQ ID NO: 2299556
uuugauggacagcauaagc

SEQ ID NO: 2299558 - RNA, 19 nt, Artificial Sequence
  Description of Artificial Sequence: Synthetic oligonucleotide
  Sense strand starting at position 3841 of SEQ ID NO: 1884886
cccacacuguucugcauau

SEQ ID NO: 2299559 - RNA, 19 nt, Artificial Sequence
  Description of Artificial Sequence: Synthetic oligonucleotide
  Antisense strand to SEQ ID NO: 2299558
auaugcagaacaguguggg

SEQ ID NO: 2299560 - RNA, 19 nt, Artificial Sequence
  Description of Artificial Sequence: Synthetic oligonucleotide
  Sense strand starting at position 22 of SEQ ID NO: 1884887
ggucuuucagaggagguua

SEQ ID NO: 2299561 - RNA, 19 nt, Artificial Sequence
  Description of Artificial Sequence: Synthetic oligonucleotide
  Antisense strand to SEQ ID NO: 2299560
uaaccuccucugaaagacc

SEQ ID NO: 2299562 - RNA, 19 nt, Artificial Sequence
  Description of Artificial Sequence: Synthetic oligonucleotide
  Sense strand starting at position 94 of SEQ ID NO: 1884887
aggugugagucagugggaa

SEQ ID NO: 2299563 - RNA, 19 nt, Artificial Sequence
  Description of Artificial Sequence: Synthetic oligonucleotide
  Antisense strand to SEQ ID NO: 2299562
uucccacugacucacaccu

SEQ ID NO: 2299564 - RNA, 19 nt, Artificial Sequence
  Description of Artificial Sequence: Synthetic oligonucleotide
  Sense strand starting at position 111 of SEQ ID NO: 1884887
aagggaaucucuuccugua

SEQ ID NO: 2299565 - RNA, 19 nt, Artificial Sequence
  Description of Artificial Sequence: Synthetic oligonucleotide
  Antisense strand to SEQ ID NO: 2299564
uacaggaagagauucccuu

SEQ ID NO: 2299566 - RNA, 19 nt, Artificial Sequence
  Description of Artificial Sequence: Synthetic oligonucleotide
  Sense strand starting at position 113 of SEQ ID NO: 1884887
gggaaucucuuccuguacu

SEQ ID NO: 2299567 - RNA, 19 nt, Artificial Sequence
  Description of Artificial Sequence: Synthetic oligonucleotide
  Antisense strand to SEQ ID NO: 2299566
aguacaggaagagauuccc

SEQ ID NO: 2299568 - RNA, 19 nt, Artificial Sequence
  Description of Artificial Sequence: Synthetic oligonucleotide
  Sense strand starting at position 196 of SEQ ID NO: 1884887
gacgauaauagguguucca

SEQ ID NO: 2299569 - RNA, 19 nt, Artificial Sequence
  Description of Artificial Sequence: Synthetic oligonucleotide
  Antisense strand to SEQ ID NO: 2299568
uggaacaccuauuaucguc

SEQ ID NO: 2299570 - RNA, 19 nt, Artificial Sequence
  Description of Artificial Sequence: Synthetic oligonucleotide
  Sense strand starting at position 199 of SEQ ID NO: 1884887
gauaauagguguuccauga

SEQ ID NO: 2299571 - RNA, 19 nt, Artificial Sequence
  Description of Artificial Sequence: Synthetic oligonucleotide
  Antisense strand to SEQ ID NO: 2299570
ucauggaacaccuauuauc

SEQ ID NO: 2299572 - RNA, 19 nt, Artificial Sequence
  Description of Artificial Sequence: Synthetic oligonucleotide
  Sense strand starting at position 203 of SEQ ID NO: 1884887
auagguguuccaugaagaa

SEQ ID NO: 2299573 - RNA, 19 nt, Artificial Sequence
  Description of Artificial Sequence: Synthetic oligonucleotide
  Antisense strand to SEQ ID NO: 2299572
uucuucauggaacaccuau

SEQ ID NO: 2299574 - RNA, 19 nt, Artificial Sequence
  Description of Artificial Sequence: Synthetic oligonucleotide
  Sense strand starting at position 233 of SEQ ID NO: 1884887
ccuauaaguuugguuaaca

SEQ ID NO: 2299575 - RNA, 19 nt, Artificial Sequence
  Description of Artificial Sequence: Synthetic oligonucleotide
  Antisense strand to SEQ ID NO: 2299574
uguuaaccaaacuuauagg

SEQ ID NO: 2299576 - RNA, 19 nt, Artificial Sequence
  Description of Artificial Sequence: Synthetic oligonucleotide
  Sense strand starting at position 234 of SEQ ID NO: 1884887
cuauaaguuugguuaacac

SEQ ID NO: 2299577 - RNA, 19 nt, Artificial Sequence
  Description of Artificial Sequence: Synthetic oligonucleotide
  Antisense strand to SEQ ID NO: 2299576
guguuaaccaaacuuauag

SEQ ID NO: 2299578 - RNA, 19 nt, Artificial Sequence
  Description of Artificial Sequence: Synthetic oligonucleotide
  Sense strand starting at position 244 of SEQ ID NO: 1884887
gguuaacacuaaguuuaaa

SEQ ID NO: 2299579 - RNA, 19 nt, Artificial Sequence
  Description of Artificial Sequence: Synthetic oligonucleotide
  Antisense strand to SEQ ID NO: 2299578
uuuaaacuuaguguuaacc

SEQ ID NO: 2299580 - RNA, 19 nt, Artificial Sequence
  Description of Artificial Sequence: Synthetic oligonucleotide
  Sense strand starting at position 324 of SEQ ID NO: 1884887
acuagagggugccuuauua

SEQ ID NO: 2299581 - RNA, 19 nt, Artificial Sequence
  Description of Artificial Sequence: Synthetic oligonucleotide
  Antisense strand to SEQ ID NO: 2299580
uaauaaggcacccucuagu

SEQ ID NO: 2299582 - RNA, 19 nt, Artificial Sequence
  Description of Artificial Sequence: Synthetic oligonucleotide
  Sense strand starting at position 382 of SEQ ID NO: 1884887
agcacauagugaccuauaa

SEQ ID NO: 2299583 - RNA, 19 nt, Artificial Sequence
  Description of Artificial Sequence: Synthetic oligonucleotide
  Antisense strand to SEQ ID NO: 2299582
uuauaggucacuaugugcu

SEQ ID NO: 2299584 - RNA, 19 nt, Artificial Sequence
  Description of Artificial Sequence: Synthetic oligonucleotide
  Sense strand starting at position 450 of SEQ ID NO: 1884887
ucuugaaggaugugucaaa

SEQ ID NO: 2299585 - RNA, 19 nt, Artificial Sequence
  Description of Artificial Sequence: Synthetic oligonucleotide
  Antisense strand to SEQ ID NO: 2299584
uuugacacauccuucaaga

SEQ ID NO: 2299586 - RNA, 19 nt, Artificial Sequence
  Description of Artificial Sequence: Synthetic oligonucleotide
  Sense strand starting at position 945 of SEQ ID NO: 1884887
guggauggauagaacgaua

SEQ ID NO: 2299587 - RNA, 19 nt, Artificial Sequence
  Description of Artificial Sequence: Synthetic oligonucleotide
  Antisense strand to SEQ ID NO: 2299586
uaucguucuauccauccac

SEQ ID NO: 2299588 - RNA, 19 nt, Artificial Sequence
  Description of Artificial Sequence: Synthetic oligonucleotide
  Sense strand starting at position 1026 of SEQ ID NO: 1884887
gauagcuuguugcucauuu

SEQ ID NO: 2299589 - RNA, 19 nt, Artificial Sequence
  Description of Artificial Sequence: Synthetic oligonucleotide
  Antisense strand to SEQ ID NO: 2299588
aaaugagcaacaagcuauc

SEQ ID NO: 2299590 - RNA, 19 nt, Artificial Sequence
  Description of Artificial Sequence: Synthetic oligonucleotide
  Sense strand starting at position 1030 of SEQ ID NO: 1884887
gcuuguugcucauuucuaa

SEQ ID NO: 2299591 - RNA, 19 nt, Artificial Sequence
  Description of Artificial Sequence: Synthetic oligonucleotide
  Antisense strand to SEQ ID NO: 2299590
uuagaaaugagcaacaagc

SEQ ID NO: 2299592 - RNA, 19 nt, Artificial Sequence
  Description of Artificial Sequence: Synthetic oligonucleotide
  Sense strand starting at position 1319 of SEQ ID NO: 1884887
gcaucauggccuuauagag

SEQ ID NO: 2299593 - RNA, 19 nt, Artificial Sequence
  Description of Artificial Sequence: Synthetic oligonucleotide
  Antisense strand to SEQ ID NO: 2299592
cucuauaaggccaugaugc

SEQ ID NO: 2299594 - RNA, 19 nt, Artificial Sequence
  Description of Artificial Sequence: Synthetic oligonucleotide
  Sense strand starting at position 1336 of SEQ ID NO: 1884887
agaaacucccuuggcaaau

SEQ ID NO: 2299595 - RNA, 19 nt, Artificial Sequence
  Description of Artificial Sequence: Synthetic oligonucleotide
  Antisense strand to SEQ ID NO: 2299594
auuugccaagggaguuucu

SEQ ID NO: 2299596 - RNA, 19 nt, Artificial Sequence
  Description of Artificial Sequence: Synthetic oligonucleotide
  Sense strand starting at position 1763 of SEQ ID NO: 1884887
uguugugcccuacagaacu

SEQ ID NO: 2299597 - RNA, 19 nt, Artificial Sequence
  Description of Artificial Sequence: Synthetic oligonucleotide
  Antisense strand to SEQ ID NO: 2299596
aguucuguagggcacaaca

SEQ ID NO: 2299598 - RNA, 19 nt, Artificial Sequence
  Description of Artificial Sequence: Synthetic oligonucleotide
  Sense strand starting at position 1837 of SEQ ID NO: 1884887
cuacgugaucucugaauag

SEQ ID NO: 2299599 - RNA, 19 nt, Artificial Sequence
  Description of Artificial Sequence: Synthetic oligonucleotide
  Antisense strand to SEQ ID NO: 2299598
cuauucagagaucacguag

SEQ ID NO: 2299600 - RNA, 19 nt, Artificial Sequence
  Description of Artificial Sequence: Synthetic oligonucleotide
  Sense strand starting at position 1841 of SEQ ID NO: 1884887
gugaucucugaauagucaa

SEQ ID NO: 2299601 - RNA, 19 nt, Artificial Sequence
  Description of Artificial Sequence: Synthetic oligonucleotide
  Antisense strand to SEQ ID NO: 2299600
uugacuauucagagaucac

SEQ ID NO: 2299602 - RNA, 19 nt, Artificial Sequence
  Description of Artificial Sequence: Synthetic oligonucleotide
  Sense strand starting at position 1997 of SEQ ID NO: 1884887
gagugaguuccagguggga

SEQ ID NO: 2299603 - RNA, 19 nt, Artificial Sequence
  Description of Artificial Sequence: Synthetic oligonucleotide
  Antisense strand to SEQ ID NO: 2299602
ucccaccuggaacucacuc

SEQ ID NO: 2299604 - RNA, 19 nt, Artificial Sequence
  Description of Artificial Sequence: Synthetic oligonucleotide
  Sense strand starting at position 2301 of SEQ ID NO: 1884887
ccuucucaucuguaugauu

SEQ ID NO: 2299605 - RNA, 19 nt, Artificial Sequence
  Description of Artificial Sequence: Synthetic oligonucleotide
  Antisense strand to SEQ ID NO: 2299604
aaucauacagaugagaagg

SEQ ID NO: 2299606 - RNA, 19 nt, Artificial Sequence
  Description of Artificial Sequence: Synthetic oligonucleotide
  Sense strand starting at position 2331 of SEQ ID NO: 1884887
auuguaucuccauggguag

SEQ ID NO: 2299607 - RNA, 19 nt, Artificial Sequence
  Description of Artificial Sequence: Synthetic oligonucleotide
  Antisense strand to SEQ ID NO: 2299606
cuacccauggagauacaau

SEQ ID NO: 2299608 - RNA, 19 nt, Artificial Sequence
  Description of Artificial Sequence: Synthetic oligonucleotide
  Sense strand starting at position 2332 of SEQ ID NO: 1884887
uuguaucuccauggguaga

SEQ ID NO: 2299609 - RNA, 19 nt, Artificial Sequence
  Description of Artificial Sequence: Synthetic oligonucleotide
  Antisense strand to SEQ ID NO: 2299608
ucuacccauggagauacaa

SEQ ID NO: 2299610 - RNA, 19 nt, Artificial Sequence
  Description of Artificial Sequence: Synthetic oligonucleotide
  Sense strand starting at position 2334 of SEQ ID NO: 1884887
guaucuccauggguagaga

SEQ ID NO: 2299611 - RNA, 19 nt, Artificial Sequence
  Description of Artificial Sequence: Synthetic oligonucleotide
  Antisense strand to SEQ ID NO: 2299610
ucucuacccauggagauac

SEQ ID NO: 2299612 - RNA, 19 nt, Artificial Sequence
  Description of Artificial Sequence: Synthetic oligonucleotide
  Sense strand starting at position 2438 of SEQ ID NO: 1884887
cgacucuagacguacuaaa

SEQ ID NO: 2299613 - RNA, 19 nt, Artificial Sequence
  Description of Artificial Sequence: Synthetic oligonucleotide
  Antisense strand to SEQ ID NO: 2299612
uuuaguacgucuagagucg

SEQ ID NO: 2299614 - RNA, 19 nt, Artificial Sequence
  Description of Artificial Sequence: Synthetic oligonucleotide
  Sense strand starting at position 2572 of SEQ ID NO: 1884887
aagugauucuuaguaguag

SEQ ID NO: 2299615 - RNA, 19 nt, Artificial Sequence
  Description of Artificial Sequence: Synthetic oligonucleotide
  Antisense strand to SEQ ID NO: 2299614
cuacuacuaagaaucacuu

SEQ ID NO: 2299616 - RNA, 19 nt, Artificial Sequence
  Description of Artificial Sequence: Synthetic oligonucleotide
  Sense strand starting at position 2586 of SEQ ID NO: 1884887
aguaguaagguuugagaau

SEQ ID NO: 2299617 - RNA, 19 nt, Artificial Sequence
  Description of Artificial Sequence: Synthetic oligonucleotide
  Antisense strand to SEQ ID NO: 2299616
auucucaaaccuuacuacu

SEQ ID NO: 2299618 - RNA, 19 nt, Artificial Sequence
  Description of Artificial Sequence: Synthetic oligonucleotide
  Sense strand starting at position 2675 of SEQ ID NO: 1884887
uugggugcaugacuuaaau

SEQ ID NO: 2299619 - RNA, 19 nt, Artificial Sequence
  Description of Artificial Sequence: Synthetic oligonucleotide
  Antisense strand to SEQ ID NO: 2299618
auuuaagucaugcacccaa

SEQ ID NO: 2299620 - RNA, 19 nt, Artificial Sequence
  Description of Artificial Sequence: Synthetic oligonucleotide
  Sense strand starting at position 2677 of SEQ ID NO: 1884887
gggugcaugacuuaaauuc

SEQ ID NO: 2299621 - RNA, 19 nt, Artificial Sequence
  Description of Artificial Sequence: Synthetic oligonucleotide
  Antisense strand to SEQ ID NO: 2299620
gaauuuaagucaugcaccc

SEQ ID NO: 2299622 - RNA, 19 nt, Artificial Sequence
  Description of Artificial Sequence: Synthetic oligonucleotide
  Sense strand starting at position 2815 of SEQ ID NO: 1884887
acugaugugcuuuagaauu

SEQ ID NO: 2299623 - RNA, 19 nt, Artificial Sequence
  Description of Artificial Sequence: Synthetic oligonucleotide
  Antisense strand to SEQ ID NO: 2299622
aauucuaaagcacaucagu

SEQ ID NO: 2299624 - RNA, 19 nt, Artificial Sequence
  Description of Artificial Sequence: Synthetic oligonucleotide
  Sense strand starting at position 2883 of SEQ ID NO: 1884887
uguucuaaaucaguaggua

SEQ ID NO: 2299625 - RNA, 19 nt, Artificial Sequence
  Description of Artificial Sequence: Synthetic oligonucleotide
  Antisense strand to SEQ ID NO: 2299624
uaccuacugauuuagaaca

SEQ ID NO: 2299626 - RNA, 19 nt, Artificial Sequence
  Description of Artificial Sequence: Synthetic oligonucleotide
  Sense strand starting at position 2884 of SEQ ID NO: 1884887
guucuaaaucaguagguac

SEQ ID NO: 2299627 - RNA, 19 nt, Artificial Sequence
  Description of Artificial Sequence: Synthetic oligonucleotide
  Antisense strand to SEQ ID NO: 2299626
guaccuacugauuuagaac

SEQ ID NO: 2299628 - RNA, 19 nt, Artificial Sequence
  Description of Artificial Sequence: Synthetic oligonucleotide
  Sense strand starting at position 3094 of SEQ ID NO: 1884887
gcuuucuugccuccaguuu

SEQ ID NO: 2299629 - RNA, 19 nt, Artificial Sequence
  Description of Artificial Sequence: Synthetic oligonucleotide
  Antisense strand to SEQ ID NO: 2299628
aaacuggaggcaagaaagc

SEQ ID NO: 2299630 - RNA, 19 nt, Artificial Sequence
  Description of Artificial Sequence: Synthetic oligonucleotide
  Sense strand starting at position 3108 of SEQ ID NO: 1884887
aguuucucauguguagaaa

SEQ ID NO: 2299631 - RNA, 19 nt, Artificial Sequence
  Description of Artificial Sequence: Synthetic oligonucleotide
  Antisense strand to SEQ ID NO: 2299630
uuucuacacaugagaaacu

SEQ ID NO: 2299632 - RNA, 19 nt, Artificial Sequence
  Description of Artificial Sequence: Synthetic oligonucleotide
  Sense strand starting at position 3109 of SEQ ID NO: 1884887
guuucucauguguagaaag

SEQ ID NO: 2299633 - RNA, 19 nt, Artificial Sequence
  Description of Artificial Sequence: Synthetic oligonucleotide
  Antisense strand to SEQ ID NO: 2299632
cuuucuacacaugagaaac

SEQ ID NO: 2299634 - RNA, 19 nt, Artificial Sequence
  Description of Artificial Sequence: Synthetic oligonucleotide
  Sense strand starting at position 3196 of SEQ ID NO: 1884887
gcauguagccaauauauaa

SEQ ID NO: 2299635 - RNA, 19 nt, Artificial Sequence
  Description of Artificial Sequence: Synthetic oligonucleotide
  Antisense strand to SEQ ID NO: 2299634
uuauauauuggcuacaugc

SEQ ID NO: 2299636 - RNA, 19 nt, Artificial Sequence
  Description of Artificial Sequence: Synthetic oligonucleotide
  Sense strand starting at position 3784 of SEQ ID NO: 1884887
gcaguuaguagucacaaac

SEQ ID NO: 2299637 - RNA, 19 nt, Artificial Sequence
  Description of Artificial Sequence: Synthetic oligonucleotide
  Antisense strand to SEQ ID NO: 2299636
guuugugacuacuaacugc

SEQ ID NO: 2299638 - RNA, 19 nt, Artificial Sequence
  Description of Artificial Sequence: Synthetic oligonucleotide
  Sense strand starting at position 3855 of SEQ ID NO: 1884887
uuuggcuagacaugagaga

SEQ ID NO: 2299639 - RNA, 19 nt, Artificial Sequence
  Description of Artificial Sequence: Synthetic oligonucleotide
  Antisense strand to SEQ ID NO: 2299638
ucucucaugucuagccaaa

SEQ ID NO: 2299640 - RNA, 19 nt, Artificial Sequence
  Description of Artificial Sequence: Synthetic oligonucleotide
  Sense strand starting at position 80 of SEQ ID NO: 1884888
ggcucaugagcacauuauu

SEQ ID NO: 2299641 - RNA, 19 nt, Artificial Sequence
  Description of Artificial Sequence: Synthetic oligonucleotide
  Antisense strand to SEQ ID NO: 2299640
aauaaugugcucaugagcc

SEQ ID NO: 2299642 - RNA, 19 nt, Artificial Sequence
  Description of Artificial Sequence: Synthetic oligonucleotide
  Sense strand starting at position 91 of SEQ ID NO: 1884888
acauuauucuaagcguaag

SEQ ID NO: 2299643 - RNA, 19 nt, Artificial Sequence
  Description of Artificial Sequence: Synthetic oligonucleotide
  Antisense strand to SEQ ID NO: 2299642
cuuacgcuuagaauaaugu

SEQ ID NO: 2299644 - RNA, 19 nt, Artificial Sequence
  Description of Artificial Sequence: Synthetic oligonucleotide
  Sense strand starting at position 101 of SEQ ID NO: 1884888
aagcguaagugguagauaa

SEQ ID NO: 2299645 - RNA, 19 nt, Artificial Sequence
  Description of Artificial Sequence: Synthetic oligonucleotide
  Antisense strand to SEQ ID NO: 2299644
uuaucuaccacuuacgcuu

SEQ ID NO: 2299646 - RNA, 19 nt, Artificial Sequence
  Description of Artificial Sequence: Synthetic oligonucleotide
  Sense strand starting at position 108 of SEQ ID NO: 1884888
agugguagauaaccugauu

SEQ ID NO: 2299647 - RNA, 19 nt, Artificial Sequence
  Description of Artificial Sequence: Synthetic oligonucleotide
  Antisense strand to SEQ ID NO: 2299646
aaucagguuaucuaccacu

SEQ ID NO: 2299648 - RNA, 19 nt, Artificial Sequence
  Description of Artificial Sequence: Synthetic oligonucleotide
  Sense strand starting at position 922 of SEQ ID NO: 1884888
gagcuagaggucugacuga

SEQ ID NO: 2299649 - RNA, 19 nt, Artificial Sequence
  Description of Artificial Sequence: Synthetic oligonucleotide
  Antisense strand to SEQ ID NO: 2299648
ucagucagaccucuagcuc

SEQ ID NO: 2299650 - RNA, 19 nt, Artificial Sequence
  Description of Artificial Sequence: Synthetic oligonucleotide
  Sense strand starting at position 1149 of SEQ ID NO: 1884888
ccgugcuggaaauaacuaa

SEQ ID NO: 2299651 - RNA, 19 nt, Artificial Sequence
  Description of Artificial Sequence: Synthetic oligonucleotide
  Antisense strand to SEQ ID NO: 2299650
uuaguuauuuccagcacgg

SEQ ID NO: 2299652 - RNA, 19 nt, Artificial Sequence
  Description of Artificial Sequence: Synthetic oligonucleotide
  Sense strand starting at position 1801 of SEQ ID NO: 1884888
gggucuugaucccagaaca

SEQ ID NO: 2299653 - RNA, 19 nt, Artificial Sequence
  Description of Artificial Sequence: Synthetic oligonucleotide
  Antisense strand to SEQ ID NO: 2299652
uguucugggaucaagaccc

SEQ ID NO: 2299654 - RNA, 19 nt, Artificial Sequence
  Description of Artificial Sequence: Synthetic oligonucleotide
  Sense strand starting at position 2312 of SEQ ID NO: 1884888
agcggcucucgacaagagu

SEQ ID NO: 2299655 - RNA, 19 nt, Artificial Sequence
  Description of Artificial Sequence: Synthetic oligonucleotide
  Antisense strand to SEQ ID NO: 2299654
acucuugucgagagccgcu

SEQ ID NO: 2299656 - RNA, 19 nt, Artificial Sequence
  Description of Artificial Sequence: Synthetic oligonucleotide
  Sense strand starting at position 2313 of SEQ ID NO: 1884888
gcggcucucgacaagaguu

SEQ ID NO: 2299657 - RNA, 19 nt, Artificial Sequence
  Description of Artificial Sequence: Synthetic oligonucleotide
  Antisense strand to SEQ ID NO: 2299656
aacucuugucgagagccgc

SEQ ID NO: 2299658 - RNA, 19 nt, Artificial Sequence
  Description of Artificial Sequence: Synthetic oligonucleotide
  Sense strand starting at position 2372 of SEQ ID NO: 1884888
caguguugcccgagggagu

SEQ ID NO: 2299659 - RNA, 19 nt, Artificial Sequence
  Description of Artificial Sequence: Synthetic oligonucleotide
  Antisense strand to SEQ ID NO: 2299658
acucccucgggcaacacug

SEQ ID NO: 2299660 - RNA, 19 nt, Artificial Sequence
  Description of Artificial Sequence: Synthetic oligonucleotide
  Sense strand starting at position 2373 of SEQ ID NO: 1884888
aguguugcccgagggaguu

SEQ ID NO: 2299661 - RNA, 19 nt, Artificial Sequence
  Description of Artificial Sequence: Synthetic oligonucleotide
  Antisense strand to SEQ ID NO: 2299660
aacucccucgggcaacacu

SEQ ID NO: 2299662 - RNA, 19 nt, Artificial Sequence
  Description of Artificial Sequence: Synthetic oligonucleotide
  Sense strand starting at position 2904 of SEQ ID NO: 1884888
gugggagcccucuguaauc

SEQ ID NO: 2299663 - RNA, 19 nt, Artificial Sequence
  Description of Artificial Sequence: Synthetic oligonucleotide
  Antisense strand to SEQ ID NO: 2299662
gauuacagagggcucccac

SEQ ID NO: 2299664 - RNA, 19 nt, Artificial Sequence
  Description of Artificial Sequence: Synthetic oligonucleotide
  Sense strand starting at position 2906 of SEQ ID NO: 1884888
gggagcccucuguaaucuu

SEQ ID NO: 2299665 - RNA, 19 nt, Artificial Sequence
  Description of Artificial Sequence: Synthetic oligonucleotide
  Antisense strand to SEQ ID NO: 2299664
aagauuacagagggcuccc

SEQ ID NO: 2299666 - RNA, 19 nt, Artificial Sequence
  Description of Artificial Sequence: Synthetic oligonucleotide
  Sense strand starting at position 2915 of SEQ ID NO: 1884888
cuguaaucuuuagggagag

SEQ ID NO: 2299667 - RNA, 19 nt, Artificial Sequence
  Description of Artificial Sequence: Synthetic oligonucleotide
  Antisense strand to SEQ ID NO: 2299666
cucucccuaaagauuacag

SEQ ID NO: 2299668 - RNA, 19 nt, Artificial Sequence
  Description of Artificial Sequence: Synthetic oligonucleotide
  Sense strand starting at position 2916 of SEQ ID NO: 1884888
uguaaucuuuagggagagu

SEQ ID NO: 2299669 - RNA, 19 nt, Artificial Sequence
  Description of Artificial Sequence: Synthetic oligonucleotide
  Antisense strand to SEQ ID NO: 2299668
acucucccuaaagauuaca

SEQ ID NO: 2299670 - RNA, 19 nt, Artificial Sequence
  Description of Artificial Sequence: Synthetic oligonucleotide
  Sense strand starting at position 2991 of SEQ ID NO: 1884888
uggguaggcuccucuacau

SEQ ID NO: 2299671 - RNA, 19 nt, Artificial Sequence
  Description of Artificial Sequence: Synthetic oligonucleotide
  Antisense strand to SEQ ID NO: 2299670
auguagaggagccuaccca

SEQ ID NO: 2299672 - RNA, 19 nt, Artificial Sequence
  Description of Artificial Sequence: Synthetic oligonucleotide
  Sense strand starting at position 3254 of SEQ ID NO: 1884888
ggccuuggcugguuccaaa

SEQ ID NO: 2299673 - RNA, 19 nt, Artificial Sequence
  Description of Artificial Sequence: Synthetic oligonucleotide
  Antisense strand to SEQ ID NO: 2299672
uuuggaaccagccaaggcc

SEQ ID NO: 2299674 - RNA, 19 nt, Artificial Sequence
  Description of Artificial Sequence: Synthetic oligonucleotide
  Sense strand starting at position 3265 of SEQ ID NO: 1884888
guuccaaacucuggucuca

SEQ ID NO: 2299675 - RNA, 19 nt, Artificial Sequence
  Description of Artificial Sequence: Synthetic oligonucleotide
  Antisense strand to SEQ ID NO: 2299674
ugagaccagaguuuggaac

SEQ ID NO: 2299676 - RNA, 19 nt, Artificial Sequence
  Description of Artificial Sequence: Synthetic oligonucleotide
  Sense strand starting at position 3390 of SEQ ID NO: 1884888
acagcagaucugugagagu

SEQ ID NO: 2299677 - RNA, 19 nt, Artificial Sequence
  Description of Artificial Sequence: Synthetic oligonucleotide
  Antisense strand to SEQ ID NO: 2299676
acucucacagaucugcugu

SEQ ID NO: 2299678 - RNA, 19 nt, Artificial Sequence
  Description of Artificial Sequence: Synthetic oligonucleotide
  Sense strand starting at position 3393 of SEQ ID NO: 1884888
gcagaucugugagagugca

SEQ ID NO: 2299679 - RNA, 19 nt, Artificial Sequence
  Description of Artificial Sequence: Synthetic oligonucleotide
  Antisense strand to SEQ ID NO: 2299678
ugcacucucacagaucugc

SEQ ID NO: 2299680 - RNA, 19 nt, Artificial Sequence
  Description of Artificial Sequence: Synthetic oligonucleotide
  Sense strand starting at position 3632 of SEQ ID NO: 1884888
ccggcaaguucugcgggau

SEQ ID NO: 2299681 - RNA, 19 nt, Artificial Sequence
  Description of Artificial Sequence: Synthetic oligonucleotide
  Antisense strand to SEQ ID NO: 2299680
aucccgcagaacuugccgg

SEQ ID NO: 2299682 - RNA, 19 nt, Artificial Sequence
  Description of Artificial Sequence: Synthetic oligonucleotide
  Sense strand starting at position 3633 of SEQ ID NO: 1884888
cggcaaguucugcgggaug

SEQ ID NO: 2299683 - RNA, 19 nt, Artificial Sequence
  Description of Artificial Sequence: Synthetic oligonucleotide
  Antisense strand to SEQ ID NO: 2299682
caucccgcagaacuugccg

SEQ ID NO: 2299684 - RNA, 19 nt, Artificial Sequence
  Description of Artificial Sequence: Synthetic oligonucleotide
  Sense strand starting at position 3687 of SEQ ID NO: 1884888
ugcaguugguuggacaauu

SEQ ID NO: 2299685 - RNA, 19 nt, Artificial Sequence
  Description of Artificial Sequence: Synthetic oligonucleotide
  Antisense strand to SEQ ID NO: 2299684
aauuguccaaccaacugca

SEQ ID NO: 2299686 - RNA, 19 nt, Artificial Sequence
  Description of Artificial Sequence: Synthetic oligonucleotide
  Sense strand starting at position 3703 of SEQ ID NO: 1884888
auuacauagcucugaagcu

SEQ ID NO: 2299687 - RNA, 19 nt, Artificial Sequence
  Description of Artificial Sequence: Synthetic oligonucleotide
  Antisense strand to SEQ ID NO: 2299686
agcuucagagcuauguaau

SEQ ID NO: 2299688 - RNA, 19 nt, Artificial Sequence
  Description of Artificial Sequence: Synthetic oligonucleotide
  Sense strand starting at position 3704 of SEQ ID NO: 1884888
uuacauagcucugaagcua

SEQ ID NO: 2299689 - RNA, 19 nt, Artificial Sequence
  Description of Artificial Sequence: Synthetic oligonucleotide
  Antisense strand to SEQ ID NO: 2299688
uagcuucagagcuauguaa

SEQ ID NO: 2299690 - RNA, 19 nt, Artificial Sequence
  Description of Artificial Sequence: Synthetic oligonucleotide
  Sense strand starting at position 3740 of SEQ ID NO: 1884888
agaguguuccugggagggu

SEQ ID NO: 2299691 - RNA, 19 nt, Artificial Sequence
  Description of Artificial Sequence: Synthetic oligonucleotide
  Antisense strand to SEQ ID NO: 2299690
acccucccaggaacacucu

SEQ ID NO: 2299692 - RNA, 19 nt, Artificial Sequence
  Description of Artificial Sequence: Synthetic oligonucleotide
  Sense strand starting at position 3759 of SEQ ID NO: 1884888
caugcauucuccuggauag

SEQ ID NO: 2299693 - RNA, 19 nt, Artificial Sequence
  Description of Artificial Sequence: Synthetic oligonucleotide
  Antisense strand to SEQ ID NO: 2299692
cuauccaggagaaugcaug

SEQ ID NO: 2299694 - RNA, 19 nt, Artificial Sequence
  Description of Artificial Sequence: Synthetic oligonucleotide
  Sense strand starting at position 3761 of SEQ ID NO: 1884888
ugcauucuccuggauagca

SEQ ID NO: 2299695 - RNA, 19 nt, Artificial Sequence
  Description of Artificial Sequence: Synthetic oligonucleotide
  Antisense strand to SEQ ID NO: 2299694
ugcuauccaggagaaugca

SEQ ID NO: 2299696 - RNA, 19 nt, Artificial Sequence
  Description of Artificial Sequence: Synthetic oligonucleotide
  Sense strand starting at position 3785 of SEQ ID NO: 1884888
cccuuucucugugaguaug

SEQ ID NO: 2299697 - RNA, 19 nt, Artificial Sequence
  Description of Artificial Sequence: Synthetic oligonucleotide
  Antisense strand to SEQ ID NO: 2299696
cauacucacagagaaaggg

SEQ ID NO: 2299698 - RNA, 19 nt, Artificial Sequence
  Description of Artificial Sequence: Synthetic oligonucleotide
  Sense strand starting at position 3793 of SEQ ID NO: 1884888
cugugaguaugagccagau

SEQ ID NO: 2299699 - RNA, 19 nt, Artificial Sequence
  Description of Artificial Sequence: Synthetic oligonucleotide
  Antisense strand to SEQ ID NO: 2299698
aucuggcucauacucacag

SEQ ID NO: 2299700 - RNA, 19 nt, Artificial Sequence
  Description of Artificial Sequence: Synthetic oligonucleotide
  Sense strand starting at position 3797 of SEQ ID NO: 1884888
gaguaugagccagaugcua

SEQ ID NO: 2299701 - RNA, 19 nt, Artificial Sequence
  Description of Artificial Sequence: Synthetic oligonucleotide
  Antisense strand to SEQ ID NO: 2299700
uagcaucuggcucauacuc

SEQ ID NO: 2299702 - RNA, 19 nt, Artificial Sequence
  Description of Artificial Sequence: Synthetic oligonucleotide
  Sense strand starting at position 3850 of SEQ ID NO: 1884888
aaacuaguccuuugggaac

SEQ ID NO: 2299703 - RNA, 19 nt, Artificial Sequence
  Description of Artificial Sequence: Synthetic oligonucleotide
  Antisense strand to SEQ ID NO: 2299702
guucccaaaggacuaguuu

SEQ ID NO: 2299704 - RNA, 19 nt, Artificial Sequence
  Description of Artificial Sequence: Synthetic oligonucleotide
  Sense strand starting at position 509 of SEQ ID NO: 1884889
ggcucaugagcacauuauu

SEQ ID NO: 2299705 - RNA, 19 nt, Artificial Sequence
  Description of Artificial Sequence: Synthetic oligonucleotide
  Antisense strand to SEQ ID NO: 2299704
aauaaugugcucaugagcc

SEQ ID NO: 2299706 - RNA, 19 nt, Artificial Sequence
  Description of Artificial Sequence: Synthetic oligonucleotide
  Sense strand starting at position 520 of SEQ ID NO: 1884889
acauuauucuaagcguaag

SEQ ID NO: 2299707 - RNA, 19 nt, Artificial Sequence
  Description of Artificial Sequence: Synthetic oligonucleotide
  Antisense strand to SEQ ID NO: 2299706
cuuacgcuuagaauaaugu

SEQ ID NO: 2299708 - RNA, 19 nt, Artificial Sequence
  Description of Artificial Sequence: Synthetic oligonucleotide
  Sense strand starting at position 530 of SEQ ID NO: 1884889
aagcguaagugguagauaa

SEQ ID NO: 2299709 - RNA, 19 nt, Artificial Sequence
  Description of Artificial Sequence: Synthetic oligonucleotide
  Antisense strand to SEQ ID NO: 2299708
uuaucuaccacuuacgcuu

SEQ ID NO: 2299710 - RNA, 19 nt, Artificial Sequence
  Description of Artificial Sequence: Synthetic oligonucleotide
  Sense strand starting at position 537 of SEQ ID NO: 1884889
agugguagauaaccugauu

SEQ ID NO: 2299711 - RNA, 19 nt, Artificial Sequence
  Description of Artificial Sequence: Synthetic oligonucleotide
  Antisense strand to SEQ ID NO: 2299710
aaucagguuaucuaccacu

SEQ ID NO: 2299712 - RNA, 19 nt, Artificial Sequence
  Description of Artificial Sequence: Synthetic oligonucleotide
  Sense strand starting at position 1351 of SEQ ID NO: 1884889
gagcuagaggucugacuga

SEQ ID NO: 2299713 - RNA, 19 nt, Artificial Sequence
  Description of Artificial Sequence: Synthetic oligonucleotide
  Antisense strand to SEQ ID NO: 2299712
ucagucagaccucuagcuc

SEQ ID NO: 2299714 - RNA, 19 nt, Artificial Sequence
  Description of Artificial Sequence: Synthetic oligonucleotide
  Sense strand starting at position 1578 of SEQ ID NO: 1884889
ccgugcuggaaauaacuaa

SEQ ID NO: 2299715 - RNA, 19 nt, Artificial Sequence
  Description of Artificial Sequence: Synthetic oligonucleotide
  Antisense strand to SEQ ID NO: 2299714
uuaguuauuuccagcacgg

SEQ ID NO: 2299716 - RNA, 19 nt, Artificial Sequence
  Description of Artificial Sequence: Synthetic oligonucleotide
  Sense strand starting at position 2230 of SEQ ID NO: 1884889
gggucuugaucccagaaca

SEQ ID NO: 2299717 - RNA, 19 nt, Artificial Sequence
  Description of Artificial Sequence: Synthetic oligonucleotide
  Antisense strand to SEQ ID NO: 2299716
uguucugggaucaagaccc

SEQ ID NO: 2299718 - RNA, 19 nt, Artificial Sequence
  Description of Artificial Sequence: Synthetic oligonucleotide
  Sense strand starting at position 2741 of SEQ ID NO: 1884889
agcggcucucgacaagagu

SEQ ID NO: 2299719 - RNA, 19 nt, Artificial Sequence
  Description of Artificial Sequence: Synthetic oligonucleotide
  Antisense strand to SEQ ID NO: 2299718
acucuugucgagagccgcu

SEQ ID NO: 2299720 - RNA, 19 nt, Artificial Sequence
  Description of Artificial Sequence: Synthetic oligonucleotide
  Sense strand starting at position 2742 of SEQ ID NO: 1884889
gcggcucucgacaagaguu

SEQ ID NO: 2299721 - RNA, 19 nt, Artificial Sequence
  Description of Artificial Sequence: Synthetic oligonucleotide
  Antisense strand to SEQ ID NO: 2299720
aacucuugucgagagccgc

SEQ ID NO: 2299722 - RNA, 19 nt, Artificial Sequence
  Description of Artificial Sequence: Synthetic oligonucleotide
  Sense strand starting at position 2801 of SEQ ID NO: 1884889
caguguugcccgagggagu

SEQ ID NO: 2299723 - RNA, 19 nt, Artificial Sequence
  Description of Artificial Sequence: Synthetic oligonucleotide
  Antisense strand to SEQ ID NO: 2299722
acucccucgggcaacacug

SEQ ID NO: 2299724 - RNA, 19 nt, Artificial Sequence
  Description of Artificial Sequence: Synthetic oligonucleotide
  Sense strand starting at position 2802 of SEQ ID NO: 1884889
aguguugcccgagggaguu

SEQ ID NO: 2299725 - RNA, 19 nt, Artificial Sequence
  Description of Artificial Sequence: Synthetic oligonucleotide
  Antisense strand to SEQ ID NO: 2299724
aacucccucgggcaacacu

SEQ ID NO: 2299726 - RNA, 19 nt, Artificial Sequence
  Description of Artificial Sequence: Synthetic oligonucleotide
  Sense strand starting at position 3333 of SEQ ID NO: 1884889
gugggagcccucuguaauc

SEQ ID NO: 2299727 - RNA, 19 nt, Artificial Sequence
  Description of Artificial Sequence: Synthetic oligonucleotide
  Antisense strand to SEQ ID NO: 2299726
gauuacagagggcucccac

SEQ ID NO: 2299728 - RNA, 19 nt, Artificial Sequence
  Description of Artificial Sequence: Synthetic oligonucleotide
  Sense strand starting at position 3335 of SEQ ID NO: 1884889
gggagcccucuguaaucuu

SEQ ID NO: 2299729 - RNA, 19 nt, Artificial Sequence
  Description of Artificial Sequence: Synthetic oligonucleotide
  Antisense strand to SEQ ID NO: 2299728
aagauuacagagggcuccc

SEQ ID NO: 2299730 - RNA, 19 nt, Artificial Sequence
  Description of Artificial Sequence: Synthetic oligonucleotide
  Sense strand starting at position 3344 of SEQ ID NO: 1884889
cuguaaucuuuagggagag

SEQ ID NO: 2299731 - RNA, 19 nt, Artificial Sequence
  Description of Artificial Sequence: Synthetic oligonucleotide
  Antisense strand to SEQ ID NO: 2299730
cucucccuaaagauuacag

SEQ ID NO: 2299732 - RNA, 19 nt, Artificial Sequence
  Description of Artificial Sequence: Synthetic oligonucleotide
  Sense strand starting at position 3345 of SEQ ID NO: 1884889
uguaaucuuuagggagagu

SEQ ID NO: 2299733 - RNA, 19 nt, Artificial Sequence
  Description of Artificial Sequence: Synthetic oligonucleotide
  Antisense strand to SEQ ID NO: 2299732
acucucccuaaagauuaca

SEQ ID NO: 2299734 - RNA, 19 nt, Artificial Sequence
  Description of Artificial Sequence: Synthetic oligonucleotide
  Sense strand starting at position 3420 of SEQ ID NO: 1884889
uggguaggcuccucuacau

SEQ ID NO: 2299735 - RNA, 19 nt, Artificial Sequence
  Description of Artificial Sequence: Synthetic oligonucleotide
  Antisense strand to SEQ ID NO: 2299734
auguagaggagccuaccca

SEQ ID NO: 2299736 - RNA, 19 nt, Artificial Sequence
  Description of Artificial Sequence: Synthetic oligonucleotide
  Sense strand starting at position 3683 of SEQ ID NO: 1884889
ggccuuggcugguuccaaa

SEQ ID NO: 2299737 - RNA, 19 nt, Artificial Sequence
  Description of Artificial Sequence: Synthetic oligonucleotide
  Antisense strand to SEQ ID NO: 2299736
uuuggaaccagccaaggcc

SEQ ID NO: 2299738 - RNA, 19 nt, Artificial Sequence
  Description of Artificial Sequence: Synthetic oligonucleotide
  Sense strand starting at position 3694 of SEQ ID NO: 1884889
guuccaaacucuggucuca

SEQ ID NO: 2299739 - RNA, 19 nt, Artificial Sequence
  Description of Artificial Sequence: Synthetic oligonucleotide
  Antisense strand to SEQ ID NO: 2299738
ugagaccagaguuuggaac

SEQ ID NO: 2299740 - RNA, 19 nt, Artificial Sequence
  Description of Artificial Sequence: Synthetic oligonucleotide
  Sense strand starting at position 3819 of SEQ ID NO: 1884889
acagcagaucugugagagu

SEQ ID NO: 2299741 - RNA, 19 nt, Artificial Sequence
  Description of Artificial Sequence: Synthetic oligonucleotide
  Antisense strand to SEQ ID NO: 2299740
acucucacagaucugcugu

SEQ ID NO: 2299742 - RNA, 19 nt, Artificial Sequence
  Description of Artificial Sequence: Synthetic oligonucleotide
  Sense strand starting at position 3822 of SEQ ID NO: 1884889
gcagaucugugagagugca

SEQ ID NO: 2299743 - RNA, 19 nt, Artificial Sequence
  Description of Artificial Sequence: Synthetic oligonucleotide
  Antisense strand to SEQ ID NO: 2299742
ugcacucucacagaucugc

SEQ ID NO: 2299744 - RNA, 19 nt, Artificial Sequence
  Description of Artificial Sequence: Synthetic oligonucleotide
  Sense strand starting at position 90 of SEQ ID NO: 1884890
ggagauguuucaguugagg

SEQ ID NO: 2299745 - RNA, 19 nt, Artificial Sequence
  Description of Artificial Sequence: Synthetic oligonucleotide
  Antisense strand to SEQ ID NO: 2299744
ccucaacugaaacaucucc

SEQ ID NO: 2299746 - RNA, 19 nt, Artificial Sequence
  Description of Artificial Sequence: Synthetic oligonucleotide
  Sense strand starting at position 125 of SEQ ID NO: 1884890
guaggagaguggagaauua

SEQ ID NO: 2299747 - RNA, 19 nt, Artificial Sequence
  Description of Artificial Sequence: Synthetic oligonucleotide
  Antisense strand to SEQ ID NO: 2299746
uaauucuccacucuccuac

SEQ ID NO: 2299748 - RNA, 19 nt, Artificial Sequence
  Description of Artificial Sequence: Synthetic oligonucleotide
  Sense strand starting at position 150 of SEQ ID NO: 1884890
ugauauuacugauccagug

SEQ ID NO: 2299749 - RNA, 19 nt, Artificial Sequence
  Description of Artificial Sequence: Synthetic oligonucleotide
  Antisense strand to SEQ ID NO: 2299748
cacuggaucaguaauauca

SEQ ID NO: 2299750 - RNA, 19 nt, Artificial Sequence
  Description of Artificial Sequence: Synthetic oligonucleotide
  Sense strand starting at position 281 of SEQ ID NO: 1884890
uuuggaaguuuccuacaaa

SEQ ID NO: 2299751 - RNA, 19 nt, Artificial Sequence
  Description of Artificial Sequence: Synthetic oligonucleotide
  Antisense strand to SEQ ID NO: 2299750
uuuguaggaaacuuccaaa

SEQ ID NO: 2299752 - RNA, 19 nt, Artificial Sequence
  Description of Artificial Sequence: Synthetic oligonucleotide
  Sense strand starting at position 376 of SEQ ID NO: 1884890
agguauaaauugcuaauga

SEQ ID NO: 2299753 - RNA, 19 nt, Artificial Sequence
  Description of Artificial Sequence: Synthetic oligonucleotide
  Antisense strand to SEQ ID NO: 2299752
ucauuagcaauuuauaccu

SEQ ID NO: 2299754 - RNA, 19 nt, Artificial Sequence
  Description of Artificial Sequence: Synthetic oligonucleotide
  Sense strand starting at position 474 of SEQ ID NO: 1884890
auaauuauaccugguguga

SEQ ID NO: 2299755 - RNA, 19 nt, Artificial Sequence
  Description of Artificial Sequence: Synthetic oligonucleotide
  Antisense strand to SEQ ID NO: 2299754
ucacaccagguauaauuau

SEQ ID NO: 2299756 - RNA, 19 nt, Artificial Sequence
  Description of Artificial Sequence: Synthetic oligonucleotide
  Sense strand starting at position 506 of SEQ ID NO: 1884890
guguucuaagaugaucuuu

SEQ ID NO: 2299757 - RNA, 19 nt, Artificial Sequence
  Description of Artificial Sequence: Synthetic oligonucleotide
  Antisense strand to SEQ ID NO: 2299756
aaagaucaucuuagaacac

SEQ ID NO: 2299758 - RNA, 19 nt, Artificial Sequence
  Description of Artificial Sequence: Synthetic oligonucleotide
  Sense strand starting at position 508 of SEQ ID NO: 1884890
guucuaagaugaucuuuga

SEQ ID NO: 2299759 - RNA, 19 nt, Artificial Sequence
  Description of Artificial Sequence: Synthetic oligonucleotide
  Antisense strand to SEQ ID NO: 2299758
ucaaagaucaucuuagaac

SEQ ID NO: 2299760 - RNA, 19 nt, Artificial Sequence
  Description of Artificial Sequence: Synthetic oligonucleotide
  Sense strand starting at position 523 of SEQ ID NO: 1884890
uugauaaacgccuacuuga

SEQ ID NO: 2299761 - RNA, 19 nt, Artificial Sequence
  Description of Artificial Sequence: Synthetic oligonucleotide
  Antisense strand to SEQ ID NO: 2299760
ucaaguaggcguuuaucaa

SEQ ID NO: 2299762 - RNA, 19 nt, Artificial Sequence
  Description of Artificial Sequence: Synthetic oligonucleotide
  Sense strand starting at position 533 of SEQ ID NO: 1884890
ccuacuugaguuuaagauu

SEQ ID NO: 2299763 - RNA, 19 nt, Artificial Sequence
  Description of Artificial Sequence: Synthetic oligonucleotide
  Antisense strand to SEQ ID NO: 2299762
aaucuuaaacucaaguagg

SEQ ID NO: 2299764 - RNA, 19 nt, Artificial Sequence
  Description of Artificial Sequence: Synthetic oligonucleotide
  Sense strand starting at position 769 of SEQ ID NO: 1884890
ugccuaaagcuugauacau

SEQ ID NO: 2299765 - RNA, 19 nt, Artificial Sequence
  Description of Artificial Sequence: Synthetic oligonucleotide
  Antisense strand to SEQ ID NO: 2299764
auguaucaagcuuuaggca

SEQ ID NO: 2299766 - RNA, 19 nt, Artificial Sequence
  Description of Artificial Sequence: Synthetic oligonucleotide
  Sense strand starting at position 819 of SEQ ID NO: 1884890
gaagcaggugacuaaguuu

SEQ ID NO: 2299767 - RNA, 19 nt, Artificial Sequence
  Description of Artificial Sequence: Synthetic oligonucleotide
  Antisense strand to SEQ ID NO: 2299766
aaacuuagucaccugcuuc

SEQ ID NO: 2299768 - RNA, 19 nt, Artificial Sequence
  Description of Artificial Sequence: Synthetic oligonucleotide
  Sense strand starting at position 905 of SEQ ID NO: 1884890
aaagacuaguuauugguau

SEQ ID NO: 2299769 - RNA, 19 nt, Artificial Sequence
  Description of Artificial Sequence: Synthetic oligonucleotide
  Antisense strand to SEQ ID NO: 2299768
auaccaauaacuagucuuu

SEQ ID NO: 2299770 - RNA, 19 nt, Artificial Sequence
  Description of Artificial Sequence: Synthetic oligonucleotide
  Sense strand starting at position 974 of SEQ ID NO: 1884890
agcagaaauuguuuacuua

SEQ ID NO: 2299771 - RNA, 19 nt, Artificial Sequence
  Description of Artificial Sequence: Synthetic oligonucleotide
  Antisense strand to SEQ ID NO: 2299770
uaaguaaacaauuucugcu

SEQ ID NO: 2299772 - RNA, 19 nt, Artificial Sequence
  Description of Artificial Sequence: Synthetic oligonucleotide
  Sense strand starting at position 975 of SEQ ID NO: 1884890
gcagaaauuguuuacuuac

SEQ ID NO: 2299773 - RNA, 19 nt, Artificial Sequence
  Description of Artificial Sequence: Synthetic oligonucleotide
  Antisense strand to SEQ ID NO: 2299772
guaaguaaacaauuucugc

SEQ ID NO: 2299774 - RNA, 19 nt, Artificial Sequence
  Description of Artificial Sequence: Synthetic oligonucleotide
  Sense strand starting at position 1244 of SEQ ID NO: 1884890
agaccuaacguuugaacau

SEQ ID NO: 2299775 - RNA, 19 nt, Artificial Sequence
  Description of Artificial Sequence: Synthetic oligonucleotide
  Antisense strand to SEQ ID NO: 2299774
auguucaaacguuaggucu

SEQ ID NO: 2299776 - RNA, 19 nt, Artificial Sequence
  Description of Artificial Sequence: Synthetic oligonucleotide
  Sense strand starting at position 1288 of SEQ ID NO: 1884890
ccacuuuccugugcuauuu

SEQ ID NO: 2299777 - RNA, 19 nt, Artificial Sequence
  Description of Artificial Sequence: Synthetic oligonucleotide
  Antisense strand to SEQ ID NO: 2299776
aaauagcacaggaaagugg

SEQ ID NO: 2299778 - RNA, 19 nt, Artificial Sequence
  Description of Artificial Sequence: Synthetic oligonucleotide
  Sense strand starting at position 1294 of SEQ ID NO: 1884890
uccugugcuauuuggcaga

SEQ ID NO: 2299779 - RNA, 19 nt, Artificial Sequence
  Description of Artificial Sequence: Synthetic oligonucleotide
  Antisense strand to SEQ ID NO: 2299778
ucugccaaauagcacagga

SEQ ID NO: 2299780 - RNA, 19 nt, Artificial Sequence
  Description of Artificial Sequence: Synthetic oligonucleotide
  Sense strand starting at position 1310 of SEQ ID NO: 1884890
agaacuguguuacuaauuc

SEQ ID NO: 2299781 - RNA, 19 nt, Artificial Sequence
  Description of Artificial Sequence: Synthetic oligonucleotide
  Antisense strand to SEQ ID NO: 2299780
gaauuaguaacacaguucu

SEQ ID NO: 2299782 - RNA, 19 nt, Artificial Sequence
  Description of Artificial Sequence: Synthetic oligonucleotide
  Sense strand starting at position 1947 of SEQ ID NO: 1884890
gccuucucugacguuugua

SEQ ID NO: 2299783 - RNA, 19 nt, Artificial Sequence
  Description of Artificial Sequence: Synthetic oligonucleotide
  Antisense strand to SEQ ID NO: 2299782
uacaaacgucagagaaggc

SEQ ID NO: 2299784 - RNA, 19 nt, Artificial Sequence
  Description of Artificial Sequence: Synthetic oligonucleotide
  Sense strand starting at position 2039 of SEQ ID NO: 1884890
ccaugauuuccgcagccca

SEQ ID NO: 2299785 - RNA, 19 nt, Artificial Sequence
  Description of Artificial Sequence: Synthetic oligonucleotide
  Antisense strand to SEQ ID NO: 2299784
ugggcugcggaaaucaugg

SEQ ID NO: 2299786 - RNA, 19 nt, Artificial Sequence
  Description of Artificial Sequence: Synthetic oligonucleotide
  Sense strand starting at position 2578 of SEQ ID NO: 1884890
cguauagggaaauguaaac

SEQ ID NO: 2299787 - RNA, 19 nt, Artificial Sequence
  Description of Artificial Sequence: Synthetic oligonucleotide
  Antisense strand to SEQ ID NO: 2299786
guuuacauuucccuauacg

SEQ ID NO: 2299788 - RNA, 19 nt, Artificial Sequence
  Description of Artificial Sequence: Synthetic oligonucleotide
  Sense strand starting at position 2677 of SEQ ID NO: 1884890
aaaugaguagugugaauug

SEQ ID NO: 2299789 - RNA, 19 nt, Artificial Sequence
  Description of Artificial Sequence: Synthetic oligonucleotide
  Antisense strand to SEQ ID NO: 2299788
caauucacacuacucauuu

SEQ ID NO: 2299790 - RNA, 19 nt, Artificial Sequence
  Description of Artificial Sequence: Synthetic oligonucleotide
  Sense strand starting at position 2706 of SEQ ID NO: 1884890
guuguuguucuaucgcuua

SEQ ID NO: 2299791 - RNA, 19 nt, Artificial Sequence
  Description of Artificial Sequence: Synthetic oligonucleotide
  Antisense strand to SEQ ID NO: 2299790
uaagcgauagaacaacaac

SEQ ID NO: 2299792 - RNA, 19 nt, Artificial Sequence
  Description of Artificial Sequence: Synthetic oligonucleotide
  Sense strand starting at position 2769 of SEQ ID NO: 1884890
auuccuaaauuuggauaga

SEQ ID NO: 2299793 - RNA, 19 nt, Artificial Sequence
  Description of Artificial Sequence: Synthetic oligonucleotide
  Antisense strand to SEQ ID NO: 2299792
ucuauccaaauuuaggaau

SEQ ID NO: 2299794 - RNA, 19 nt, Artificial Sequence
  Description of Artificial Sequence: Synthetic oligonucleotide
  Sense strand starting at position 2954 of SEQ ID NO: 1884890
gguugcauuaucuagagac

SEQ ID NO: 2299795 - RNA, 19 nt, Artificial Sequence
  Description of Artificial Sequence: Synthetic oligonucleotide
  Antisense strand to SEQ ID NO: 2299794
gucucuagauaaugcaacc

SEQ ID NO: 2299796 - RNA, 19 nt, Artificial Sequence
  Description of Artificial Sequence: Synthetic oligonucleotide
  Sense strand starting at position 2956 of SEQ ID NO: 1884890
uugcauuaucuagagacuc

SEQ ID NO: 2299797 - RNA, 19 nt, Artificial Sequence
  Description of Artificial Sequence: Synthetic oligonucleotide
  Antisense strand to SEQ ID NO: 2299796
gagucucuagauaaugcaa

SEQ ID NO: 2299798 - RNA, 19 nt, Artificial Sequence
  Description of Artificial Sequence: Synthetic oligonucleotide
  Sense strand starting at position 3154 of SEQ ID NO: 1884890
uuugucauacagugacaaa

SEQ ID NO: 2299799 - RNA, 19 nt, Artificial Sequence
  Description of Artificial Sequence: Synthetic oligonucleotide
  Antisense strand to SEQ ID NO: 2299798
uuugucacuguaugacaaa

SEQ ID NO: 2299800 - RNA, 19 nt, Artificial Sequence
  Description of Artificial Sequence: Synthetic oligonucleotide
  Sense strand starting at position 3165 of SEQ ID NO: 1884890
gugacaaacccaugugaca

SEQ ID NO: 2299801 - RNA, 19 nt, Artificial Sequence
  Description of Artificial Sequence: Synthetic oligonucleotide
  Antisense strand to SEQ ID NO: 2299800
ugucacauggguuugucac

SEQ ID NO: 2299802 - RNA, 19 nt, Artificial Sequence
  Description of Artificial Sequence: Synthetic oligonucleotide
  Sense strand starting at position 3238 of SEQ ID NO: 1884890
gaugcauggugaccaauca

SEQ ID NO: 2299803 - RNA, 19 nt, Artificial Sequence
  Description of Artificial Sequence: Synthetic oligonucleotide
  Antisense strand to SEQ ID NO: 2299802
ugauuggucaccaugcauc

SEQ ID NO: 2299804 - RNA, 19 nt, Artificial Sequence
  Description of Artificial Sequence: Synthetic oligonucleotide
  Sense strand starting at position 3239 of SEQ ID NO: 1884890
augcauggugaccaaucaa

SEQ ID NO: 2299805 - RNA, 19 nt, Artificial Sequence
  Description of Artificial Sequence: Synthetic oligonucleotide
  Antisense strand to SEQ ID NO: 2299804
uugauuggucaccaugcau

SEQ ID NO: 2299806 - RNA, 19 nt, Artificial Sequence
  Description of Artificial Sequence: Synthetic oligonucleotide
  Sense strand starting at position 3349 of SEQ ID NO: 1884890
ggaaguuucuacuuuauac

SEQ ID NO: 2299807 - RNA, 19 nt, Artificial Sequence
  Description of Artificial Sequence: Synthetic oligonucleotide
  Antisense strand to SEQ ID NO: 2299806
guauaaaguagaaacuucc

SEQ ID NO: 2299808 - RNA, 19 nt, Artificial Sequence
  Description of Artificial Sequence: Synthetic oligonucleotide
  Sense strand starting at position 3396 of SEQ ID NO: 1884890
acagauaaguacgcugaaa

SEQ ID NO: 2299809 - RNA, 19 nt, Artificial Sequence
  Description of Artificial Sequence: Synthetic oligonucleotide
  Antisense strand to SEQ ID NO: 2299808
uuucagcguacuuaucugu

SEQ ID NO: 2299810 - RNA, 19 nt, Artificial Sequence
  Description of Artificial Sequence: Synthetic oligonucleotide
  Sense strand starting at position 3398 of SEQ ID NO: 1884890
agauaaguacgcugaaaga

SEQ ID NO: 2299811 - RNA, 19 nt, Artificial Sequence
  Description of Artificial Sequence: Synthetic oligonucleotide
  Antisense strand to SEQ ID NO: 2299810
ucuuucagcguacuuaucu

SEQ ID NO: 2299812 - RNA, 19 nt, Artificial Sequence
  Description of Artificial Sequence: Synthetic oligonucleotide
  Sense strand starting at position 3450 of SEQ ID NO: 1884890
aacugugagaagugaaguu

SEQ ID NO: 2299813 - RNA, 19 nt, Artificial Sequence
  Description of Artificial Sequence: Synthetic oligonucleotide
  Antisense strand to SEQ ID NO: 2299812
aacuucacuucucacaguu

SEQ ID NO: 2299814 - RNA, 19 nt, Artificial Sequence
  Description of Artificial Sequence: Synthetic oligonucleotide
  Sense strand starting at position 3457 of SEQ ID NO: 1884890
agaagugaaguuuaugcau

SEQ ID NO: 2299815 - RNA, 19 nt, Artificial Sequence
  Description of Artificial Sequence: Synthetic oligonucleotide
  Antisense strand to SEQ ID NO: 2299814
augcauaaacuucacuucu

SEQ ID NO: 2299816 - RNA, 19 nt, Artificial Sequence
  Description of Artificial Sequence: Synthetic oligonucleotide
  Sense strand starting at position 3463 of SEQ ID NO: 1884890
gaaguuuaugcauauuaga

SEQ ID NO: 2299817 - RNA, 19 nt, Artificial Sequence
  Description of Artificial Sequence: Synthetic oligonucleotide
  Antisense strand to SEQ ID NO: 2299816
ucuaauaugcauaaacuuc

SEQ ID NO: 2299818 - RNA, 19 nt, Artificial Sequence
  Description of Artificial Sequence: Synthetic oligonucleotide
  Sense strand starting at position 3613 of SEQ ID NO: 1884890
aucugaagucaaggaguuu

SEQ ID NO: 2299819 - RNA, 19 nt, Artificial Sequence
  Description of Artificial Sequence: Synthetic oligonucleotide
  Antisense strand to SEQ ID NO: 2299818
aaacuccuugacuucagau

SEQ ID NO: 2299820 - RNA, 19 nt, Artificial Sequence
  Description of Artificial Sequence: Synthetic oligonucleotide
  Sense strand starting at position 3798 of SEQ ID NO: 1884890
cacuccagccuggagauau

SEQ ID NO: 2299821 - RNA, 19 nt, Artificial Sequence
  Description of Artificial Sequence: Synthetic oligonucleotide
  Antisense strand to SEQ ID NO: 2299820
auaucuccaggcuggagug

SEQ ID NO: 2299822 - RNA, 19 nt, Artificial Sequence
  Description of Artificial Sequence: Synthetic oligonucleotide
  Sense strand starting at position 3922 of SEQ ID NO: 1884890
guguauagaccuuauucua

SEQ ID NO: 2299823 - RNA, 19 nt, Artificial Sequence
  Description of Artificial Sequence: Synthetic oligonucleotide
  Antisense strand to SEQ ID NO: 2299822
uagaauaaggucuauacac

SEQ ID NO: 2299824 - RNA, 19 nt, Artificial Sequence
  Description of Artificial Sequence: Synthetic oligonucleotide
  Sense strand starting at position 151 of SEQ ID NO: 1884891
aauggacgucaugagguaa

SEQ ID NO: 2299825 - RNA, 19 nt, Artificial Sequence
  Description of Artificial Sequence: Synthetic oligonucleotide
  Antisense strand to SEQ ID NO: 2299824
uuaccucaugacguccauu

SEQ ID NO: 2299826 - RNA, 19 nt, Artificial Sequence
  Description of Artificial Sequence: Synthetic oligonucleotide
  Sense strand starting at position 193 of SEQ ID NO: 1884891
aagugccaucuggauagau

SEQ ID NO: 2299827 - RNA, 19 nt, Artificial Sequence
  Description of Artificial Sequence: Synthetic oligonucleotide
  Antisense strand to SEQ ID NO: 2299826
aucuauccagauggcacuu

SEQ ID NO: 2299828 - RNA, 19 nt, Artificial Sequence
  Description of Artificial Sequence: Synthetic oligonucleotide
  Sense strand starting at position 203 of SEQ ID NO: 1884891
uggauagaugggugacacu

SEQ ID NO: 2299829 - RNA, 19 nt, Artificial Sequence
  Description of Artificial Sequence: Synthetic oligonucleotide
  Antisense strand to SEQ ID NO: 2299828
agugucacccaucuaucca

SEQ ID NO: 2299830 - RNA, 19 nt, Artificial Sequence
  Description of Artificial Sequence: Synthetic oligonucleotide
  Sense strand starting at position 247 of SEQ ID NO: 1884891
ugggaaguuugguuugauu

SEQ ID NO: 2299831 - RNA, 19 nt, Artificial Sequence
  Description of Artificial Sequence: Synthetic oligonucleotide
  Antisense strand to SEQ ID NO: 2299830
aaucaaaccaaacuuccca

SEQ ID NO: 2299832 - RNA, 19 nt, Artificial Sequence
  Description of Artificial Sequence: Synthetic oligonucleotide
  Sense strand starting at position 255 of SEQ ID NO: 1884891
uugguuugauuugacaaac

SEQ ID NO: 2299833 - RNA, 19 nt, Artificial Sequence
  Description of Artificial Sequence: Synthetic oligonucleotide
  Antisense strand to SEQ ID NO: 2299832
guuugucaaaucaaaccaa

SEQ ID NO: 2299834 - RNA, 19 nt, Artificial Sequence
  Description of Artificial Sequence: Synthetic oligonucleotide
  Sense strand starting at position 330 of SEQ ID NO: 1884891
auaagauucugugucucag

SEQ ID NO: 2299835 - RNA, 19 nt, Artificial Sequence
  Description of Artificial Sequence: Synthetic oligonucleotide
  Antisense strand to SEQ ID NO: 2299834
cugagacacagaaucuuau

SEQ ID NO: 2299836 - RNA, 19 nt, Artificial Sequence
  Description of Artificial Sequence: Synthetic oligonucleotide
  Sense strand starting at position 339 of SEQ ID NO: 1884891
ugugucucagccuaauuaa

SEQ ID NO: 2299837 - RNA, 19 nt, Artificial Sequence
  Description of Artificial Sequence: Synthetic oligonucleotide
  Antisense strand to SEQ ID NO: 2299836
uuaauuaggcugagacaca

SEQ ID NO: 2299838 - RNA, 19 nt, Artificial Sequence
  Description of Artificial Sequence: Synthetic oligonucleotide
  Sense strand starting at position 769 of SEQ ID NO: 1884891
aaaugauugccaugguauu

SEQ ID NO: 2299839 - RNA, 19 nt, Artificial Sequence
  Description of Artificial Sequence: Synthetic oligonucleotide
  Antisense strand to SEQ ID NO: 2299838
aauaccauggcaaucauuu

SEQ ID NO: 2299840 - RNA, 19 nt, Artificial Sequence
  Description of Artificial Sequence: Synthetic oligonucleotide
  Sense strand starting at position 869 of SEQ ID NO: 1884891
ccugucuuugcucagaaac

SEQ ID NO: 2299841 - RNA, 19 nt, Artificial Sequence
  Description of Artificial Sequence: Synthetic oligonucleotide
  Antisense strand to SEQ ID NO: 2299840
guuucugagcaaagacagg

SEQ ID NO: 2299842 - RNA, 19 nt, Artificial Sequence
  Description of Artificial Sequence: Synthetic oligonucleotide
  Sense strand starting at position 1039 of SEQ ID NO: 1884891
ggcaguaaagccuaguaaa

SEQ ID NO: 2299843 - RNA, 19 nt, Artificial Sequence
  Description of Artificial Sequence: Synthetic oligonucleotide
  Antisense strand to SEQ ID NO: 2299842
uuuacuaggcuuuacugcc

SEQ ID NO: 2299844 - RNA, 19 nt, Artificial Sequence
  Description of Artificial Sequence: Synthetic oligonucleotide
  Sense strand starting at position 1106 of SEQ ID NO: 1884891
augucaaccugaucucaga

SEQ ID NO: 2299845 - RNA, 19 nt, Artificial Sequence
  Description of Artificial Sequence: Synthetic oligonucleotide
  Antisense strand to SEQ ID NO: 2299844
ucugagaucagguugacau

SEQ ID NO: 2299846 - RNA, 19 nt, Artificial Sequence
  Description of Artificial Sequence: Synthetic oligonucleotide
  Sense strand starting at position 1235 of SEQ ID NO: 1884891
guuggaagcucugugagga

SEQ ID NO: 2299847 - RNA, 19 nt, Artificial Sequence
  Description of Artificial Sequence: Synthetic oligonucleotide
  Antisense strand to SEQ ID NO: 2299846
uccucacagagcuuccaac

SEQ ID NO: 2299848 - RNA, 19 nt, Artificial Sequence
  Description of Artificial Sequence: Synthetic oligonucleotide
  Sense strand starting at position 1250 of SEQ ID NO: 1884891
aggacagaagguugucaua

SEQ ID NO: 2299849 - RNA, 19 nt, Artificial Sequence
  Description of Artificial Sequence: Synthetic oligonucleotide
  Antisense strand to SEQ ID NO: 2299848
uaugacaaccuucuguccu

SEQ ID NO: 2299850 - RNA, 19 nt, Artificial Sequence
  Description of Artificial Sequence: Synthetic oligonucleotide
  Sense strand starting at position 1252 of SEQ ID NO: 1884891
gacagaagguugucauacu

SEQ ID NO: 2299851 - RNA, 19 nt, Artificial Sequence
  Description of Artificial Sequence: Synthetic oligonucleotide
  Antisense strand to SEQ ID NO: 2299850
aguaugacaaccuucuguc

SEQ ID NO: 2299852 - RNA, 19 nt, Artificial Sequence
  Description of Artificial Sequence: Synthetic oligonucleotide
  Sense strand starting at position 2001 of SEQ ID NO: 1884891
ugagauuccucaguuccca

SEQ ID NO: 2299853 - RNA, 19 nt, Artificial Sequence
  Description of Artificial Sequence: Synthetic oligonucleotide
  Antisense strand to SEQ ID NO: 2299852
ugggaacugaggaaucuca

SEQ ID NO: 2299854 - RNA, 19 nt, Artificial Sequence
  Description of Artificial Sequence: Synthetic oligonucleotide
  Sense strand starting at position 2039 of SEQ ID NO: 1884891
ucagaauacugagcucuga

SEQ ID NO: 2299855 - RNA, 19 nt, Artificial Sequence
  Description of Artificial Sequence: Synthetic oligonucleotide
  Antisense strand to SEQ ID NO: 2299854
ucagagcucaguauucuga

SEQ ID NO: 2299856 - RNA, 19 nt, Artificial Sequence
  Description of Artificial Sequence: Synthetic oligonucleotide
  Sense strand starting at position 2049 of SEQ ID NO: 1884891
gagcucugacauuggguga

SEQ ID NO: 2299857 - RNA, 19 nt, Artificial Sequence
  Description of Artificial Sequence: Synthetic oligonucleotide
  Antisense strand to SEQ ID NO: 2299856
ucacccaaugucagagcuc

SEQ ID NO: 2299858 - RNA, 19 nt, Artificial Sequence
  Description of Artificial Sequence: Synthetic oligonucleotide
  Sense strand starting at position 2052 of SEQ ID NO: 1884891
cucugacauugggugagau

SEQ ID NO: 2299859 - RNA, 19 nt, Artificial Sequence
  Description of Artificial Sequence: Synthetic oligonucleotide
  Antisense strand to SEQ ID NO: 2299858
aucucacccaaugucagag

SEQ ID NO: 2299860 - RNA, 19 nt, Artificial Sequence
  Description of Artificial Sequence: Synthetic oligonucleotide
  Sense strand starting at position 2053 of SEQ ID NO: 1884891
ucugacauugggugagaua

SEQ ID NO: 2299861 - RNA, 19 nt, Artificial Sequence
  Description of Artificial Sequence: Synthetic oligonucleotide
  Antisense strand to SEQ ID NO: 2299860
uaucucacccaaugucaga

SEQ ID NO: 2299862 - RNA, 19 nt, Artificial Sequence
  Description of Artificial Sequence: Synthetic oligonucleotide
  Sense strand starting at position 2102 of SEQ ID NO: 1884891
agaugaggcguuuauagau

SEQ ID NO: 2299863 - RNA, 19 nt, Artificial Sequence
  Description of Artificial Sequence: Synthetic oligonucleotide
  Antisense strand to SEQ ID NO: 2299862
aucuauaaacgccucaucu

SEQ ID NO: 2299864 - RNA, 19 nt, Artificial Sequence
  Description of Artificial Sequence: Synthetic oligonucleotide
  Sense strand starting at position 2108 of SEQ ID NO: 1884891
ggcguuuauagauaaagac

SEQ ID NO: 2299865 - RNA, 19 nt, Artificial Sequence
  Description of Artificial Sequence: Synthetic oligonucleotide
  Antisense strand to SEQ ID NO: 2299864
gucuuuaucuauaaacgcc

SEQ ID NO: 2299866 - RNA, 19 nt, Artificial Sequence
  Description of Artificial Sequence: Synthetic oligonucleotide
  Sense strand starting at position 2229 of SEQ ID NO: 1884891
caggaauucggagagcagu

SEQ ID NO: 2299867 - RNA, 19 nt, Artificial Sequence
  Description of Artificial Sequence: Synthetic oligonucleotide
  Antisense strand to SEQ ID NO: 2299866
acugcucuccgaauuccug

SEQ ID NO: 2299868 - RNA, 19 nt, Artificial Sequence
  Description of Artificial Sequence: Synthetic oligonucleotide
  Sense strand starting at position 2265 of SEQ ID NO: 1884891
gcuccauguccagauugga

SEQ ID NO: 2299869 - RNA, 19 nt, Artificial Sequence
  Description of Artificial Sequence: Synthetic oligonucleotide
  Antisense strand to SEQ ID NO: 2299868
uccaaucuggacauggagc

SEQ ID NO: 2299870 - RNA, 19 nt, Artificial Sequence
  Description of Artificial Sequence: Synthetic oligonucleotide
  Sense strand starting at position 2396 of SEQ ID NO: 1884891
guuugugcaguucugugau

SEQ ID NO: 2299871 - RNA, 19 nt, Artificial Sequence
  Description of Artificial Sequence: Synthetic oligonucleotide
  Antisense strand to SEQ ID NO: 2299870
aucacagaacugcacaaac

SEQ ID NO: 2299872 - RNA, 19 nt, Artificial Sequence
  Description of Artificial Sequence: Synthetic oligonucleotide
  Sense strand starting at position 2429 of SEQ ID NO: 1884891
uugguuaaauuagcagaga

SEQ ID NO: 2299873 - RNA, 19 nt, Artificial Sequence
  Description of Artificial Sequence: Synthetic oligonucleotide
  Antisense strand to SEQ ID NO: 2299872
ucucugcuaauuuaaccaa

SEQ ID NO: 2299874 - RNA, 19 nt, Artificial Sequence
  Description of Artificial Sequence: Synthetic oligonucleotide
  Sense strand starting at position 2448 of SEQ ID NO: 1884891
ggagaacucauguaucugu

SEQ ID NO: 2299875 - RNA, 19 nt, Artificial Sequence
  Description of Artificial Sequence: Synthetic oligonucleotide
  Antisense strand to SEQ ID NO: 2299874
acagauacaugaguucucc

SEQ ID NO: 2299876 - RNA, 19 nt, Artificial Sequence
  Description of Artificial Sequence: Synthetic oligonucleotide
  Sense strand starting at position 2504 of SEQ ID NO: 1884891
aggauucuacgaugaagca

SEQ ID NO: 2299877 - RNA, 19 nt, Artificial Sequence
  Description of Artificial Sequence: Synthetic oligonucleotide
  Antisense strand to SEQ ID NO: 2299876
ugcuucaucguagaauccu

SEQ ID NO: 2299878 - RNA, 19 nt, Artificial Sequence
  Description of Artificial Sequence: Synthetic oligonucleotide
  Sense strand starting at position 2555 of SEQ ID NO: 1884891
ucagucugccugggaauaa

SEQ ID NO: 2299879 - RNA, 19 nt, Artificial Sequence
  Description of Artificial Sequence: Synthetic oligonucleotide
  Antisense strand to SEQ ID NO: 2299878
uuauucccaggcagacuga

SEQ ID NO: 2299880 - RNA, 19 nt, Artificial Sequence
  Description of Artificial Sequence: Synthetic oligonucleotide
  Sense strand starting at position 2610 of SEQ ID NO: 1884891
aggacucccugagugauga

SEQ ID NO: 2299881 - RNA, 19 nt, Artificial Sequence
  Description of Artificial Sequence: Synthetic oligonucleotide
  Antisense strand to SEQ ID NO: 2299880
ucaucacucagggaguccu

SEQ ID NO: 2299882 - RNA, 19 nt, Artificial Sequence
  Description of Artificial Sequence: Synthetic oligonucleotide
  Sense strand starting at position 2715 of SEQ ID NO: 1884891
ccauuuagauauuaggauu

SEQ ID NO: 2299883 - RNA, 19 nt, Artificial Sequence
  Description of Artificial Sequence: Synthetic oligonucleotide
  Antisense strand to SEQ ID NO: 2299882
aauccuaauaucuaaaugg

SEQ ID NO: 2299884 - RNA, 19 nt, Artificial Sequence
  Description of Artificial Sequence: Synthetic oligonucleotide
  Sense strand starting at position 2782 of SEQ ID NO: 1884891
ugucacuucuuaccaugau

SEQ ID NO: 2299885 - RNA, 19 nt, Artificial Sequence
  Description of Artificial Sequence: Synthetic oligonucleotide
  Antisense strand to SEQ ID NO: 2299884
aucaugguaagaagugaca

SEQ ID NO: 2299886 - RNA, 19 nt, Artificial Sequence
  Description of Artificial Sequence: Synthetic oligonucleotide
  Sense strand starting at position 3098 of SEQ ID NO: 1884891
acuggaagcccuggagaau

SEQ ID NO: 2299887 - RNA, 19 nt, Artificial Sequence
  Description of Artificial Sequence: Synthetic oligonucleotide
  Antisense strand to SEQ ID NO: 2299886
auucuccagggcuuccagu

SEQ ID NO: 2299888 - RNA, 19 nt, Artificial Sequence
  Description of Artificial Sequence: Synthetic oligonucleotide
  Sense strand starting at position 3304 of SEQ ID NO: 1884891
cgugccaguccucuacuuu

SEQ ID NO: 2299889 - RNA, 19 nt, Artificial Sequence
  Description of Artificial Sequence: Synthetic oligonucleotide
  Antisense strand to SEQ ID NO: 2299888
aaaguagaggacuggcacg

SEQ ID NO: 2299890 - RNA, 19 nt, Artificial Sequence
  Description of Artificial Sequence: Synthetic oligonucleotide
  Sense strand starting at position 3759 of SEQ ID NO: 1884891
cccucagauguuuauuaug

SEQ ID NO: 2299891 - RNA, 19 nt, Artificial Sequence
  Description of Artificial Sequence: Synthetic oligonucleotide
  Antisense strand to SEQ ID NO: 2299890
cauaauaaacaucugaggg

SEQ ID NO: 2299892 - RNA, 19 nt, Artificial Sequence
  Description of Artificial Sequence: Synthetic oligonucleotide
  Sense strand starting at position 3765 of SEQ ID NO: 1884891
gauguuuauuaugugaaug

SEQ ID NO: 2299893 - RNA, 19 nt, Artificial Sequence
  Description of Artificial Sequence: Synthetic oligonucleotide
  Antisense strand to SEQ ID NO: 2299892
cauucacauaauaaacauc

SEQ ID NO: 2299894 - RNA, 19 nt, Artificial Sequence
  Description of Artificial Sequence: Synthetic oligonucleotide
  Sense strand starting at position 3770 of SEQ ID NO: 1884891
uuauuaugugaaugaguga

SEQ ID NO: 2299895 - RNA, 19 nt, Artificial Sequence
  Description of Artificial Sequence: Synthetic oligonucleotide
  Antisense strand to SEQ ID NO: 2299894
ucacucauucacauaauaa

SEQ ID NO: 2299896 - RNA, 19 nt, Artificial Sequence
  Description of Artificial Sequence: Synthetic oligonucleotide
  Sense strand starting at position 3785 of SEQ ID NO: 1884891
gugagugaaacuuauguaa

SEQ ID NO: 2299897 - RNA, 19 nt, Artificial Sequence
  Description of Artificial Sequence: Synthetic oligonucleotide
  Antisense strand to SEQ ID NO: 2299896
uuacauaaguuucacucac

SEQ ID NO: 2299898 - RNA, 19 nt, Artificial Sequence
  Description of Artificial Sequence: Synthetic oligonucleotide
  Sense strand starting at position 3788 of SEQ ID NO: 1884891
agugaaacuuauguaacca

SEQ ID NO: 2299899 - RNA, 19 nt, Artificial Sequence
  Description of Artificial Sequence: Synthetic oligonucleotide
  Antisense strand to SEQ ID NO: 2299898
ugguuacauaaguuucacu

SEQ ID NO: 2299900 - RNA, 19 nt, Artificial Sequence
  Description of Artificial Sequence: Synthetic oligonucleotide
  Sense strand starting at position 3938 of SEQ ID NO: 1884891
aguguacaucagugaccaa

SEQ ID NO: 2299901 - RNA, 19 nt, Artificial Sequence
  Description of Artificial Sequence: Synthetic oligonucleotide
  Antisense strand to SEQ ID NO: 2299900
uuggucacugauguacacu

SEQ ID NO: 2299902 - RNA, 19 nt, Artificial Sequence
  Description of Artificial Sequence: Synthetic oligonucleotide
  Sense strand starting at position 3939 of SEQ ID NO: 1884891
guguacaucagugaccaaa

SEQ ID NO: 2299903 - RNA, 19 nt, Artificial Sequence
  Description of Artificial Sequence: Synthetic oligonucleotide
  Antisense strand to SEQ ID NO: 2299902
uuuggucacugauguacac

SEQ ID NO: 2299904 - RNA, 19 nt, Artificial Sequence
  Description of Artificial Sequence: Synthetic oligonucleotide
  Sense strand starting at position 267 of SEQ ID NO: 1884892
aauguuuagcguuauacua

SEQ ID NO: 2299905 - RNA, 19 nt, Artificial Sequence
  Description of Artificial Sequence: Synthetic oligonucleotide
  Antisense strand to SEQ ID NO: 2299904
uaguauaacgcuaaacauu

SEQ ID NO: 2299906 - RNA, 19 nt, Artificial Sequence
  Description of Artificial Sequence: Synthetic oligonucleotide
  Sense strand starting at position 535 of SEQ ID NO: 1884892
uuccuuauccagcggaaau

SEQ ID NO: 2299907 - RNA, 19 nt, Artificial Sequence
  Description of Artificial Sequence: Synthetic oligonucleotide
  Antisense strand to SEQ ID NO: 2299906
auuuccgcuggauaaggaa

SEQ ID NO: 2299908 - RNA, 19 nt, Artificial Sequence
  Description of Artificial Sequence: Synthetic oligonucleotide
  Sense strand starting at position 546 of SEQ ID NO: 1884892
gcggaaaucacaugcaucu

SEQ ID NO: 2299909 - RNA, 19 nt, Artificial Sequence
  Description of Artificial Sequence: Synthetic oligonucleotide
  Antisense strand to SEQ ID NO: 2299908
agaugcaugugauuuccgc

SEQ ID NO: 2299910 - RNA, 19 nt, Artificial Sequence
  Description of Artificial Sequence: Synthetic oligonucleotide
  Sense strand starting at position 1139 of SEQ ID NO: 1884892
gugugucucacuggaagga

SEQ ID NO: 2299911 - RNA, 19 nt, Artificial Sequence
  Description of Artificial Sequence: Synthetic oligonucleotide
  Antisense strand to SEQ ID NO: 2299910
uccuuccagugagacacac

SEQ ID NO: 2299912 - RNA, 19 nt, Artificial Sequence
  Description of Artificial Sequence: Synthetic oligonucleotide
  Sense strand starting at position 1184 of SEQ ID NO: 1884892
guuguuguucgggaaauaa

SEQ ID NO: 2299913 - RNA, 19 nt, Artificial Sequence
  Description of Artificial Sequence: Synthetic oligonucleotide
  Antisense strand to SEQ ID NO: 2299912
uuauuucccgaacaacaac

SEQ ID NO: 2299914 - RNA, 19 nt, Artificial Sequence
  Description of Artificial Sequence: Synthetic oligonucleotide
  Sense strand starting at position 1192 of SEQ ID NO: 1884892
ucgggaaauaacuguauua

SEQ ID NO: 2299915 - RNA, 19 nt, Artificial Sequence
  Description of Artificial Sequence: Synthetic oligonucleotide
  Antisense strand to SEQ ID NO: 2299914
uaauacaguuauuucccga

SEQ ID NO: 2299916 - RNA, 19 nt, Artificial Sequence
  Description of Artificial Sequence: Synthetic oligonucleotide
  Sense strand starting at position 1428 of SEQ ID NO: 1884892
ggcuaucuucuacaaagca

SEQ ID NO: 2299917 - RNA, 19 nt, Artificial Sequence
  Description of Artificial Sequence: Synthetic oligonucleotide
  Antisense strand to SEQ ID NO: 2299916
ugcuuuguagaagauagcc

SEQ ID NO: 2299918 - RNA, 19 nt, Artificial Sequence
  Description of Artificial Sequence: Synthetic oligonucleotide
  Sense strand starting at position 1510 of SEQ ID NO: 1884892
ucuaacuuauagguagaau

SEQ ID NO: 2299919 - RNA, 19 nt, Artificial Sequence
  Description of Artificial Sequence: Synthetic oligonucleotide
  Antisense strand to SEQ ID NO: 2299918
auucuaccuauaaguuaga

SEQ ID NO: 2299920 - RNA, 19 nt, Artificial Sequence
  Description of Artificial Sequence: Synthetic oligonucleotide
  Sense strand starting at position 1575 of SEQ ID NO: 1884892
ucaagagacugagucugau

SEQ ID NO: 2299921 - RNA, 19 nt, Artificial Sequence
  Description of Artificial Sequence: Synthetic oligonucleotide
  Antisense strand to SEQ ID NO: 2299920
aucagacucagucucuuga

SEQ ID NO: 2299922 - RNA, 19 nt, Artificial Sequence
  Description of Artificial Sequence: Synthetic oligonucleotide
  Sense strand starting at position 2060 of SEQ ID NO: 1884892
ucaucagauuucuaucagu

SEQ ID NO: 2299923 - RNA, 19 nt, Artificial Sequence
  Description of Artificial Sequence: Synthetic oligonucleotide
  Antisense strand to SEQ ID NO: 2299922
acugauagaaaucugauga

SEQ ID NO: 2299924 - RNA, 19 nt, Artificial Sequence
  Description of Artificial Sequence: Synthetic oligonucleotide
  Sense strand starting at position 2063 of SEQ ID NO: 1884892
ucagauuucuaucaguagu

SEQ ID NO: 2299925 - RNA, 19 nt, Artificial Sequence
  Description of Artificial Sequence: Synthetic oligonucleotide
  Antisense strand to SEQ ID NO: 2299924
acuacugauagaaaucuga

SEQ ID NO: 2299926 - RNA, 19 nt, Artificial Sequence
  Description of Artificial Sequence: Synthetic oligonucleotide
  Sense strand starting at position 2098 of SEQ ID NO: 1884892
acucaaguguauguuuaaa

SEQ ID NO: 2299927 - RNA, 19 nt, Artificial Sequence
  Description of Artificial Sequence: Synthetic oligonucleotide
  Antisense strand to SEQ ID NO: 2299926
uuuaaacauacacuugagu

SEQ ID NO: 2299928 - RNA, 19 nt, Artificial Sequence
  Description of Artificial Sequence: Synthetic oligonucleotide
  Sense strand starting at position 2121 of SEQ ID NO: 1884892
acuguaaagucagcauaaa

SEQ ID NO: 2299929 - RNA, 19 nt, Artificial Sequence
  Description of Artificial Sequence: Synthetic oligonucleotide
  Antisense strand to SEQ ID NO: 2299928
uuuaugcugacuuuacagu

SEQ ID NO: 2299930 - RNA, 19 nt, Artificial Sequence
  Description of Artificial Sequence: Synthetic oligonucleotide
  Sense strand starting at position 2122 of SEQ ID NO: 1884892
cuguaaagucagcauaaag

SEQ ID NO: 2299931 - RNA, 19 nt, Artificial Sequence
  Description of Artificial Sequence: Synthetic oligonucleotide
  Antisense strand to SEQ ID NO: 2299930
cuuuaugcugacuuuacag

SEQ ID NO: 2299932 - RNA, 19 nt, Artificial Sequence
  Description of Artificial Sequence: Synthetic oligonucleotide
  Sense strand starting at position 2356 of SEQ ID NO: 1884892
guagcaggauucucuaaua

SEQ ID NO: 2299933 - RNA, 19 nt, Artificial Sequence
  Description of Artificial Sequence: Synthetic oligonucleotide
  Antisense strand to SEQ ID NO: 2299932
uauuagagaauccugcuac

SEQ ID NO: 2299934 - RNA, 19 nt, Artificial Sequence
  Description of Artificial Sequence: Synthetic oligonucleotide
  Sense strand starting at position 2433 of SEQ ID NO: 1884892
acaguuucucaaggcaaua

SEQ ID NO: 2299935 - RNA, 19 nt, Artificial Sequence
  Description of Artificial Sequence: Synthetic oligonucleotide
  Antisense strand to SEQ ID NO: 2299934
uauugccuugagaaacugu

SEQ ID NO: 2299936 - RNA, 19 nt, Artificial Sequence
  Description of Artificial Sequence: Synthetic oligonucleotide
  Sense strand starting at position 2527 of SEQ ID NO: 1884892
ccaagaauugggcaaugca

SEQ ID NO: 2299937 - RNA, 19 nt, Artificial Sequence
  Description of Artificial Sequence: Synthetic oligonucleotide
  Antisense strand to SEQ ID NO: 2299936
ugcauugcccaauucuugg

SEQ ID NO: 2299938 - RNA, 19 nt, Artificial Sequence
  Description of Artificial Sequence: Synthetic oligonucleotide
  Sense strand starting at position 2591 of SEQ ID NO: 1884892
agauguuacuagucaauuc

SEQ ID NO: 2299939 - RNA, 19 nt, Artificial Sequence
  Description of Artificial Sequence: Synthetic oligonucleotide
  Antisense strand to SEQ ID NO: 2299938
gaauugacuaguaacaucu

SEQ ID NO: 2299940 - RNA, 19 nt, Artificial Sequence
  Description of Artificial Sequence: Synthetic oligonucleotide
  Sense strand starting at position 2721 of SEQ ID NO: 1884892
acccauuuguuccauugau

SEQ ID NO: 2299941 - RNA, 19 nt, Artificial Sequence
  Description of Artificial Sequence: Synthetic oligonucleotide
  Antisense strand to SEQ ID NO: 2299940
aucaauggaacaaaugggu

SEQ ID NO: 2299942 - RNA, 19 nt, Artificial Sequence
  Description of Artificial Sequence: Synthetic oligonucleotide
  Sense strand starting at position 2735 of SEQ ID NO: 1884892
uugauaucccagugaucaa

SEQ ID NO: 2299943 - RNA, 19 nt, Artificial Sequence
  Description of Artificial Sequence: Synthetic oligonucleotide
  Antisense strand to SEQ ID NO: 2299942
uugaucacugggauaucaa

SEQ ID NO: 2299944 - RNA, 19 nt, Artificial Sequence
  Description of Artificial Sequence: Synthetic oligonucleotide
  Sense strand starting at position 2882 of SEQ ID NO: 1884892
aucuuaguucuauggcuaa

SEQ ID NO: 2299945 - RNA, 19 nt, Artificial Sequence
  Description of Artificial Sequence: Synthetic oligonucleotide
  Antisense strand to SEQ ID NO: 2299944
uuagccauagaacuaagau

SEQ ID NO: 2299946 - RNA, 19 nt, Artificial Sequence
  Description of Artificial Sequence: Synthetic oligonucleotide
  Sense strand starting at position 2885 of SEQ ID NO: 1884892
uuaguucuauggcuaagaa

SEQ ID NO: 2299947 - RNA, 19 nt, Artificial Sequence
  Description of Artificial Sequence: Synthetic oligonucleotide
  Antisense strand to SEQ ID NO: 2299946
uucuuagccauagaacuaa

SEQ ID NO: 2299948 - RNA, 19 nt, Artificial Sequence
  Description of Artificial Sequence: Synthetic oligonucleotide
  Sense strand starting at position 2886 of SEQ ID NO: 1884892
uaguucuauggcuaagaag

SEQ ID NO: 2299949 - RNA, 19 nt, Artificial Sequence
  Description of Artificial Sequence: Synthetic oligonucleotide
  Antisense strand to SEQ ID NO: 2299948
cuucuuagccauagaacua

SEQ ID NO: 2299950 - RNA, 19 nt, Artificial Sequence
  Description of Artificial Sequence: Synthetic oligonucleotide
  Sense strand starting at position 2943 of SEQ ID NO: 1884892
guugauuccuaguuugaaa

SEQ ID NO: 2299951 - RNA, 19 nt, Artificial Sequence
  Description of Artificial Sequence: Synthetic oligonucleotide
  Antisense strand to SEQ ID NO: 2299950
uuucaaacuaggaaucaac

SEQ ID NO: 2299952 - RNA, 19 nt, Artificial Sequence
  Description of Artificial Sequence: Synthetic oligonucleotide
  Sense strand starting at position 3026 of SEQ ID NO: 1884892
uuaccauuguuggcuuauu

SEQ ID NO: 2299953 - RNA, 19 nt, Artificial Sequence
  Description of Artificial Sequence: Synthetic oligonucleotide
  Antisense strand to SEQ ID NO: 2299952
aauaagccaacaaugguaa

SEQ ID NO: 2299954 - RNA, 19 nt, Artificial Sequence
  Description of Artificial Sequence: Synthetic oligonucleotide
  Sense strand starting at position 3034 of SEQ ID NO: 1884892
guuggcuuauuucuucuau

SEQ ID NO: 2299955 - RNA, 19 nt, Artificial Sequence
  Description of Artificial Sequence: Synthetic oligonucleotide
  Antisense strand to SEQ ID NO: 2299954
auagaagaaauaagccaac

SEQ ID NO: 2299956 - RNA, 19 nt, Artificial Sequence
  Description of Artificial Sequence: Synthetic oligonucleotide
  Sense strand starting at position 3049 of SEQ ID NO: 1884892
cuaugcuuacauggcuaaa

SEQ ID NO: 2299957 - RNA, 19 nt, Artificial Sequence
  Description of Artificial Sequence: Synthetic oligonucleotide
  Antisense strand to SEQ ID NO: 2299956
uuuagccauguaagcauag

SEQ ID NO: 2299958 - RNA, 19 nt, Artificial Sequence
  Description of Artificial Sequence: Synthetic oligonucleotide
  Sense strand starting at position 3052 of SEQ ID NO: 1884892
ugcuuacauggcuaaacuu

SEQ ID NO: 2299959 - RNA, 19 nt, Artificial Sequence
  Description of Artificial Sequence: Synthetic oligonucleotide
  Antisense strand to SEQ ID NO: 2299958
aaguuuagccauguaagca

SEQ ID NO: 2299960 - RNA, 19 nt, Artificial Sequence
  Description of Artificial Sequence: Synthetic oligonucleotide
  Sense strand starting at position 3060 of SEQ ID NO: 1884892
uggcuaaacuucuuccaga

SEQ ID NO: 2299961 - RNA, 19 nt, Artificial Sequence
  Description of Artificial Sequence: Synthetic oligonucleotide
  Antisense strand to SEQ ID NO: 2299960
ucuggaagaaguuuagcca

SEQ ID NO: 2299962 - RNA, 19 nt, Artificial Sequence
  Description of Artificial Sequence: Synthetic oligonucleotide
  Sense strand starting at position 3061 of SEQ ID NO: 1884892
ggcuaaacuucuuccagaa

SEQ ID NO: 2299963 - RNA, 19 nt, Artificial Sequence
  Description of Artificial Sequence: Synthetic oligonucleotide
  Antisense strand to SEQ ID NO: 2299962
uucuggaagaaguuuagcc

SEQ ID NO: 2299964 - RNA, 19 nt, Artificial Sequence
  Description of Artificial Sequence: Synthetic oligonucleotide
  Sense strand starting at position 3160 of SEQ ID NO: 1884892
ucuccagggagguauguau

SEQ ID NO: 2299965 - RNA, 19 nt, Artificial Sequence
  Description of Artificial Sequence: Synthetic oligonucleotide
  Antisense strand to SEQ ID NO: 2299964
auacauaccucccuggaga

SEQ ID NO: 2299966 - RNA, 19 nt, Artificial Sequence
  Description of Artificial Sequence: Synthetic oligonucleotide
  Sense strand starting at position 3164 of SEQ ID NO: 1884892
cagggagguauguauaguu

SEQ ID NO: 2299967 - RNA, 19 nt, Artificial Sequence
  Description of Artificial Sequence: Synthetic oligonucleotide
  Antisense strand to SEQ ID NO: 2299966
aacuauacauaccucccug

SEQ ID NO: 2299968 - RNA, 19 nt, Artificial Sequence
  Description of Artificial Sequence: Synthetic oligonucleotide
  Sense strand starting at position 3169 of SEQ ID NO: 1884892
agguauguauaguuaggga

SEQ ID NO: 2299969 - RNA, 19 nt, Artificial Sequence
  Description of Artificial Sequence: Synthetic oligonucleotide
  Antisense strand to SEQ ID NO: 2299968
ucccuaacuauacauaccu

SEQ ID NO: 2299970 - RNA, 19 nt, Artificial Sequence
  Description of Artificial Sequence: Synthetic oligonucleotide
  Sense strand starting at position 3213 of SEQ ID NO: 1884892
gguuauauuugggagagga

SEQ ID NO: 2299971 - RNA, 19 nt, Artificial Sequence
  Description of Artificial Sequence: Synthetic oligonucleotide
  Antisense strand to SEQ ID NO: 2299970
uccucucccaaauauaacc

SEQ ID NO: 2299972 - RNA, 19 nt, Artificial Sequence
  Description of Artificial Sequence: Synthetic oligonucleotide
  Sense strand starting at position 3279 of SEQ ID NO: 1884892
uuaugaaacacugggugau

SEQ ID NO: 2299973 - RNA, 19 nt, Artificial Sequence
  Description of Artificial Sequence: Synthetic oligonucleotide
  Antisense strand to SEQ ID NO: 2299972
aucacccaguguuucauaa

SEQ ID NO: 2299974 - RNA, 19 nt, Artificial Sequence
  Description of Artificial Sequence: Synthetic oligonucleotide
  Sense strand starting at position 3551 of SEQ ID NO: 1884892
ucaagagacguagaguagu

SEQ ID NO: 2299975 - RNA, 19 nt, Artificial Sequence
  Description of Artificial Sequence: Synthetic oligonucleotide
  Antisense strand to SEQ ID NO: 2299974
acuacucuacgucucuuga

SEQ ID NO: 2299976 - RNA, 19 nt, Artificial Sequence
  Description of Artificial Sequence: Synthetic oligonucleotide
  Sense strand starting at position 3661 of SEQ ID NO: 1884892
uauguuagugagcaacgua

SEQ ID NO: 2299977 - RNA, 19 nt, Artificial Sequence
  Description of Artificial Sequence: Synthetic oligonucleotide
  Antisense strand to SEQ ID NO: 2299976
uacguugcucacuaacaua

SEQ ID NO: 2299978 - RNA, 19 nt, Artificial Sequence
  Description of Artificial Sequence: Synthetic oligonucleotide
  Sense strand starting at position 3742 of SEQ ID NO: 1884892
uuggaauggcuuuauguau

SEQ ID NO: 2299979 - RNA, 19 nt, Artificial Sequence
  Description of Artificial Sequence: Synthetic oligonucleotide
  Antisense strand to SEQ ID NO: 2299978
auacauaaagccauuccaa

SEQ ID NO: 2299980 - RNA, 19 nt, Artificial Sequence
  Description of Artificial Sequence: Synthetic oligonucleotide
  Sense strand starting at position 3748 of SEQ ID NO: 1884892
uggcuuuauguauacaugu

SEQ ID NO: 2299981 - RNA, 19 nt, Artificial Sequence
  Description of Artificial Sequence: Synthetic oligonucleotide
  Antisense strand to SEQ ID NO: 2299980
acauguauacauaaagcca

SEQ ID NO: 2299982 - RNA, 19 nt, Artificial Sequence
  Description of Artificial Sequence: Synthetic oligonucleotide
  Sense strand starting at position 3965 of SEQ ID NO: 1884892
ggaacugcccuuuauauua

SEQ ID NO: 2299983 - RNA, 19 nt, Artificial Sequence
  Description of Artificial Sequence: Synthetic oligonucleotide
  Antisense strand to SEQ ID NO: 2299982
uaauauaaagggcaguucc

SEQ ID NO: 2299984 - RNA, 19 nt, Artificial Sequence
  Description of Artificial Sequence: Synthetic oligonucleotide
  Sense strand starting at position 102 of SEQ ID NO: 1884893
uuagaaucucugggucuaa

SEQ ID NO: 2299985 - RNA, 19 nt, Artificial Sequence
  Description of Artificial Sequence: Synthetic oligonucleotide
  Antisense strand to SEQ ID NO: 2299984
uuagacccagagauucuaa

SEQ ID NO: 2299986 - RNA, 19 nt, Artificial Sequence
  Description of Artificial Sequence: Synthetic oligonucleotide
  Sense strand starting at position 103 of SEQ ID NO: 1884893
uagaaucucugggucuaau

SEQ ID NO: 2299987 - RNA, 19 nt, Artificial Sequence
  Description of Artificial Sequence: Synthetic oligonucleotide
  Antisense strand to SEQ ID NO: 2299986
auuagacccagagauucua

SEQ ID NO: 2299988 - RNA, 19 nt, Artificial Sequence
  Description of Artificial Sequence: Synthetic oligonucleotide
  Sense strand starting at position 106 of SEQ ID NO: 1884893
aaucucugggucuaaugua

SEQ ID NO: 2299989 - RNA, 19 nt, Artificial Sequence
  Description of Artificial Sequence: Synthetic oligonucleotide
  Antisense strand to SEQ ID NO: 2299988
uacauuagacccagagauu

SEQ ID NO: 2299990 - RNA, 19 nt, Artificial Sequence
  Description of Artificial Sequence: Synthetic oligonucleotide
  Sense strand starting at position 283 of SEQ ID NO: 1884893
ccaguucucagagguaaga

SEQ ID NO: 2299991 - RNA, 19 nt, Artificial Sequence
  Description of Artificial Sequence: Synthetic oligonucleotide
  Antisense strand to SEQ ID NO: 2299990
ucuuaccucugagaacugg

SEQ ID NO: 2299992 - RNA, 19 nt, Artificial Sequence
  Description of Artificial Sequence: Synthetic oligonucleotide
  Sense strand starting at position 293 of SEQ ID NO: 1884893
gagguaagaaguuacgauu

SEQ ID NO: 2299993 - RNA, 19 nt, Artificial Sequence
  Description of Artificial Sequence: Synthetic oligonucleotide
  Antisense strand to SEQ ID NO: 2299992
aaucguaacuucuuaccuc

SEQ ID NO: 2299994 - RNA, 19 nt, Artificial Sequence
  Description of Artificial Sequence: Synthetic oligonucleotide
  Sense strand starting at position 410 of SEQ ID NO: 1884893
agaucaguuugaccuaaua

SEQ ID NO: 2299995 - RNA, 19 nt, Artificial Sequence
  Description of Artificial Sequence: Synthetic oligonucleotide
  Antisense strand to SEQ ID NO: 2299994
uauuaggucaaacugaucu

SEQ ID NO: 2299996 - RNA, 19 nt, Artificial Sequence
  Description of Artificial Sequence: Synthetic oligonucleotide
  Sense strand starting at position 435 of SEQ ID NO: 1884893
ugagaaugaguucaguggu

SEQ ID NO: 2299997 - RNA, 19 nt, Artificial Sequence
  Description of Artificial Sequence: Synthetic oligonucleotide
  Antisense strand to SEQ ID NO: 2299996
accacugaacucauucuca

SEQ ID NO: 2299998 - RNA, 19 nt, Artificial Sequence
  Description of Artificial Sequence: Synthetic oligonucleotide
  Sense strand starting at position 535 of SEQ ID NO: 1884893
uaacucuugcgugaagaua

SEQ ID NO: 2299999 - RNA, 19 nt, Artificial Sequence
  Description of Artificial Sequence: Synthetic oligonucleotide
  Antisense strand to SEQ ID NO: 2299998
uaucuucacgcaagaguua

SEQ ID NO: 2300000 - RNA, 19 nt, Artificial Sequence
  Description of Artificial Sequence: Synthetic oligonucleotide
  Sense strand starting at position 607 of SEQ ID NO: 1884893
cucagccagccuuaagaau

SEQ ID NO: 2300001 - RNA, 19 nt, Artificial Sequence
  Description of Artificial Sequence: Synthetic oligonucleotide
  Antisense strand to SEQ ID NO: 2300000
auucuuaaggcuggcugag

SEQ ID NO: 2300002 - RNA, 19 nt, Artificial Sequence
  Description of Artificial Sequence: Synthetic oligonucleotide
  Sense strand starting at position 634 of SEQ ID NO: 1884893
ucgagcuuauuucugaguu

SEQ ID NO: 2300003 - RNA, 19 nt, Artificial Sequence
  Description of Artificial Sequence: Synthetic oligonucleotide
  Antisense strand to SEQ ID NO: 2300002
aacucagaaauaagcucga

SEQ ID NO: 2300004 - RNA, 19 nt, Artificial Sequence
  Description of Artificial Sequence: Synthetic oligonucleotide
  Sense strand starting at position 793 of SEQ ID NO: 1884893
gccaacacugagugaugaa

SEQ ID NO: 2300005 - RNA, 19 nt, Artificial Sequence
  Description of Artificial Sequence: Synthetic oligonucleotide
  Antisense strand to SEQ ID NO: 2300004
uucaucacucaguguuggc

SEQ ID NO: 2300006 - RNA, 19 nt, Artificial Sequence
  Description of Artificial Sequence: Synthetic oligonucleotide
  Sense strand starting at position 805 of SEQ ID NO: 1884893
ugaugaauugagggccuga

SEQ ID NO: 2300007 - RNA, 19 nt, Artificial Sequence
  Description of Artificial Sequence: Synthetic oligonucleotide
  Antisense strand to SEQ ID NO: 2300006
ucaggcccucaauucauca

SEQ ID NO: 2300008 - RNA, 19 nt, Artificial Sequence
  Description of Artificial Sequence: Synthetic oligonucleotide
  Sense strand starting at position 860 of SEQ ID NO: 1884893
uugggaaucuucuuagacu

SEQ ID NO: 2300009 - RNA, 19 nt, Artificial Sequence
  Description of Artificial Sequence: Synthetic oligonucleotide
  Antisense strand to SEQ ID NO: 2300008
agucuaagaagauucccaa

SEQ ID NO: 2300010 - RNA, 19 nt, Artificial Sequence
  Description of Artificial Sequence: Synthetic oligonucleotide
  Sense strand starting at position 921 of SEQ ID NO: 1884893
gagcgucugcacuuugagu

SEQ ID NO: 2300011 - RNA, 19 nt, Artificial Sequence
  Description of Artificial Sequence: Synthetic oligonucleotide
  Antisense strand to SEQ ID NO: 2300010
acucaaagugcagacgcuc

SEQ ID NO: 2300012 - RNA, 19 nt, Artificial Sequence
  Description of Artificial Sequence: Synthetic oligonucleotide
  Sense strand starting at position 922 of SEQ ID NO: 1884893
agcgucugcacuuugagua

SEQ ID NO: 2300013 - RNA, 19 nt, Artificial Sequence
  Description of Artificial Sequence: Synthetic oligonucleotide
  Antisense strand to SEQ ID NO: 2300012
uacucaaagugcagacgcu

SEQ ID NO: 2300014 - RNA, 19 nt, Artificial Sequence
  Description of Artificial Sequence: Synthetic oligonucleotide
  Sense strand starting at position 1043 of SEQ ID NO: 1884893
uuuagucugugauuaaaga

SEQ ID NO: 2300015 - RNA, 19 nt, Artificial Sequence
  Description of Artificial Sequence: Synthetic oligonucleotide
  Antisense strand to SEQ ID NO: 2300014
ucuuuaaucacagacuaaa

SEQ ID NO: 2300016 - RNA, 19 nt, Artificial Sequence
  Description of Artificial Sequence: Synthetic oligonucleotide
  Sense strand starting at position 1549 of SEQ ID NO: 1884893
gaggauaucaguuguagga

SEQ ID NO: 2300017 - RNA, 19 nt, Artificial Sequence
  Description of Artificial Sequence: Synthetic oligonucleotide
  Antisense strand to SEQ ID NO: 2300016
uccuacaacugauauccuc

SEQ ID NO: 2300018 - RNA, 19 nt, Artificial Sequence
  Description of Artificial Sequence: Synthetic oligonucleotide
  Sense strand starting at position 1660 of SEQ ID NO: 1884893
agugaaagguucccacaaa

SEQ ID NO: 2300019 - RNA, 19 nt, Artificial Sequence
  Description of Artificial Sequence: Synthetic oligonucleotide
  Antisense strand to SEQ ID NO: 2300018
uuugugggaaccuuucacu

SEQ ID NO: 2300020 - RNA, 19 nt, Artificial Sequence
  Description of Artificial Sequence: Synthetic oligonucleotide
  Sense strand starting at position 1799 of SEQ ID NO: 1884893
ugcggcuguccuuugugau

SEQ ID NO: 2300021 - RNA, 19 nt, Artificial Sequence
  Description of Artificial Sequence: Synthetic oligonucleotide
  Antisense strand to SEQ ID NO: 2300020
aucacaaaggacagccgca

SEQ ID NO: 2300022 - RNA, 19 nt, Artificial Sequence
  Description of Artificial Sequence: Synthetic oligonucleotide
  Sense strand starting at position 1997 of SEQ ID NO: 1884893
guguccucucgugauuuac

SEQ ID NO: 2300023 - RNA, 19 nt, Artificial Sequence
  Description of Artificial Sequence: Synthetic oligonucleotide
  Antisense strand to SEQ ID NO: 2300022
guaaaucacgagaggacac

SEQ ID NO: 2300024 - RNA, 19 nt, Artificial Sequence
  Description of Artificial Sequence: Synthetic oligonucleotide
  Sense strand starting at position 2005 of SEQ ID NO: 1884893
ucgugauuuacucgcagag

SEQ ID NO: 2300025 - RNA, 19 nt, Artificial Sequence
  Description of Artificial Sequence: Synthetic oligonucleotide
  Antisense strand to SEQ ID NO: 2300024
cucugcgaguaaaucacga

SEQ ID NO: 2300026 - RNA, 19 nt, Artificial Sequence
  Description of Artificial Sequence: Synthetic oligonucleotide
  Sense strand starting at position 2023 of SEQ ID NO: 1884893
ggcgaaagccuguugcgaa

SEQ ID NO: 2300027 - RNA, 19 nt, Artificial Sequence
  Description of Artificial Sequence: Synthetic oligonucleotide
  Antisense strand to SEQ ID NO: 2300026
uucgcaacaggcuuucgcc

SEQ ID NO: 2300028 - RNA, 19 nt, Artificial Sequence
  Description of Artificial Sequence: Synthetic oligonucleotide
  Sense strand starting at position 2111 of SEQ ID NO: 1884893
acucgugcacauuagagaa

SEQ ID NO: 2300029 - RNA, 19 nt, Artificial Sequence
  Description of Artificial Sequence: Synthetic oligonucleotide
  Antisense strand to SEQ ID NO: 2300028
uucucuaaugugcacgagu

SEQ ID NO: 2300030 - RNA, 19 nt, Artificial Sequence
  Description of Artificial Sequence: Synthetic oligonucleotide
  Sense strand starting at position 2250 of SEQ ID NO: 1884893
agcagaucacuuggauauu

SEQ ID NO: 2300031 - RNA, 19 nt, Artificial Sequence
  Description of Artificial Sequence: Synthetic oligonucleotide
  Antisense strand to SEQ ID NO: 2300030
aauauccaagugaucugcu

SEQ ID NO: 2300032 - RNA, 19 nt, Artificial Sequence
  Description of Artificial Sequence: Synthetic oligonucleotide
  Sense strand starting at position 2461 of SEQ ID NO: 1884893
aaagcugauggugggaaau

SEQ ID NO: 2300033 - RNA, 19 nt, Artificial Sequence
  Description of Artificial Sequence: Synthetic oligonucleotide
  Antisense strand to SEQ ID NO: 2300032
auuucccaccaucagcuuu

SEQ ID NO: 2300034 - RNA, 19 nt, Artificial Sequence
  Description of Artificial Sequence: Synthetic oligonucleotide
  Sense strand starting at position 2545 of SEQ ID NO: 1884893
gagucaagcgcauugugua

SEQ ID NO: 2300035 - RNA, 19 nt, Artificial Sequence
  Description of Artificial Sequence: Synthetic oligonucleotide
  Antisense strand to SEQ ID NO: 2300034
uacacaaugcgcuugacuc

SEQ ID NO: 2300036 - RNA, 19 nt, Artificial Sequence
  Description of Artificial Sequence: Synthetic oligonucleotide
  Sense strand starting at position 2640 of SEQ ID NO: 1884893
uaagcuuaucugggagaac

SEQ ID NO: 2300037 - RNA, 19 nt, Artificial Sequence
  Description of Artificial Sequence: Synthetic oligonucleotide
  Antisense strand to SEQ ID NO: 2300036
guucucccagauaagcuua

SEQ ID NO: 2300038 - RNA, 19 nt, Artificial Sequence
  Description of Artificial Sequence: Synthetic oligonucleotide
  Sense strand starting at position 2649 of SEQ ID NO: 1884893
cugggagaaccaugccauu

SEQ ID NO: 2300039 - RNA, 19 nt, Artificial Sequence
  Description of Artificial Sequence: Synthetic oligonucleotide
  Antisense strand to SEQ ID NO: 2300038
aauggcaugguucucccag

SEQ ID NO: 2300040 - RNA, 19 nt, Artificial Sequence
  Description of Artificial Sequence: Synthetic oligonucleotide
  Sense strand starting at position 2854 of SEQ ID NO: 1884893
gugaguuuauuuguaagua

SEQ ID NO: 2300041 - RNA, 19 nt, Artificial Sequence
  Description of Artificial Sequence: Synthetic oligonucleotide
  Antisense strand to SEQ ID NO: 2300040
uacuuacaaauaaacucac

SEQ ID NO: 2300042 - RNA, 19 nt, Artificial Sequence
  Description of Artificial Sequence: Synthetic oligonucleotide
  Sense strand starting at position 2883 of SEQ ID NO: 1884893
guggauauccugggucaga

SEQ ID NO: 2300043 - RNA, 19 nt, Artificial Sequence
  Description of Artificial Sequence: Synthetic oligonucleotide
  Antisense strand to SEQ ID NO: 2300042
ucugacccaggauauccac

SEQ ID NO: 2300044 - RNA, 19 nt, Artificial Sequence
  Description of Artificial Sequence: Synthetic oligonucleotide
  Sense strand starting at position 2884 of SEQ ID NO: 1884893
uggauauccugggucagag

SEQ ID NO: 2300045 - RNA, 19 nt, Artificial Sequence
  Description of Artificial Sequence: Synthetic oligonucleotide
  Antisense strand to SEQ ID NO: 2300044
cucugacccaggauaucca

SEQ ID NO: 2300046 - RNA, 19 nt, Artificial Sequence
  Description of Artificial Sequence: Synthetic oligonucleotide
  Sense strand starting at position 2923 of SEQ ID NO: 1884893
ugauaagaguagccaaagu

SEQ ID NO: 2300047 - RNA, 19 nt, Artificial Sequence
  Description of Artificial Sequence: Synthetic oligonucleotide
  Antisense strand to SEQ ID NO: 2300046
acuuuggcuacucuuauca

SEQ ID NO: 2300048 - RNA, 19 nt, Artificial Sequence
  Description of Artificial Sequence: Synthetic oligonucleotide
  Sense strand starting at position 3051 of SEQ ID NO: 1884893
uuucuugaucuuuaccgau

SEQ ID NO: 2300049 - RNA, 19 nt, Artificial Sequence
  Description of Artificial Sequence: Synthetic oligonucleotide
  Antisense strand to SEQ ID NO: 2300048
aucgguaaagaucaagaaa

SEQ ID NO: 2300050 - RNA, 19 nt, Artificial Sequence
  Description of Artificial Sequence: Synthetic oligonucleotide
  Sense strand starting at position 3066 of SEQ ID NO: 1884893
cgauaugaaaggugaagca

SEQ ID NO: 2300051 - RNA, 19 nt, Artificial Sequence
  Description of Artificial Sequence: Synthetic oligonucleotide
  Antisense strand to SEQ ID NO: 2300050
ugcuucaccuuucauaucg

SEQ ID NO: 2300052 - RNA, 19 nt, Artificial Sequence
  Description of Artificial Sequence: Synthetic oligonucleotide
  Sense strand starting at position 3167 of SEQ ID NO: 1884893
guguaagagcuguuugugu

SEQ ID NO: 2300053 - RNA, 19 nt, Artificial Sequence
  Description of Artificial Sequence: Synthetic oligonucleotide
  Antisense strand to SEQ ID NO: 2300052
acacaaacagcucuuacac

SEQ ID NO: 2300054 - RNA, 19 nt, Artificial Sequence
  Description of Artificial Sequence: Synthetic oligonucleotide
  Sense strand starting at position 3285 of SEQ ID NO: 1884893
ggaugaauuuaugggacua

SEQ ID NO: 2300055 - RNA, 19 nt, Artificial Sequence
  Description of Artificial Sequence: Synthetic oligonucleotide
  Antisense strand to SEQ ID NO: 2300054
uagucccauaaauucaucc

SEQ ID NO: 2300056 - RNA, 19 nt, Artificial Sequence
  Description of Artificial Sequence: Synthetic oligonucleotide
  Sense strand starting at position 3628 of SEQ ID NO: 1884893
gauauaucaggccaguaua

SEQ ID NO: 2300057 - RNA, 19 nt, Artificial Sequence
  Description of Artificial Sequence: Synthetic oligonucleotide
  Antisense strand to SEQ ID NO: 2300056
uauacuggccugauauauc

SEQ ID NO: 2300058 - RNA, 19 nt, Artificial Sequence
  Description of Artificial Sequence: Synthetic oligonucleotide
  Sense strand starting at position 3631 of SEQ ID NO: 1884893
auaucaggccaguauauaa

SEQ ID NO: 2300059 - RNA, 19 nt, Artificial Sequence
  Description of Artificial Sequence: Synthetic oligonucleotide
  Antisense strand to SEQ ID NO: 2300058
uuauauacuggccugauau

SEQ ID NO: 2300060 - RNA, 19 nt, Artificial Sequence
  Description of Artificial Sequence: Synthetic oligonucleotide
  Sense strand starting at position 3823 of SEQ ID NO: 1884893
guuguagagaugggaucau

SEQ ID NO: 2300061 - RNA, 19 nt, Artificial Sequence
  Description of Artificial Sequence: Synthetic oligonucleotide
  Antisense strand to SEQ ID NO: 2300060
augaucccaucucuacaac

SEQ ID NO: 2300062 - RNA, 19 nt, Artificial Sequence
  Description of Artificial Sequence: Synthetic oligonucleotide
  Sense strand starting at position 3884 of SEQ ID NO: 1884893
gugccuuggagagaggauu

SEQ ID NO: 2300063 - RNA, 19 nt, Artificial Sequence
  Description of Artificial Sequence: Synthetic oligonucleotide
  Antisense strand to SEQ ID NO: 2300062
aauccucucuccaaggcac

SEQ ID NO: 2300064 - RNA, 19 nt, Artificial Sequence
  Description of Artificial Sequence: Synthetic oligonucleotide
  Sense strand starting at position 66 of SEQ ID NO: 1884894
aucagaaugucaguguuga

SEQ ID NO: 2300065 - RNA, 19 nt, Artificial Sequence
  Description of Artificial Sequence: Synthetic oligonucleotide
  Antisense strand to SEQ ID NO: 2300064
ucaacacugacauucugau

SEQ ID NO: 2300066 - RNA, 19 nt, Artificial Sequence
  Description of Artificial Sequence: Synthetic oligonucleotide
  Sense strand starting at position 67 of SEQ ID NO: 1884894
ucagaaugucaguguugag

SEQ ID NO: 2300067 - RNA, 19 nt, Artificial Sequence
  Description of Artificial Sequence: Synthetic oligonucleotide
  Antisense strand to SEQ ID NO: 2300066
cucaacacugacauucuga

SEQ ID NO: 2300068 - RNA, 19 nt, Artificial Sequence
  Description of Artificial Sequence: Synthetic oligonucleotide
  Sense strand starting at position 71 of SEQ ID NO: 1884894
aaugucaguguugagauca

SEQ ID NO: 2300069 - RNA, 19 nt, Artificial Sequence
  Description of Artificial Sequence: Synthetic oligonucleotide
  Antisense strand to SEQ ID NO: 2300068
ugaucucaacacugacauu

SEQ ID NO: 2300070 - RNA, 19 nt, Artificial Sequence
  Description of Artificial Sequence: Synthetic oligonucleotide
  Sense strand starting at position 149 of SEQ ID NO: 1884894
gccuaugaaccaggugauu

SEQ ID NO: 2300071 - RNA, 19 nt, Artificial Sequence
  Description of Artificial Sequence: Synthetic oligonucleotide
  Antisense strand to SEQ ID NO: 2300070
aaucaccugguucauaggc

SEQ ID NO: 2300072 - RNA, 19 nt, Artificial Sequence
  Description of Artificial Sequence: Synthetic oligonucleotide
  Sense strand starting at position 169 of SEQ ID NO: 1884894
uugagacucuucuuuguau

SEQ ID NO: 2300073 - RNA, 19 nt, Artificial Sequence
  Description of Artificial Sequence: Synthetic oligonucleotide
  Antisense strand to SEQ ID NO: 2300072
auacaaagaagagucucaa

SEQ ID NO: 2300074 - RNA, 19 nt, Artificial Sequence
  Description of Artificial Sequence: Synthetic oligonucleotide
  Sense strand starting at position 170 of SEQ ID NO: 1884894
ugagacucuucuuuguaua

SEQ ID NO: 2300075 - RNA, 19 nt, Artificial Sequence
  Description of Artificial Sequence: Synthetic oligonucleotide
  Antisense strand to SEQ ID NO: 2300074
uauacaaagaagagucuca

SEQ ID NO: 2300076 - RNA, 19 nt, Artificial Sequence
  Description of Artificial Sequence: Synthetic oligonucleotide
  Sense strand starting at position 171 of SEQ ID NO: 1884894
gagacucuucuuuguauag

SEQ ID NO: 2300077 - RNA, 19 nt, Artificial Sequence
  Description of Artificial Sequence: Synthetic oligonucleotide
  Antisense strand to SEQ ID NO: 2300076
cuauacaaagaagagucuc

SEQ ID NO: 2300078 - RNA, 19 nt, Artificial Sequence
  Description of Artificial Sequence: Synthetic oligonucleotide
  Sense strand starting at position 175 of SEQ ID NO: 1884894
cucuucuuuguauaggauu

SEQ ID NO: 2300079 - RNA, 19 nt, Artificial Sequence
  Description of Artificial Sequence: Synthetic oligonucleotide
  Antisense strand to SEQ ID NO: 2300078
aauccuauacaaagaagag

SEQ ID NO: 2300080 - RNA, 19 nt, Artificial Sequence
  Description of Artificial Sequence: Synthetic oligonucleotide
  Sense strand starting at position 288 of SEQ ID NO: 1884894
uuaggcauaugcuuugaaa

SEQ ID NO: 2300081 - RNA, 19 nt, Artificial Sequence
  Description of Artificial Sequence: Synthetic oligonucleotide
  Antisense strand to SEQ ID NO: 2300080
uuucaaagcauaugccuaa

SEQ ID NO: 2300082 - RNA, 19 nt, Artificial Sequence
  Description of Artificial Sequence: Synthetic oligonucleotide
  Sense strand starting at position 489 of SEQ ID NO: 1884894
agagaaguauuugaaguag

SEQ ID NO: 2300083 - RNA, 19 nt, Artificial Sequence
  Description of Artificial Sequence: Synthetic oligonucleotide
  Antisense strand to SEQ ID NO: 2300082
cuacuucaaauacuucucu

SEQ ID NO: 2300084 - RNA, 19 nt, Artificial Sequence
  Description of Artificial Sequence: Synthetic oligonucleotide
  Sense strand starting at position 847 of SEQ ID NO: 1884894
ucuuuauauuguucucaga

SEQ ID NO: 2300085 - RNA, 19 nt, Artificial Sequence
  Description of Artificial Sequence: Synthetic oligonucleotide
  Antisense strand to SEQ ID NO: 2300084
ucugagaacaauauaaaga

SEQ ID NO: 2300086 - RNA, 19 nt, Artificial Sequence
  Description of Artificial Sequence: Synthetic oligonucleotide
  Sense strand starting at position 926 of SEQ ID NO: 1884894
ugcuuuccacuaugaugga

SEQ ID NO: 2300087 - RNA, 19 nt, Artificial Sequence
  Description of Artificial Sequence: Synthetic oligonucleotide
  Antisense strand to SEQ ID NO: 2300086
uccaucauaguggaaagca

SEQ ID NO: 2300088 - RNA, 19 nt, Artificial Sequence
  Description of Artificial Sequence: Synthetic oligonucleotide
  Sense strand starting at position 1194 of SEQ ID NO: 1884894
ugucacugcaugggagauu

SEQ ID NO: 2300089 - RNA, 19 nt, Artificial Sequence
  Description of Artificial Sequence: Synthetic oligonucleotide
  Antisense strand to SEQ ID NO: 2300088
aaucucccaugcagugaca

SEQ ID NO: 2300090 - RNA, 19 nt, Artificial Sequence
  Description of Artificial Sequence: Synthetic oligonucleotide
  Sense strand starting at position 1635 of SEQ ID NO: 1884894
ggauacucgaccuguauaa

SEQ ID NO: 2300091 - RNA, 19 nt, Artificial Sequence
  Description of Artificial Sequence: Synthetic oligonucleotide
  Antisense strand to SEQ ID NO: 2300090
uuauacaggucgaguaucc

SEQ ID NO: 2300092 - RNA, 19 nt, Artificial Sequence
  Description of Artificial Sequence: Synthetic oligonucleotide
  Sense strand starting at position 1637 of SEQ ID NO: 1884894
auacucgaccuguauaagu

SEQ ID NO: 2300093 - RNA, 19 nt, Artificial Sequence
  Description of Artificial Sequence: Synthetic oligonucleotide
  Antisense strand to SEQ ID NO: 2300092
acuuauacaggucgaguau

SEQ ID NO: 2300094 - RNA, 19 nt, Artificial Sequence
  Description of Artificial Sequence: Synthetic oligonucleotide
  Sense strand starting at position 1639 of SEQ ID NO: 1884894
acucgaccuguauaaguuu

SEQ ID NO: 2300095 - RNA, 19 nt, Artificial Sequence
  Description of Artificial Sequence: Synthetic oligonucleotide
  Antisense strand to SEQ ID NO: 2300094
aaacuuauacaggucgagu

SEQ ID NO: 2300096 - RNA, 19 nt, Artificial Sequence
  Description of Artificial Sequence: Synthetic oligonucleotide
  Sense strand starting at position 1729 of SEQ ID NO: 1884894
uguuaaagagguugaugaa

SEQ ID NO: 2300097 - RNA, 19 nt, Artificial Sequence
  Description of Artificial Sequence: Synthetic oligonucleotide
  Antisense strand to SEQ ID NO: 2300096
uucaucaaccucuuuaaca

SEQ ID NO: 2300098 - RNA, 19 nt, Artificial Sequence
  Description of Artificial Sequence: Synthetic oligonucleotide
  Sense strand starting at position 1889 of SEQ ID NO: 1884894
aaggcugaugcaugaugau

SEQ ID NO: 2300099 - RNA, 19 nt, Artificial Sequence
  Description of Artificial Sequence: Synthetic oligonucleotide
  Antisense strand to SEQ ID NO: 2300098
aucaucaugcaucagccuu

SEQ ID NO: 2300100 - RNA, 19 nt, Artificial Sequence
  Description of Artificial Sequence: Synthetic oligonucleotide
  Sense strand starting at position 2188 of SEQ ID NO: 1884894
auaauauuaugugucagag

SEQ ID NO: 2300101 - RNA, 19 nt, Artificial Sequence
  Description of Artificial Sequence: Synthetic oligonucleotide
  Antisense strand to SEQ ID NO: 2300100
cucugacacauaauauuau

SEQ ID NO: 2300102 - RNA, 19 nt, Artificial Sequence
  Description of Artificial Sequence: Synthetic oligonucleotide
  Sense strand starting at position 2194 of SEQ ID NO: 1884894
uuaugugucagaggaguca

SEQ ID NO: 2300103 - RNA, 19 nt, Artificial Sequence
  Description of Artificial Sequence: Synthetic oligonucleotide
  Antisense strand to SEQ ID NO: 2300102
ugacuccucugacacauaa

SEQ ID NO: 2300104 - RNA, 19 nt, Artificial Sequence
  Description of Artificial Sequence: Synthetic oligonucleotide
  Sense strand starting at position 2215 of SEQ ID NO: 1884894
guuauaauugccuaaggca

SEQ ID NO: 2300105 - RNA, 19 nt, Artificial Sequence
  Description of Artificial Sequence: Synthetic oligonucleotide
  Antisense strand to SEQ ID NO: 2300104
ugccuuaggcaauuauaac

SEQ ID NO: 2300106 - RNA, 19 nt, Artificial Sequence
  Description of Artificial Sequence: Synthetic oligonucleotide
  Sense strand starting at position 2230 of SEQ ID NO: 1884894
ggcaauucucgugaucaag

SEQ ID NO: 2300107 - RNA, 19 nt, Artificial Sequence
  Description of Artificial Sequence: Synthetic oligonucleotide
  Antisense strand to SEQ ID NO: 2300106
cuugaucacgagaauugcc

SEQ ID NO: 2300108 - RNA, 19 nt, Artificial Sequence
  Description of Artificial Sequence: Synthetic oligonucleotide
  Sense strand starting at position 2315 of SEQ ID NO: 1884894
cguguuugucaucuuuauu

SEQ ID NO: 2300109 - RNA, 19 nt, Artificial Sequence
  Description of Artificial Sequence: Synthetic oligonucleotide
  Antisense strand to SEQ ID NO: 2300108
aauaaagaugacaaacacg

SEQ ID NO: 2300110 - RNA, 19 nt, Artificial Sequence
  Description of Artificial Sequence: Synthetic oligonucleotide
  Sense strand starting at position 2626 of SEQ ID NO: 1884894
aucuauauguaucuuguga

SEQ ID NO: 2300111 - RNA, 19 nt, Artificial Sequence
  Description of Artificial Sequence: Synthetic oligonucleotide
  Antisense strand to SEQ ID NO: 2300110
ucacaagauacauauagau

SEQ ID NO: 2300112 - RNA, 19 nt, Artificial Sequence
  Description of Artificial Sequence: Synthetic oligonucleotide
  Sense strand starting at position 2794 of SEQ ID NO: 1884894
uccauauauggacguacau

SEQ ID NO: 2300113 - RNA, 19 nt, Artificial Sequence
  Description of Artificial Sequence: Synthetic oligonucleotide
  Antisense strand to SEQ ID NO: 2300112
auguacguccauauaugga

SEQ ID NO: 2300114 - RNA, 19 nt, Artificial Sequence
  Description of Artificial Sequence: Synthetic oligonucleotide
  Sense strand starting at position 2947 of SEQ ID NO: 1884894
caaugaauaucagugugca

SEQ ID NO: 2300115 - RNA, 19 nt, Artificial Sequence
  Description of Artificial Sequence: Synthetic oligonucleotide
  Antisense strand to SEQ ID NO: 2300114
ugcacacugauauucauug

SEQ ID NO: 2300116 - RNA, 19 nt, Artificial Sequence
  Description of Artificial Sequence: Synthetic oligonucleotide
  Sense strand starting at position 2948 of SEQ ID NO: 1884894
aaugaauaucagugugcau

SEQ ID NO: 2300117 - RNA, 19 nt, Artificial Sequence
  Description of Artificial Sequence: Synthetic oligonucleotide
  Antisense strand to SEQ ID NO: 2300116
augcacacugauauucauu

SEQ ID NO: 2300118 - RNA, 19 nt, Artificial Sequence
  Description of Artificial Sequence: Synthetic oligonucleotide
  Sense strand starting at position 2959 of SEQ ID NO: 1884894
gugugcaugccucuuugua

SEQ ID NO: 2300119 - RNA, 19 nt, Artificial Sequence
  Description of Artificial Sequence: Synthetic oligonucleotide
  Antisense strand to SEQ ID NO: 2300118
uacaaagaggcaugcacac

SEQ ID NO: 2300120 - RNA, 19 nt, Artificial Sequence
  Description of Artificial Sequence: Synthetic oligonucleotide
  Sense strand starting at position 3015 of SEQ ID NO: 1884894
gacugcuggauugaagagu

SEQ ID NO: 2300121 - RNA, 19 nt, Artificial Sequence
  Description of Artificial Sequence: Synthetic oligonucleotide
  Antisense strand to SEQ ID NO: 2300120
acucuucaauccagcaguc

SEQ ID NO: 2300122 - RNA, 19 nt, Artificial Sequence
  Description of Artificial Sequence: Synthetic oligonucleotide
  Sense strand starting at position 3083 of SEQ ID NO: 1884894
gucaauuggcacuaccaca

SEQ ID NO: 2300123 - RNA, 19 nt, Artificial Sequence
  Description of Artificial Sequence: Synthetic oligonucleotide
  Antisense strand to SEQ ID NO: 2300122
ugugguagugccaauugac

SEQ ID NO: 2300124 - RNA, 19 nt, Artificial Sequence
  Description of Artificial Sequence: Synthetic oligonucleotide
  Sense strand starting at position 3103 of SEQ ID NO: 1884894
caguguaugaaggguacaa

SEQ ID NO: 2300125 - RNA, 19 nt, Artificial Sequence
  Description of Artificial Sequence: Synthetic oligonucleotide
  Antisense strand to SEQ ID NO: 2300124
uuguacccuucauacacug

SEQ ID NO: 2300126 - RNA, 19 nt, Artificial Sequence
  Description of Artificial Sequence: Synthetic oligonucleotide
  Sense strand starting at position 3480 of SEQ ID NO: 1884894
ggguaagaauacuuuguaa

SEQ ID NO: 2300127 - RNA, 19 nt, Artificial Sequence
  Description of Artificial Sequence: Synthetic oligonucleotide
  Antisense strand to SEQ ID NO: 2300126
uuacaaaguauucuuaccc

SEQ ID NO: 2300128 - RNA, 19 nt, Artificial Sequence
  Description of Artificial Sequence: Synthetic oligonucleotide
  Sense strand starting at position 3656 of SEQ ID NO: 1884894
uuggguuguccuuauuaau

SEQ ID NO: 2300129 - RNA, 19 nt, Artificial Sequence
  Description of Artificial Sequence: Synthetic oligonucleotide
  Antisense strand to SEQ ID NO: 2300128
auuaauaaggacaacccaa

SEQ ID NO: 2300130 - RNA, 19 nt, Artificial Sequence
  Description of Artificial Sequence: Synthetic oligonucleotide
  Sense strand starting at position 3666 of SEQ ID NO: 1884894
cuuauuaauguaugggaac

SEQ ID NO: 2300131 - RNA, 19 nt, Artificial Sequence
  Description of Artificial Sequence: Synthetic oligonucleotide
  Antisense strand to SEQ ID NO: 2300130
guucccauacauuaauaag

SEQ ID NO: 2300132 - RNA, 19 nt, Artificial Sequence
  Description of Artificial Sequence: Synthetic oligonucleotide
  Sense strand starting at position 3734 of SEQ ID NO: 1884894
uuuagcuuugacuauaaag

SEQ ID NO: 2300133 - RNA, 19 nt, Artificial Sequence
  Description of Artificial Sequence: Synthetic oligonucleotide
  Antisense strand to SEQ ID NO: 2300132
cuuuauagucaaagcuaaa

SEQ ID NO: 2300134 - RNA, 19 nt, Artificial Sequence
  Description of Artificial Sequence: Synthetic oligonucleotide
  Sense strand starting at position 3757 of SEQ ID NO: 1884894
uuguaauaugagugaagau

SEQ ID NO: 2300135 - RNA, 19 nt, Artificial Sequence
  Description of Artificial Sequence: Synthetic oligonucleotide
  Antisense strand to SEQ ID NO: 2300134
aucuucacucauauuacaa

SEQ ID NO: 2300136 - RNA, 19 nt, Artificial Sequence
  Description of Artificial Sequence: Synthetic oligonucleotide
  Sense strand starting at position 3776 of SEQ ID NO: 1884894
acauauaaugcagggcuua

SEQ ID NO: 2300137 - RNA, 19 nt, Artificial Sequence
  Description of Artificial Sequence: Synthetic oligonucleotide
  Antisense strand to SEQ ID NO: 2300136
uaagcccugcauuauaugu

SEQ ID NO: 2300138 - RNA, 19 nt, Artificial Sequence
  Description of Artificial Sequence: Synthetic oligonucleotide
  Sense strand starting at position 3802 of SEQ ID NO: 1884894
ggaguuuggagucaggcuu

SEQ ID NO: 2300139 - RNA, 19 nt, Artificial Sequence
  Description of Artificial Sequence: Synthetic oligonucleotide
  Antisense strand to SEQ ID NO: 2300138
aagccugacuccaaacucc

SEQ ID NO: 2300140 - RNA, 19 nt, Artificial Sequence
  Description of Artificial Sequence: Synthetic oligonucleotide
  Sense strand starting at position 3808 of SEQ ID NO: 1884894
uggagucaggcuuauagga

SEQ ID NO: 2300141 - RNA, 19 nt, Artificial Sequence
  Description of Artificial Sequence: Synthetic oligonucleotide
  Antisense strand to SEQ ID NO: 2300140
uccuauaagccugacucca

SEQ ID NO: 2300142 - RNA, 19 nt, Artificial Sequence
  Description of Artificial Sequence: Synthetic oligonucleotide
  Sense strand starting at position 3813 of SEQ ID NO: 1884894
ucaggcuuauaggauuuaa

SEQ ID NO: 2300143 - RNA, 19 nt, Artificial Sequence
  Description of Artificial Sequence: Synthetic oligonucleotide
  Antisense strand to SEQ ID NO: 2300142
uuaaauccuauaagccuga

SEQ ID NO: 2300144 - RNA, 19 nt, Artificial Sequence
  Description of Artificial Sequence: Synthetic oligonucleotide
  Sense strand starting at position 284 of SEQ ID NO: 1884895
augugcuauggauacacau

SEQ ID NO: 2300145 - RNA, 19 nt, Artificial Sequence
  Description of Artificial Sequence: Synthetic oligonucleotide
  Antisense strand to SEQ ID NO: 2300144
auguguauccauagcacau

SEQ ID NO: 2300146 - RNA, 19 nt, Artificial Sequence
  Description of Artificial Sequence: Synthetic oligonucleotide
  Sense strand starting at position 499 of SEQ ID NO: 1884895
accuauagcagagguugaa

SEQ ID NO: 2300147 - RNA, 19 nt, Artificial Sequence
  Description of Artificial Sequence: Synthetic oligonucleotide
  Antisense strand to SEQ ID NO: 2300146
uucaaccucugcuauaggu

SEQ ID NO: 2300148 - RNA, 19 nt, Artificial Sequence
  Description of Artificial Sequence: Synthetic oligonucleotide
  Sense strand starting at position 638 of SEQ ID NO: 1884895
caagaauuggcuggaguuu

SEQ ID NO: 2300149 - RNA, 19 nt, Artificial Sequence
  Description of Artificial Sequence: Synthetic oligonucleotide
  Antisense strand to SEQ ID NO: 2300148
aaacuccagccaauucuug

SEQ ID NO: 2300150 - RNA, 19 nt, Artificial Sequence
  Description of Artificial Sequence: Synthetic oligonucleotide
  Sense strand starting at position 781 of SEQ ID NO: 1884895
gucucuggccuauaugauc

SEQ ID NO: 2300151 - RNA, 19 nt, Artificial Sequence
  Description of Artificial Sequence: Synthetic oligonucleotide
  Antisense strand to SEQ ID NO: 2300150
gaucauauaggccagagac

SEQ ID NO: 2300152 - RNA, 19 nt, Artificial Sequence
  Description of Artificial Sequence: Synthetic oligonucleotide
  Sense strand starting at position 786 of SEQ ID NO: 1884895
uggccuauaugaucauaga

SEQ ID NO: 2300153 - RNA, 19 nt, Artificial Sequence
  Description of Artificial Sequence: Synthetic oligonucleotide
  Antisense strand to SEQ ID NO: 2300152
ucuaugaucauauaggcca

SEQ ID NO: 2300154 - RNA, 19 nt, Artificial Sequence
  Description of Artificial Sequence: Synthetic oligonucleotide
  Sense strand starting at position 805 of SEQ ID NO: 1884895
cugucaguaguggaagaga

SEQ ID NO: 2300155 - RNA, 19 nt, Artificial Sequence
  Description of Artificial Sequence: Synthetic oligonucleotide
  Antisense strand to SEQ ID NO: 2300154
ucucuuccacuacugacag

SEQ ID NO: 2300156 - RNA, 19 nt, Artificial Sequence
  Description of Artificial Sequence: Synthetic oligonucleotide
  Sense strand starting at position 832 of SEQ ID NO: 1884895
gaucaacucgucuaacagu

SEQ ID NO: 2300157 - RNA, 19 nt, Artificial Sequence
  Description of Artificial Sequence: Synthetic oligonucleotide
  Antisense strand to SEQ ID NO: 2300156
acuguuagacgaguugauc

SEQ ID NO: 2300158 - RNA, 19 nt, Artificial Sequence
  Description of Artificial Sequence: Synthetic oligonucleotide
  Sense strand starting at position 894 of SEQ ID NO: 1884895
gucuaaagagcuuacauua

SEQ ID NO: 2300159 - RNA, 19 nt, Artificial Sequence
  Description of Artificial Sequence: Synthetic oligonucleotide
  Antisense strand to SEQ ID NO: 2300158
uaauguaagcucuuuagac

SEQ ID NO: 2300160 - RNA, 19 nt, Artificial Sequence
  Description of Artificial Sequence: Synthetic oligonucleotide
  Sense strand starting at position 975 of SEQ ID NO: 1884895
ccucauacggaucauguua

SEQ ID NO: 2300161 - RNA, 19 nt, Artificial Sequence
  Description of Artificial Sequence: Synthetic oligonucleotide
  Antisense strand to SEQ ID NO: 2300160
uaacaugauccguaugagg

SEQ ID NO: 2300162 - RNA, 19 nt, Artificial Sequence
  Description of Artificial Sequence: Synthetic oligonucleotide
  Sense strand starting at position 1010 of SEQ ID NO: 1884895
uugguuuaauugcuaggaa

SEQ ID NO: 2300163 - RNA, 19 nt, Artificial Sequence
  Description of Artificial Sequence: Synthetic oligonucleotide
  Antisense strand to SEQ ID NO: 2300162
uuccuagcaauuaaaccaa

SEQ ID NO: 2300164 - RNA, 19 nt, Artificial Sequence
  Description of Artificial Sequence: Synthetic oligonucleotide
  Sense strand starting at position 1164 of SEQ ID NO: 1884895
ccuauuauaguguguauuu

SEQ ID NO: 2300165 - RNA, 19 nt, Artificial Sequence
  Description of Artificial Sequence: Synthetic oligonucleotide
  Antisense strand to SEQ ID NO: 2300164
aaauacacacuauaauagg

SEQ ID NO: 2300166 - RNA, 19 nt, Artificial Sequence
  Description of Artificial Sequence: Synthetic oligonucleotide
  Sense strand starting at position 1575 of SEQ ID NO: 1884895
gaugacuggugagauuuau

SEQ ID NO: 2300167 - RNA, 19 nt, Artificial Sequence
  Description of Artificial Sequence: Synthetic oligonucleotide
  Antisense strand to SEQ ID NO: 2300166
auaaaucucaccagucauc

SEQ ID NO: 2300168 - RNA, 19 nt, Artificial Sequence
  Description of Artificial Sequence: Synthetic oligonucleotide
  Sense strand starting at position 2046 of SEQ ID NO: 1884895
cgacuucuuccggaaguau

SEQ ID NO: 2300169 - RNA, 19 nt, Artificial Sequence
  Description of Artificial Sequence: Synthetic oligonucleotide
  Antisense strand to SEQ ID NO: 2300168
auacuuccggaagaagucg

SEQ ID NO: 2300170 - RNA, 19 nt, Artificial Sequence
  Description of Artificial Sequence: Synthetic oligonucleotide
  Sense strand starting at position 2098 of SEQ ID NO: 1884895
guggcuuuacuagacagaa

SEQ ID NO: 2300171 - RNA, 19 nt, Artificial Sequence
  Description of Artificial Sequence: Synthetic oligonucleotide
  Antisense strand to SEQ ID NO: 2300170
uucugucuaguaaagccac

SEQ ID NO: 2300172 - RNA, 19 nt, Artificial Sequence
  Description of Artificial Sequence: Synthetic oligonucleotide
  Sense strand starting at position 2217 of SEQ ID NO: 1884895
ggaugaauuggacguuagu

SEQ ID NO: 2300173 - RNA, 19 nt, Artificial Sequence
  Description of Artificial Sequence: Synthetic oligonucleotide
  Antisense strand to SEQ ID NO: 2300172
acuaacguccaauucaucc

SEQ ID NO: 2300174 - RNA, 19 nt, Artificial Sequence
  Description of Artificial Sequence: Synthetic oligonucleotide
  Sense strand starting at position 2408 of SEQ ID NO: 1884895
ugcuuuauuugggaagaaa

SEQ ID NO: 2300175 - RNA, 19 nt, Artificial Sequence
  Description of Artificial Sequence: Synthetic oligonucleotide
  Antisense strand to SEQ ID NO: 2300174
uuucuucccaaauaaagca

SEQ ID NO: 2300176 - RNA, 19 nt, Artificial Sequence
  Description of Artificial Sequence: Synthetic oligonucleotide
  Sense strand starting at position 2510 of SEQ ID NO: 1884895
agaaauguuacguauuggu

SEQ ID NO: 2300177 - RNA, 19 nt, Artificial Sequence
  Description of Artificial Sequence: Synthetic oligonucleotide
  Antisense strand to SEQ ID NO: 2300176
accaauacguaacauuucu

SEQ ID NO: 2300178 - RNA, 19 nt, Artificial Sequence
  Description of Artificial Sequence: Synthetic oligonucleotide
  Sense strand starting at position 2520 of SEQ ID NO: 1884895
cguauuggucuccaagaga

SEQ ID NO: 2300179 - RNA, 19 nt, Artificial Sequence
  Description of Artificial Sequence: Synthetic oligonucleotide
  Antisense strand to SEQ ID NO: 2300178
ucucuuggagaccaauacg

SEQ ID NO: 2300180 - RNA, 19 nt, Artificial Sequence
  Description of Artificial Sequence: Synthetic oligonucleotide
  Sense strand starting at position 2523 of SEQ ID NO: 1884895
auuggucuccaagagaguu

SEQ ID NO: 2300181 - RNA, 19 nt, Artificial Sequence
  Description of Artificial Sequence: Synthetic oligonucleotide
  Antisense strand to SEQ ID NO: 2300180
aacucucuuggagaccaau

SEQ ID NO: 2300182 - RNA, 19 nt, Artificial Sequence
  Description of Artificial Sequence: Synthetic oligonucleotide
  Sense strand starting at position 2525 of SEQ ID NO: 1884895
uggucuccaagagaguuua

SEQ ID NO: 2300183 - RNA, 19 nt, Artificial Sequence
  Description of Artificial Sequence: Synthetic oligonucleotide
  Antisense strand to SEQ ID NO: 2300182
uaaacucucuuggagacca

SEQ ID NO: 2300184 - RNA, 19 nt, Artificial Sequence
  Description of Artificial Sequence: Synthetic oligonucleotide
  Sense strand starting at position 2535 of SEQ ID NO: 1884895
gagaguuuauuggcacuau

SEQ ID NO: 2300185 - RNA, 19 nt, Artificial Sequence
  Description of Artificial Sequence: Synthetic oligonucleotide
  Antisense strand to SEQ ID NO: 2300184
auagugccaauaaacucuc

SEQ ID NO: 2300186 - RNA, 19 nt, Artificial Sequence
  Description of Artificial Sequence: Synthetic oligonucleotide
  Sense strand starting at position 2539 of SEQ ID NO: 1884895
guuuauuggcacuauuaau

SEQ ID NO: 2300187 - RNA, 19 nt, Artificial Sequence
  Description of Artificial Sequence: Synthetic oligonucleotide
  Antisense strand to SEQ ID NO: 2300186
auuaauagugccaauaaac

SEQ ID NO: 2300188 - RNA, 19 nt, Artificial Sequence
  Description of Artificial Sequence: Synthetic oligonucleotide
  Sense strand starting at position 2634 of SEQ ID NO: 1884895
cuuaguagccuuuagauua

SEQ ID NO: 2300189 - RNA, 19 nt, Artificial Sequence
  Description of Artificial Sequence: Synthetic oligonucleotide
  Antisense strand to SEQ ID NO: 2300188
uaaucuaaaggcuacuaag

SEQ ID NO: 2300190 - RNA, 19 nt, Artificial Sequence
  Description of Artificial Sequence: Synthetic oligonucleotide
  Sense strand starting at position 2762 of SEQ ID NO: 1884895
cuuuaacugguaugacaaa

SEQ ID NO: 2300191 - RNA, 19 nt, Artificial Sequence
  Description of Artificial Sequence: Synthetic oligonucleotide
  Antisense strand to SEQ ID NO: 2300190
uuugucauaccaguuaaag

SEQ ID NO: 2300192 - RNA, 19 nt, Artificial Sequence
  Description of Artificial Sequence: Synthetic oligonucleotide
  Sense strand starting at position 2809 of SEQ ID NO: 1884895
acagcugacaggugguaaa

SEQ ID NO: 2300193 - RNA, 19 nt, Artificial Sequence
  Description of Artificial Sequence: Synthetic oligonucleotide
  Antisense strand to SEQ ID NO: 2300192
uuuaccaccugucagcugu

SEQ ID NO: 2300194 - RNA, 19 nt, Artificial Sequence
  Description of Artificial Sequence: Synthetic oligonucleotide
  Sense strand starting at position 2820 of SEQ ID NO: 1884895
gugguaaacucuuuacaau

SEQ ID NO: 2300195 - RNA, 19 nt, Artificial Sequence
  Description of Artificial Sequence: Synthetic oligonucleotide
  Antisense strand to SEQ ID NO: 2300194
auuguaaagaguuuaccac

SEQ ID NO: 2300196 - RNA, 19 nt, Artificial Sequence
  Description of Artificial Sequence: Synthetic oligonucleotide
  Sense strand starting at position 2992 of SEQ ID NO: 1884895
augugaauacuuuguagga

SEQ ID NO: 2300197 - RNA, 19 nt, Artificial Sequence
  Description of Artificial Sequence: Synthetic oligonucleotide
  Antisense strand to SEQ ID NO: 2300196
uccuacaaaguauucacau

SEQ ID NO: 2300198 - RNA, 19 nt, Artificial Sequence
  Description of Artificial Sequence: Synthetic oligonucleotide
  Sense strand starting at position 2993 of SEQ ID NO: 1884895
ugugaauacuuuguaggag

SEQ ID NO: 2300199 - RNA, 19 nt, Artificial Sequence
  Description of Artificial Sequence: Synthetic oligonucleotide
  Antisense strand to SEQ ID NO: 2300198
cuccuacaaaguauucaca

SEQ ID NO: 2300200 - RNA, 19 nt, Artificial Sequence
  Description of Artificial Sequence: Synthetic oligonucleotide
  Sense strand starting at position 2996 of SEQ ID NO: 1884895
gaauacuuuguaggagucu

SEQ ID NO: 2300201 - RNA, 19 nt, Artificial Sequence
  Description of Artificial Sequence: Synthetic oligonucleotide
  Antisense strand to SEQ ID NO: 2300200
agacuccuacaaaguauuc

SEQ ID NO: 2300202 - RNA, 19 nt, Artificial Sequence
  Description of Artificial Sequence: Synthetic oligonucleotide
  Sense strand starting at position 3007 of SEQ ID NO: 1884895
aggagucuuccagacccuu

SEQ ID NO: 2300203 - RNA, 19 nt, Artificial Sequence
  Description of Artificial Sequence: Synthetic oligonucleotide
  Antisense strand to SEQ ID NO: 2300202
aagggucuggaagacuccu

SEQ ID NO: 2300204 - RNA, 19 nt, Artificial Sequence
  Description of Artificial Sequence: Synthetic oligonucleotide
  Sense strand starting at position 3109 of SEQ ID NO: 1884895
gagacaaaguuacuguguu

SEQ ID NO: 2300205 - RNA, 19 nt, Artificial Sequence
  Description of Artificial Sequence: Synthetic oligonucleotide
  Antisense strand to SEQ ID NO: 2300204
aacacaguaacuuugucuc

SEQ ID NO: 2300206 - RNA, 19 nt, Artificial Sequence
  Description of Artificial Sequence: Synthetic oligonucleotide
  Sense strand starting at position 3639 of SEQ ID NO: 1884895
gacacuuaacaugguugua

SEQ ID NO: 2300207 - RNA, 19 nt, Artificial Sequence
  Description of Artificial Sequence: Synthetic oligonucleotide
  Antisense strand to SEQ ID NO: 2300206
uacaaccauguuaaguguc

SEQ ID NO: 2300208 - RNA, 19 nt, Artificial Sequence
  Description of Artificial Sequence: Synthetic oligonucleotide
  Sense strand starting at position 3642 of SEQ ID NO: 1884895
acuuaacaugguuguauau

SEQ ID NO: 2300209 - RNA, 19 nt, Artificial Sequence
  Description of Artificial Sequence: Synthetic oligonucleotide
  Antisense strand to SEQ ID NO: 2300208
auauacaaccauguuaagu

SEQ ID NO: 2300210 - RNA, 19 nt, Artificial Sequence
  Description of Artificial Sequence: Synthetic oligonucleotide
  Sense strand starting at position 3651 of SEQ ID NO: 1884895
gguuguauauauuccauua

SEQ ID NO: 2300211 - RNA, 19 nt, Artificial Sequence
  Description of Artificial Sequence: Synthetic oligonucleotide
  Antisense strand to SEQ ID NO: 2300210
uaauggaauauauacaacc

SEQ ID NO: 2300212 - RNA, 19 nt, Artificial Sequence
  Description of Artificial Sequence: Synthetic oligonucleotide
  Sense strand starting at position 3667 of SEQ ID NO: 1884895
uuauaccucuuguuggaua

SEQ ID NO: 2300213 - RNA, 19 nt, Artificial Sequence
  Description of Artificial Sequence: Synthetic oligonucleotide
  Antisense strand to SEQ ID NO: 2300212
uauccaacaagagguauaa

SEQ ID NO: 2300214 - RNA, 19 nt, Artificial Sequence
  Description of Artificial Sequence: Synthetic oligonucleotide
  Sense strand starting at position 3669 of SEQ ID NO: 1884895
auaccucuuguuggauauu

SEQ ID NO: 2300215 - RNA, 19 nt, Artificial Sequence
  Description of Artificial Sequence: Synthetic oligonucleotide
  Antisense strand to SEQ ID NO: 2300214
aauauccaacaagagguau

SEQ ID NO: 2300216 - RNA, 19 nt, Artificial Sequence
  Description of Artificial Sequence: Synthetic oligonucleotide
  Sense strand starting at position 3849 of SEQ ID NO: 1884895
caauuagugcugcaaugga

SEQ ID NO: 2300217 - RNA, 19 nt, Artificial Sequence
  Description of Artificial Sequence: Synthetic oligonucleotide
  Antisense strand to SEQ ID NO: 2300216
uccauugcagcacuaauug

SEQ ID NO: 2300218 - RNA, 19 nt, Artificial Sequence
  Description of Artificial Sequence: Synthetic oligonucleotide
  Sense strand starting at position 3854 of SEQ ID NO: 1884895
agugcugcaauggagaaau

SEQ ID NO: 2300219 - RNA, 19 nt, Artificial Sequence
  Description of Artificial Sequence: Synthetic oligonucleotide
  Antisense strand to SEQ ID NO: 2300218
auuucuccauugcagcacu

SEQ ID NO: 2300220 - RNA, 19 nt, Artificial Sequence
  Description of Artificial Sequence: Synthetic oligonucleotide
  Sense strand starting at position 3903 of SEQ ID NO: 1884895
gcucuaauuucuuuguggu

SEQ ID NO: 2300221 - RNA, 19 nt, Artificial Sequence
  Description of Artificial Sequence: Synthetic oligonucleotide
  Antisense strand to SEQ ID NO: 2300220
accacaaagaaauuagagc

SEQ ID NO: 2300222 - RNA, 19 nt, Artificial Sequence
  Description of Artificial Sequence: Synthetic oligonucleotide
  Sense strand starting at position 3904 of SEQ ID NO: 1884895
cucuaauuucuuuguggua

SEQ ID NO: 2300223 - RNA, 19 nt, Artificial Sequence
  Description of Artificial Sequence: Synthetic oligonucleotide
  Antisense strand to SEQ ID NO: 2300222
uaccacaaagaaauuagag

SEQ ID NO: 2300224 - RNA, 19 nt, Artificial Sequence
  Description of Artificial Sequence: Synthetic oligonucleotide
  Sense strand starting at position 223 of SEQ ID NO: 1884896
uguacugacugagcauaua

SEQ ID NO: 2300225 - RNA, 19 nt, Artificial Sequence
  Description of Artificial Sequence: Synthetic oligonucleotide
  Antisense strand to SEQ ID NO: 2300224
uauaugcucagucaguaca

SEQ ID NO: 2300226 - RNA, 19 nt, Artificial Sequence
  Description of Artificial Sequence: Synthetic oligonucleotide
  Sense strand starting at position 245 of SEQ ID NO: 1884896
ggacauaacuguccuauca

SEQ ID NO: 2300227 - RNA, 19 nt, Artificial Sequence
  Description of Artificial Sequence: Synthetic oligonucleotide
  Antisense strand to SEQ ID NO: 2300226
ugauaggacaguuaugucc

SEQ ID NO: 2300228 - RNA, 19 nt, Artificial Sequence
  Description of Artificial Sequence: Synthetic oligonucleotide
  Sense strand starting at position 255 of SEQ ID NO: 1884896
guccuaucauuucuguuau

SEQ ID NO: 2300229 - RNA, 19 nt, Artificial Sequence
  Description of Artificial Sequence: Synthetic oligonucleotide
  Antisense strand to SEQ ID NO: 2300228
auaacagaaaugauaggac

SEQ ID NO: 2300230 - RNA, 19 nt, Artificial Sequence
  Description of Artificial Sequence: Synthetic oligonucleotide
  Sense strand starting at position 381 of SEQ ID NO: 1884896
augacucuccuuugaguaa

SEQ ID NO: 2300231 - RNA, 19 nt, Artificial Sequence
  Description of Artificial Sequence: Synthetic oligonucleotide
  Antisense strand to SEQ ID NO: 2300230
uuacucaaaggagagucau

SEQ ID NO: 2300232 - RNA, 19 nt, Artificial Sequence
  Description of Artificial Sequence: Synthetic oligonucleotide
  Sense strand starting at position 640 of SEQ ID NO: 1884896
ugcuacagggcugagaauu

SEQ ID NO: 2300233 - RNA, 19 nt, Artificial Sequence
  Description of Artificial Sequence: Synthetic oligonucleotide
  Antisense strand to SEQ ID NO: 2300232
aauucucagcccuguagca

SEQ ID NO: 2300234 - RNA, 19 nt, Artificial Sequence
  Description of Artificial Sequence: Synthetic oligonucleotide
  Sense strand starting at position 740 of SEQ ID NO: 1884896
caggaucuuccugaacugu

SEQ ID NO: 2300235 - RNA, 19 nt, Artificial Sequence
  Description of Artificial Sequence: Synthetic oligonucleotide
  Antisense strand to SEQ ID NO: 2300234
acaguucaggaagauccug

SEQ ID NO: 2300236 - RNA, 19 nt, Artificial Sequence
  Description of Artificial Sequence: Synthetic oligonucleotide
  Sense strand starting at position 825 of SEQ ID NO: 1884896
acagaucugccucaguaug

SEQ ID NO: 2300237 - RNA, 19 nt, Artificial Sequence
  Description of Artificial Sequence: Synthetic oligonucleotide
  Antisense strand to SEQ ID NO: 2300236
cauacugaggcagaucugu

SEQ ID NO: 2300238 - RNA, 19 nt, Artificial Sequence
  Description of Artificial Sequence: Synthetic oligonucleotide
  Sense strand starting at position 948 of SEQ ID NO: 1884896
aaaguuucccuggaugcua

SEQ ID NO: 2300239 - RNA, 19 nt, Artificial Sequence
  Description of Artificial Sequence: Synthetic oligonucleotide
  Antisense strand to SEQ ID NO: 2300238
uagcauccagggaaacuuu

SEQ ID NO: 2300240 - RNA, 19 nt, Artificial Sequence
  Description of Artificial Sequence: Synthetic oligonucleotide
  Sense strand starting at position 959 of SEQ ID NO: 1884896
ggaugcuaaucuuccaaau

SEQ ID NO: 2300241 - RNA, 19 nt, Artificial Sequence
  Description of Artificial Sequence: Synthetic oligonucleotide
  Antisense strand to SEQ ID NO: 2300240
auuuggaagauuagcaucc

SEQ ID NO: 2300242 - RNA, 19 nt, Artificial Sequence
  Description of Artificial Sequence: Synthetic oligonucleotide
  Sense strand starting at position 986 of SEQ ID NO: 1884896
uugaauuuguccuuggcau

SEQ ID NO: 2300243 - RNA, 19 nt, Artificial Sequence
  Description of Artificial Sequence: Synthetic oligonucleotide
  Antisense strand to SEQ ID NO: 2300242
augccaaggacaaauucaa

SEQ ID NO: 2300244 - RNA, 19 nt, Artificial Sequence
  Description of Artificial Sequence: Synthetic oligonucleotide
  Sense strand starting at position 1239 of SEQ ID NO: 1884896
aggccuaaaccagguaaua

SEQ ID NO: 2300245 - RNA, 19 nt, Artificial Sequence
  Description of Artificial Sequence: Synthetic oligonucleotide
  Antisense strand to SEQ ID NO: 2300244
uauuaccugguuuaggccu

SEQ ID NO: 2300246 - RNA, 19 nt, Artificial Sequence
  Description of Artificial Sequence: Synthetic oligonucleotide
  Sense strand starting at position 1291 of SEQ ID NO: 1884896
caaaucugccacgaauugu

SEQ ID NO: 2300247 - RNA, 19 nt, Artificial Sequence
  Description of Artificial Sequence: Synthetic oligonucleotide
  Antisense strand to SEQ ID NO: 2300246
acaauucguggcagauuug

SEQ ID NO: 2300248 - RNA, 19 nt, Artificial Sequence
  Description of Artificial Sequence: Synthetic oligonucleotide
  Sense strand starting at position 1409 of SEQ ID NO: 1884896
aaaggauaucagugaugcu

SEQ ID NO: 2300249 - RNA, 19 nt, Artificial Sequence
  Description of Artificial Sequence: Synthetic oligonucleotide
  Antisense strand to SEQ ID NO: 2300248
agcaucacugauauccuuu

SEQ ID NO: 2300250 - RNA, 19 nt, Artificial Sequence
  Description of Artificial Sequence: Synthetic oligonucleotide
  Sense strand starting at position 1416 of SEQ ID NO: 1884896
aucagugaugcucagauac

SEQ ID NO: 2300251 - RNA, 19 nt, Artificial Sequence
  Description of Artificial Sequence: Synthetic oligonucleotide
  Antisense strand to SEQ ID NO: 2300250
guaucugagcaucacugau

SEQ ID NO: 2300252 - RNA, 19 nt, Artificial Sequence
  Description of Artificial Sequence: Synthetic oligonucleotide
  Sense strand starting at position 1423 of SEQ ID NO: 1884896
augcucagauaccuagaaa

SEQ ID NO: 2300253 - RNA, 19 nt, Artificial Sequence
  Description of Artificial Sequence: Synthetic oligonucleotide
  Antisense strand to SEQ ID NO: 2300252
uuucuagguaucugagcau

SEQ ID NO: 2300254 - RNA, 19 nt, Artificial Sequence
  Description of Artificial Sequence: Synthetic oligonucleotide
  Sense strand starting at position 1449 of SEQ ID NO: 1884896
ccuacaauucuagagcugu

SEQ ID NO: 2300255 - RNA, 19 nt, Artificial Sequence
  Description of Artificial Sequence: Synthetic oligonucleotide
  Antisense strand to SEQ ID NO: 2300254
acagcucuagaauuguagg

SEQ ID NO: 2300256 - RNA, 19 nt, Artificial Sequence
  Description of Artificial Sequence: Synthetic oligonucleotide
  Sense strand starting at position 1558 of SEQ ID NO: 1884896
gugccaaagcuagaugaaa

SEQ ID NO: 2300257 - RNA, 19 nt, Artificial Sequence
  Description of Artificial Sequence: Synthetic oligonucleotide
  Antisense strand to SEQ ID NO: 2300256
uuucaucuagcuuuggcac

SEQ ID NO: 2300258 - RNA, 19 nt, Artificial Sequence
  Description of Artificial Sequence: Synthetic oligonucleotide
  Sense strand starting at position 1644 of SEQ ID NO: 1884896
uguugagauuugccgaguu

SEQ ID NO: 2300259 - RNA, 19 nt, Artificial Sequence
  Description of Artificial Sequence: Synthetic oligonucleotide
  Antisense strand to SEQ ID NO: 2300258
aacucggcaaaucucaaca

SEQ ID NO: 2300260 - RNA, 19 nt, Artificial Sequence
  Description of Artificial Sequence: Synthetic oligonucleotide
  Sense strand starting at position 1736 of SEQ ID NO: 1884896
gguugaagacggcauaaga

SEQ ID NO: 2300261 - RNA, 19 nt, Artificial Sequence
  Description of Artificial Sequence: Synthetic oligonucleotide
  Antisense strand to SEQ ID NO: 2300260
ucuuaugccgucuucaacc

SEQ ID NO: 2300262 - RNA, 19 nt, Artificial Sequence
  Description of Artificial Sequence: Synthetic oligonucleotide
  Sense strand starting at position 1745 of SEQ ID NO: 1884896
cggcauaagaacgacauaa

SEQ ID NO: 2300263 - RNA, 19 nt, Artificial Sequence
  Description of Artificial Sequence: Synthetic oligonucleotide
  Antisense strand to SEQ ID NO: 2300262
uuaugucguucuuaugccg

SEQ ID NO: 2300264 - RNA, 19 nt, Artificial Sequence
  Description of Artificial Sequence: Synthetic oligonucleotide
  Sense strand starting at position 2024 of SEQ ID NO: 1884896
ugugaagacuugcucagag

SEQ ID NO: 2300265 - RNA, 19 nt, Artificial Sequence
  Description of Artificial Sequence: Synthetic oligonucleotide
  Antisense strand to SEQ ID NO: 2300264
cucugagcaagucuucaca

SEQ ID NO: 2300266 - RNA, 19 nt, Artificial Sequence
  Description of Artificial Sequence: Synthetic oligonucleotide
  Sense strand starting at position 2173 of SEQ ID NO: 1884896
uaaagugacuuaguuuaag

SEQ ID NO: 2300267 - RNA, 19 nt, Artificial Sequence
  Description of Artificial Sequence: Synthetic oligonucleotide
  Antisense strand to SEQ ID NO: 2300266
cuuaaacuaagucacuuua

SEQ ID NO: 2300268 - RNA, 19 nt, Artificial Sequence
  Description of Artificial Sequence: Synthetic oligonucleotide
  Sense strand starting at position 2215 of SEQ ID NO: 1884896
gucagaguccaguauauga

SEQ ID NO: 2300269 - RNA, 19 nt, Artificial Sequence
  Description of Artificial Sequence: Synthetic oligonucleotide
  Antisense strand to SEQ ID NO: 2300268
ucauauacuggacucugac

SEQ ID NO: 2300270 - RNA, 19 nt, Artificial Sequence
  Description of Artificial Sequence: Synthetic oligonucleotide
  Sense strand starting at position 2684 of SEQ ID NO: 1884896
agugcagugccugcuagau

SEQ ID NO: 2300271 - RNA, 19 nt, Artificial Sequence
  Description of Artificial Sequence: Synthetic oligonucleotide
  Antisense strand to SEQ ID NO: 2300270
aucuagcaggcacugcacu

SEQ ID NO: 2300272 - RNA, 19 nt, Artificial Sequence
  Description of Artificial Sequence: Synthetic oligonucleotide
  Sense strand starting at position 2716 of SEQ ID NO: 1884896
auguuuguggaguaaagga

SEQ ID NO: 2300273 - RNA, 19 nt, Artificial Sequence
  Description of Artificial Sequence: Synthetic oligonucleotide
  Antisense strand to SEQ ID NO: 2300272
uccuuuacuccacaaacau

SEQ ID NO: 2300274 - RNA, 19 nt, Artificial Sequence
  Description of Artificial Sequence: Synthetic oligonucleotide
  Sense strand starting at position 2818 of SEQ ID NO: 1884896
cuugucacacccgaacauu

SEQ ID NO: 2300275 - RNA, 19 nt, Artificial Sequence
  Description of Artificial Sequence: Synthetic oligonucleotide
  Antisense strand to SEQ ID NO: 2300274
aauguucgggugugacaag

SEQ ID NO: 2300276 - RNA, 19 nt, Artificial Sequence
  Description of Artificial Sequence: Synthetic oligonucleotide
  Sense strand starting at position 3005 of SEQ ID NO: 1884896
caagcugucgcagacauuu

SEQ ID NO: 2300277 - RNA, 19 nt, Artificial Sequence
  Description of Artificial Sequence: Synthetic oligonucleotide
  Antisense strand to SEQ ID NO: 2300276
aaaugucugcgacagcuug

SEQ ID NO: 2300278 - RNA, 19 nt, Artificial Sequence
  Description of Artificial Sequence: Synthetic oligonucleotide
  Sense strand starting at position 3178 of SEQ ID NO: 1884896
guuuguagaaugcagaauu

SEQ ID NO: 2300279 - RNA, 19 nt, Artificial Sequence
  Description of Artificial Sequence: Synthetic oligonucleotide
  Antisense strand to SEQ ID NO: 2300278
aauucugcauucuacaaac

SEQ ID NO: 2300280 - RNA, 19 nt, Artificial Sequence
  Description of Artificial Sequence: Synthetic oligonucleotide
  Sense strand starting at position 3216 of SEQ ID NO: 1884896
aggcuucuggagcaugaga

SEQ ID NO: 2300281 - RNA, 19 nt, Artificial Sequence
  Description of Artificial Sequence: Synthetic oligonucleotide
  Antisense strand to SEQ ID NO: 2300280
ucucaugcuccagaagccu

SEQ ID NO: 2300282 - RNA, 19 nt, Artificial Sequence
  Description of Artificial Sequence: Synthetic oligonucleotide
  Sense strand starting at position 3401 of SEQ ID NO: 1884896
uguggaauaugaucuauag

SEQ ID NO: 2300283 - RNA, 19 nt, Artificial Sequence
  Description of Artificial Sequence: Synthetic oligonucleotide
  Antisense strand to SEQ ID NO: 2300282
cuauagaucauauuccaca

SEQ ID NO: 2300284 - RNA, 19 nt, Artificial Sequence
  Description of Artificial Sequence: Synthetic oligonucleotide
  Sense strand starting at position 3432 of SEQ ID NO: 1884896
ugguguauuugguuuccaa

SEQ ID NO: 2300285 - RNA, 19 nt, Artificial Sequence
  Description of Artificial Sequence: Synthetic oligonucleotide
  Antisense strand to SEQ ID NO: 2300284
uuggaaaccaaauacacca

SEQ ID NO: 2300286 - RNA, 19 nt, Artificial Sequence
  Description of Artificial Sequence: Synthetic oligonucleotide
  Sense strand starting at position 3505 of SEQ ID NO: 1884896
guaguuaaucaagagguag

SEQ ID NO: 2300287 - RNA, 19 nt, Artificial Sequence
  Description of Artificial Sequence: Synthetic oligonucleotide
  Antisense strand to SEQ ID NO: 2300286
cuaccucuugauuaacuac

SEQ ID NO: 2300288 - RNA, 19 nt, Artificial Sequence
  Description of Artificial Sequence: Synthetic oligonucleotide
  Sense strand starting at position 3564 of SEQ ID NO: 1884896
uauacuauggcagaguaau

SEQ ID NO: 2300289 - RNA, 19 nt, Artificial Sequence
  Description of Artificial Sequence: Synthetic oligonucleotide
  Antisense strand to SEQ ID NO: 2300288
auuacucugccauaguaua

SEQ ID NO: 2300290 - RNA, 19 nt, Artificial Sequence
  Description of Artificial Sequence: Synthetic oligonucleotide
  Sense strand starting at position 3575 of SEQ ID NO: 1884896
agaguaauugauugcuaga

SEQ ID NO: 2300291 - RNA, 19 nt, Artificial Sequence
  Description of Artificial Sequence: Synthetic oligonucleotide
  Antisense strand to SEQ ID NO: 2300290
ucuagcaaucaauuacucu

SEQ ID NO: 2300292 - RNA, 19 nt, Artificial Sequence
  Description of Artificial Sequence: Synthetic oligonucleotide
  Sense strand starting at position 3577 of SEQ ID NO: 1884896
aguaauugauugcuagauu

SEQ ID NO: 2300293 - RNA, 19 nt, Artificial Sequence
  Description of Artificial Sequence: Synthetic oligonucleotide
  Antisense strand to SEQ ID NO: 2300292
aaucuagcaaucaauuacu

SEQ ID NO: 2300294 - RNA, 19 nt, Artificial Sequence
  Description of Artificial Sequence: Synthetic oligonucleotide
  Sense strand starting at position 3586 of SEQ ID NO: 1884896
uugcuagauuuaucacgcu

SEQ ID NO: 2300295 - RNA, 19 nt, Artificial Sequence
  Description of Artificial Sequence: Synthetic oligonucleotide
  Antisense strand to SEQ ID NO: 2300294
agcgugauaaaucuagcaa

SEQ ID NO: 2300296 - RNA, 19 nt, Artificial Sequence
  Description of Artificial Sequence: Synthetic oligonucleotide
  Sense strand starting at position 3624 of SEQ ID NO: 1884896
uguuguauugauuaaggac

SEQ ID NO: 2300297 - RNA, 19 nt, Artificial Sequence
  Description of Artificial Sequence: Synthetic oligonucleotide
  Antisense strand to SEQ ID NO: 2300296
guccuuaaucaauacaaca

SEQ ID NO: 2300298 - RNA, 19 nt, Artificial Sequence
  Description of Artificial Sequence: Synthetic oligonucleotide
  Sense strand starting at position 3653 of SEQ ID NO: 1884896
ugugaaacauaucugcaua

SEQ ID NO: 2300299 - RNA, 19 nt, Artificial Sequence
  Description of Artificial Sequence: Synthetic oligonucleotide
  Antisense strand to SEQ ID NO: 2300298
uaugcagauauguuucaca

SEQ ID NO: 2300300 - RNA, 19 nt, Artificial Sequence
  Description of Artificial Sequence: Synthetic oligonucleotide
  Sense strand starting at position 3921 of SEQ ID NO: 1884896
gcugucacagucuaugaaa

SEQ ID NO: 2300301 - RNA, 19 nt, Artificial Sequence
  Description of Artificial Sequence: Synthetic oligonucleotide
  Antisense strand to SEQ ID NO: 2300300
uuucauagacugugacagc

SEQ ID NO: 2300302 - RNA, 19 nt, Artificial Sequence
  Description of Artificial Sequence: Synthetic oligonucleotide
  Sense strand starting at position 3966 of SEQ ID NO: 1884896
ugagucuuccucugacaga

SEQ ID NO: 2300303 - RNA, 19 nt, Artificial Sequence
  Description of Artificial Sequence: Synthetic oligonucleotide
  Antisense strand to SEQ ID NO: 2300302
ucugucagaggaagacuca

SEQ ID NO: 2300304 - RNA, 19 nt, Artificial Sequence
  Description of Artificial Sequence: Synthetic oligonucleotide
  Sense strand starting at position 190 of SEQ ID NO: 1884897
ggagcaaauugauugcuau

SEQ ID NO: 2300305 - RNA, 19 nt, Artificial Sequence
  Description of Artificial Sequence: Synthetic oligonucleotide
  Antisense strand to SEQ ID NO: 2300304
auagcaaucaauuugcucc

SEQ ID NO: 2300306 - RNA, 19 nt, Artificial Sequence
  Description of Artificial Sequence: Synthetic oligonucleotide
  Sense strand starting at position 281 of SEQ ID NO: 1884897
guguuaaaggacuaaagca

SEQ ID NO: 2300307 - RNA, 19 nt, Artificial Sequence
  Description of Artificial Sequence: Synthetic oligonucleotide
  Antisense strand to SEQ ID NO: 2300306
ugcuuuaguccuuuaacac

SEQ ID NO: 2300308 - RNA, 19 nt, Artificial Sequence
  Description of Artificial Sequence: Synthetic oligonucleotide
  Sense strand starting at position 348 of SEQ ID NO: 1884897
acaugauggcucuggugga

SEQ ID NO: 2300309 - RNA, 19 nt, Artificial Sequence
  Description of Artificial Sequence: Synthetic oligonucleotide
  Antisense strand to SEQ ID NO: 2300308
uccaccagagccaucaugu

SEQ ID NO: 2300310 - RNA, 19 nt, Artificial Sequence
  Description of Artificial Sequence: Synthetic oligonucleotide
  Sense strand starting at position 450 of SEQ ID NO: 1884897
gcuccauuggucgcacuuu

SEQ ID NO: 2300311 - RNA, 19 nt, Artificial Sequence
  Description of Artificial Sequence: Synthetic oligonucleotide
  Antisense strand to SEQ ID NO: 2300310
aaagugcgaccaauggagc

SEQ ID NO: 2300312 - RNA, 19 nt, Artificial Sequence
  Description of Artificial Sequence: Synthetic oligonucleotide
  Sense strand starting at position 460 of SEQ ID NO: 1884897
ucgcacuuucucuaaagga

SEQ ID NO: 2300313 - RNA, 19 nt, Artificial Sequence
  Description of Artificial Sequence: Synthetic oligonucleotide
  Antisense strand to SEQ ID NO: 2300312
uccuuuagagaaagugcga

SEQ ID NO: 2300314 - RNA, 19 nt, Artificial Sequence
  Description of Artificial Sequence: Synthetic oligonucleotide
  Sense strand starting at position 660 of SEQ ID NO: 1884897
guggaaucagcuugauaca

SEQ ID NO: 2300315 - RNA, 19 nt, Artificial Sequence
  Description of Artificial Sequence: Synthetic oligonucleotide
  Antisense strand to SEQ ID NO: 2300314
uguaucaagcugauuccac

SEQ ID NO: 2300316 - RNA, 19 nt, Artificial Sequence
  Description of Artificial Sequence: Synthetic oligonucleotide
  Sense strand starting at position 750 of SEQ ID NO: 1884897
gagcuaaggguuuguagaa

SEQ ID NO: 2300317 - RNA, 19 nt, Artificial Sequence
  Description of Artificial Sequence: Synthetic oligonucleotide
  Antisense strand to SEQ ID NO: 2300316
uucuacaaacccuuagcuc

SEQ ID NO: 2300318 - RNA, 19 nt, Artificial Sequence
  Description of Artificial Sequence: Synthetic oligonucleotide
  Sense strand starting at position 820 of SEQ ID NO: 1884897
uuaagaacucuugguuaua

SEQ ID NO: 2300319 - RNA, 19 nt, Artificial Sequence
  Description of Artificial Sequence: Synthetic oligonucleotide
  Antisense strand to SEQ ID NO: 2300318
uauaaccaagaguucuuaa

SEQ ID NO: 2300320 - RNA, 19 nt, Artificial Sequence
  Description of Artificial Sequence: Synthetic oligonucleotide
  Sense strand starting at position 846 of SEQ ID NO: 1884897
uuuguacaugccuaagauc

SEQ ID NO: 2300321 - RNA, 19 nt, Artificial Sequence
  Description of Artificial Sequence: Synthetic oligonucleotide
  Antisense strand to SEQ ID NO: 2300320
gaucuuaggcauguacaaa

SEQ ID NO: 2300322 - RNA, 19 nt, Artificial Sequence
  Description of Artificial Sequence: Synthetic oligonucleotide
  Sense strand starting at position 925 of SEQ ID NO: 1884897
ucaguaacucuggauucua

SEQ ID NO: 2300323 - RNA, 19 nt, Artificial Sequence
  Description of Artificial Sequence: Synthetic oligonucleotide
  Antisense strand to SEQ ID NO: 2300322
uagaauccagaguuacuga

SEQ ID NO: 2300324 - RNA, 19 nt, Artificial Sequence
  Description of Artificial Sequence: Synthetic oligonucleotide
  Sense strand starting at position 957 of SEQ ID NO: 1884897
ugucuaagguuauugacca

SEQ ID NO: 2300325 - RNA, 19 nt, Artificial Sequence
  Description of Artificial Sequence: Synthetic oligonucleotide
  Antisense strand to SEQ ID NO: 2300324
uggucaauaaccuuagaca

SEQ ID NO: 2300326 - RNA, 19 nt, Artificial Sequence
  Description of Artificial Sequence: Synthetic oligonucleotide
  Sense strand starting at position 961 of SEQ ID NO: 1884897
uaagguuauugaccagaua

SEQ ID NO: 2300327 - RNA, 19 nt, Artificial Sequence
  Description of Artificial Sequence: Synthetic oligonucleotide
  Antisense strand to SEQ ID NO: 2300326
uaucuggucaauaaccuua

SEQ ID NO: 2300328 - RNA, 19 nt, Artificial Sequence
  Description of Artificial Sequence: Synthetic oligonucleotide
  Sense strand starting at position 1191 of SEQ ID NO: 1884897
uguucugggcaauagaaau

SEQ ID NO: 2300329 - RNA, 19 nt, Artificial Sequence
  Description of Artificial Sequence: Synthetic oligonucleotide
  Antisense strand to SEQ ID NO: 2300328
auuucuauugcccagaaca

SEQ ID NO: 2300330 - RNA, 19 nt, Artificial Sequence
  Description of Artificial Sequence: Synthetic oligonucleotide
  Sense strand starting at position 1288 of SEQ ID NO: 1884897
uaggcaugugaucaguauu

SEQ ID NO: 2300331 - RNA, 19 nt, Artificial Sequence
  Description of Artificial Sequence: Synthetic oligonucleotide
  Antisense strand to SEQ ID NO: 2300330
aauacugaucacaugccua

SEQ ID NO: 2300332 - RNA, 19 nt, Artificial Sequence
  Description of Artificial Sequence: Synthetic oligonucleotide
  Sense strand starting at position 1291 of SEQ ID NO: 1884897
gcaugugaucaguauuagg

SEQ ID NO: 2300333 - RNA, 19 nt, Artificial Sequence
  Description of Artificial Sequence: Synthetic oligonucleotide
  Antisense strand to SEQ ID NO: 2300332
ccuaauacugaucacaugc

SEQ ID NO: 2300334 - RNA, 19 nt, Artificial Sequence
  Description of Artificial Sequence: Synthetic oligonucleotide
  Sense strand starting at position 1478 of SEQ ID NO: 1884897
gcaaucaagguagaucuua

SEQ ID NO: 2300335 - RNA, 19 nt, Artificial Sequence
  Description of Artificial Sequence: Synthetic oligonucleotide
  Antisense strand to SEQ ID NO: 2300334
uaagaucuaccuugauugc

SEQ ID NO: 2300336 - RNA, 19 nt, Artificial Sequence
  Description of Artificial Sequence: Synthetic oligonucleotide
  Sense strand starting at position 1501 of SEQ ID NO: 1884897
gaaagaauuugcuagaaag

SEQ ID NO: 2300337 - RNA, 19 nt, Artificial Sequence
  Description of Artificial Sequence: Synthetic oligonucleotide
  Antisense strand to SEQ ID NO: 2300336
cuuucuagcaaauucuuuc

SEQ ID NO: 2300338 - RNA, 19 nt, Artificial Sequence
  Description of Artificial Sequence: Synthetic oligonucleotide
  Sense strand starting at position 1573 of SEQ ID NO: 1884897
gugugaucaguucaaggaa

SEQ ID NO: 2300339 - RNA, 19 nt, Artificial Sequence
  Description of Artificial Sequence: Synthetic oligonucleotide
  Antisense strand to SEQ ID NO: 2300338
uuccuugaacugaucacac

SEQ ID NO: 2300340 - RNA, 19 nt, Artificial Sequence
  Description of Artificial Sequence: Synthetic oligonucleotide
  Sense strand starting at position 1640 of SEQ ID NO: 1884897
gaguguuugcuuuaggaau

SEQ ID NO: 2300341 - RNA, 19 nt, Artificial Sequence
  Description of Artificial Sequence: Synthetic oligonucleotide
  Antisense strand to SEQ ID NO: 2300340
auuccuaaagcaaacacuc

SEQ ID NO: 2300342 - RNA, 19 nt, Artificial Sequence
  Description of Artificial Sequence: Synthetic oligonucleotide
  Sense strand starting at position 1668 of SEQ ID NO: 1884897
ugugaugaucaaggagguu

SEQ ID NO: 2300343 - RNA, 19 nt, Artificial Sequence
  Description of Artificial Sequence: Synthetic oligonucleotide
  Antisense strand to SEQ ID NO: 2300342
aaccuccuugaucaucaca

SEQ ID NO: 2300344 - RNA, 19 nt, Artificial Sequence
  Description of Artificial Sequence: Synthetic oligonucleotide
  Sense strand starting at position 1687 of SEQ ID NO: 1884897
cuggguuggugaaaugaag

SEQ ID NO: 2300345 - RNA, 19 nt, Artificial Sequence
  Description of Artificial Sequence: Synthetic oligonucleotide
  Antisense strand to SEQ ID NO: 2300344
cuucauuucaccaacccag

SEQ ID NO: 2300346 - RNA, 19 nt, Artificial Sequence
  Description of Artificial Sequence: Synthetic oligonucleotide
  Sense strand starting at position 1719 of SEQ ID NO: 1884897
ggaguuguucggucuuguu

SEQ ID NO: 2300347 - RNA, 19 nt, Artificial Sequence
  Description of Artificial Sequence: Synthetic oligonucleotide
  Antisense strand to SEQ ID NO: 2300346
aacaagaccgaacaacucc

SEQ ID NO: 2300348 - RNA, 19 nt, Artificial Sequence
  Description of Artificial Sequence: Synthetic oligonucleotide
  Sense strand starting at position 1968 of SEQ ID NO: 1884897
ucaauagacucuguuauga

SEQ ID NO: 2300349 - RNA, 19 nt, Artificial Sequence
  Description of Artificial Sequence: Synthetic oligonucleotide
  Antisense strand to SEQ ID NO: 2300348
ucauaacagagucuauuga

SEQ ID NO: 2300350 - RNA, 19 nt, Artificial Sequence
  Description of Artificial Sequence: Synthetic oligonucleotide
  Sense strand starting at position 1976 of SEQ ID NO: 1884897
cucuguuaugaugaucaau

SEQ ID NO: 2300351 - RNA, 19 nt, Artificial Sequence
  Description of Artificial Sequence: Synthetic oligonucleotide
  Antisense strand to SEQ ID NO: 2300350
auugaucaucauaacagag

SEQ ID NO: 2300352 - RNA, 19 nt, Artificial Sequence
  Description of Artificial Sequence: Synthetic oligonucleotide
  Sense strand starting at position 1978 of SEQ ID NO: 1884897
cuguuaugaugaucaauga

SEQ ID NO: 2300353 - RNA, 19 nt, Artificial Sequence
  Description of Artificial Sequence: Synthetic oligonucleotide
  Antisense strand to SEQ ID NO: 2300352
ucauugaucaucauaacag

SEQ ID NO: 2300354 - RNA, 19 nt, Artificial Sequence
  Description of Artificial Sequence: Synthetic oligonucleotide
  Sense strand starting at position 1988 of SEQ ID NO: 1884897
gaucaaugagcucaguuaa

SEQ ID NO: 2300355 - RNA, 19 nt, Artificial Sequence
  Description of Artificial Sequence: Synthetic oligonucleotide
  Antisense strand to SEQ ID NO: 2300354
uuaacugagcucauugauc

SEQ ID NO: 2300356 - RNA, 19 nt, Artificial Sequence
  Description of Artificial Sequence: Synthetic oligonucleotide
  Sense strand starting at position 2066 of SEQ ID NO: 1884897
guaucugccacugagugaa

SEQ ID NO: 2300357 - RNA, 19 nt, Artificial Sequence
  Description of Artificial Sequence: Synthetic oligonucleotide
  Antisense strand to SEQ ID NO: 2300356
uucacucaguggcagauac

SEQ ID NO: 2300358 - RNA, 19 nt, Artificial Sequence
  Description of Artificial Sequence: Synthetic oligonucleotide
  Sense strand starting at position 2131 of SEQ ID NO: 1884897
augaaucauugcuuugaag

SEQ ID NO: 2300359 - RNA, 19 nt, Artificial Sequence
  Description of Artificial Sequence: Synthetic oligonucleotide
  Antisense strand to SEQ ID NO: 2300358
cuucaaagcaaugauucau

SEQ ID NO: 2300360 - RNA, 19 nt, Artificial Sequence
  Description of Artificial Sequence: Synthetic oligonucleotide
  Sense strand starting at position 2256 of SEQ ID NO: 1884897
ggguaagauuggagacaga

SEQ ID NO: 2300361 - RNA, 19 nt, Artificial Sequence
  Description of Artificial Sequence: Synthetic oligonucleotide
  Antisense strand to SEQ ID NO: 2300360
ucugucuccaaucuuaccc

SEQ ID NO: 2300362 - RNA, 19 nt, Artificial Sequence
  Description of Artificial Sequence: Synthetic oligonucleotide
  Sense strand starting at position 2280 of SEQ ID NO: 1884897
caguuaggagacuguuaug

SEQ ID NO: 2300363 - RNA, 19 nt, Artificial Sequence
  Description of Artificial Sequence: Synthetic oligonucleotide
  Antisense strand to SEQ ID NO: 2300362
cauaacagucuccuaacug

SEQ ID NO: 2300364 - RNA, 19 nt, Artificial Sequence
  Description of Artificial Sequence: Synthetic oligonucleotide
  Sense strand starting at position 2295 of SEQ ID NO: 1884897
uauguugaucuuggugaaa

SEQ ID NO: 2300365 - RNA, 19 nt, Artificial Sequence
  Description of Artificial Sequence: Synthetic oligonucleotide
  Antisense strand to SEQ ID NO: 2300364
uuucaccaagaucaacaua

SEQ ID NO: 2300366 - RNA, 19 nt, Artificial Sequence
  Description of Artificial Sequence: Synthetic oligonucleotide
  Sense strand starting at position 2298 of SEQ ID NO: 1884897
guugaucuuggugaaagau

SEQ ID NO: 2300367 - RNA, 19 nt, Artificial Sequence
  Description of Artificial Sequence: Synthetic oligonucleotide
  Antisense strand to SEQ ID NO: 2300366
aucuuucaccaagaucaac

SEQ ID NO: 2300368 - RNA, 19 nt, Artificial Sequence
  Description of Artificial Sequence: Synthetic oligonucleotide
  Sense strand starting at position 2375 of SEQ ID NO: 1884897
acaccaagaucguuacuua

SEQ ID NO: 2300369 - RNA, 19 nt, Artificial Sequence
  Description of Artificial Sequence: Synthetic oligonucleotide
  Antisense strand to SEQ ID NO: 2300368
uaaguaacgaucuuggugu

SEQ ID NO: 2300370 - RNA, 19 nt, Artificial Sequence
  Description of Artificial Sequence: Synthetic oligonucleotide
  Sense strand starting at position 2546 of SEQ ID NO: 1884897
guauacauuguguaauauc

SEQ ID NO: 2300371 - RNA, 19 nt, Artificial Sequence
  Description of Artificial Sequence: Synthetic oligonucleotide
  Antisense strand to SEQ ID NO: 2300370
gauauuacacaauguauac

SEQ ID NO: 2300372 - RNA, 19 nt, Artificial Sequence
  Description of Artificial Sequence: Synthetic oligonucleotide
  Sense strand starting at position 2919 of SEQ ID NO: 1884897
acucauguugugcaaauaa

SEQ ID NO: 2300373 - RNA, 19 nt, Artificial Sequence
  Description of Artificial Sequence: Synthetic oligonucleotide
  Antisense strand to SEQ ID NO: 2300372
uuauuugcacaacaugagu

SEQ ID NO: 2300374 - RNA, 19 nt, Artificial Sequence
  Description of Artificial Sequence: Synthetic oligonucleotide
  Sense strand starting at position 3325 of SEQ ID NO: 1884897
ugagacucauguuucuuaa

SEQ ID NO: 2300375 - RNA, 19 nt, Artificial Sequence
  Description of Artificial Sequence: Synthetic oligonucleotide
  Antisense strand to SEQ ID NO: 2300374
uuaagaaacaugagucuca

SEQ ID NO: 2300376 - RNA, 19 nt, Artificial Sequence
  Description of Artificial Sequence: Synthetic oligonucleotide
  Sense strand starting at position 3347 of SEQ ID NO: 1884897
acauuauaguaagcuggau

SEQ ID NO: 2300377 - RNA, 19 nt, Artificial Sequence
  Description of Artificial Sequence: Synthetic oligonucleotide
  Antisense strand to SEQ ID NO: 2300376
auccagcuuacuauaaugu

SEQ ID NO: 2300378 - RNA, 19 nt, Artificial Sequence
  Description of Artificial Sequence: Synthetic oligonucleotide
  Sense strand starting at position 3395 of SEQ ID NO: 1884897
ugucauguuguggaaauca

SEQ ID NO: 2300379 - RNA, 19 nt, Artificial Sequence
  Description of Artificial Sequence: Synthetic oligonucleotide
  Antisense strand to SEQ ID NO: 2300378
ugauuuccacaacaugaca

SEQ ID NO: 2300380 - RNA, 19 nt, Artificial Sequence
  Description of Artificial Sequence: Synthetic oligonucleotide
  Sense strand starting at position 3545 of SEQ ID NO: 1884897
ugucuuaugggaggucuga

SEQ ID NO: 2300381 - RNA, 19 nt, Artificial Sequence
  Description of Artificial Sequence: Synthetic oligonucleotide
  Antisense strand to SEQ ID NO: 2300380
ucagaccucccauaagaca

SEQ ID NO: 2300382 - RNA, 19 nt, Artificial Sequence
  Description of Artificial Sequence: Synthetic oligonucleotide
  Sense strand starting at position 3935 of SEQ ID NO: 1884897
gaguuugaauuugacaaau

SEQ ID NO: 2300383 - RNA, 19 nt, Artificial Sequence
  Description of Artificial Sequence: Synthetic oligonucleotide
  Antisense strand to SEQ ID NO: 2300382
auuugucaaauucaaacuc

SEQ ID NO: 2300384 - RNA, 19 nt, Artificial Sequence
  Description of Artificial Sequence: Synthetic oligonucleotide
  Sense strand starting at position 143 of SEQ ID NO: 1884898
acuccauucuaguaggaga

SEQ ID NO: 2300385 - RNA, 19 nt, Artificial Sequence
  Description of Artificial Sequence: Synthetic oligonucleotide
  Antisense strand to SEQ ID NO: 2300384
ucuccuacuagaauggagu

SEQ ID NO: 2300386 - RNA, 19 nt, Artificial Sequence
  Description of Artificial Sequence: Synthetic oligonucleotide
  Sense strand starting at position 145 of SEQ ID NO: 1884898
uccauucuaguaggagaga

SEQ ID NO: 2300387 - RNA, 19 nt, Artificial Sequence
  Description of Artificial Sequence: Synthetic oligonucleotide
  Antisense strand to SEQ ID NO: 2300386
ucucuccuacuagaaugga

SEQ ID NO: 2300388 - RNA, 19 nt, Artificial Sequence
  Description of Artificial Sequence: Synthetic oligonucleotide
  Sense strand starting at position 232 of SEQ ID NO: 1884898
gcucaaacuccugggucaa

SEQ ID NO: 2300389 - RNA, 19 nt, Artificial Sequence
  Description of Artificial Sequence: Synthetic oligonucleotide
  Antisense strand to SEQ ID NO: 2300388
uugacccaggaguuugagc

SEQ ID NO: 2300390 - RNA, 19 nt, Artificial Sequence
  Description of Artificial Sequence: Synthetic oligonucleotide
  Sense strand starting at position 366 of SEQ ID NO: 1884898
agacaugcucagugaaaga

SEQ ID NO: 2300391 - RNA, 19 nt, Artificial Sequence
  Description of Artificial Sequence: Synthetic oligonucleotide
  Antisense strand to SEQ ID NO: 2300390
ucuuucacugagcaugucu

SEQ ID NO: 2300392 - RNA, 19 nt, Artificial Sequence
  Description of Artificial Sequence: Synthetic oligonucleotide
  Sense strand starting at position 522 of SEQ ID NO: 1884898
auuguuuaauguguagagu

SEQ ID NO: 2300393 - RNA, 19 nt, Artificial Sequence
  Description of Artificial Sequence: Synthetic oligonucleotide
  Antisense strand to SEQ ID NO: 2300392
acucuacacauuaaacaau

SEQ ID NO: 2300394 - RNA, 19 nt, Artificial Sequence
  Description of Artificial Sequence: Synthetic oligonucleotide
  Sense strand starting at position 523 of SEQ ID NO: 1884898
uuguuuaauguguagaguu

SEQ ID NO: 2300395 - RNA, 19 nt, Artificial Sequence
  Description of Artificial Sequence: Synthetic oligonucleotide
  Antisense strand to SEQ ID NO: 2300394
aacucuacacauuaaacaa

SEQ ID NO: 2300396 - RNA, 19 nt, Artificial Sequence
  Description of Artificial Sequence: Synthetic oligonucleotide
  Sense strand starting at position 525 of SEQ ID NO: 1884898
guuuaauguguagaguuca

SEQ ID NO: 2300397 - RNA, 19 nt, Artificial Sequence
  Description of Artificial Sequence: Synthetic oligonucleotide
  Antisense strand to SEQ ID NO: 2300396
ugaacucuacacauuaaac

SEQ ID NO: 2300398 - RNA, 19 nt, Artificial Sequence
  Description of Artificial Sequence: Synthetic oligonucleotide
  Sense strand starting at position 554 of SEQ ID NO: 1884898
gugaauugguucuggagaa

SEQ ID NO: 2300399 - RNA, 19 nt, Artificial Sequence
  Description of Artificial Sequence: Synthetic oligonucleotide
  Antisense strand to SEQ ID NO: 2300398
uucuccagaaccaauucac

SEQ ID NO: 2300400 - RNA, 19 nt, Artificial Sequence
  Description of Artificial Sequence: Synthetic oligonucleotide
  Sense strand starting at position 555 of SEQ ID NO: 1884898
ugaauugguucuggagaag

SEQ ID NO: 2300401 - RNA, 19 nt, Artificial Sequence
  Description of Artificial Sequence: Synthetic oligonucleotide
  Antisense strand to SEQ ID NO: 2300400
cuucuccagaaccaauuca

SEQ ID NO: 2300402 - RNA, 19 nt, Artificial Sequence
  Description of Artificial Sequence: Synthetic oligonucleotide
  Sense strand starting at position 606 of SEQ ID NO: 1884898
ugccuaaugccauagaacu

SEQ ID NO: 2300403 - RNA, 19 nt, Artificial Sequence
  Description of Artificial Sequence: Synthetic oligonucleotide
  Antisense strand to SEQ ID NO: 2300402
aguucuauggcauuaggca

SEQ ID NO: 2300404 - RNA, 19 nt, Artificial Sequence
  Description of Artificial Sequence: Synthetic oligonucleotide
  Sense strand starting at position 616 of SEQ ID NO: 1884898
cauagaacugugugcacuu

SEQ ID NO: 2300405 - RNA, 19 nt, Artificial Sequence
  Description of Artificial Sequence: Synthetic oligonucleotide
  Antisense strand to SEQ ID NO: 2300404
aagugcacacaguucuaug

SEQ ID NO: 2300406 - RNA, 19 nt, Artificial Sequence
  Description of Artificial Sequence: Synthetic oligonucleotide
  Sense strand starting at position 1007 of SEQ ID NO: 1884898
aaguaagucggguacuaga

SEQ ID NO: 2300407 - RNA, 19 nt, Artificial Sequence
  Description of Artificial Sequence: Synthetic oligonucleotide
  Antisense strand to SEQ ID NO: 2300406
ucuaguacccgacuuacuu

SEQ ID NO: 2300408 - RNA, 19 nt, Artificial Sequence
  Description of Artificial Sequence: Synthetic oligonucleotide
  Sense strand starting at position 1010 of SEQ ID NO: 1884898
uaagucggguacuagauaa

SEQ ID NO: 2300409 - RNA, 19 nt, Artificial Sequence
  Description of Artificial Sequence: Synthetic oligonucleotide
  Antisense strand to SEQ ID NO: 2300408
uuaucuaguacccgacuua

SEQ ID NO: 2300410 - RNA, 19 nt, Artificial Sequence
  Description of Artificial Sequence: Synthetic oligonucleotide
  Sense strand starting at position 1014 of SEQ ID NO: 1884898
ucggguacuagauaacgau

SEQ ID NO: 2300411 - RNA, 19 nt, Artificial Sequence
  Description of Artificial Sequence: Synthetic oligonucleotide
  Antisense strand to SEQ ID NO: 2300410
aucguuaucuaguacccga

SEQ ID NO: 2300412 - RNA, 19 nt, Artificial Sequence
  Description of Artificial Sequence: Synthetic oligonucleotide
  Sense strand starting at position 1017 of SEQ ID NO: 1884898
gguacuagauaacgaucaa

SEQ ID NO: 2300413 - RNA, 19 nt, Artificial Sequence
  Description of Artificial Sequence: Synthetic oligonucleotide
  Antisense strand to SEQ ID NO: 2300412
uugaucguuaucuaguacc

SEQ ID NO: 2300414 - RNA, 19 nt, Artificial Sequence
  Description of Artificial Sequence: Synthetic oligonucleotide
  Sense strand starting at position 1029 of SEQ ID NO: 1884898
cgaucaacgcucugaagaa

SEQ ID NO: 2300415 - RNA, 19 nt, Artificial Sequence
  Description of Artificial Sequence: Synthetic oligonucleotide
  Antisense strand to SEQ ID NO: 2300414
uucuucagagcguugaucg

SEQ ID NO: 2300416 - RNA, 19 nt, Artificial Sequence
  Description of Artificial Sequence: Synthetic oligonucleotide
  Sense strand starting at position 1030 of SEQ ID NO: 1884898
gaucaacgcucugaagaaa

SEQ ID NO: 2300417 - RNA, 19 nt, Artificial Sequence
  Description of Artificial Sequence: Synthetic oligonucleotide
  Antisense strand to SEQ ID NO: 2300416
uuucuucagagcguugauc

SEQ ID NO: 2300418 - RNA, 19 nt, Artificial Sequence
  Description of Artificial Sequence: Synthetic oligonucleotide
  Sense strand starting at position 1051 of SEQ ID NO: 1884898
uagaaagggucagaggaau

SEQ ID NO: 2300419 - RNA, 19 nt, Artificial Sequence
  Description of Artificial Sequence: Synthetic oligonucleotide
  Antisense strand to SEQ ID NO: 2300418
auuccucugacccuuucua

SEQ ID NO: 2300420 - RNA, 19 nt, Artificial Sequence
  Description of Artificial Sequence: Synthetic oligonucleotide
  Sense strand starting at position 1063 of SEQ ID NO: 1884898
gaggaaugccaggguuaga

SEQ ID NO: 2300421 - RNA, 19 nt, Artificial Sequence
  Description of Artificial Sequence: Synthetic oligonucleotide
  Antisense strand to SEQ ID NO: 2300420
ucuaacccuggcauuccuc

SEQ ID NO: 2300422 - RNA, 19 nt, Artificial Sequence
  Description of Artificial Sequence: Synthetic oligonucleotide
  Sense strand starting at position 1154 of SEQ ID NO: 1884898
gagaguggcaaguacagau

SEQ ID NO: 2300423 - RNA, 19 nt, Artificial Sequence
  Description of Artificial Sequence: Synthetic oligonucleotide
  Antisense strand to SEQ ID NO: 2300422
aucuguacuugccacucuc

SEQ ID NO: 2300424 - RNA, 19 nt, Artificial Sequence
  Description of Artificial Sequence: Synthetic oligonucleotide
  Sense strand starting at position 2003 of SEQ ID NO: 1884898
cagggauaaccgcaggagu

SEQ ID NO: 2300425 - RNA, 19 nt, Artificial Sequence
  Description of Artificial Sequence: Synthetic oligonucleotide
  Antisense strand to SEQ ID NO: 2300424
acuccugcgguuaucccug

SEQ ID NO: 2300426 - RNA, 19 nt, Artificial Sequence
  Description of Artificial Sequence: Synthetic oligonucleotide
  Sense strand starting at position 2078 of SEQ ID NO: 1884898
guuccagacccacgucauu

SEQ ID NO: 2300427 - RNA, 19 nt, Artificial Sequence
  Description of Artificial Sequence: Synthetic oligonucleotide
  Antisense strand to SEQ ID NO: 2300426
aaugacgugggucuggaac

SEQ ID NO: 2300428 - RNA, 19 nt, Artificial Sequence
  Description of Artificial Sequence: Synthetic oligonucleotide
  Sense strand starting at position 2539 of SEQ ID NO: 1884898
gcaucaucucuagagcaaa

SEQ ID NO: 2300429 - RNA, 19 nt, Artificial Sequence
  Description of Artificial Sequence: Synthetic oligonucleotide
  Antisense strand to SEQ ID NO: 2300428
uuugcucuagagaugaugc

SEQ ID NO: 2300430 - RNA, 19 nt, Artificial Sequence
  Description of Artificial Sequence: Synthetic oligonucleotide
  Sense strand starting at position 2616 of SEQ ID NO: 1884898
ggugaugacuggcuaguca

SEQ ID NO: 2300431 - RNA, 19 nt, Artificial Sequence
  Description of Artificial Sequence: Synthetic oligonucleotide
  Antisense strand to SEQ ID NO: 2300430
ugacuagccagucaucacc

SEQ ID NO: 2300432 - RNA, 19 nt, Artificial Sequence
  Description of Artificial Sequence: Synthetic oligonucleotide
  Sense strand starting at position 2856 of SEQ ID NO: 1884898
ggagcauugcuuuagugga

SEQ ID NO: 2300433 - RNA, 19 nt, Artificial Sequence
  Description of Artificial Sequence: Synthetic oligonucleotide
  Antisense strand to SEQ ID NO: 2300432
uccacuaaagcaaugcucc

SEQ ID NO: 2300434 - RNA, 19 nt, Artificial Sequence
  Description of Artificial Sequence: Synthetic oligonucleotide
  Sense strand starting at position 2858 of SEQ ID NO: 1884898
agcauugcuuuaguggaaa

SEQ ID NO: 2300435 - RNA, 19 nt, Artificial Sequence
  Description of Artificial Sequence: Synthetic oligonucleotide
  Antisense strand to SEQ ID NO: 2300434
uuuccacuaaagcaaugcu

SEQ ID NO: 2300436 - RNA, 19 nt, Artificial Sequence
  Description of Artificial Sequence: Synthetic oligonucleotide
  Sense strand starting at position 2916 of SEQ ID NO: 1884898
cugcaacuuugggaacaaa

SEQ ID NO: 2300437 - RNA, 19 nt, Artificial Sequence
  Description of Artificial Sequence: Synthetic oligonucleotide
  Antisense strand to SEQ ID NO: 2300436
uuuguucccaaaguugcag

SEQ ID NO: 2300438 - RNA, 19 nt, Artificial Sequence
  Description of Artificial Sequence: Synthetic oligonucleotide
  Sense strand starting at position 3198 of SEQ ID NO: 1884898
uguccauuggcugauggau

SEQ ID NO: 2300439 - RNA, 19 nt, Artificial Sequence
  Description of Artificial Sequence: Synthetic oligonucleotide
  Antisense strand to SEQ ID NO: 2300438
auccaucagccaauggaca

SEQ ID NO: 2300440 - RNA, 19 nt, Artificial Sequence
  Description of Artificial Sequence: Synthetic oligonucleotide
  Sense strand starting at position 3200 of SEQ ID NO: 1884898
uccauuggcugauggauaa

SEQ ID NO: 2300441 - RNA, 19 nt, Artificial Sequence
  Description of Artificial Sequence: Synthetic oligonucleotide
  Antisense strand to SEQ ID NO: 2300440
uuauccaucagccaaugga

SEQ ID NO: 2300442 - RNA, 19 nt, Artificial Sequence
  Description of Artificial Sequence: Synthetic oligonucleotide
  Sense strand starting at position 3227 of SEQ ID NO: 1884898
cagaaugugguccauccau

SEQ ID NO: 2300443 - RNA, 19 nt, Artificial Sequence
  Description of Artificial Sequence: Synthetic oligonucleotide
  Antisense strand to SEQ ID NO: 2300442
auggauggaccacauucug

SEQ ID NO: 2300444 - RNA, 19 nt, Artificial Sequence
  Description of Artificial Sequence: Synthetic oligonucleotide
  Sense strand starting at position 3238 of SEQ ID NO: 1884898
ccauccauguacugggaua

SEQ ID NO: 2300445 - RNA, 19 nt, Artificial Sequence
  Description of Artificial Sequence: Synthetic oligonucleotide
  Antisense strand to SEQ ID NO: 2300444
uaucccaguacauggaugg

SEQ ID NO: 2300446 - RNA, 19 nt, Artificial Sequence
  Description of Artificial Sequence: Synthetic oligonucleotide
  Sense strand starting at position 3346 of SEQ ID NO: 1884898
cacagaaggccauguaguu

SEQ ID NO: 2300447 - RNA, 19 nt, Artificial Sequence
  Description of Artificial Sequence: Synthetic oligonucleotide
  Antisense strand to SEQ ID NO: 2300446
aacuacauggccuucugug

SEQ ID NO: 2300448 - RNA, 19 nt, Artificial Sequence
  Description of Artificial Sequence: Synthetic oligonucleotide
  Sense strand starting at position 3358 of SEQ ID NO: 1884898
uguaguuuaugaguccauu

SEQ ID NO: 2300449 - RNA, 19 nt, Artificial Sequence
  Description of Artificial Sequence: Synthetic oligonucleotide
  Antisense strand to SEQ ID NO: 2300448
aauggacucauaaacuaca

SEQ ID NO: 2300450 - RNA, 19 nt, Artificial Sequence
  Description of Artificial Sequence: Synthetic oligonucleotide
  Sense strand starting at position 3420 of SEQ ID NO: 1884898
agaguagauugguuguuga

SEQ ID NO: 2300451 - RNA, 19 nt, Artificial Sequence
  Description of Artificial Sequence: Synthetic oligonucleotide
  Antisense strand to SEQ ID NO: 2300450
ucaacaaccaaucuacucu

SEQ ID NO: 2300452 - RNA, 19 nt, Artificial Sequence
  Description of Artificial Sequence: Synthetic oligonucleotide
  Sense strand starting at position 3423 of SEQ ID NO: 1884898
guagauugguuguugacag

SEQ ID NO: 2300453 - RNA, 19 nt, Artificial Sequence
  Description of Artificial Sequence: Synthetic oligonucleotide
  Antisense strand to SEQ ID NO: 2300452
cugucaacaaccaaucuac

SEQ ID NO: 2300454 - RNA, 19 nt, Artificial Sequence
  Description of Artificial Sequence: Synthetic oligonucleotide
  Sense strand starting at position 3495 of SEQ ID NO: 1884898
ugcugaaacucuggaacua

SEQ ID NO: 2300455 - RNA, 19 nt, Artificial Sequence
  Description of Artificial Sequence: Synthetic oligonucleotide
  Antisense strand to SEQ ID NO: 2300454
uaguuccagaguuucagca

SEQ ID NO: 2300456 - RNA, 19 nt, Artificial Sequence
  Description of Artificial Sequence: Synthetic oligonucleotide
  Sense strand starting at position 3640 of SEQ ID NO: 1884898
gcgguagaaucuagauggu

SEQ ID NO: 2300457 - RNA, 19 nt, Artificial Sequence
  Description of Artificial Sequence: Synthetic oligonucleotide
  Antisense strand to SEQ ID NO: 2300456
accaucuagauucuaccgc

SEQ ID NO: 2300458 - RNA, 19 nt, Artificial Sequence
  Description of Artificial Sequence: Synthetic oligonucleotide
  Sense strand starting at position 3694 of SEQ ID NO: 1884898
uuugccauaugcuugaaca

SEQ ID NO: 2300459 - RNA, 19 nt, Artificial Sequence
  Description of Artificial Sequence: Synthetic oligonucleotide
  Antisense strand to SEQ ID NO: 2300458
uguucaagcauauggcaaa

SEQ ID NO: 2300460 - RNA, 19 nt, Artificial Sequence
  Description of Artificial Sequence: Synthetic oligonucleotide
  Sense strand starting at position 3695 of SEQ ID NO: 1884898
uugccauaugcuugaacac

SEQ ID NO: 2300461 - RNA, 19 nt, Artificial Sequence
  Description of Artificial Sequence: Synthetic oligonucleotide
  Antisense strand to SEQ ID NO: 2300460
guguucaagcauauggcaa

SEQ ID NO: 2300462 - RNA, 19 nt, Artificial Sequence
  Description of Artificial Sequence: Synthetic oligonucleotide
  Sense strand starting at position 3696 of SEQ ID NO: 1884898
ugccauaugcuugaacacu

SEQ ID NO: 2300463 - RNA, 19 nt, Artificial Sequence
  Description of Artificial Sequence: Synthetic oligonucleotide
  Antisense strand to SEQ ID NO: 2300462
aguguucaagcauauggca

SEQ ID NO: 2300464 - RNA, 19 nt, Artificial Sequence
  Description of Artificial Sequence: Synthetic oligonucleotide
  Sense strand starting at position 138 of SEQ ID NO: 1884899
ugugaaauccuuugauaaa

SEQ ID NO: 2300465 - RNA, 19 nt, Artificial Sequence
  Description of Artificial Sequence: Synthetic oligonucleotide
  Antisense strand to SEQ ID NO: 2300464
uuuaucaaaggauuucaca

SEQ ID NO: 2300466 - RNA, 19 nt, Artificial Sequence
  Description of Artificial Sequence: Synthetic oligonucleotide
  Sense strand starting at position 502 of SEQ ID NO: 1884899
gccuacaagcucuggagaa

SEQ ID NO: 2300467 - RNA, 19 nt, Artificial Sequence
  Description of Artificial Sequence: Synthetic oligonucleotide
  Antisense strand to SEQ ID NO: 2300466
uucuccagagcuuguaggc

SEQ ID NO: 2300468 - RNA, 19 nt, Artificial Sequence
  Description of Artificial Sequence: Synthetic oligonucleotide
  Sense strand starting at position 564 of SEQ ID NO: 1884899
ccgugaugucuugaaucua

SEQ ID NO: 2300469 - RNA, 19 nt, Artificial Sequence
  Description of Artificial Sequence: Synthetic oligonucleotide
  Antisense strand to SEQ ID NO: 2300468
uagauucaagacaucacgg

SEQ ID NO: 2300470 - RNA, 19 nt, Artificial Sequence
  Description of Artificial Sequence: Synthetic oligonucleotide
  Sense strand starting at position 575 of SEQ ID NO: 1884899
ugaaucuagugacucuuaa

SEQ ID NO: 2300471 - RNA, 19 nt, Artificial Sequence
  Description of Artificial Sequence: Synthetic oligonucleotide
  Antisense strand to SEQ ID NO: 2300470
uuaagagucacuagauuca

SEQ ID NO: 2300472 - RNA, 19 nt, Artificial Sequence
  Description of Artificial Sequence: Synthetic oligonucleotide
  Sense strand starting at position 678 of SEQ ID NO: 1884899
uucuaagaguucuuaggua

SEQ ID NO: 2300473 - RNA, 19 nt, Artificial Sequence
  Description of Artificial Sequence: Synthetic oligonucleotide
  Antisense strand to SEQ ID NO: 2300472
uaccuaagaacucuuagaa

SEQ ID NO: 2300474 - RNA, 19 nt, Artificial Sequence
  Description of Artificial Sequence: Synthetic oligonucleotide
  Sense strand starting at position 682 of SEQ ID NO: 1884899
aagaguucuuagguaauga

SEQ ID NO: 2300475 - RNA, 19 nt, Artificial Sequence
  Description of Artificial Sequence: Synthetic oligonucleotide
  Antisense strand to SEQ ID NO: 2300474
ucauuaccuaagaacucuu

SEQ ID NO: 2300476 - RNA, 19 nt, Artificial Sequence
  Description of Artificial Sequence: Synthetic oligonucleotide
  Sense strand starting at position 1370 of SEQ ID NO: 1884899
aacauauauccaggcggga

SEQ ID NO: 2300477 - RNA, 19 nt, Artificial Sequence
  Description of Artificial Sequence: Synthetic oligonucleotide
  Antisense strand to SEQ ID NO: 2300476
ucccgccuggauauauguu

SEQ ID NO: 2300478 - RNA, 19 nt, Artificial Sequence
  Description of Artificial Sequence: Synthetic oligonucleotide
  Sense strand starting at position 1437 of SEQ ID NO: 1884899
uggaauuaaucugcaaauu

SEQ ID NO: 2300479 - RNA, 19 nt, Artificial Sequence
  Description of Artificial Sequence: Synthetic oligonucleotide
  Antisense strand to SEQ ID NO: 2300478
aauuugcagauuaauucca

SEQ ID NO: 2300480 - RNA, 19 nt, Artificial Sequence
  Description of Artificial Sequence: Synthetic oligonucleotide
  Sense strand starting at position 1845 of SEQ ID NO: 1884899
ucugccauugcugaagaaa

SEQ ID NO: 2300481 - RNA, 19 nt, Artificial Sequence
  Description of Artificial Sequence: Synthetic oligonucleotide
  Antisense strand to SEQ ID NO: 2300480
uuucuucagcaauggcaga

SEQ ID NO: 2300482 - RNA, 19 nt, Artificial Sequence
  Description of Artificial Sequence: Synthetic oligonucleotide
  Sense strand starting at position 1848 of SEQ ID NO: 1884899
gccauugcugaagaaauga

SEQ ID NO: 2300483 - RNA, 19 nt, Artificial Sequence
  Description of Artificial Sequence: Synthetic oligonucleotide
  Antisense strand to SEQ ID NO: 2300482
ucauuucuucagcaauggc

SEQ ID NO: 2300484 - RNA, 19 nt, Artificial Sequence
  Description of Artificial Sequence: Synthetic oligonucleotide
  Sense strand starting at position 1883 of SEQ ID NO: 1884899
ggaauuaccugguccaauu

SEQ ID NO: 2300485 - RNA, 19 nt, Artificial Sequence
  Description of Artificial Sequence: Synthetic oligonucleotide
  Antisense strand to SEQ ID NO: 2300484
aauuggaccagguaauucc

SEQ ID NO: 2300486 - RNA, 19 nt, Artificial Sequence
  Description of Artificial Sequence: Synthetic oligonucleotide
  Sense strand starting at position 1996 of SEQ ID NO: 1884899
ccugcugagccugauggau

SEQ ID NO: 2300487 - RNA, 19 nt, Artificial Sequence
  Description of Artificial Sequence: Synthetic oligonucleotide
  Antisense strand to SEQ ID NO: 2300486
auccaucaggcucagcagg

SEQ ID NO: 2300488 - RNA, 19 nt, Artificial Sequence
  Description of Artificial Sequence: Synthetic oligonucleotide
  Sense strand starting at position 2107 of SEQ ID NO: 1884899
caguuugguccugacagac

SEQ ID NO: 2300489 - RNA, 19 nt, Artificial Sequence
  Description of Artificial Sequence: Synthetic oligonucleotide
  Antisense strand to SEQ ID NO: 2300488
gucugucaggaccaaacug

SEQ ID NO: 2300490 - RNA, 19 nt, Artificial Sequence
  Description of Artificial Sequence: Synthetic oligonucleotide
  Sense strand starting at position 2323 of SEQ ID NO: 1884899
cguggcaagguuaguguua

SEQ ID NO: 2300491 - RNA, 19 nt, Artificial Sequence
  Description of Artificial Sequence: Synthetic oligonucleotide
  Antisense strand to SEQ ID NO: 2300490
uaacacuaaccuugccacg

SEQ ID NO: 2300492 - RNA, 19 nt, Artificial Sequence
  Description of Artificial Sequence: Synthetic oligonucleotide
  Sense strand starting at position 2386 of SEQ ID NO: 1884899
uuaauaugauugguuccaa

SEQ ID NO: 2300493 - RNA, 19 nt, Artificial Sequence
  Description of Artificial Sequence: Synthetic oligonucleotide
  Antisense strand to SEQ ID NO: 2300492
uuggaaccaaucauauuaa

SEQ ID NO: 2300494 - RNA, 19 nt, Artificial Sequence
  Description of Artificial Sequence: Synthetic oligonucleotide
  Sense strand starting at position 2387 of SEQ ID NO: 1884899
uaauaugauugguuccaag

SEQ ID NO: 2300495 - RNA, 19 nt, Artificial Sequence
  Description of Artificial Sequence: Synthetic oligonucleotide
  Antisense strand to SEQ ID NO: 2300494
cuuggaaccaaucauauua

SEQ ID NO: 2300496 - RNA, 19 nt, Artificial Sequence
  Description of Artificial Sequence: Synthetic oligonucleotide
  Sense strand starting at position 2453 of SEQ ID NO: 1884899
gggauuacaccacgugaca

SEQ ID NO: 2300497 - RNA, 19 nt, Artificial Sequence
  Description of Artificial Sequence: Synthetic oligonucleotide
  Antisense strand to SEQ ID NO: 2300496
ugucacgugguguaauccc

SEQ ID NO: 2300498 - RNA, 19 nt, Artificial Sequence
  Description of Artificial Sequence: Synthetic oligonucleotide
  Sense strand starting at position 2551 of SEQ ID NO: 1884899
gggcuacugccagaucuac

SEQ ID NO: 2300499 - RNA, 19 nt, Artificial Sequence
  Description of Artificial Sequence: Synthetic oligonucleotide
  Antisense strand to SEQ ID NO: 2300498
guagaucuggcaguagccc

SEQ ID NO: 2300500 - RNA, 19 nt, Artificial Sequence
  Description of Artificial Sequence: Synthetic oligonucleotide
  Sense strand starting at position 2586 of SEQ ID NO: 1884899
guccauccucauuagguua

SEQ ID NO: 2300501 - RNA, 19 nt, Artificial Sequence
  Description of Artificial Sequence: Synthetic oligonucleotide
  Antisense strand to SEQ ID NO: 2300500
uaaccuaaugaggauggac

SEQ ID NO: 2300502 - RNA, 19 nt, Artificial Sequence
  Description of Artificial Sequence: Synthetic oligonucleotide
  Sense strand starting at position 2687 of SEQ ID NO: 1884899
ucuggucucagucaguaua

SEQ ID NO: 2300503 - RNA, 19 nt, Artificial Sequence
  Description of Artificial Sequence: Synthetic oligonucleotide
  Antisense strand to SEQ ID NO: 2300502
uauacugacugagaccaga

SEQ ID NO: 2300504 - RNA, 19 nt, Artificial Sequence
  Description of Artificial Sequence: Synthetic oligonucleotide
  Sense strand starting at position 2690 of SEQ ID NO: 1884899
ggucucagucaguauaaac

SEQ ID NO: 2300505 - RNA, 19 nt, Artificial Sequence
  Description of Artificial Sequence: Synthetic oligonucleotide
  Antisense strand to SEQ ID NO: 2300504
guuuauacugacugagacc

SEQ ID NO: 2300506 - RNA, 19 nt, Artificial Sequence
  Description of Artificial Sequence: Synthetic oligonucleotide
  Sense strand starting at position 2738 of SEQ ID NO: 1884899
uuuguaagaaguuguggaa

SEQ ID NO: 2300507 - RNA, 19 nt, Artificial Sequence
  Description of Artificial Sequence: Synthetic oligonucleotide
  Antisense strand to SEQ ID NO: 2300506
uuccacaacuucuuacaaa

SEQ ID NO: 2300508 - RNA, 19 nt, Artificial Sequence
  Description of Artificial Sequence: Synthetic oligonucleotide
  Sense strand starting at position 2761 of SEQ ID NO: 1884899
acgugagaucaugguccaa

SEQ ID NO: 2300509 - RNA, 19 nt, Artificial Sequence
  Description of Artificial Sequence: Synthetic oligonucleotide
  Antisense strand to SEQ ID NO: 2300508
uuggaccaugaucucacgu

SEQ ID NO: 2300510 - RNA, 19 nt, Artificial Sequence
  Description of Artificial Sequence: Synthetic oligonucleotide
  Sense strand starting at position 2899 of SEQ ID NO: 1884899
augggaaugauauguuguu

SEQ ID NO: 2300511 - RNA, 19 nt, Artificial Sequence
  Description of Artificial Sequence: Synthetic oligonucleotide
  Antisense strand to SEQ ID NO: 2300510
aacaacauaucauucccau

SEQ ID NO: 2300512 - RNA, 19 nt, Artificial Sequence
  Description of Artificial Sequence: Synthetic oligonucleotide
  Sense strand starting at position 2900 of SEQ ID NO: 1884899
ugggaaugauauguuguua

SEQ ID NO: 2300513 - RNA, 19 nt, Artificial Sequence
  Description of Artificial Sequence: Synthetic oligonucleotide
  Antisense strand to SEQ ID NO: 2300512
uaacaacauaucauuccca

SEQ ID NO: 2300514 - RNA, 19 nt, Artificial Sequence
  Description of Artificial Sequence: Synthetic oligonucleotide
  Sense strand starting at position 2966 of SEQ ID NO: 1884899
ucaauaaaucaguguuucu

SEQ ID NO: 2300515 - RNA, 19 nt, Artificial Sequence
  Description of Artificial Sequence: Synthetic oligonucleotide
  Antisense strand to SEQ ID NO: 2300514
agaaacacugauuuauuga

SEQ ID NO: 2300516 - RNA, 19 nt, Artificial Sequence
  Description of Artificial Sequence: Synthetic oligonucleotide
  Sense strand starting at position 2989 of SEQ ID NO: 1884899
augacaggagugugaugau

SEQ ID NO: 2300517 - RNA, 19 nt, Artificial Sequence
  Description of Artificial Sequence: Synthetic oligonucleotide
  Antisense strand to SEQ ID NO: 2300516
aucaucacacuccugucau

SEQ ID NO: 2300518 - RNA, 19 nt, Artificial Sequence
  Description of Artificial Sequence: Synthetic oligonucleotide
  Sense strand starting at position 3002 of SEQ ID NO: 1884899
gaugauaagucuucuaggu

SEQ ID NO: 2300519 - RNA, 19 nt, Artificial Sequence
  Description of Artificial Sequence: Synthetic oligonucleotide
  Antisense strand to SEQ ID NO: 2300518
accuagaagacuuaucauc

SEQ ID NO: 2300520 - RNA, 19 nt, Artificial Sequence
  Description of Artificial Sequence: Synthetic oligonucleotide
  Sense strand starting at position 3007 of SEQ ID NO: 1884899
uaagucuucuagguuugga

SEQ ID NO: 2300521 - RNA, 19 nt, Artificial Sequence
  Description of Artificial Sequence: Synthetic oligonucleotide
  Antisense strand to SEQ ID NO: 2300520
uccaaaccuagaagacuua

SEQ ID NO: 2300522 - RNA, 19 nt, Artificial Sequence
  Description of Artificial Sequence: Synthetic oligonucleotide
  Sense strand starting at position 3021 of SEQ ID NO: 1884899
uuggaaguucucuguggaa

SEQ ID NO: 2300523 - RNA, 19 nt, Artificial Sequence
  Description of Artificial Sequence: Synthetic oligonucleotide
  Antisense strand to SEQ ID NO: 2300522
uuccacagagaacuuccaa

SEQ ID NO: 2300524 - RNA, 19 nt, Artificial Sequence
  Description of Artificial Sequence: Synthetic oligonucleotide
  Sense strand starting at position 3023 of SEQ ID NO: 1884899
ggaaguucucuguggaaca

SEQ ID NO: 2300525 - RNA, 19 nt, Artificial Sequence
  Description of Artificial Sequence: Synthetic oligonucleotide
  Antisense strand to SEQ ID NO: 2300524
uguuccacagagaacuucc

SEQ ID NO: 2300526 - RNA, 19 nt, Artificial Sequence
  Description of Artificial Sequence: Synthetic oligonucleotide
  Sense strand starting at position 3025 of SEQ ID NO: 1884899
aaguucucuguggaacauu

SEQ ID NO: 2300527 - RNA, 19 nt, Artificial Sequence
  Description of Artificial Sequence: Synthetic oligonucleotide
  Antisense strand to SEQ ID NO: 2300526
aauguuccacagagaacuu

SEQ ID NO: 2300528 - RNA, 19 nt, Artificial Sequence
  Description of Artificial Sequence: Synthetic oligonucleotide
  Sense strand starting at position 3028 of SEQ ID NO: 1884899
uucucuguggaacauuauu

SEQ ID NO: 2300529 - RNA, 19 nt, Artificial Sequence
  Description of Artificial Sequence: Synthetic oligonucleotide
  Antisense strand to SEQ ID NO: 2300528
aauaauguuccacagagaa

SEQ ID NO: 2300530 - RNA, 19 nt, Artificial Sequence
  Description of Artificial Sequence: Synthetic oligonucleotide
  Sense strand starting at position 3033 of SEQ ID NO: 1884899
uguggaacauuauuacauu

SEQ ID NO: 2300531 - RNA, 19 nt, Artificial Sequence
  Description of Artificial Sequence: Synthetic oligonucleotide
  Antisense strand to SEQ ID NO: 2300530
aauguaauaauguuccaca

SEQ ID NO: 2300532 - RNA, 19 nt, Artificial Sequence
  Description of Artificial Sequence: Synthetic oligonucleotide
  Sense strand starting at position 3034 of SEQ ID NO: 1884899
guggaacauuauuacauuu

SEQ ID NO: 2300533 - RNA, 19 nt, Artificial Sequence
  Description of Artificial Sequence: Synthetic oligonucleotide
  Antisense strand to SEQ ID NO: 2300532
aaauguaauaauguuccac

SEQ ID NO: 2300534 - RNA, 19 nt, Artificial Sequence
  Description of Artificial Sequence: Synthetic oligonucleotide
  Sense strand starting at position 3176 of SEQ ID NO: 1884899
gaugguacuacuugaagug

SEQ ID NO: 2300535 - RNA, 19 nt, Artificial Sequence
  Description of Artificial Sequence: Synthetic oligonucleotide
  Antisense strand to SEQ ID NO: 2300534
cacuucaaguaguaccauc

SEQ ID NO: 2300536 - RNA, 19 nt, Artificial Sequence
  Description of Artificial Sequence: Synthetic oligonucleotide
  Sense strand starting at position 3191 of SEQ ID NO: 1884899
agugucaugagcuagagaa

SEQ ID NO: 2300537 - RNA, 19 nt, Artificial Sequence
  Description of Artificial Sequence: Synthetic oligonucleotide
  Antisense strand to SEQ ID NO: 2300536
uucucuagcucaugacacu

SEQ ID NO: 2300538 - RNA, 19 nt, Artificial Sequence
  Description of Artificial Sequence: Synthetic oligonucleotide
  Sense strand starting at position 3235 of SEQ ID NO: 1884899
aaaggaaguguuuaugcca

SEQ ID NO: 2300539 - RNA, 19 nt, Artificial Sequence
  Description of Artificial Sequence: Synthetic oligonucleotide
  Antisense strand to SEQ ID NO: 2300538
uggcauaaacacuuccuuu

SEQ ID NO: 2300540 - RNA, 19 nt, Artificial Sequence
  Description of Artificial Sequence: Synthetic oligonucleotide
  Sense strand starting at position 3283 of SEQ ID NO: 1884899
gcacauaaauguccuaaga

SEQ ID NO: 2300541 - RNA, 19 nt, Artificial Sequence
  Description of Artificial Sequence: Synthetic oligonucleotide
  Antisense strand to SEQ ID NO: 2300540
ucuuaggacauuuaugugc

SEQ ID NO: 2300542 - RNA, 19 nt, Artificial Sequence
  Description of Artificial Sequence: Synthetic oligonucleotide
  Sense strand starting at position 3773 of SEQ ID NO: 1884899
gugguuugcaaguaauaaa

SEQ ID NO: 2300543 - RNA, 19 nt, Artificial Sequence
  Description of Artificial Sequence: Synthetic oligonucleotide
  Antisense strand to SEQ ID NO: 2300542
uuuauuacuugcaaaccac

SEQ ID NO: 2300544 - RNA, 19 nt, Artificial Sequence
  Description of Artificial Sequence: Synthetic oligonucleotide
  Sense strand starting at position 19 of SEQ ID NO: 1884900
ggaagugauaagcauguau

SEQ ID NO: 2300545 - RNA, 19 nt, Artificial Sequence
  Description of Artificial Sequence: Synthetic oligonucleotide
  Antisense strand to SEQ ID NO: 2300544
auacaugcuuaucacuucc

SEQ ID NO: 2300546 - RNA, 19 nt, Artificial Sequence
  Description of Artificial Sequence: Synthetic oligonucleotide
  Sense strand starting at position 173 of SEQ ID NO: 1884900
acuacagagguauggugau

SEQ ID NO: 2300547 - RNA, 19 nt, Artificial Sequence
  Description of Artificial Sequence: Synthetic oligonucleotide
  Antisense strand to SEQ ID NO: 2300546
aucaccauaccucuguagu

SEQ ID NO: 2300548 - RNA, 19 nt, Artificial Sequence
  Description of Artificial Sequence: Synthetic oligonucleotide
  Sense strand starting at position 279 of SEQ ID NO: 1884900
guggaaagucuaggaucaa

SEQ ID NO: 2300549 - RNA, 19 nt, Artificial Sequence
  Description of Artificial Sequence: Synthetic oligonucleotide
  Antisense strand to SEQ ID NO: 2300548
uugauccuagacuuuccac

SEQ ID NO: 2300550 - RNA, 19 nt, Artificial Sequence
  Description of Artificial Sequence: Synthetic oligonucleotide
  Sense strand starting at position 454 of SEQ ID NO: 1884900
aggauuaauccugggugug

SEQ ID NO: 2300551 - RNA, 19 nt, Artificial Sequence
  Description of Artificial Sequence: Synthetic oligonucleotide
  Antisense strand to SEQ ID NO: 2300550
cacacccaggauuaauccu

SEQ ID NO: 2300552 - RNA, 19 nt, Artificial Sequence
  Description of Artificial Sequence: Synthetic oligonucleotide
  Sense strand starting at position 668 of SEQ ID NO: 1884900
gccuuugaacauugaauuc

SEQ ID NO: 2300553 - RNA, 19 nt, Artificial Sequence
  Description of Artificial Sequence: Synthetic oligonucleotide
  Antisense strand to SEQ ID NO: 2300552
gaauucaauguucaaaggc

SEQ ID NO: 2300554 - RNA, 19 nt, Artificial Sequence
  Description of Artificial Sequence: Synthetic oligonucleotide
  Sense strand starting at position 752 of SEQ ID NO: 1884900
gggaccucaugaucguaua

SEQ ID NO: 2300555 - RNA, 19 nt, Artificial Sequence
  Description of Artificial Sequence: Synthetic oligonucleotide
  Antisense strand to SEQ ID NO: 2300554
uauacgaucaugagguccc

SEQ ID NO: 2300556 - RNA, 19 nt, Artificial Sequence
  Description of Artificial Sequence: Synthetic oligonucleotide
  Sense strand starting at position 753 of SEQ ID NO: 1884900
ggaccucaugaucguauaa

SEQ ID NO: 2300557 - RNA, 19 nt, Artificial Sequence
  Description of Artificial Sequence: Synthetic oligonucleotide
  Antisense strand to SEQ ID NO: 2300556
uuauacgaucaugaggucc

SEQ ID NO: 2300558 - RNA, 19 nt, Artificial Sequence
  Description of Artificial Sequence: Synthetic oligonucleotide
  Sense strand starting at position 1035 of SEQ ID NO: 1884900
ggcacugauccaugacuua

SEQ ID NO: 2300559 - RNA, 19 nt, Artificial Sequence
  Description of Artificial Sequence: Synthetic oligonucleotide
  Antisense strand to SEQ ID NO: 2300558
uaagucauggaucagugcc

SEQ ID NO: 2300560 - RNA, 19 nt, Artificial Sequence
  Description of Artificial Sequence: Synthetic oligonucleotide
  Sense strand starting at position 1243 of SEQ ID NO: 1884900
caggacaaggguugucuua

SEQ ID NO: 2300561 - RNA, 19 nt, Artificial Sequence
  Description of Artificial Sequence: Synthetic oligonucleotide
  Antisense strand to SEQ ID NO: 2300560
uaagacaacccuuguccug

SEQ ID NO: 2300562 - RNA, 19 nt, Artificial Sequence
  Description of Artificial Sequence: Synthetic oligonucleotide
  Sense strand starting at position 1245 of SEQ ID NO: 1884900
ggacaaggguugucuuaag

SEQ ID NO: 2300563 - RNA, 19 nt, Artificial Sequence
  Description of Artificial Sequence: Synthetic oligonucleotide
  Antisense strand to SEQ ID NO: 2300562
cuuaagacaacccuugucc

SEQ ID NO: 2300564 - RNA, 19 nt, Artificial Sequence
  Description of Artificial Sequence: Synthetic oligonucleotide
  Sense strand starting at position 1260 of SEQ ID NO: 1884900
uaagaaagauggcuugacu

SEQ ID NO: 2300565 - RNA, 19 nt, Artificial Sequence
  Description of Artificial Sequence: Synthetic oligonucleotide
  Antisense strand to SEQ ID NO: 2300564
agucaagccaucuuucuua

SEQ ID NO: 2300566 - RNA, 19 nt, Artificial Sequence
  Description of Artificial Sequence: Synthetic oligonucleotide
  Sense strand starting at position 1338 of SEQ ID NO: 1884900
ccauuucugcauugccaga

SEQ ID NO: 2300567 - RNA, 19 nt, Artificial Sequence
  Description of Artificial Sequence: Synthetic oligonucleotide
  Antisense strand to SEQ ID NO: 2300566
ucuggcaaugcagaaaugg

SEQ ID NO: 2300568 - RNA, 19 nt, Artificial Sequence
  Description of Artificial Sequence: Synthetic oligonucleotide
  Sense strand starting at position 1426 of SEQ ID NO: 1884900
cucaauaucuaguugacag

SEQ ID NO: 2300569 - RNA, 19 nt, Artificial Sequence
  Description of Artificial Sequence: Synthetic oligonucleotide
  Antisense strand to SEQ ID NO: 2300568
cugucaacuagauauugag

SEQ ID NO: 2300570 - RNA, 19 nt, Artificial Sequence
  Description of Artificial Sequence: Synthetic oligonucleotide
  Sense strand starting at position 1433 of SEQ ID NO: 1884900
ucuaguugacagugacaau

SEQ ID NO: 2300571 - RNA, 19 nt, Artificial Sequence
  Description of Artificial Sequence: Synthetic oligonucleotide
  Antisense strand to SEQ ID NO: 2300570
auugucacugucaacuaga

SEQ ID NO: 2300572 - RNA, 19 nt, Artificial Sequence
  Description of Artificial Sequence: Synthetic oligonucleotide
  Sense strand starting at position 1444 of SEQ ID NO: 1884900
gugacaauaugguuauuag

SEQ ID NO: 2300573 - RNA, 19 nt, Artificial Sequence
  Description of Artificial Sequence: Synthetic oligonucleotide
  Antisense strand to SEQ ID NO: 2300572
cuaauaaccauauugucac

SEQ ID NO: 2300574 - RNA, 19 nt, Artificial Sequence
  Description of Artificial Sequence: Synthetic oligonucleotide
  Sense strand starting at position 1481 of SEQ ID NO: 1884900
ugucuugaauaaucaauga

SEQ ID NO: 2300575 - RNA, 19 nt, Artificial Sequence
  Description of Artificial Sequence: Synthetic oligonucleotide
  Antisense strand to SEQ ID NO: 2300574
ucauugauuauucaagaca

SEQ ID NO: 2300576 - RNA, 19 nt, Artificial Sequence
  Description of Artificial Sequence: Synthetic oligonucleotide
  Sense strand starting at position 1593 of SEQ ID NO: 1884900
cagugauugaguuaugcug

SEQ ID NO: 2300577 - RNA, 19 nt, Artificial Sequence
  Description of Artificial Sequence: Synthetic oligonucleotide
  Antisense strand to SEQ ID NO: 2300576
cagcauaacucaaucacug

SEQ ID NO: 2300578 - RNA, 19 nt, Artificial Sequence
  Description of Artificial Sequence: Synthetic oligonucleotide
  Sense strand starting at position 1702 of SEQ ID NO: 1884900
agagaugcugcuuacauaa

SEQ ID NO: 2300579 - RNA, 19 nt, Artificial Sequence
  Description of Artificial Sequence: Synthetic oligonucleotide
  Antisense strand to SEQ ID NO: 2300578
uuauguaagcagcaucucu

SEQ ID NO: 2300580 - RNA, 19 nt, Artificial Sequence
  Description of Artificial Sequence: Synthetic oligonucleotide
  Sense strand starting at position 1835 of SEQ ID NO: 1884900
guuguaaagaucugaguaa

SEQ ID NO: 2300581 - RNA, 19 nt, Artificial Sequence
  Description of Artificial Sequence: Synthetic oligonucleotide
  Antisense strand to SEQ ID NO: 2300580
uuacucagaucuuuacaac

SEQ ID NO: 2300582 - RNA, 19 nt, Artificial Sequence
  Description of Artificial Sequence: Synthetic oligonucleotide
  Sense strand starting at position 1916 of SEQ ID NO: 1884900
uuagaaaccucuuccugga

SEQ ID NO: 2300583 - RNA, 19 nt, Artificial Sequence
  Description of Artificial Sequence: Synthetic oligonucleotide
  Antisense strand to SEQ ID NO: 2300582
uccaggaagagguuucuaa

SEQ ID NO: 2300584 - RNA, 19 nt, Artificial Sequence
  Description of Artificial Sequence: Synthetic oligonucleotide
  Sense strand starting at position 2034 of SEQ ID NO: 1884900
cucacuccuccuggagaua

SEQ ID NO: 2300585 - RNA, 19 nt, Artificial Sequence
  Description of Artificial Sequence: Synthetic oligonucleotide
  Antisense strand to SEQ ID NO: 2300584
uaucuccaggaggagugag

SEQ ID NO: 2300586 - RNA, 19 nt, Artificial Sequence
  Description of Artificial Sequence: Synthetic oligonucleotide
  Sense strand starting at position 2187 of SEQ ID NO: 1884900
gcaacucagaguuaggcaa

SEQ ID NO: 2300587 - RNA, 19 nt, Artificial Sequence
  Description of Artificial Sequence: Synthetic oligonucleotide
  Antisense strand to SEQ ID NO: 2300586
uugccuaacucugaguugc

SEQ ID NO: 2300588 - RNA, 19 nt, Artificial Sequence
  Description of Artificial Sequence: Synthetic oligonucleotide
  Sense strand starting at position 2291 of SEQ ID NO: 1884900
ucaucauaaguuugcagaa

SEQ ID NO: 2300589 - RNA, 19 nt, Artificial Sequence
  Description of Artificial Sequence: Synthetic oligonucleotide
  Antisense strand to SEQ ID NO: 2300588
uucugcaaacuuaugauga

SEQ ID NO: 2300590 - RNA, 19 nt, Artificial Sequence
  Description of Artificial Sequence: Synthetic oligonucleotide
  Sense strand starting at position 2395 of SEQ ID NO: 1884900
ggucaaauccaucaguguu

SEQ ID NO: 2300591 - RNA, 19 nt, Artificial Sequence
  Description of Artificial Sequence: Synthetic oligonucleotide
  Antisense strand to SEQ ID NO: 2300590
aacacugauggauuugacc

SEQ ID NO: 2300592 - RNA, 19 nt, Artificial Sequence
  Description of Artificial Sequence: Synthetic oligonucleotide
  Sense strand starting at position 2446 of SEQ ID NO: 1884900
cuguaaggacugcaucauu

SEQ ID NO: 2300593 - RNA, 19 nt, Artificial Sequence
  Description of Artificial Sequence: Synthetic oligonucleotide
  Antisense strand to SEQ ID NO: 2300592
aaugaugcaguccuuacag

SEQ ID NO: 2300594 - RNA, 19 nt, Artificial Sequence
  Description of Artificial Sequence: Synthetic oligonucleotide
  Sense strand starting at position 2454 of SEQ ID NO: 1884900
acugcaucauuugcgaaau

SEQ ID NO: 2300595 - RNA, 19 nt, Artificial Sequence
  Description of Artificial Sequence: Synthetic oligonucleotide
  Antisense strand to SEQ ID NO: 2300594
auuucgcaaaugaugcagu

SEQ ID NO: 2300596 - RNA, 19 nt, Artificial Sequence
  Description of Artificial Sequence: Synthetic oligonucleotide
  Sense strand starting at position 2456 of SEQ ID NO: 1884900
ugcaucauuugcgaaauuu

SEQ ID NO: 2300597 - RNA, 19 nt, Artificial Sequence
  Description of Artificial Sequence: Synthetic oligonucleotide
  Antisense strand to SEQ ID NO: 2300596
aaauuucgcaaaugaugca

SEQ ID NO: 2300598 - RNA, 19 nt, Artificial Sequence
  Description of Artificial Sequence: Synthetic oligonucleotide
  Sense strand starting at position 2464 of SEQ ID NO: 1884900
uugcgaaauuucuugcuaa

SEQ ID NO: 2300599 - RNA, 19 nt, Artificial Sequence
  Description of Artificial Sequence: Synthetic oligonucleotide
  Antisense strand to SEQ ID NO: 2300598
uuagcaagaaauuucgcaa

SEQ ID NO: 2300600 - RNA, 19 nt, Artificial Sequence
  Description of Artificial Sequence: Synthetic oligonucleotide
  Sense strand starting at position 2560 of SEQ ID NO: 1884900
gauaaugaguagucucuuc

SEQ ID NO: 2300601 - RNA, 19 nt, Artificial Sequence
  Description of Artificial Sequence: Synthetic oligonucleotide
  Antisense strand to SEQ ID NO: 2300600
gaagagacuacucauuauc

SEQ ID NO: 2300602 - RNA, 19 nt, Artificial Sequence
  Description of Artificial Sequence: Synthetic oligonucleotide
  Sense strand starting at position 2603 of SEQ ID NO: 1884900
aucgacugccuguaauaug

SEQ ID NO: 2300603 - RNA, 19 nt, Artificial Sequence
  Description of Artificial Sequence: Synthetic oligonucleotide
  Antisense strand to SEQ ID NO: 2300602
cauauuacaggcagucgau

SEQ ID NO: 2300604 - RNA, 19 nt, Artificial Sequence
  Description of Artificial Sequence: Synthetic oligonucleotide
  Sense strand starting at position 2673 of SEQ ID NO: 1884900
cuuuaaucuuuaucaggga

SEQ ID NO: 2300605 - RNA, 19 nt, Artificial Sequence
  Description of Artificial Sequence: Synthetic oligonucleotide
  Antisense strand to SEQ ID NO: 2300604
ucccugauaaagauuaaag

SEQ ID NO: 2300606 - RNA, 19 nt, Artificial Sequence
  Description of Artificial Sequence: Synthetic oligonucleotide
  Sense strand starting at position 2696 of SEQ ID NO: 1884900
aucccucuucucuagugau

SEQ ID NO: 2300607 - RNA, 19 nt, Artificial Sequence
  Description of Artificial Sequence: Synthetic oligonucleotide
  Antisense strand to SEQ ID NO: 2300606
aucacuagagaagagggau

SEQ ID NO: 2300608 - RNA, 19 nt, Artificial Sequence
  Description of Artificial Sequence: Synthetic oligonucleotide
  Sense strand starting at position 3059 of SEQ ID NO: 1884900
gaagcuccuucugugaaga

SEQ ID NO: 2300609 - RNA, 19 nt, Artificial Sequence
  Description of Artificial Sequence: Synthetic oligonucleotide
  Antisense strand to SEQ ID NO: 2300608
ucuucacagaaggagcuuc
